United States Patent Application Publication US 2020/0095579 A1 - sequence listing, part 16

SEQ ID NO: 243066 - DNA, 20 bp, Artificial Sequence
  Description of Artificial Sequence: Synthetic oligonucleotide
  Target: LAMA2; (-) strand; PAM type: YTN; PAM sequence: TTT
aataattcatcacatttcag

SEQ ID NO: 243067 - DNA, 20 bp, Artificial Sequence
  Description of Artificial Sequence: Synthetic oligonucleotide
  Target: LAMA2; (-) strand; PAM type: YTN; PAM sequence: CTG
tttaataattcatcacattt

SEQ ID NO: 243068 - DNA, 20 bp, Artificial Sequence
  Description of Artificial Sequence: Synthetic oligonucleotide
  Target: LAMA2; (-) strand; PAM type: YTN; PAM sequence: CTA
cctgtttaataattcatcac

SEQ ID NO: 243069 - DNA, 20 bp, Artificial Sequence
  Description of Artificial Sequence: Synthetic oligonucleotide
  Target: LAMA2; (-) strand; PAM type: YTN; PAM sequence: TTC
aatcacccaacaaactacct

SEQ ID NO: 243070 - DNA, 20 bp, Artificial Sequence
  Description of Artificial Sequence: Synthetic oligonucleotide
  Target: LAMA2; (-) strand; PAM type: YTN; PAM sequence: TTT
caatcacccaacaaactacc

SEQ ID NO: 243071 - DNA, 20 bp, Artificial Sequence
  Description of Artificial Sequence: Synthetic oligonucleotide
  Target: LAMA2; (-) strand; PAM type: YTN; PAM sequence: TTT
tcaatcacccaacaaactac

SEQ ID NO: 243072 - DNA, 20 bp, Artificial Sequence
  Description of Artificial Sequence: Synthetic oligonucleotide
  Target: LAMA2; (-) strand; PAM type: YTN; PAM sequence: TTC
acaggtaattttcaatcacc

SEQ ID NO: 243073 - DNA, 20 bp, Artificial Sequence
  Description of Artificial Sequence: Synthetic oligonucleotide
  Target: LAMA2; (-) strand; PAM type: YTN; PAM sequence: TTT
cacaggtaattttcaatcac

SEQ ID NO: 243074 - DNA, 20 bp, Artificial Sequence
  Description of Artificial Sequence: Synthetic oligonucleotide
  Target: LAMA2; (-) strand; PAM type: YTN; PAM sequence: CTT
tcacaggtaattttcaatca

SEQ ID NO: 243075 - DNA, 20 bp, Artificial Sequence
  Description of Artificial Sequence: Synthetic oligonucleotide
  Target: LAMA2; (-) strand; PAM type: YTN; PAM sequence: CTC
tttcacaggtaattttcaat

SEQ ID NO: 243076 - DNA, 20 bp, Artificial Sequence
  Description of Artificial Sequence: Synthetic oligonucleotide
  Target: LAMA2; (-) strand; PAM type: YTN; PAM sequence: CTC
aaggagataagcactctttc

SEQ ID NO: 243077 - DNA, 20 bp, Artificial Sequence
  Description of Artificial Sequence: Synthetic oligonucleotide
  Target: LAMA2; (-) strand; PAM type: YTN; PAM sequence: TTC
gatgtgcctcaaggagataa

SEQ ID NO: 243078 - DNA, 20 bp, Artificial Sequence
  Description of Artificial Sequence: Synthetic oligonucleotide
  Target: LAMA2; (-) strand; PAM type: YTN; PAM sequence: TTT
cgatgtgcctcaaggagata

SEQ ID NO: 243079 - DNA, 20 bp, Artificial Sequence
  Description of Artificial Sequence: Synthetic oligonucleotide
  Target: LAMA2; (-) strand; PAM type: YTN; PAM sequence: CTT
tcgatgtgcctcaaggagat

SEQ ID NO: 243080 - DNA, 20 bp, Artificial Sequence
  Description of Artificial Sequence: Synthetic oligonucleotide
  Target: LAMA2; (-) strand; PAM type: YTN; PAM sequence: TTC
cgtcagctttcgatgtgcct

SEQ ID NO: 243081 - DNA, 20 bp, Artificial Sequence
  Description of Artificial Sequence: Synthetic oligonucleotide
  Target: LAMA2; (-) strand; PAM type: YTN; PAM sequence: CTC
aattccgtcagctttcgatg

SEQ ID NO: 243082 - DNA, 20 bp, Artificial Sequence
  Description of Artificial Sequence: Synthetic oligonucleotide
  Target: LAMA2; (-) strand; PAM type: YTN; PAM sequence: TTG
gctcaattccgtcagctttc

SEQ ID NO: 243083 - DNA, 20 bp, Artificial Sequence
  Description of Artificial Sequence: Synthetic oligonucleotide
  Target: LAMA2; (-) strand; PAM type: YTN; PAM sequence: CTA
attggctcaattccgtcagc

SEQ ID NO: 243084 - DNA, 20 bp, Artificial Sequence
  Description of Artificial Sequence: Synthetic oligonucleotide
  Target: LAMA2; (-) strand; PAM type: YTN; PAM sequence: TTG
aagagacagtcagtctaatt

SEQ ID NO: 243085 - DNA, 20 bp, Artificial Sequence
  Description of Artificial Sequence: Synthetic oligonucleotide
  Target: LAMA2; (-) strand; PAM type: YTN; PAM sequence: CTC
attgaagagacagtcagtct

SEQ ID NO: 243086 - DNA, 20 bp, Artificial Sequence
  Description of Artificial Sequence: Synthetic oligonucleotide
  Target: LAMA2; (-) strand; PAM type: YTN; PAM sequence: TTG
ataggtcacaactcattgaa

SEQ ID NO: 243087 - DNA, 20 bp, Artificial Sequence
  Description of Artificial Sequence: Synthetic oligonucleotide
  Target: LAMA2; (-) strand; PAM type: YTN; PAM sequence: TTA
ccattgataggtcacaactc

SEQ ID NO: 243088 - DNA, 20 bp, Artificial Sequence
  Description of Artificial Sequence: Synthetic oligonucleotide
  Target: LAMA2; (-) strand; PAM type: YTN; PAM sequence: CTA
ttaccattgataggtcacaa

SEQ ID NO: 243089 - DNA, 20 bp, Artificial Sequence
  Description of Artificial Sequence: Synthetic oligonucleotide
  Target: LAMA2; (-) strand; PAM type: YTN; PAM sequence: TTA
tcatcataataagctattac

SEQ ID NO: 243090 - DNA, 20 bp, Artificial Sequence
  Description of Artificial Sequence: Synthetic oligonucleotide
  Target: LAMA2; (-) strand; PAM type: YTN; PAM sequence: TTT
atcatcataataagctatta

SEQ ID NO: 243091 - DNA, 20 bp, Artificial Sequence
  Description of Artificial Sequence: Synthetic oligonucleotide
  Target: LAMA2; (-) strand; PAM type: YTN; PAM sequence: TTC
atttatcatcataataagct

SEQ ID NO: 243092 - DNA, 20 bp, Artificial Sequence
  Description of Artificial Sequence: Synthetic oligonucleotide
  Target: LAMA2; (-) strand; PAM type: YTN; PAM sequence: TTG
agagatgggttcatttatca

SEQ ID NO: 243093 - DNA, 20 bp, Artificial Sequence
  Description of Artificial Sequence: Synthetic oligonucleotide
  Target: LAMA2; (-) strand; PAM type: YTN; PAM sequence: TTT
gagagatgggttcatttatc

SEQ ID NO: 243094 - DNA, 20 bp, Artificial Sequence
  Description of Artificial Sequence: Synthetic oligonucleotide
  Target: LAMA2; (-) strand; PAM type: YTN; PAM sequence: TTC
agtttgagagatgggttcat

SEQ ID NO: 243095 - DNA, 20 bp, Artificial Sequence
  Description of Artificial Sequence: Synthetic oligonucleotide
  Target: LAMA2; (-) strand; PAM type: YTN; PAM sequence: CTT
cagtttgagagatgggttca

SEQ ID NO: 243096 - DNA, 20 bp, Artificial Sequence
  Description of Artificial Sequence: Synthetic oligonucleotide
  Target: LAMA2; (-) strand; PAM type: YTN; PAM sequence: CTC
aggcttcagtttgagagatg

SEQ ID NO: 243097 - DNA, 20 bp, Artificial Sequence
  Description of Artificial Sequence: Synthetic oligonucleotide
  Target: LAMA2; (-) strand; PAM type: YTN; PAM sequence: CTG
aagtgtgtactcaggcttca

SEQ ID NO: 243098 - DNA, 20 bp, Artificial Sequence
  Description of Artificial Sequence: Synthetic oligonucleotide
  Target: LAMA2; (-) strand; PAM type: YTN; PAM sequence: CTG
ctgaagtgtgtactcaggct

SEQ ID NO: 243099 - DNA, 20 bp, Artificial Sequence
  Description of Artificial Sequence: Synthetic oligonucleotide
  Target: LAMA2; (-) strand; PAM type: YTN; PAM sequence: TTC
aaggcaactgctgaagtgtg

SEQ ID NO: 243100 - DNA, 20 bp, Artificial Sequence
  Description of Artificial Sequence: Synthetic oligonucleotide
  Target: LAMA2; (-) strand; PAM type: YTN; PAM sequence: CTC
atgattcaaggcaactgctg

SEQ ID NO: 243101 - DNA, 20 bp, Artificial Sequence
  Description of Artificial Sequence: Synthetic oligonucleotide
  Target: LAMA2; (-) strand; PAM type: YTN; PAM sequence: TTG
agaggcaatggcctcatgat

SEQ ID NO: 243102 - DNA, 20 bp, Artificial Sequence
  Description of Artificial Sequence: Synthetic oligonucleotide
  Target: LAMA2; (-) strand; PAM type: YTN; PAM sequence: CTG
aagttgagaggcaatggcct

SEQ ID NO: 243103 - DNA, 20 bp, Artificial Sequence
  Description of Artificial Sequence: Synthetic oligonucleotide
  Target: LAMA2; (-) strand; PAM type: YTN; PAM sequence: CTG
tcgatctgaagttgagaggc

SEQ ID NO: 243104 - DNA, 20 bp, Artificial Sequence
  Description of Artificial Sequence: Synthetic oligonucleotide
  Target: LAMA2; (-) strand; PAM type: YTN; PAM sequence: CTG
ctgtcgatctgaagttgaga

SEQ ID NO: 243105 - DNA, 20 bp, Artificial Sequence
  Description of Artificial Sequence: Synthetic oligonucleotide
  Target: LAMA2; (-) strand; PAM type: YTN; PAM sequence: CTG
tcactgctgtcgatctgaag

SEQ ID NO: 243106 - DNA, 20 bp, Artificial Sequence
  Description of Artificial Sequence: Synthetic oligonucleotide
  Target: LAMA2; (-) strand; PAM type: YTN; PAM sequence: CTG
tggctgtcactgctgtcgat

SEQ ID NO: 243107 - DNA, 20 bp, Artificial Sequence
  Description of Artificial Sequence: Synthetic oligonucleotide
  Target: LAMA2; (-) strand; PAM type: YTN; PAM sequence: CTC
ctgtggctgtcactgctgtc

SEQ ID NO: 243108 - DNA, 20 bp, Artificial Sequence
  Description of Artificial Sequence: Synthetic oligonucleotide
  Target: LAMA2; (-) strand; PAM type: YTN; PAM sequence: CTG
ctcctgtggctgtcactgct

SEQ ID NO: 243109 - DNA, 20 bp, Artificial Sequence
  Description of Artificial Sequence: Synthetic oligonucleotide
  Target: LAMA2; (-) strand; PAM type: YTN; PAM sequence: CTC
tgctcctgtggctgtcactg

SEQ ID NO: 243110 - DNA, 20 bp, Artificial Sequence
  Description of Artificial Sequence: Synthetic oligonucleotide
  Target: LAMA2; (-) strand; PAM type: YTN; PAM sequence: CTC
tctgctcctgtggctgtcac

SEQ ID NO: 243111 - DNA, 20 bp, Artificial Sequence
  Description of Artificial Sequence: Synthetic oligonucleotide
  Target: LAMA2; (-) strand; PAM type: YTN; PAM sequence: CTA
gtcatgcatgctctctgctc

SEQ ID NO: 243112 - DNA, 20 bp, Artificial Sequence
  Description of Artificial Sequence: Synthetic oligonucleotide
  Target: LAMA2; (-) strand; PAM type: YTN; PAM sequence: CTG
tgtctagtcatgcatgctct

SEQ ID NO: 243113 - DNA, 20 bp, Artificial Sequence
  Description of Artificial Sequence: Synthetic oligonucleotide
  Target: LAMA2; (-) strand; PAM type: YTN; PAM sequence: CTG
agtaaaacaatcatctgtgt

SEQ ID NO: 243114 - DNA, 20 bp, Artificial Sequence
  Description of Artificial Sequence: Synthetic oligonucleotide
  Target: LAMA2; (-) strand; PAM type: YTN; PAM sequence: TTC
atctgagtaaaacaatcatc

SEQ ID NO: 243115 - DNA, 20 bp, Artificial Sequence
  Description of Artificial Sequence: Synthetic oligonucleotide
  Target: LAMA2; (-) strand; PAM type: YTN; PAM sequence: CTG
taaatatattcatctgagta

SEQ ID NO: 243116 - DNA, 20 bp, Artificial Sequence
  Description of Artificial Sequence: Synthetic oligonucleotide
  Target: LAMA2; (-) strand; PAM type: YTN; PAM sequence: TTG
gaaatagctgtaaatatatt

SEQ ID NO: 243117 - DNA, 20 bp, Artificial Sequence
  Description of Artificial Sequence: Synthetic oligonucleotide
  Target: LAMA2; (-) strand; PAM type: YTN; PAM sequence: TTT
ggaaatagctgtaaatatat

SEQ ID NO: 243118 - DNA, 20 bp, Artificial Sequence
  Description of Artificial Sequence: Synthetic oligonucleotide
  Target: LAMA2; (-) strand; PAM type: YTN; PAM sequence: CTT
tggaaatagctgtaaatata

SEQ ID NO: 243119 - DNA, 20 bp, Artificial Sequence
  Description of Artificial Sequence: Synthetic oligonucleotide
  Target: LAMA2; (-) strand; PAM type: YTN; PAM sequence: TTC
tttggaaatagctgtaaata

SEQ ID NO: 243120 - DNA, 20 bp, Artificial Sequence
  Description of Artificial Sequence: Synthetic oligonucleotide
  Target: LAMA2; (-) strand; PAM type: YTN; PAM sequence: TTT
ctttggaaatagctgtaaat

SEQ ID NO: 243121 - DNA, 20 bp, Artificial Sequence
  Description of Artificial Sequence: Synthetic oligonucleotide
  Target: LAMA2; (-) strand; PAM type: YTN; PAM sequence: TTC
agatacgaatacacaatgca

SEQ ID NO: 243122 - DNA, 20 bp, Artificial Sequence
  Description of Artificial Sequence: Synthetic oligonucleotide
  Target: LAMA2; (-) strand; PAM type: YTN; PAM sequence: TTT
cagatacgaatacacaatgc

SEQ ID NO: 243123 - DNA, 20 bp, Artificial Sequence
  Description of Artificial Sequence: Synthetic oligonucleotide
  Target: LAMA2; (-) strand; PAM type: YTN; PAM sequence: CTA
tttcagatacgaatacacaa

SEQ ID NO: 243124 - DNA, 20 bp, Artificial Sequence
  Description of Artificial Sequence: Synthetic oligonucleotide
  Target: LAMA2; (-) strand; PAM type: YTN; PAM sequence: CTA
atgaaggaaacgtcatatgg

SEQ ID NO: 243125 - DNA, 20 bp, Artificial Sequence
  Description of Artificial Sequence: Synthetic oligonucleotide
  Target: LAMA2; (-) strand; PAM type: YTN; PAM sequence: TTC
ctaatgaaggaaacgtcata

SEQ ID NO: 243126 - DNA, 20 bp, Artificial Sequence
  Description of Artificial Sequence: Synthetic oligonucleotide
  Target: LAMA2; (-) strand; PAM type: YTN; PAM sequence: CTT
cctaatgaaggaaacgtcat

SEQ ID NO: 243127 - DNA, 20 bp, Artificial Sequence
  Description of Artificial Sequence: Synthetic oligonucleotide
  Target: LAMA2; (-) strand; PAM type: YTN; PAM sequence: CTC
ttcctaatgaaggaaacgtc

SEQ ID NO: 243128 - DNA, 20 bp, Artificial Sequence
  Description of Artificial Sequence: Synthetic oligonucleotide
  Target: LAMA2; (-) strand; PAM type: YTN; PAM sequence: TTC
tcttcctaatgaaggaaacg

SEQ ID NO: 243129 - DNA, 20 bp, Artificial Sequence
  Description of Artificial Sequence: Synthetic oligonucleotide
  Target: LAMA2; (-) strand; PAM type: YTN; PAM sequence: CTA
cagccagggaggggttctct

SEQ ID NO: 243130 - DNA, 20 bp, Artificial Sequence
  Description of Artificial Sequence: Synthetic oligonucleotide
  Target: LAMA2; (-) strand; PAM type: YTN; PAM sequence: TTC
agaatgctacagccagggag

SEQ ID NO: 243131 - DNA, 20 bp, Artificial Sequence
  Description of Artificial Sequence: Synthetic oligonucleotide
  Target: LAMA2; (-) strand; PAM type: YTN; PAM sequence: TTT
cagaatgctacagccaggga

SEQ ID NO: 243132 - DNA, 20 bp, Artificial Sequence
  Description of Artificial Sequence: Synthetic oligonucleotide
  Target: LAMA2; (-) strand; PAM type: YTN; PAM sequence: TTA
tttcagaatgctacagccag

SEQ ID NO: 243133 - DNA, 20 bp, Artificial Sequence
  Description of Artificial Sequence: Synthetic oligonucleotide
  Target: LAMA2; (-) strand; PAM type: YTN; PAM sequence: TTC
aaaatccagttatttcagaa

SEQ ID NO: 243134 - DNA, 20 bp, Artificial Sequence
  Description of Artificial Sequence: Synthetic oligonucleotide
  Target: LAMA2; (-) strand; PAM type: YTN; PAM sequence: CTT
caaaatccagttatttcaga

SEQ ID NO: 243135 - DNA, 20 bp, Artificial Sequence
  Description of Artificial Sequence: Synthetic oligonucleotide
  Target: LAMA2; (-) strand; PAM type: YTN; PAM sequence: TTG
taaacaataaacaaaaagtg

SEQ ID NO: 243136 - DNA, 20 bp, Artificial Sequence
  Description of Artificial Sequence: Synthetic oligonucleotide
  Target: LAMA2; (-) strand; PAM type: YTN; PAM sequence: TTA
aaacattgtaaacaataaac

SEQ ID NO: 243137 - DNA, 20 bp, Artificial Sequence
  Description of Artificial Sequence: Synthetic oligonucleotide
  Target: LAMA2; (-) strand; PAM type: YTN; PAM sequence: CTC
acaagaatgagaaattaaaa

SEQ ID NO: 243138 - DNA, 20 bp, Artificial Sequence
  Description of Artificial Sequence: Synthetic oligonucleotide
  Target: LAMA2; (-) strand; PAM type: YTN; PAM sequence: TTA
ctcacaagaatgagaaatta

SEQ ID NO: 243139 - DNA, 20 bp, Artificial Sequence
  Description of Artificial Sequence: Synthetic oligonucleotide
  Target: LAMA2; (-) strand; PAM type: YTN; PAM sequence: TTA
ttactcacaagaatgagaaa

SEQ ID NO: 243140 - DNA, 20 bp, Artificial Sequence
  Description of Artificial Sequence: Synthetic oligonucleotide
  Target: LAMA2; (-) strand; PAM type: YTN; PAM sequence: TTG
agttattactcacaagaatg

SEQ ID NO: 243141 - DNA, 20 bp, Artificial Sequence
  Description of Artificial Sequence: Synthetic oligonucleotide
  Target: LAMA2; (-) strand; PAM type: YTN; PAM sequence: TTA
accaggagttgagttattac

SEQ ID NO: 243142 - DNA, 20 bp, Artificial Sequence
  Description of Artificial Sequence: Synthetic oligonucleotide
  Target: LAMA2; (-) strand; PAM type: YTN; PAM sequence: CTT
aaccaggagttgagttatta

SEQ ID NO: 243143 - DNA, 20 bp, Artificial Sequence
  Description of Artificial Sequence: Synthetic oligonucleotide
  Target: LAMA2; (-) strand; PAM type: YTN; PAM sequence: TTA
cttaaccaggagttgagtta

SEQ ID NO: 243144 - DNA, 20 bp, Artificial Sequence
  Description of Artificial Sequence: Synthetic oligonucleotide
  Target: LAMA2; (-) strand; PAM type: YTN; PAM sequence: TTT
acttaaccaggagttgagtt

SEQ ID NO: 243145 - DNA, 20 bp, Artificial Sequence
  Description of Artificial Sequence: Synthetic oligonucleotide
  Target: LAMA2; (-) strand; PAM type: YTN; PAM sequence: TTT
tacttaaccaggagttgagt

SEQ ID NO: 243146 - DNA, 20 bp, Artificial Sequence
  Description of Artificial Sequence: Synthetic oligonucleotide
  Target: LAMA2; (-) strand; PAM type: YTN; PAM sequence: CTG
aaattttacttaaccaggag

SEQ ID NO: 243147 - DNA, 20 bp, Artificial Sequence
  Description of Artificial Sequence: Synthetic oligonucleotide
  Target: LAMA2; (-) strand; PAM type: YTN; PAM sequence: TTC
tgaaattttacttaaccagg

SEQ ID NO: 243148 - DNA, 20 bp, Artificial Sequence
  Description of Artificial Sequence: Synthetic oligonucleotide
  Target: LAMA2; (-) strand; PAM type: YTN; PAM sequence: TTA
ttctgaaattttacttaacc

SEQ ID NO: 243149 - DNA, 20 bp, Artificial Sequence
  Description of Artificial Sequence: Synthetic oligonucleotide
  Target: LAMA2; (-) strand; PAM type: YTN; PAM sequence: TTT
attctgaaattttacttaac

SEQ ID NO: 243150 - DNA, 20 bp, Artificial Sequence
  Description of Artificial Sequence: Synthetic oligonucleotide
  Target: LAMA2; (-) strand; PAM type: YTN; PAM sequence: TTT
tattctgaaattttacttaa

SEQ ID NO: 243151 - DNA, 20 bp, Artificial Sequence
  Description of Artificial Sequence: Synthetic oligonucleotide
  Target: LAMA2; (-) strand; PAM type: YTN; PAM sequence: TTT
ttattctgaaattttactta

SEQ ID NO: 243152 - DNA, 20 bp, Artificial Sequence
  Description of Artificial Sequence: Synthetic oligonucleotide
  Target: LAMA2; (-) strand; PAM type: YTN; PAM sequence: CTA
taaaacaatatttttattct

SEQ ID NO: 243153 - DNA, 20 bp, Artificial Sequence
  Description of Artificial Sequence: Synthetic oligonucleotide
  Target: LAMA2; (-) strand; PAM type: YTN; PAM sequence: TTA
ctataaaacaatatttttat

SEQ ID NO: 243154 - DNA, 20 bp, Artificial Sequence
  Description of Artificial Sequence: Synthetic oligonucleotide
  Target: LAMA2; (-) strand; PAM type: YTN; PAM sequence: TTT
actataaaacaatattttta

SEQ ID NO: 243155 - DNA, 20 bp, Artificial Sequence
  Description of Artificial Sequence: Synthetic oligonucleotide
  Target: LAMA2; (-) strand; PAM type: YTN; PAM sequence: CTT
tactataaaacaatattttt

SEQ ID NO: 243156 - DNA, 20 bp, Artificial Sequence
  Description of Artificial Sequence: Synthetic oligonucleotide
  Target: LAMA2; (-) strand; PAM type: YTN; PAM sequence: TTA
caagcatctttactataaaa

SEQ ID NO: 243157 - DNA, 20 bp, Artificial Sequence
  Description of Artificial Sequence: Synthetic oligonucleotide
  Target: LAMA2; (-) strand; PAM type: YTN; PAM sequence: TTG
atattacaagcatctttact

SEQ ID NO: 243158 - DNA, 20 bp, Artificial Sequence
  Description of Artificial Sequence: Synthetic oligonucleotide
  Target: LAMA2; (-) strand; PAM type: YTN; PAM sequence: TTT
gatattacaagcatctttac

SEQ ID NO: 243159 - DNA, 20 bp, Artificial Sequence
  Description of Artificial Sequence: Synthetic oligonucleotide
  Target: LAMA2; (-) strand; PAM type: YTN; PAM sequence: TTT
tgatattacaagcatcttta

SEQ ID NO: 243160 - DNA, 20 bp, Artificial Sequence
  Description of Artificial Sequence: Synthetic oligonucleotide
  Target: LAMA2; (-) strand; PAM type: YTN; PAM sequence: TTG
ttttgatattacaagcatct

SEQ ID NO: 243161 - DNA, 20 bp, Artificial Sequence
  Description of Artificial Sequence: Synthetic oligonucleotide
  Target: LAMA2; (-) strand; PAM type: YTN; PAM sequence: CTT
gttttgatattacaagcatc

SEQ ID NO: 243162 - DNA, 20 bp, Artificial Sequence
  Description of Artificial Sequence: Synthetic oligonucleotide
  Target: LAMA2; (-) strand; PAM type: YTN; PAM sequence: TTA
aaaacatacttgttttgata

SEQ ID NO: 243163 - DNA, 20 bp, Artificial Sequence
  Description of Artificial Sequence: Synthetic oligonucleotide
  Target: LAMA2; (-) strand; PAM type: YTN; PAM sequence: TTT
aaaaacatacttgttttgat

SEQ ID NO: 243164 - DNA, 20 bp, Artificial Sequence
  Description of Artificial Sequence: Synthetic oligonucleotide
  Target: LAMA2; (-) strand; PAM type: YTN; PAM sequence: TTT
taaaaacatacttgttttga

SEQ ID NO: 243165 - DNA, 20 bp, Artificial Sequence
  Description of Artificial Sequence: Synthetic oligonucleotide
  Target: LAMA2; (-) strand; PAM type: YTN; PAM sequence: TTT
ttaaaaacatacttgttttg

SEQ ID NO: 243166 - DNA, 20 bp, Artificial Sequence
  Description of Artificial Sequence: Synthetic oligonucleotide
  Target: LAMA2; (-) strand; PAM type: YTN; PAM sequence: TTT
tttaaaaacatacttgtttt

SEQ ID NO: 243167 - DNA, 20 bp, Artificial Sequence
  Description of Artificial Sequence: Synthetic oligonucleotide
  Target: LAMA2; (-) strand; PAM type: YTN; PAM sequence: TTA
attttttaaaaacatacttg

SEQ ID NO: 243168 - DNA, 20 bp, Artificial Sequence
  Description of Artificial Sequence: Synthetic oligonucleotide
  Target: LAMA2; (-) strand; PAM type: YTN; PAM sequence: CTC
caacccacatcaaatataaa

SEQ ID NO: 243169 - DNA, 20 bp, Artificial Sequence
  Description of Artificial Sequence: Synthetic oligonucleotide
  Target: LAMA2; (-) strand; PAM type: YTN; PAM sequence: CTC
ctccaacccacatcaaatat

SEQ ID NO: 243170 - DNA, 20 bp, Artificial Sequence
  Description of Artificial Sequence: Synthetic oligonucleotide
  Target: LAMA2; (-) strand; PAM type: YTN; PAM sequence: CTA
aggggctcctccaacccaca

SEQ ID NO: 243171 - DNA, 20 bp, Artificial Sequence
  Description of Artificial Sequence: Synthetic oligonucleotide
  Target: LAMA2; (-) strand; PAM type: YTN; PAM sequence: CTC
taaggggctcctccaaccca

SEQ ID NO: 243172 - DNA, 20 bp, Artificial Sequence
  Description of Artificial Sequence: Synthetic oligonucleotide
  Target: LAMA2; (-) strand; PAM type: YTN; PAM sequence: CTA
caaagaaaaaagaatctcta

SEQ ID NO: 243173 - DNA, 20 bp, Artificial Sequence
  Description of Artificial Sequence: Synthetic oligonucleotide
  Target: LAMA2; (-) strand; PAM type: YTN; PAM sequence: CTC
tacaaagaaaaaagaatctc

SEQ ID NO: 243174 - DNA, 20 bp, Artificial Sequence
  Description of Artificial Sequence: Synthetic oligonucleotide
  Target: LAMA2; (-) strand; PAM type: YTN; PAM sequence: TTC
tctacaaagaaaaaagaatc

SEQ ID NO: 243175 - DNA, 20 bp, Artificial Sequence
  Description of Artificial Sequence: Synthetic oligonucleotide
  Target: LAMA2; (-) strand; PAM type: YTN; PAM sequence: CTT
ctctacaaagaaaaaagaat

SEQ ID NO: 243176 - DNA, 20 bp, Artificial Sequence
  Description of Artificial Sequence: Synthetic oligonucleotide
  Target: LAMA2; (-) strand; PAM type: YTN; PAM sequence: CTA
caaaacttctctacaaagaa

SEQ ID NO: 243177 - DNA, 20 bp, Artificial Sequence
  Description of Artificial Sequence: Synthetic oligonucleotide
  Target: LAMA2; (-) strand; PAM type: YTN; PAM sequence: CTC
tacaaaacttctctacaaag

SEQ ID NO: 243178 - DNA, 20 bp, Artificial Sequence
  Description of Artificial Sequence: Synthetic oligonucleotide
  Target: LAMA2; (-) strand; PAM type: YTN; PAM sequence: TTG
atctctacaaaacttctcta

SEQ ID NO: 243179 - DNA, 20 bp, Artificial Sequence
  Description of Artificial Sequence: Synthetic oligonucleotide
  Target: LAMA2; (-) strand; PAM type: YTN; PAM sequence: CTA
ttgatctctacaaaacttct

SEQ ID NO: 243180 - DNA, 20 bp, Artificial Sequence
  Description of Artificial Sequence: Synthetic oligonucleotide
  Target: LAMA2; (-) strand; PAM type: YTN; PAM sequence: TTA
cactattgatctctacaaaa

SEQ ID NO: 243181 - DNA, 20 bp, Artificial Sequence
  Description of Artificial Sequence: Synthetic oligonucleotide
  Target: LAMA2; (-) strand; PAM type: YTN; PAM sequence: CTT
acactattgatctctacaaa

SEQ ID NO: 243182 - DNA, 20 bp, Artificial Sequence
  Description of Artificial Sequence: Synthetic oligonucleotide
  Target: LAMA2; (-) strand; PAM type: YTN; PAM sequence: TTC
ttacactattgatctctaca

SEQ ID NO: 243183 - DNA, 20 bp, Artificial Sequence
  Description of Artificial Sequence: Synthetic oligonucleotide
  Target: LAMA2; (-) strand; PAM type: YTN; PAM sequence: TTG
tatgattcttacactattga

SEQ ID NO: 243184 - DNA, 20 bp, Artificial Sequence
  Description of Artificial Sequence: Synthetic oligonucleotide
  Target: LAMA2; (-) strand; PAM type: YTN; PAM sequence: CTT
gtatgattcttacactattg

SEQ ID NO: 243185 - DNA, 20 bp, Artificial Sequence
  Description of Artificial Sequence: Synthetic oligonucleotide
  Target: LAMA2; (-) strand; PAM type: YTN; PAM sequence: TTA
cacttgtatgattcttacac

SEQ ID NO: 243186 - DNA, 20 bp, Artificial Sequence
  Description of Artificial Sequence: Synthetic oligonucleotide
  Target: LAMA2; (-) strand; PAM type: YTN; PAM sequence: TTT
acacttgtatgattcttaca

SEQ ID NO: 243187 - DNA, 20 bp, Artificial Sequence
  Description of Artificial Sequence: Synthetic oligonucleotide
  Target: LAMA2; (-) strand; PAM type: YTN; PAM sequence: CTA
tttacacttgtatgattctt

SEQ ID NO: 243188 - DNA, 20 bp, Artificial Sequence
  Description of Artificial Sequence: Synthetic oligonucleotide
  Target: LAMA2; (-) strand; PAM type: YTN; PAM sequence: TTA
aaaggaaacaaaactattta

SEQ ID NO: 243189 - DNA, 20 bp, Artificial Sequence
  Description of Artificial Sequence: Synthetic oligonucleotide
  Target: LAMA2; (-) strand; PAM type: YTN; PAM sequence: TTG
aaaaattaaaaggaaacaaa

SEQ ID NO: 243190 - DNA, 20 bp, Artificial Sequence
  Description of Artificial Sequence: Synthetic oligonucleotide
  Target: LAMA2; (-) strand; PAM type: YTN; PAM sequence: TTT
gaaaaattaaaaggaaacaa

SEQ ID NO: 243191 - DNA, 20 bp, Artificial Sequence
  Description of Artificial Sequence: Synthetic oligonucleotide
  Target: LAMA2; (-) strand; PAM type: YTN; PAM sequence: TTT
tgaaaaattaaaaggaaaca

SEQ ID NO: 243192 - DNA, 20 bp, Artificial Sequence
  Description of Artificial Sequence: Synthetic oligonucleotide
  Target: LAMA2; (-) strand; PAM type: YTN; PAM sequence: TTC
aaatattttgaaaaattaaa

SEQ ID NO: 243193 - DNA, 20 bp, Artificial Sequence
  Description of Artificial Sequence: Synthetic oligonucleotide
  Target: LAMA2; (-) strand; PAM type: YTN; PAM sequence: TTT
caaatattttgaaaaattaa

SEQ ID NO: 243194 - DNA, 20 bp, Artificial Sequence
  Description of Artificial Sequence: Synthetic oligonucleotide
  Target: LAMA2; (-) strand; PAM type: YTN; PAM sequence: TTT
tcaaatattttgaaaaatta

SEQ ID NO: 243195 - DNA, 20 bp, Artificial Sequence
  Description of Artificial Sequence: Synthetic oligonucleotide
  Target: LAMA2; (-) strand; PAM type: YTN; PAM sequence: TTA
aagaattttcaaatattttg

SEQ ID NO: 243196 - DNA, 20 bp, Artificial Sequence
  Description of Artificial Sequence: Synthetic oligonucleotide
  Target: LAMA2; (-) strand; PAM type: YTN; PAM sequence: CTT
aaagaattttcaaatatttt

SEQ ID NO: 243197 - DNA, 20 bp, Artificial Sequence
  Description of Artificial Sequence: Synthetic oligonucleotide
  Target: LAMA2; (-) strand; PAM type: YTN; PAM sequence: CTA
cttaaagaattttcaaatat

SEQ ID NO: 243198 - DNA, 20 bp, Artificial Sequence
  Description of Artificial Sequence: Synthetic oligonucleotide
  Target: LAMA2; (-) strand; PAM type: YTN; PAM sequence: TTC
agtaactacttaaagaattt

SEQ ID NO: 243199 - DNA, 20 bp, Artificial Sequence
  Description of Artificial Sequence: Synthetic oligonucleotide
  Target: LAMA2; (-) strand; PAM type: YTN; PAM sequence: TTT
cagtaactacttaaagaatt

SEQ ID NO: 243200 - DNA, 20 bp, Artificial Sequence
  Description of Artificial Sequence: Synthetic oligonucleotide
  Target: LAMA2; (-) strand; PAM type: YTN; PAM sequence: TTA
ccaaatttcagtaactactt

SEQ ID NO: 243201 - DNA, 20 bp, Artificial Sequence
  Description of Artificial Sequence: Synthetic oligonucleotide
  Target: LAMA2; (-) strand; PAM type: YTN; PAM sequence: CTT
accaaatttcagtaactact

SEQ ID NO: 243202 - DNA, 20 bp, Artificial Sequence
  Description of Artificial Sequence: Synthetic oligonucleotide
  Target: LAMA2; (-) strand; PAM type: YTN; PAM sequence: CTA
aaacaaaatgtatcaatata

SEQ ID NO: 243203 - DNA, 20 bp, Artificial Sequence
  Description of Artificial Sequence: Synthetic oligonucleotide
  Target: LAMA2; (-) strand; PAM type: YTN; PAM sequence: TTC
taaaacaaaatgtatcaata

SEQ ID NO: 243204 - DNA, 20 bp, Artificial Sequence
  Description of Artificial Sequence: Synthetic oligonucleotide
  Target: LAMA2; (-) strand; PAM type: YTN; PAM sequence: CTT
ctaaaacaaaatgtatcaat

SEQ ID NO: 243205 - DNA, 20 bp, Artificial Sequence
  Description of Artificial Sequence: Synthetic oligonucleotide
  Target: LAMA2; (-) strand; PAM type: YTN; PAM sequence: TTC
ttctaaaacaaaatgtatca

SEQ ID NO: 243206 - DNA, 20 bp, Artificial Sequence
  Description of Artificial Sequence: Synthetic oligonucleotide
  Target: LAMA2; (-) strand; PAM type: YTN; PAM sequence: CTA
attcttctaaaacaaaatgt

SEQ ID NO: 243207 - DNA, 20 bp, Artificial Sequence
  Description of Artificial Sequence: Synthetic oligonucleotide
  Target: LAMA2; (-) strand; PAM type: YTN; PAM sequence: CTC
ctaattcttctaaaacaaaa

SEQ ID NO: 243208 - DNA, 20 bp, Artificial Sequence
  Description of Artificial Sequence: Synthetic oligonucleotide
  Target: LAMA2; (-) strand; PAM type: YTN; PAM sequence: TTG
ctcctaattcttctaaaaca

SEQ ID NO: 243209 - DNA, 20 bp, Artificial Sequence
  Description of Artificial Sequence: Synthetic oligonucleotide
  Target: LAMA2; (-) strand; PAM type: YTN; PAM sequence: TTT
gctcctaattcttctaaaac

SEQ ID NO: 243210 - DNA, 20 bp, Artificial Sequence
  Description of Artificial Sequence: Synthetic oligonucleotide
  Target: LAMA2; (-) strand; PAM type: YTN; PAM sequence: TTT
tgctcctaattcttctaaaa

SEQ ID NO: 243211 - DNA, 20 bp, Artificial Sequence
  Description of Artificial Sequence: Synthetic oligonucleotide
  Target: LAMA2; (-) strand; PAM type: YTN; PAM sequence: CTT
ttgctcctaattcttctaaa

SEQ ID NO: 243212 - DNA, 20 bp, Artificial Sequence
  Description of Artificial Sequence: Synthetic oligonucleotide
  Target: LAMA2; (-) strand; PAM type: YTN; PAM sequence: TTA
taaaaataacccttttgctc

SEQ ID NO: 243213 - DNA, 20 bp, Artificial Sequence
  Description of Artificial Sequence: Synthetic oligonucleotide
  Target: LAMA2; (-) strand; PAM type: YTN; PAM sequence: TTC
attataaaaataaccctttt

SEQ ID NO: 243214 - DNA, 20 bp, Artificial Sequence
  Description of Artificial Sequence: Synthetic oligonucleotide
  Target: LAMA2; (-) strand; PAM type: YTN; PAM sequence: TTT
cattataaaaataacccttt

SEQ ID NO: 243215 - DNA, 20 bp, Artificial Sequence
  Description of Artificial Sequence: Synthetic oligonucleotide
  Target: LAMA2; (-) strand; PAM type: YTN; PAM sequence: TTG
tatttcattataaaaataac

SEQ ID NO: 243216 - DNA, 20 bp, Artificial Sequence
  Description of Artificial Sequence: Synthetic oligonucleotide
  Target: LAMA2; (-) strand; PAM type: YTN; PAM sequence: CTG
gaagattgtatttcattata

SEQ ID NO: 243217 - DNA, 20 bp, Artificial Sequence
  Description of Artificial Sequence: Synthetic oligonucleotide
  Target: LAMA2; (-) strand; PAM type: YTN; PAM sequence: TTA
ggaactggaagattgtattt

SEQ ID NO: 243218 - DNA, 20 bp, Artificial Sequence
  Description of Artificial Sequence: Synthetic oligonucleotide
  Target: LAMA2; (-) strand; PAM type: YTN; PAM sequence: TTA
ttaggaactggaagattgta

SEQ ID NO: 243219 - DNA, 20 bp, Artificial Sequence
  Description of Artificial Sequence: Synthetic oligonucleotide
  Target: LAMA2; (-) strand; PAM type: YTN; PAM sequence: CTT
attaggaactggaagattgt

SEQ ID NO: 243220 - DNA, 20 bp, Artificial Sequence
  Description of Artificial Sequence: Synthetic oligonucleotide
  Target: LAMA2; (-) strand; PAM type: YTN; PAM sequence: CTA
atacttattaggaactggaa

SEQ ID NO: 243221 - DNA, 20 bp, Artificial Sequence
  Description of Artificial Sequence: Synthetic oligonucleotide
  Target: LAMA2; (-) strand; PAM type: YTN; PAM sequence: CTA
acaggtgtctaatacttatt

SEQ ID NO: 243222 - DNA, 20 bp, Artificial Sequence
  Description of Artificial Sequence: Synthetic oligonucleotide
  Target: LAMA2; (-) strand; PAM type: YTN; PAM sequence: TTG
gcagctaacaggtgtctaat

SEQ ID NO: 243223 - DNA, 20 bp, Artificial Sequence
  Description of Artificial Sequence: Synthetic oligonucleotide
  Target: LAMA2; (-) strand; PAM type: YTN; PAM sequence: TTG
ggaagttggcagctaacagg

SEQ ID NO: 243224 - DNA, 20 bp, Artificial Sequence
  Description of Artificial Sequence: Synthetic oligonucleotide
  Target: LAMA2; (-) strand; PAM type: YTN; PAM sequence: TTT
gggaagttggcagctaacag

SEQ ID NO: 243225 - DNA, 20 bp, Artificial Sequence
  Description of Artificial Sequence: Synthetic oligonucleotide
  Target: LAMA2; (-) strand; PAM type: YTN; PAM sequence: TTT
tgggaagttggcagctaaca

SEQ ID NO: 243226 - DNA, 20 bp, Artificial Sequence
  Description of Artificial Sequence: Synthetic oligonucleotide
  Target: LAMA2; (-) strand; PAM type: YTN; PAM sequence: TTT
ttgggaagttggcagctaac

SEQ ID NO: 243227 - DNA, 20 bp, Artificial Sequence
  Description of Artificial Sequence: Synthetic oligonucleotide
  Target: LAMA2; (-) strand; PAM type: YTN; PAM sequence: CTC
aggggtatttttgggaagtt

SEQ ID NO: 243228 - DNA, 20 bp, Artificial Sequence
  Description of Artificial Sequence: Synthetic oligonucleotide
  Target: LAMA2; (-) strand; PAM type: YTN; PAM sequence: TTC
tcaggggtatttttgggaag

SEQ ID NO: 243229 - DNA, 20 bp, Artificial Sequence
  Description of Artificial Sequence: Synthetic oligonucleotide
  Target: LAMA2; (-) strand; PAM type: YTN; PAM sequence: TTT
ctcaggggtatttttgggaa

SEQ ID NO: 243230 - DNA, 20 bp, Artificial Sequence
  Description of Artificial Sequence: Synthetic oligonucleotide
  Target: LAMA2; (-) strand; PAM type: YTN; PAM sequence: TTT
tctcaggggtatttttggga

SEQ ID NO: 243231 - DNA, 20 bp, Artificial Sequence
  Description of Artificial Sequence: Synthetic oligonucleotide
  Target: LAMA2; (-) strand; PAM type: YTN; PAM sequence: TTT
ttctcaggggtatttttggg

SEQ ID NO: 243232 - DNA, 20 bp, Artificial Sequence
  Description of Artificial Sequence: Synthetic oligonucleotide
  Target: LAMA2; (-) strand; PAM type: YTN; PAM sequence: TTT
tttctcaggggtatttttgg

SEQ ID NO: 243233 - DNA, 20 bp, Artificial Sequence
  Description of Artificial Sequence: Synthetic oligonucleotide
  Target: LAMA2; (-) strand; PAM type: YTN; PAM sequence: TTT
ttttctcaggggtatttttg

SEQ ID NO: 243234 - DNA, 20 bp, Artificial Sequence
  Description of Artificial Sequence: Synthetic oligonucleotide
  Target: LAMA2; (-) strand; PAM type: YTN; PAM sequence: TTT
tttttctcaggggtattttt

SEQ ID NO: 243235 - DNA, 20 bp, Artificial Sequence
  Description of Artificial Sequence: Synthetic oligonucleotide
  Target: LAMA2; (-) strand; PAM type: YTN; PAM sequence: TTT
ttttttctcaggggtatttt

SEQ ID NO: 243236 - DNA, 20 bp, Artificial Sequence
  Description of Artificial Sequence: Synthetic oligonucleotide
  Target: LAMA2; (-) strand; PAM type: YTN; PAM sequence: TTT
tttttttctcaggggtattt

SEQ ID NO: 243237 - DNA, 20 bp, Artificial Sequence
  Description of Artificial Sequence: Synthetic oligonucleotide
  Target: LAMA2; (-) strand; PAM type: YTN; PAM sequence: TTT
ttttttttctcaggggtatt

SEQ ID NO: 243238 - DNA, 20 bp, Artificial Sequence
  Description of Artificial Sequence: Synthetic oligonucleotide
  Target: LAMA2; (-) strand; PAM type: YTN; PAM sequence: TTG
accaacaggttttttttttt

SEQ ID NO: 243239 - DNA, 20 bp, Artificial Sequence
  Description of Artificial Sequence: Synthetic oligonucleotide
  Target: LAMA2; (-) strand; PAM type: YTN; PAM sequence: CTT
gaccaacaggtttttttttt

SEQ ID NO: 243240 - DNA, 20 bp, Artificial Sequence
  Description of Artificial Sequence: Synthetic oligonucleotide
  Target: LAMA2; (-) strand; PAM type: YTN; PAM sequence: TTC
ttgaccaacaggtttttttt

SEQ ID NO: 243241 - DNA, 20 bp, Artificial Sequence
  Description of Artificial Sequence: Synthetic oligonucleotide
  Target: LAMA2; (-) strand; PAM type: YTN; PAM sequence: TTT
cttgaccaacaggttttttt

SEQ ID NO: 243242 - DNA, 20 bp, Artificial Sequence
  Description of Artificial Sequence: Synthetic oligonucleotide
  Target: LAMA2; (-) strand; PAM type: YTN; PAM sequence: CTT
tcttgaccaacaggtttttt

SEQ ID NO: 243243 - DNA, 20 bp, Artificial Sequence
  Description of Artificial Sequence: Synthetic oligonucleotide
  Target: LAMA2; (-) strand; PAM type: YTN; PAM sequence: TTC
gtgaactttcttgaccaaca

SEQ ID NO: 243244 - DNA, 20 bp, Artificial Sequence
  Description of Artificial Sequence: Synthetic oligonucleotide
  Target: LAMA2; (-) strand; PAM type: YTN; PAM sequence: CTT
cgtgaactttcttgaccaac

SEQ ID NO: 243245 - DNA, 20 bp, Artificial Sequence
  Description of Artificial Sequence: Synthetic oligonucleotide
  Target: LAMA2; (-) strand; PAM type: YTN; PAM sequence: CTG
taataacttcgtgaactttc

SEQ ID NO: 243246 - DNA, 20 bp, Artificial Sequence
  Description of Artificial Sequence: Synthetic oligonucleotide
  Target: LAMA2; (-) strand; PAM type: YTN; PAM sequence: TTA
ctgtaataacttcgtgaact

SEQ ID NO: 243247 - DNA, 20 bp, Artificial Sequence
  Description of Artificial Sequence: Synthetic oligonucleotide
  Target: LAMA2; (-) strand; PAM type: YTN; PAM sequence: TTT
actgtaataacttcgtgaac

SEQ ID NO: 243248 - DNA, 20 bp, Artificial Sequence
  Description of Artificial Sequence: Synthetic oligonucleotide
  Target: LAMA2; (-) strand; PAM type: YTN; PAM sequence: TTG
tttactgtaataacttcgtg

SEQ ID NO: 243249 - DNA, 20 bp, Artificial Sequence
  Description of Artificial Sequence: Synthetic oligonucleotide
  Target: LAMA2; (-) strand; PAM type: YTN; PAM sequence: CTT
gtttactgtaataacttcgt

SEQ ID NO: 243250 - DNA, 20 bp, Artificial Sequence
  Description of Artificial Sequence: Synthetic oligonucleotide
  Target: LAMA2; (-) strand; PAM type: YTN; PAM sequence: TTC
ttgtttactgtaataacttc

SEQ ID NO: 243251 - DNA, 20 bp, Artificial Sequence
  Description of Artificial Sequence: Synthetic oligonucleotide
  Target: LAMA2; (-) strand; PAM type: YTN; PAM sequence: CTA
agaatatcaaggtgatgttc

SEQ ID NO: 243252 - DNA, 20 bp, Artificial Sequence
  Description of Artificial Sequence: Synthetic oligonucleotide
  Target: LAMA2; (-) strand; PAM type: YTN; PAM sequence: TTA
ctaagaatatcaaggtgatg

SEQ ID NO: 243253 - DNA, 20 bp, Artificial Sequence
  Description of Artificial Sequence: Synthetic oligonucleotide
  Target: LAMA2; (-) strand; PAM type: YTN; PAM sequence: CTG
agacattactaagaatatca

SEQ ID NO: 243254 - DNA, 20 bp, Artificial Sequence
  Description of Artificial Sequence: Synthetic oligonucleotide
  Target: LAMA2; (-) strand; PAM type: YTN; PAM sequence: TTC
tgagacattactaagaatat

SEQ ID NO: 243255 - DNA, 20 bp, Artificial Sequence
  Description of Artificial Sequence: Synthetic oligonucleotide
  Target: LAMA2; (-) strand; PAM type: YTN; PAM sequence: CTT
ctgagacattactaagaata

SEQ ID NO: 243256 - DNA, 20 bp, Artificial Sequence
  Description of Artificial Sequence: Synthetic oligonucleotide
  Target: LAMA2; (-) strand; PAM type: YTN; PAM sequence: CTC
accttctgagacattactaa

SEQ ID NO: 243257 - DNA, 20 bp, Artificial Sequence
  Description of Artificial Sequence: Synthetic oligonucleotide
  Target: LAMA2; (-) strand; PAM type: YTN; PAM sequence: CTG
accctcaccttctgagacat

SEQ ID NO: 243258 - DNA, 20 bp, Artificial Sequence
  Description of Artificial Sequence: Synthetic oligonucleotide
  Target: LAMA2; (-) strand; PAM type: YTN; PAM sequence: TTC
ccctgaccctcaccttctga

SEQ ID NO: 243259 - DNA, 20 bp, Artificial Sequence
  Description of Artificial Sequence: Synthetic oligonucleotide
  Target: LAMA2; (-) strand; PAM type: YTN; PAM sequence: CTT
cccctgaccctcaccttctg

SEQ ID NO: 243260 - DNA, 20 bp, Artificial Sequence
  Description of Artificial Sequence: Synthetic oligonucleotide
  Target: LAMA2; (-) strand; PAM type: YTN; PAM sequence: CTG
taaatatcttcccctgaccc

SEQ ID NO: 243261 - DNA, 20 bp, Artificial Sequence
  Description of Artificial Sequence: Synthetic oligonucleotide
  Target: LAMA2; (-) strand; PAM type: YTN; PAM sequence: CTA
aagcctgtaaatatcttccc

SEQ ID NO: 243262 - DNA, 20 bp, Artificial Sequence
  Description of Artificial Sequence: Synthetic oligonucleotide
  Target: LAMA2; (-) strand; PAM type: YTN; PAM sequence: TTC
cctaaagcctgtaaatatct

SEQ ID NO: 243263 - DNA, 20 bp, Artificial Sequence
  Description of Artificial Sequence: Synthetic oligonucleotide
  Target: LAMA2; (-) strand; PAM type: YTN; PAM sequence: TTT
ccctaaagcctgtaaatatc

SEQ ID NO: 243264 - DNA, 20 bp, Artificial Sequence
  Description of Artificial Sequence: Synthetic oligonucleotide
  Target: LAMA2; (-) strand; PAM type: YTN; PAM sequence: TTT
tccctaaagcctgtaaatat

SEQ ID NO: 243265 - DNA, 20 bp, Artificial Sequence
  Description of Artificial Sequence: Synthetic oligonucleotide
  Target: LAMA2; (-) strand; PAM type: YTN; PAM sequence: CTT
ttccctaaagcctgtaaata

SEQ ID NO: 243266 - DNA, 20 bp, Artificial Sequence
  Description of Artificial Sequence: Synthetic oligonucleotide
  Target: LAMA2; (-) strand; PAM type: YTN; PAM sequence: TTG
aaatcaaccagccttttccc

SEQ ID NO: 243267 - DNA, 20 bp, Artificial Sequence
  Description of Artificial Sequence: Synthetic oligonucleotide
  Target: LAMA2; (-) strand; PAM type: YTN; PAM sequence: CTT
gaaatcaaccagccttttcc

SEQ ID NO: 243268 - DNA, 20 bp, Artificial Sequence
  Description of Artificial Sequence: Synthetic oligonucleotide
  Target: LAMA2; (-) strand; PAM type: YTN; PAM sequence: TTG
ccttgaaatcaaccagcctt

SEQ ID NO: 243269 - DNA, 20 bp, Artificial Sequence
  Description of Artificial Sequence: Synthetic oligonucleotide
  Target: LAMA2; (-) strand; PAM type: YTN; PAM sequence: TTT
gccttgaaatcaaccagcct

SEQ ID NO: 243270 - DNA, 20 bp, Artificial Sequence
  Description of Artificial Sequence: Synthetic oligonucleotide
  Target: LAMA2; (-) strand; PAM type: YTN; PAM sequence: CTC
aagatttgccttgaaatcaa

SEQ ID NO: 243271 - DNA, 20 bp, Artificial Sequence
  Description of Artificial Sequence: Synthetic oligonucleotide
  Target: LAMA2; (-) strand; PAM type: YTN; PAM sequence: CTC
actcaagatttgccttgaaa

SEQ ID NO: 243272 - DNA, 20 bp, Artificial Sequence
  Description of Artificial Sequence: Synthetic oligonucleotide
  Target: LAMA2; (-) strand; PAM type: YTN; PAM sequence: CTC
tcactcaagatttgccttga

SEQ ID NO: 243273 - DNA, 20 bp, Artificial Sequence
  Description of Artificial Sequence: Synthetic oligonucleotide
  Target: LAMA2; (-) strand; PAM type: YTN; PAM sequence: TTC
cctctcactcaagatttgcc

SEQ ID NO: 243274 - DNA, 20 bp, Artificial Sequence
  Description of Artificial Sequence: Synthetic oligonucleotide
  Target: LAMA2; (-) strand; PAM type: YTN; PAM sequence: CTG
cagaatcccaaccagttccc

SEQ ID NO: 243275 - DNA, 20 bp, Artificial Sequence
  Description of Artificial Sequence: Synthetic oligonucleotide
  Target: LAMA2; (-) strand; PAM type: YTN; PAM sequence: TTA
tataataaaccctgcagaat

SEQ ID NO: 243276 - DNA, 20 bp, Artificial Sequence
  Description of Artificial Sequence: Synthetic oligonucleotide
  Target: LAMA2; (-) strand; PAM type: YTN; PAM sequence: CTA
ttatataataaaccctgcag

SEQ ID NO: 243277 - DNA, 20 bp, Artificial Sequence
  Description of Artificial Sequence: Synthetic oligonucleotide
  Target: LAMA2; (-) strand; PAM type: YTN; PAM sequence: CTG
gtgacaaatccaaaactatt

SEQ ID NO: 243278 - DNA, 20 bp, Artificial Sequence
  Description of Artificial Sequence: Synthetic oligonucleotide
  Target: LAMA2; (-) strand; PAM type: YTN; PAM sequence: CTC
tggtgacaaatccaaaacta

SEQ ID NO: 243279 - DNA, 20 bp, Artificial Sequence
  Description of Artificial Sequence: Synthetic oligonucleotide
  Target: LAMA2; (-) strand; PAM type: YTN; PAM sequence: TTC
actctggtgacaaatccaaa

SEQ ID NO: 243280 - DNA, 20 bp, Artificial Sequence
  Description of Artificial Sequence: Synthetic oligonucleotide
  Target: LAMA2; (-) strand; PAM type: YTN; PAM sequence: TTG
ttcactctggtgacaaatcc

SEQ ID NO: 243281 - DNA, 20 bp, Artificial Sequence
  Description of Artificial Sequence: Synthetic oligonucleotide
  Target: LAMA2; (-) strand; PAM type: YTN; PAM sequence: TTT
gttcactctggtgacaaatc

SEQ ID NO: 243282 - DNA, 20 bp, Artificial Sequence
  Description of Artificial Sequence: Synthetic oligonucleotide
  Target: LAMA2; (-) strand; PAM type: YTN; PAM sequence: TTC
aatgtttgttcactctggtg

SEQ ID NO: 243283 - DNA, 20 bp, Artificial Sequence
  Description of Artificial Sequence: Synthetic oligonucleotide
  Target: LAMA2; (-) strand; PAM type: YTN; PAM sequence: CTT
caatgtttgttcactctggt

SEQ ID NO: 243284 - DNA, 20 bp, Artificial Sequence
  Description of Artificial Sequence: Synthetic oligonucleotide
  Target: LAMA2; (-) strand; PAM type: YTN; PAM sequence: TTC
ttcaatgtttgttcactctg

SEQ ID NO: 243285 - DNA, 20 bp, Artificial Sequence
  Description of Artificial Sequence: Synthetic oligonucleotide
  Target: LAMA2; (-) strand; PAM type: YTN; PAM sequence: CTC
ataacatgttcttcaatgtt

SEQ ID NO: 243286 - DNA, 20 bp, Artificial Sequence
  Description of Artificial Sequence: Synthetic oligonucleotide
  Target: LAMA2; (-) strand; PAM type: YTN; PAM sequence: TTA
tagactcataacatgttctt

SEQ ID NO: 243287 - DNA, 20 bp, Artificial Sequence
  Description of Artificial Sequence: Synthetic oligonucleotide
  Target: LAMA2; (-) strand; PAM type: YTN; PAM sequence: CTT
atagactcataacatgttct

SEQ ID NO: 243288 - DNA, 20 bp, Artificial Sequence
  Description of Artificial Sequence: Synthetic oligonucleotide
  Target: LAMA2; (-) strand; PAM type: YTN; PAM sequence: TTC
cttatagactcataacatgt

SEQ ID NO: 243289 - DNA, 20 bp, Artificial Sequence
  Description of Artificial Sequence: Synthetic oligonucleotide
  Target: LAMA2; (-) strand; PAM type: YTN; PAM sequence: CTT
ccttatagactcataacatg

SEQ ID NO: 243290 - DNA, 20 bp, Artificial Sequence
  Description of Artificial Sequence: Synthetic oligonucleotide
  Target: LAMA2; (-) strand; PAM type: YTN; PAM sequence: CTA
acttccttatagactcataa

SEQ ID NO: 243291 - DNA, 20 bp, Artificial Sequence
  Description of Artificial Sequence: Synthetic oligonucleotide
  Target: LAMA2; (-) strand; PAM type: YTN; PAM sequence: CTA
agctaacttccttatagact

SEQ ID NO: 243292 - DNA, 20 bp, Artificial Sequence
  Description of Artificial Sequence: Synthetic oligonucleotide
  Target: LAMA2; (-) strand; PAM type: YTN; PAM sequence: CTG
tgatccatctaagctaactt

SEQ ID NO: 243293 - DNA, 20 bp, Artificial Sequence
  Description of Artificial Sequence: Synthetic oligonucleotide
  Target: LAMA2; (-) strand; PAM type: YTN; PAM sequence: CTC
tgtgatccatctaagctaac

SEQ ID NO: 243294 - DNA, 20 bp, Artificial Sequence
  Description of Artificial Sequence: Synthetic oligonucleotide
  Target: LAMA2; (-) strand; PAM type: YTN; PAM sequence: CTG
ctctgtgatccatctaagct

SEQ ID NO: 243295 - DNA, 20 bp, Artificial Sequence
  Description of Artificial Sequence: Synthetic oligonucleotide
  Target: LAMA2; (-) strand; PAM type: YTN; PAM sequence: TTG
tctgctctgtgatccatcta

SEQ ID NO: 243296 - DNA, 20 bp, Artificial Sequence
  Description of Artificial Sequence: Synthetic oligonucleotide
  Target: LAMA2; (-) strand; PAM type: YTN; PAM sequence: CTT
gtctgctctgtgatccatct

SEQ ID NO: 243297 - DNA, 20 bp, Artificial Sequence
  Description of Artificial Sequence: Synthetic oligonucleotide
  Target: LAMA2; (-) strand; PAM type: YTN; PAM sequence: CTC
caagaaaaccttgtctgctc

SEQ ID NO: 243298 - DNA, 20 bp, Artificial Sequence
  Description of Artificial Sequence: Synthetic oligonucleotide
  Target: LAMA2; (-) strand; PAM type: YTN; PAM sequence: CTG
tgagcaatctccaagaaaac

SEQ ID NO: 243299 - DNA, 20 bp, Artificial Sequence
  Description of Artificial Sequence: Synthetic oligonucleotide
  Target: LAMA2; (-) strand; PAM type: YTN; PAM sequence: TTA
agaatgctgtgagcaatctc

SEQ ID NO: 243300 - DNA, 20 bp, Artificial Sequence
  Description of Artificial Sequence: Synthetic oligonucleotide
  Target: LAMA2; (-) strand; PAM type: YTN; PAM sequence: TTT
aagaatgctgtgagcaatct

SEQ ID NO: 243301 - DNA, 20 bp, Artificial Sequence
  Description of Artificial Sequence: Synthetic oligonucleotide
  Target: LAMA2; (-) strand; PAM type: YTN; PAM sequence: TTT
taagaatgctgtgagcaatc

SEQ ID NO: 243302 - DNA, 20 bp, Artificial Sequence
  Description of Artificial Sequence: Synthetic oligonucleotide
  Target: LAMA2; (-) strand; PAM type: YTN; PAM sequence: CTA
ttttaagaatgctgtgagca

SEQ ID NO: 243303 - DNA, 20 bp, Artificial Sequence
  Description of Artificial Sequence: Synthetic oligonucleotide
  Target: LAMA2; (-) strand; PAM type: YTN; PAM sequence: CTG
ggagtaagaaaaatgtccac

SEQ ID NO: 243304 - DNA, 20 bp, Artificial Sequence
  Description of Artificial Sequence: Synthetic oligonucleotide
  Target: LAMA2; (-) strand; PAM type: YTN; PAM sequence: CTA
aataatgctgggagtaagaa

SEQ ID NO: 243305 - DNA, 20 bp, Artificial Sequence
  Description of Artificial Sequence: Synthetic oligonucleotide
  Target: LAMA2; (-) strand; PAM type: YTN; PAM sequence: CTG
tgctaaataatgctgggagt

SEQ ID NO: 243306 - DNA, 20 bp, Artificial Sequence
  Description of Artificial Sequence: Synthetic oligonucleotide
  Target: LAMA2; (-) strand; PAM type: YTN; PAM sequence: TTC
ctgtgctaaataatgctggg

SEQ ID NO: 243307 - DNA, 20 bp, Artificial Sequence
  Description of Artificial Sequence: Synthetic oligonucleotide
  Target: LAMA2; (-) strand; PAM type: YTN; PAM sequence: TTT
cctgtgctaaataatgctgg

SEQ ID NO: 243308 - DNA, 20 bp, Artificial Sequence
  Description of Artificial Sequence: Synthetic oligonucleotide
  Target: LAMA2; (-) strand; PAM type: YTN; PAM sequence: CTT
tcctgtgctaaataatgctg

SEQ ID NO: 243309 - DNA, 20 bp, Artificial Sequence
  Description of Artificial Sequence: Synthetic oligonucleotide
  Target: LAMA2; (-) strand; PAM type: YTN; PAM sequence: TTC
ctttcctgtgctaaataatg

SEQ ID NO: 243310 - DNA, 20 bp, Artificial Sequence
  Description of Artificial Sequence: Synthetic oligonucleotide
  Target: LAMA2; (-) strand; PAM type: YTN; PAM sequence: TTT
cctttcctgtgctaaataat

SEQ ID NO: 243311 - DNA, 20 bp, Artificial Sequence
  Description of Artificial Sequence: Synthetic oligonucleotide
  Target: LAMA2; (-) strand; PAM type: YTN; PAM sequence: CTA
acacaatttcctttcctgtg

SEQ ID NO: 243312 - DNA, 20 bp, Artificial Sequence
  Description of Artificial Sequence: Synthetic oligonucleotide
  Target: LAMA2; (-) strand; PAM type: YTN; PAM sequence: CTA
acgctaacacaatttccttt

SEQ ID NO: 243313 - DNA, 20 bp, Artificial Sequence
  Description of Artificial Sequence: Synthetic oligonucleotide
  Target: LAMA2; (-) strand; PAM type: YTN; PAM sequence: TTC
taacgctaacacaatttcct

SEQ ID NO: 243314 - DNA, 20 bp, Artificial Sequence
  Description of Artificial Sequence: Synthetic oligonucleotide
  Target: LAMA2; (-) strand; PAM type: YTN; PAM sequence: CTT
ctaacgctaacacaatttcc

SEQ ID NO: 243315 - DNA, 20 bp, Artificial Sequence
  Description of Artificial Sequence: Synthetic oligonucleotide
  Target: LAMA2; (-) strand; PAM type: YTN; PAM sequence: TTC
ttctaacgctaacacaattt

SEQ ID NO: 243316 - DNA, 20 bp, Artificial Sequence
  Description of Artificial Sequence: Synthetic oligonucleotide
  Target: LAMA2; (-) strand; PAM type: YTN; PAM sequence: TTT
cttctaacgctaacacaatt

SEQ ID NO: 243317 - DNA, 20 bp, Artificial Sequence
  Description of Artificial Sequence: Synthetic oligonucleotide
  Target: LAMA2; (-) strand; PAM type: YTN; PAM sequence: CTA
aagcaaacacaatttcttct

SEQ ID NO: 243318 - DNA, 20 bp, Artificial Sequence
  Description of Artificial Sequence: Synthetic oligonucleotide
  Target: LAMA2; (-) strand; PAM type: YTN; PAM sequence: CTG
taagaactaaagcaaacaca

SEQ ID NO: 243319 - DNA, 20 bp, Artificial Sequence
  Description of Artificial Sequence: Synthetic oligonucleotide
  Target: LAMA2; (-) strand; PAM type: YTN; PAM sequence: TTG
tctgtaagaactaaagcaaa

SEQ ID NO: 243320 - DNA, 20 bp, Artificial Sequence
  Description of Artificial Sequence: Synthetic oligonucleotide
  Target: LAMA2; (-) strand; PAM type: YTN; PAM sequence: TTA
agtaaatatattgtctgtaa

SEQ ID NO: 243321 - DNA, 20 bp, Artificial Sequence
  Description of Artificial Sequence: Synthetic oligonucleotide
  Target: LAMA2; (-) strand; PAM type: YTN; PAM sequence: TTA
agaaacagtgtcacagaaga

SEQ ID NO: 243322 - DNA, 20 bp, Artificial Sequence
  Description of Artificial Sequence: Synthetic oligonucleotide
  Target: LAMA2; (-) strand; PAM type: YTN; PAM sequence: TTA
tacattaagaaacagtgtca

SEQ ID NO: 243323 - DNA, 20 bp, Artificial Sequence
  Description of Artificial Sequence: Synthetic oligonucleotide
  Target: LAMA2; (-) strand; PAM type: YTN; PAM sequence: TTT
atacattaagaaacagtgtc

SEQ ID NO: 243324 - DNA, 20 bp, Artificial Sequence
  Description of Artificial Sequence: Synthetic oligonucleotide
  Target: LAMA2; (-) strand; PAM type: YTN; PAM sequence: TTT
tatacattaagaaacagtgt

SEQ ID NO: 243325 - DNA, 20 bp, Artificial Sequence
  Description of Artificial Sequence: Synthetic oligonucleotide
  Target: LAMA2; (-) strand; PAM type: YTN; PAM sequence: TTC
attttatacattaagaaaca

SEQ ID NO: 243326 - DNA, 20 bp, Artificial Sequence
  Description of Artificial Sequence: Synthetic oligonucleotide
  Target: LAMA2; (-) strand; PAM type: YTN; PAM sequence: TTT
cattttatacattaagaaac

SEQ ID NO: 243327 - DNA, 20 bp, Artificial Sequence
  Description of Artificial Sequence: Synthetic oligonucleotide
  Target: LAMA2; (-) strand; PAM type: YTN; PAM sequence: TTT
tcattttatacattaagaaa

SEQ ID NO: 243328 - DNA, 20 bp, Artificial Sequence
  Description of Artificial Sequence: Synthetic oligonucleotide
  Target: LAMA2; (-) strand; PAM type: YTN; PAM sequence: TTA
ttttcattttatacattaag

SEQ ID NO: 243329 - DNA, 20 bp, Artificial Sequence
  Description of Artificial Sequence: Synthetic oligonucleotide
  Target: LAMA2; (-) strand; PAM type: YTN; PAM sequence: TTC
atattattttcattttatac

SEQ ID NO: 243330 - DNA, 20 bp, Artificial Sequence
  Description of Artificial Sequence: Synthetic oligonucleotide
  Target: LAMA2; (-) strand; PAM type: YTN; PAM sequence: CTA
taaagtaggtattcatatta

SEQ ID NO: 243331 - DNA, 20 bp, Artificial Sequence
  Description of Artificial Sequence: Synthetic oligonucleotide
  Target: LAMA2; (-) strand; PAM type: YTN; PAM sequence: CTC
aaaataacactataaagtag

SEQ ID NO: 243332 - DNA, 20 bp, Artificial Sequence
  Description of Artificial Sequence: Synthetic oligonucleotide
  Target: LAMA2; (-) strand; PAM type: YTN; PAM sequence: TTA
accctcaaaataacactata

SEQ ID NO: 243333 - DNA, 20 bp, Artificial Sequence
  Description of Artificial Sequence: Synthetic oligonucleotide
  Target: LAMA2; (-) strand; PAM type: YTN; PAM sequence: TTT
aaccctcaaaataacactat

SEQ ID NO: 243334 - DNA, 20 bp, Artificial Sequence
  Description of Artificial Sequence: Synthetic oligonucleotide
  Target: LAMA2; (-) strand; PAM type: YTN; PAM sequence: CTC
atttaaccctcaaaataaca

SEQ ID NO: 243335 - DNA, 20 bp, Artificial Sequence
  Description of Artificial Sequence: Synthetic oligonucleotide
  Target: LAMA2; (-) strand; PAM type: YTN; PAM sequence: TTA
actcatttaaccctcaaaat

SEQ ID NO: 243336 - DNA, 20 bp, Artificial Sequence
  Description of Artificial Sequence: Synthetic oligonucleotide
  Target: LAMA2; (-) strand; PAM type: YTN; PAM sequence: CTG
catatgtgttaactcattta

SEQ ID NO: 243337 - DNA, 20 bp, Artificial Sequence
  Description of Artificial Sequence: Synthetic oligonucleotide
  Target: LAMA2; (-) strand; PAM type: YTN; PAM sequence: TTG
agtactgcatatgtgttaac

SEQ ID NO: 243338 - DNA, 20 bp, Artificial Sequence
  Description of Artificial Sequence: Synthetic oligonucleotide
  Target: LAMA2; (-) strand; PAM type: YTN; PAM sequence: CTT
gagtactgcatatgtgttaa

SEQ ID NO: 243339 - DNA, 20 bp, Artificial Sequence
  Description of Artificial Sequence: Synthetic oligonucleotide
  Target: LAMA2; (-) strand; PAM type: YTN; PAM sequence: TTC
agacaccatcttgagtactg

SEQ ID NO: 243340 - DNA, 20 bp, Artificial Sequence
  Description of Artificial Sequence: Synthetic oligonucleotide
  Target: LAMA2; (-) strand; PAM type: YTN; PAM sequence: TTT
cagacaccatcttgagtact

SEQ ID NO: 243341 - DNA, 20 bp, Artificial Sequence
  Description of Artificial Sequence: Synthetic oligonucleotide
  Target: LAMA2; (-) strand; PAM type: YTN; PAM sequence: TTT
tcagacaccatcttgagtac

SEQ ID NO: 243342 - DNA, 20 bp, Artificial Sequence
  Description of Artificial Sequence: Synthetic oligonucleotide
  Target: LAMA2; (-) strand; PAM type: YTN; PAM sequence: TTA
tcattttcagacaccatctt

SEQ ID NO: 243343 - DNA, 20 bp, Artificial Sequence
  Description of Artificial Sequence: Synthetic oligonucleotide
  Target: LAMA2; (-) strand; PAM type: YTN; PAM sequence: CTT
atcattttcagacaccatct

SEQ ID NO: 243344 - DNA, 20 bp, Artificial Sequence
  Description of Artificial Sequence: Synthetic oligonucleotide
  Target: LAMA2; (-) strand; PAM type: YTN; PAM sequence: CTA
ataccaaatgcttatcattt

SEQ ID NO: 243345 - DNA, 20 bp, Artificial Sequence
  Description of Artificial Sequence: Synthetic oligonucleotide
  Target: LAMA2; (-) strand; PAM type: YTN; PAM sequence: TTA
ataataatagctaataccaa

SEQ ID NO: 243346 - DNA, 20 bp, Artificial Sequence
  Description of Artificial Sequence: Synthetic oligonucleotide
  Target: LAMA2; (-) strand; PAM type: YTN; PAM sequence: TTG
gagttaataataatagctaa

SEQ ID NO: 243347 - DNA, 20 bp, Artificial Sequence
  Description of Artificial Sequence: Synthetic oligonucleotide
  Target: LAMA2; (-) strand; PAM type: YTN; PAM sequence: TTA
agcccagttggagttaataa

SEQ ID NO: 243348 - DNA, 20 bp, Artificial Sequence
  Description of Artificial Sequence: Synthetic oligonucleotide
  Target: LAMA2; (-) strand; PAM type: YTN; PAM sequence: CTC
aaattaagcccagttggagt

SEQ ID NO: 243349 - DNA, 20 bp, Artificial Sequence
  Description of Artificial Sequence: Synthetic oligonucleotide
  Target: LAMA2; (-) strand; PAM type: YTN; PAM sequence: CTG
acctcaaattaagcccagtt

SEQ ID NO: 243350 - DNA, 20 bp, Artificial Sequence
  Description of Artificial Sequence: Synthetic oligonucleotide
  Target: LAMA2; (-) strand; PAM type: YTN; PAM sequence: TTC
aacaaaataatgcctgacct

SEQ ID NO: 243351 - DNA, 20 bp, Artificial Sequence
  Description of Artificial Sequence: Synthetic oligonucleotide
  Target: LAMA2; (-) strand; PAM type: YTN; PAM sequence: TTT
caacaaaataatgcctgacc

SEQ ID NO: 243352 - DNA, 20 bp, Artificial Sequence
  Description of Artificial Sequence: Synthetic oligonucleotide
  Target: LAMA2; (-) strand; PAM type: YTN; PAM sequence: CTA
aaatttcaacaaaataatgc

SEQ ID NO: 243353 - DNA, 20 bp, Artificial Sequence
  Description of Artificial Sequence: Synthetic oligonucleotide
  Target: LAMA2; (-) strand; PAM type: YTN; PAM sequence: TTC
taaaatttcaacaaaataat

SEQ ID NO: 243354 - DNA, 20 bp, Artificial Sequence
  Description of Artificial Sequence: Synthetic oligonucleotide
  Target: LAMA2; (-) strand; PAM type: YTN; PAM sequence: TTT
ctaaaatttcaacaaaataa

SEQ ID NO: 243355 - DNA, 20 bp, Artificial Sequence
  Description of Artificial Sequence: Synthetic oligonucleotide
  Target: LAMA2; (-) strand; PAM type: YTN; PAM sequence: CTT
tctaaaatttcaacaaaata

SEQ ID NO: 243356 - DNA, 20 bp, Artificial Sequence
  Description of Artificial Sequence: Synthetic oligonucleotide
  Target: LAMA2; (-) strand; PAM type: YTN; PAM sequence: TTA
tgtgtgaggggagtctttct

SEQ ID NO: 243357 - DNA, 20 bp, Artificial Sequence
  Description of Artificial Sequence: Synthetic oligonucleotide
  Target: LAMA2; (-) strand; PAM type: YTN; PAM sequence: TTT
atgtgtgaggggagtctttc

SEQ ID NO: 243358 - DNA, 20 bp, Artificial Sequence
  Description of Artificial Sequence: Synthetic oligonucleotide
  Target: LAMA2; (-) strand; PAM type: YTN; PAM sequence: CTG
tttatgtgtgaggggagtct

SEQ ID NO: 243359 - DNA, 20 bp, Artificial Sequence
  Description of Artificial Sequence: Synthetic oligonucleotide
  Target: LAMA2; (-) strand; PAM type: YTN; PAM sequence: CTG
tctgtttatgtgtgagggga

SEQ ID NO: 243360 - DNA, 20 bp, Artificial Sequence
  Description of Artificial Sequence: Synthetic oligonucleotide
  Target: LAMA2; (-) strand; PAM type: YTN; PAM sequence: TTC
tgtctgtttatgtgtgaggg

SEQ ID NO: 243361 - DNA, 20 bp, Artificial Sequence
  Description of Artificial Sequence: Synthetic oligonucleotide
  Target: LAMA2; (-) strand; PAM type: YTN; PAM sequence: TTT
ctgtctgtttatgtgtgagg

SEQ ID NO: 243362 - DNA, 20 bp, Artificial Sequence
  Description of Artificial Sequence: Synthetic oligonucleotide
  Target: LAMA2; (-) strand; PAM type: YTN; PAM sequence: CTT
tctgtctgtttatgtgtgag

SEQ ID NO: 243363 - DNA, 20 bp, Artificial Sequence
  Description of Artificial Sequence: Synthetic oligonucleotide
  Target: LAMA2; (-) strand; PAM type: YTN; PAM sequence: CTC
tttctgtctgtttatgtgtg

SEQ ID NO: 243364 - DNA, 20 bp, Artificial Sequence
  Description of Artificial Sequence: Synthetic oligonucleotide
  Target: LAMA2; (-) strand; PAM type: YTN; PAM sequence: CTC
tctttctgtctgtttatgtg

SEQ ID NO: 243365 - DNA, 20 bp, Artificial Sequence
  Description of Artificial Sequence: Synthetic oligonucleotide
  Target: LAMA2; (-) strand; PAM type: YTN; PAM sequence: CTC
tctctttctgtctgtttatg

SEQ ID NO: 243366 - DNA, 20 bp, Artificial Sequence
  Description of Artificial Sequence: Synthetic oligonucleotide
  Target: LAMA2; (-) strand; PAM type: YTN; PAM sequence: CTC
tctctctttctgtctgttta

SEQ ID NO: 243367 - DNA, 20 bp, Artificial Sequence
  Description of Artificial Sequence: Synthetic oligonucleotide
  Target: LAMA2; (-) strand; PAM type: YTN; PAM sequence: TTC
ctctctctctttctgtctgt

SEQ ID NO: 243368 - DNA, 20 bp, Artificial Sequence
  Description of Artificial Sequence: Synthetic oligonucleotide
  Target: LAMA2; (-) strand; PAM type: YTN; PAM sequence: CTT
cctctctctctttctgtctg

SEQ ID NO: 243369 - DNA, 20 bp, Artificial Sequence
  Description of Artificial Sequence: Synthetic oligonucleotide
  Target: LAMA2; (-) strand; PAM type: YTN; PAM sequence: TTC
ttcctctctctctttctgtc

SEQ ID NO: 243370 - DNA, 20 bp, Artificial Sequence
  Description of Artificial Sequence: Synthetic oligonucleotide
  Target: LAMA2; (-) strand; PAM type: YTN; PAM sequence: TTT
cttcctctctctctttctgt

SEQ ID NO: 243371 - DNA, 20 bp, Artificial Sequence
  Description of Artificial Sequence: Synthetic oligonucleotide
  Target: LAMA2; (-) strand; PAM type: YTN; PAM sequence: CTT
tcttcctctctctctttctg

SEQ ID NO: 243372 - DNA, 20 bp, Artificial Sequence
  Description of Artificial Sequence: Synthetic oligonucleotide
  Target: LAMA2; (-) strand; PAM type: YTN; PAM sequence: TTC
tttcttcctctctctctttc

SEQ ID NO: 243373 - DNA, 20 bp, Artificial Sequence
  Description of Artificial Sequence: Synthetic oligonucleotide
  Target: LAMA2; (-) strand; PAM type: YTN; PAM sequence: CTT
ctttcttcctctctctcttt

SEQ ID NO: 243374 - DNA, 20 bp, Artificial Sequence
  Description of Artificial Sequence: Synthetic oligonucleotide
  Target: LAMA2; (-) strand; PAM type: YTN; PAM sequence: TTC
ttctttcttcctctctctct

SEQ ID NO: 243375 - DNA, 20 bp, Artificial Sequence
  Description of Artificial Sequence: Synthetic oligonucleotide
  Target: LAMA2; (-) strand; PAM type: YTN; PAM sequence: TTT
cttctttcttcctctctctc

SEQ ID NO: 243376 - DNA, 20 bp, Artificial Sequence
  Description of Artificial Sequence: Synthetic oligonucleotide
  Target: LAMA2; (-) strand; PAM type: YTN; PAM sequence: TTT
tcttctttcttcctctctct

SEQ ID NO: 243377 - DNA, 20 bp, Artificial Sequence
  Description of Artificial Sequence: Synthetic oligonucleotide
  Target: LAMA2; (-) strand; PAM type: YTN; PAM sequence: CTT
ttcttctttcttcctctctc

SEQ ID NO: 243378 - DNA, 20 bp, Artificial Sequence
  Description of Artificial Sequence: Synthetic oligonucleotide
  Target: LAMA2; (-) strand; PAM type: YTN; PAM sequence: CTC
ttttcttctttcttcctctc

SEQ ID NO: 243379 - DNA, 20 bp, Artificial Sequence
  Description of Artificial Sequence: Synthetic oligonucleotide
  Target: LAMA2; (-) strand; PAM type: YTN; PAM sequence: CTC
tcttttcttctttcttcctc

SEQ ID NO: 243380 - DNA, 20 bp, Artificial Sequence
  Description of Artificial Sequence: Synthetic oligonucleotide
  Target: LAMA2; (-) strand; PAM type: YTN; PAM sequence: CTC
tctcttttcttctttcttcc

SEQ ID NO: 243381 - DNA, 20 bp, Artificial Sequence
  Description of Artificial Sequence: Synthetic oligonucleotide
  Target: LAMA2; (-) strand; PAM type: YTN; PAM sequence: CTA
tctctctcttttcttctttc

SEQ ID NO: 243382 - DNA, 20 bp, Artificial Sequence
  Description of Artificial Sequence: Synthetic oligonucleotide
  Target: LAMA2; (-) strand; PAM type: YTN; PAM sequence: CTC
tatctctctcttttcttctt

SEQ ID NO: 243383 - DNA, 20 bp, Artificial Sequence
  Description of Artificial Sequence: Synthetic oligonucleotide
  Target: LAMA2; (-) strand; PAM type: YTN; PAM sequence: CTC
tctatctctctcttttcttc

SEQ ID NO: 243384 - DNA, 20 bp, Artificial Sequence
  Description of Artificial Sequence: Synthetic oligonucleotide
  Target: LAMA2; (-) strand; PAM type: YTN; PAM sequence: CTC
tctctatctctctcttttct

SEQ ID NO: 243385 - DNA, 20 bp, Artificial Sequence
  Description of Artificial Sequence: Synthetic oligonucleotide
  Target: LAMA2; (-) strand; PAM type: YTN; PAM sequence: CTG
cctctctctatctctctctt

SEQ ID NO: 243386 - DNA, 20 bp, Artificial Sequence
  Description of Artificial Sequence: Synthetic oligonucleotide
  Target: LAMA2; (-) strand; PAM type: YTN; PAM sequence: TTC
tgcctctctctatctctctc

SEQ ID NO: 243387 - DNA, 20 bp, Artificial Sequence
  Description of Artificial Sequence: Synthetic oligonucleotide
  Target: LAMA2; (-) strand; PAM type: YTN; PAM sequence: TTT
ctgcctctctctatctctct

SEQ ID NO: 243388 - DNA, 20 bp, Artificial Sequence
  Description of Artificial Sequence: Synthetic oligonucleotide
  Target: LAMA2; (-) strand; PAM type: YTN; PAM sequence: CTT
tctgcctctctctatctctc

SEQ ID NO: 243389 - DNA, 20 bp, Artificial Sequence
  Description of Artificial Sequence: Synthetic oligonucleotide
  Target: LAMA2; (-) strand; PAM type: YTN; PAM sequence: CTC
tttctgcctctctctatctc

SEQ ID NO: 243390 - DNA, 20 bp, Artificial Sequence
  Description of Artificial Sequence: Synthetic oligonucleotide
  Target: LAMA2; (-) strand; PAM type: YTN; PAM sequence: TTC
tctttctgcctctctctatc

SEQ ID NO: 243391 - DNA, 20 bp, Artificial Sequence
  Description of Artificial Sequence: Synthetic oligonucleotide
  Target: LAMA2; (-) strand; PAM type: YTN; PAM sequence: TTT
ctctttctgcctctctctat

SEQ ID NO: 243392 - DNA, 20 bp, Artificial Sequence
  Description of Artificial Sequence: Synthetic oligonucleotide
  Target: LAMA2; (-) strand; PAM type: YTN; PAM sequence: TTT
tctctttctgcctctctcta

SEQ ID NO: 243393 - DNA, 20 bp, Artificial Sequence
  Description of Artificial Sequence: Synthetic oligonucleotide
  Target: LAMA2; (-) strand; PAM type: YTN; PAM sequence: TTT
ttctctttctgcctctctct

SEQ ID NO: 243394 - DNA, 20 bp, Artificial Sequence
  Description of Artificial Sequence: Synthetic oligonucleotide
  Target: LAMA2; (-) strand; PAM type: YTN; PAM sequence: CTT
tttctctttctgcctctctc

SEQ ID NO: 243395 - DNA, 20 bp, Artificial Sequence
  Description of Artificial Sequence: Synthetic oligonucleotide
  Target: LAMA2; (-) strand; PAM type: YTN; PAM sequence: TTC
tttttctctttctgcctctc

SEQ ID NO: 243396 - DNA, 20 bp, Artificial Sequence
  Description of Artificial Sequence: Synthetic oligonucleotide
  Target: LAMA2; (-) strand; PAM type: YTN; PAM sequence: TTT
ctttttctctttctgcctct

SEQ ID NO: 243397 - DNA, 20 bp, Artificial Sequence
  Description of Artificial Sequence: Synthetic oligonucleotide
  Target: LAMA2; (-) strand; PAM type: YTN; PAM sequence: CTT
tctttttctctttctgcctc

SEQ ID NO: 243398 - DNA, 20 bp, Artificial Sequence
  Description of Artificial Sequence: Synthetic oligonucleotide
  Target: LAMA2; (-) strand; PAM type: YTN; PAM sequence: TTC
tttctttttctctttctgcc

SEQ ID NO: 243399 - DNA, 20 bp, Artificial Sequence
  Description of Artificial Sequence: Synthetic oligonucleotide
  Target: LAMA2; (-) strand; PAM type: YTN; PAM sequence: TTT
ctttctttttctctttctgc

SEQ ID NO: 243400 - DNA, 20 bp, Artificial Sequence
  Description of Artificial Sequence: Synthetic oligonucleotide
  Target: LAMA2; (-) strand; PAM type: YTN; PAM sequence: CTT
tctttctttttctctttctg

SEQ ID NO: 243401 - DNA, 20 bp, Artificial Sequence
  Description of Artificial Sequence: Synthetic oligonucleotide
  Target: LAMA2; (-) strand; PAM type: YTN; PAM sequence: CTC
tttctttctttttctctttc

SEQ ID NO: 243402 - DNA, 20 bp, Artificial Sequence
  Description of Artificial Sequence: Synthetic oligonucleotide
  Target: LAMA2; (-) strand; PAM type: YTN; PAM sequence: CTC
tctttctttctttttctctt

SEQ ID NO: 243403 - DNA, 20 bp, Artificial Sequence
  Description of Artificial Sequence: Synthetic oligonucleotide
  Target: LAMA2; (-) strand; PAM type: YTN; PAM sequence: TTC
tctctttctttctttttctc

SEQ ID NO: 243404 - DNA, 20 bp, Artificial Sequence
  Description of Artificial Sequence: Synthetic oligonucleotide
  Target: LAMA2; (-) strand; PAM type: YTN; PAM sequence: TTT
ctctctttctttctttttct

SEQ ID NO: 243405 - DNA, 20 bp, Artificial Sequence
  Description of Artificial Sequence: Synthetic oligonucleotide
  Target: LAMA2; (-) strand; PAM type: YTN; PAM sequence: CTT
tctctctttctttctttttc

SEQ ID NO: 243406 - DNA, 20 bp, Artificial Sequence
  Description of Artificial Sequence: Synthetic oligonucleotide
  Target: LAMA2; (-) strand; PAM type: YTN; PAM sequence: TTC
tttctctctttctttctttt

SEQ ID NO: 243407 - DNA, 20 bp, Artificial Sequence
  Description of Artificial Sequence: Synthetic oligonucleotide
  Target: LAMA2; (-) strand; PAM type: YTN; PAM sequence: TTT
ctttctctctttctttcttt

SEQ ID NO: 243408 - DNA, 20 bp, Artificial Sequence
  Description of Artificial Sequence: Synthetic oligonucleotide
  Target: LAMA2; (-) strand; PAM type: YTN; PAM sequence: TTT
tctttctctctttctttctt

SEQ ID NO: 243409 - DNA, 20 bp, Artificial Sequence
  Description of Artificial Sequence: Synthetic oligonucleotide
  Target: LAMA2; (-) strand; PAM type: YTN; PAM sequence: CTT
ttctttctctctttctttct

SEQ ID NO: 243410 - DNA, 20 bp, Artificial Sequence
  Description of Artificial Sequence: Synthetic oligonucleotide
  Target: LAMA2; (-) strand; PAM type: YTN; PAM sequence: TTC
cttttctttctctctttctt

SEQ ID NO: 243411 - DNA, 20 bp, Artificial Sequence
  Description of Artificial Sequence: Synthetic oligonucleotide
  Target: LAMA2; (-) strand; PAM type: YTN; PAM sequence: CTT
ccttttctttctctctttct

SEQ ID NO: 243412 - DNA, 20 bp, Artificial Sequence
  Description of Artificial Sequence: Synthetic oligonucleotide
  Target: LAMA2; (-) strand; PAM type: YTN; PAM sequence: CTC
ttccttttctttctctcttt

SEQ ID NO: 243413 - DNA, 20 bp, Artificial Sequence
  Description of Artificial Sequence: Synthetic oligonucleotide
  Target: LAMA2; (-) strand; PAM type: YTN; PAM sequence: TTC
tcttccttttctttctctct

SEQ ID NO: 243414 - DNA, 20 bp, Artificial Sequence
  Description of Artificial Sequence: Synthetic oligonucleotide
  Target: LAMA2; (-) strand; PAM type: YTN; PAM sequence: TTT
ctcttccttttctttctctc

SEQ ID NO: 243415 - DNA, 20 bp, Artificial Sequence
  Description of Artificial Sequence: Synthetic oligonucleotide
  Target: LAMA2; (-) strand; PAM type: YTN; PAM sequence: CTT
tctcttccttttctttctct

SEQ ID NO: 243416 - DNA, 20 bp, Artificial Sequence
  Description of Artificial Sequence: Synthetic oligonucleotide
  Target: LAMA2; (-) strand; PAM type: YTN; PAM sequence: TTC
tttctcttccttttctttct

SEQ ID NO: 243417 - DNA, 20 bp, Artificial Sequence
  Description of Artificial Sequence: Synthetic oligonucleotide
  Target: LAMA2; (-) strand; PAM type: YTN; PAM sequence: TTT
ctttctcttccttttctttc

SEQ ID NO: 243418 - DNA, 20 bp, Artificial Sequence
  Description of Artificial Sequence: Synthetic oligonucleotide
  Target: LAMA2; (-) strand; PAM type: YTN; PAM sequence: CTT
tctttctcttccttttcttt

SEQ ID NO: 243419 - DNA, 20 bp, Artificial Sequence
  Description of Artificial Sequence: Synthetic oligonucleotide
  Target: LAMA2; (-) strand; PAM type: YTN; PAM sequence: TTC
tttctttctcttccttttct

SEQ ID NO: 243420 - DNA, 20 bp, Artificial Sequence
  Description of Artificial Sequence: Synthetic oligonucleotide
  Target: LAMA2; (-) strand; PAM type: YTN; PAM sequence: TTT
ctttctttctcttccttttc

SEQ ID NO: 243421 - DNA, 20 bp, Artificial Sequence
  Description of Artificial Sequence: Synthetic oligonucleotide
  Target: LAMA2; (-) strand; PAM type: YTN; PAM sequence: CTT
tctttctttctcttcctttt

SEQ ID NO: 243422 - DNA, 20 bp, Artificial Sequence
  Description of Artificial Sequence: Synthetic oligonucleotide
  Target: LAMA2; (-) strand; PAM type: YTN; PAM sequence: CTC
tttctttctttctcttcctt

SEQ ID NO: 243423 - DNA, 20 bp, Artificial Sequence
  Description of Artificial Sequence: Synthetic oligonucleotide
  Target: LAMA2; (-) strand; PAM type: YTN; PAM sequence: TTC
tctttctttctttctcttcc

SEQ ID NO: 243424 - DNA, 20 bp, Artificial Sequence
  Description of Artificial Sequence: Synthetic oligonucleotide
  Target: LAMA2; (-) strand; PAM type: YTN; PAM sequence: TTT
ctctttctttctttctcttc

SEQ ID NO: 243425 - DNA, 20 bp, Artificial Sequence
  Description of Artificial Sequence: Synthetic oligonucleotide
  Target: LAMA2; (-) strand; PAM type: YTN; PAM sequence: CTT
tctctttctttctttctctt

SEQ ID NO: 243426 - DNA, 20 bp, Artificial Sequence
  Description of Artificial Sequence: Synthetic oligonucleotide
  Target: LAMA2; (-) strand; PAM type: YTN; PAM sequence: TTC
tttctctttctttctttctc

SEQ ID NO: 243427 - DNA, 20 bp, Artificial Sequence
  Description of Artificial Sequence: Synthetic oligonucleotide
  Target: LAMA2; (-) strand; PAM type: YTN; PAM sequence: TTT
ctttctctttctttctttct

SEQ ID NO: 243428 - DNA, 20 bp, Artificial Sequence
  Description of Artificial Sequence: Synthetic oligonucleotide
  Target: LAMA2; (-) strand; PAM type: YTN; PAM sequence: CTT
tctttctctttctttctttc

SEQ ID NO: 243429 - DNA, 20 bp, Artificial Sequence
  Description of Artificial Sequence: Synthetic oligonucleotide
  Target: LAMA2; (-) strand; PAM type: YTN; PAM sequence: CTC
tttctttctctttctttctt

SEQ ID NO: 243430 - DNA, 20 bp, Artificial Sequence
  Description of Artificial Sequence: Synthetic oligonucleotide
  Target: LAMA2; (-) strand; PAM type: YTN; PAM sequence: TTC
tctttctttctctttctttc

SEQ ID NO: 243431 - DNA, 20 bp, Artificial Sequence
  Description of Artificial Sequence: Synthetic oligonucleotide
  Target: LAMA2; (-) strand; PAM type: YTN; PAM sequence: TTT
ctctttctttctctttcttt

SEQ ID NO: 243432 - DNA, 20 bp, Artificial Sequence
  Description of Artificial Sequence: Synthetic oligonucleotide
  Target: LAMA2; (-) strand; PAM type: YTN; PAM sequence: CTT
tctctttctttctctttctt

SEQ ID NO: 243433 - DNA, 20 bp, Artificial Sequence
  Description of Artificial Sequence: Synthetic oligonucleotide
  Target: LAMA2; (-) strand; PAM type: YTN; PAM sequence: TTC
tttctctttctttctctttc

SEQ ID NO: 243434 - DNA, 20 bp, Artificial Sequence
  Description of Artificial Sequence: Synthetic oligonucleotide
  Target: LAMA2; (-) strand; PAM type: YTN; PAM sequence: TTT
ctttctctttctttctcttt

SEQ ID NO: 243435 - DNA, 20 bp, Artificial Sequence
  Description of Artificial Sequence: Synthetic oligonucleotide
  Target: LAMA2; (-) strand; PAM type: YTN; PAM sequence: CTT
tctttctctttctttctctt

SEQ ID NO: 243436 - DNA, 20 bp, Artificial Sequence
  Description of Artificial Sequence: Synthetic oligonucleotide
  Target: LAMA2; (-) strand; PAM type: YTN; PAM sequence: CTC
ctttctttctctttctttct

SEQ ID NO: 243437 - DNA, 20 bp, Artificial Sequence
  Description of Artificial Sequence: Synthetic oligonucleotide
  Target: LAMA2; (-) strand; PAM type: YTN; PAM sequence: TTC
ctcctttctttctctttctt

SEQ ID NO: 243438 - DNA, 20 bp, Artificial Sequence
  Description of Artificial Sequence: Synthetic oligonucleotide
  Target: LAMA2; (-) strand; PAM type: YTN; PAM sequence: CTT
cctcctttctttctctttct

SEQ ID NO: 243439 - DNA, 20 bp, Artificial Sequence
  Description of Artificial Sequence: Synthetic oligonucleotide
  Target: LAMA2; (-) strand; PAM type: YTN; PAM sequence: TTC
cttcctcctttctttctctt

SEQ ID NO: 243440 - DNA, 20 bp, Artificial Sequence
  Description of Artificial Sequence: Synthetic oligonucleotide
  Target: LAMA2; (-) strand; PAM type: YTN; PAM sequence: TTT
ccttcctcctttctttctct

SEQ ID NO: 243441 - DNA, 20 bp, Artificial Sequence
  Description of Artificial Sequence: Synthetic oligonucleotide
  Target: LAMA2; (-) strand; PAM type: YTN; PAM sequence: CTT
tccttcctcctttctttctc

SEQ ID NO: 243442 - DNA, 20 bp, Artificial Sequence
  Description of Artificial Sequence: Synthetic oligonucleotide
  Target: LAMA2; (-) strand; PAM type: YTN; PAM sequence: TTC
tttccttcctcctttctttc

SEQ ID NO: 243443 - DNA, 20 bp, Artificial Sequence
  Description of Artificial Sequence: Synthetic oligonucleotide
  Target: LAMA2; (-) strand; PAM type: YTN; PAM sequence: CTT
ctttccttcctcctttcttt

SEQ ID NO: 243444 - DNA, 20 bp, Artificial Sequence
  Description of Artificial Sequence: Synthetic oligonucleotide
  Target: LAMA2; (-) strand; PAM type: YTN; PAM sequence: CTC
ttctttccttcctcctttct

SEQ ID NO: 243445 - DNA, 20 bp, Artificial Sequence
  Description of Artificial Sequence: Synthetic oligonucleotide
  Target: LAMA2; (-) strand; PAM type: YTN; PAM sequence: CTC
tcttctttccttcctccttt

SEQ ID NO: 243446 - DNA, 20 bp, Artificial Sequence
  Description of Artificial Sequence: Synthetic oligonucleotide
  Target: LAMA2; (-) strand; PAM type: YTN; PAM sequence: CTC
cctctcttctttccttcctc

SEQ ID NO: 243447 - DNA, 20 bp, Artificial Sequence
  Description of Artificial Sequence: Synthetic oligonucleotide
  Target: LAMA2; (-) strand; PAM type: YTN; PAM sequence: TTC
tccctctcttctttccttcc

SEQ ID NO: 243448 - DNA, 20 bp, Artificial Sequence
  Description of Artificial Sequence: Synthetic oligonucleotide
  Target: LAMA2; (-) strand; PAM type: YTN; PAM sequence: TTT
ctccctctcttctttccttc

SEQ ID NO: 243449 - DNA, 20 bp, Artificial Sequence
  Description of Artificial Sequence: Synthetic oligonucleotide
  Target: LAMA2; (-) strand; PAM type: YTN; PAM sequence: CTT
tctccctctcttctttcctt

SEQ ID NO: 243450 - DNA, 20 bp, Artificial Sequence
  Description of Artificial Sequence: Synthetic oligonucleotide
  Target: LAMA2; (-) strand; PAM type: YTN; PAM sequence: TTC
tttctccctctcttctttcc

SEQ ID NO: 243451 - DNA, 20 bp, Artificial Sequence
  Description of Artificial Sequence: Synthetic oligonucleotide
  Target: LAMA2; (-) strand; PAM type: YTN; PAM sequence: TTC
cattctttctccctctcttc

SEQ ID NO: 243452 - DNA, 20 bp, Artificial Sequence
  Description of Artificial Sequence: Synthetic oligonucleotide
  Target: LAMA2; (-) strand; PAM type: YTN; PAM sequence: CTT
ccattctttctccctctctt

SEQ ID NO: 243453 - DNA, 20 bp, Artificial Sequence
  Description of Artificial Sequence: Synthetic oligonucleotide
  Target: LAMA2; (-) strand; PAM type: YTN; PAM sequence: TTC
ttccattctttctccctctc

SEQ ID NO: 243454 - DNA, 20 bp, Artificial Sequence
  Description of Artificial Sequence: Synthetic oligonucleotide
  Target: LAMA2; (-) strand; PAM type: YTN; PAM sequence: TTT
cttccattctttctccctct

SEQ ID NO: 243455 - DNA, 20 bp, Artificial Sequence
  Description of Artificial Sequence: Synthetic oligonucleotide
  Target: LAMA2; (-) strand; PAM type: YTN; PAM sequence: CTT
tcttccattctttctccctc

SEQ ID NO: 243456 - DNA, 20 bp, Artificial Sequence
  Description of Artificial Sequence: Synthetic oligonucleotide
  Target: LAMA2; (-) strand; PAM type: YTN; PAM sequence: TTC
tttcttccattctttctccc

SEQ ID NO: 243457 - DNA, 20 bp, Artificial Sequence
  Description of Artificial Sequence: Synthetic oligonucleotide
  Target: LAMA2; (-) strand; PAM type: YTN; PAM sequence: TTT
ctttcttccattctttctcc

SEQ ID NO: 243458 - DNA, 20 bp, Artificial Sequence
  Description of Artificial Sequence: Synthetic oligonucleotide
  Target: LAMA2; (-) strand; PAM type: YTN; PAM sequence: CTT
tctttcttccattctttctc

SEQ ID NO: 243459 - DNA, 20 bp, Artificial Sequence
  Description of Artificial Sequence: Synthetic oligonucleotide
  Target: LAMA2; (-) strand; PAM type: YTN; PAM sequence: TTC
tttctttcttccattctttc

SEQ ID NO: 243460 - DNA, 20 bp, Artificial Sequence
  Description of Artificial Sequence: Synthetic oligonucleotide
  Target: LAMA2; (-) strand; PAM type: YTN; PAM sequence: TTT
ctttctttcttccattcttt

SEQ ID NO: 243461 - DNA, 20 bp, Artificial Sequence
  Description of Artificial Sequence: Synthetic oligonucleotide
  Target: LAMA2; (-) strand; PAM type: YTN; PAM sequence: CTT
tctttctttcttccattctt

SEQ ID NO: 243462 - DNA, 20 bp, Artificial Sequence
  Description of Artificial Sequence: Synthetic oligonucleotide
  Target: LAMA2; (-) strand; PAM type: YTN; PAM sequence: TTC
tttctttctttcttccattc

SEQ ID NO: 243463 - DNA, 20 bp, Artificial Sequence
  Description of Artificial Sequence: Synthetic oligonucleotide
  Target: LAMA2; (-) strand; PAM type: YTN; PAM sequence: CTT
ctttctttctttcttccatt

SEQ ID NO: 243464 - DNA, 20 bp, Artificial Sequence
  Description of Artificial Sequence: Synthetic oligonucleotide
  Target: LAMA2; (-) strand; PAM type: YTN; PAM sequence: TTC
ttctttctttctttcttcca

SEQ ID NO: 243465 - DNA, 20 bp, Artificial Sequence
  Description of Artificial Sequence: Synthetic oligonucleotide
  Target: LAMA2; (-) strand; PAM type: YTN; PAM sequence: TTT
cttctttctttctttcttcc

SEQ ID NO: 243466 - DNA, 20 bp, Artificial Sequence
  Description of Artificial Sequence: Synthetic oligonucleotide
  Target: LAMA2; (-) strand; PAM type: YTN; PAM sequence: CTT
tcttctttctttctttcttc

SEQ ID NO: 243467 - DNA, 20 bp, Artificial Sequence
  Description of Artificial Sequence: Synthetic oligonucleotide
  Target: LAMA2; (-) strand; PAM type: YTN; PAM sequence: TTC
tttcttctttctttctttct

SEQ ID NO: 243468 - DNA, 20 bp, Artificial Sequence
  Description of Artificial Sequence: Synthetic oligonucleotide
  Target: LAMA2; (-) strand; PAM type: YTN; PAM sequence: TTT
ctttcttctttctttctttc

SEQ ID NO: 243469 - DNA, 20 bp, Artificial Sequence
  Description of Artificial Sequence: Synthetic oligonucleotide
  Target: LAMA2; (-) strand; PAM type: YTN; PAM sequence: CTT
tctttcttctttctttcttt

SEQ ID NO: 243470 - DNA, 20 bp, Artificial Sequence
  Description of Artificial Sequence: Synthetic oligonucleotide
  Target: LAMA2; (-) strand; PAM type: YTN; PAM sequence: TTC
tttctttcttctttctttct

SEQ ID NO: 243471 - DNA, 20 bp, Artificial Sequence
  Description of Artificial Sequence: Synthetic oligonucleotide
  Target: LAMA2; (-) strand; PAM type: YTN; PAM sequence: CTT
ctttctttcttctttctttc

SEQ ID NO: 243472 - DNA, 20 bp, Artificial Sequence
  Description of Artificial Sequence: Synthetic oligonucleotide
  Target: LAMA2; (-) strand; PAM type: YTN; PAM sequence: TTC
cttctttctttcttctttct

SEQ ID NO: 243473 - DNA, 20 bp, Artificial Sequence
  Description of Artificial Sequence: Synthetic oligonucleotide
  Target: LAMA2; (-) strand; PAM type: YTN; PAM sequence: CTT
ccttctttctttcttctttc

SEQ ID NO: 243474 - DNA, 20 bp, Artificial Sequence
  Description of Artificial Sequence: Synthetic oligonucleotide
  Target: LAMA2; (-) strand; PAM type: YTN; PAM sequence: TTC
cttccttctttctttcttct

SEQ ID NO: 243475 - DNA, 20 bp, Artificial Sequence
  Description of Artificial Sequence: Synthetic oligonucleotide
  Target: LAMA2; (-) strand; PAM type: YTN; PAM sequence: CTT
ccttccttctttctttcttc

SEQ ID NO: 243476 - DNA, 20 bp, Artificial Sequence
  Description of Artificial Sequence: Synthetic oligonucleotide
  Target: LAMA2; (-) strand; PAM type: YTN; PAM sequence: CTC
ttccttccttctttctttct

SEQ ID NO: 243477 - DNA, 20 bp, Artificial Sequence
  Description of Artificial Sequence: Synthetic oligonucleotide
  Target: LAMA2; (-) strand; PAM type: YTN; PAM sequence: CTC
tcttccttccttctttcttt

SEQ ID NO: 243478 - DNA, 20 bp, Artificial Sequence
  Description of Artificial Sequence: Synthetic oligonucleotide
  Target: LAMA2; (-) strand; PAM type: YTN; PAM sequence: CTC
cctctcttccttccttcttt

SEQ ID NO: 243479 - DNA, 20 bp, Artificial Sequence
  Description of Artificial Sequence: Synthetic oligonucleotide
  Target: LAMA2; (-) strand; PAM type: YTN; PAM sequence: TTC
tccctctcttccttccttct

SEQ ID NO: 243480 - DNA, 20 bp, Artificial Sequence
  Description of Artificial Sequence: Synthetic oligonucleotide
  Target: LAMA2; (-) strand; PAM type: YTN; PAM sequence: TTT
ctccctctcttccttccttc

SEQ ID NO: 243481 - DNA, 20 bp, Artificial Sequence
  Description of Artificial Sequence: Synthetic oligonucleotide
  Target: LAMA2; (-) strand; PAM type: YTN; PAM sequence: CTT
tctccctctcttccttcctt

SEQ ID NO: 243482 - DNA, 20 bp, Artificial Sequence
  Description of Artificial Sequence: Synthetic oligonucleotide
  Target: LAMA2; (-) strand; PAM type: YTN; PAM sequence: TTC
tttctccctctcttccttcc

SEQ ID NO: 243483 - DNA, 20 bp, Artificial Sequence
  Description of Artificial Sequence: Synthetic oligonucleotide
  Target: LAMA2; (-) strand; PAM type: YTN; PAM sequence: TTT
ctttctccctctcttccttc

SEQ ID NO: 243484 - DNA, 20 bp, Artificial Sequence
  Description of Artificial Sequence: Synthetic oligonucleotide
  Target: LAMA2; (-) strand; PAM type: YTN; PAM sequence: CTT
tctttctccctctcttcctt

SEQ ID NO: 243485 - DNA, 20 bp, Artificial Sequence
  Description of Artificial Sequence: Synthetic oligonucleotide
  Target: LAMA2; (-) strand; PAM type: YTN; PAM sequence: CTC
tttctttctccctctcttcc

SEQ ID NO: 243486 - DNA, 20 bp, Artificial Sequence
  Description of Artificial Sequence: Synthetic oligonucleotide
  Target: LAMA2; (-) strand; PAM type: YTN; PAM sequence: TTC
tctttctttctccctctctt

SEQ ID NO: 243487 - DNA, 20 bp, Artificial Sequence
  Description of Artificial Sequence: Synthetic oligonucleotide
  Target: LAMA2; (-) strand; PAM type: YTN; PAM sequence: TTT
ctctttctttctccctctct

SEQ ID NO: 243488 - DNA, 20 bp, Artificial Sequence
  Description of Artificial Sequence: Synthetic oligonucleotide
  Target: LAMA2; (-) strand; PAM type: YTN; PAM sequence: CTT
tctctttctttctccctctc

SEQ ID NO: 243489 - DNA, 20 bp, Artificial Sequence
  Description of Artificial Sequence: Synthetic oligonucleotide
  Target: LAMA2; (-) strand; PAM type: YTN; PAM sequence: CTC
tttctctttctttctccctc

SEQ ID NO: 243490 - DNA, 20 bp, Artificial Sequence
  Description of Artificial Sequence: Synthetic oligonucleotide
  Target: LAMA2; (-) strand; PAM type: YTN; PAM sequence: TTC
tctttctctttctttctccc

SEQ ID NO: 243491 - DNA, 20 bp, Artificial Sequence
  Description of Artificial Sequence: Synthetic oligonucleotide
  Target: LAMA2; (-) strand; PAM type: YTN; PAM sequence: CTT
ctctttctctttctttctcc

SEQ ID NO: 243492 - DNA, 20 bp, Artificial Sequence
  Description of Artificial Sequence: Synthetic oligonucleotide
  Target: LAMA2; (-) strand; PAM type: YTN; PAM sequence: TTC
cttctctttctctttctttc

SEQ ID NO: 243493 - DNA, 20 bp, Artificial Sequence
  Description of Artificial Sequence: Synthetic oligonucleotide
  Target: LAMA2; (-) strand; PAM type: YTN; PAM sequence: TTT
ccttctctttctctttcttt

SEQ ID NO: 243494 - DNA, 20 bp, Artificial Sequence
  Description of Artificial Sequence: Synthetic oligonucleotide
  Target: LAMA2; (-) strand; PAM type: YTN; PAM sequence: CTT
tccttctctttctctttctt

SEQ ID NO: 243495 - DNA, 20 bp, Artificial Sequence
  Description of Artificial Sequence: Synthetic oligonucleotide
  Target: LAMA2; (-) strand; PAM type: YTN; PAM sequence: TTC
tttccttctctttctctttc

SEQ ID NO: 243496 - DNA, 20 bp, Artificial Sequence
  Description of Artificial Sequence: Synthetic oligonucleotide
  Target: LAMA2; (-) strand; PAM type: YTN; PAM sequence: TTT
ctttccttctctttctcttt

SEQ ID NO: 243497 - DNA, 20 bp, Artificial Sequence
  Description of Artificial Sequence: Synthetic oligonucleotide
  Target: LAMA2; (-) strand; PAM type: YTN; PAM sequence: CTT
tctttccttctctttctctt

SEQ ID NO: 243498 - DNA, 20 bp, Artificial Sequence
  Description of Artificial Sequence: Synthetic oligonucleotide
  Target: LAMA2; (-) strand; PAM type: YTN; PAM sequence: TTC
tttctttccttctctttctc

SEQ ID NO: 243499 - DNA, 20 bp, Artificial Sequence
  Description of Artificial Sequence: Synthetic oligonucleotide
  Target: LAMA2; (-) strand; PAM type: YTN; PAM sequence: TTT
ctttctttccttctctttct

SEQ ID NO: 243500 - DNA, 20 bp, Artificial Sequence
  Description of Artificial Sequence: Synthetic oligonucleotide
  Target: LAMA2; (-) strand; PAM type: YTN; PAM sequence: TTT
tctttctttccttctctttc

SEQ ID NO: 243501 - DNA, 20 bp, Artificial Sequence
  Description of Artificial Sequence: Synthetic oligonucleotide
  Target: LAMA2; (-) strand; PAM type: YTN; PAM sequence: TTT
ttctttctttccttctcttt

SEQ ID NO: 243502 - DNA, 20 bp, Artificial Sequence
  Description of Artificial Sequence: Synthetic oligonucleotide
  Target: LAMA2; (-) strand; PAM type: YTN; PAM sequence: CTT
tttctttctttccttctctt

SEQ ID NO: 243503 - DNA, 20 bp, Artificial Sequence
  Description of Artificial Sequence: Synthetic oligonucleotide
  Target: LAMA2; (-) strand; PAM type: YTN; PAM sequence: TTC
ctttttctttctttccttct

SEQ ID NO: 243504 - DNA, 20 bp, Artificial Sequence
  Description of Artificial Sequence: Synthetic oligonucleotide
  Target: LAMA2; (-) strand; PAM type: YTN; PAM sequence: CTT
cctttttctttctttccttc

SEQ ID NO: 243505 - DNA, 20 bp, Artificial Sequence
  Description of Artificial Sequence: Synthetic oligonucleotide
  Target: LAMA2; (-) strand; PAM type: YTN; PAM sequence: TTC
cttcctttttctttctttcc

SEQ ID NO: 243506 - DNA, 20 bp, Artificial Sequence
  Description of Artificial Sequence: Synthetic oligonucleotide
  Target: LAMA2; (-) strand; PAM type: YTN; PAM sequence: CTT
ccttcctttttctttctttc

SEQ ID NO: 243507 - DNA, 20 bp, Artificial Sequence
  Description of Artificial Sequence: Synthetic oligonucleotide
  Target: LAMA2; (-) strand; PAM type: YTN; PAM sequence: TTC
cttccttcctttttctttct

SEQ ID NO: 243508 - DNA, 20 bp, Artificial Sequence
  Description of Artificial Sequence: Synthetic oligonucleotide
  Target: LAMA2; (-) strand; PAM type: YTN; PAM sequence: CTT
ccttccttcctttttctttc

SEQ ID NO: 243509 - DNA, 20 bp, Artificial Sequence
  Description of Artificial Sequence: Synthetic oligonucleotide
  Target: LAMA2; (-) strand; PAM type: YTN; PAM sequence: TTC
cttccttccttcctttttct

SEQ ID NO: 243510 - DNA, 20 bp, Artificial Sequence
  Description of Artificial Sequence: Synthetic oligonucleotide
  Target: LAMA2; (-) strand; PAM type: YTN; PAM sequence: TTT
ccttccttccttcctttttc

SEQ ID NO: 243511 - DNA, 20 bp, Artificial Sequence
  Description of Artificial Sequence: Synthetic oligonucleotide
  Target: LAMA2; (-) strand; PAM type: YTN; PAM sequence: TTT
tccttccttccttccttttt

SEQ ID NO: 243512 - DNA, 20 bp, Artificial Sequence
  Description of Artificial Sequence: Synthetic oligonucleotide
  Target: LAMA2; (-) strand; PAM type: YTN; PAM sequence: CTT
ttccttccttccttcctttt

SEQ ID NO: 243513 - DNA, 20 bp, Artificial Sequence
  Description of Artificial Sequence: Synthetic oligonucleotide
  Target: LAMA2; (-) strand; PAM type: YTN; PAM sequence: CTC
ccttttccttccttccttcc

SEQ ID NO: 243514 - DNA, 20 bp, Artificial Sequence
  Description of Artificial Sequence: Synthetic oligonucleotide
  Target: LAMA2; (-) strand; PAM type: YTN; PAM sequence: CTC
cctcccttttccttccttcc

SEQ ID NO: 243515 - DNA, 20 bp, Artificial Sequence
  Description of Artificial Sequence: Synthetic oligonucleotide
  Target: LAMA2; (-) strand; PAM type: YTN; PAM sequence: CTC
cctccctcccttttccttcc

SEQ ID NO: 243516 - DNA, 20 bp, Artificial Sequence
  Description of Artificial Sequence: Synthetic oligonucleotide
  Target: LAMA2; (-) strand; PAM type: YTN; PAM sequence: TTC
cctccctccctcccttttcc

SEQ ID NO: 243517 - DNA, 20 bp, Artificial Sequence
  Description of Artificial Sequence: Synthetic oligonucleotide
  Target: LAMA2; (-) strand; PAM type: YTN; PAM sequence: CTT
ccctccctccctcccttttc

SEQ ID NO: 243518 - DNA, 20 bp, Artificial Sequence
  Description of Artificial Sequence: Synthetic oligonucleotide
  Target: LAMA2; (-) strand; PAM type: YTN; PAM sequence: TTC
cttccctccctccctccctt

SEQ ID NO: 243519 - DNA, 20 bp, Artificial Sequence
  Description of Artificial Sequence: Synthetic oligonucleotide
  Target: LAMA2; (-) strand; PAM type: YTN; PAM sequence: CTT
ccttccctccctccctccct

SEQ ID NO: 243520 - DNA, 20 bp, Artificial Sequence
  Description of Artificial Sequence: Synthetic oligonucleotide
  Target: LAMA2; (-) strand; PAM type: YTN; PAM sequence: CTC
cttccttccctccctccctc

SEQ ID NO: 243521 - DNA, 20 bp, Artificial Sequence
  Description of Artificial Sequence: Synthetic oligonucleotide
  Target: LAMA2; (-) strand; PAM type: YTN; PAM sequence: CTC
cctccttccttccctccctc

SEQ ID NO: 243522 - DNA, 20 bp, Artificial Sequence
  Description of Artificial Sequence: Synthetic oligonucleotide
  Target: LAMA2; (-) strand; PAM type: YTN; PAM sequence: CTC
cctccctccttccttccctc

SEQ ID NO: 243523 - DNA, 20 bp, Artificial Sequence
  Description of Artificial Sequence: Synthetic oligonucleotide
  Target: LAMA2; (-) strand; PAM type: YTN; PAM sequence: TTC
ctccctccctccttccttcc

SEQ ID NO: 243524 - DNA, 20 bp, Artificial Sequence
  Description of Artificial Sequence: Synthetic oligonucleotide
  Target: LAMA2; (-) strand; PAM type: YTN; PAM sequence: CTT
cctccctccctccttccttc

SEQ ID NO: 243525 - DNA, 20 bp, Artificial Sequence
  Description of Artificial Sequence: Synthetic oligonucleotide
  Target: LAMA2; (-) strand; PAM type: YTN; PAM sequence: TTC
cttcctccctccctccttcc

SEQ ID NO: 243526 - DNA, 20 bp, Artificial Sequence
  Description of Artificial Sequence: Synthetic oligonucleotide
  Target: LAMA2; (-) strand; PAM type: YTN; PAM sequence: CTT
ccttcctccctccctccttc

SEQ ID NO: 243527 - DNA, 20 bp, Artificial Sequence
  Description of Artificial Sequence: Synthetic oligonucleotide
  Target: LAMA2; (-) strand; PAM type: YTN; PAM sequence: TTC
cttccttcctccctccctcc

SEQ ID NO: 243528 - DNA, 20 bp, Artificial Sequence
  Description of Artificial Sequence: Synthetic oligonucleotide
  Target: LAMA2; (-) strand; PAM type: YTN; PAM sequence: CTT
ccttccttcctccctccctc

SEQ ID NO: 243529 - DNA, 20 bp, Artificial Sequence
  Description of Artificial Sequence: Synthetic oligonucleotide
  Target: LAMA2; (-) strand; PAM type: YTN; PAM sequence: CTC
ttccttccttcctccctccc

SEQ ID NO: 243530 - DNA, 20 bp, Artificial Sequence
  Description of Artificial Sequence: Synthetic oligonucleotide
  Target: LAMA2; (-) strand; PAM type: YTN; PAM sequence: TTC
ctcttccttccttcctccct

SEQ ID NO: 243531 - DNA, 20 bp, Artificial Sequence
  Description of Artificial Sequence: Synthetic oligonucleotide
  Target: LAMA2; (-) strand; PAM type: YTN; PAM sequence: CTT
cctcttccttccttcctccc

SEQ ID NO: 243532 - DNA, 20 bp, Artificial Sequence
  Description of Artificial Sequence: Synthetic oligonucleotide
  Target: LAMA2; (-) strand; PAM type: YTN; PAM sequence: CTG
cttcctcttccttccttcct

SEQ ID NO: 243533 - DNA, 20 bp, Artificial Sequence
  Description of Artificial Sequence: Synthetic oligonucleotide
  Target: LAMA2; (-) strand; PAM type: YTN; PAM sequence: CTC
cctgcttcctcttccttcct

SEQ ID NO: 243534 - DNA, 20 bp, Artificial Sequence
  Description of Artificial Sequence: Synthetic oligonucleotide
  Target: LAMA2; (-) strand; PAM type: YTN; PAM sequence: TTG
ccctccctgcttcctcttcc

SEQ ID NO: 243535 - DNA, 20 bp, Artificial Sequence
  Description of Artificial Sequence: Synthetic oligonucleotide
  Target: LAMA2; (-) strand; PAM type: YTN; PAM sequence: CTT
gccctccctgcttcctcttc

SEQ ID NO: 243536 - DNA, 20 bp, Artificial Sequence
  Description of Artificial Sequence: Synthetic oligonucleotide
  Target: LAMA2; (-) strand; PAM type: YTN; PAM sequence: TTC
cttgccctccctgcttcctc

SEQ ID NO: 243537 - DNA, 20 bp, Artificial Sequence
  Description of Artificial Sequence: Synthetic oligonucleotide
  Target: LAMA2; (-) strand; PAM type: YTN; PAM sequence: TTT
ccttgccctccctgcttcct

SEQ ID NO: 243538 - DNA, 20 bp, Artificial Sequence
  Description of Artificial Sequence: Synthetic oligonucleotide
  Target: LAMA2; (-) strand; PAM type: YTN; PAM sequence: CTT
tccttgccctccctgcttcc

SEQ ID NO: 243539 - DNA, 20 bp, Artificial Sequence
  Description of Artificial Sequence: Synthetic oligonucleotide
  Target: LAMA2; (-) strand; PAM type: YTN; PAM sequence: TTC
ctttccttgccctccctgct

SEQ ID NO: 243540 - DNA, 20 bp, Artificial Sequence
  Description of Artificial Sequence: Synthetic oligonucleotide
  Target: LAMA2; (-) strand; PAM type: YTN; PAM sequence: TTT
cctttccttgccctccctgc

SEQ ID NO: 243541 - DNA, 20 bp, Artificial Sequence
  Description of Artificial Sequence: Synthetic oligonucleotide
  Target: LAMA2; (-) strand; PAM type: YTN; PAM sequence: TTT
tcctttccttgccctccctg

SEQ ID NO: 243542 - DNA, 20 bp, Artificial Sequence
  Description of Artificial Sequence: Synthetic oligonucleotide
  Target: LAMA2; (-) strand; PAM type: YTN; PAM sequence: TTG
ttttcctttccttgccctcc

SEQ ID NO: 243543 - DNA, 20 bp, Artificial Sequence
  Description of Artificial Sequence: Synthetic oligonucleotide
  Target: LAMA2; (-) strand; PAM type: YTN; PAM sequence: TTC
cattgttttcctttccttgc

SEQ ID NO: 243544 - DNA, 20 bp, Artificial Sequence
  Description of Artificial Sequence: Synthetic oligonucleotide
  Target: LAMA2; (-) strand; PAM type: YTN; PAM sequence: TTT
ccattgttttcctttccttg

SEQ ID NO: 243545 - DNA, 20 bp, Artificial Sequence
  Description of Artificial Sequence: Synthetic oligonucleotide
  Target: LAMA2; (-) strand; PAM type: YTN; PAM sequence: CTT
tccattgttttcctttcctt

SEQ ID NO: 243546 - DNA, 20 bp, Artificial Sequence
  Description of Artificial Sequence: Synthetic oligonucleotide
  Target: LAMA2; (-) strand; PAM type: YTN; PAM sequence: TTC
tttccattgttttcctttcc

SEQ ID NO: 243547 - DNA, 20 bp, Artificial Sequence
  Description of Artificial Sequence: Synthetic oligonucleotide
  Target: LAMA2; (-) strand; PAM type: YTN; PAM sequence: TTA
ttctttccattgttttcctt

SEQ ID NO: 243548 - DNA, 20 bp, Artificial Sequence
  Description of Artificial Sequence: Synthetic oligonucleotide
  Target: LAMA2; (-) strand; PAM type: YTN; PAM sequence: TTT
attctttccattgttttcct

SEQ ID NO: 243549 - DNA, 20 bp, Artificial Sequence
  Description of Artificial Sequence: Synthetic oligonucleotide
  Target: LAMA2; (-) strand; PAM type: YTN; PAM sequence: CTT
tattctttccattgttttcc

SEQ ID NO: 243550 - DNA, 20 bp, Artificial Sequence
  Description of Artificial Sequence: Synthetic oligonucleotide
  Target: LAMA2; (-) strand; PAM type: YTN; PAM sequence: TTC
tttattctttccattgtttt

SEQ ID NO: 243551 - DNA, 20 bp, Artificial Sequence
  Description of Artificial Sequence: Synthetic oligonucleotide
  Target: LAMA2; (-) strand; PAM type: YTN; PAM sequence: TTT
ctttattctttccattgttt

SEQ ID NO: 243552 - DNA, 20 bp, Artificial Sequence
  Description of Artificial Sequence: Synthetic oligonucleotide
  Target: LAMA2; (-) strand; PAM type: YTN; PAM sequence: TTA
tttctttattctttccattg

SEQ ID NO: 243553 - DNA, 20 bp, Artificial Sequence
  Description of Artificial Sequence: Synthetic oligonucleotide
  Target: LAMA2; (-) strand; PAM type: YTN; PAM sequence: TTT
atttctttattctttccatt

SEQ ID NO: 243554 - DNA, 20 bp, Artificial Sequence
  Description of Artificial Sequence: Synthetic oligonucleotide
  Target: LAMA2; (-) strand; PAM type: YTN; PAM sequence: CTG
catttatttctttattcttt

SEQ ID NO: 243555 - DNA, 20 bp, Artificial Sequence
  Description of Artificial Sequence: Synthetic oligonucleotide
  Target: LAMA2; (-) strand; PAM type: YTN; PAM sequence: CTG
ctgcatttatttctttattc

SEQ ID NO: 243556 - DNA, 20 bp, Artificial Sequence
  Description of Artificial Sequence: Synthetic oligonucleotide
  Target: LAMA2; (-) strand; PAM type: YTN; PAM sequence: TTC
ctgctgcatttatttcttta

SEQ ID NO: 243557 - DNA, 20 bp, Artificial Sequence
  Description of Artificial Sequence: Synthetic oligonucleotide
  Target: LAMA2; (-) strand; PAM type: YTN; PAM sequence: TTT
cctgctgcatttatttcttt

SEQ ID NO: 243558 - DNA, 20 bp, Artificial Sequence
  Description of Artificial Sequence: Synthetic oligonucleotide
  Target: LAMA2; (-) strand; PAM type: YTN; PAM sequence: CTT
tcctgctgcatttatttctt

SEQ ID NO: 243559 - DNA, 20 bp, Artificial Sequence
  Description of Artificial Sequence: Synthetic oligonucleotide
  Target: LAMA2; (-) strand; PAM type: YTN; PAM sequence: TTC
ctttcctgctgcatttattt

SEQ ID NO: 243560 - DNA, 20 bp, Artificial Sequence
  Description of Artificial Sequence: Synthetic oligonucleotide
  Target: LAMA2; (-) strand; PAM type: YTN; PAM sequence: TTT
cctttcctgctgcatttatt

SEQ ID NO: 243561 - DNA, 20 bp, Artificial Sequence
  Description of Artificial Sequence: Synthetic oligonucleotide
  Target: LAMA2; (-) strand; PAM type: YTN; PAM sequence: TTT
tcctttcctgctgcatttat

SEQ ID NO: 243562 - DNA, 20 bp, Artificial Sequence
  Description of Artificial Sequence: Synthetic oligonucleotide
  Target: LAMA2; (-) strand; PAM type: YTN; PAM sequence: TTT
ttcctttcctgctgcattta

SEQ ID NO: 243563 - DNA, 20 bp, Artificial Sequence
  Description of Artificial Sequence: Synthetic oligonucleotide
  Target: LAMA2; (-) strand; PAM type: YTN; PAM sequence: CTT
tttcctttcctgctgcattt

SEQ ID NO: 243564 - DNA, 20 bp, Artificial Sequence
  Description of Artificial Sequence: Synthetic oligonucleotide
  Target: LAMA2; (-) strand; PAM type: YTN; PAM sequence: TTC
tttttcctttcctgctgcat

SEQ ID NO: 243565 - DNA, 20 bp, Artificial Sequence
  Description of Artificial Sequence: Synthetic oligonucleotide
  Target: LAMA2; (-) strand; PAM type: YTN; PAM sequence: CTA
ttctttttcctttcctgctg

SEQ ID NO: 243566 - DNA, 20 bp, Artificial Sequence
  Description of Artificial Sequence: Synthetic oligonucleotide
  Target: LAMA2; (-) strand; PAM type: YTN; PAM sequence: TTC
ctattctttttcctttcctg

SEQ ID NO: 243567 - DNA, 20 bp, Artificial Sequence
  Description of Artificial Sequence: Synthetic oligonucleotide
  Target: LAMA2; (-) strand; PAM type: YTN; PAM sequence: CTT
cctattctttttcctttcct

SEQ ID NO: 243568 - DNA, 20 bp, Artificial Sequence
  Description of Artificial Sequence: Synthetic oligonucleotide
  Target: LAMA2; (-) strand; PAM type: YTN; PAM sequence: TTC
ttcctattctttttcctttc

SEQ ID NO: 243569 - DNA, 20 bp, Artificial Sequence
  Description of Artificial Sequence: Synthetic oligonucleotide
  Target: LAMA2; (-) strand; PAM type: YTN; PAM sequence: TTA
gacagatatgagcaaattct

SEQ ID NO: 243570 - DNA, 20 bp, Artificial Sequence
  Description of Artificial Sequence: Synthetic oligonucleotide
  Target: LAMA2; (-) strand; PAM type: YTN; PAM sequence: CTA
aaaattagacagatatgagc

SEQ ID NO: 243571 - DNA, 20 bp, Artificial Sequence
  Description of Artificial Sequence: Synthetic oligonucleotide
  Target: LAMA2; (-) strand; PAM type: YTN; PAM sequence: TTG
tatatcaaaataccctaaaa

SEQ ID NO: 243572 - DNA, 20 bp, Artificial Sequence
  Description of Artificial Sequence: Synthetic oligonucleotide
  Target: LAMA2; (-) strand; PAM type: YTN; PAM sequence: TTT
gtatatcaaaataccctaaa

SEQ ID NO: 243573 - DNA, 20 bp, Artificial Sequence
  Description of Artificial Sequence: Synthetic oligonucleotide
  Target: LAMA2; (-) strand; PAM type: YTN; PAM sequence: CTT
tgtatatcaaaataccctaa

SEQ ID NO: 243574 - DNA, 20 bp, Artificial Sequence
  Description of Artificial Sequence: Synthetic oligonucleotide
  Target: LAMA2; (-) strand; PAM type: YTN; PAM sequence: TTA
ctttgtatatcaaaataccc

SEQ ID NO: 243575 - DNA, 20 bp, Artificial Sequence
  Description of Artificial Sequence: Synthetic oligonucleotide
  Target: LAMA2; (-) strand; PAM type: YTN; PAM sequence: CTG
acagtcagttactttgtata

SEQ ID NO: 243576 - DNA, 20 bp, Artificial Sequence
  Description of Artificial Sequence: Synthetic oligonucleotide
  Target: LAMA2; (-) strand; PAM type: YTN; PAM sequence: CTA
agacaggtcctgacagtcag

SEQ ID NO: 243577 - DNA, 20 bp, Artificial Sequence
  Description of Artificial Sequence: Synthetic oligonucleotide
  Target: LAMA2; (-) strand; PAM type: YTN; PAM sequence: CTC
taagacaggtcctgacagtc

SEQ ID NO: 243578 - DNA, 20 bp, Artificial Sequence
  Description of Artificial Sequence: Synthetic oligonucleotide
  Target: LAMA2; (-) strand; PAM type: YTN; PAM sequence: CTA
ccagatcatctctaagacag

SEQ ID NO: 243579 - DNA, 20 bp, Artificial Sequence
  Description of Artificial Sequence: Synthetic oligonucleotide
  Target: LAMA2; (-) strand; PAM type: YTN; PAM sequence: CTG
tcctaccagatcatctctaa

SEQ ID NO: 243580 - DNA, 20 bp, Artificial Sequence
  Description of Artificial Sequence: Synthetic oligonucleotide
  Target: LAMA2; (-) strand; PAM type: YTN; PAM sequence: TTA
ctgtcctaccagatcatctc

SEQ ID NO: 243581 - DNA, 20 bp, Artificial Sequence
  Description of Artificial Sequence: Synthetic oligonucleotide
  Target: LAMA2; (-) strand; PAM type: YTN; PAM sequence: TTT
actgtcctaccagatcatct

SEQ ID NO: 243582 - DNA, 20 bp, Artificial Sequence
  Description of Artificial Sequence: Synthetic oligonucleotide
  Target: LAMA2; (-) strand; PAM type: YTN; PAM sequence: CTG
gaaagaaaagccatttactg

SEQ ID NO: 243583 - DNA, 20 bp, Artificial Sequence
  Description of Artificial Sequence: Synthetic oligonucleotide
  Target: LAMA2; (-) strand; PAM type: YTN; PAM sequence: TTC
aaacccagtcccagatgaaa

SEQ ID NO: 243584 - DNA, 20 bp, Artificial Sequence
  Description of Artificial Sequence: Synthetic oligonucleotide
  Target: LAMA2; (-) strand; PAM type: YTN; PAM sequence: CTT
caaacccagtcccagatgaa

SEQ ID NO: 243585 - DNA, 20 bp, Artificial Sequence
  Description of Artificial Sequence: Synthetic oligonucleotide
  Target: LAMA2; (-) strand; PAM type: YTN; PAM sequence: CTG
atgatcacttcaaacccagt

SEQ ID NO: 243586 - DNA, 20 bp, Artificial Sequence
  Description of Artificial Sequence: Synthetic oligonucleotide
  Target: LAMA2; (-) strand; PAM type: YTN; PAM sequence: CTG
aggctgatgatcacttcaaa

SEQ ID NO: 243587 - DNA, 20 bp, Artificial Sequence
  Description of Artificial Sequence: Synthetic oligonucleotide
  Target: LAMA2; (-) strand; PAM type: YTN; PAM sequence: TTC
cagaacactgaggctgatga

SEQ ID NO: 243588 - DNA, 20 bp, Artificial Sequence
  Description of Artificial Sequence: Synthetic oligonucleotide
  Target: LAMA2; (-) strand; PAM type: YTN; PAM sequence: TTT
ccagaacactgaggctgatg

SEQ ID NO: 243589 - DNA, 20 bp, Artificial Sequence
  Description of Artificial Sequence: Synthetic oligonucleotide
  Target: LAMA2; (-) strand; PAM type: YTN; PAM sequence: TTA
tttccagaacactgaggctg

SEQ ID NO: 243590 - DNA, 20 bp, Artificial Sequence
  Description of Artificial Sequence: Synthetic oligonucleotide
  Target: LAMA2; (-) strand; PAM type: YTN; PAM sequence: CTT
atttccagaacactgaggct

SEQ ID NO: 243591 - DNA, 20 bp, Artificial Sequence
  Description of Artificial Sequence: Synthetic oligonucleotide
  Target: LAMA2; (-) strand; PAM type: YTN; PAM sequence: TTA
taaatgacttatttccagaa

SEQ ID NO: 243592 - DNA, 20 bp, Artificial Sequence
  Description of Artificial Sequence: Synthetic oligonucleotide
  Target: LAMA2; (-) strand; PAM type: YTN; PAM sequence: TTC
attataaatgacttatttcc

SEQ ID NO: 243593 - DNA, 20 bp, Artificial Sequence
  Description of Artificial Sequence: Synthetic oligonucleotide
  Target: LAMA2; (-) strand; PAM type: YTN; PAM sequence: TTT
cattataaatgacttatttc

SEQ ID NO: 243594 - DNA, 20 bp, Artificial Sequence
  Description of Artificial Sequence: Synthetic oligonucleotide
  Target: LAMA2; (-) strand; PAM type: YTN; PAM sequence: TTC
catttcattataaatgactt

SEQ ID NO: 243595 - DNA, 20 bp, Artificial Sequence
  Description of Artificial Sequence: Synthetic oligonucleotide
  Target: LAMA2; (-) strand; PAM type: YTN; PAM sequence: TTC
cagttccatttcattataaa

SEQ ID NO: 243596 - DNA, 20 bp, Artificial Sequence
  Description of Artificial Sequence: Synthetic oligonucleotide
  Target: LAMA2; (-) strand; PAM type: YTN; PAM sequence: TTT
ccagttccatttcattataa

SEQ ID NO: 243597 - DNA, 20 bp, Artificial Sequence
  Description of Artificial Sequence: Synthetic oligonucleotide
  Target: LAMA2; (-) strand; PAM type: YTN; PAM sequence: TTA
tttccagttccatttcatta

SEQ ID NO: 243598 - DNA, 20 bp, Artificial Sequence
  Description of Artificial Sequence: Synthetic oligonucleotide
  Target: LAMA2; (-) strand; PAM type: YTN; PAM sequence: CTG
tgggttatttccagttccat

SEQ ID NO: 243599 - DNA, 20 bp, Artificial Sequence
  Description of Artificial Sequence: Synthetic oligonucleotide
  Target: LAMA2; (-) strand; PAM type: YTN; PAM sequence: TTG
tctgtgggttatttccagtt

SEQ ID NO: 243600 - DNA, 20 bp, Artificial Sequence
  Description of Artificial Sequence: Synthetic oligonucleotide
  Target: LAMA2; (-) strand; PAM type: YTN; PAM sequence: TTT
gtctgtgggttatttccagt

SEQ ID NO: 243601 - DNA, 20 bp, Artificial Sequence
  Description of Artificial Sequence: Synthetic oligonucleotide
  Target: LAMA2; (-) strand; PAM type: YTN; PAM sequence: TTT
tgtctgtgggttatttccag

SEQ ID NO: 243602 - DNA, 20 bp, Artificial Sequence
  Description of Artificial Sequence: Synthetic oligonucleotide
  Target: LAMA2; (-) strand; PAM type: YTN; PAM sequence: TTT
ttgtctgtgggttatttcca

SEQ ID NO: 243603 - DNA, 20 bp, Artificial Sequence
  Description of Artificial Sequence: Synthetic oligonucleotide
  Target: LAMA2; (-) strand; PAM type: YTN; PAM sequence: CTT
tttgtctgtgggttatttcc

SEQ ID NO: 243604 - DNA, 20 bp, Artificial Sequence
  Description of Artificial Sequence: Synthetic oligonucleotide
  Target: LAMA2; (-) strand; PAM type: YTN; PAM sequence: TTG
caaagctttttgtctgtggg

SEQ ID NO: 243605 - DNA, 20 bp, Artificial Sequence
  Description of Artificial Sequence: Synthetic oligonucleotide
  Target: LAMA2; (-) strand; PAM type: YTN; PAM sequence: CTT
gcaaagctttttgtctgtgg

SEQ ID NO: 243606 - DNA, 20 bp, Artificial Sequence
  Description of Artificial Sequence: Synthetic oligonucleotide
  Target: LAMA2; (-) strand; PAM type: YTN; PAM sequence: TTC
aatggcttgcaaagcttttt

SEQ ID NO: 243607 - DNA, 20 bp, Artificial Sequence
  Description of Artificial Sequence: Synthetic oligonucleotide
  Target: LAMA2; (-) strand; PAM type: YTN; PAM sequence: CTT
caatggcttgcaaagctttt

SEQ ID NO: 243608 - DNA, 20 bp, Artificial Sequence
  Description of Artificial Sequence: Synthetic oligonucleotide
  Target: LAMA2; (-) strand; PAM type: YTN; PAM sequence: CTA
ggggaacttcaatggcttgc

SEQ ID NO: 243609 - DNA, 20 bp, Artificial Sequence
  Description of Artificial Sequence: Synthetic oligonucleotide
  Target: LAMA2; (-) strand; PAM type: YTN; PAM sequence: TTA
aggcagtaaatggcctaggg

SEQ ID NO: 243610 - DNA, 20 bp, Artificial Sequence
  Description of Artificial Sequence: Synthetic oligonucleotide
  Target: LAMA2; (-) strand; PAM type: YTN; PAM sequence: CTT
aaggcagtaaatggcctagg

SEQ ID NO: 243611 - DNA, 20 bp, Artificial Sequence
  Description of Artificial Sequence: Synthetic oligonucleotide
  Target: LAMA2; (-) strand; PAM type: YTN; PAM sequence: CTG
cagtatgagtaaaaacgagc

SEQ ID NO: 243612 - DNA, 20 bp, Artificial Sequence
  Description of Artificial Sequence: Synthetic oligonucleotide
  Target: LAMA2; (-) strand; PAM type: YTN; PAM sequence: TTC
ctgcagtatgagtaaaaacg

SEQ ID NO: 243613 - DNA, 20 bp, Artificial Sequence
  Description of Artificial Sequence: Synthetic oligonucleotide
  Target: LAMA2; (-) strand; PAM type: YTN; PAM sequence: TTT
cctgcagtatgagtaaaaac

SEQ ID NO: 243614 - DNA, 20 bp, Artificial Sequence
  Description of Artificial Sequence: Synthetic oligonucleotide
  Target: LAMA2; (-) strand; PAM type: YTN; PAM sequence: TTT
tcctgcagtatgagtaaaaa

SEQ ID NO: 243615 - DNA, 20 bp, Artificial Sequence
  Description of Artificial Sequence: Synthetic oligonucleotide
  Target: LAMA2; (-) strand; PAM type: YTN; PAM sequence: TTT
ttcctgcagtatgagtaaaa

SEQ ID NO: 243616 - DNA, 20 bp, Artificial Sequence
  Description of Artificial Sequence: Synthetic oligonucleotide
  Target: LAMA2; (-) strand; PAM type: YTN; PAM sequence: TTT
tttcctgcagtatgagtaaa

SEQ ID NO: 243617 - DNA, 20 bp, Artificial Sequence
  Description of Artificial Sequence: Synthetic oligonucleotide
  Target: LAMA2; (-) strand; PAM type: YTN; PAM sequence: TTT
ttttcctgcagtatgagtaa

SEQ ID NO: 243618 - DNA, 20 bp, Artificial Sequence
  Description of Artificial Sequence: Synthetic oligonucleotide
  Target: LAMA2; (-) strand; PAM type: YTN; PAM sequence: TTT
tttttcctgcagtatgagta

SEQ ID NO: 243619 - DNA, 20 bp, Artificial Sequence
  Description of Artificial Sequence: Synthetic oligonucleotide
  Target: LAMA2; (-) strand; PAM type: YTN; PAM sequence: CTT
ttttttcctgcagtatgagt

SEQ ID NO: 243620 - DNA, 20 bp, Artificial Sequence
  Description of Artificial Sequence: Synthetic oligonucleotide
  Target: LAMA2; (-) strand; PAM type: YTN; PAM sequence: CTC
ttttttttcctgcagtatga

SEQ ID NO: 243621 - DNA, 20 bp, Artificial Sequence
  Description of Artificial Sequence: Synthetic oligonucleotide
  Target: LAMA2; (-) strand; PAM type: YTN; PAM sequence: CTC
actcttttttttcctgcagt

SEQ ID NO: 243622 - DNA, 20 bp, Artificial Sequence
  Description of Artificial Sequence: Synthetic oligonucleotide
  Target: LAMA2; (-) strand; PAM type: YTN; PAM sequence: CTA
ctcactcttttttttcctgc

SEQ ID NO: 243623 - DNA, 20 bp, Artificial Sequence
  Description of Artificial Sequence: Synthetic oligonucleotide
  Target: LAMA2; (-) strand; PAM type: YTN; PAM sequence: CTC
cctactcactcttttttttc

SEQ ID NO: 243624 - DNA, 20 bp, Artificial Sequence
  Description of Artificial Sequence: Synthetic oligonucleotide
  Target: LAMA2; (-) strand; PAM type: YTN; PAM sequence: TTA
tgtgatataagaacaccacc

SEQ ID NO: 243625 - DNA, 20 bp, Artificial Sequence
  Description of Artificial Sequence: Synthetic oligonucleotide
  Target: LAMA2; (-) strand; PAM type: YTN; PAM sequence: TTA
aaattatgtgatataagaac

SEQ ID NO: 243626 - DNA, 20 bp, Artificial Sequence
  Description of Artificial Sequence: Synthetic oligonucleotide
  Target: LAMA2; (-) strand; PAM type: YTN; PAM sequence: TTT
aaaattatgtgatataagaa

SEQ ID NO: 243627 - DNA, 20 bp, Artificial Sequence
  Description of Artificial Sequence: Synthetic oligonucleotide
  Target: LAMA2; (-) strand; PAM type: YTN; PAM sequence: TTA
atttaaaattatgtgatata

SEQ ID NO: 243628 - DNA, 20 bp, Artificial Sequence
  Description of Artificial Sequence: Synthetic oligonucleotide
  Target: LAMA2; (-) strand; PAM type: YTN; PAM sequence: CTT
aatttaaaattatgtgatat

SEQ ID NO: 243629 - DNA, 20 bp, Artificial Sequence
  Description of Artificial Sequence: Synthetic oligonucleotide
  Target: LAMA2; (-) strand; PAM type: YTN; PAM sequence: TTA
tataaaaccatcacatctta

SEQ ID NO: 243630 - DNA, 20 bp, Artificial Sequence
  Description of Artificial Sequence: Synthetic oligonucleotide
  Target: LAMA2; (-) strand; PAM type: YTN; PAM sequence: TTT
atataaaaccatcacatctt

SEQ ID NO: 243631 - DNA, 20 bp, Artificial Sequence
  Description of Artificial Sequence: Synthetic oligonucleotide
  Target: LAMA2; (-) strand; PAM type: YTN; PAM sequence: TTT
tatataaaaccatcacatct

SEQ ID NO: 243632 - DNA, 20 bp, Artificial Sequence
  Description of Artificial Sequence: Synthetic oligonucleotide
  Target: LAMA2; (-) strand; PAM type: YTN; PAM sequence: CTT
ttatataaaaccatcacatc

SEQ ID NO: 243633 - DNA, 20 bp, Artificial Sequence
  Description of Artificial Sequence: Synthetic oligonucleotide
  Target: LAMA2; (-) strand; PAM type: YTN; PAM sequence: TTG
cttttatataaaaccatcac

SEQ ID NO: 243634 - DNA, 20 bp, Artificial Sequence
  Description of Artificial Sequence: Synthetic oligonucleotide
  Target: LAMA2; (-) strand; PAM type: YTN; PAM sequence: TTT
gcttttatataaaaccatca

SEQ ID NO: 243635 - DNA, 20 bp, Artificial Sequence
  Description of Artificial Sequence: Synthetic oligonucleotide
  Target: LAMA2; (-) strand; PAM type: YTN; PAM sequence: TTT
tgcttttatataaaaccatc

SEQ ID NO: 243636 - DNA, 20 bp, Artificial Sequence
  Description of Artificial Sequence: Synthetic oligonucleotide
  Target: LAMA2; (-) strand; PAM type: YTN; PAM sequence: TTT
ttgcttttatataaaaccat

SEQ ID NO: 243637 - DNA, 20 bp, Artificial Sequence
  Description of Artificial Sequence: Synthetic oligonucleotide
  Target: LAMA2; (-) strand; PAM type: YTN; PAM sequence: TTG
aacaaaaaaagcaaaataaa

SEQ ID NO: 243638 - DNA, 20 bp, Artificial Sequence
  Description of Artificial Sequence: Synthetic oligonucleotide
  Target: LAMA2; (-) strand; PAM type: YTN; PAM sequence: CTT
gaacaaaaaaagcaaaataa

SEQ ID NO: 243639 - DNA, 20 bp, Artificial Sequence
  Description of Artificial Sequence: Synthetic oligonucleotide
  Target: LAMA2; (-) strand; PAM type: YTN; PAM sequence: TTG
tcttgaacaaaaaaagcaaa

SEQ ID NO: 243640 - DNA, 20 bp, Artificial Sequence
  Description of Artificial Sequence: Synthetic oligonucleotide
  Target: LAMA2; (-) strand; PAM type: YTN; PAM sequence: CTT
gtcttgaacaaaaaaagcaa

SEQ ID NO: 243641 - DNA, 20 bp, Artificial Sequence
  Description of Artificial Sequence: Synthetic oligonucleotide
  Target: LAMA2; (-) strand; PAM type: YTN; PAM sequence: CTG
tacttgtcttgaacaaaaaa

SEQ ID NO: 243642 - DNA, 20 bp, Artificial Sequence
  Description of Artificial Sequence: Synthetic oligonucleotide
  Target: LAMA2; (-) strand; PAM type: YTN; PAM sequence: TTC
atccctgtacttgtcttgaa

SEQ ID NO: 243643 - DNA, 20 bp, Artificial Sequence
  Description of Artificial Sequence: Synthetic oligonucleotide
  Target: LAMA2; (-) strand; PAM type: YTN; PAM sequence: TTT
catccctgtacttgtcttga

SEQ ID NO: 243644 - DNA, 20 bp, Artificial Sequence
  Description of Artificial Sequence: Synthetic oligonucleotide
  Target: LAMA2; (-) strand; PAM type: YTN; PAM sequence: TTA
catttcatccctgtacttgt

SEQ ID NO: 243645 - DNA, 20 bp, Artificial Sequence
  Description of Artificial Sequence: Synthetic oligonucleotide
  Target: LAMA2; (-) strand; PAM type: YTN; PAM sequence: TTT
acatttcatccctgtacttg

SEQ ID NO: 243646 - DNA, 20 bp, Artificial Sequence
  Description of Artificial Sequence: Synthetic oligonucleotide
  Target: LAMA2; (-) strand; PAM type: YTN; PAM sequence: TTA
acatatttacatttcatccc

SEQ ID NO: 243647 - DNA, 20 bp, Artificial Sequence
  Description of Artificial Sequence: Synthetic oligonucleotide
  Target: LAMA2; (-) strand; PAM type: YTN; PAM sequence: TTA
gatattaacatatttacatt

SEQ ID NO: 243648 - DNA, 20 bp, Artificial Sequence
  Description of Artificial Sequence: Synthetic oligonucleotide
  Target: LAMA2; (-) strand; PAM type: YTN; PAM sequence: TTA
agattagatattaacatatt

SEQ ID NO: 243649 - DNA, 20 bp, Artificial Sequence
  Description of Artificial Sequence: Synthetic oligonucleotide
  Target: LAMA2; (-) strand; PAM type: YTN; PAM sequence: CTT
aagattagatattaacatat

SEQ ID NO: 243650 - DNA, 20 bp, Artificial Sequence
  Description of Artificial Sequence: Synthetic oligonucleotide
  Target: LAMA2; (-) strand; PAM type: YTN; PAM sequence: TTC
ggatcaagagcagacttaag

SEQ ID NO: 243651 - DNA, 20 bp, Artificial Sequence
  Description of Artificial Sequence: Synthetic oligonucleotide
  Target: LAMA2; (-) strand; PAM type: YTN; PAM sequence: TTT
cggatcaagagcagacttaa

SEQ ID NO: 243652 - DNA, 20 bp, Artificial Sequence
  Description of Artificial Sequence: Synthetic oligonucleotide
  Target: LAMA2; (-) strand; PAM type: YTN; PAM sequence: TTC
aaaagagtttcggatcaaga

SEQ ID NO: 243653 - DNA, 20 bp, Artificial Sequence
  Description of Artificial Sequence: Synthetic oligonucleotide
  Target: LAMA2; (-) strand; PAM type: YTN; PAM sequence: TTT
caaaagagtttcggatcaag

SEQ ID NO: 243654 - DNA, 20 bp, Artificial Sequence
  Description of Artificial Sequence: Synthetic oligonucleotide
  Target: LAMA2; (-) strand; PAM type: YTN; PAM sequence: CTA
ggtaaagtttcaaaagagtt

SEQ ID NO: 243655 - DNA, 20 bp, Artificial Sequence
  Description of Artificial Sequence: Synthetic oligonucleotide
  Target: LAMA2; (-) strand; PAM type: YTN; PAM sequence: TTC
taggtaaagtttcaaaagag

SEQ ID NO: 243656 - DNA, 20 bp, Artificial Sequence
  Description of Artificial Sequence: Synthetic oligonucleotide
  Target: LAMA2; (-) strand; PAM type: YTN; PAM sequence: TTT
ctaggtaaagtttcaaaaga

SEQ ID NO: 243657 - DNA, 20 bp, Artificial Sequence
  Description of Artificial Sequence: Synthetic oligonucleotide
  Target: LAMA2; (-) strand; PAM type: YTN; PAM sequence: TTT
tctaggtaaagtttcaaaag

SEQ ID NO: 243658 - DNA, 20 bp, Artificial Sequence
  Description of Artificial Sequence: Synthetic oligonucleotide
  Target: LAMA2; (-) strand; PAM type: YTN; PAM sequence: CTA
tcattttctaggtaaagttt

SEQ ID NO: 243659 - DNA, 20 bp, Artificial Sequence
  Description of Artificial Sequence: Synthetic oligonucleotide
  Target: LAMA2; (-) strand; PAM type: YTN; PAM sequence: CTC
tatcattttctaggtaaagt

SEQ ID NO: 243660 - DNA, 20 bp, Artificial Sequence
  Description of Artificial Sequence: Synthetic oligonucleotide
  Target: LAMA2; (-) strand; PAM type: YTN; PAM sequence: TTG
ctctatcattttctaggtaa

SEQ ID NO: 243661 - DNA, 20 bp, Artificial Sequence
  Description of Artificial Sequence: Synthetic oligonucleotide
  Target: LAMA2; (-) strand; PAM type: YTN; PAM sequence: TTA
aattgctctatcattttcta

SEQ ID NO: 243662 - DNA, 20 bp, Artificial Sequence
  Description of Artificial Sequence: Synthetic oligonucleotide
  Target: LAMA2; (-) strand; PAM type: YTN; PAM sequence: TTG
tgagacacattaaattgctc

SEQ ID NO: 243663 - DNA, 20 bp, Artificial Sequence
  Description of Artificial Sequence: Synthetic oligonucleotide
  Target: LAMA2; (-) strand; PAM type: YTN; PAM sequence: CTA
gattgtgagacacattaaat

SEQ ID NO: 243664 - DNA, 20 bp, Artificial Sequence
  Description of Artificial Sequence: Synthetic oligonucleotide
  Target: LAMA2; (-) strand; PAM type: YTN; PAM sequence: CTG
ctagattgtgagacacatta

SEQ ID NO: 243665 - DNA, 20 bp, Artificial Sequence
  Description of Artificial Sequence: Synthetic oligonucleotide
  Target: LAMA2; (-) strand; PAM type: YTN; PAM sequence: CTC
tgctagattgtgagacacat

SEQ ID NO: 243666 - DNA, 20 bp, Artificial Sequence
  Description of Artificial Sequence: Synthetic oligonucleotide
  Target: LAMA2; (-) strand; PAM type: YTN; PAM sequence: CTC
caaatctctgctagattgtg

SEQ ID NO: 243667 - DNA, 20 bp, Artificial Sequence
  Description of Artificial Sequence: Synthetic oligonucleotide
  Target: LAMA2; (-) strand; PAM type: YTN; PAM sequence: CTA
tccatcaccctccaaatctc

SEQ ID NO: 243668 - DNA, 20 bp, Artificial Sequence
  Description of Artificial Sequence: Synthetic oligonucleotide
  Target: LAMA2; (-) strand; PAM type: YTN; PAM sequence: TTC
tatccatcaccctccaaatc

SEQ ID NO: 243669 - DNA, 20 bp, Artificial Sequence
  Description of Artificial Sequence: Synthetic oligonucleotide
  Target: LAMA2; (-) strand; PAM type: YTN; PAM sequence: TTA
ttctatccatcaccctccaa

SEQ ID NO: 243670 - DNA, 20 bp, Artificial Sequence
  Description of Artificial Sequence: Synthetic oligonucleotide
  Target: LAMA2; (-) strand; PAM type: YTN; PAM sequence: CTT
attctatccatcaccctcca

SEQ ID NO: 243671 - DNA, 20 bp, Artificial Sequence
  Description of Artificial Sequence: Synthetic oligonucleotide
  Target: LAMA2; (-) strand; PAM type: YTN; PAM sequence: TTA
agcccttattctatccatca

SEQ ID NO: 243672 - DNA, 20 bp, Artificial Sequence
  Description of Artificial Sequence: Synthetic oligonucleotide
  Target: LAMA2; (-) strand; PAM type: YTN; PAM sequence: TTG
tgttaagcccttattctatc

SEQ ID NO: 243673 - DNA, 20 bp, Artificial Sequence
  Description of Artificial Sequence: Synthetic oligonucleotide
  Target: LAMA2; (-) strand; PAM type: YTN; PAM sequence: CTT
gtgttaagcccttattctat

SEQ ID NO: 243674 - DNA, 20 bp, Artificial Sequence
  Description of Artificial Sequence: Synthetic oligonucleotide
  Target: LAMA2; (-) strand; PAM type: YTN; PAM sequence: TTC
ttgtgttaagcccttattct

SEQ ID NO: 243675 - DNA, 20 bp, Artificial Sequence
  Description of Artificial Sequence: Synthetic oligonucleotide
  Target: LAMA2; (-) strand; PAM type: YTN; PAM sequence: TTT
cttgtgttaagcccttattc

SEQ ID NO: 243676 - DNA, 20 bp, Artificial Sequence
  Description of Artificial Sequence: Synthetic oligonucleotide
  Target: LAMA2; (-) strand; PAM type: YTN; PAM sequence: TTA
tttcttgtgttaagccctta

SEQ ID NO: 243677 - DNA, 20 bp, Artificial Sequence
  Description of Artificial Sequence: Synthetic oligonucleotide
  Target: LAMA2; (-) strand; PAM type: YTN; PAM sequence: TTG
tacaacagaaattatttctt

SEQ ID NO: 243678 - DNA, 20 bp, Artificial Sequence
  Description of Artificial Sequence: Synthetic oligonucleotide
  Target: LAMA2; (-) strand; PAM type: YTN; PAM sequence: TTT
gtacaacagaaattatttct

SEQ ID NO: 243679 - DNA, 20 bp, Artificial Sequence
  Description of Artificial Sequence: Synthetic oligonucleotide
  Target: LAMA2; (-) strand; PAM type: YTN; PAM sequence: CTT
tgtacaacagaaattatttc

SEQ ID NO: 243680 - DNA, 20 bp, Artificial Sequence
  Description of Artificial Sequence: Synthetic oligonucleotide
  Target: LAMA2; (-) strand; PAM type: YTN; PAM sequence: CTC
atgagctttgtacaacagaa

SEQ ID NO: 243681 - DNA, 20 bp, Artificial Sequence
  Description of Artificial Sequence: Synthetic oligonucleotide
  Target: LAMA2; (-) strand; PAM type: YTN; PAM sequence: TTC
accatgcatgaagctcatga

SEQ ID NO: 243682 - DNA, 20 bp, Artificial Sequence
  Description of Artificial Sequence: Synthetic oligonucleotide
  Target: LAMA2; (-) strand; PAM type: YTN; PAM sequence: TTT
caccatgcatgaagctcatg

SEQ ID NO: 243683 - DNA, 20 bp, Artificial Sequence
  Description of Artificial Sequence: Synthetic oligonucleotide
  Target: LAMA2; (-) strand; PAM type: YTN; PAM sequence: CTT
tcaccatgcatgaagctcat

SEQ ID NO: 243684 - DNA, 20 bp, Artificial Sequence
  Description of Artificial Sequence: Synthetic oligonucleotide
  Target: LAMA2; (-) strand; PAM type: YTN; PAM sequence: CTA
aatatctttcaccatgcatg

SEQ ID NO: 243685 - DNA, 20 bp, Artificial Sequence
  Description of Artificial Sequence: Synthetic oligonucleotide
  Target: LAMA2; (-) strand; PAM type: YTN; PAM sequence: TTA
gcctaaatatctttcaccat

SEQ ID NO: 243686 - DNA, 20 bp, Artificial Sequence
  Description of Artificial Sequence: Synthetic oligonucleotide
  Target: LAMA2; (-) strand; PAM type: YTN; PAM sequence: TTT
agcctaaatatctttcacca

SEQ ID NO: 243687 - DNA, 20 bp, Artificial Sequence
  Description of Artificial Sequence: Synthetic oligonucleotide
  Target: LAMA2; (-) strand; PAM type: YTN; PAM sequence: CTT
tagcctaaatatctttcacc

SEQ ID NO: 243688 - DNA, 20 bp, Artificial Sequence
  Description of Artificial Sequence: Synthetic oligonucleotide
  Target: LAMA2; (-) strand; PAM type: YTN; PAM sequence: TTC
tttagcctaaatatctttca

SEQ ID NO: 243689 - DNA, 20 bp, Artificial Sequence
  Description of Artificial Sequence: Synthetic oligonucleotide
  Target: LAMA2; (-) strand; PAM type: YTN; PAM sequence: TTT
ctttagcctaaatatctttc

SEQ ID NO: 243690 - DNA, 20 bp, Artificial Sequence
  Description of Artificial Sequence: Synthetic oligonucleotide
  Target: LAMA2; (-) strand; PAM type: YTN; PAM sequence: TTT
tctttagcctaaatatcttt

SEQ ID NO: 243691 - DNA, 20 bp, Artificial Sequence
  Description of Artificial Sequence: Synthetic oligonucleotide
  Target: LAMA2; (-) strand; PAM type: YTN; PAM sequence: TTA
acattttctttagcctaaat

SEQ ID NO: 243692 - DNA, 20 bp, Artificial Sequence
  Description of Artificial Sequence: Synthetic oligonucleotide
  Target: LAMA2; (-) strand; PAM type: YTN; PAM sequence: CTG
catagttaacattttcttta

SEQ ID NO: 243693 - DNA, 20 bp, Artificial Sequence
  Description of Artificial Sequence: Synthetic oligonucleotide
  Target: LAMA2; (-) strand; PAM type: YTN; PAM sequence: TTC
cctgcatagttaacattttc

SEQ ID NO: 243694 - DNA, 20 bp, Artificial Sequence
  Description of Artificial Sequence: Synthetic oligonucleotide
  Target: LAMA2; (-) strand; PAM type: YTN; PAM sequence: TTC
attccctgcatagttaacat

SEQ ID NO: 243695 - DNA, 20 bp, Artificial Sequence
  Description of Artificial Sequence: Synthetic oligonucleotide
  Target: LAMA2; (-) strand; PAM type: YTN; PAM sequence: TTT
cattccctgcatagttaaca

SEQ ID NO: 243696 - DNA, 20 bp, Artificial Sequence
  Description of Artificial Sequence: Synthetic oligonucleotide
  Target: LAMA2; (-) strand; PAM type: YTN; PAM sequence: CTG
tcacgagtttcattccctgc

SEQ ID NO: 243697 - DNA, 20 bp, Artificial Sequence
  Description of Artificial Sequence: Synthetic oligonucleotide
  Target: LAMA2; (-) strand; PAM type: YTN; PAM sequence: TTA
tgggatcaagctgtcacgag

SEQ ID NO: 243698 - DNA, 20 bp, Artificial Sequence
  Description of Artificial Sequence: Synthetic oligonucleotide
  Target: LAMA2; (-) strand; PAM type: YTN; PAM sequence: TTT
atgggatcaagctgtcacga

SEQ ID NO: 243699 - DNA, 20 bp, Artificial Sequence
  Description of Artificial Sequence: Synthetic oligonucleotide
  Target: LAMA2; (-) strand; PAM type: YTN; PAM sequence: TTT
tatgggatcaagctgtcacg

SEQ ID NO: 243700 - DNA, 20 bp, Artificial Sequence
  Description of Artificial Sequence: Synthetic oligonucleotide
  Target: LAMA2; (-) strand; PAM type: YTN; PAM sequence: CTG
agttttatgggatcaagctg

SEQ ID NO: 243701 - DNA, 20 bp, Artificial Sequence
  Description of Artificial Sequence: Synthetic oligonucleotide
  Target: LAMA2; (-) strand; PAM type: YTN; PAM sequence: TTG
ctgagttttatgggatcaag

SEQ ID NO: 243702 - DNA, 20 bp, Artificial Sequence
  Description of Artificial Sequence: Synthetic oligonucleotide
  Target: LAMA2; (-) strand; PAM type: YTN; PAM sequence: CTT
gctgagttttatgggatcaa

SEQ ID NO: 243703 - DNA, 20 bp, Artificial Sequence
  Description of Artificial Sequence: Synthetic oligonucleotide
  Target: LAMA2; (-) strand; PAM type: YTN; PAM sequence: CTC
atccttgctgagttttatgg

SEQ ID NO: 243704 - DNA, 20 bp, Artificial Sequence
  Description of Artificial Sequence: Synthetic oligonucleotide
  Target: LAMA2; (-) strand; PAM type: YTN; PAM sequence: CTA
tataaatcagggatgcagag

SEQ ID NO: 243705 - DNA, 20 bp, Artificial Sequence
  Description of Artificial Sequence: Synthetic oligonucleotide
  Target: LAMA2; (-) strand; PAM type: YTN; PAM sequence: CTG
tactatataaatcagggatg

SEQ ID NO: 243706 - DNA, 20 bp, Artificial Sequence
  Description of Artificial Sequence: Synthetic oligonucleotide
  Target: LAMA2; (-) strand; PAM type: YTN; PAM sequence: TTA
aataaacatactgtactata

SEQ ID NO: 243707 - DNA, 20 bp, Artificial Sequence
  Description of Artificial Sequence: Synthetic oligonucleotide
  Target: LAMA2; (-) strand; PAM type: YTN; PAM sequence: TTT
aaataaacatactgtactat

SEQ ID NO: 243708 - DNA, 20 bp, Artificial Sequence
  Description of Artificial Sequence: Synthetic oligonucleotide
  Target: LAMA2; (-) strand; PAM type: YTN; PAM sequence: CTT
taaataaacatactgtacta

SEQ ID NO: 243709 - DNA, 20 bp, Artificial Sequence
  Description of Artificial Sequence: Synthetic oligonucleotide
  Target: LAMA2; (-) strand; PAM type: YTN; PAM sequence: CTC
ctttaaataaacatactgta

SEQ ID NO: 243710 - DNA, 20 bp, Artificial Sequence
  Description of Artificial Sequence: Synthetic oligonucleotide
  Target: LAMA2; (-) strand; PAM type: YTN; PAM sequence: TTA
tctcctttaaataaacatac

SEQ ID NO: 243711 - DNA, 20 bp, Artificial Sequence
  Description of Artificial Sequence: Synthetic oligonucleotide
  Target: LAMA2; (-) strand; PAM type: YTN; PAM sequence: CTT
atctcctttaaataaacata

SEQ ID NO: 243712 - DNA, 20 bp, Artificial Sequence
  Description of Artificial Sequence: Synthetic oligonucleotide
  Target: LAMA2; (-) strand; PAM type: YTN; PAM sequence: CTG
gcttatctcctttaaataaa

SEQ ID NO: 243713 - DNA, 20 bp, Artificial Sequence
  Description of Artificial Sequence: Synthetic oligonucleotide
  Target: LAMA2; (-) strand; PAM type: YTN; PAM sequence: TTA
acctggcttatctcctttaa

SEQ ID NO: 243714 - DNA, 20 bp, Artificial Sequence
  Description of Artificial Sequence: Synthetic oligonucleotide
  Target: LAMA2; (-) strand; PAM type: YTN; PAM sequence: CTT
aacctggcttatctccttta

SEQ ID NO: 243715 - DNA, 20 bp, Artificial Sequence
  Description of Artificial Sequence: Synthetic oligonucleotide
  Target: LAMA2; (-) strand; PAM type: YTN; PAM sequence: CTG
aaccccttaacctggcttat

SEQ ID NO: 243716 - DNA, 20 bp, Artificial Sequence
  Description of Artificial Sequence: Synthetic oligonucleotide
  Target: LAMA2; (-) strand; PAM type: YTN; PAM sequence: TTG
ctgaaccccttaacctggct

SEQ ID NO: 243717 - DNA, 20 bp, Artificial Sequence
  Description of Artificial Sequence: Synthetic oligonucleotide
  Target: LAMA2; (-) strand; PAM type: YTN; PAM sequence: TTT
gctgaaccccttaacctggc

SEQ ID NO: 243718 - DNA, 20 bp, Artificial Sequence
  Description of Artificial Sequence: Synthetic oligonucleotide
  Target: LAMA2; (-) strand; PAM type: YTN; PAM sequence: TTT
tgctgaaccccttaacctgg

SEQ ID NO: 243719 - DNA, 20 bp, Artificial Sequence
  Description of Artificial Sequence: Synthetic oligonucleotide
  Target: LAMA2; (-) strand; PAM type: YTN; PAM sequence: TTA
acagttttgctgaacccctt

SEQ ID NO: 243720 - DNA, 20 bp, Artificial Sequence
  Description of Artificial Sequence: Synthetic oligonucleotide
  Target: LAMA2; (-) strand; PAM type: YTN; PAM sequence: TTT
aacagttttgctgaacccct

SEQ ID NO: 243721 - DNA, 20 bp, Artificial Sequence
  Description of Artificial Sequence: Synthetic oligonucleotide
  Target: LAMA2; (-) strand; PAM type: YTN; PAM sequence: TTA
atttaacagttttgctgaac

SEQ ID NO: 243722 - DNA, 20 bp, Artificial Sequence
  Description of Artificial Sequence: Synthetic oligonucleotide
  Target: LAMA2; (-) strand; PAM type: YTN; PAM sequence: TTA
aaggagttaatttaacagtt

SEQ ID NO: 243723 - DNA, 20 bp, Artificial Sequence
  Description of Artificial Sequence: Synthetic oligonucleotide
  Target: LAMA2; (-) strand; PAM type: YTN; PAM sequence: TTT
aaaggagttaatttaacagt

SEQ ID NO: 243724 - DNA, 20 bp, Artificial Sequence
  Description of Artificial Sequence: Synthetic oligonucleotide
  Target: LAMA2; (-) strand; PAM type: YTN; PAM sequence: TTT
taaaggagttaatttaacag

SEQ ID NO: 243725 - DNA, 20 bp, Artificial Sequence
  Description of Artificial Sequence: Synthetic oligonucleotide
  Target: LAMA2; (-) strand; PAM type: YTN; PAM sequence: TTT
ttaaaggagttaatttaaca

SEQ ID NO: 243726 - DNA, 20 bp, Artificial Sequence
  Description of Artificial Sequence: Synthetic oligonucleotide
  Target: LAMA2; (-) strand; PAM type: YTN; PAM sequence: CTA
gatttttaaaggagttaatt

SEQ ID NO: 243727 - DNA, 20 bp, Artificial Sequence
  Description of Artificial Sequence: Synthetic oligonucleotide
  Target: LAMA2; (-) strand; PAM type: YTN; PAM sequence: TTC
atagcaataactagattttt

SEQ ID NO: 243728 - DNA, 20 bp, Artificial Sequence
  Description of Artificial Sequence: Synthetic oligonucleotide
  Target: LAMA2; (-) strand; PAM type: YTN; PAM sequence: TTT
catagcaataactagatttt

SEQ ID NO: 243729 - DNA, 20 bp, Artificial Sequence
  Description of Artificial Sequence: Synthetic oligonucleotide
  Target: LAMA2; (-) strand; PAM type: YTN; PAM sequence: CTT
tcatagcaataactagattt

SEQ ID NO: 243730 - DNA, 20 bp, Artificial Sequence
  Description of Artificial Sequence: Synthetic oligonucleotide
  Target: LAMA2; (-) strand; PAM type: YTN; PAM sequence: TTG
agagactttcatagcaataa

SEQ ID NO: 243731 - DNA, 20 bp, Artificial Sequence
  Description of Artificial Sequence: Synthetic oligonucleotide
  Target: LAMA2; (-) strand; PAM type: YTN; PAM sequence: CTT
gagagactttcatagcaata

SEQ ID NO: 243732 - DNA, 20 bp, Artificial Sequence
  Description of Artificial Sequence: Synthetic oligonucleotide
  Target: LAMA2; (-) strand; PAM type: YTN; PAM sequence: CTG
agcaccgcacttgagagact

SEQ ID NO: 243733 - DNA, 20 bp, Artificial Sequence
  Description of Artificial Sequence: Synthetic oligonucleotide
  Target: LAMA2; (-) strand; PAM type: YTN; PAM sequence: CTG
atgcaaaaaagcctgagcac

SEQ ID NO: 243734 - DNA, 20 bp, Artificial Sequence
  Description of Artificial Sequence: Synthetic oligonucleotide
  Target: LAMA2; (-) strand; PAM type: YTN; PAM sequence: CTC
cagatgactgatgcaaaaaa

SEQ ID NO: 243735 - DNA, 20 bp, Artificial Sequence
  Description of Artificial Sequence: Synthetic oligonucleotide
  Target: LAMA2; (-) strand; PAM type: YTN; PAM sequence: TTA
aataaagactccagatgact

SEQ ID NO: 243736 - DNA, 20 bp, Artificial Sequence
  Description of Artificial Sequence: Synthetic oligonucleotide
  Target: LAMA2; (-) strand; PAM type: YTN; PAM sequence: TTT
aaataaagactccagatgac

SEQ ID NO: 243737 - DNA, 20 bp, Artificial Sequence
  Description of Artificial Sequence: Synthetic oligonucleotide
  Target: LAMA2; (-) strand; PAM type: YTN; PAM sequence: TTT
taaataaagactccagatga

SEQ ID NO: 243738 - DNA, 20 bp, Artificial Sequence
  Description of Artificial Sequence: Synthetic oligonucleotide
  Target: LAMA2; (-) strand; PAM type: YTN; PAM sequence: TTA
caggcgtgagccaccgcgcc

SEQ ID NO: 243739 - DNA, 20 bp, Artificial Sequence
  Description of Artificial Sequence: Synthetic oligonucleotide
  Target: LAMA2; (-) strand; PAM type: YTN; PAM sequence: CTG
ggattacaggcgtgagccac

SEQ ID NO: 243740 - DNA, 20 bp, Artificial Sequence
  Description of Artificial Sequence: Synthetic oligonucleotide
  Target: LAMA2; (-) strand; PAM type: YTN; PAM sequence: CTC
ccaaagtgctgggattacag

SEQ ID NO: 243741 - DNA, 20 bp, Artificial Sequence
  Description of Artificial Sequence: Synthetic oligonucleotide
  Target: LAMA2; (-) strand; PAM type: YTN; PAM sequence: CTC
agcctcccaaagtgctggga

SEQ ID NO: 243742 - DNA, 20 bp, Artificial Sequence
  Description of Artificial Sequence: Synthetic oligonucleotide
  Target: LAMA2; (-) strand; PAM type: YTN; PAM sequence: TTA
tccgcccgcctcagcctccc

SEQ ID NO: 243743 - DNA, 20 bp, Artificial Sequence
  Description of Artificial Sequence: Synthetic oligonucleotide
  Target: LAMA2; (-) strand; PAM type: YTN; PAM sequence: CTC
gttatccgcccgcctcagcc

SEQ ID NO: 243744 - DNA, 20 bp, Artificial Sequence
  Description of Artificial Sequence: Synthetic oligonucleotide
  Target: LAMA2; (-) strand; PAM type: YTN; PAM sequence: CTG
acctcgttatccgcccgcct

SEQ ID NO: 243745 - DNA, 20 bp, Artificial Sequence
  Description of Artificial Sequence: Synthetic oligonucleotide
  Target: LAMA2; (-) strand; PAM type: YTN; PAM sequence: CTC
ctgacctcgttatccgcccg

SEQ ID NO: 243746 - DNA, 20 bp, Artificial Sequence
  Description of Artificial Sequence: Synthetic oligonucleotide
  Target: LAMA2; (-) strand; PAM type: YTN; PAM sequence: CTC
gatctcctgacctcgttatc

SEQ ID NO: 243747 - DNA, 20 bp, Artificial Sequence
  Description of Artificial Sequence: Synthetic oligonucleotide
  Target: LAMA2; (-) strand; PAM type: YTN; PAM sequence: TTA
gccaggatggtctcgatctc

SEQ ID NO: 243748 - DNA, 20 bp, Artificial Sequence
  Description of Artificial Sequence: Synthetic oligonucleotide
  Target: LAMA2; (-) strand; PAM type: YTN; PAM sequence: TTC
atcgtgttagccaggatggt

SEQ ID NO: 243749 - DNA, 20 bp, Artificial Sequence
  Description of Artificial Sequence: Synthetic oligonucleotide
  Target: LAMA2; (-) strand; PAM type: YTN; PAM sequence: TTT
catcgtgttagccaggatgg

SEQ ID NO: 243750 - DNA, 20 bp, Artificial Sequence
  Description of Artificial Sequence: Synthetic oligonucleotide
  Target: LAMA2; (-) strand; PAM type: YTN; PAM sequence: TTA
gtagagatgggatttcatcg

SEQ ID NO: 243751 - DNA, 20 bp, Artificial Sequence
  Description of Artificial Sequence: Synthetic oligonucleotide
  Target: LAMA2; (-) strand; PAM type: YTN; PAM sequence: TTT
agtagagatgggatttcatc

SEQ ID NO: 243752 - DNA, 20 bp, Artificial Sequence
  Description of Artificial Sequence: Synthetic oligonucleotide
  Target: LAMA2; (-) strand; PAM type: YTN; PAM sequence: TTA
tgtatatttagtagagatgg

SEQ ID NO: 243753 - DNA, 20 bp, Artificial Sequence
  Description of Artificial Sequence: Synthetic oligonucleotide
  Target: LAMA2; (-) strand; PAM type: YTN; PAM sequence: TTT
atgtatatttagtagagatg

SEQ ID NO: 243754 - DNA, 20 bp, Artificial Sequence
  Description of Artificial Sequence: Synthetic oligonucleotide
  Target: LAMA2; (-) strand; PAM type: YTN; PAM sequence: TTT
tatgtatatttagtagagat

SEQ ID NO: 243755 - DNA, 20 bp, Artificial Sequence
  Description of Artificial Sequence: Synthetic oligonucleotide
  Target: LAMA2; (-) strand; PAM type: YTN; PAM sequence: TTT
ttatgtatatttagtagaga

SEQ ID NO: 243756 - DNA, 20 bp, Artificial Sequence
  Description of Artificial Sequence: Synthetic oligonucleotide
  Target: LAMA2; (-) strand; PAM type: YTN; PAM sequence: CTA
atttttatgtatatttagta

SEQ ID NO: 243757 - DNA, 20 bp, Artificial Sequence
  Description of Artificial Sequence: Synthetic oligonucleotide
  Target: LAMA2; (-) strand; PAM type: YTN; PAM sequence: CTG
gctaatttttatgtatattt

SEQ ID NO: 243758 - DNA, 20 bp, Artificial Sequence
  Description of Artificial Sequence: Synthetic oligonucleotide
  Target: LAMA2; (-) strand; PAM type: YTN; PAM sequence: CTG
cctggctaatttttatgtat

SEQ ID NO: 243759 - DNA, 20 bp, Artificial Sequence
  Description of Artificial Sequence: Synthetic oligonucleotide
  Target: LAMA2; (-) strand; PAM type: YTN; PAM sequence: CTA
ccctgcctggctaattttta

SEQ ID NO: 243760 - DNA, 20 bp, Artificial Sequence
  Description of Artificial Sequence: Synthetic oligonucleotide
  Target: LAMA2; (-) strand; PAM type: YTN; PAM sequence: TTA
caggtgcccgctaccctgcc

SEQ ID NO: 243761 - DNA, 20 bp, Artificial Sequence
  Description of Artificial Sequence: Synthetic oligonucleotide
  Target: LAMA2; (-) strand; PAM type: YTN; PAM sequence: CTG
ggattacaggtgcccgctac

SEQ ID NO: 243762 - DNA, 20 bp, Artificial Sequence
  Description of Artificial Sequence: Synthetic oligonucleotide
  Target: LAMA2; (-) strand; PAM type: YTN; PAM sequence: CTC
ccgagtagctgggattacag

SEQ ID NO: 243763 - DNA, 20 bp, Artificial Sequence
  Description of Artificial Sequence: Synthetic oligonucleotide
  Target: LAMA2; (-) strand; PAM type: YTN; PAM sequence: CTC
agcctcccgagtagctggga

SEQ ID NO: 243764 - DNA, 20 bp, Artificial Sequence
  Description of Artificial Sequence: Synthetic oligonucleotide
  Target: LAMA2; (-) strand; PAM type: YTN; PAM sequence: CTG
cctcagcctcccgagtagct

SEQ ID NO: 243765 - DNA, 20 bp, Artificial Sequence
  Description of Artificial Sequence: Synthetic oligonucleotide
  Target: LAMA2; (-) strand; PAM type: YTN; PAM sequence: CTC
ctgcctcagcctcccgagta

SEQ ID NO: 243766 - DNA, 20 bp, Artificial Sequence
  Description of Artificial Sequence: Synthetic oligonucleotide
  Target: LAMA2; (-) strand; PAM type: YTN; PAM sequence: TTC
tcctgcctcagcctcccgag

SEQ ID NO: 243767 - DNA, 20 bp, Artificial Sequence
  Description of Artificial Sequence: Synthetic oligonucleotide
  Target: LAMA2; (-) strand; PAM type: YTN; PAM sequence: TTC
acgtcattctcctgcctcag

SEQ ID NO: 243768 - DNA, 20 bp, Artificial Sequence
  Description of Artificial Sequence: Synthetic oligonucleotide
  Target: LAMA2; (-) strand; PAM type: YTN; PAM sequence: CTT
cacgtcattctcctgcctca

SEQ ID NO: 243769 - DNA, 20 bp, Artificial Sequence
  Description of Artificial Sequence: Synthetic oligonucleotide
  Target: LAMA2; (-) strand; PAM type: YTN; PAM sequence: CTC
ccggcttcacgtcattctcc

SEQ ID NO: 243770 - DNA, 20 bp, Artificial Sequence
  Description of Artificial Sequence: Synthetic oligonucleotide
  Target: LAMA2; (-) strand; PAM type: YTN; PAM sequence: CTC
cacctcccggcttcacgtca

SEQ ID NO: 243771 - DNA, 20 bp, Artificial Sequence
  Description of Artificial Sequence: Synthetic oligonucleotide
  Target: LAMA2; (-) strand; PAM type: YTN; PAM sequence: CTG
caagctccacctcccggctt

SEQ ID NO: 243772 - DNA, 20 bp, Artificial Sequence
  Description of Artificial Sequence: Synthetic oligonucleotide
  Target: LAMA2; (-) strand; PAM type: YTN; PAM sequence: CTC
actgcaagctccacctcccg

SEQ ID NO: 243773 - DNA, 20 bp, Artificial Sequence
  Description of Artificial Sequence: Synthetic oligonucleotide
  Target: LAMA2; (-) strand; PAM type: YTN; PAM sequence: CTG
gagtgcagtggcgcgatcac

SEQ ID NO: 243774 - DNA, 20 bp, Artificial Sequence
  Description of Artificial Sequence: Synthetic oligonucleotide
  Target: LAMA2; (-) strand; PAM type: YTN; PAM sequence: CTG
tcgcccgggctggagtgcag

SEQ ID NO: 243775 - DNA, 20 bp, Artificial Sequence
  Description of Artificial Sequence: Synthetic oligonucleotide
  Target: LAMA2; (-) strand; PAM type: YTN; PAM sequence: CTC
tgtcgcccgggctggagtgc

SEQ ID NO: 243776 - DNA, 20 bp, Artificial Sequence
  Description of Artificial Sequence: Synthetic oligonucleotide
  Target: LAMA2; (-) strand; PAM type: YTN; PAM sequence: CTC
gctctgtcgcccgggctgga

SEQ ID NO: 243777 - DNA, 20 bp, Artificial Sequence
  Description of Artificial Sequence: Synthetic oligonucleotide
  Target: LAMA2; (-) strand; PAM type: YTN; PAM sequence: TTG
agatggagtctcgctctgtc

SEQ ID NO: 243778 - DNA, 20 bp, Artificial Sequence
  Description of Artificial Sequence: Synthetic oligonucleotide
  Target: LAMA2; (-) strand; PAM type: YTN; PAM sequence: TTT
gagatggagtctcgctctgt

SEQ ID NO: 243779 - DNA, 20 bp, Artificial Sequence
  Description of Artificial Sequence: Synthetic oligonucleotide
  Target: LAMA2; (-) strand; PAM type: YTN; PAM sequence: TTT
tgagatggagtctcgctctg

SEQ ID NO: 243780 - DNA, 20 bp, Artificial Sequence
  Description of Artificial Sequence: Synthetic oligonucleotide
  Target: LAMA2; (-) strand; PAM type: YTN; PAM sequence: TTT
ttgagatggagtctcgctct

SEQ ID NO: 243781 - DNA, 20 bp, Artificial Sequence
  Description of Artificial Sequence: Synthetic oligonucleotide
  Target: LAMA2; (-) strand; PAM type: YTN; PAM sequence: TTT
tttgagatggagtctcgctc

SEQ ID NO: 243782 - DNA, 20 bp, Artificial Sequence
  Description of Artificial Sequence: Synthetic oligonucleotide
  Target: LAMA2; (-) strand; PAM type: YTN; PAM sequence: TTT
ttttgagatggagtctcgct

SEQ ID NO: 243783 - DNA, 20 bp, Artificial Sequence
  Description of Artificial Sequence: Synthetic oligonucleotide
  Target: LAMA2; (-) strand; PAM type: YTN; PAM sequence: TTT
tttttgagatggagtctcgc

SEQ ID NO: 243784 - DNA, 20 bp, Artificial Sequence
  Description of Artificial Sequence: Synthetic oligonucleotide
  Target: LAMA2; (-) strand; PAM type: YTN; PAM sequence: TTT
ttttttgagatggagtctcg

SEQ ID NO: 243785 - DNA, 20 bp, Artificial Sequence
  Description of Artificial Sequence: Synthetic oligonucleotide
  Target: LAMA2; (-) strand; PAM type: YTN; PAM sequence: TTT
tttttttgagatggagtctc

SEQ ID NO: 243786 - DNA, 20 bp, Artificial Sequence
  Description of Artificial Sequence: Synthetic oligonucleotide
  Target: LAMA2; (-) strand; PAM type: YTN; PAM sequence: TTT
ttttttttgagatggagtct

SEQ ID NO: 243787 - DNA, 20 bp, Artificial Sequence
  Description of Artificial Sequence: Synthetic oligonucleotide
  Target: LAMA2; (-) strand; PAM type: YTN; PAM sequence: TTT
tttttttttgagatggagtc

SEQ ID NO: 243788 - DNA, 20 bp, Artificial Sequence
  Description of Artificial Sequence: Synthetic oligonucleotide
  Target: LAMA2; (-) strand; PAM type: YTN; PAM sequence: TTT
ttttttttttgagatggagt

SEQ ID NO: 243789 - DNA, 20 bp, Artificial Sequence
  Description of Artificial Sequence: Synthetic oligonucleotide
  Target: LAMA2; (-) strand; PAM type: YTN; PAM sequence: TTT
tttttttttttgagatggag

SEQ ID NO: 243790 - DNA, 20 bp, Artificial Sequence
  Description of Artificial Sequence: Synthetic oligonucleotide
  Target: LAMA2; (-) strand; PAM type: YTN; PAM sequence: TTT
ttttttttttttgagatgga

SEQ ID NO: 243791 - DNA, 20 bp, Artificial Sequence
  Description of Artificial Sequence: Synthetic oligonucleotide
  Target: LAMA2; (-) strand; PAM type: YTN; PAM sequence: TTT
tttttttttttttgagatgg

SEQ ID NO: 243792 - DNA, 20 bp, Artificial Sequence
  Description of Artificial Sequence: Synthetic oligonucleotide
  Target: LAMA2; (-) strand; PAM type: YTN; PAM sequence: TTT
ttttttttttttttgagatg

SEQ ID NO: 243793 - DNA, 20 bp, Artificial Sequence
  Description of Artificial Sequence: Synthetic oligonucleotide
  Target: LAMA2; (-) strand; PAM type: YTN; PAM sequence: TTT
tttttttttttttttgagat

SEQ ID NO: 243794 - DNA, 20 bp, Artificial Sequence
  Description of Artificial Sequence: Synthetic oligonucleotide
  Target: LAMA2; (-) strand; PAM type: YTN; PAM sequence: TTT
ttttttttttttttttgaga

SEQ ID NO: 243795 - DNA, 20 bp, Artificial Sequence
  Description of Artificial Sequence: Synthetic oligonucleotide
  Target: LAMA2; (-) strand; PAM type: YTN; PAM sequence: TTT
tttttttttttttttttgag

SEQ ID NO: 243796 - DNA, 20 bp, Artificial Sequence
  Description of Artificial Sequence: Synthetic oligonucleotide
  Target: LAMA2; (-) strand; PAM type: YTN; PAM sequence: TTT
ttttttttttttttttttga

SEQ ID NO: 243797 - DNA, 20 bp, Artificial Sequence
  Description of Artificial Sequence: Synthetic oligonucleotide
  Target: LAMA2; (-) strand; PAM type: YTN; PAM sequence: TTT
tttttttttttttttttttg

SEQ ID NO: 243798 - DNA, 20 bp, Artificial Sequence
  Description of Artificial Sequence: Synthetic oligonucleotide
  Target: LAMA2; (-) strand; PAM type: YTN; PAM sequence: CTG
gataagtgaatccagagtaa

SEQ ID NO: 243799 - DNA, 20 bp, Artificial Sequence
  Description of Artificial Sequence: Synthetic oligonucleotide
  Target: LAMA2; (-) strand; PAM type: YTN; PAM sequence: TTC
tggataagtgaatccagagt

SEQ ID NO: 243800 - DNA, 20 bp, Artificial Sequence
  Description of Artificial Sequence: Synthetic oligonucleotide
  Target: LAMA2; (-) strand; PAM type: YTN; PAM sequence: CTT
ctggataagtgaatccagag

SEQ ID NO: 243801 - DNA, 20 bp, Artificial Sequence
  Description of Artificial Sequence: Synthetic oligonucleotide
  Target: LAMA2; (-) strand; PAM type: YTN; PAM sequence: TTC
cccagatcttctggataagt

SEQ ID NO: 243802 - DNA, 20 bp, Artificial Sequence
  Description of Artificial Sequence: Synthetic oligonucleotide
  Target: LAMA2; (-) strand; PAM type: YTN; PAM sequence: TTT
ccccagatcttctggataag

SEQ ID NO: 243803 - DNA, 20 bp, Artificial Sequence
  Description of Artificial Sequence: Synthetic oligonucleotide
  Target: LAMA2; (-) strand; PAM type: YTN; PAM sequence: TTA
aaaacgtagatttccccaga

SEQ ID NO: 243804 - DNA, 20 bp, Artificial Sequence
  Description of Artificial Sequence: Synthetic oligonucleotide
  Target: LAMA2; (-) strand; PAM type: YTN; PAM sequence: CTG
attaaaaacgtagatttccc

SEQ ID NO: 243805 - DNA, 20 bp, Artificial Sequence
  Description of Artificial Sequence: Synthetic oligonucleotide
  Target: LAMA2; (-) strand; PAM type: YTN; PAM sequence: TTG
gggagctgattaaaaacgta

SEQ ID NO: 243806 - DNA, 20 bp, Artificial Sequence
  Description of Artificial Sequence: Synthetic oligonucleotide
  Target: LAMA2; (-) strand; PAM type: YTN; PAM sequence: CTT
ggggagctgattaaaaacgt

SEQ ID NO: 243807 - DNA, 20 bp, Artificial Sequence
  Description of Artificial Sequence: Synthetic oligonucleotide
  Target: LAMA2; (-) strand; PAM type: YTN; PAM sequence: TTA
tgggtaaataatcacttggg

SEQ ID NO: 243808 - DNA, 20 bp, Artificial Sequence
  Description of Artificial Sequence: Synthetic oligonucleotide
  Target: LAMA2; (-) strand; PAM type: YTN; PAM sequence: CTT
atgggtaaataatcacttgg

SEQ ID NO: 243809 - DNA, 20 bp, Artificial Sequence
  Description of Artificial Sequence: Synthetic oligonucleotide
  Target: LAMA2; (-) strand; PAM type: YTN; PAM sequence: TTC
ttatgggtaaataatcactt

SEQ ID NO: 243810 - DNA, 20 bp, Artificial Sequence
  Description of Artificial Sequence: Synthetic oligonucleotide
  Target: LAMA2; (-) strand; PAM type: YTN; PAM sequence: TTA
aaaaagtagtcataaaagag

SEQ ID NO: 243811 - DNA, 20 bp, Artificial Sequence
  Description of Artificial Sequence: Synthetic oligonucleotide
  Target: LAMA2; (-) strand; PAM type: YTN; PAM sequence: TTT
aaaaaagtagtcataaaaga

SEQ ID NO: 243812 - DNA, 20 bp, Artificial Sequence
  Description of Artificial Sequence: Synthetic oligonucleotide
  Target: LAMA2; (-) strand; PAM type: YTN; PAM sequence: TTA
atcatcagtaatttaaaaaa

SEQ ID NO: 243813 - DNA, 20 bp, Artificial Sequence
  Description of Artificial Sequence: Synthetic oligonucleotide
  Target: LAMA2; (-) strand; PAM type: YTN; PAM sequence: CTG
cagataattaatcatcagta

SEQ ID NO: 243814 - DNA, 20 bp, Artificial Sequence
  Description of Artificial Sequence: Synthetic oligonucleotide
  Target: LAMA2; (-) strand; PAM type: YTN; PAM sequence: CTA
tctgcagataattaatcatc

SEQ ID NO: 243815 - DNA, 20 bp, Artificial Sequence
  Description of Artificial Sequence: Synthetic oligonucleotide
  Target: LAMA2; (-) strand; PAM type: YTN; PAM sequence: CTA
gggaactatctgcagataat

SEQ ID NO: 243816 - DNA, 20 bp, Artificial Sequence
  Description of Artificial Sequence: Synthetic oligonucleotide
  Target: LAMA2; (-) strand; PAM type: YTN; PAM sequence: TTG
gaaagtcaaagtctagggaa

SEQ ID NO: 243817 - DNA, 20 bp, Artificial Sequence
  Description of Artificial Sequence: Synthetic oligonucleotide
  Target: LAMA2; (-) strand; PAM type: YTN; PAM sequence: CTT
ggaaagtcaaagtctaggga

SEQ ID NO: 243818 - DNA, 20 bp, Artificial Sequence
  Description of Artificial Sequence: Synthetic oligonucleotide
  Target: LAMA2; (-) strand; PAM type: YTN; PAM sequence: TTA
aagccttggaaagtcaaagt

SEQ ID NO: 243819 - DNA, 20 bp, Artificial Sequence
  Description of Artificial Sequence: Synthetic oligonucleotide
  Target: LAMA2; (-) strand; PAM type: YTN; PAM sequence: TTT
aaagccttggaaagtcaaag

SEQ ID NO: 243820 - DNA, 20 bp, Artificial Sequence
  Description of Artificial Sequence: Synthetic oligonucleotide
  Target: LAMA2; (-) strand; PAM type: YTN; PAM sequence: TTT
taaagccttggaaagtcaaa

SEQ ID NO: 243821 - DNA, 20 bp, Artificial Sequence
  Description of Artificial Sequence: Synthetic oligonucleotide
  Target: LAMA2; (-) strand; PAM type: YTN; PAM sequence: TTT
ttaaagccttggaaagtcaa

SEQ ID NO: 243822 - DNA, 20 bp, Artificial Sequence
  Description of Artificial Sequence: Synthetic oligonucleotide
  Target: LAMA2; (-) strand; PAM type: YTN; PAM sequence: TTT
tttaaagccttggaaagtca

SEQ ID NO: 243823 - DNA, 20 bp, Artificial Sequence
  Description of Artificial Sequence: Synthetic oligonucleotide
  Target: LAMA2; (-) strand; PAM type: YTN; PAM sequence: TTT
ttttaaagccttggaaagtc

SEQ ID NO: 243824 - DNA, 20 bp, Artificial Sequence
  Description of Artificial Sequence: Synthetic oligonucleotide
  Target: LAMA2; (-) strand; PAM type: YTN; PAM sequence: TTG
tttttttaaagccttggaaa

SEQ ID NO: 243825 - DNA, 20 bp, Artificial Sequence
  Description of Artificial Sequence: Synthetic oligonucleotide
  Target: LAMA2; (-) strand; PAM type: YTN; PAM sequence: TTT
gtttttttaaagccttggaa

SEQ ID NO: 243826 - DNA, 20 bp, Artificial Sequence
  Description of Artificial Sequence: Synthetic oligonucleotide
  Target: LAMA2; (-) strand; PAM type: YTN; PAM sequence: TTG
tttgtttttttaaagccttg

SEQ ID NO: 243827 - DNA, 20 bp, Artificial Sequence
  Description of Artificial Sequence: Synthetic oligonucleotide
  Target: LAMA2; (-) strand; PAM type: YTN; PAM sequence: TTT
gtttgtttttttaaagcctt

SEQ ID NO: 243828 - DNA, 20 bp, Artificial Sequence
  Description of Artificial Sequence: Synthetic oligonucleotide
  Target: LAMA2; (-) strand; PAM type: YTN; PAM sequence: TTG
tttgtttgtttttttaaagc

SEQ ID NO: 243829 - DNA, 20 bp, Artificial Sequence
  Description of Artificial Sequence: Synthetic oligonucleotide
  Target: LAMA2; (-) strand; PAM type: YTN; PAM sequence: TTT
gtttgtttgtttttttaaag

SEQ ID NO: 243830 - DNA, 20 bp, Artificial Sequence
  Description of Artificial Sequence: Synthetic oligonucleotide
  Target: LAMA2; (-) strand; PAM type: YTN; PAM sequence: TTT
tgtttgtttgtttttttaaa

SEQ ID NO: 243831 - DNA, 20 bp, Artificial Sequence
  Description of Artificial Sequence: Synthetic oligonucleotide
  Target: LAMA2; (-) strand; PAM type: YTN; PAM sequence: TTT
ttgtttgtttgtttttttaa

SEQ ID NO: 243832 - DNA, 20 bp, Artificial Sequence
  Description of Artificial Sequence: Synthetic oligonucleotide
  Target: LAMA2; (-) strand; PAM type: YTN; PAM sequence: TTT
tttgtttgtttgttttttta

SEQ ID NO: 243833 - DNA, 20 bp, Artificial Sequence
  Description of Artificial Sequence: Synthetic oligonucleotide
  Target: LAMA2; (-) strand; PAM type: YTN; PAM sequence: TTT
ttttgtttgtttgttttttt

SEQ ID NO: 243834 - DNA, 20 bp, Artificial Sequence
  Description of Artificial Sequence: Synthetic oligonucleotide
  Target: LAMA2; (-) strand; PAM type: YTN; PAM sequence: CTG
caggtttttttgtttgtttg

SEQ ID NO: 243835 - DNA, 20 bp, Artificial Sequence
  Description of Artificial Sequence: Synthetic oligonucleotide
  Target: LAMA2; (-) strand; PAM type: YTN; PAM sequence: CTA
aaagcatactgcaggttttt

SEQ ID NO: 243836 - DNA, 20 bp, Artificial Sequence
  Description of Artificial Sequence: Synthetic oligonucleotide
  Target: LAMA2; (-) strand; PAM type: YTN; PAM sequence: TTC
agactaaaagcatactgcag

SEQ ID NO: 243837 - DNA, 20 bp, Artificial Sequence
  Description of Artificial Sequence: Synthetic oligonucleotide
  Target: LAMA2; (-) strand; PAM type: YTN; PAM sequence: CTG
aattcagactaaaagcatac

SEQ ID NO: 243838 - DNA, 20 bp, Artificial Sequence
  Description of Artificial Sequence: Synthetic oligonucleotide
  Target: LAMA2; (-) strand; PAM type: YTN; PAM sequence: TTG
gataagaaagtcaatccctg

SEQ ID NO: 243839 - DNA, 20 bp, Artificial Sequence
  Description of Artificial Sequence: Synthetic oligonucleotide
  Target: LAMA2; (-) strand; PAM type: YTN; PAM sequence: CTA
ttggataagaaagtcaatcc

SEQ ID NO: 243840 - DNA, 20 bp, Artificial Sequence
  Description of Artificial Sequence: Synthetic oligonucleotide
  Target: LAMA2; (-) strand; PAM type: YTN; PAM sequence: TTG
tacaggatagactattggat

SEQ ID NO: 243841 - DNA, 20 bp, Artificial Sequence
  Description of Artificial Sequence: Synthetic oligonucleotide
  Target: LAMA2; (-) strand; PAM type: YTN; PAM sequence: CTT
gtacaggatagactattgga

SEQ ID NO: 243842 - DNA, 20 bp, Artificial Sequence
  Description of Artificial Sequence: Synthetic oligonucleotide
  Target: LAMA2; (-) strand; PAM type: YTN; PAM sequence: TTC
ccttgtacaggatagactat

SEQ ID NO: 243843 - DNA, 20 bp, Artificial Sequence
  Description of Artificial Sequence: Synthetic oligonucleotide
  Target: LAMA2; (-) strand; PAM type: YTN; PAM sequence: TTA
gggttcccttgtacaggata

SEQ ID NO: 243844 - DNA, 20 bp, Artificial Sequence
  Description of Artificial Sequence: Synthetic oligonucleotide
  Target: LAMA2; (-) strand; PAM type: YTN; PAM sequence: TTT
agggttcccttgtacaggat

SEQ ID NO: 243845 - DNA, 20 bp, Artificial Sequence
  Description of Artificial Sequence: Synthetic oligonucleotide
  Target: LAMA2; (-) strand; PAM type: YTN; PAM sequence: TTT
tagggttcccttgtacagga

SEQ ID NO: 243846 - DNA, 20 bp, Artificial Sequence
  Description of Artificial Sequence: Synthetic oligonucleotide
  Target: LAMA2; (-) strand; PAM type: YTN; PAM sequence: TTA
ttttagggttcccttgtaca

SEQ ID NO: 243847 - DNA, 20 bp, Artificial Sequence
  Description of Artificial Sequence: Synthetic oligonucleotide
  Target: LAMA2; (-) strand; PAM type: YTN; PAM sequence: CTA
acgaggttattttagggttc

SEQ ID NO: 243848 - DNA, 20 bp, Artificial Sequence
  Description of Artificial Sequence: Synthetic oligonucleotide
  Target: LAMA2; (-) strand; PAM type: YTN; PAM sequence: TTG
gtggtggctaacgaggttat

SEQ ID NO: 243849 - DNA, 20 bp, Artificial Sequence
  Description of Artificial Sequence: Synthetic oligonucleotide
  Target: LAMA2; (-) strand; PAM type: YTN; PAM sequence: TTT
ggtggtggctaacgaggtta

SEQ ID NO: 243850 - DNA, 20 bp, Artificial Sequence
  Description of Artificial Sequence: Synthetic oligonucleotide
  Target: LAMA2; (-) strand; PAM type: YTN; PAM sequence: CTT
tggtggtggctaacgaggtt

SEQ ID NO: 243851 - DNA, 20 bp, Artificial Sequence
  Description of Artificial Sequence: Synthetic oligonucleotide
  Target: LAMA2; (-) strand; PAM type: YTN; PAM sequence: TTA
catagtctttggtggtggct

SEQ ID NO: 243852 - DNA, 20 bp, Artificial Sequence
  Description of Artificial Sequence: Synthetic oligonucleotide
  Target: LAMA2; (-) strand; PAM type: YTN; PAM sequence: TTT
acatagtctttggtggtggc

SEQ ID NO: 243853 - DNA, 20 bp, Artificial Sequence
  Description of Artificial Sequence: Synthetic oligonucleotide
  Target: LAMA2; (-) strand; PAM type: YTN; PAM sequence: TTG
tatttacatagtctttggtg

SEQ ID NO: 243854 - DNA, 20 bp, Artificial Sequence
  Description of Artificial Sequence: Synthetic oligonucleotide
  Target: LAMA2; (-) strand; PAM type: YTN; PAM sequence: TTT
gtatttacatagtctttggt

SEQ ID NO: 243855 - DNA, 20 bp, Artificial Sequence
  Description of Artificial Sequence: Synthetic oligonucleotide
  Target: LAMA2; (-) strand; PAM type: YTN; PAM sequence: TTG
ataaataaatttgtatttac

SEQ ID NO: 243856 - DNA, 20 bp, Artificial Sequence
  Description of Artificial Sequence: Synthetic oligonucleotide
  Target: LAMA2; (-) strand; PAM type: YTN; PAM sequence: CTA
atgagattgataaataaatt

SEQ ID NO: 243857 - DNA, 20 bp, Artificial Sequence
  Description of Artificial Sequence: Synthetic oligonucleotide
  Target: LAMA2; (-) strand; PAM type: YTN; PAM sequence: TTC
taatgagattgataaataaa

SEQ ID NO: 243858 - DNA, 20 bp, Artificial Sequence
  Description of Artificial Sequence: Synthetic oligonucleotide
  Target: LAMA2; (-) strand; PAM type: YTN; PAM sequence: TTT
ctaatgagattgataaataa

SEQ ID NO: 243859 - DNA, 20 bp, Artificial Sequence
  Description of Artificial Sequence: Synthetic oligonucleotide
  Target: LAMA2; (-) strand; PAM type: YTN; PAM sequence: TTC
ggtttctaatgagattgata

SEQ ID NO: 243860 - DNA, 20 bp, Artificial Sequence
  Description of Artificial Sequence: Synthetic oligonucleotide
  Target: LAMA2; (-) strand; PAM type: YTN; PAM sequence: TTG
gtgtggtgtgtgtgtgtgtg

SEQ ID NO: 243861 - DNA, 20 bp, Artificial Sequence
  Description of Artificial Sequence: Synthetic oligonucleotide
  Target: LAMA2; (-) strand; PAM type: YTN; PAM sequence: TTC
caatgtaaatgtgtggttgg

SEQ ID NO: 243862 - DNA, 20 bp, Artificial Sequence
  Description of Artificial Sequence: Synthetic oligonucleotide
  Target: LAMA2; (-) strand; PAM type: YTN; PAM sequence: TTA
ttccaatgtaaatgtgtggt

SEQ ID NO: 243863 - DNA, 20 bp, Artificial Sequence
  Description of Artificial Sequence: Synthetic oligonucleotide
  Target: LAMA2; (-) strand; PAM type: YTN; PAM sequence: TTT
attccaatgtaaatgtgtgg

SEQ ID NO: 243864 - DNA, 20 bp, Artificial Sequence
  Description of Artificial Sequence: Synthetic oligonucleotide
  Target: LAMA2; (-) strand; PAM type: YTN; PAM sequence: TTT
tattccaatgtaaatgtgtg

SEQ ID NO: 243865 - DNA, 20 bp, Artificial Sequence
  Description of Artificial Sequence: Synthetic oligonucleotide
  Target: LAMA2; (-) strand; PAM type: YTN; PAM sequence: TTC
attttattccaatgtaaatg

SEQ ID NO: 243866 - DNA, 20 bp, Artificial Sequence
  Description of Artificial Sequence: Synthetic oligonucleotide
  Target: LAMA2; (-) strand; PAM type: YTN; PAM sequence: CTA
agattcattttattccaatg

SEQ ID NO: 243867 - DNA, 20 bp, Artificial Sequence
  Description of Artificial Sequence: Synthetic oligonucleotide
  Target: LAMA2; (-) strand; PAM type: YTN; PAM sequence: TTC
taagattcattttattccaa

SEQ ID NO: 243868 - DNA, 20 bp, Artificial Sequence
  Description of Artificial Sequence: Synthetic oligonucleotide
  Target: LAMA2; (-) strand; PAM type: YTN; PAM sequence: TTT
ctaagattcattttattcca

SEQ ID NO: 243869 - DNA, 20 bp, Artificial Sequence
  Description of Artificial Sequence: Synthetic oligonucleotide
  Target: LAMA2; (-) strand; PAM type: YTN; PAM sequence: CTT
tctaagattcattttattcc

SEQ ID NO: 243870 - DNA, 20 bp, Artificial Sequence
  Description of Artificial Sequence: Synthetic oligonucleotide
  Target: LAMA2; (-) strand; PAM type: YTN; PAM sequence: CTG
ctttctaagattcattttat

SEQ ID NO: 243871 - DNA, 20 bp, Artificial Sequence
  Description of Artificial Sequence: Synthetic oligonucleotide
  Target: LAMA2; (-) strand; PAM type: YTN; PAM sequence: TTA
aaaatagctgctttctaaga

SEQ ID NO: 243872 - DNA, 20 bp, Artificial Sequence
  Description of Artificial Sequence: Synthetic oligonucleotide
  Target: LAMA2; (-) strand; PAM type: YTN; PAM sequence: TTT
aaaaatagctgctttctaag

SEQ ID NO: 243873 - DNA, 20 bp, Artificial Sequence
  Description of Artificial Sequence: Synthetic oligonucleotide
  Target: LAMA2; (-) strand; PAM type: YTN; PAM sequence: CTT
taaaaatagctgctttctaa

SEQ ID NO: 243874 - DNA, 20 bp, Artificial Sequence
  Description of Artificial Sequence: Synthetic oligonucleotide
  Target: LAMA2; (-) strand; PAM type: YTN; PAM sequence: TTC
tttaaaaatagctgctttct

SEQ ID NO: 243875 - DNA, 20 bp, Artificial Sequence
  Description of Artificial Sequence: Synthetic oligonucleotide
  Target: LAMA2; (-) strand; PAM type: YTN; PAM sequence: TTT
ctttaaaaatagctgctttc

SEQ ID NO: 243876 - DNA, 20 bp, Artificial Sequence
  Description of Artificial Sequence: Synthetic oligonucleotide
  Target: LAMA2; (-) strand; PAM type: YTN; PAM sequence: CTG
tttctttaaaaatagctgct

SEQ ID NO: 243877 - DNA, 20 bp, Artificial Sequence
  Description of Artificial Sequence: Synthetic oligonucleotide
  Target: LAMA2; (-) strand; PAM type: YTN; PAM sequence: TTC
ctgtttctttaaaaatagct

SEQ ID NO: 243878 - DNA, 20 bp, Artificial Sequence
  Description of Artificial Sequence: Synthetic oligonucleotide
  Target: LAMA2; (-) strand; PAM type: YTN; PAM sequence: CTT
cctgtttctttaaaaatagc

SEQ ID NO: 243879 - DNA, 20 bp, Artificial Sequence
  Description of Artificial Sequence: Synthetic oligonucleotide
  Target: LAMA2; (-) strand; PAM type: YTN; PAM sequence: TTA
gacttcctgtttctttaaaa

SEQ ID NO: 243880 - DNA, 20 bp, Artificial Sequence
  Description of Artificial Sequence: Synthetic oligonucleotide
  Target: LAMA2; (-) strand; PAM type: YTN; PAM sequence: TTA
atggcagtacatgttagact

SEQ ID NO: 243881 - DNA, 20 bp, Artificial Sequence
  Description of Artificial Sequence: Synthetic oligonucleotide
  Target: LAMA2; (-) strand; PAM type: YTN; PAM sequence: TTC
caaattaatggcagtacatg

SEQ ID NO: 243882 - DNA, 20 bp, Artificial Sequence
  Description of Artificial Sequence: Synthetic oligonucleotide
  Target: LAMA2; (-) strand; PAM type: YTN; PAM sequence: CTC
ccattccaaattaatggcag

SEQ ID NO: 243883 - DNA, 20 bp, Artificial Sequence
  Description of Artificial Sequence: Synthetic oligonucleotide
  Target: LAMA2; (-) strand; PAM type: YTN; PAM sequence: CTC
tcccattccaaattaatggc

SEQ ID NO: 243884 - DNA, 20 bp, Artificial Sequence
  Description of Artificial Sequence: Synthetic oligonucleotide
  Target: LAMA2; (-) strand; PAM type: YTN; PAM sequence: TTC
tctcccattccaaattaatg

SEQ ID NO: 243885 - DNA, 20 bp, Artificial Sequence
  Description of Artificial Sequence: Synthetic oligonucleotide
  Target: LAMA2; (-) strand; PAM type: YTN; PAM sequence: TTT
ctctcccattccaaattaat

SEQ ID NO: 243886 - DNA, 20 bp, Artificial Sequence
  Description of Artificial Sequence: Synthetic oligonucleotide
  Target: LAMA2; (-) strand; PAM type: YTN; PAM sequence: CTT
tctctcccattccaaattaa

SEQ ID NO: 243887 - DNA, 20 bp, Artificial Sequence
  Description of Artificial Sequence: Synthetic oligonucleotide
  Target: LAMA2; (-) strand; PAM type: YTN; PAM sequence: CTC
ctttctctcccattccaaat

SEQ ID NO: 243888 - DNA, 20 bp, Artificial Sequence
  Description of Artificial Sequence: Synthetic oligonucleotide
  Target: LAMA2; (-) strand; PAM type: YTN; PAM sequence: CTG
ccaagtctcctttctctccc

SEQ ID NO: 243889 - DNA, 20 bp, Artificial Sequence
  Description of Artificial Sequence: Synthetic oligonucleotide
  Target: LAMA2; (-) strand; PAM type: YTN; PAM sequence: TTC
tgccaagtctcctttctctc

SEQ ID NO: 243890 - DNA, 20 bp, Artificial Sequence
  Description of Artificial Sequence: Synthetic oligonucleotide
  Target: LAMA2; (-) strand; PAM type: YTN; PAM sequence: CTG
gttctgccaagtctcctttc

SEQ ID NO: 243891 - DNA, 20 bp, Artificial Sequence
  Description of Artificial Sequence: Synthetic oligonucleotide
  Target: LAMA2; (-) strand; PAM type: YTN; PAM sequence: TTC
tggttctgccaagtctcctt

SEQ ID NO: 243892 - DNA, 20 bp, Artificial Sequence
  Description of Artificial Sequence: Synthetic oligonucleotide
  Target: LAMA2; (-) strand; PAM type: YTN; PAM sequence: CTC
acgcaatattctggttctgc

SEQ ID NO: 243893 - DNA, 20 bp, Artificial Sequence
  Description of Artificial Sequence: Synthetic oligonucleotide
  Target: LAMA2; (-) strand; PAM type: YTN; PAM sequence: TTC
aatcctcacgcaatattctg

SEQ ID NO: 243894 - DNA, 20 bp, Artificial Sequence
  Description of Artificial Sequence: Synthetic oligonucleotide
  Target: LAMA2; (-) strand; PAM type: YTN; PAM sequence: CTT
caatcctcacgcaatattct

SEQ ID NO: 243895 - DNA, 20 bp, Artificial Sequence
  Description of Artificial Sequence: Synthetic oligonucleotide
  Target: LAMA2; (-) strand; PAM type: YTN; PAM sequence: CTA
tcttcaatcctcacgcaata

SEQ ID NO: 243896 - DNA, 20 bp, Artificial Sequence
  Description of Artificial Sequence: Synthetic oligonucleotide
  Target: LAMA2; (-) strand; PAM type: YTN; PAM sequence: CTG
aagctatcttcaatcctcac

SEQ ID NO: 243897 - DNA, 20 bp, Artificial Sequence
  Description of Artificial Sequence: Synthetic oligonucleotide
  Target: LAMA2; (-) strand; PAM type: YTN; PAM sequence: CTA
gaatctgaagctatcttcaa

SEQ ID NO: 243898 - DNA, 20 bp, Artificial Sequence
  Description of Artificial Sequence: Synthetic oligonucleotide
  Target: LAMA2; (-) strand; PAM type: YTN; PAM sequence: TTC
tagaatctgaagctatcttc

SEQ ID NO: 243899 - DNA, 20 bp, Artificial Sequence
  Description of Artificial Sequence: Synthetic oligonucleotide
  Target: LAMA2; (-) strand; PAM type: YTN; PAM sequence: CTT
ctagaatctgaagctatctt

SEQ ID NO: 243900 - DNA, 20 bp, Artificial Sequence
  Description of Artificial Sequence: Synthetic oligonucleotide
  Target: LAMA2; (-) strand; PAM type: YTN; PAM sequence: CTC
ttctagaatctgaagctatc

SEQ ID NO: 243901 - DNA, 20 bp, Artificial Sequence
  Description of Artificial Sequence: Synthetic oligonucleotide
  Target: LAMA2; (-) strand; PAM type: YTN; PAM sequence: CTA
gaaactcttctagaatctga

SEQ ID NO: 243902 - DNA, 20 bp, Artificial Sequence
  Description of Artificial Sequence: Synthetic oligonucleotide
  Target: LAMA2; (-) strand; PAM type: YTN; PAM sequence: TTC
agaaagagctagaaactctt

SEQ ID NO: 243903 - DNA, 20 bp, Artificial Sequence
  Description of Artificial Sequence: Synthetic oligonucleotide
  Target: LAMA2; (-) strand; PAM type: YTN; PAM sequence: TTA
acacatattcagaaagagct

SEQ ID NO: 243904 - DNA, 20 bp, Artificial Sequence
  Description of Artificial Sequence: Synthetic oligonucleotide
  Target: LAMA2; (-) strand; PAM type: YTN; PAM sequence: CTG
ttaacacatattcagaaaga

SEQ ID NO: 243905 - DNA, 20 bp, Artificial Sequence
  Description of Artificial Sequence: Synthetic oligonucleotide
  Target: LAMA2; (-) strand; PAM type: YTN; PAM sequence: CTC
aaacagcgaaactgttaaca

SEQ ID NO: 243906 - DNA, 20 bp, Artificial Sequence
  Description of Artificial Sequence: Synthetic oligonucleotide
  Target: LAMA2; (-) strand; PAM type: YTN; PAM sequence: CTA
gtgggtagcagagctcaaac

SEQ ID NO: 243907 - DNA, 20 bp, Artificial Sequence
  Description of Artificial Sequence: Synthetic oligonucleotide
  Target: LAMA2; (-) strand; PAM type: YTN; PAM sequence: CTG
gctagtgggtagcagagctc

SEQ ID NO: 243908 - DNA, 20 bp, Artificial Sequence
  Description of Artificial Sequence: Synthetic oligonucleotide
  Target: LAMA2; (-) strand; PAM type: YTN; PAM sequence: TTA
taactggctagtgggtagca

SEQ ID NO: 243909 - DNA, 20 bp, Artificial Sequence
  Description of Artificial Sequence: Synthetic oligonucleotide
  Target: LAMA2; (-) strand; PAM type: YTN; PAM sequence: TTT
ataactggctagtgggtagc

SEQ ID NO: 243910 - DNA, 20 bp, Artificial Sequence
  Description of Artificial Sequence: Synthetic oligonucleotide
  Target: LAMA2; (-) strand; PAM type: YTN; PAM sequence: CTG
tgtttataactggctagtgg

SEQ ID NO: 243911 - DNA, 20 bp, Artificial Sequence
  Description of Artificial Sequence: Synthetic oligonucleotide
  Target: LAMA2; (-) strand; PAM type: YTN; PAM sequence: TTA
cctgtgtttataactggcta

SEQ ID NO: 243912 - DNA, 20 bp, Artificial Sequence
  Description of Artificial Sequence: Synthetic oligonucleotide
  Target: LAMA2; (-) strand; PAM type: YTN; PAM sequence: CTT
acctgtgtttataactggct

SEQ ID NO: 243913 - DNA, 20 bp, Artificial Sequence
  Description of Artificial Sequence: Synthetic oligonucleotide
  Target: LAMA2; (-) strand; PAM type: YTN; PAM sequence: TTA
agggtcttacctgtgtttat

SEQ ID NO: 243914 - DNA, 20 bp, Artificial Sequence
  Description of Artificial Sequence: Synthetic oligonucleotide
  Target: LAMA2; (-) strand; PAM type: YTN; PAM sequence: CTG
tgaagttaagggtcttacct

SEQ ID NO: 243915 - DNA, 20 bp, Artificial Sequence
  Description of Artificial Sequence: Synthetic oligonucleotide
  Target: LAMA2; (-) strand; PAM type: YTN; PAM sequence: TTC
ccaacaggccctgtgaagtt

SEQ ID NO: 243916 - DNA, 20 bp, Artificial Sequence
  Description of Artificial Sequence: Synthetic oligonucleotide
  Target: LAMA2; (-) strand; PAM type: YTN; PAM sequence: CTT
cccaacaggccctgtgaagt

SEQ ID NO: 243917 - DNA, 20 bp, Artificial Sequence
  Description of Artificial Sequence: Synthetic oligonucleotide
  Target: LAMA2; (-) strand; PAM type: YTN; PAM sequence: CTC
ttcccaacaggccctgtgaa

SEQ ID NO: 243918 - DNA, 20 bp, Artificial Sequence
  Description of Artificial Sequence: Synthetic oligonucleotide
  Target: LAMA2; (-) strand; PAM type: YTN; PAM sequence: TTA
taacctcttcccaacaggcc

SEQ ID NO: 243919 - DNA, 20 bp, Artificial Sequence
  Description of Artificial Sequence: Synthetic oligonucleotide
  Target: LAMA2; (-) strand; PAM type: YTN; PAM sequence: CTA
aaaaattataacctcttccc

SEQ ID NO: 243920 - DNA, 20 bp, Artificial Sequence
  Description of Artificial Sequence: Synthetic oligonucleotide
  Target: LAMA2; (-) strand; PAM type: YTN; PAM sequence: TTG
ctaaaaaattataacctctt

SEQ ID NO: 243921 - DNA, 20 bp, Artificial Sequence
  Description of Artificial Sequence: Synthetic oligonucleotide
  Target: LAMA2; (-) strand; PAM type: YTN; PAM sequence: CTG
ttgctaaaaaattataacct

SEQ ID NO: 243922 - DNA, 20 bp, Artificial Sequence
  Description of Artificial Sequence: Synthetic oligonucleotide
  Target: LAMA2; (-) strand; PAM type: YTN; PAM sequence: TTC
tgttgctaaaaaattataac

SEQ ID NO: 243923 - DNA, 20 bp, Artificial Sequence
  Description of Artificial Sequence: Synthetic oligonucleotide
  Target: LAMA2; (-) strand; PAM type: YTN; PAM sequence: TTG
aaaaacaggttctgttgcta

SEQ ID NO: 243924 - DNA, 20 bp, Artificial Sequence
  Description of Artificial Sequence: Synthetic oligonucleotide
  Target: LAMA2; (-) strand; PAM type: YTN; PAM sequence: TTT
gaaaaacaggttctgttgct

SEQ ID NO: 243925 - DNA, 20 bp, Artificial Sequence
  Description of Artificial Sequence: Synthetic oligonucleotide
  Target: LAMA2; (-) strand; PAM type: YTN; PAM sequence: TTG
tttgaaaaacaggttctgtt

SEQ ID NO: 243926 - DNA, 20 bp, Artificial Sequence
  Description of Artificial Sequence: Synthetic oligonucleotide
  Target: LAMA2; (-) strand; PAM type: YTN; PAM sequence: TTT
gtttgaaaaacaggttctgt

SEQ ID NO: 243927 - DNA, 20 bp, Artificial Sequence
  Description of Artificial Sequence: Synthetic oligonucleotide
  Target: LAMA2; (-) strand; PAM type: YTN; PAM sequence: TTT
tgtttgaaaaacaggttctg

SEQ ID NO: 243928 - DNA, 20 bp, Artificial Sequence
  Description of Artificial Sequence: Synthetic oligonucleotide
  Target: LAMA2; (-) strand; PAM type: YTN; PAM sequence: TTA
ggattttgtttgaaaaacag

SEQ ID NO: 243929 - DNA, 20 bp, Artificial Sequence
  Description of Artificial Sequence: Synthetic oligonucleotide
  Target: LAMA2; (-) strand; PAM type: YTN; PAM sequence: CTA
attaggattttgtttgaaaa

SEQ ID NO: 243930 - DNA, 20 bp, Artificial Sequence
  Description of Artificial Sequence: Synthetic oligonucleotide
  Target: LAMA2; (-) strand; PAM type: YTN; PAM sequence: TTC
taattaggattttgtttgaa

SEQ ID NO: 243931 - DNA, 20 bp, Artificial Sequence
  Description of Artificial Sequence: Synthetic oligonucleotide
  Target: LAMA2; (-) strand; PAM type: YTN; PAM sequence: TTG
ggtgttctaattaggatttt

SEQ ID NO: 243932 - DNA, 20 bp, Artificial Sequence
  Description of Artificial Sequence: Synthetic oligonucleotide
  Target: LAMA2; (-) strand; PAM type: YTN; PAM sequence: TTT
gggtgttctaattaggattt

SEQ ID NO: 243933 - DNA, 20 bp, Artificial Sequence
  Description of Artificial Sequence: Synthetic oligonucleotide
  Target: LAMA2; (-) strand; PAM type: YTN; PAM sequence: TTT
tgggtgttctaattaggatt

SEQ ID NO: 243934 - DNA, 20 bp, Artificial Sequence
  Description of Artificial Sequence: Synthetic oligonucleotide
  Target: LAMA2; (-) strand; PAM type: YTN; PAM sequence: TTT
ttgggtgttctaattaggat

SEQ ID NO: 243935 - DNA, 20 bp, Artificial Sequence
  Description of Artificial Sequence: Synthetic oligonucleotide
  Target: LAMA2; (-) strand; PAM type: YTN; PAM sequence: TTG
tttttgggtgttctaattag

SEQ ID NO: 243936 - DNA, 20 bp, Artificial Sequence
  Description of Artificial Sequence: Synthetic oligonucleotide
  Target: LAMA2; (-) strand; PAM type: YTN; PAM sequence: TTT
gtttttgggtgttctaatta

SEQ ID NO: 243937 - DNA, 20 bp, Artificial Sequence
  Description of Artificial Sequence: Synthetic oligonucleotide
  Target: LAMA2; (-) strand; PAM type: YTN; PAM sequence: TTG
tttgtttttgggtgttctaa

SEQ ID NO: 243938 - DNA, 20 bp, Artificial Sequence
  Description of Artificial Sequence: Synthetic oligonucleotide
  Target: LAMA2; (-) strand; PAM type: YTN; PAM sequence: TTT
gtttgtttttgggtgttcta

SEQ ID NO: 243939 - DNA, 20 bp, Artificial Sequence
  Description of Artificial Sequence: Synthetic oligonucleotide
  Target: LAMA2; (-) strand; PAM type: YTN; PAM sequence: TTT
tgtttgtttttgggtgttct

SEQ ID NO: 243940 - DNA, 20 bp, Artificial Sequence
  Description of Artificial Sequence: Synthetic oligonucleotide
  Target: LAMA2; (-) strand; PAM type: YTN; PAM sequence: TTA
ttttgtttgtttttgggtgt

SEQ ID NO: 243941 - DNA, 20 bp, Artificial Sequence
  Description of Artificial Sequence: Synthetic oligonucleotide
  Target: LAMA2; (-) strand; PAM type: YTN; PAM sequence: TTT
attttgtttgtttttgggtg

SEQ ID NO: 243942 - DNA, 20 bp, Artificial Sequence
  Description of Artificial Sequence: Synthetic oligonucleotide
  Target: LAMA2; (-) strand; PAM type: YTN; PAM sequence: CTT
tattttgtttgtttttgggt

SEQ ID NO: 243943 - DNA, 20 bp, Artificial Sequence
  Description of Artificial Sequence: Synthetic oligonucleotide
  Target: LAMA2; (-) strand; PAM type: YTN; PAM sequence: TTG
aatcctttattttgtttgtt

SEQ ID NO: 243944 - DNA, 20 bp, Artificial Sequence
  Description of Artificial Sequence: Synthetic oligonucleotide
  Target: LAMA2; (-) strand; PAM type: YTN; PAM sequence: TTT
gaatcctttattttgtttgt

SEQ ID NO: 243945 - DNA, 20 bp, Artificial Sequence
  Description of Artificial Sequence: Synthetic oligonucleotide
  Target: LAMA2; (-) strand; PAM type: YTN; PAM sequence: CTG
gccatgtcacccatttgaat

SEQ ID NO: 243946 - DNA, 20 bp, Artificial Sequence
  Description of Artificial Sequence: Synthetic oligonucleotide
  Target: LAMA2; (-) strand; PAM type: YTN; PAM sequence: CTG
taaccaggactggccatgtc

SEQ ID NO: 243947 - DNA, 20 bp, Artificial Sequence
  Description of Artificial Sequence: Synthetic oligonucleotide
  Target: LAMA2; (-) strand; PAM type: YTN; PAM sequence: CTC
atactgtaaccaggactggc

SEQ ID NO: 243948 - DNA, 20 bp, Artificial Sequence
  Description of Artificial Sequence: Synthetic oligonucleotide
  Target: LAMA2; (-) strand; PAM type: YTN; PAM sequence: CTG
tctcatactgtaaccaggac

SEQ ID NO: 243949 - DNA, 20 bp, Artificial Sequence
  Description of Artificial Sequence: Synthetic oligonucleotide
  Target: LAMA2; (-) strand; PAM type: YTN; PAM sequence: TTG
cccaccgtaaccggcatctg

SEQ ID NO: 243950 - DNA, 20 bp, Artificial Sequence
  Description of Artificial Sequence: Synthetic oligonucleotide
  Target: LAMA2; (-) strand; PAM type: YTN; PAM sequence: CTG
ttgcccaccgtaaccggcat

SEQ ID NO: 243951 - DNA, 20 bp, Artificial Sequence
  Description of Artificial Sequence: Synthetic oligonucleotide
  Target: LAMA2; (-) strand; PAM type: YTN; PAM sequence: TTC
tgttgcccaccgtaaccggc

SEQ ID NO: 243952 - DNA, 20 bp, Artificial Sequence
  Description of Artificial Sequence: Synthetic oligonucleotide
  Target: LAMA2; (-) strand; PAM type: YTN; PAM sequence: CTG
ttctgttgcccaccgtaacc

SEQ ID NO: 243953 - DNA, 20 bp, Artificial Sequence
  Description of Artificial Sequence: Synthetic oligonucleotide
  Target: LAMA2; (-) strand; PAM type: YTN; PAM sequence: CTG
tagccagcatctgttctgtt

SEQ ID NO: 243954 - DNA, 20 bp, Artificial Sequence
  Description of Artificial Sequence: Synthetic oligonucleotide
  Target: LAMA2; (-) strand; PAM type: YTN; PAM sequence: CTG
tcgaccactgtagccagcat

SEQ ID NO: 243955 - DNA, 20 bp, Artificial Sequence
  Description of Artificial Sequence: Synthetic oligonucleotide
  Target: LAMA2; (-) strand; PAM type: YTN; PAM sequence: CTC
tgtcgaccactgtagccagc

SEQ ID NO: 243956 - DNA, 20 bp, Artificial Sequence
  Description of Artificial Sequence: Synthetic oligonucleotide
  Target: LAMA2; (-) strand; PAM type: YTN; PAM sequence: CTA
aaatgaactctgtcgaccac

SEQ ID NO: 243957 - DNA, 20 bp, Artificial Sequence
  Description of Artificial Sequence: Synthetic oligonucleotide
  Target: LAMA2; (-) strand; PAM type: YTN; PAM sequence: TTG
aactaaaatgaactctgtcg

SEQ ID NO: 243958 - DNA, 20 bp, Artificial Sequence
  Description of Artificial Sequence: Synthetic oligonucleotide
  Target: LAMA2; (-) strand; PAM type: YTN; PAM sequence: CTT
gaactaaaatgaactctgtc

SEQ ID NO: 243959 - DNA, 20 bp, Artificial Sequence
  Description of Artificial Sequence: Synthetic oligonucleotide
  Target: LAMA2; (-) strand; PAM type: YTN; PAM sequence: CTG
cttgaactaaaatgaactct

SEQ ID NO: 243960 - DNA, 20 bp, Artificial Sequence
  Description of Artificial Sequence: Synthetic oligonucleotide
  Target: LAMA2; (-) strand; PAM type: YTN; PAM sequence: TTC
tgcttgaactaaaatgaact

SEQ ID NO: 243961 - DNA, 20 bp, Artificial Sequence
  Description of Artificial Sequence: Synthetic oligonucleotide
  Target: LAMA2; (-) strand; PAM type: YTN; PAM sequence: CTT
ctgcttgaactaaaatgaac

SEQ ID NO: 243962 - DNA, 20 bp, Artificial Sequence
  Description of Artificial Sequence: Synthetic oligonucleotide
  Target: LAMA2; (-) strand; PAM type: YTN; PAM sequence: CTA
ccttctgcttgaactaaaat

SEQ ID NO: 243963 - DNA, 20 bp, Artificial Sequence
  Description of Artificial Sequence: Synthetic oligonucleotide
  Target: LAMA2; (-) strand; PAM type: YTN; PAM sequence: CTG
taacaagcaccagccctacc

SEQ ID NO: 243964 - DNA, 20 bp, Artificial Sequence
  Description of Artificial Sequence: Synthetic oligonucleotide
  Target: LAMA2; (-) strand; PAM type: YTN; PAM sequence: CTG
gccactgtaacaagcaccag

SEQ ID NO: 243965 - DNA, 20 bp, Artificial Sequence
  Description of Artificial Sequence: Synthetic oligonucleotide
  Target: LAMA2; (-) strand; PAM type: YTN; PAM sequence: CTA
ctggccactgtaacaagcac

SEQ ID NO: 243966 - DNA, 20 bp, Artificial Sequence
  Description of Artificial Sequence: Synthetic oligonucleotide
  Target: LAMA2; (-) strand; PAM type: YTN; PAM sequence: CTA
taaccagaaaccaggcctac

SEQ ID NO: 243967 - DNA, 20 bp, Artificial Sequence
  Description of Artificial Sequence: Synthetic oligonucleotide
  Target: LAMA2; (-) strand; PAM type: YTN; PAM sequence: CTG
ccatgtgctataaccagaaa

SEQ ID NO: 243968 - DNA, 20 bp, Artificial Sequence
  Description of Artificial Sequence: Synthetic oligonucleotide
  Target: LAMA2; (-) strand; PAM type: YTN; PAM sequence: CTC
tgccatgtgctataaccaga

SEQ ID NO: 243969 - DNA, 20 bp, Artificial Sequence
  Description of Artificial Sequence: Synthetic oligonucleotide
  Target: LAMA2; (-) strand; PAM type: YTN; PAM sequence: CTA
actctgccatgtgctataac

SEQ ID NO: 243970 - DNA, 20 bp, Artificial Sequence
  Description of Artificial Sequence: Synthetic oligonucleotide
  Target: LAMA2; (-) strand; PAM type: YTN; PAM sequence: CTC
ctaactctgccatgtgctat

SEQ ID NO: 243971 - DNA, 20 bp, Artificial Sequence
  Description of Artificial Sequence: Synthetic oligonucleotide
  Target: LAMA2; (-) strand; PAM type: YTN; PAM sequence: TTA
tggggaaaccacagatgagg

SEQ ID NO: 243972 - DNA, 20 bp, Artificial Sequence
  Description of Artificial Sequence: Synthetic oligonucleotide
  Target: LAMA2; (-) strand; PAM type: YTN; PAM sequence: CTT
atggggaaaccacagatgag

SEQ ID NO: 243973 - DNA, 20 bp, Artificial Sequence
  Description of Artificial Sequence: Synthetic oligonucleotide
  Target: LAMA2; (-) strand; PAM type: YTN; PAM sequence: TTC
ttatggggaaaccacagatg

SEQ ID NO: 243974 - DNA, 20 bp, Artificial Sequence
  Description of Artificial Sequence: Synthetic oligonucleotide
  Target: LAMA2; (-) strand; PAM type: YTN; PAM sequence: TTT
cttatggggaaaccacagat

SEQ ID NO: 243975 - DNA, 20 bp, Artificial Sequence
  Description of Artificial Sequence: Synthetic oligonucleotide
  Target: LAMA2; (-) strand; PAM type: YTN; PAM sequence: TTT
tcttatggggaaaccacaga

SEQ ID NO: 243976 - DNA, 20 bp, Artificial Sequence
  Description of Artificial Sequence: Synthetic oligonucleotide
  Target: LAMA2; (-) strand; PAM type: YTN; PAM sequence: TTC
ccaaaaggtagttttcttat

SEQ ID NO: 243977 - DNA, 20 bp, Artificial Sequence
  Description of Artificial Sequence: Synthetic oligonucleotide
  Target: LAMA2; (-) strand; PAM type: YTN; PAM sequence: TTT
cccaaaaggtagttttctta

SEQ ID NO: 243978 - DNA, 20 bp, Artificial Sequence
  Description of Artificial Sequence: Synthetic oligonucleotide
  Target: LAMA2; (-) strand; PAM type: YTN; PAM sequence: TTT
tcccaaaaggtagttttctt

SEQ ID NO: 243979 - DNA, 20 bp, Artificial Sequence
  Description of Artificial Sequence: Synthetic oligonucleotide
  Target: LAMA2; (-) strand; PAM type: YTN; PAM sequence: TTG
tatcatgttttcccaaaagg

SEQ ID NO: 243980 - DNA, 20 bp, Artificial Sequence
  Description of Artificial Sequence: Synthetic oligonucleotide
  Target: LAMA2; (-) strand; PAM type: YTN; PAM sequence: TTT
gtatcatgttttcccaaaag

SEQ ID NO: 243981 - DNA, 20 bp, Artificial Sequence
  Description of Artificial Sequence: Synthetic oligonucleotide
  Target: LAMA2; (-) strand; PAM type: YTN; PAM sequence: CTG
tttgtatcatgttttcccaa

SEQ ID NO: 243982 - DNA, 20 bp, Artificial Sequence
  Description of Artificial Sequence: Synthetic oligonucleotide
  Target: LAMA2; (-) strand; PAM type: YTN; PAM sequence: CTG
atctgtttgtatcatgtttt

SEQ ID NO: 243983 - DNA, 20 bp, Artificial Sequence
  Description of Artificial Sequence: Synthetic oligonucleotide
  Target: LAMA2; (-) strand; PAM type: YTN; PAM sequence: TTC
acctgatctgtttgtatcat

SEQ ID NO: 243984 - DNA, 20 bp, Artificial Sequence
  Description of Artificial Sequence: Synthetic oligonucleotide
  Target: LAMA2; (-) strand; PAM type: YTN; PAM sequence: CTA
attcacctgatctgtttgta

SEQ ID NO: 243985 - DNA, 20 bp, Artificial Sequence
  Description of Artificial Sequence: Synthetic oligonucleotide
  Target: LAMA2; (-) strand; PAM type: YTN; PAM sequence: TTC
taattcacctgatctgtttg

SEQ ID NO: 243986 - DNA, 20 bp, Artificial Sequence
  Description of Artificial Sequence: Synthetic oligonucleotide
  Target: LAMA2; (-) strand; PAM type: YTN; PAM sequence: CTT
ctaattcacctgatctgttt

SEQ ID NO: 243987 - DNA, 20 bp, Artificial Sequence
  Description of Artificial Sequence: Synthetic oligonucleotide
  Target: LAMA2; (-) strand; PAM type: YTN; PAM sequence: CTG
caggagaccttctaattcac

SEQ ID NO: 243988 - DNA, 20 bp, Artificial Sequence
  Description of Artificial Sequence: Synthetic oligonucleotide
  Target: LAMA2; (-) strand; PAM type: YTN; PAM sequence: TTA
aatctgcaggagaccttcta

SEQ ID NO: 243989 - DNA, 20 bp, Artificial Sequence
  Description of Artificial Sequence: Synthetic oligonucleotide
  Target: LAMA2; (-) strand; PAM type: YTN; PAM sequence: TTT
aaatctgcaggagaccttct

SEQ ID NO: 243990 - DNA, 20 bp, Artificial Sequence
  Description of Artificial Sequence: Synthetic oligonucleotide
  Target: LAMA2; (-) strand; PAM type: YTN; PAM sequence: TTT
taaatctgcaggagaccttc

SEQ ID NO: 243991 - DNA, 20 bp, Artificial Sequence
  Description of Artificial Sequence: Synthetic oligonucleotide
  Target: LAMA2; (-) strand; PAM type: YTN; PAM sequence: TTC
ataaaattttaaatctgcag

SEQ ID NO: 243992 - DNA, 20 bp, Artificial Sequence
  Description of Artificial Sequence: Synthetic oligonucleotide
  Target: LAMA2; (-) strand; PAM type: YTN; PAM sequence: TTA
tattcataaaattttaaatc

SEQ ID NO: 243993 - DNA, 20 bp, Artificial Sequence
  Description of Artificial Sequence: Synthetic oligonucleotide
  Target: LAMA2; (-) strand; PAM type: YTN; PAM sequence: TTG
gcattatattcataaaattt

SEQ ID NO: 243994 - DNA, 20 bp, Artificial Sequence
  Description of Artificial Sequence: Synthetic oligonucleotide
  Target: LAMA2; (-) strand; PAM type: YTN; PAM sequence: TTT
ggcattatattcataaaatt

SEQ ID NO: 243995 - DNA, 20 bp, Artificial Sequence
  Description of Artificial Sequence: Synthetic oligonucleotide
  Target: LAMA2; (-) strand; PAM type: YTN; PAM sequence: TTA
tatttggcattatattcata

SEQ ID NO: 243996 - DNA, 20 bp, Artificial Sequence
  Description of Artificial Sequence: Synthetic oligonucleotide
  Target: LAMA2; (-) strand; PAM type: YTN; PAM sequence: CTG
agtgtaagattatatttggc

SEQ ID NO: 243997 - DNA, 20 bp, Artificial Sequence
  Description of Artificial Sequence: Synthetic oligonucleotide
  Target: LAMA2; (-) strand; PAM type: YTN; PAM sequence: TTA
gtagtcaactgagtgtaaga

SEQ ID NO: 243998 - DNA, 20 bp, Artificial Sequence
  Description of Artificial Sequence: Synthetic oligonucleotide
  Target: LAMA2; (-) strand; PAM type: YTN; PAM sequence: TTA
ttagtagtcaactgagtgta

SEQ ID NO: 243999 - DNA, 20 bp, Artificial Sequence
  Description of Artificial Sequence: Synthetic oligonucleotide
  Target: LAMA2; (-) strand; PAM type: YTN; PAM sequence: TTA
ttattagtagtcaactgagt

SEQ ID NO: 244000 - DNA, 20 bp, Artificial Sequence
  Description of Artificial Sequence: Synthetic oligonucleotide
  Target: LAMA2; (-) strand; PAM type: YTN; PAM sequence: TTT
attattagtagtcaactgag

SEQ ID NO: 244001 - DNA, 20 bp, Artificial Sequence
  Description of Artificial Sequence: Synthetic oligonucleotide
  Target: LAMA2; (-) strand; PAM type: YTN; PAM sequence: TTA
tttattattagtagtcaact

SEQ ID NO: 244002 - DNA, 20 bp, Artificial Sequence
  Description of Artificial Sequence: Synthetic oligonucleotide
  Target: LAMA2; (-) strand; PAM type: YTN; PAM sequence: TTG
tagggttatttattattagt

SEQ ID NO: 244003 - DNA, 20 bp, Artificial Sequence
  Description of Artificial Sequence: Synthetic oligonucleotide
  Target: LAMA2; (-) strand; PAM type: YTN; PAM sequence: TTT
gtagggttatttattattag

SEQ ID NO: 244004 - DNA, 20 bp, Artificial Sequence
  Description of Artificial Sequence: Synthetic oligonucleotide
  Target: LAMA2; (-) strand; PAM type: YTN; PAM sequence: TTT
tgtagggttatttattatta

SEQ ID NO: 244005 - DNA, 20 bp, Artificial Sequence
  Description of Artificial Sequence: Synthetic oligonucleotide
  Target: LAMA2; (-) strand; PAM type: YTN; PAM sequence: TTA
ccatattttgtagggttatt

SEQ ID NO: 244006 - DNA, 20 bp, Artificial Sequence
  Description of Artificial Sequence: Synthetic oligonucleotide
  Target: LAMA2; (-) strand; PAM type: YTN; PAM sequence: TTT
accatattttgtagggttat

SEQ ID NO: 244007 - DNA, 20 bp, Artificial Sequence
  Description of Artificial Sequence: Synthetic oligonucleotide
  Target: LAMA2; (-) strand; PAM type: YTN; PAM sequence: CTT
taccatattttgtagggtta

SEQ ID NO: 244008 - DNA, 20 bp, Artificial Sequence
  Description of Artificial Sequence: Synthetic oligonucleotide
  Target: LAMA2; (-) strand; PAM type: YTN; PAM sequence: TTG
tcatggagtcactttaccat

SEQ ID NO: 244009 - DNA, 20 bp, Artificial Sequence
  Description of Artificial Sequence: Synthetic oligonucleotide
  Target: LAMA2; (-) strand; PAM type: YTN; PAM sequence: TTG
ttgtcatggagtcactttac

SEQ ID NO: 244010 - DNA, 20 bp, Artificial Sequence
  Description of Artificial Sequence: Synthetic oligonucleotide
  Target: LAMA2; (-) strand; PAM type: YTN; PAM sequence: TTC
aattgttgtcatggagtcac

SEQ ID NO: 244011 - DNA, 20 bp, Artificial Sequence
  Description of Artificial Sequence: Synthetic oligonucleotide
  Target: LAMA2; (-) strand; PAM type: YTN; PAM sequence: TTT
caattgttgtcatggagtca

SEQ ID NO: 244012 - DNA, 20 bp, Artificial Sequence
  Description of Artificial Sequence: Synthetic oligonucleotide
  Target: LAMA2; (-) strand; PAM type: YTN; PAM sequence: TTT
tcaattgttgtcatggagtc

SEQ ID NO: 244013 - DNA, 20 bp, Artificial Sequence
  Description of Artificial Sequence: Synthetic oligonucleotide
  Target: LAMA2; (-) strand; PAM type: YTN; PAM sequence: CTT
ttcaattgttgtcatggagt

SEQ ID NO: 244014 - DNA, 20 bp, Artificial Sequence
  Description of Artificial Sequence: Synthetic oligonucleotide
  Target: LAMA2; (-) strand; PAM type: YTN; PAM sequence: TTC
ttttcaattgttgtcatgga

SEQ ID NO: 244015 - DNA, 20 bp, Artificial Sequence
  Description of Artificial Sequence: Synthetic oligonucleotide
  Target: LAMA2; (-) strand; PAM type: YTN; PAM sequence: TTT
cttttcaattgttgtcatgg

SEQ ID NO: 244016 - DNA, 20 bp, Artificial Sequence
  Description of Artificial Sequence: Synthetic oligonucleotide
  Target: LAMA2; (-) strand; PAM type: YTN; PAM sequence: TTT
tcttttcaattgttgtcatg

SEQ ID NO: 244017 - DNA, 20 bp, Artificial Sequence
  Description of Artificial Sequence: Synthetic oligonucleotide
  Target: LAMA2; (-) strand; PAM type: YTN; PAM sequence: TTA
ttttcttttcaattgttgtc

SEQ ID NO: 244018 - DNA, 20 bp, Artificial Sequence
  Description of Artificial Sequence: Synthetic oligonucleotide
  Target: LAMA2; (-) strand; PAM type: YTN; PAM sequence: CTG
agtgcaattattttcttttc

SEQ ID NO: 244019 - DNA, 20 bp, Artificial Sequence
  Description of Artificial Sequence: Synthetic oligonucleotide
  Target: LAMA2; (-) strand; PAM type: YTN; PAM sequence: CTC
agctgagtgcaattattttc

SEQ ID NO: 244020 - DNA, 20 bp, Artificial Sequence
  Description of Artificial Sequence: Synthetic oligonucleotide
  Target: LAMA2; (-) strand; PAM type: YTN; PAM sequence: CTA
gatatggacaatagctcagc

SEQ ID NO: 244021 - DNA, 20 bp, Artificial Sequence
  Description of Artificial Sequence: Synthetic oligonucleotide
  Target: LAMA2; (-) strand; PAM type: YTN; PAM sequence: TTG
tgtatcatcagtgcatctag

SEQ ID NO: 244022 - DNA, 20 bp, Artificial Sequence
  Description of Artificial Sequence: Synthetic oligonucleotide
  Target: LAMA2; (-) strand; PAM type: YTN; PAM sequence: TTT
gtgtatcatcagtgcatcta

SEQ ID NO: 244023 - DNA, 20 bp, Artificial Sequence
  Description of Artificial Sequence: Synthetic oligonucleotide
  Target: LAMA2; (-) strand; PAM type: YTN; PAM sequence: CTG
ggtttgtgtatcatcagtgc

SEQ ID NO: 244024 - DNA, 20 bp, Artificial Sequence
  Description of Artificial Sequence: Synthetic oligonucleotide
  Target: LAMA2; (-) strand; PAM type: YTN; PAM sequence: CTG
tggctgggtttgtgtatcat

SEQ ID NO: 244025 - DNA, 20 bp, Artificial Sequence
  Description of Artificial Sequence: Synthetic oligonucleotide
  Target: LAMA2; (-) strand; PAM type: YTN; PAM sequence: TTC
tgtggctgggtttgtgtatc

SEQ ID NO: 244026 - DNA, 20 bp, Artificial Sequence
  Description of Artificial Sequence: Synthetic oligonucleotide
  Target: LAMA2; (-) strand; PAM type: YTN; PAM sequence: TTT
ctgtggctgggtttgtgtat

SEQ ID NO: 244027 - DNA, 20 bp, Artificial Sequence
  Description of Artificial Sequence: Synthetic oligonucleotide
  Target: LAMA2; (-) strand; PAM type: YTN; PAM sequence: TTT
tctgtggctgggtttgtgta

SEQ ID NO: 244028 - DNA, 20 bp, Artificial Sequence
  Description of Artificial Sequence: Synthetic oligonucleotide
  Target: LAMA2; (-) strand; PAM type: YTN; PAM sequence: CTG
acacatgccacattttctgt

SEQ ID NO: 244029 - DNA, 20 bp, Artificial Sequence
  Description of Artificial Sequence: Synthetic oligonucleotide
  Target: LAMA2; (-) strand; PAM type: YTN; PAM sequence: CTC
tgacacatgccacattttct

SEQ ID NO: 244030 - DNA, 20 bp, Artificial Sequence
  Description of Artificial Sequence: Synthetic oligonucleotide
  Target: LAMA2; (-) strand; PAM type: YTN; PAM sequence: TTG
ctctgacacatgccacattt

SEQ ID NO: 244031 - DNA, 20 bp, Artificial Sequence
  Description of Artificial Sequence: Synthetic oligonucleotide
  Target: LAMA2; (-) strand; PAM type: YTN; PAM sequence: TTT
gctctgacacatgccacatt

SEQ ID NO: 244032 - DNA, 20 bp, Artificial Sequence
  Description of Artificial Sequence: Synthetic oligonucleotide
  Target: LAMA2; (-) strand; PAM type: YTN; PAM sequence: CTT
tgctctgacacatgccacat

SEQ ID NO: 244033 - DNA, 20 bp, Artificial Sequence
  Description of Artificial Sequence: Synthetic oligonucleotide
  Target: LAMA2; (-) strand; PAM type: YTN; PAM sequence: TTG
ctttgctctgacacatgcca

SEQ ID NO: 244034 - DNA, 20 bp, Artificial Sequence
  Description of Artificial Sequence: Synthetic oligonucleotide
  Target: LAMA2; (-) strand; PAM type: YTN; PAM sequence: CTA
gttgctttgctctgacacat

SEQ ID NO: 244035 - DNA, 20 bp, Artificial Sequence
  Description of Artificial Sequence: Synthetic oligonucleotide
  Target: LAMA2; (-) strand; PAM type: YTN; PAM sequence: TTC
tagttgctttgctctgacac

SEQ ID NO: 244036 - DNA, 20 bp, Artificial Sequence
  Description of Artificial Sequence: Synthetic oligonucleotide
  Target: LAMA2; (-) strand; PAM type: YTN; PAM sequence: TTG
aatcattctagttgctttgc

SEQ ID NO: 244037 - DNA, 20 bp, Artificial Sequence
  Description of Artificial Sequence: Synthetic oligonucleotide
  Target: LAMA2; (-) strand; PAM type: YTN; PAM sequence: CTT
gaatcattctagttgctttg

SEQ ID NO: 244038 - DNA, 20 bp, Artificial Sequence
  Description of Artificial Sequence: Synthetic oligonucleotide
  Target: LAMA2; (-) strand; PAM type: YTN; PAM sequence: TTC
agtgtcttgaatcattctag

SEQ ID NO: 244039 - DNA, 20 bp, Artificial Sequence
  Description of Artificial Sequence: Synthetic oligonucleotide
  Target: LAMA2; (-) strand; PAM type: YTN; PAM sequence: CTG
ttcagtgtcttgaatcattc

SEQ ID NO: 244040 - DNA, 20 bp, Artificial Sequence
  Description of Artificial Sequence: Synthetic oligonucleotide
  Target: LAMA2; (-) strand; PAM type: YTN; PAM sequence: CTG
gctgttcagtgtcttgaatc

SEQ ID NO: 244041 - DNA, 20 bp, Artificial Sequence
  Description of Artificial Sequence: Synthetic oligonucleotide
  Target: LAMA2; (-) strand; PAM type: YTN; PAM sequence: TTG
aacactggctgttcagtgtc

SEQ ID NO: 244042 - DNA, 20 bp, Artificial Sequence
  Description of Artificial Sequence: Synthetic oligonucleotide
  Target: LAMA2; (-) strand; PAM type: YTN; PAM sequence: CTT
gaacactggctgttcagtgt

SEQ ID NO: 244043 - DNA, 20 bp, Artificial Sequence
  Description of Artificial Sequence: Synthetic oligonucleotide
  Target: LAMA2; (-) strand; PAM type: YTN; PAM sequence: TTA
cgtagcttgaacactggctg

SEQ ID NO: 244044 - DNA, 20 bp, Artificial Sequence
  Description of Artificial Sequence: Synthetic oligonucleotide
  Target: LAMA2; (-) strand; PAM type: YTN; PAM sequence: CTG
taatataggtaagaaattac

SEQ ID NO: 244045 - DNA, 20 bp, Artificial Sequence
  Description of Artificial Sequence: Synthetic oligonucleotide
  Target: LAMA2; (-) strand; PAM type: YTN; PAM sequence: TTC
ctgtaatataggtaagaaat

SEQ ID NO: 244046 - DNA, 20 bp, Artificial Sequence
  Description of Artificial Sequence: Synthetic oligonucleotide
  Target: LAMA2; (-) strand; PAM type: YTN; PAM sequence: TTT
cctgtaatataggtaagaaa

SEQ ID NO: 244047 - DNA, 20 bp, Artificial Sequence
  Description of Artificial Sequence: Synthetic oligonucleotide
  Target: LAMA2; (-) strand; PAM type: YTN; PAM sequence: TTT
tcctgtaatataggtaagaa

SEQ ID NO: 244048 - DNA, 20 bp, Artificial Sequence
  Description of Artificial Sequence: Synthetic oligonucleotide
  Target: LAMA2; (-) strand; PAM type: YTN; PAM sequence: TTT
ttcctgtaatataggtaaga

SEQ ID NO: 244049 - DNA, 20 bp, Artificial Sequence
  Description of Artificial Sequence: Synthetic oligonucleotide
  Target: LAMA2; (-) strand; PAM type: YTN; PAM sequence: TTT
tttcctgtaatataggtaag

SEQ ID NO: 244050 - DNA, 20 bp, Artificial Sequence
  Description of Artificial Sequence: Synthetic oligonucleotide
  Target: LAMA2; (-) strand; PAM type: YTN; PAM sequence: TTA
gatggttttttcctgtaata

SEQ ID NO: 244051 - DNA, 20 bp, Artificial Sequence
  Description of Artificial Sequence: Synthetic oligonucleotide
  Target: LAMA2; (-) strand; PAM type: YTN; PAM sequence: TTG
gaggtagaaaaagagttaga

SEQ ID NO: 244052 - DNA, 20 bp, Artificial Sequence
  Description of Artificial Sequence: Synthetic oligonucleotide
  Target: LAMA2; (-) strand; PAM type: YTN; PAM sequence: TTC
agaggagggaggttggaggt

SEQ ID NO: 244053 - DNA, 20 bp, Artificial Sequence
  Description of Artificial Sequence: Synthetic oligonucleotide
  Target: LAMA2; (-) strand; PAM type: YTN; PAM sequence: TTT
cagaggagggaggttggagg

SEQ ID NO: 244054 - DNA, 20 bp, Artificial Sequence
  Description of Artificial Sequence: Synthetic oligonucleotide
  Target: LAMA2; (-) strand; PAM type: YTN; PAM sequence: CTC
caccaggtatgtgaataaca

SEQ ID NO: 244055 - DNA, 20 bp, Artificial Sequence
  Description of Artificial Sequence: Synthetic oligonucleotide
  Target: LAMA2; (-) strand; PAM type: YTN; PAM sequence: TTC
tccaccaggtatgtgaataa

SEQ ID NO: 244056 - DNA, 20 bp, Artificial Sequence
  Description of Artificial Sequence: Synthetic oligonucleotide
  Target: LAMA2; (-) strand; PAM type: YTN; PAM sequence: CTT
ctccaccaggtatgtgaata

SEQ ID NO: 244057 - DNA, 20 bp, Artificial Sequence
  Description of Artificial Sequence: Synthetic oligonucleotide
  Target: LAMA2; (-) strand; PAM type: YTN; PAM sequence: TTC
ttctccaccaggtatgtgaa

SEQ ID NO: 244058 - DNA, 20 bp, Artificial Sequence
  Description of Artificial Sequence: Synthetic oligonucleotide
  Target: LAMA2; (-) strand; PAM type: YTN; PAM sequence: TTA
taaagattcttctccaccag

SEQ ID NO: 244059 - DNA, 20 bp, Artificial Sequence
  Description of Artificial Sequence: Synthetic oligonucleotide
  Target: LAMA2; (-) strand; PAM type: YTN; PAM sequence: TTT
ataaagattcttctccacca

SEQ ID NO: 244060 - DNA, 20 bp, Artificial Sequence
  Description of Artificial Sequence: Synthetic oligonucleotide
  Target: LAMA2; (-) strand; PAM type: YTN; PAM sequence: TTT
tataaagattcttctccacc

SEQ ID NO: 244061 - DNA, 20 bp, Artificial Sequence
  Description of Artificial Sequence: Synthetic oligonucleotide
  Target: LAMA2; (-) strand; PAM type: YTN; PAM sequence: TTG
agttttataaagattcttct

SEQ ID NO: 244062 - DNA, 20 bp, Artificial Sequence
  Description of Artificial Sequence: Synthetic oligonucleotide
  Target: LAMA2; (-) strand; PAM type: YTN; PAM sequence: TTT
gagttttataaagattcttc

SEQ ID NO: 244063 - DNA, 20 bp, Artificial Sequence
  Description of Artificial Sequence: Synthetic oligonucleotide
  Target: LAMA2; (-) strand; PAM type: YTN; PAM sequence: CTA
aggtaatcaaatttgagttt

SEQ ID NO: 244064 - DNA, 20 bp, Artificial Sequence
  Description of Artificial Sequence: Synthetic oligonucleotide
  Target: LAMA2; (-) strand; PAM type: YTN; PAM sequence: TTA
agcagaggactaaggtaatc

SEQ ID NO: 244065 - DNA, 20 bp, Artificial Sequence
  Description of Artificial Sequence: Synthetic oligonucleotide
  Target: LAMA2; (-) strand; PAM type: YTN; PAM sequence: TTT
aagcagaggactaaggtaat

SEQ ID NO: 244066 - DNA, 20 bp, Artificial Sequence
  Description of Artificial Sequence: Synthetic oligonucleotide
  Target: LAMA2; (-) strand; PAM type: YTN; PAM sequence: TTT
taagcagaggactaaggtaa

SEQ ID NO: 244067 - DNA, 20 bp, Artificial Sequence
  Description of Artificial Sequence: Synthetic oligonucleotide
  Target: LAMA2; (-) strand; PAM type: YTN; PAM sequence: CTG
aaattttaagcagaggacta

SEQ ID NO: 244068 - DNA, 20 bp, Artificial Sequence
  Description of Artificial Sequence: Synthetic oligonucleotide
  Target: LAMA2; (-) strand; PAM type: YTN; PAM sequence: TTG
aaagacactgaaattttaag

SEQ ID NO: 244069 - DNA, 20 bp, Artificial Sequence
  Description of Artificial Sequence: Synthetic oligonucleotide
  Target: LAMA2; (-) strand; PAM type: YTN; PAM sequence: TTC
attgaaagacactgaaattt

SEQ ID NO: 244070 - DNA, 20 bp, Artificial Sequence
  Description of Artificial Sequence: Synthetic oligonucleotide
  Target: LAMA2; (-) strand; PAM type: YTN; PAM sequence: TTT
cattgaaagacactgaaatt

SEQ ID NO: 244071 - DNA, 20 bp, Artificial Sequence
  Description of Artificial Sequence: Synthetic oligonucleotide
  Target: LAMA2; (-) strand; PAM type: YTN; PAM sequence: CTT
tcattgaaagacactgaaat

SEQ ID NO: 244072 - DNA, 20 bp, Artificial Sequence
  Description of Artificial Sequence: Synthetic oligonucleotide
  Target: LAMA2; (-) strand; PAM type: YTN; PAM sequence: CTG
agctttcattgaaagacact

SEQ ID NO: 244073 - DNA, 20 bp, Artificial Sequence
  Description of Artificial Sequence: Synthetic oligonucleotide
  Target: LAMA2; (-) strand; PAM type: YTN; PAM sequence: CTC
tgagctttcattgaaagaca

SEQ ID NO: 244074 - DNA, 20 bp, Artificial Sequence
  Description of Artificial Sequence: Synthetic oligonucleotide
  Target: LAMA2; (-) strand; PAM type: YTN; PAM sequence: TTA
taagtccagaatggtctctg

SEQ ID NO: 244075 - DNA, 20 bp, Artificial Sequence
  Description of Artificial Sequence: Synthetic oligonucleotide
  Target: LAMA2; (-) strand; PAM type: YTN; PAM sequence: CTG
caagggagttataagtccag

SEQ ID NO: 244076 - DNA, 20 bp, Artificial Sequence
  Description of Artificial Sequence: Synthetic oligonucleotide
  Target: LAMA2; (-) strand; PAM type: YTN; PAM sequence: CTG
agctgcaagggagttataag

SEQ ID NO: 244077 - DNA, 20 bp, Artificial Sequence
  Description of Artificial Sequence: Synthetic oligonucleotide
  Target: LAMA2; (-) strand; PAM type: YTN; PAM sequence: TTC
tgagctgcaagggagttata

SEQ ID NO: 244078 - DNA, 20 bp, Artificial Sequence
  Description of Artificial Sequence: Synthetic oligonucleotide
  Target: LAMA2; (-) strand; PAM type: YTN; PAM sequence: CTT
ctgagctgcaagggagttat

SEQ ID NO: 244079 - DNA, 20 bp, Artificial Sequence
  Description of Artificial Sequence: Synthetic oligonucleotide
  Target: LAMA2; (-) strand; PAM type: YTN; PAM sequence: CTG
gaccacgggtcccttctgag

SEQ ID NO: 244080 - DNA, 20 bp, Artificial Sequence
  Description of Artificial Sequence: Synthetic oligonucleotide
  Target: LAMA2; (-) strand; PAM type: YTN; PAM sequence: TTA
ctggaccacgggtcccttct

SEQ ID NO: 244081 - DNA, 20 bp, Artificial Sequence
  Description of Artificial Sequence: Synthetic oligonucleotide
  Target: LAMA2; (-) strand; PAM type: YTN; PAM sequence: TTA
attactggaccacgggtccc

SEQ ID NO: 244082 - DNA, 20 bp, Artificial Sequence
  Description of Artificial Sequence: Synthetic oligonucleotide
  Target: LAMA2; (-) strand; PAM type: YTN; PAM sequence: TTT
aattactggaccacgggtcc

SEQ ID NO: 244083 - DNA, 20 bp, Artificial Sequence
  Description of Artificial Sequence: Synthetic oligonucleotide
  Target: LAMA2; (-) strand; PAM type: YTN; PAM sequence: TTT
taattactggaccacgggtc

SEQ ID NO: 244084 - DNA, 20 bp, Artificial Sequence
  Description of Artificial Sequence: Synthetic oligonucleotide
  Target: LAMA2; (-) strand; PAM type: YTN; PAM sequence: TTA
ccacgggcattttaattact

SEQ ID NO: 244085 - DNA, 20 bp, Artificial Sequence
  Description of Artificial Sequence: Synthetic oligonucleotide
  Target: LAMA2; (-) strand; PAM type: YTN; PAM sequence: CTT
accacgggcattttaattac

SEQ ID NO: 244086 - DNA, 20 bp, Artificial Sequence
  Description of Artificial Sequence: Synthetic oligonucleotide
  Target: LAMA2; (-) strand; PAM type: YTN; PAM sequence: TTG
aacacttaccacgggcattt

SEQ ID NO: 244087 - DNA, 20 bp, Artificial Sequence
  Description of Artificial Sequence: Synthetic oligonucleotide
  Target: LAMA2; (-) strand; PAM type: YTN; PAM sequence: TTG
tgagaagaaaagcatgagag

SEQ ID NO: 244088 - DNA, 20 bp, Artificial Sequence
  Description of Artificial Sequence: Synthetic oligonucleotide
  Target: LAMA2; (-) strand; PAM type: YTN; PAM sequence: CTG
aagggacattgtgagaagaa

SEQ ID NO: 244089 - DNA, 20 bp, Artificial Sequence
  Description of Artificial Sequence: Synthetic oligonucleotide
  Target: LAMA2; (-) strand; PAM type: YTN; PAM sequence: CTC
aggaaaatggtagaaagaaa

SEQ ID NO: 244090 - DNA, 20 bp, Artificial Sequence
  Description of Artificial Sequence: Synthetic oligonucleotide
  Target: LAMA2; (-) strand; PAM type: YTN; PAM sequence: TTA
ctcaggaaaatggtagaaag

SEQ ID NO: 244091 - DNA, 20 bp, Artificial Sequence
  Description of Artificial Sequence: Synthetic oligonucleotide
  Target: LAMA2; (-) strand; PAM type: YTN; PAM sequence: CTA
gaaggtaattactcaggaaa

SEQ ID NO: 244092 - DNA, 20 bp, Artificial Sequence
  Description of Artificial Sequence: Synthetic oligonucleotide
  Target: LAMA2; (-) strand; PAM type: YTN; PAM sequence: TTG
aatgatgactagaaggtaat

SEQ ID NO: 244093 - DNA, 20 bp, Artificial Sequence
  Description of Artificial Sequence: Synthetic oligonucleotide
  Target: LAMA2; (-) strand; PAM type: YTN; PAM sequence: TTT
gaatgatgactagaaggtaa

SEQ ID NO: 244094 - DNA, 20 bp, Artificial Sequence
  Description of Artificial Sequence: Synthetic oligonucleotide
  Target: LAMA2; (-) strand; PAM type: YTN; PAM sequence: TTT
tgaatgatgactagaaggta

SEQ ID NO: 244095 - DNA, 20 bp, Artificial Sequence
  Description of Artificial Sequence: Synthetic oligonucleotide
  Target: LAMA2; (-) strand; PAM type: YTN; PAM sequence: TTT
ttgaatgatgactagaaggt

SEQ ID NO: 244096 - DNA, 20 bp, Artificial Sequence
  Description of Artificial Sequence: Synthetic oligonucleotide
  Target: LAMA2; (-) strand; PAM type: YTN; PAM sequence: CTT
tttgaatgatgactagaagg

SEQ ID NO: 244097 - DNA, 20 bp, Artificial Sequence
  Description of Artificial Sequence: Synthetic oligonucleotide
  Target: LAMA2; (-) strand; PAM type: YTN; PAM sequence: TTA
aatgctttttgaatgatgac

SEQ ID NO: 244098 - DNA, 20 bp, Artificial Sequence
  Description of Artificial Sequence: Synthetic oligonucleotide
  Target: LAMA2; (-) strand; PAM type: YTN; PAM sequence: CTT
aaatgctttttgaatgatga

SEQ ID NO: 244099 - DNA, 20 bp, Artificial Sequence
  Description of Artificial Sequence: Synthetic oligonucleotide
  Target: LAMA2; (-) strand; PAM type: YTN; PAM sequence: TTC
aatgcttaaatgctttttga

SEQ ID NO: 244100 - DNA, 20 bp, Artificial Sequence
  Description of Artificial Sequence: Synthetic oligonucleotide
  Target: LAMA2; (-) strand; PAM type: YTN; PAM sequence: CTA
tagaattcaatgcttaaatg

SEQ ID NO: 244101 - DNA, 20 bp, Artificial Sequence
  Description of Artificial Sequence: Synthetic oligonucleotide
  Target: LAMA2; (-) strand; PAM type: YTN; PAM sequence: TTC
ctatagaattcaatgcttaa

SEQ ID NO: 244102 - DNA, 20 bp, Artificial Sequence
  Description of Artificial Sequence: Synthetic oligonucleotide
  Target: LAMA2; (-) strand; PAM type: YTN; PAM sequence: TTT
cctatagaattcaatgctta

SEQ ID NO: 244103 - DNA, 20 bp, Artificial Sequence
  Description of Artificial Sequence: Synthetic oligonucleotide
  Target: LAMA2; (-) strand; PAM type: YTN; PAM sequence: TTA
gaaacatttcctatagaatt

SEQ ID NO: 244104 - DNA, 20 bp, Artificial Sequence
  Description of Artificial Sequence: Synthetic oligonucleotide
  Target: LAMA2; (-) strand; PAM type: YTN; PAM sequence: CTG
ggggatagggtgattagaaa

SEQ ID NO: 244105 - DNA, 20 bp, Artificial Sequence
  Description of Artificial Sequence: Synthetic oligonucleotide
  Target: LAMA2; (-) strand; PAM type: YTN; PAM sequence: CTC
agccagagctgggggatagg

SEQ ID NO: 244106 - DNA, 20 bp, Artificial Sequence
  Description of Artificial Sequence: Synthetic oligonucleotide
  Target: LAMA2; (-) strand; PAM type: YTN; PAM sequence: CTA
actcagccagagctggggga

SEQ ID NO: 244107 - DNA, 20 bp, Artificial Sequence
  Description of Artificial Sequence: Synthetic oligonucleotide
  Target: LAMA2; (-) strand; PAM type: YTN; PAM sequence: TTG
tgcagagaaggcctaactca

SEQ ID NO: 244108 - DNA, 20 bp, Artificial Sequence
  Description of Artificial Sequence: Synthetic oligonucleotide
  Target: LAMA2; (-) strand; PAM type: YTN; PAM sequence: TTC
atgggaattgtgcagagaag

SEQ ID NO: 244109 - DNA, 20 bp, Artificial Sequence
  Description of Artificial Sequence: Synthetic oligonucleotide
  Target: LAMA2; (-) strand; PAM type: YTN; PAM sequence: TTT
catgggaattgtgcagagaa

SEQ ID NO: 244110 - DNA, 20 bp, Artificial Sequence
  Description of Artificial Sequence: Synthetic oligonucleotide
  Target: LAMA2; (-) strand; PAM type: YTN; PAM sequence: CTT
tcatgggaattgtgcagaga

SEQ ID NO: 244111 - DNA, 20 bp, Artificial Sequence
  Description of Artificial Sequence: Synthetic oligonucleotide
  Target: LAMA2; (-) strand; PAM type: YTN; PAM sequence: CTG
ggtggtaggtgctttcatgg

SEQ ID NO: 244112 - DNA, 20 bp, Artificial Sequence
  Description of Artificial Sequence: Synthetic oligonucleotide
  Target: LAMA2; (-) strand; PAM type: YTN; PAM sequence: CTG
ctgggtggtaggtgctttca

SEQ ID NO: 244113 - DNA, 20 bp, Artificial Sequence
  Description of Artificial Sequence: Synthetic oligonucleotide
  Target: LAMA2; (-) strand; PAM type: YTN; PAM sequence: CTG
cctgctgggtggtaggtgct

SEQ ID NO: 244114 - DNA, 20 bp, Artificial Sequence
  Description of Artificial Sequence: Synthetic oligonucleotide
  Target: LAMA2; (-) strand; PAM type: YTN; PAM sequence: TTC
tgcctgctgggtggtaggtg

SEQ ID NO: 244115 - DNA, 20 bp, Artificial Sequence
  Description of Artificial Sequence: Synthetic oligonucleotide
  Target: LAMA2; (-) strand; PAM type: YTN; PAM sequence: TTT
ctgcctgctgggtggtaggt

SEQ ID NO: 244116 - DNA, 20 bp, Artificial Sequence
  Description of Artificial Sequence: Synthetic oligonucleotide
  Target: LAMA2; (-) strand; PAM type: YTN; PAM sequence: TTA
gtgagaaagtcaaagaggga

SEQ ID NO: 244117 - DNA, 20 bp, Artificial Sequence
  Description of Artificial Sequence: Synthetic oligonucleotide
  Target: LAMA2; (-) strand; PAM type: YTN; PAM sequence: TTT
agtgagaaagtcaaagaggg

SEQ ID NO: 244118 - DNA, 20 bp, Artificial Sequence
  Description of Artificial Sequence: Synthetic oligonucleotide
  Target: LAMA2; (-) strand; PAM type: YTN; PAM sequence: TTG
cagtttagtgagaaagtcaa

SEQ ID NO: 244119 - DNA, 20 bp, Artificial Sequence
  Description of Artificial Sequence: Synthetic oligonucleotide
  Target: LAMA2; (-) strand; PAM type: YTN; PAM sequence: TTT
gcagtttagtgagaaagtca

SEQ ID NO: 244120 - DNA, 20 bp, Artificial Sequence
  Description of Artificial Sequence: Synthetic oligonucleotide
  Target: LAMA2; (-) strand; PAM type: YTN; PAM sequence: CTC
accaggaatttgcagtttag

SEQ ID NO: 244121 - DNA, 20 bp, Artificial Sequence
  Description of Artificial Sequence: Synthetic oligonucleotide
  Target: LAMA2; (-) strand; PAM type: YTN; PAM sequence: TTG
tcactcaccaggaatttgca

SEQ ID NO: 244122 - DNA, 20 bp, Artificial Sequence
  Description of Artificial Sequence: Synthetic oligonucleotide
  Target: LAMA2; (-) strand; PAM type: YTN; PAM sequence: TTA
gaagaagaatagaatccagt

SEQ ID NO: 244123 - DNA, 20 bp, Artificial Sequence
  Description of Artificial Sequence: Synthetic oligonucleotide
  Target: LAMA2; (-) strand; PAM type: YTN; PAM sequence: CTA
gaggttagaagaagaataga

SEQ ID NO: 244124 - DNA, 20 bp, Artificial Sequence
  Description of Artificial Sequence: Synthetic oligonucleotide
  Target: LAMA2; (-) strand; PAM type: YTN; PAM sequence: TTC
tagaggttagaagaagaata

SEQ ID NO: 244125 - DNA, 20 bp, Artificial Sequence
  Description of Artificial Sequence: Synthetic oligonucleotide
  Target: LAMA2; (-) strand; PAM type: YTN; PAM sequence: CTA
ggttctagaggttagaagaa

SEQ ID NO: 244126 - DNA, 20 bp, Artificial Sequence
  Description of Artificial Sequence: Synthetic oligonucleotide
  Target: LAMA2; (-) strand; PAM type: YTN; PAM sequence: CTG
ctaggttctagaggttagaa

SEQ ID NO: 244127 - DNA, 20 bp, Artificial Sequence
  Description of Artificial Sequence: Synthetic oligonucleotide
  Target: LAMA2; (-) strand; PAM type: YTN; PAM sequence: CTC
caaagcaatctgctaggttc

SEQ ID NO: 244128 - DNA, 20 bp, Artificial Sequence
  Description of Artificial Sequence: Synthetic oligonucleotide
  Target: LAMA2; (-) strand; PAM type: YTN; PAM sequence: CTA
aggtctccaaagcaatctgc

SEQ ID NO: 244129 - DNA, 20 bp, Artificial Sequence
  Description of Artificial Sequence: Synthetic oligonucleotide
  Target: LAMA2; (-) strand; PAM type: YTN; PAM sequence: TTC
ctaaggtctccaaagcaatc

SEQ ID NO: 244130 - DNA, 20 bp, Artificial Sequence
  Description of Artificial Sequence: Synthetic oligonucleotide
  Target: LAMA2; (-) strand; PAM type: YTN; PAM sequence: TTA
agttcctaaggtctccaaag

SEQ ID NO: 244131 - DNA, 20 bp, Artificial Sequence
  Description of Artificial Sequence: Synthetic oligonucleotide
  Target: LAMA2; (-) strand; PAM type: YTN; PAM sequence: TTA
ttaagttcctaaggtctcca

SEQ ID NO: 244132 - DNA, 20 bp, Artificial Sequence
  Description of Artificial Sequence: Synthetic oligonucleotide
  Target: LAMA2; (-) strand; PAM type: YTN; PAM sequence: CTC
aacaaagaattattaagttc

SEQ ID NO: 244133 - DNA, 20 bp, Artificial Sequence
  Description of Artificial Sequence: Synthetic oligonucleotide
  Target: LAMA2; (-) strand; PAM type: YTN; PAM sequence: TTC
actcaacaaagaattattaa

SEQ ID NO: 244134 - DNA, 20 bp, Artificial Sequence
  Description of Artificial Sequence: Synthetic oligonucleotide
  Target: LAMA2; (-) strand; PAM type: YTN; PAM sequence: TTA
ttcactcaacaaagaattat

SEQ ID NO: 244135 - DNA, 20 bp, Artificial Sequence
  Description of Artificial Sequence: Synthetic oligonucleotide
  Target: LAMA2; (-) strand; PAM type: YTN; PAM sequence: TTT
attcactcaacaaagaatta

SEQ ID NO: 244136 - DNA, 20 bp, Artificial Sequence
  Description of Artificial Sequence: Synthetic oligonucleotide
  Target: LAMA2; (-) strand; PAM type: YTN; PAM sequence: CTT
tattcactcaacaaagaatt

SEQ ID NO: 244137 - DNA, 20 bp, Artificial Sequence
  Description of Artificial Sequence: Synthetic oligonucleotide
  Target: LAMA2; (-) strand; PAM type: YTN; PAM sequence: CTG
tccacaaaaagcatcccttt

SEQ ID NO: 244138 - DNA, 20 bp, Artificial Sequence
  Description of Artificial Sequence: Synthetic oligonucleotide
  Target: LAMA2; (-) strand; PAM type: YTN; PAM sequence: CTG
ctgtccacaaaaagcatccc

SEQ ID NO: 244139 - DNA, 20 bp, Artificial Sequence
  Description of Artificial Sequence: Synthetic oligonucleotide
  Target: LAMA2; (-) strand; PAM type: YTN; PAM sequence: TTG
tgtaaacagaaataactgct

SEQ ID NO: 244140 - DNA, 20 bp, Artificial Sequence
  Description of Artificial Sequence: Synthetic oligonucleotide
  Target: LAMA2; (-) strand; PAM type: YTN; PAM sequence: TTT
gtgtaaacagaaataactgc

SEQ ID NO: 244141 - DNA, 20 bp, Artificial Sequence
  Description of Artificial Sequence: Synthetic oligonucleotide
  Target: LAMA2; (-) strand; PAM type: YTN; PAM sequence: TTT
tgtgtaaacagaaataactg

SEQ ID NO: 244142 - DNA, 20 bp, Artificial Sequence
  Description of Artificial Sequence: Synthetic oligonucleotide
  Target: LAMA2; (-) strand; PAM type: YTN; PAM sequence: CTT
ttgtgtaaacagaaataact

SEQ ID NO: 244143 - DNA, 20 bp, Artificial Sequence
  Description of Artificial Sequence: Synthetic oligonucleotide
  Target: LAMA2; (-) strand; PAM type: YTN; PAM sequence: TTA
tcttttgtgtaaacagaaat

SEQ ID NO: 244144 - DNA, 20 bp, Artificial Sequence
  Description of Artificial Sequence: Synthetic oligonucleotide
  Target: LAMA2; (-) strand; PAM type: YTN; PAM sequence: CTT
atcttttgtgtaaacagaaa

SEQ ID NO: 244145 - DNA, 20 bp, Artificial Sequence
  Description of Artificial Sequence: Synthetic oligonucleotide
  Target: LAMA2; (-) strand; PAM type: YTN; PAM sequence: CTC
ttatcttttgtgtaaacaga

SEQ ID NO: 244146 - DNA, 20 bp, Artificial Sequence
  Description of Artificial Sequence: Synthetic oligonucleotide
  Target: LAMA2; (-) strand; PAM type: YTN; PAM sequence: TTC
tcttatcttttgtgtaaaca

SEQ ID NO: 244147 - DNA, 20 bp, Artificial Sequence
  Description of Artificial Sequence: Synthetic oligonucleotide
  Target: LAMA2; (-) strand; PAM type: YTN; PAM sequence: TTT
ctcttatcttttgtgtaaac

SEQ ID NO: 244148 - DNA, 20 bp, Artificial Sequence
  Description of Artificial Sequence: Synthetic oligonucleotide
  Target: LAMA2; (-) strand; PAM type: YTN; PAM sequence: TTT
tctcttatcttttgtgtaaa

SEQ ID NO: 244149 - DNA, 20 bp, Artificial Sequence
  Description of Artificial Sequence: Synthetic oligonucleotide
  Target: LAMA2; (-) strand; PAM type: YTN; PAM sequence: CTG
tattttctcttatcttttgt

SEQ ID NO: 244150 - DNA, 20 bp, Artificial Sequence
  Description of Artificial Sequence: Synthetic oligonucleotide
  Target: LAMA2; (-) strand; PAM type: YTN; PAM sequence: TTA
cctgtattttctcttatctt

SEQ ID NO: 244151 - DNA, 20 bp, Artificial Sequence
  Description of Artificial Sequence: Synthetic oligonucleotide
  Target: LAMA2; (-) strand; PAM type: YTN; PAM sequence: TTT
acctgtattttctcttatct

SEQ ID NO: 244152 - DNA, 20 bp, Artificial Sequence
  Description of Artificial Sequence: Synthetic oligonucleotide
  Target: LAMA2; (-) strand; PAM type: YTN; PAM sequence: TTT
tacctgtattttctcttatc

SEQ ID NO: 244153 - DNA, 20 bp, Artificial Sequence
  Description of Artificial Sequence: Synthetic oligonucleotide
  Target: LAMA2; (-) strand; PAM type: YTN; PAM sequence: TTA
ggataattttacctgtattt

SEQ ID NO: 244154 - DNA, 20 bp, Artificial Sequence
  Description of Artificial Sequence: Synthetic oligonucleotide
  Target: LAMA2; (-) strand; PAM type: YTN; PAM sequence: TTT
aggataattttacctgtatt

SEQ ID NO: 244155 - DNA, 20 bp, Artificial Sequence
  Description of Artificial Sequence: Synthetic oligonucleotide
  Target: LAMA2; (-) strand; PAM type: YTN; PAM sequence: TTA
aaatttaggataattttacc

SEQ ID NO: 244156 - DNA, 20 bp, Artificial Sequence
  Description of Artificial Sequence: Synthetic oligonucleotide
  Target: LAMA2; (-) strand; PAM type: YTN; PAM sequence: TTT
aaaatttaggataattttac

SEQ ID NO: 244157 - DNA, 20 bp, Artificial Sequence
  Description of Artificial Sequence: Synthetic oligonucleotide
  Target: LAMA2; (-) strand; PAM type: YTN; PAM sequence: TTT
taaaatttaggataatttta

SEQ ID NO: 244158 - DNA, 20 bp, Artificial Sequence
  Description of Artificial Sequence: Synthetic oligonucleotide
  Target: LAMA2; (-) strand; PAM type: YTN; PAM sequence: TTT
ttaaaatttaggataatttt

SEQ ID NO: 244159 - DNA, 20 bp, Artificial Sequence
  Description of Artificial Sequence: Synthetic oligonucleotide
  Target: LAMA2; (-) strand; PAM type: YTN; PAM sequence: TTT
tttaaaatttaggataattt

SEQ ID NO: 244160 - DNA, 20 bp, Artificial Sequence
  Description of Artificial Sequence: Synthetic oligonucleotide
  Target: LAMA2; (-) strand; PAM type: YTN; PAM sequence: TTC
aaattttttaaaatttagga

SEQ ID NO: 244161 - DNA, 20 bp, Artificial Sequence
  Description of Artificial Sequence: Synthetic oligonucleotide
  Target: LAMA2; (-) strand; PAM type: YTN; PAM sequence: TTT
caaattttttaaaatttagg

SEQ ID NO: 244162 - DNA, 20 bp, Artificial Sequence
  Description of Artificial Sequence: Synthetic oligonucleotide
  Target: LAMA2; (-) strand; PAM type: YTN; PAM sequence: TTG
taagtttcaaattttttaaa

SEQ ID NO: 244163 - DNA, 20 bp, Artificial Sequence
  Description of Artificial Sequence: Synthetic oligonucleotide
  Target: LAMA2; (-) strand; PAM type: YTN; PAM sequence: TTT
gtaagtttcaaattttttaa

SEQ ID NO: 244164 - DNA, 20 bp, Artificial Sequence
  Description of Artificial Sequence: Synthetic oligonucleotide
  Target: LAMA2; (-) strand; PAM type: YTN; PAM sequence: TTT
tgtaagtttcaaatttttta

SEQ ID NO: 244165 - DNA, 20 bp, Artificial Sequence
  Description of Artificial Sequence: Synthetic oligonucleotide
  Target: LAMA2; (-) strand; PAM type: YTN; PAM sequence: TTT
ttgtaagtttcaaatttttt

SEQ ID NO: 244166 - DNA, 20 bp, Artificial Sequence
  Description of Artificial Sequence: Synthetic oligonucleotide
  Target: LAMA2; (-) strand; PAM type: YTN; PAM sequence: CTT
tttgtaagtttcaaattttt

SEQ ID NO: 244167 - DNA, 20 bp, Artificial Sequence
  Description of Artificial Sequence: Synthetic oligonucleotide
  Target: LAMA2; (-) strand; PAM type: YTN; PAM sequence: TTA
aatccaacactttttgtaag

SEQ ID NO: 244168 - DNA, 20 bp, Artificial Sequence
  Description of Artificial Sequence: Synthetic oligonucleotide
  Target: LAMA2; (-) strand; PAM type: YTN; PAM sequence: CTT
aaatccaacactttttgtaa

SEQ ID NO: 244169 - DNA, 20 bp, Artificial Sequence
  Description of Artificial Sequence: Synthetic oligonucleotide
  Target: LAMA2; (-) strand; PAM type: YTN; PAM sequence: TTC
ggaaatccagacagacaaag

SEQ ID NO: 244170 - DNA, 20 bp, Artificial Sequence
  Description of Artificial Sequence: Synthetic oligonucleotide
  Target: LAMA2; (-) strand; PAM type: YTN; PAM sequence: TTT
cggaaatccagacagacaaa

SEQ ID NO: 244171 - DNA, 20 bp, Artificial Sequence
  Description of Artificial Sequence: Synthetic oligonucleotide
  Target: LAMA2; (-) strand; PAM type: YTN; PAM sequence: TTA
aaaatatttcggaaatccag

SEQ ID NO: 244172 - DNA, 20 bp, Artificial Sequence
  Description of Artificial Sequence: Synthetic oligonucleotide
  Target: LAMA2; (-) strand; PAM type: YTN; PAM sequence: TTT
aaaaatatttcggaaatcca

SEQ ID NO: 244173 - DNA, 20 bp, Artificial Sequence
  Description of Artificial Sequence: Synthetic oligonucleotide
  Target: LAMA2; (-) strand; PAM type: YTN; PAM sequence: TTT
taaaaatatttcggaaatcc

SEQ ID NO: 244174 - DNA, 20 bp, Artificial Sequence
  Description of Artificial Sequence: Synthetic oligonucleotide
  Target: LAMA2; (-) strand; PAM type: YTN; PAM sequence: CTT
ttaaaaatatttcggaaatc

SEQ ID NO: 244175 - DNA, 20 bp, Artificial Sequence
  Description of Artificial Sequence: Synthetic oligonucleotide
  Target: LAMA2; (-) strand; PAM type: YTN; PAM sequence: TTA
aatgatcccagaaaaaatct

SEQ ID NO: 244176 - DNA, 20 bp, Artificial Sequence
  Description of Artificial Sequence: Synthetic oligonucleotide
  Target: LAMA2; (-) strand; PAM type: YTN; PAM sequence: CTT
aaatgatcccagaaaaaatc

SEQ ID NO: 244177 - DNA, 20 bp, Artificial Sequence
  Description of Artificial Sequence: Synthetic oligonucleotide
  Target: LAMA2; (-) strand; PAM type: YTN; PAM sequence: CTG
aacagatgaggccttaaatg

SEQ ID NO: 244178 - DNA, 20 bp, Artificial Sequence
  Description of Artificial Sequence: Synthetic oligonucleotide
  Target: LAMA2; (-) strand; PAM type: YTN; PAM sequence: TTC
tgaacagatgaggccttaaa

SEQ ID NO: 244179 - DNA, 20 bp, Artificial Sequence
  Description of Artificial Sequence: Synthetic oligonucleotide
  Target: LAMA2; (-) strand; PAM type: YTN; PAM sequence: TTG
gttctgaacagatgaggcct

SEQ ID NO: 244180 - DNA, 20 bp, Artificial Sequence
  Description of Artificial Sequence: Synthetic oligonucleotide
  Target: LAMA2; (-) strand; PAM type: YTN; PAM sequence: CTT
ggttctgaacagatgaggcc

SEQ ID NO: 244181 - DNA, 20 bp, Artificial Sequence
  Description of Artificial Sequence: Synthetic oligonucleotide
  Target: LAMA2; (-) strand; PAM type: YTN; PAM sequence: CTC
cccttggttctgaacagatg

SEQ ID NO: 244182 - DNA, 20 bp, Artificial Sequence
  Description of Artificial Sequence: Synthetic oligonucleotide
  Target: LAMA2; (-) strand; PAM type: YTN; PAM sequence: TTC
ggtcctccccttggttctga

SEQ ID NO: 244183 - DNA, 20 bp, Artificial Sequence
  Description of Artificial Sequence: Synthetic oligonucleotide
  Target: LAMA2; (-) strand; PAM type: YTN; PAM sequence: TTT
cggtcctccccttggttctg

SEQ ID NO: 244184 - DNA, 20 bp, Artificial Sequence
  Description of Artificial Sequence: Synthetic oligonucleotide
  Target: LAMA2; (-) strand; PAM type: YTN; PAM sequence: CTA
tttcggtcctccccttggtt

SEQ ID NO: 244185 - DNA, 20 bp, Artificial Sequence
  Description of Artificial Sequence: Synthetic oligonucleotide
  Target: LAMA2; (-) strand; PAM type: YTN; PAM sequence: TTG
gcatactatttcggtcctcc

SEQ ID NO: 244186 - DNA, 20 bp, Artificial Sequence
  Description of Artificial Sequence: Synthetic oligonucleotide
  Target: LAMA2; (-) strand; PAM type: YTN; PAM sequence: TTT
ggcatactatttcggtcctc

SEQ ID NO: 244187 - DNA, 20 bp, Artificial Sequence
  Description of Artificial Sequence: Synthetic oligonucleotide
  Target: LAMA2; (-) strand; PAM type: YTN; PAM sequence: CTG
gaaaagaatttggcatacta

SEQ ID NO: 244188 - DNA, 20 bp, Artificial Sequence
  Description of Artificial Sequence: Synthetic oligonucleotide
  Target: LAMA2; (-) strand; PAM type: YTN; PAM sequence: TTG
agggctggaaaagaatttgg

SEQ ID NO: 244189 - DNA, 20 bp, Artificial Sequence
  Description of Artificial Sequence: Synthetic oligonucleotide
  Target: LAMA2; (-) strand; PAM type: YTN; PAM sequence: TTT
gagggctggaaaagaatttg

SEQ ID NO: 244190 - DNA, 20 bp, Artificial Sequence
  Description of Artificial Sequence: Synthetic oligonucleotide
  Target: LAMA2; (-) strand; PAM type: YTN; PAM sequence: CTC
ataaaatttgagggctggaa

SEQ ID NO: 244191 - DNA, 20 bp, Artificial Sequence
  Description of Artificial Sequence: Synthetic oligonucleotide
  Target: LAMA2; (-) strand; PAM type: YTN; PAM sequence: CTC
aggctcataaaatttgaggg

SEQ ID NO: 244192 - DNA, 20 bp, Artificial Sequence
  Description of Artificial Sequence: Synthetic oligonucleotide
  Target: LAMA2; (-) strand; PAM type: YTN; PAM sequence: TTA
cccacacaatgcaactcagg

SEQ ID NO: 244193 - DNA, 20 bp, Artificial Sequence
  Description of Artificial Sequence: Synthetic oligonucleotide
  Target: LAMA2; (-) strand; PAM type: YTN; PAM sequence: TTT
acccacacaatgcaactcag

SEQ ID NO: 244194 - DNA, 20 bp, Artificial Sequence
  Description of Artificial Sequence: Synthetic oligonucleotide
  Target: LAMA2; (-) strand; PAM type: YTN; PAM sequence: TTT
tacccacacaatgcaactca

SEQ ID NO: 244195 - DNA, 20 bp, Artificial Sequence
  Description of Artificial Sequence: Synthetic oligonucleotide
  Target: LAMA2; (-) strand; PAM type: YTN; PAM sequence: CTT
ttacccacacaatgcaactc

SEQ ID NO: 244196 - DNA, 20 bp, Artificial Sequence
  Description of Artificial Sequence: Synthetic oligonucleotide
  Target: LAMA2; (-) strand; PAM type: YTN; PAM sequence: CTG
atccacagagcacaagactt

SEQ ID NO: 244197 - DNA, 20 bp, Artificial Sequence
  Description of Artificial Sequence: Synthetic oligonucleotide
  Target: LAMA2; (-) strand; PAM type: YTN; PAM sequence: CTC
ctgatccacagagcacaaga

SEQ ID NO: 244198 - DNA, 20 bp, Artificial Sequence
  Description of Artificial Sequence: Synthetic oligonucleotide
  Target: LAMA2; (-) strand; PAM type: YTN; PAM sequence: TTC
ctcctgatccacagagcaca

SEQ ID NO: 244199 - DNA, 20 bp, Artificial Sequence
  Description of Artificial Sequence: Synthetic oligonucleotide
  Target: LAMA2; (-) strand; PAM type: YTN; PAM sequence: CTT
cctcctgatccacagagcac

SEQ ID NO: 244200 - DNA, 20 bp, Artificial Sequence
  Description of Artificial Sequence: Synthetic oligonucleotide
  Target: LAMA2; (-) strand; PAM type: YTN; PAM sequence: CTA
acttcctcctgatccacaga

SEQ ID NO: 244201 - DNA, 20 bp, Artificial Sequence
  Description of Artificial Sequence: Synthetic oligonucleotide
  Target: LAMA2; (-) strand; PAM type: YTN; PAM sequence: CTA
tgtaaatatccaaaacatct

SEQ ID NO: 244202 - DNA, 20 bp, Artificial Sequence
  Description of Artificial Sequence: Synthetic oligonucleotide
  Target: LAMA2; (-) strand; PAM type: YTN; PAM sequence: TTC
tatgtaaatatccaaaacat

SEQ ID NO: 244203 - DNA, 20 bp, Artificial Sequence
  Description of Artificial Sequence: Synthetic oligonucleotide
  Target: LAMA2; (-) strand; PAM type: YTN; PAM sequence: TTT
ctatgtaaatatccaaaaca

SEQ ID NO: 244204 - DNA, 20 bp, Artificial Sequence
  Description of Artificial Sequence: Synthetic oligonucleotide
  Target: LAMA2; (-) strand; PAM type: YTN; PAM sequence: TTG
tttctatgtaaatatccaaa

SEQ ID NO: 244205 - DNA, 20 bp, Artificial Sequence
  Description of Artificial Sequence: Synthetic oligonucleotide
  Target: LAMA2; (-) strand; PAM type: YTN; PAM sequence: TTT
gtttctatgtaaatatccaa

SEQ ID NO: 244206 - DNA, 20 bp, Artificial Sequence
  Description of Artificial Sequence: Synthetic oligonucleotide
  Target: LAMA2; (-) strand; PAM type: YTN; PAM sequence: CTT
tgtttctatgtaaatatcca

SEQ ID NO: 244207 - DNA, 20 bp, Artificial Sequence
  Description of Artificial Sequence: Synthetic oligonucleotide
  Target: LAMA2; (-) strand; PAM type: YTN; PAM sequence: TTC
tttgtttctatgtaaatatc

SEQ ID NO: 244208 - DNA, 20 bp, Artificial Sequence
  Description of Artificial Sequence: Synthetic oligonucleotide
  Target: LAMA2; (-) strand; PAM type: YTN; PAM sequence: TTC
aaattctttgtttctatgta

SEQ ID NO: 244209 - DNA, 20 bp, Artificial Sequence
  Description of Artificial Sequence: Synthetic oligonucleotide
  Target: LAMA2; (-) strand; PAM type: YTN; PAM sequence: CTT
caaattctttgtttctatgt

SEQ ID NO: 244210 - DNA, 20 bp, Artificial Sequence
  Description of Artificial Sequence: Synthetic oligonucleotide
  Target: LAMA2; (-) strand; PAM type: YTN; PAM sequence: TTC
cagtcttcaaattctttgtt

SEQ ID NO: 244211 - DNA, 20 bp, Artificial Sequence
  Description of Artificial Sequence: Synthetic oligonucleotide
  Target: LAMA2; (-) strand; PAM type: YTN; PAM sequence: TTT
ccagtcttcaaattctttgt

SEQ ID NO: 244212 - DNA, 20 bp, Artificial Sequence
  Description of Artificial Sequence: Synthetic oligonucleotide
  Target: LAMA2; (-) strand; PAM type: YTN; PAM sequence: CTT
tccagtcttcaaattctttg

SEQ ID NO: 244213 - DNA, 20 bp, Artificial Sequence
  Description of Artificial Sequence: Synthetic oligonucleotide
  Target: LAMA2; (-) strand; PAM type: YTN; PAM sequence: TTC
tttccagtcttcaaattctt

SEQ ID NO: 244214 - DNA, 20 bp, Artificial Sequence
  Description of Artificial Sequence: Synthetic oligonucleotide
  Target: LAMA2; (-) strand; PAM type: YTN; PAM sequence: CTC
aagttctttccagtcttcaa

SEQ ID NO: 244215 - DNA, 20 bp, Artificial Sequence
  Description of Artificial Sequence: Synthetic oligonucleotide
  Target: LAMA2; (-) strand; PAM type: YTN; PAM sequence: CTG
ctcaagttctttccagtctt

SEQ ID NO: 244216 - DNA, 20 bp, Artificial Sequence
  Description of Artificial Sequence: Synthetic oligonucleotide
  Target: LAMA2; (-) strand; PAM type: YTN; PAM sequence: TTA
atagagtcctgctcaagttc

SEQ ID NO: 244217 - DNA, 20 bp, Artificial Sequence
  Description of Artificial Sequence: Synthetic oligonucleotide
  Target: LAMA2; (-) strand; PAM type: YTN; PAM sequence: TTT
aatagagtcctgctcaagtt

SEQ ID NO: 244218 - DNA, 20 bp, Artificial Sequence
  Description of Artificial Sequence: Synthetic oligonucleotide
  Target: LAMA2; (-) strand; PAM type: YTN; PAM sequence: CTC
acacaaaacacatttaatag

SEQ ID NO: 244219 - DNA, 20 bp, Artificial Sequence
  Description of Artificial Sequence: Synthetic oligonucleotide
  Target: LAMA2; (-) strand; PAM type: YTN; PAM sequence: CTA
gcatggaggaaccacaagaa

SEQ ID NO: 244220 - DNA, 20 bp, Artificial Sequence
  Description of Artificial Sequence: Synthetic oligonucleotide
  Target: LAMA2; (-) strand; PAM type: YTN; PAM sequence: CTG
cccctagcatggaggaacca

SEQ ID NO: 244221 - DNA, 20 bp, Artificial Sequence
  Description of Artificial Sequence: Synthetic oligonucleotide
  Target: LAMA2; (-) strand; PAM type: YTN; PAM sequence: CTC
ctgcccctagcatggaggaa

SEQ ID NO: 244222 - DNA, 20 bp, Artificial Sequence
  Description of Artificial Sequence: Synthetic oligonucleotide
  Target: LAMA2; (-) strand; PAM type: YTN; PAM sequence: CTA
cctcctgcccctagcatgga

SEQ ID NO: 244223 - DNA, 20 bp, Artificial Sequence
  Description of Artificial Sequence: Synthetic oligonucleotide
  Target: LAMA2; (-) strand; PAM type: YTN; PAM sequence: CTC
catcctacctcctgccccta

SEQ ID NO: 244224 - DNA, 20 bp, Artificial Sequence
  Description of Artificial Sequence: Synthetic oligonucleotide
  Target: LAMA2; (-) strand; PAM type: YTN; PAM sequence: CTG
ctccatcctacctcctgccc

SEQ ID NO: 244225 - DNA, 20 bp, Artificial Sequence
  Description of Artificial Sequence: Synthetic oligonucleotide
  Target: LAMA2; (-) strand; PAM type: YTN; PAM sequence: CTA
tctgctccatcctacctcct

SEQ ID NO: 244226 - DNA, 20 bp, Artificial Sequence
  Description of Artificial Sequence: Synthetic oligonucleotide
  Target: LAMA2; (-) strand; PAM type: YTN; PAM sequence: CTC
cctatctgctccatcctacc

SEQ ID NO: 244227 - DNA, 20 bp, Artificial Sequence
  Description of Artificial Sequence: Synthetic oligonucleotide
  Target: LAMA2; (-) strand; PAM type: YTN; PAM sequence: TTA
agaggaaaagagactcccta

SEQ ID NO: 244228 - DNA, 20 bp, Artificial Sequence
  Description of Artificial Sequence: Synthetic oligonucleotide
  Target: LAMA2; (-) strand; PAM type: YTN; PAM sequence: TTT
aagaggaaaagagactccct

SEQ ID NO: 244229 - DNA, 20 bp, Artificial Sequence
  Description of Artificial Sequence: Synthetic oligonucleotide
  Target: LAMA2; (-) strand; PAM type: YTN; PAM sequence: TTA
aaaaaaacatccggtttaag

SEQ ID NO: 244230 - DNA, 20 bp, Artificial Sequence
  Description of Artificial Sequence: Synthetic oligonucleotide
  Target: LAMA2; (-) strand; PAM type: YTN; PAM sequence: TTT
aaaaaaaacatccggtttaa

SEQ ID NO: 244231 - DNA, 20 bp, Artificial Sequence
  Description of Artificial Sequence: Synthetic oligonucleotide
  Target: LAMA2; (-) strand; PAM type: YTN; PAM sequence: TTT
taaaaaaaacatccggttta

SEQ ID NO: 244232 - DNA, 20 bp, Artificial Sequence
  Description of Artificial Sequence: Synthetic oligonucleotide
  Target: LAMA2; (-) strand; PAM type: YTN; PAM sequence: CTG
attttaaaaaaaacatccgg

SEQ ID NO: 244233 - DNA, 20 bp, Artificial Sequence
  Description of Artificial Sequence: Synthetic oligonucleotide
  Target: LAMA2; (-) strand; PAM type: YTN; PAM sequence: CTC
aacatataaaactgatttta

SEQ ID NO: 244234 - DNA, 20 bp, Artificial Sequence
  Description of Artificial Sequence: Synthetic oligonucleotide
  Target: LAMA2; (-) strand; PAM type: YTN; PAM sequence: CTC
tcaacatataaaactgattt

SEQ ID NO: 244235 - DNA, 20 bp, Artificial Sequence
  Description of Artificial Sequence: Synthetic oligonucleotide
  Target: LAMA2; (-) strand; PAM type: YTN; PAM sequence: TTC
catggactctcaacatataa

SEQ ID NO: 244236 - DNA, 20 bp, Artificial Sequence
  Description of Artificial Sequence: Synthetic oligonucleotide
  Target: LAMA2; (-) strand; PAM type: YTN; PAM sequence: TTC
cattccatggactctcaaca

SEQ ID NO: 244237 - DNA, 20 bp, Artificial Sequence
  Description of Artificial Sequence: Synthetic oligonucleotide
  Target: LAMA2; (-) strand; PAM type: YTN; PAM sequence: TTC
cacattccattccatggact

SEQ ID NO: 244238 - DNA, 20 bp, Artificial Sequence
  Description of Artificial Sequence: Synthetic oligonucleotide
  Target: LAMA2; (-) strand; PAM type: YTN; PAM sequence: TTT
ccacattccattccatggac

SEQ ID NO: 244239 - DNA, 20 bp, Artificial Sequence
  Description of Artificial Sequence: Synthetic oligonucleotide
  Target: LAMA2; (-) strand; PAM type: YTN; PAM sequence: CTC
agtttccacattccattcca

SEQ ID NO: 244240 - DNA, 20 bp, Artificial Sequence
  Description of Artificial Sequence: Synthetic oligonucleotide
  Target: LAMA2; (-) strand; PAM type: YTN; PAM sequence: TTC
agggtctcagtttccacatt

SEQ ID NO: 244241 - DNA, 20 bp, Artificial Sequence
  Description of Artificial Sequence: Synthetic oligonucleotide
  Target: LAMA2; (-) strand; PAM type: YTN; PAM sequence: TTT
cagggtctcagtttccacat

SEQ ID NO: 244242 - DNA, 20 bp, Artificial Sequence
  Description of Artificial Sequence: Synthetic oligonucleotide
  Target: LAMA2; (-) strand; PAM type: YTN; PAM sequence: CTT
tcagggtctcagtttccaca

SEQ ID NO: 244243 - DNA, 20 bp, Artificial Sequence
  Description of Artificial Sequence: Synthetic oligonucleotide
  Target: LAMA2; (-) strand; PAM type: YTN; PAM sequence: TTA
atctttcagggtctcagttt

SEQ ID NO: 244244 - DNA, 20 bp, Artificial Sequence
  Description of Artificial Sequence: Synthetic oligonucleotide
  Target: LAMA2; (-) strand; PAM type: YTN; PAM sequence: CTT
aatctttcagggtctcagtt

SEQ ID NO: 244245 - DNA, 20 bp, Artificial Sequence
  Description of Artificial Sequence: Synthetic oligonucleotide
  Target: LAMA2; (-) strand; PAM type: YTN; PAM sequence: TTC
aagtgacttaatctttcagg

SEQ ID NO: 244246 - DNA, 20 bp, Artificial Sequence
  Description of Artificial Sequence: Synthetic oligonucleotide
  Target: LAMA2; (-) strand; PAM type: YTN; PAM sequence: TTG
ttcaagtgacttaatctttc

SEQ ID NO: 244247 - DNA, 20 bp, Artificial Sequence
  Description of Artificial Sequence: Synthetic oligonucleotide
  Target: LAMA2; (-) strand; PAM type: YTN; PAM sequence: TTT
gttcaagtgacttaatcttt

SEQ ID NO: 244248 - DNA, 20 bp, Artificial Sequence
  Description of Artificial Sequence: Synthetic oligonucleotide
  Target: LAMA2; (-) strand; PAM type: YTN; PAM sequence: CTT
tgttcaagtgacttaatctt

SEQ ID NO: 244249 - DNA, 20 bp, Artificial Sequence
  Description of Artificial Sequence: Synthetic oligonucleotide
  Target: LAMA2; (-) strand; PAM type: YTN; PAM sequence: CTG
tatatctttgttcaagtgac

SEQ ID NO: 244250 - DNA, 20 bp, Artificial Sequence
  Description of Artificial Sequence: Synthetic oligonucleotide
  Target: LAMA2; (-) strand; PAM type: YTN; PAM sequence: CTG
gagaagctgtatatctttgt

SEQ ID NO: 244251 - DNA, 20 bp, Artificial Sequence
  Description of Artificial Sequence: Synthetic oligonucleotide
  Target: LAMA2; (-) strand; PAM type: YTN; PAM sequence: CTC
tggagaagctgtatatcttt

SEQ ID NO: 244252 - DNA, 20 bp, Artificial Sequence
  Description of Artificial Sequence: Synthetic oligonucleotide
  Target: LAMA2; (-) strand; PAM type: YTN; PAM sequence: CTG
gtctctggagaagctgtata

SEQ ID NO: 244253 - DNA, 20 bp, Artificial Sequence
  Description of Artificial Sequence: Synthetic oligonucleotide
  Target: LAMA2; (-) strand; PAM type: YTN; PAM sequence: CTG
cctggtctctggagaagctg

SEQ ID NO: 244254 - DNA, 20 bp, Artificial Sequence
  Description of Artificial Sequence: Synthetic oligonucleotide
  Target: LAMA2; (-) strand; PAM type: YTN; PAM sequence: CTA
gtgtctgcctggtctctgga

SEQ ID NO: 244255 - DNA, 20 bp, Artificial Sequence
  Description of Artificial Sequence: Synthetic oligonucleotide
  Target: LAMA2; (-) strand; PAM type: YTN; PAM sequence: CTG
cagtggaagtcaggaaatca

SEQ ID NO: 244256 - DNA, 20 bp, Artificial Sequence
  Description of Artificial Sequence: Synthetic oligonucleotide
  Target: LAMA2; (-) strand; PAM type: YTN; PAM sequence: CTC
atagaaaaatggtaagagat

SEQ ID NO: 244257 - DNA, 20 bp, Artificial Sequence
  Description of Artificial Sequence: Synthetic oligonucleotide
  Target: LAMA2; (-) strand; PAM type: YTN; PAM sequence: CTC
tcatagaaaaatggtaagag

SEQ ID NO: 244258 - DNA, 20 bp, Artificial Sequence
  Description of Artificial Sequence: Synthetic oligonucleotide
  Target: LAMA2; (-) strand; PAM type: YTN; PAM sequence: TTA
tgactctcatagaaaaatgg

SEQ ID NO: 244259 - DNA, 20 bp, Artificial Sequence
  Description of Artificial Sequence: Synthetic oligonucleotide
  Target: LAMA2; (-) strand; PAM type: YTN; PAM sequence: TTT
atgactctcatagaaaaatg

SEQ ID NO: 244260 - DNA, 20 bp, Artificial Sequence
  Description of Artificial Sequence: Synthetic oligonucleotide
  Target: LAMA2; (-) strand; PAM type: YTN; PAM sequence: TTT
tatgactctcatagaaaaat

SEQ ID NO: 244261 - DNA, 20 bp, Artificial Sequence
  Description of Artificial Sequence: Synthetic oligonucleotide
  Target: LAMA2; (-) strand; PAM type: YTN; PAM sequence: TTT
ttatgactctcatagaaaaa

SEQ ID NO: 244262 - DNA, 20 bp, Artificial Sequence
  Description of Artificial Sequence: Synthetic oligonucleotide
  Target: LAMA2; (-) strand; PAM type: YTN; PAM sequence: TTT
tttatgactctcatagaaaa

SEQ ID NO: 244263 - DNA, 20 bp, Artificial Sequence
  Description of Artificial Sequence: Synthetic oligonucleotide
  Target: LAMA2; (-) strand; PAM type: YTN; PAM sequence: TTT
ttttatgactctcatagaaa

SEQ ID NO: 244264 - DNA, 20 bp, Artificial Sequence
  Description of Artificial Sequence: Synthetic oligonucleotide
  Target: LAMA2; (-) strand; PAM type: YTN; PAM sequence: CTT
tttttatgactctcatagaa

SEQ ID NO: 244265 - DNA, 20 bp, Artificial Sequence
  Description of Artificial Sequence: Synthetic oligonucleotide
  Target: LAMA2; (-) strand; PAM type: YTN; PAM sequence: TTC
tttttttatgactctcatag

SEQ ID NO: 244266 - DNA, 20 bp, Artificial Sequence
  Description of Artificial Sequence: Synthetic oligonucleotide
  Target: LAMA2; (-) strand; PAM type: YTN; PAM sequence: CTG
attctttttttatgactctc

SEQ ID NO: 244267 - DNA, 20 bp, Artificial Sequence
  Description of Artificial Sequence: Synthetic oligonucleotide
  Target: LAMA2; (-) strand; PAM type: YTN; PAM sequence: CTA
gaaagtaaatagctgattct

SEQ ID NO: 244268 - DNA, 20 bp, Artificial Sequence
  Description of Artificial Sequence: Synthetic oligonucleotide
  Target: LAMA2; (-) strand; PAM type: YTN; PAM sequence: TTG
actagaaagtaaatagctga

SEQ ID NO: 244269 - DNA, 20 bp, Artificial Sequence
  Description of Artificial Sequence: Synthetic oligonucleotide
  Target: LAMA2; (-) strand; PAM type: YTN; PAM sequence: CTT
gactagaaagtaaatagctg

SEQ ID NO: 244270 - DNA, 20 bp, Artificial Sequence
  Description of Artificial Sequence: Synthetic oligonucleotide
  Target: LAMA2; (-) strand; PAM type: YTN; PAM sequence: TTA
acccaccttgactagaaagt

SEQ ID NO: 244271 - DNA, 20 bp, Artificial Sequence
  Description of Artificial Sequence: Synthetic oligonucleotide
  Target: LAMA2; (-) strand; PAM type: YTN; PAM sequence: TTT
aacccaccttgactagaaag

SEQ ID NO: 244272 - DNA, 20 bp, Artificial Sequence
  Description of Artificial Sequence: Synthetic oligonucleotide
  Target: LAMA2; (-) strand; PAM type: YTN; PAM sequence: TTT
taacccaccttgactagaaa

SEQ ID NO: 244273 - DNA, 20 bp, Artificial Sequence
  Description of Artificial Sequence: Synthetic oligonucleotide
  Target: LAMA2; (-) strand; PAM type: YTN; PAM sequence: TTG
attttaacccaccttgacta

SEQ ID NO: 244274 - DNA, 20 bp, Artificial Sequence
  Description of Artificial Sequence: Synthetic oligonucleotide
  Target: LAMA2; (-) strand; PAM type: YTN; PAM sequence: CTT
gattttaacccaccttgact

SEQ ID NO: 244275 - DNA, 20 bp, Artificial Sequence
  Description of Artificial Sequence: Synthetic oligonucleotide
  Target: LAMA2; (-) strand; PAM type: YTN; PAM sequence: TTG
aaaacaagtggcttgatttt

SEQ ID NO: 244276 - DNA, 20 bp, Artificial Sequence
  Description of Artificial Sequence: Synthetic oligonucleotide
  Target: LAMA2; (-) strand; PAM type: YTN; PAM sequence: TTT
gaaaacaagtggcttgattt

SEQ ID NO: 244277 - DNA, 20 bp, Artificial Sequence
  Description of Artificial Sequence: Synthetic oligonucleotide
  Target: LAMA2; (-) strand; PAM type: YTN; PAM sequence: TTG
atggcatgaacccgaaatcg

SEQ ID NO: 244278 - DNA, 20 bp, Artificial Sequence
  Description of Artificial Sequence: Synthetic oligonucleotide
  Target: LAMA2; (-) strand; PAM type: YTN; PAM sequence: TTT
gatggcatgaacccgaaatc

SEQ ID NO: 244279 - DNA, 20 bp, Artificial Sequence
  Description of Artificial Sequence: Synthetic oligonucleotide
  Target: LAMA2; (-) strand; PAM type: YTN; PAM sequence: TTA
atttgatggcatgaacccga

SEQ ID NO: 244280 - DNA, 20 bp, Artificial Sequence
  Description of Artificial Sequence: Synthetic oligonucleotide
  Target: LAMA2; (-) strand; PAM type: YTN; PAM sequence: TTT
aatttgatggcatgaacccg

SEQ ID NO: 244281 - DNA, 20 bp, Artificial Sequence
  Description of Artificial Sequence: Synthetic oligonucleotide
  Target: LAMA2; (-) strand; PAM type: YTN; PAM sequence: TTT
taatttgatggcatgaaccc

SEQ ID NO: 244282 - DNA, 20 bp, Artificial Sequence
  Description of Artificial Sequence: Synthetic oligonucleotide
  Target: LAMA2; (-) strand; PAM type: YTN; PAM sequence: TTT
ttaatttgatggcatgaacc

SEQ ID NO: 244283 - DNA, 20 bp, Artificial Sequence
  Description of Artificial Sequence: Synthetic oligonucleotide
  Target: LAMA2; (-) strand; PAM type: YTN; PAM sequence: TTT
tttaatttgatggcatgaac

SEQ ID NO: 244284 - DNA, 20 bp, Artificial Sequence
  Description of Artificial Sequence: Synthetic oligonucleotide
  Target: LAMA2; (-) strand; PAM type: YTN; PAM sequence: TTA
agtgaattttttaatttgat

SEQ ID NO: 244285 - DNA, 20 bp, Artificial Sequence
  Description of Artificial Sequence: Synthetic oligonucleotide
  Target: LAMA2; (-) strand; PAM type: YTN; PAM sequence: CTC
agttaagtgaattttttaat

SEQ ID NO: 244286 - DNA, 20 bp, Artificial Sequence
  Description of Artificial Sequence: Synthetic oligonucleotide
  Target: LAMA2; (-) strand; PAM type: YTN; PAM sequence: TTA
aactcagttaagtgaatttt

SEQ ID NO: 244287 - DNA, 20 bp, Artificial Sequence
  Description of Artificial Sequence: Synthetic oligonucleotide
  Target: LAMA2; (-) strand; PAM type: YTN; PAM sequence: CTA
agtgaaagcaaattaaactc

SEQ ID NO: 244288 - DNA, 20 bp, Artificial Sequence
  Description of Artificial Sequence: Synthetic oligonucleotide
  Target: LAMA2; (-) strand; PAM type: YTN; PAM sequence: TTC
ctaagtgaaagcaaattaaa

SEQ ID NO: 244289 - DNA, 20 bp, Artificial Sequence
  Description of Artificial Sequence: Synthetic oligonucleotide
  Target: LAMA2; (-) strand; PAM type: YTN; PAM sequence: CTT
cctaagtgaaagcaaattaa

SEQ ID NO: 244290 - DNA, 20 bp, Artificial Sequence
  Description of Artificial Sequence: Synthetic oligonucleotide
  Target: LAMA2; (-) strand; PAM type: YTN; PAM sequence: CTG
cttcctaagtgaaagcaaat

SEQ ID NO: 244291 - DNA, 20 bp, Artificial Sequence
  Description of Artificial Sequence: Synthetic oligonucleotide
  Target: LAMA2; (-) strand; PAM type: YTN; PAM sequence: TTG
aaaggcagctgcttcctaag

SEQ ID NO: 244292 - DNA, 20 bp, Artificial Sequence
  Description of Artificial Sequence: Synthetic oligonucleotide
  Target: LAMA2; (-) strand; PAM type: YTN; PAM sequence: CTT
gaaaggcagctgcttcctaa

SEQ ID NO: 244293 - DNA, 20 bp, Artificial Sequence
  Description of Artificial Sequence: Synthetic oligonucleotide
  Target: LAMA2; (-) strand; PAM type: YTN; PAM sequence: TTA
tcttgaaaggcagctgcttc

SEQ ID NO: 244294 - DNA, 20 bp, Artificial Sequence
  Description of Artificial Sequence: Synthetic oligonucleotide
  Target: LAMA2; (-) strand; PAM type: YTN; PAM sequence: TTA
ttatcttgaaaggcagctgc

SEQ ID NO: 244295 - DNA, 20 bp, Artificial Sequence
  Description of Artificial Sequence: Synthetic oligonucleotide
  Target: LAMA2; (-) strand; PAM type: YTN; PAM sequence: TTT
attatcttgaaaggcagctg

SEQ ID NO: 244296 - DNA, 20 bp, Artificial Sequence
  Description of Artificial Sequence: Synthetic oligonucleotide
  Target: LAMA2; (-) strand; PAM type: YTN; PAM sequence: TTT
tattatcttgaaaggcagct

SEQ ID NO: 244297 - DNA, 20 bp, Artificial Sequence
  Description of Artificial Sequence: Synthetic oligonucleotide
  Target: LAMA2; (-) strand; PAM type: YTN; PAM sequence: TTA
ttttattatcttgaaaggca

SEQ ID NO: 244298 - DNA, 20 bp, Artificial Sequence
  Description of Artificial Sequence: Synthetic oligonucleotide
  Target: LAMA2; (-) strand; PAM type: YTN; PAM sequence: TTT
attttattatcttgaaaggc

SEQ ID NO: 244299 - DNA, 20 bp, Artificial Sequence
  Description of Artificial Sequence: Synthetic oligonucleotide
  Target: LAMA2; (-) strand; PAM type: YTN; PAM sequence: CTG
tttattttattatcttgaaa

SEQ ID NO: 244300 - DNA, 20 bp, Artificial Sequence
  Description of Artificial Sequence: Synthetic oligonucleotide
  Target: LAMA2; (-) strand; PAM type: YTN; PAM sequence: TTG
tatctgtttattttattatc

SEQ ID NO: 244301 - DNA, 20 bp, Artificial Sequence
  Description of Artificial Sequence: Synthetic oligonucleotide
  Target: LAMA2; (-) strand; PAM type: YTN; PAM sequence: TTA
ttgtatctgtttattttatt

SEQ ID NO: 244302 - DNA, 20 bp, Artificial Sequence
  Description of Artificial Sequence: Synthetic oligonucleotide
  Target: LAMA2; (-) strand; PAM type: YTN; PAM sequence: CTG
accaaatattattgtatctg

SEQ ID NO: 244303 - DNA, 20 bp, Artificial Sequence
  Description of Artificial Sequence: Synthetic oligonucleotide
  Target: LAMA2; (-) strand; PAM type: YTN; PAM sequence: TTA
aaagccacagctgaccaaat

SEQ ID NO: 244304 - DNA, 20 bp, Artificial Sequence
  Description of Artificial Sequence: Synthetic oligonucleotide
  Target: LAMA2; (-) strand; PAM type: YTN; PAM sequence: TTA
aattaaaagccacagctgac

SEQ ID NO: 244305 - DNA, 20 bp, Artificial Sequence
  Description of Artificial Sequence: Synthetic oligonucleotide
  Target: LAMA2; (-) strand; PAM type: YTN; PAM sequence: TTT
aaattaaaagccacagctga

SEQ ID NO: 244306 - DNA, 20 bp, Artificial Sequence
  Description of Artificial Sequence: Synthetic oligonucleotide
  Target: LAMA2; (-) strand; PAM type: YTN; PAM sequence: TTA
aatcaaacatttaaattaaa

SEQ ID NO: 244307 - DNA, 20 bp, Artificial Sequence
  Description of Artificial Sequence: Synthetic oligonucleotide
  Target: LAMA2; (-) strand; PAM type: YTN; PAM sequence: CTA
aacaacattaaatcaaacat

SEQ ID NO: 244308 - DNA, 20 bp, Artificial Sequence
  Description of Artificial Sequence: Synthetic oligonucleotide
  Target: LAMA2; (-) strand; PAM type: YTN; PAM sequence: TTG
gaatccagcaaactaaacaa

SEQ ID NO: 244309 - DNA, 20 bp, Artificial Sequence
  Description of Artificial Sequence: Synthetic oligonucleotide
  Target: LAMA2; (-) strand; PAM type: YTN; PAM sequence: TTT
ggaatccagcaaactaaaca

SEQ ID NO: 244310 - DNA, 20 bp, Artificial Sequence
  Description of Artificial Sequence: Synthetic oligonucleotide
  Target: LAMA2; (-) strand; PAM type: YTN; PAM sequence: TTT
tggaatccagcaaactaaac

SEQ ID NO: 244311 - DNA, 20 bp, Artificial Sequence
  Description of Artificial Sequence: Synthetic oligonucleotide
  Target: LAMA2; (-) strand; PAM type: YTN; PAM sequence: TTG
cagagaatattttggaatcc

SEQ ID NO: 244312 - DNA, 20 bp, Artificial Sequence
  Description of Artificial Sequence: Synthetic oligonucleotide
  Target: LAMA2; (-) strand; PAM type: YTN; PAM sequence: CTT
gcagagaatattttggaatc

SEQ ID NO: 244313 - DNA, 20 bp, Artificial Sequence
  Description of Artificial Sequence: Synthetic oligonucleotide
  Target: LAMA2; (-) strand; PAM type: YTN; PAM sequence: CTC
ttgcagagaatattttggaa

SEQ ID NO: 244314 - DNA, 20 bp, Artificial Sequence
  Description of Artificial Sequence: Synthetic oligonucleotide
  Target: LAMA2; (-) strand; PAM type: YTN; PAM sequence: TTC
tcttgcagagaatattttgg

SEQ ID NO: 244315 - DNA, 20 bp, Artificial Sequence
  Description of Artificial Sequence: Synthetic oligonucleotide
  Target: LAMA2; (-) strand; PAM type: YTN; PAM sequence: CTT
ctcttgcagagaatattttg

SEQ ID NO: 244316 - DNA, 20 bp, Artificial Sequence
  Description of Artificial Sequence: Synthetic oligonucleotide
  Target: LAMA2; (-) strand; PAM type: YTN; PAM sequence: TTA
gaatgtgtatgcttctcttg

SEQ ID NO: 244317 - DNA, 20 bp, Artificial Sequence
  Description of Artificial Sequence: Synthetic oligonucleotide
  Target: LAMA2; (-) strand; PAM type: YTN; PAM sequence: TTT
agaatgtgtatgcttctctt

SEQ ID NO: 244318 - DNA, 20 bp, Artificial Sequence
  Description of Artificial Sequence: Synthetic oligonucleotide
  Target: LAMA2; (-) strand; PAM type: YTN; PAM sequence: CTT
tagaatgtgtatgcttctct

SEQ ID NO: 244319 - DNA, 20 bp, Artificial Sequence
  Description of Artificial Sequence: Synthetic oligonucleotide
  Target: LAMA2; (-) strand; PAM type: YTN; PAM sequence: TTG
aaatgctttagaatgtgtat

SEQ ID NO: 244320 - DNA, 20 bp, Artificial Sequence
  Description of Artificial Sequence: Synthetic oligonucleotide
  Target: LAMA2; (-) strand; PAM type: YTN; PAM sequence: TTT
gaaatgctttagaatgtgta

SEQ ID NO: 244321 - DNA, 20 bp, Artificial Sequence
  Description of Artificial Sequence: Synthetic oligonucleotide
  Target: LAMA2; (-) strand; PAM type: YTN; PAM sequence: CTA
ggacatcataataaacattt

SEQ ID NO: 244322 - DNA, 20 bp, Artificial Sequence
  Description of Artificial Sequence: Synthetic oligonucleotide
  Target: LAMA2; (-) strand; PAM type: YTN; PAM sequence: CTC
taggacatcataataaacat

SEQ ID NO: 244323 - DNA, 20 bp, Artificial Sequence
  Description of Artificial Sequence: Synthetic oligonucleotide
  Target: LAMA2; (-) strand; PAM type: YTN; PAM sequence: CTC
agggtatgcacagcaacaga

SEQ ID NO: 244324 - DNA, 20 bp, Artificial Sequence
  Description of Artificial Sequence: Synthetic oligonucleotide
  Target: LAMA2; (-) strand; PAM type: YTN; PAM sequence: CTG
ctcagggtatgcacagcaac

SEQ ID NO: 244325 - DNA, 20 bp, Artificial Sequence
  Description of Artificial Sequence: Synthetic oligonucleotide
  Target: LAMA2; (-) strand; PAM type: YTN; PAM sequence: TTC
caaagcaatgtcaagtctgc

SEQ ID NO: 244326 - DNA, 20 bp, Artificial Sequence
  Description of Artificial Sequence: Synthetic oligonucleotide
  Target: LAMA2; (-) strand; PAM type: YTN; PAM sequence: CTT
ccaaagcaatgtcaagtctg

SEQ ID NO: 244327 - DNA, 20 bp, Artificial Sequence
  Description of Artificial Sequence: Synthetic oligonucleotide
  Target: LAMA2; (-) strand; PAM type: YTN; PAM sequence: CTA
tcagaaaatatgtgcttcca

SEQ ID NO: 244328 - DNA, 20 bp, Artificial Sequence
  Description of Artificial Sequence: Synthetic oligonucleotide
  Target: LAMA2; (-) strand; PAM type: YTN; PAM sequence: TTA
tgagagtaatatgtctatca

SEQ ID NO: 244329 - DNA, 20 bp, Artificial Sequence
  Description of Artificial Sequence: Synthetic oligonucleotide
  Target: LAMA2; (-) strand; PAM type: YTN; PAM sequence: TTA
gattatgagagtaatatgtc

SEQ ID NO: 244330 - DNA, 20 bp, Artificial Sequence
  Description of Artificial Sequence: Synthetic oligonucleotide
  Target: LAMA2; (-) strand; PAM type: YTN; PAM sequence: TTT
agattatgagagtaatatgt

SEQ ID NO: 244331 - DNA, 20 bp, Artificial Sequence
  Description of Artificial Sequence: Synthetic oligonucleotide
  Target: LAMA2; (-) strand; PAM type: YTN; PAM sequence: TTT
tagattatgagagtaatatg

SEQ ID NO: 244332 - DNA, 20 bp, Artificial Sequence
  Description of Artificial Sequence: Synthetic oligonucleotide
  Target: LAMA2; (-) strand; PAM type: YTN; PAM sequence: CTG
aaaaattttagattatgaga

SEQ ID NO: 244333 - DNA, 20 bp, Artificial Sequence
  Description of Artificial Sequence: Synthetic oligonucleotide
  Target: LAMA2; (-) strand; PAM type: YTN; PAM sequence: TTC
tgaaaaattttagattatga

SEQ ID NO: 244334 - DNA, 20 bp, Artificial Sequence
  Description of Artificial Sequence: Synthetic oligonucleotide
  Target: LAMA2; (-) strand; PAM type: YTN; PAM sequence: CTT
ctgaaaaattttagattatg

SEQ ID NO: 244335 - DNA, 20 bp, Artificial Sequence
  Description of Artificial Sequence: Synthetic oligonucleotide
  Target: LAMA2; (-) strand; PAM type: YTN; PAM sequence: TTG
tcacttctgaaaaattttag

SEQ ID NO: 244336 - DNA, 20 bp, Artificial Sequence
  Description of Artificial Sequence: Synthetic oligonucleotide
  Target: LAMA2; (-) strand; PAM type: YTN; PAM sequence: TTT
gtcacttctgaaaaatttta

SEQ ID NO: 244337 - DNA, 20 bp, Artificial Sequence
  Description of Artificial Sequence: Synthetic oligonucleotide
  Target: LAMA2; (-) strand; PAM type: YTN; PAM sequence: TTT
tgtcacttctgaaaaatttt

SEQ ID NO: 244338 - DNA, 20 bp, Artificial Sequence
  Description of Artificial Sequence: Synthetic oligonucleotide
  Target: LAMA2; (-) strand; PAM type: YTN; PAM sequence: CTT
ttgtcacttctgaaaaattt

SEQ ID NO: 244339 - DNA, 20 bp, Artificial Sequence
  Description of Artificial Sequence: Synthetic oligonucleotide
  Target: LAMA2; (-) strand; PAM type: YTN; PAM sequence: TTG
gaaaaagcaaaatcatggag

SEQ ID NO: 244340 - DNA, 20 bp, Artificial Sequence
  Description of Artificial Sequence: Synthetic oligonucleotide
  Target: LAMA2; (-) strand; PAM type: YTN; PAM sequence: CTT
ggaaaaagcaaaatcatgga

SEQ ID NO: 244341 - DNA, 20 bp, Artificial Sequence
  Description of Artificial Sequence: Synthetic oligonucleotide
  Target: LAMA2; (-) strand; PAM type: YTN; PAM sequence: CTA
catgacatcttggaaaaagc

SEQ ID NO: 244342 - DNA, 20 bp, Artificial Sequence
  Description of Artificial Sequence: Synthetic oligonucleotide
  Target: LAMA2; (-) strand; PAM type: YTN; PAM sequence: CTA
actacatgacatcttggaaa

SEQ ID NO: 244343 - DNA, 20 bp, Artificial Sequence
  Description of Artificial Sequence: Synthetic oligonucleotide
  Target: LAMA2; (-) strand; PAM type: YTN; PAM sequence: TTC
taactacatgacatcttgga

SEQ ID NO: 244344 - DNA, 20 bp, Artificial Sequence
  Description of Artificial Sequence: Synthetic oligonucleotide
  Target: LAMA2; (-) strand; PAM type: YTN; PAM sequence: TTG
tatgattctaactacatgac

SEQ ID NO: 244345 - DNA, 20 bp, Artificial Sequence
  Description of Artificial Sequence: Synthetic oligonucleotide
  Target: LAMA2; (-) strand; PAM type: YTN; PAM sequence: CTG
aaaagacaacacattgtatg

SEQ ID NO: 244346 - DNA, 20 bp, Artificial Sequence
  Description of Artificial Sequence: Synthetic oligonucleotide
  Target: LAMA2; (-) strand; PAM type: YTN; PAM sequence: CTA
agtgaaaaaagccaacctga

SEQ ID NO: 244347 - DNA, 20 bp, Artificial Sequence
  Description of Artificial Sequence: Synthetic oligonucleotide
  Target: LAMA2; (-) strand; PAM type: YTN; PAM sequence: TTG
ctaagtgaaaaaagccaacc

SEQ ID NO: 244348 - DNA, 20 bp, Artificial Sequence
  Description of Artificial Sequence: Synthetic oligonucleotide
  Target: LAMA2; (-) strand; PAM type: YTN; PAM sequence: TTA
caggcatattgctaagtgaa

SEQ ID NO: 244349 - DNA, 20 bp, Artificial Sequence
  Description of Artificial Sequence: Synthetic oligonucleotide
  Target: LAMA2; (-) strand; PAM type: YTN; PAM sequence: CTT
acaggcatattgctaagtga

SEQ ID NO: 244350 - DNA, 20 bp, Artificial Sequence
  Description of Artificial Sequence: Synthetic oligonucleotide
  Target: LAMA2; (-) strand; PAM type: YTN; PAM sequence: TTA
tcaaggcaagaaaagacatg

SEQ ID NO: 244351 - DNA, 20 bp, Artificial Sequence
  Description of Artificial Sequence: Synthetic oligonucleotide
  Target: LAMA2; (-) strand; PAM type: YTN; PAM sequence: CTA
aaaagaaatgaattatcaag

SEQ ID NO: 244352 - DNA, 20 bp, Artificial Sequence
  Description of Artificial Sequence: Synthetic oligonucleotide
  Target: LAMA2; (-) strand; PAM type: YTN; PAM sequence: TTC
agagctaaaaagaaatgaat

SEQ ID NO: 244353 - DNA, 20 bp, Artificial Sequence
  Description of Artificial Sequence: Synthetic oligonucleotide
  Target: LAMA2; (-) strand; PAM type: YTN; PAM sequence: TTA
tatccagacaacaaaatagt

SEQ ID NO: 244354 - DNA, 20 bp, Artificial Sequence
  Description of Artificial Sequence: Synthetic oligonucleotide
  Target: LAMA2; (-) strand; PAM type: YTN; PAM sequence: CTG
tggttatatccagacaacaa

SEQ ID NO: 244355 - DNA, 20 bp, Artificial Sequence
  Description of Artificial Sequence: Synthetic oligonucleotide
  Target: LAMA2; (-) strand; PAM type: YTN; PAM sequence: TTC
aactgtggttatatccagac

SEQ ID NO: 244356 - DNA, 20 bp, Artificial Sequence
  Description of Artificial Sequence: Synthetic oligonucleotide
  Target: LAMA2; (-) strand; PAM type: YTN; PAM sequence: TTC
aggaggtaaatggataattc

SEQ ID NO: 244357 - DNA, 20 bp, Artificial Sequence
  Description of Artificial Sequence: Synthetic oligonucleotide
  Target: LAMA2; (-) strand; PAM type: YTN; PAM sequence: TTT
caggaggtaaatggataatt

SEQ ID NO: 244358 - DNA, 20 bp, Artificial Sequence
  Description of Artificial Sequence: Synthetic oligonucleotide
  Target: LAMA2; (-) strand; PAM type: YTN; PAM sequence: TTT
tcaggaggtaaatggataat

SEQ ID NO: 244359 - DNA, 20 bp, Artificial Sequence
  Description of Artificial Sequence: Synthetic oligonucleotide
  Target: LAMA2; (-) strand; PAM type: YTN; PAM sequence: TTT
ttcaggaggtaaatggataa

SEQ ID NO: 244360 - DNA, 20 bp, Artificial Sequence
  Description of Artificial Sequence: Synthetic oligonucleotide
  Target: LAMA2; (-) strand; PAM type: YTN; PAM sequence: TTG
ccagaacatggtagcaagca

SEQ ID NO: 244361 - DNA, 20 bp, Artificial Sequence
  Description of Artificial Sequence: Synthetic oligonucleotide
  Target: LAMA2; (-) strand; PAM type: YTN; PAM sequence: TTC
atattgccagaacatggtag

SEQ ID NO: 244362 - DNA, 20 bp, Artificial Sequence
  Description of Artificial Sequence: Synthetic oligonucleotide
  Target: LAMA2; (-) strand; PAM type: YTN; PAM sequence: TTG
attcatattgccagaacatg

SEQ ID NO: 244363 - DNA, 20 bp, Artificial Sequence
  Description of Artificial Sequence: Synthetic oligonucleotide
  Target: LAMA2; (-) strand; PAM type: YTN; PAM sequence: CTT
gattcatattgccagaacat

SEQ ID NO: 244364 - DNA, 20 bp, Artificial Sequence
  Description of Artificial Sequence: Synthetic oligonucleotide
  Target: LAMA2; (-) strand; PAM type: YTN; PAM sequence: TTA
tagcagcttgattcatattg

SEQ ID NO: 244365 - DNA, 20 bp, Artificial Sequence
  Description of Artificial Sequence: Synthetic oligonucleotide
  Target: LAMA2; (-) strand; PAM type: YTN; PAM sequence: TTT
atagcagcttgattcatatt

SEQ ID NO: 244366 - DNA, 20 bp, Artificial Sequence
  Description of Artificial Sequence: Synthetic oligonucleotide
  Target: LAMA2; (-) strand; PAM type: YTN; PAM sequence: TTA
tcacataagtgtttatagca

SEQ ID NO: 244367 - DNA, 20 bp, Artificial Sequence
  Description of Artificial Sequence: Synthetic oligonucleotide
  Target: LAMA2; (-) strand; PAM type: YTN; PAM sequence: CTT
atcacataagtgtttatagc

SEQ ID NO: 244368 - DNA, 20 bp, Artificial Sequence
  Description of Artificial Sequence: Synthetic oligonucleotide
  Target: LAMA2; (-) strand; PAM type: YTN; PAM sequence: TTA
tatccacacaagacttatca

SEQ ID NO: 244369 - DNA, 20 bp, Artificial Sequence
  Description of Artificial Sequence: Synthetic oligonucleotide
  Target: LAMA2; (-) strand; PAM type: YTN; PAM sequence: TTT
atatccacacaagacttatc

SEQ ID NO: 244370 - DNA, 20 bp, Artificial Sequence
  Description of Artificial Sequence: Synthetic oligonucleotide
  Target: LAMA2; (-) strand; PAM type: YTN; PAM sequence: TTG
aatatttatatccacacaag

SEQ ID NO: 244371 - DNA, 20 bp, Artificial Sequence
  Description of Artificial Sequence: Synthetic oligonucleotide
  Target: LAMA2; (-) strand; PAM type: YTN; PAM sequence: TTA
cccaaataagttgaatattt

SEQ ID NO: 244372 - DNA, 20 bp, Artificial Sequence
  Description of Artificial Sequence: Synthetic oligonucleotide
  Target: LAMA2; (-) strand; PAM type: YTN; PAM sequence: TTT
acccaaataagttgaatatt

SEQ ID NO: 244373 - DNA, 20 bp, Artificial Sequence
  Description of Artificial Sequence: Synthetic oligonucleotide
  Target: LAMA2; (-) strand; PAM type: YTN; PAM sequence: TTG
gtatttacccaaataagttg

SEQ ID NO: 244374 - DNA, 20 bp, Artificial Sequence
  Description of Artificial Sequence: Synthetic oligonucleotide
  Target: LAMA2; (-) strand; PAM type: YTN; PAM sequence: TTT
ggtatttacccaaataagtt

SEQ ID NO: 244375 - DNA, 20 bp, Artificial Sequence
  Description of Artificial Sequence: Synthetic oligonucleotide
  Target: LAMA2; (-) strand; PAM type: YTN; PAM sequence: CTT
tggtatttacccaaataagt

SEQ ID NO: 244376 - DNA, 20 bp, Artificial Sequence
  Description of Artificial Sequence: Synthetic oligonucleotide
  Target: LAMA2; (-) strand; PAM type: YTN; PAM sequence: CTC
tttggtatttacccaaataa

SEQ ID NO: 244377 - DNA, 20 bp, Artificial Sequence
  Description of Artificial Sequence: Synthetic oligonucleotide
  Target: LAMA2; (-) strand; PAM type: YTN; PAM sequence: TTG
cactctttggtatttaccca

SEQ ID NO: 244378 - DNA, 20 bp, Artificial Sequence
  Description of Artificial Sequence: Synthetic oligonucleotide
  Target: LAMA2; (-) strand; PAM type: YTN; PAM sequence: CTG
accatatgatccagtaattg

SEQ ID NO: 244379 - DNA, 20 bp, Artificial Sequence
  Description of Artificial Sequence: Synthetic oligonucleotide
  Target: LAMA2; (-) strand; PAM type: YTN; PAM sequence: CTC
tgaccatatgatccagtaat

SEQ ID NO: 244380 - DNA, 20 bp, Artificial Sequence
  Description of Artificial Sequence: Synthetic oligonucleotide
  Target: LAMA2; (-) strand; PAM type: YTN; PAM sequence: CTA
gcatgctctgaccatatgat

SEQ ID NO: 244381 - DNA, 20 bp, Artificial Sequence
  Description of Artificial Sequence: Synthetic oligonucleotide
  Target: LAMA2; (-) strand; PAM type: YTN; PAM sequence: TTA
caaaactagcatgctctgac

SEQ ID NO: 244382 - DNA, 20 bp, Artificial Sequence
  Description of Artificial Sequence: Synthetic oligonucleotide
  Target: LAMA2; (-) strand; PAM type: YTN; PAM sequence: TTA
ttacaaaactagcatgctct

SEQ ID NO: 244383 - DNA, 20 bp, Artificial Sequence
  Description of Artificial Sequence: Synthetic oligonucleotide
  Target: LAMA2; (-) strand; PAM type: YTN; PAM sequence: TTT
attacaaaactagcatgctc

SEQ ID NO: 244384 - DNA, 20 bp, Artificial Sequence
  Description of Artificial Sequence: Synthetic oligonucleotide
  Target: LAMA2; (-) strand; PAM type: YTN; PAM sequence: TTG
gcagtttattacaaaactag

SEQ ID NO: 244385 - DNA, 20 bp, Artificial Sequence
  Description of Artificial Sequence: Synthetic oligonucleotide
  Target: LAMA2; (-) strand; PAM type: YTN; PAM sequence: TTT
ggcagtttattacaaaacta

SEQ ID NO: 244386 - DNA, 20 bp, Artificial Sequence
  Description of Artificial Sequence: Synthetic oligonucleotide
  Target: LAMA2; (-) strand; PAM type: YTN; PAM sequence: TTG
gaagatagtttggcagttta

SEQ ID NO: 244387 - DNA, 20 bp, Artificial Sequence
  Description of Artificial Sequence: Synthetic oligonucleotide
  Target: LAMA2; (-) strand; PAM type: YTN; PAM sequence: TTA
tacaaccatattggaagata

SEQ ID NO: 244388 - DNA, 20 bp, Artificial Sequence
  Description of Artificial Sequence: Synthetic oligonucleotide
  Target: LAMA2; (-) strand; PAM type: YTN; PAM sequence: CTG
gtgagaatgcaaaattatac

SEQ ID NO: 244389 - DNA, 20 bp, Artificial Sequence
  Description of Artificial Sequence: Synthetic oligonucleotide
  Target: LAMA2; (-) strand; PAM type: YTN; PAM sequence: TTG
ctggtgagaatgcaaaatta

SEQ ID NO: 244390 - DNA, 20 bp, Artificial Sequence
  Description of Artificial Sequence: Synthetic oligonucleotide
  Target: LAMA2; (-) strand; PAM type: YTN; PAM sequence: TTC
attgctggtgagaatgcaaa

SEQ ID NO: 244391 - DNA, 20 bp, Artificial Sequence
  Description of Artificial Sequence: Synthetic oligonucleotide
  Target: LAMA2; (-) strand; PAM type: YTN; PAM sequence: TTG
ttcattgctggtgagaatgc

SEQ ID NO: 244392 - DNA, 20 bp, Artificial Sequence
  Description of Artificial Sequence: Synthetic oligonucleotide
  Target: LAMA2; (-) strand; PAM type: YTN; PAM sequence: CTT
gttcattgctggtgagaatg

SEQ ID NO: 244393 - DNA, 20 bp, Artificial Sequence
  Description of Artificial Sequence: Synthetic oligonucleotide
  Target: LAMA2; (-) strand; PAM type: YTN; PAM sequence: CTC
ttgttcattgctggtgagaa

SEQ ID NO: 244394 - DNA, 20 bp, Artificial Sequence
  Description of Artificial Sequence: Synthetic oligonucleotide
  Target: LAMA2; (-) strand; PAM type: YTN; PAM sequence: CTG
gtgagaatgtggagaaacag

SEQ ID NO: 244395 - DNA, 20 bp, Artificial Sequence
  Description of Artificial Sequence: Synthetic oligonucleotide
  Target: LAMA2; (-) strand; PAM type: YTN; PAM sequence: TTG
acaatatgaaatgctggtga

SEQ ID NO: 244396 - DNA, 20 bp, Artificial Sequence
  Description of Artificial Sequence: Synthetic oligonucleotide
  Target: LAMA2; (-) strand; PAM type: YTN; PAM sequence: CTA
aaacattgacaatatgaaat

SEQ ID NO: 244397 - DNA, 20 bp, Artificial Sequence
  Description of Artificial Sequence: Synthetic oligonucleotide
  Target: LAMA2; (-) strand; PAM type: YTN; PAM sequence: CTG
atgtctaaaacattgacaat

SEQ ID NO: 244398 - DNA, 20 bp, Artificial Sequence
  Description of Artificial Sequence: Synthetic oligonucleotide
  Target: LAMA2; (-) strand; PAM type: YTN; PAM sequence: TTA
gaatagctgatgtctaaaac

SEQ ID NO: 244399 - DNA, 20 bp, Artificial Sequence
  Description of Artificial Sequence: Synthetic oligonucleotide
  Target: LAMA2; (-) strand; PAM type: YTN; PAM sequence: CTA
ttagaatagctgatgtctaa

SEQ ID NO: 244400 - DNA, 20 bp, Artificial Sequence
  Description of Artificial Sequence: Synthetic oligonucleotide
  Target: LAMA2; (-) strand; PAM type: YTN; PAM sequence: CTA
catatctattagaatagctg

SEQ ID NO: 244401 - DNA, 20 bp, Artificial Sequence
  Description of Artificial Sequence: Synthetic oligonucleotide
  Target: LAMA2; (-) strand; PAM type: YTN; PAM sequence: TTA
aaacaacgatataccactac

SEQ ID NO: 244402 - DNA, 20 bp, Artificial Sequence
  Description of Artificial Sequence: Synthetic oligonucleotide
  Target: LAMA2; (-) strand; PAM type: YTN; PAM sequence: TTC
aaattaaaacaacgatatac

SEQ ID NO: 244403 - DNA, 20 bp, Artificial Sequence
  Description of Artificial Sequence: Synthetic oligonucleotide
  Target: LAMA2; (-) strand; PAM type: YTN; PAM sequence: TTT
caaattaaaacaacgatata

SEQ ID NO: 244404 - DNA, 20 bp, Artificial Sequence
  Description of Artificial Sequence: Synthetic oligonucleotide
  Target: LAMA2; (-) strand; PAM type: YTN; PAM sequence: TTA
gagaatttcaaattaaaaca

SEQ ID NO: 244405 - DNA, 20 bp, Artificial Sequence
  Description of Artificial Sequence: Synthetic oligonucleotide
  Target: LAMA2; (-) strand; PAM type: YTN; PAM sequence: TTA
catcattagagaatttcaaa

SEQ ID NO: 244406 - DNA, 20 bp, Artificial Sequence
  Description of Artificial Sequence: Synthetic oligonucleotide
  Target: LAMA2; (-) strand; PAM type: YTN; PAM sequence: CTT
acatcattagagaatttcaa

SEQ ID NO: 244407 - DNA, 20 bp, Artificial Sequence
  Description of Artificial Sequence: Synthetic oligonucleotide
  Target: LAMA2; (-) strand; PAM type: YTN; PAM sequence: CTC
atcatcttacatcattagag

SEQ ID NO: 244408 - DNA, 20 bp, Artificial Sequence
  Description of Artificial Sequence: Synthetic oligonucleotide
  Target: LAMA2; (-) strand; PAM type: YTN; PAM sequence: TTA
tatacagatggaaaataagc

SEQ ID NO: 244409 - DNA, 20 bp, Artificial Sequence
  Description of Artificial Sequence: Synthetic oligonucleotide
  Target: LAMA2; (-) strand; PAM type: YTN; PAM sequence: CTT
atatacagatggaaaataag

SEQ ID NO: 244410 - DNA, 20 bp, Artificial Sequence
  Description of Artificial Sequence: Synthetic oligonucleotide
  Target: LAMA2; (-) strand; PAM type: YTN; PAM sequence: CTC
agcaaagcttatatacagat

SEQ ID NO: 244411 - DNA, 20 bp, Artificial Sequence
  Description of Artificial Sequence: Synthetic oligonucleotide
  Target: LAMA2; (-) strand; PAM type: YTN; PAM sequence: CTA
aacagatacctcagcaaagc

SEQ ID NO: 244412 - DNA, 20 bp, Artificial Sequence
  Description of Artificial Sequence: Synthetic oligonucleotide
  Target: LAMA2; (-) strand; PAM type: YTN; PAM sequence: TTG
gaaaaaatctaaacagatac

SEQ ID NO: 244413 - DNA, 20 bp, Artificial Sequence
  Description of Artificial Sequence: Synthetic oligonucleotide
  Target: LAMA2; (-) strand; PAM type: YTN; PAM sequence: TTA
aaaattggaaaaaatctaaa

SEQ ID NO: 244414 - DNA, 20 bp, Artificial Sequence
  Description of Artificial Sequence: Synthetic oligonucleotide
  Target: LAMA2; (-) strand; PAM type: YTN; PAM sequence: TTT
aaaaattggaaaaaatctaa

SEQ ID NO: 244415 - DNA, 20 bp, Artificial Sequence
  Description of Artificial Sequence: Synthetic oligonucleotide
  Target: LAMA2; (-) strand; PAM type: YTN; PAM sequence: CTC
aacaacaagaaaataaattt

SEQ ID NO: 244416 - DNA, 20 bp, Artificial Sequence
  Description of Artificial Sequence: Synthetic oligonucleotide
  Target: LAMA2; (-) strand; PAM type: YTN; PAM sequence: TTA
aatctcaacaacaagaaaat

SEQ ID NO: 244417 - DNA, 20 bp, Artificial Sequence
  Description of Artificial Sequence: Synthetic oligonucleotide
  Target: LAMA2; (-) strand; PAM type: YTN; PAM sequence: CTT
aaatctcaacaacaagaaaa

SEQ ID NO: 244418 - DNA, 20 bp, Artificial Sequence
  Description of Artificial Sequence: Synthetic oligonucleotide
  Target: LAMA2; (-) strand; PAM type: YTN; PAM sequence: CTC
ttaaatctcaacaacaagaa

SEQ ID NO: 244419 - DNA, 20 bp, Artificial Sequence
  Description of Artificial Sequence: Synthetic oligonucleotide
  Target: LAMA2; (-) strand; PAM type: YTN; PAM sequence: CTG
atatggtccaaaacatacaa

SEQ ID NO: 244420 - DNA, 20 bp, Artificial Sequence
  Description of Artificial Sequence: Synthetic oligonucleotide
  Target: LAMA2; (-) strand; PAM type: YTN; PAM sequence: TTG
caaaagatatacctgatatg

SEQ ID NO: 244421 - DNA, 20 bp, Artificial Sequence
  Description of Artificial Sequence: Synthetic oligonucleotide
  Target: LAMA2; (-) strand; PAM type: YTN; PAM sequence: TTT
gcaaaagatatacctgatat

SEQ ID NO: 244422 - DNA, 20 bp, Artificial Sequence
  Description of Artificial Sequence: Synthetic oligonucleotide
  Target: LAMA2; (-) strand; PAM type: YTN; PAM sequence: TTG
caagaaaatatttgcaaaag

SEQ ID NO: 244423 - DNA, 20 bp, Artificial Sequence
  Description of Artificial Sequence: Synthetic oligonucleotide
  Target: LAMA2; (-) strand; PAM type: YTN; PAM sequence: TTT
gcaagaaaatatttgcaaaa

SEQ ID NO: 244424 - DNA, 20 bp, Artificial Sequence
  Description of Artificial Sequence: Synthetic oligonucleotide
  Target: LAMA2; (-) strand; PAM type: YTN; PAM sequence: CTA
ccatttgcaagaaaatattt

SEQ ID NO: 244425 - DNA, 20 bp, Artificial Sequence
  Description of Artificial Sequence: Synthetic oligonucleotide
  Target: LAMA2; (-) strand; PAM type: YTN; PAM sequence: CTG
tgaagagaataagagaaact

SEQ ID NO: 244426 - DNA, 20 bp, Artificial Sequence
  Description of Artificial Sequence: Synthetic oligonucleotide
  Target: LAMA2; (-) strand; PAM type: YTN; PAM sequence: CTG
tgaaagacactgtgaagaga

SEQ ID NO: 244427 - DNA, 20 bp, Artificial Sequence
  Description of Artificial Sequence: Synthetic oligonucleotide
  Target: LAMA2; (-) strand; PAM type: YTN; PAM sequence: CTC
tgtgaaagacactgtgaaga

SEQ ID NO: 244428 - DNA, 20 bp, Artificial Sequence
  Description of Artificial Sequence: Synthetic oligonucleotide
  Target: LAMA2; (-) strand; PAM type: YTN; PAM sequence: TTC
tctgtgaaagacactgtgaa

SEQ ID NO: 244429 - DNA, 20 bp, Artificial Sequence
  Description of Artificial Sequence: Synthetic oligonucleotide
  Target: LAMA2; (-) strand; PAM type: YTN; PAM sequence: CTT
ctctgtgaaagacactgtga

SEQ ID NO: 244430 - DNA, 20 bp, Artificial Sequence
  Description of Artificial Sequence: Synthetic oligonucleotide
  Target: LAMA2; (-) strand; PAM type: YTN; PAM sequence: TTA
aaaatcatcttctctgtgaa

SEQ ID NO: 244431 - DNA, 20 bp, Artificial Sequence
  Description of Artificial Sequence: Synthetic oligonucleotide
  Target: LAMA2; (-) strand; PAM type: YTN; PAM sequence: TTA
aaattaaaaatcatcttctc

SEQ ID NO: 244432 - DNA, 20 bp, Artificial Sequence
  Description of Artificial Sequence: Synthetic oligonucleotide
  Target: LAMA2; (-) strand; PAM type: YTN; PAM sequence: TTA
ttaaaattaaaaatcatctt

SEQ ID NO: 244433 - DNA, 20 bp, Artificial Sequence
  Description of Artificial Sequence: Synthetic oligonucleotide
  Target: LAMA2; (-) strand; PAM type: YTN; PAM sequence: TTT
attaaaattaaaaatcatct

SEQ ID NO: 244434 - DNA, 20 bp, Artificial Sequence
  Description of Artificial Sequence: Synthetic oligonucleotide
  Target: LAMA2; (-) strand; PAM type: YTN; PAM sequence: TTT
tattaaaattaaaaatcatc

SEQ ID NO: 244435 - DNA, 20 bp, Artificial Sequence
  Description of Artificial Sequence: Synthetic oligonucleotide
  Target: LAMA2; (-) strand; PAM type: YTN; PAM sequence: TTA
gattttattaaaattaaaaa

SEQ ID NO: 244436 - DNA, 20 bp, Artificial Sequence
  Description of Artificial Sequence: Synthetic oligonucleotide
  Target: LAMA2; (-) strand; PAM type: YTN; PAM sequence: TTT
agattttattaaaattaaaa

SEQ ID NO: 244437 - DNA, 20 bp, Artificial Sequence
  Description of Artificial Sequence: Synthetic oligonucleotide
  Target: LAMA2; (-) strand; PAM type: YTN; PAM sequence: TTT
tagattttattaaaattaaa

SEQ ID NO: 244438 - DNA, 20 bp, Artificial Sequence
  Description of Artificial Sequence: Synthetic oligonucleotide
  Target: LAMA2; (-) strand; PAM type: YTN; PAM sequence: TTC
attttagattttattaaaat

SEQ ID NO: 244439 - DNA, 20 bp, Artificial Sequence
  Description of Artificial Sequence: Synthetic oligonucleotide
  Target: LAMA2; (-) strand; PAM type: YTN; PAM sequence: CTA
aagtcaagatccatgaaata

SEQ ID NO: 244440 - DNA, 20 bp, Artificial Sequence
  Description of Artificial Sequence: Synthetic oligonucleotide
  Target: LAMA2; (-) strand; PAM type: YTN; PAM sequence: TTA
tatataacactaaagtcaag

SEQ ID NO: 244441 - DNA, 20 bp, Artificial Sequence
  Description of Artificial Sequence: Synthetic oligonucleotide
  Target: LAMA2; (-) strand; PAM type: YTN; PAM sequence: TTT
atatataacactaaagtcaa

SEQ ID NO: 244442 - DNA, 20 bp, Artificial Sequence
  Description of Artificial Sequence: Synthetic oligonucleotide
  Target: LAMA2; (-) strand; PAM type: YTN; PAM sequence: CTT
tatatataacactaaagtca

SEQ ID NO: 244443 - DNA, 20 bp, Artificial Sequence
  Description of Artificial Sequence: Synthetic oligonucleotide
  Target: LAMA2; (-) strand; PAM type: YTN; PAM sequence: CTC
tttatatataacactaaagt

SEQ ID NO: 244444 - DNA, 20 bp, Artificial Sequence
  Description of Artificial Sequence: Synthetic oligonucleotide
  Target: LAMA2; (-) strand; PAM type: YTN; PAM sequence: TTG
cagtaactctttatatataa

SEQ ID NO: 244445 - DNA, 20 bp, Artificial Sequence
  Description of Artificial Sequence: Synthetic oligonucleotide
  Target: LAMA2; (-) strand; PAM type: YTN; PAM sequence: TTT
gcagtaactctttatatata

SEQ ID NO: 244446 - DNA, 20 bp, Artificial Sequence
  Description of Artificial Sequence: Synthetic oligonucleotide
  Target: LAMA2; (-) strand; PAM type: YTN; PAM sequence: CTG
agtttgcagtaactctttat

SEQ ID NO: 244447 - DNA, 20 bp, Artificial Sequence
  Description of Artificial Sequence: Synthetic oligonucleotide
  Target: LAMA2; (-) strand; PAM type: YTN; PAM sequence: CTA
aataaccctgagtttgcagt

SEQ ID NO: 244448 - DNA, 20 bp, Artificial Sequence
  Description of Artificial Sequence: Synthetic oligonucleotide
  Target: LAMA2; (-) strand; PAM type: YTN; PAM sequence: TTG
gaagataacatagaagaaaa

SEQ ID NO: 244449 - DNA, 20 bp, Artificial Sequence
  Description of Artificial Sequence: Synthetic oligonucleotide
  Target: LAMA2; (-) strand; PAM type: YTN; PAM sequence: CTT
ggaagataacatagaagaaa

SEQ ID NO: 244450 - DNA, 20 bp, Artificial Sequence
  Description of Artificial Sequence: Synthetic oligonucleotide
  Target: LAMA2; (-) strand; PAM type: YTN; PAM sequence: CTC
ttggaagataacatagaaga

SEQ ID NO: 244451 - DNA, 20 bp, Artificial Sequence
  Description of Artificial Sequence: Synthetic oligonucleotide
  Target: LAMA2; (-) strand; PAM type: YTN; PAM sequence: CTA
tgactcttggaagataacat

SEQ ID NO: 244452 - DNA, 20 bp, Artificial Sequence
  Description of Artificial Sequence: Synthetic oligonucleotide
  Target: LAMA2; (-) strand; PAM type: YTN; PAM sequence: CTC
aaaatggatcatataaaatg

SEQ ID NO: 244453 - DNA, 20 bp, Artificial Sequence
  Description of Artificial Sequence: Synthetic oligonucleotide
  Target: LAMA2; (-) strand; PAM type: YTN; PAM sequence: TTA
acacaaaatggatcatagac

SEQ ID NO: 244454 - DNA, 20 bp, Artificial Sequence
  Description of Artificial Sequence: Synthetic oligonucleotide
  Target: LAMA2; (-) strand; PAM type: YTN; PAM sequence: CTC
acaaaaattaacacaaaatg

SEQ ID NO: 244455 - DNA, 20 bp, Artificial Sequence
  Description of Artificial Sequence: Synthetic oligonucleotide
  Target: LAMA2; (-) strand; PAM type: YTN; PAM sequence: TTG
tgaaaaaatacataaatgca

SEQ ID NO: 244456 - DNA, 20 bp, Artificial Sequence
  Description of Artificial Sequence: Synthetic oligonucleotide
  Target: LAMA2; (-) strand; PAM type: YTN; PAM sequence: CTT
gtgaaaaaatacataaatgc

SEQ ID NO: 244457 - DNA, 20 bp, Artificial Sequence
  Description of Artificial Sequence: Synthetic oligonucleotide
  Target: LAMA2; (-) strand; PAM type: YTN; PAM sequence: CTG
agataacttgtgaaaaaata

SEQ ID NO: 244458 - DNA, 20 bp, Artificial Sequence
  Description of Artificial Sequence: Synthetic oligonucleotide
  Target: LAMA2; (-) strand; PAM type: YTN; PAM sequence: TTG
actgagataacttgtgaaaa

SEQ ID NO: 244459 - DNA, 20 bp, Artificial Sequence
  Description of Artificial Sequence: Synthetic oligonucleotide
  Target: LAMA2; (-) strand; PAM type: YTN; PAM sequence: TTA
tagcaacagaaaattgactg

SEQ ID NO: 244460 - DNA, 20 bp, Artificial Sequence
  Description of Artificial Sequence: Synthetic oligonucleotide
  Target: LAMA2; (-) strand; PAM type: YTN; PAM sequence: CTG
ttatagcaacagaaaattga

SEQ ID NO: 244461 - DNA, 20 bp, Artificial Sequence
  Description of Artificial Sequence: Synthetic oligonucleotide
  Target: LAMA2; (-) strand; PAM type: YTN; PAM sequence: TTC
tgttatagcaacagaaaatt

SEQ ID NO: 244462 - DNA, 20 bp, Artificial Sequence
  Description of Artificial Sequence: Synthetic oligonucleotide
  Target: LAMA2; (-) strand; PAM type: YTN; PAM sequence: CTC
aggtattctgttatagcaac

SEQ ID NO: 244463 - DNA, 20 bp, Artificial Sequence
  Description of Artificial Sequence: Synthetic oligonucleotide
  Target: LAMA2; (-) strand; PAM type: YTN; PAM sequence: CTA
gtctcaggtattctgttata

SEQ ID NO: 244464 - DNA, 20 bp, Artificial Sequence
  Description of Artificial Sequence: Synthetic oligonucleotide
  Target: LAMA2; (-) strand; PAM type: YTN; PAM sequence: TTA
cctagtctcaggtattctgt

SEQ ID NO: 244465 - DNA, 20 bp, Artificial Sequence
  Description of Artificial Sequence: Synthetic oligonucleotide
  Target: LAMA2; (-) strand; PAM type: YTN; PAM sequence: TTA
taaattacctagtctcaggt

SEQ ID NO: 244466 - DNA, 20 bp, Artificial Sequence
  Description of Artificial Sequence: Synthetic oligonucleotide
  Target: LAMA2; (-) strand; PAM type: YTN; PAM sequence: TTT
ataaattacctagtctcagg

SEQ ID NO: 244467 - DNA, 20 bp, Artificial Sequence
  Description of Artificial Sequence: Synthetic oligonucleotide
  Target: LAMA2; (-) strand; PAM type: YTN; PAM sequence: CTT
tataaattacctagtctcag

SEQ ID NO: 244468 - DNA, 20 bp, Artificial Sequence
  Description of Artificial Sequence: Synthetic oligonucleotide
  Target: LAMA2; (-) strand; PAM type: YTN; PAM sequence: CTC
ctttataaattacctagtct

SEQ ID NO: 244469 - DNA, 20 bp, Artificial Sequence
  Description of Artificial Sequence: Synthetic oligonucleotide
  Target: LAMA2; (-) strand; PAM type: YTN; PAM sequence: CTC
tcctttataaattacctagt

SEQ ID NO: 244470 - DNA, 20 bp, Artificial Sequence
  Description of Artificial Sequence: Synthetic oligonucleotide
  Target: LAMA2; (-) strand; PAM type: YTN; PAM sequence: CTC
tctcctttataaattaccta

SEQ ID NO: 244471 - DNA, 20 bp, Artificial Sequence
  Description of Artificial Sequence: Synthetic oligonucleotide
  Target: LAMA2; (-) strand; PAM type: YTN; PAM sequence: CTA
aatagaactctctcctttat

SEQ ID NO: 244472 - DNA, 20 bp, Artificial Sequence
  Description of Artificial Sequence: Synthetic oligonucleotide
  Target: LAMA2; (-) strand; PAM type: YTN; PAM sequence: CTC
ccaggatcacaagctaaata

SEQ ID NO: 244473 - DNA, 20 bp, Artificial Sequence
  Description of Artificial Sequence: Synthetic oligonucleotide
  Target: LAMA2; (-) strand; PAM type: YTN; PAM sequence: CTA
gtcaagctcccaggatcaca

SEQ ID NO: 244474 - DNA, 20 bp, Artificial Sequence
  Description of Artificial Sequence: Synthetic oligonucleotide
  Target: LAMA2; (-) strand; PAM type: YTN; PAM sequence: CTC
ctagtcaagctcccaggatc

SEQ ID NO: 244475 - DNA, 20 bp, Artificial Sequence
  Description of Artificial Sequence: Synthetic oligonucleotide
  Target: LAMA2; (-) strand; PAM type: YTN; PAM sequence: TTG
gatctcctagtcaagctccc

SEQ ID NO: 244476 - DNA, 20 bp, Artificial Sequence
  Description of Artificial Sequence: Synthetic oligonucleotide
  Target: LAMA2; (-) strand; PAM type: YTN; PAM sequence: CTT
ggatctcctagtcaagctcc

SEQ ID NO: 244477 - DNA, 20 bp, Artificial Sequence
  Description of Artificial Sequence: Synthetic oligonucleotide
  Target: LAMA2; (-) strand; PAM type: YTN; PAM sequence: CTA
acttggatctcctagtcaag

SEQ ID NO: 244478 - DNA, 20 bp, Artificial Sequence
  Description of Artificial Sequence: Synthetic oligonucleotide
  Target: LAMA2; (-) strand; PAM type: YTN; PAM sequence: CTG
tcctaacttggatctcctag

SEQ ID NO: 244479 - DNA, 20 bp, Artificial Sequence
  Description of Artificial Sequence: Synthetic oligonucleotide
  Target: LAMA2; (-) strand; PAM type: YTN; PAM sequence: TTG
accaaatgcacctgtcctaa

SEQ ID NO: 244480 - DNA, 20 bp, Artificial Sequence
  Description of Artificial Sequence: Synthetic oligonucleotide
  Target: LAMA2; (-) strand; PAM type: YTN; PAM sequence: CTT
gaccaaatgcacctgtccta

SEQ ID NO: 244481 - DNA, 20 bp, Artificial Sequence
  Description of Artificial Sequence: Synthetic oligonucleotide
  Target: LAMA2; (-) strand; PAM type: YTN; PAM sequence: CTC
accagaacttgaccaaatgc

SEQ ID NO: 244482 - DNA, 20 bp, Artificial Sequence
  Description of Artificial Sequence: Synthetic oligonucleotide
  Target: LAMA2; (-) strand; PAM type: YTN; PAM sequence: CTC
tcaccagaacttgaccaaat

SEQ ID NO: 244483 - DNA, 20 bp, Artificial Sequence
  Description of Artificial Sequence: Synthetic oligonucleotide
  Target: LAMA2; (-) strand; PAM type: YTN; PAM sequence: TTA
agatgcagcacaagactctc

SEQ ID NO: 244484 - DNA, 20 bp, Artificial Sequence
  Description of Artificial Sequence: Synthetic oligonucleotide
  Target: LAMA2; (-) strand; PAM type: YTN; PAM sequence: CTC
caccatgttaagatgcagca

SEQ ID NO: 244485 - DNA, 20 bp, Artificial Sequence
  Description of Artificial Sequence: Synthetic oligonucleotide
  Target: LAMA2; (-) strand; PAM type: YTN; PAM sequence: TTC
tccaccatgttaagatgcag

SEQ ID NO: 244486 - DNA, 20 bp, Artificial Sequence
  Description of Artificial Sequence: Synthetic oligonucleotide
  Target: LAMA2; (-) strand; PAM type: YTN; PAM sequence: CTT
ctccaccatgttaagatgca

SEQ ID NO: 244487 - DNA, 20 bp, Artificial Sequence
  Description of Artificial Sequence: Synthetic oligonucleotide
  Target: LAMA2; (-) strand; PAM type: YTN; PAM sequence: TTC
cacttctccaccatgttaag

SEQ ID NO: 244488 - DNA, 20 bp, Artificial Sequence
  Description of Artificial Sequence: Synthetic oligonucleotide
  Target: LAMA2; (-) strand; PAM type: YTN; PAM sequence: CTT
ccacttctccaccatgttaa

SEQ ID NO: 244489 - DNA, 20 bp, Artificial Sequence
  Description of Artificial Sequence: Synthetic oligonucleotide
  Target: LAMA2; (-) strand; PAM type: YTN; PAM sequence: TTC
ttccacttctccaccatgtt

SEQ ID NO: 244490 - DNA, 20 bp, Artificial Sequence
  Description of Artificial Sequence: Synthetic oligonucleotide
  Target: LAMA2; (-) strand; PAM type: YTN; PAM sequence: TTT
cttccacttctccaccatgt

SEQ ID NO: 244491 - DNA, 20 bp, Artificial Sequence
  Description of Artificial Sequence: Synthetic oligonucleotide
  Target: LAMA2; (-) strand; PAM type: YTN; PAM sequence: TTT
tcttccacttctccaccatg

SEQ ID NO: 244492 - DNA, 20 bp, Artificial Sequence
  Description of Artificial Sequence: Synthetic oligonucleotide
  Target: LAMA2; (-) strand; PAM type: YTN; PAM sequence: TTT
ttcttccacttctccaccat

SEQ ID NO: 244493 - DNA, 20 bp, Artificial Sequence
  Description of Artificial Sequence: Synthetic oligonucleotide
  Target: LAMA2; (-) strand; PAM type: YTN; PAM sequence: CTT
tttcttccacttctccacca

SEQ ID NO: 244494 - DNA, 20 bp, Artificial Sequence
  Description of Artificial Sequence: Synthetic oligonucleotide
  Target: LAMA2; (-) strand; PAM type: YTN; PAM sequence: TTG
cacatgcccactttttcttc

SEQ ID NO: 244495 - DNA, 20 bp, Artificial Sequence
  Description of Artificial Sequence: Synthetic oligonucleotide
  Target: LAMA2; (-) strand; PAM type: YTN; PAM sequence: TTT
gcacatgcccactttttctt

SEQ ID NO: 244496 - DNA, 20 bp, Artificial Sequence
  Description of Artificial Sequence: Synthetic oligonucleotide
  Target: LAMA2; (-) strand; PAM type: YTN; PAM sequence: TTT
tgcacatgcccactttttct

SEQ ID NO: 244497 - DNA, 20 bp, Artificial Sequence
  Description of Artificial Sequence: Synthetic oligonucleotide
  Target: LAMA2; (-) strand; PAM type: YTN; PAM sequence: TTG
gtcattttgcacatgcccac

SEQ ID NO: 244498 - DNA, 20 bp, Artificial Sequence
  Description of Artificial Sequence: Synthetic oligonucleotide
  Target: LAMA2; (-) strand; PAM type: YTN; PAM sequence: TTT
ggtcattttgcacatgccca

SEQ ID NO: 244499 - DNA, 20 bp, Artificial Sequence
  Description of Artificial Sequence: Synthetic oligonucleotide
  Target: LAMA2; (-) strand; PAM type: YTN; PAM sequence: TTG
tgtttggtcattttgcacat

SEQ ID NO: 244500 - DNA, 20 bp, Artificial Sequence
  Description of Artificial Sequence: Synthetic oligonucleotide
  Target: LAMA2; (-) strand; PAM type: YTN; PAM sequence: CTT
gtgtttggtcattttgcaca

SEQ ID NO: 244501 - DNA, 20 bp, Artificial Sequence
  Description of Artificial Sequence: Synthetic oligonucleotide
  Target: LAMA2; (-) strand; PAM type: YTN; PAM sequence: CTC
ttgtgtttggtcattttgca

SEQ ID NO: 244502 - DNA, 20 bp, Artificial Sequence
  Description of Artificial Sequence: Synthetic oligonucleotide
  Target: LAMA2; (-) strand; PAM type: YTN; PAM sequence: CTC
cctcttgtgtttggtcattt

SEQ ID NO: 244503 - DNA, 20 bp, Artificial Sequence
  Description of Artificial Sequence: Synthetic oligonucleotide
  Target: LAMA2; (-) strand; PAM type: YTN; PAM sequence: TTA
aaaaggaaggctccctcttg

SEQ ID NO: 244504 - DNA, 20 bp, Artificial Sequence
  Description of Artificial Sequence: Synthetic oligonucleotide
  Target: LAMA2; (-) strand; PAM type: YTN; PAM sequence: TTG
ttaaaaaggaaggctccctc

SEQ ID NO: 244505 - DNA, 20 bp, Artificial Sequence
  Description of Artificial Sequence: Synthetic oligonucleotide
  Target: LAMA2; (-) strand; PAM type: YTN; PAM sequence: CTC
gagggtgggttgttaaaaag

SEQ ID NO: 244506 - DNA, 20 bp, Artificial Sequence
  Description of Artificial Sequence: Synthetic oligonucleotide
  Target: LAMA2; (-) strand; PAM type: YTN; PAM sequence: CTA
cctcgagggtgggttgttaa

SEQ ID NO: 244507 - DNA, 20 bp, Artificial Sequence
  Description of Artificial Sequence: Synthetic oligonucleotide
  Target: LAMA2; (-) strand; PAM type: YTN; PAM sequence: TTA
gctacctcgagggtgggttg

SEQ ID NO: 244508 - DNA, 20 bp, Artificial Sequence
  Description of Artificial Sequence: Synthetic oligonucleotide
  Target: LAMA2; (-) strand; PAM type: YTN; PAM sequence: CTG
gattagctacctcgagggtg

SEQ ID NO: 244509 - DNA, 20 bp, Artificial Sequence
  Description of Artificial Sequence: Synthetic oligonucleotide
  Target: LAMA2; (-) strand; PAM type: YTN; PAM sequence: TTG
taggactggattagctacct

SEQ ID NO: 244510 - DNA, 20 bp, Artificial Sequence
  Description of Artificial Sequence: Synthetic oligonucleotide
  Target: LAMA2; (-) strand; PAM type: YTN; PAM sequence: CTT
gtaggactggattagctacc

SEQ ID NO: 244511 - DNA, 20 bp, Artificial Sequence
  Description of Artificial Sequence: Synthetic oligonucleotide
  Target: LAMA2; (-) strand; PAM type: YTN; PAM sequence: CTC
ttgtaggactggattagcta

SEQ ID NO: 244512 - DNA, 20 bp, Artificial Sequence
  Description of Artificial Sequence: Synthetic oligonucleotide
  Target: LAMA2; (-) strand; PAM type: YTN; PAM sequence: TTG
ctcttgtaggactggattag

SEQ ID NO: 244513 - DNA, 20 bp, Artificial Sequence
  Description of Artificial Sequence: Synthetic oligonucleotide
  Target: LAMA2; (-) strand; PAM type: YTN; PAM sequence: CTT
gctcttgtaggactggatta

SEQ ID NO: 244514 - DNA, 20 bp, Artificial Sequence
  Description of Artificial Sequence: Synthetic oligonucleotide
  Target: LAMA2; (-) strand; PAM type: YTN; PAM sequence: TTC
ttgctcttgtaggactggat

SEQ ID NO: 244515 - DNA, 20 bp, Artificial Sequence
  Description of Artificial Sequence: Synthetic oligonucleotide
  Target: LAMA2; (-) strand; PAM type: YTN; PAM sequence: TTA
gagtgagttcttgctcttgt

SEQ ID NO: 244516 - DNA, 20 bp, Artificial Sequence
  Description of Artificial Sequence: Synthetic oligonucleotide
  Target: LAMA2; (-) strand; PAM type: YTN; PAM sequence: CTT
agagtgagttcttgctcttg

SEQ ID NO: 244517 - DNA, 20 bp, Artificial Sequence
  Description of Artificial Sequence: Synthetic oligonucleotide
  Target: LAMA2; (-) strand; PAM type: YTN; PAM sequence: TTC
ttagagtgagttcttgctct

SEQ ID NO: 244518 - DNA, 20 bp, Artificial Sequence
  Description of Artificial Sequence: Synthetic oligonucleotide
  Target: LAMA2; (-) strand; PAM type: YTN; PAM sequence: TTT
cttagagtgagttcttgctc

SEQ ID NO: 244519 - DNA, 20 bp, Artificial Sequence
  Description of Artificial Sequence: Synthetic oligonucleotide
  Target: LAMA2; (-) strand; PAM type: YTN; PAM sequence: CTT
tcttagagtgagttcttgct

SEQ ID NO: 244520 - DNA, 20 bp, Artificial Sequence
  Description of Artificial Sequence: Synthetic oligonucleotide
  Target: LAMA2; (-) strand; PAM type: YTN; PAM sequence: TTA
atacctttcttagagtgagt

SEQ ID NO: 244521 - DNA, 20 bp, Artificial Sequence
  Description of Artificial Sequence: Synthetic oligonucleotide
  Target: LAMA2; (-) strand; PAM type: YTN; PAM sequence: TTA
aaaaggaattaatacctttc

SEQ ID NO: 244522 - DNA, 20 bp, Artificial Sequence
  Description of Artificial Sequence: Synthetic oligonucleotide
  Target: LAMA2; (-) strand; PAM type: YTN; PAM sequence: TTT
aaaaaggaattaataccttt

SEQ ID NO: 244523 - DNA, 20 bp, Artificial Sequence
  Description of Artificial Sequence: Synthetic oligonucleotide
  Target: LAMA2; (-) strand; PAM type: YTN; PAM sequence: TTT
taaaaaggaattaatacctt

SEQ ID NO: 244524 - DNA, 20 bp, Artificial Sequence
  Description of Artificial Sequence: Synthetic oligonucleotide
  Target: LAMA2; (-) strand; PAM type: YTN; PAM sequence: TTT
ttaaaaaggaattaatacct

SEQ ID NO: 244525 - DNA, 20 bp, Artificial Sequence
  Description of Artificial Sequence: Synthetic oligonucleotide
  Target: LAMA2; (-) strand; PAM type: YTN; PAM sequence: TTA
ggtttttaaaaaggaattaa

SEQ ID NO: 244526 - DNA, 20 bp, Artificial Sequence
  Description of Artificial Sequence: Synthetic oligonucleotide
  Target: LAMA2; (-) strand; PAM type: YTN; PAM sequence: TTG
gagaggtgattaggttttta

SEQ ID NO: 244527 - DNA, 20 bp, Artificial Sequence
  Description of Artificial Sequence: Synthetic oligonucleotide
  Target: LAMA2; (-) strand; PAM type: YTN; PAM sequence: CTT
ggagaggtgattaggttttt

SEQ ID NO: 244528 - DNA, 20 bp, Artificial Sequence
  Description of Artificial Sequence: Synthetic oligonucleotide
  Target: LAMA2; (-) strand; PAM type: YTN; PAM sequence: TTG
agaggtggtgccttggagag

SEQ ID NO: 244529 - DNA, 20 bp, Artificial Sequence
  Description of Artificial Sequence: Synthetic oligonucleotide
  Target: LAMA2; (-) strand; PAM type: YTN; PAM sequence: CTA
atggggtgatgttgagaggt

SEQ ID NO: 244530 - DNA, 20 bp, Artificial Sequence
  Description of Artificial Sequence: Synthetic oligonucleotide
  Target: LAMA2; (-) strand; PAM type: YTN; PAM sequence: TTC
ctaatggggtgatgttgaga

SEQ ID NO: 244531 - DNA, 20 bp, Artificial Sequence
  Description of Artificial Sequence: Synthetic oligonucleotide
  Target: LAMA2; (-) strand; PAM type: YTN; PAM sequence: TTG
gttcctaatggggtgatgtt

SEQ ID NO: 244532 - DNA, 20 bp, Artificial Sequence
  Description of Artificial Sequence: Synthetic oligonucleotide
  Target: LAMA2; (-) strand; PAM type: YTN; PAM sequence: TTT
ggttcctaatggggtgatgt

SEQ ID NO: 244533 - DNA, 20 bp, Artificial Sequence
  Description of Artificial Sequence: Synthetic oligonucleotide
  Target: LAMA2; (-) strand; PAM type: YTN; PAM sequence: TTG
tcacaatcaaaatccatagt

SEQ ID NO: 244534 - DNA, 20 bp, Artificial Sequence
  Description of Artificial Sequence: Synthetic oligonucleotide
  Target: LAMA2; (-) strand; PAM type: YTN; PAM sequence: TTT
gtcacaatcaaaatccatag

SEQ ID NO: 244535 - DNA, 20 bp, Artificial Sequence
  Description of Artificial Sequence: Synthetic oligonucleotide
  Target: LAMA2; (-) strand; PAM type: YTN; PAM sequence: TTA
gaatatggtttgtcacaatc

SEQ ID NO: 244536 - DNA, 20 bp, Artificial Sequence
  Description of Artificial Sequence: Synthetic oligonucleotide
  Target: LAMA2; (-) strand; PAM type: YTN; PAM sequence: TTA
tggttagaatatggtttgtc

SEQ ID NO: 244537 - DNA, 20 bp, Artificial Sequence
  Description of Artificial Sequence: Synthetic oligonucleotide
  Target: LAMA2; (-) strand; PAM type: YTN; PAM sequence: TTG
tgttatggttagaatatggt

SEQ ID NO: 244538 - DNA, 20 bp, Artificial Sequence
  Description of Artificial Sequence: Synthetic oligonucleotide
  Target: LAMA2; (-) strand; PAM type: YTN; PAM sequence: TTT
gtgttatggttagaatatgg

SEQ ID NO: 244539 - DNA, 20 bp, Artificial Sequence
  Description of Artificial Sequence: Synthetic oligonucleotide
  Target: LAMA2; (-) strand; PAM type: YTN; PAM sequence: CTG
gacatcatttgtgttatggt

SEQ ID NO: 244540 - DNA, 20 bp, Artificial Sequence
  Description of Artificial Sequence: Synthetic oligonucleotide
  Target: LAMA2; (-) strand; PAM type: YTN; PAM sequence: CTA
gaaaaactggacatcatttg

SEQ ID NO: 244541 - DNA, 20 bp, Artificial Sequence
  Description of Artificial Sequence: Synthetic oligonucleotide
  Target: LAMA2; (-) strand; PAM type: YTN; PAM sequence: TTC
aacaaatggcactagaaaaa

SEQ ID NO: 244542 - DNA, 20 bp, Artificial Sequence
  Description of Artificial Sequence: Synthetic oligonucleotide
  Target: LAMA2; (-) strand; PAM type: YTN; PAM sequence: TTT
caacaaatggcactagaaaa

SEQ ID NO: 244543 - DNA, 20 bp, Artificial Sequence
  Description of Artificial Sequence: Synthetic oligonucleotide
  Target: LAMA2; (-) strand; PAM type: YTN; PAM sequence: TTT
tcaacaaatggcactagaaa

SEQ ID NO: 244544 - DNA, 20 bp, Artificial Sequence
  Description of Artificial Sequence: Synthetic oligonucleotide
  Target: LAMA2; (-) strand; PAM type: YTN; PAM sequence: TTC
aatgaagaaaggaaagtgtt

SEQ ID NO: 244545 - DNA, 20 bp, Artificial Sequence
  Description of Artificial Sequence: Synthetic oligonucleotide
  Target: LAMA2; (-) strand; PAM type: YTN; PAM sequence: TTC
acaaaggagcaaagggaatt

SEQ ID NO: 244546 - DNA, 20 bp, Artificial Sequence
  Description of Artificial Sequence: Synthetic oligonucleotide
  Target: LAMA2; (-) strand; PAM type: YTN; PAM sequence: TTT
cacaaaggagcaaagggaat

SEQ ID NO: 244547 - DNA, 20 bp, Artificial Sequence
  Description of Artificial Sequence: Synthetic oligonucleotide
  Target: LAMA2; (-) strand; PAM type: YTN; PAM sequence: CTT
tcacaaaggagcaaagggaa

SEQ ID NO: 244548 - DNA, 20 bp, Artificial Sequence
  Description of Artificial Sequence: Synthetic oligonucleotide
  Target: LAMA2; (-) strand; PAM type: YTN; PAM sequence: CTG
atctttcacaaaggagcaaa

SEQ ID NO: 244549 - DNA, 20 bp, Artificial Sequence
  Description of Artificial Sequence: Synthetic oligonucleotide
  Target: LAMA2; (-) strand; PAM type: YTN; PAM sequence: TTA
gatcaatggaacagaatagc

SEQ ID NO: 244550 - DNA, 20 bp, Artificial Sequence
  Description of Artificial Sequence: Synthetic oligonucleotide
  Target: LAMA2; (-) strand; PAM type: YTN; PAM sequence: CTT
agatcaatggaacagaatag

SEQ ID NO: 244551 - DNA, 20 bp, Artificial Sequence
  Description of Artificial Sequence: Synthetic oligonucleotide
  Target: LAMA2; (-) strand; PAM type: YTN; PAM sequence: CTG
gtcagaaaaaagtcacttag

SEQ ID NO: 244552 - DNA, 20 bp, Artificial Sequence
  Description of Artificial Sequence: Synthetic oligonucleotide
  Target: LAMA2; (-) strand; PAM type: YTN; PAM sequence: TTA
tcaagacaatatagtactgg

SEQ ID NO: 244553 - DNA, 20 bp, Artificial Sequence
  Description of Artificial Sequence: Synthetic oligonucleotide
  Target: LAMA2; (-) strand; PAM type: YTN; PAM sequence: CTA
tagttatcaagacaatatag

SEQ ID NO: 244554 - DNA, 20 bp, Artificial Sequence
  Description of Artificial Sequence: Synthetic oligonucleotide
  Target: LAMA2; (-) strand; PAM type: YTN; PAM sequence: TTA
gtataaaactatagttatca

SEQ ID NO: 244555 - DNA, 20 bp, Artificial Sequence
  Description of Artificial Sequence: Synthetic oligonucleotide
  Target: LAMA2; (-) strand; PAM type: YTN; PAM sequence: CTT
agtataaaactatagttatc

SEQ ID NO: 244556 - DNA, 20 bp, Artificial Sequence
  Description of Artificial Sequence: Synthetic oligonucleotide
  Target: LAMA2; (-) strand; PAM type: YTN; PAM sequence: TTC
aagacttagtataaaactat

SEQ ID NO: 244557 - DNA, 20 bp, Artificial Sequence
  Description of Artificial Sequence: Synthetic oligonucleotide
  Target: LAMA2; (-) strand; PAM type: YTN; PAM sequence: CTT
caagacttagtataaaacta

SEQ ID NO: 244558 - DNA, 20 bp, Artificial Sequence
  Description of Artificial Sequence: Synthetic oligonucleotide
  Target: LAMA2; (-) strand; PAM type: YTN; PAM sequence: CTA
cccaacttcaagacttagta

SEQ ID NO: 244559 - DNA, 20 bp, Artificial Sequence
  Description of Artificial Sequence: Synthetic oligonucleotide
  Target: LAMA2; (-) strand; PAM type: YTN; PAM sequence: CTA
acactacccaacttcaagac

SEQ ID NO: 244560 - DNA, 20 bp, Artificial Sequence
  Description of Artificial Sequence: Synthetic oligonucleotide
  Target: LAMA2; (-) strand; PAM type: YTN; PAM sequence: TTG
taaagctaacactacccaac

SEQ ID NO: 244561 - DNA, 20 bp, Artificial Sequence
  Description of Artificial Sequence: Synthetic oligonucleotide
  Target: LAMA2; (-) strand; PAM type: YTN; PAM sequence: CTT
gtaaagctaacactacccaa

SEQ ID NO: 244562 - DNA, 20 bp, Artificial Sequence
  Description of Artificial Sequence: Synthetic oligonucleotide
  Target: LAMA2; (-) strand; PAM type: YTN; PAM sequence: TTG
aacaaacttgtaaagctaac

SEQ ID NO: 244563 - DNA, 20 bp, Artificial Sequence
  Description of Artificial Sequence: Synthetic oligonucleotide
  Target: LAMA2; (-) strand; PAM type: YTN; PAM sequence: TTA
aataatattgaacaaacttg

SEQ ID NO: 244564 - DNA, 20 bp, Artificial Sequence
  Description of Artificial Sequence: Synthetic oligonucleotide
  Target: LAMA2; (-) strand; PAM type: YTN; PAM sequence: TTA
tatggagaggaaagaccaag

SEQ ID NO: 244565 - DNA, 20 bp, Artificial Sequence
  Description of Artificial Sequence: Synthetic oligonucleotide
  Target: LAMA2; (-) strand; PAM type: YTN; PAM sequence: TTT
atatggagaggaaagaccaa

SEQ ID NO: 244566 - DNA, 20 bp, Artificial Sequence
  Description of Artificial Sequence: Synthetic oligonucleotide
  Target: LAMA2; (-) strand; PAM type: YTN; PAM sequence: CTA
aaatttatatggagaggaaa

SEQ ID NO: 244567 - DNA, 20 bp, Artificial Sequence
  Description of Artificial Sequence: Synthetic oligonucleotide
  Target: LAMA2; (-) strand; PAM type: YTN; PAM sequence: TTC
taaaatttatatggagagga

SEQ ID NO: 244568 - DNA, 20 bp, Artificial Sequence
  Description of Artificial Sequence: Synthetic oligonucleotide
  Target: LAMA2; (-) strand; PAM type: YTN; PAM sequence: CTG
attctaaaatttatatggag

SEQ ID NO: 244569 - DNA, 20 bp, Artificial Sequence
  Description of Artificial Sequence: Synthetic oligonucleotide
  Target: LAMA2; (-) strand; PAM type: YTN; PAM sequence: TTG
gatatcaacacactgattct

SEQ ID NO: 244570 - DNA, 20 bp, Artificial Sequence
  Description of Artificial Sequence: Synthetic oligonucleotide
  Target: LAMA2; (-) strand; PAM type: YTN; PAM sequence: TTT
ggatatcaacacactgattc

SEQ ID NO: 244571 - DNA, 20 bp, Artificial Sequence
  Description of Artificial Sequence: Synthetic oligonucleotide
  Target: LAMA2; (-) strand; PAM type: YTN; PAM sequence: TTT
tggatatcaacacactgatt

SEQ ID NO: 244572 - DNA, 20 bp, Artificial Sequence
  Description of Artificial Sequence: Synthetic oligonucleotide
  Target: LAMA2; (-) strand; PAM type: YTN; PAM sequence: TTT
ttggatatcaacacactgat

SEQ ID NO: 244573 - DNA, 20 bp, Artificial Sequence
  Description of Artificial Sequence: Synthetic oligonucleotide
  Target: LAMA2; (-) strand; PAM type: YTN; PAM sequence: TTT
tttggatatcaacacactga

SEQ ID NO: 244574 - DNA, 20 bp, Artificial Sequence
  Description of Artificial Sequence: Synthetic oligonucleotide
  Target: LAMA2; (-) strand; PAM type: YTN; PAM sequence: TTA
ttttttggatatcaacacac

SEQ ID NO: 244575 - DNA, 20 bp, Artificial Sequence
  Description of Artificial Sequence: Synthetic oligonucleotide
  Target: LAMA2; (-) strand; PAM type: YTN; PAM sequence: TTC
aaggtaatcccagtcaaaat

SEQ ID NO: 244576 - DNA, 20 bp, Artificial Sequence
  Description of Artificial Sequence: Synthetic oligonucleotide
  Target: LAMA2; (-) strand; PAM type: YTN; PAM sequence: TTG
tgtagattcaaggtaatccc

SEQ ID NO: 244577 - DNA, 20 bp, Artificial Sequence
  Description of Artificial Sequence: Synthetic oligonucleotide
  Target: LAMA2; (-) strand; PAM type: YTN; PAM sequence: TTT
gtgtagattcaaggtaatcc

SEQ ID NO: 244578 - DNA, 20 bp, Artificial Sequence
  Description of Artificial Sequence: Synthetic oligonucleotide
  Target: LAMA2; (-) strand; PAM type: YTN; PAM sequence: TTC
ccaatttgtgtagattcaag

SEQ ID NO: 244579 - DNA, 20 bp, Artificial Sequence
  Description of Artificial Sequence: Synthetic oligonucleotide
  Target: LAMA2; (-) strand; PAM type: YTN; PAM sequence: CTT
cccaatttgtgtagattcaa

SEQ ID NO: 244580 - DNA, 20 bp, Artificial Sequence
  Description of Artificial Sequence: Synthetic oligonucleotide
  Target: LAMA2; (-) strand; PAM type: YTN; PAM sequence: TTC
ttcccaatttgtgtagattc

SEQ ID NO: 244581 - DNA, 20 bp, Artificial Sequence
  Description of Artificial Sequence: Synthetic oligonucleotide
  Target: LAMA2; (-) strand; PAM type: YTN; PAM sequence: CTC
aaggtaggatgtcagttctt

SEQ ID NO: 244582 - DNA, 20 bp, Artificial Sequence
  Description of Artificial Sequence: Synthetic oligonucleotide
  Target: LAMA2; (-) strand; PAM type: YTN; PAM sequence: TTC
catgtccataaataggaaga

SEQ ID NO: 244583 - DNA, 20 bp, Artificial Sequence
  Description of Artificial Sequence: Synthetic oligonucleotide
  Target: LAMA2; (-) strand; PAM type: YTN; PAM sequence: TTA
aataaatggagaggtattcc

SEQ ID NO: 244584 - DNA, 20 bp, Artificial Sequence
  Description of Artificial Sequence: Synthetic oligonucleotide
  Target: LAMA2; (-) strand; PAM type: YTN; PAM sequence: CTC
cagtgaaagaaatcaaagaa

SEQ ID NO: 244585 - DNA, 20 bp, Artificial Sequence
  Description of Artificial Sequence: Synthetic oligonucleotide
  Target: LAMA2; (-) strand; PAM type: YTN; PAM sequence: CTA
taaaactccagtgaaagaaa

SEQ ID NO: 244586 - DNA, 20 bp, Artificial Sequence
  Description of Artificial Sequence: Synthetic oligonucleotide
  Target: LAMA2; (-) strand; PAM type: YTN; PAM sequence: CTA
tatgaggaaaactataaaac

SEQ ID NO: 244587 - DNA, 20 bp, Artificial Sequence
  Description of Artificial Sequence: Synthetic oligonucleotide
  Target: LAMA2; (-) strand; PAM type: YTN; PAM sequence: TTA
tgtacaaaatctatatgagg

SEQ ID NO: 244588 - DNA, 20 bp, Artificial Sequence
  Description of Artificial Sequence: Synthetic oligonucleotide
  Target: LAMA2; (-) strand; PAM type: YTN; PAM sequence: CTA
acaaattatgtacaaaatct

SEQ ID NO: 244589 - DNA, 20 bp, Artificial Sequence
  Description of Artificial Sequence: Synthetic oligonucleotide
  Target: LAMA2; (-) strand; PAM type: YTN; PAM sequence: TTC
aatataaatctaacaaatta

SEQ ID NO: 244590 - DNA, 20 bp, Artificial Sequence
  Description of Artificial Sequence: Synthetic oligonucleotide
  Target: LAMA2; (-) strand; PAM type: YTN; PAM sequence: CTT
caatataaatctaacaaatt

SEQ ID NO: 244591 - DNA, 20 bp, Artificial Sequence
  Description of Artificial Sequence: Synthetic oligonucleotide
  Target: LAMA2; (-) strand; PAM type: YTN; PAM sequence: CTC
cacaaaacacttcaatataa

SEQ ID NO: 244592 - DNA, 20 bp, Artificial Sequence
  Description of Artificial Sequence: Synthetic oligonucleotide
  Target: LAMA2; (-) strand; PAM type: YTN; PAM sequence: CTA
gcatgctccacaaaacactt

SEQ ID NO: 244593 - DNA, 20 bp, Artificial Sequence
  Description of Artificial Sequence: Synthetic oligonucleotide
  Target: LAMA2; (-) strand; PAM type: YTN; PAM sequence: TTA
tactagcatgctccacaaaa

SEQ ID NO: 244594 - DNA, 20 bp, Artificial Sequence
  Description of Artificial Sequence: Synthetic oligonucleotide
  Target: LAMA2; (-) strand; PAM type: YTN; PAM sequence: TTT
atactagcatgctccacaaa

SEQ ID NO: 244595 - DNA, 20 bp, Artificial Sequence
  Description of Artificial Sequence: Synthetic oligonucleotide
  Target: LAMA2; (-) strand; PAM type: YTN; PAM sequence: TTA
aaaacacaagaccatttata

SEQ ID NO: 244596 - DNA, 20 bp, Artificial Sequence
  Description of Artificial Sequence: Synthetic oligonucleotide
  Target: LAMA2; (-) strand; PAM type: YTN; PAM sequence: TTG
gaatgtgaagttaaaaacac

SEQ ID NO: 244597 - DNA, 20 bp, Artificial Sequence
  Description of Artificial Sequence: Synthetic oligonucleotide
  Target: LAMA2; (-) strand; PAM type: YTN; PAM sequence: TTA
gcaaagaaaattggaatgtg

SEQ ID NO: 244598 - DNA, 20 bp, Artificial Sequence
  Description of Artificial Sequence: Synthetic oligonucleotide
  Target: LAMA2; (-) strand; PAM type: YTN; PAM sequence: CTA
tatattagcaaagaaaattg

SEQ ID NO: 244599 - DNA, 20 bp, Artificial Sequence
  Description of Artificial Sequence: Synthetic oligonucleotide
  Target: LAMA2; (-) strand; PAM type: YTN; PAM sequence: TTC
ctatatattagcaaagaaaa

SEQ ID NO: 244600 - DNA, 20 bp, Artificial Sequence
  Description of Artificial Sequence: Synthetic oligonucleotide
  Target: LAMA2; (-) strand; PAM type: YTN; PAM sequence: TTT
cctatatattagcaaagaaa

SEQ ID NO: 244601 - DNA, 20 bp, Artificial Sequence
  Description of Artificial Sequence: Synthetic oligonucleotide
  Target: LAMA2; (-) strand; PAM type: YTN; PAM sequence: CTT
tcctatatattagcaaagaa

SEQ ID NO: 244602 - DNA, 20 bp, Artificial Sequence
  Description of Artificial Sequence: Synthetic oligonucleotide
  Target: LAMA2; (-) strand; PAM type: YTN; PAM sequence: TTG
ctttcctatatattagcaaa

SEQ ID NO: 244603 - DNA, 20 bp, Artificial Sequence
  Description of Artificial Sequence: Synthetic oligonucleotide
  Target: LAMA2; (-) strand; PAM type: YTN; PAM sequence: CTG
aagaaaaaggtggtataaaa

SEQ ID NO: 244604 - DNA, 20 bp, Artificial Sequence
  Description of Artificial Sequence: Synthetic oligonucleotide
  Target: LAMA2; (-) strand; PAM type: YTN; PAM sequence: CTG
tctgaagaaaaaggtggtat

SEQ ID NO: 244605 - DNA, 20 bp, Artificial Sequence
  Description of Artificial Sequence: Synthetic oligonucleotide
  Target: LAMA2; (-) strand; PAM type: YTN; PAM sequence: TTC
catctgtctgaagaaaaagg

SEQ ID NO: 244606 - DNA, 20 bp, Artificial Sequence
  Description of Artificial Sequence: Synthetic oligonucleotide
  Target: LAMA2; (-) strand; PAM type: YTN; PAM sequence: TTG
attccatctgtctgaagaaa

SEQ ID NO: 244607 - DNA, 20 bp, Artificial Sequence
  Description of Artificial Sequence: Synthetic oligonucleotide
  Target: LAMA2; (-) strand; PAM type: YTN; PAM sequence: CTT
gattccatctgtctgaagaa

SEQ ID NO: 244608 - DNA, 20 bp, Artificial Sequence
  Description of Artificial Sequence: Synthetic oligonucleotide
  Target: LAMA2; (-) strand; PAM type: YTN; PAM sequence: CTA
agtcacttgattccatctgt

SEQ ID NO: 244609 - DNA, 20 bp, Artificial Sequence
  Description of Artificial Sequence: Synthetic oligonucleotide
  Target: LAMA2; (-) strand; PAM type: YTN; PAM sequence: TTC
taagtcacttgattccatct

SEQ ID NO: 244610 - DNA, 20 bp, Artificial Sequence
  Description of Artificial Sequence: Synthetic oligonucleotide
  Target: LAMA2; (-) strand; PAM type: YTN; PAM sequence: TTT
ctaagtcacttgattccatc

SEQ ID NO: 244611 - DNA, 20 bp, Artificial Sequence
  Description of Artificial Sequence: Synthetic oligonucleotide
  Target: LAMA2; (-) strand; PAM type: YTN; PAM sequence: CTC
aggcagagcaacaaagccaa

SEQ ID NO: 244612 - DNA, 20 bp, Artificial Sequence
  Description of Artificial Sequence: Synthetic oligonucleotide
  Target: LAMA2; (-) strand; PAM type: YTN; PAM sequence: TTC
aagatactcaggcagagcaa

SEQ ID NO: 244613 - DNA, 20 bp, Artificial Sequence
  Description of Artificial Sequence: Synthetic oligonucleotide
  Target: LAMA2; (-) strand; PAM type: YTN; PAM sequence: TTT
caagatactcaggcagagca

SEQ ID NO: 244614 - DNA, 20 bp, Artificial Sequence
  Description of Artificial Sequence: Synthetic oligonucleotide
  Target: LAMA2; (-) strand; PAM type: YTN; PAM sequence: TTT
tcaagatactcaggcagagc

SEQ ID NO: 244615 - DNA, 20 bp, Artificial Sequence
  Description of Artificial Sequence: Synthetic oligonucleotide
  Target: LAMA2; (-) strand; PAM type: YTN; PAM sequence: CTC
agaaggaagatgagaatttt

SEQ ID NO: 244616 - DNA, 20 bp, Artificial Sequence
  Description of Artificial Sequence: Synthetic oligonucleotide
  Target: LAMA2; (-) strand; PAM type: YTN; PAM sequence: TTC
tcagaaggaagatgagaatt

SEQ ID NO: 244617 - DNA, 20 bp, Artificial Sequence
  Description of Artificial Sequence: Synthetic oligonucleotide
  Target: LAMA2; (-) strand; PAM type: YTN; PAM sequence: TTA
tggttctcagaaggaagatg

SEQ ID NO: 244618 - DNA, 20 bp, Artificial Sequence
  Description of Artificial Sequence: Synthetic oligonucleotide
  Target: LAMA2; (-) strand; PAM type: YTN; PAM sequence: TTG
agatatgtaggttatggttc

SEQ ID NO: 244619 - DNA, 20 bp, Artificial Sequence
  Description of Artificial Sequence: Synthetic oligonucleotide
  Target: LAMA2; (-) strand; PAM type: YTN; PAM sequence: CTT
gagatatgtaggttatggtt

SEQ ID NO: 244620 - DNA, 20 bp, Artificial Sequence
  Description of Artificial Sequence: Synthetic oligonucleotide
  Target: LAMA2; (-) strand; PAM type: YTN; PAM sequence: CTA
taaccttgagatatgtaggt

SEQ ID NO: 244621 - DNA, 20 bp, Artificial Sequence
  Description of Artificial Sequence: Synthetic oligonucleotide
  Target: LAMA2; (-) strand; PAM type: YTN; PAM sequence: TTA
tctataaccttgagatatgt

SEQ ID NO: 244622 - DNA, 20 bp, Artificial Sequence
  Description of Artificial Sequence: Synthetic oligonucleotide
  Target: LAMA2; (-) strand; PAM type: YTN; PAM sequence: TTT
atctataaccttgagatatg

SEQ ID NO: 244623 - DNA, 20 bp, Artificial Sequence
  Description of Artificial Sequence: Synthetic oligonucleotide
  Target: LAMA2; (-) strand; PAM type: YTN; PAM sequence: TTT
tatctataaccttgagatat

SEQ ID NO: 244624 - DNA, 20 bp, Artificial Sequence
  Description of Artificial Sequence: Synthetic oligonucleotide
  Target: LAMA2; (-) strand; PAM type: YTN; PAM sequence: TTG
taggtagcattttatctata

SEQ ID NO: 244625 - DNA, 20 bp, Artificial Sequence
  Description of Artificial Sequence: Synthetic oligonucleotide
  Target: LAMA2; (-) strand; PAM type: YTN; PAM sequence: TTT
gtaggtagcattttatctat

SEQ ID NO: 244626 - DNA, 20 bp, Artificial Sequence
  Description of Artificial Sequence: Synthetic oligonucleotide
  Target: LAMA2; (-) strand; PAM type: YTN; PAM sequence: TTT
tgtaggtagcattttatcta

SEQ ID NO: 244627 - DNA, 20 bp, Artificial Sequence
  Description of Artificial Sequence: Synthetic oligonucleotide
  Target: LAMA2; (-) strand; PAM type: YTN; PAM sequence: TTA
caaggattttgtaggtagca

SEQ ID NO: 244628 - DNA, 20 bp, Artificial Sequence
  Description of Artificial Sequence: Synthetic oligonucleotide
  Target: LAMA2; (-) strand; PAM type: YTN; PAM sequence: CTG
taagcattacaaggattttg

SEQ ID NO: 244629 - DNA, 20 bp, Artificial Sequence
  Description of Artificial Sequence: Synthetic oligonucleotide
  Target: LAMA2; (-) strand; PAM type: YTN; PAM sequence: TTA
gactgtaagcattacaagga

SEQ ID NO: 244630 - DNA, 20 bp, Artificial Sequence
  Description of Artificial Sequence: Synthetic oligonucleotide
  Target: LAMA2; (-) strand; PAM type: YTN; PAM sequence: TTT
agactgtaagcattacaagg

SEQ ID NO: 244631 - DNA, 20 bp, Artificial Sequence
  Description of Artificial Sequence: Synthetic oligonucleotide
  Target: LAMA2; (-) strand; PAM type: YTN; PAM sequence: TTT
tagactgtaagcattacaag

SEQ ID NO: 244632 - DNA, 20 bp, Artificial Sequence
  Description of Artificial Sequence: Synthetic oligonucleotide
  Target: LAMA2; (-) strand; PAM type: YTN; PAM sequence: CTT
ttagactgtaagcattacaa

SEQ ID NO: 244633 - DNA, 20 bp, Artificial Sequence
  Description of Artificial Sequence: Synthetic oligonucleotide
  Target: LAMA2; (-) strand; PAM type: YTN; PAM sequence: TTA
gtcttttagactgtaagcat

SEQ ID NO: 244634 - DNA, 20 bp, Artificial Sequence
  Description of Artificial Sequence: Synthetic oligonucleotide
  Target: LAMA2; (-) strand; PAM type: YTN; PAM sequence: TTT
agtcttttagactgtaagca

SEQ ID NO: 244635 - DNA, 20 bp, Artificial Sequence
  Description of Artificial Sequence: Synthetic oligonucleotide
  Target: LAMA2; (-) strand; PAM type: YTN; PAM sequence: TTA
tttagtcttttagactgtaa

SEQ ID NO: 244636 - DNA, 20 bp, Artificial Sequence
  Description of Artificial Sequence: Synthetic oligonucleotide
  Target: LAMA2; (-) strand; PAM type: YTN; PAM sequence: CTT
atttagtcttttagactgta

SEQ ID NO: 244637 - DNA, 20 bp, Artificial Sequence
  Description of Artificial Sequence: Synthetic oligonucleotide
  Target: LAMA2; (-) strand; PAM type: YTN; PAM sequence: TTG
aggccttatttagtctttta

SEQ ID NO: 244638 - DNA, 20 bp, Artificial Sequence
  Description of Artificial Sequence: Synthetic oligonucleotide
  Target: LAMA2; (-) strand; PAM type: YTN; PAM sequence: CTT
gaggccttatttagtctttt

SEQ ID NO: 244639 - DNA, 20 bp, Artificial Sequence
  Description of Artificial Sequence: Synthetic oligonucleotide
  Target: LAMA2; (-) strand; PAM type: YTN; PAM sequence: CTC
ttgaggccttatttagtctt

SEQ ID NO: 244640 - DNA, 20 bp, Artificial Sequence
  Description of Artificial Sequence: Synthetic oligonucleotide
  Target: LAMA2; (-) strand; PAM type: YTN; PAM sequence: TTG
aataatctcttgaggcctta

SEQ ID NO: 244641 - DNA, 20 bp, Artificial Sequence
  Description of Artificial Sequence: Synthetic oligonucleotide
  Target: LAMA2; (-) strand; PAM type: YTN; PAM sequence: TTT
gaataatctcttgaggcctt

SEQ ID NO: 244642 - DNA, 20 bp, Artificial Sequence
  Description of Artificial Sequence: Synthetic oligonucleotide
  Target: LAMA2; (-) strand; PAM type: YTN; PAM sequence: TTT
tgaataatctcttgaggcct

SEQ ID NO: 244643 - DNA, 20 bp, Artificial Sequence
  Description of Artificial Sequence: Synthetic oligonucleotide
  Target: LAMA2; (-) strand; PAM type: YTN; PAM sequence: CTG
attttgaataatctcttgag

SEQ ID NO: 244644 - DNA, 20 bp, Artificial Sequence
  Description of Artificial Sequence: Synthetic oligonucleotide
  Target: LAMA2; (-) strand; PAM type: YTN; PAM sequence: CTC
tgattttgaataatctcttg

SEQ ID NO: 244645 - DNA, 20 bp, Artificial Sequence
  Description of Artificial Sequence: Synthetic oligonucleotide
  Target: LAMA2; (-) strand; PAM type: YTN; PAM sequence: CTG
ggaatcaacaactctgattt

SEQ ID NO: 244646 - DNA, 20 bp, Artificial Sequence
  Description of Artificial Sequence: Synthetic oligonucleotide
  Target: LAMA2; (-) strand; PAM type: YTN; PAM sequence: CTA
ctgggaatcaacaactctga

SEQ ID NO: 244647 - DNA, 20 bp, Artificial Sequence
  Description of Artificial Sequence: Synthetic oligonucleotide
  Target: LAMA2; (-) strand; PAM type: YTN; PAM sequence: CTC
tactgggaatcaacaactct

SEQ ID NO: 244648 - DNA, 20 bp, Artificial Sequence
  Description of Artificial Sequence: Synthetic oligonucleotide
  Target: LAMA2; (-) strand; PAM type: YTN; PAM sequence: TTA
tgactctactgggaatcaac

SEQ ID NO: 244649 - DNA, 20 bp, Artificial Sequence
  Description of Artificial Sequence: Synthetic oligonucleotide
  Target: LAMA2; (-) strand; PAM type: YTN; PAM sequence: TTT
atgactctactgggaatcaa

SEQ ID NO: 244650 - DNA, 20 bp, Artificial Sequence
  Description of Artificial Sequence: Synthetic oligonucleotide
  Target: LAMA2; (-) strand; PAM type: YTN; PAM sequence: CTT
tatgactctactgggaatca

SEQ ID NO: 244651 - DNA, 20 bp, Artificial Sequence
  Description of Artificial Sequence: Synthetic oligonucleotide
  Target: LAMA2; (-) strand; PAM type: YTN; PAM sequence: CTA
acataacatagccctttatg

SEQ ID NO: 244652 - DNA, 20 bp, Artificial Sequence
  Description of Artificial Sequence: Synthetic oligonucleotide
  Target: LAMA2; (-) strand; PAM type: YTN; PAM sequence: TTG
cagctaacataacatagccc

SEQ ID NO: 244653 - DNA, 20 bp, Artificial Sequence
  Description of Artificial Sequence: Synthetic oligonucleotide
  Target: LAMA2; (-) strand; PAM type: YTN; PAM sequence: TTA
gaattgcagctaacataaca

SEQ ID NO: 244654 - DNA, 20 bp, Artificial Sequence
  Description of Artificial Sequence: Synthetic oligonucleotide
  Target: LAMA2; (-) strand; PAM type: YTN; PAM sequence: TTG
atataggattagaattgcag

SEQ ID NO: 244655 - DNA, 20 bp, Artificial Sequence
  Description of Artificial Sequence: Synthetic oligonucleotide
  Target: LAMA2; (-) strand; PAM type: YTN; PAM sequence: TTT
gatataggattagaattgca

SEQ ID NO: 244656 - DNA, 20 bp, Artificial Sequence
  Description of Artificial Sequence: Synthetic oligonucleotide
  Target: LAMA2; (-) strand; PAM type: YTN; PAM sequence: CTT
tgatataggattagaattgc

SEQ ID NO: 244657 - DNA, 20 bp, Artificial Sequence
  Description of Artificial Sequence: Synthetic oligonucleotide
  Target: LAMA2; (-) strand; PAM type: YTN; PAM sequence: TTA
gatatgggggagtggaagtc

SEQ ID NO: 244658 - DNA, 20 bp, Artificial Sequence
  Description of Artificial Sequence: Synthetic oligonucleotide
  Target: LAMA2; (-) strand; PAM type: YTN; PAM sequence: CTT
agatatgggggagtggaagt

SEQ ID NO: 244659 - DNA, 20 bp, Artificial Sequence
  Description of Artificial Sequence: Synthetic oligonucleotide
  Target: LAMA2; (-) strand; PAM type: YTN; PAM sequence: CTC
cttagatatgggggagtgga

SEQ ID NO: 244660 - DNA, 20 bp, Artificial Sequence
  Description of Artificial Sequence: Synthetic oligonucleotide
  Target: LAMA2; (-) strand; PAM type: YTN; PAM sequence: TTG
agggaaacctccttagatat

SEQ ID NO: 244661 - DNA, 20 bp, Artificial Sequence
  Description of Artificial Sequence: Synthetic oligonucleotide
  Target: LAMA2; (-) strand; PAM type: YTN; PAM sequence: CTG
ttgagggaaacctccttaga

SEQ ID NO: 244662 - DNA, 20 bp, Artificial Sequence
  Description of Artificial Sequence: Synthetic oligonucleotide
  Target: LAMA2; (-) strand; PAM type: YTN; PAM sequence: TTC
aactgttgagggaaacctcc

SEQ ID NO: 244663 - DNA, 20 bp, Artificial Sequence
  Description of Artificial Sequence: Synthetic oligonucleotide
  Target: LAMA2; (-) strand; PAM type: YTN; PAM sequence: TTT
caactgttgagggaaacctc

SEQ ID NO: 244664 - DNA, 20 bp, Artificial Sequence
  Description of Artificial Sequence: Synthetic oligonucleotide
  Target: LAMA2; (-) strand; PAM type: YTN; PAM sequence: TTT
tcaactgttgagggaaacct

SEQ ID NO: 244665 - DNA, 20 bp, Artificial Sequence
  Description of Artificial Sequence: Synthetic oligonucleotide
  Target: LAMA2; (-) strand; PAM type: YTN; PAM sequence: TTT
ttcaactgttgagggaaacc

SEQ ID NO: 244666 - DNA, 20 bp, Artificial Sequence
  Description of Artificial Sequence: Synthetic oligonucleotide
  Target: LAMA2; (-) strand; PAM type: YTN; PAM sequence: TTA
tttttcaactgttgagggaa

SEQ ID NO: 244667 - DNA, 20 bp, Artificial Sequence
  Description of Artificial Sequence: Synthetic oligonucleotide
  Target: LAMA2; (-) strand; PAM type: YTN; PAM sequence: CTG
cagttatttttcaactgttg

SEQ ID NO: 244668 - DNA, 20 bp, Artificial Sequence
  Description of Artificial Sequence: Synthetic oligonucleotide
  Target: LAMA2; (-) strand; PAM type: YTN; PAM sequence: TTG
tggcatgggatggcaaagca

SEQ ID NO: 244669 - DNA, 20 bp, Artificial Sequence
  Description of Artificial Sequence: Synthetic oligonucleotide
  Target: LAMA2; (-) strand; PAM type: YTN; PAM sequence: TTT
gtggcatgggatggcaaagc

SEQ ID NO: 244670 - DNA, 20 bp, Artificial Sequence
  Description of Artificial Sequence: Synthetic oligonucleotide
  Target: LAMA2; (-) strand; PAM type: YTN; PAM sequence: TTT
tgtggcatgggatggcaaag

SEQ ID NO: 244671 - DNA, 20 bp, Artificial Sequence
  Description of Artificial Sequence: Synthetic oligonucleotide
  Target: LAMA2; (-) strand; PAM type: YTN; PAM sequence: TTT
ttgtggcatgggatggcaaa

SEQ ID NO: 244672 - DNA, 20 bp, Artificial Sequence
  Description of Artificial Sequence: Synthetic oligonucleotide
  Target: LAMA2; (-) strand; PAM type: YTN; PAM sequence: TTC
agaaatgcatttttgtggca

SEQ ID NO: 244673 - DNA, 20 bp, Artificial Sequence
  Description of Artificial Sequence: Synthetic oligonucleotide
  Target: LAMA2; (-) strand; PAM type: YTN; PAM sequence: CTT
cagaaatgcatttttgtggc

SEQ ID NO: 244674 - DNA, 20 bp, Artificial Sequence
  Description of Artificial Sequence: Synthetic oligonucleotide
  Target: LAMA2; (-) strand; PAM type: YTN; PAM sequence: CTG
cagcatccttcagaaatgca

SEQ ID NO: 244675 - DNA, 20 bp, Artificial Sequence
  Description of Artificial Sequence: Synthetic oligonucleotide
  Target: LAMA2; (-) strand; PAM type: YTN; PAM sequence: CTC
tgcagcatccttcagaaatg

SEQ ID NO: 244676 - DNA, 20 bp, Artificial Sequence
  Description of Artificial Sequence: Synthetic oligonucleotide
  Target: LAMA2; (-) strand; PAM type: YTN; PAM sequence: CTC
tctgcagcatccttcagaaa

SEQ ID NO: 244677 - DNA, 20 bp, Artificial Sequence
  Description of Artificial Sequence: Synthetic oligonucleotide
  Target: LAMA2; (-) strand; PAM type: YTN; PAM sequence: TTA
agaaatatatatctctctgc

SEQ ID NO: 244678 - DNA, 20 bp, Artificial Sequence
  Description of Artificial Sequence: Synthetic oligonucleotide
  Target: LAMA2; (-) strand; PAM type: YTN; PAM sequence: CTT
aagaaatatatatctctctg

SEQ ID NO: 244679 - DNA, 20 bp, Artificial Sequence
  Description of Artificial Sequence: Synthetic oligonucleotide
  Target: LAMA2; (-) strand; PAM type: YTN; PAM sequence: CTG
ggcttaagaaatatatatct

SEQ ID NO: 244680 - DNA, 20 bp, Artificial Sequence
  Description of Artificial Sequence: Synthetic oligonucleotide
  Target: LAMA2; (-) strand; PAM type: YTN; PAM sequence: TTG
agaaatagatatgagctggg

SEQ ID NO: 244681 - DNA, 20 bp, Artificial Sequence
  Description of Artificial Sequence: Synthetic oligonucleotide
  Target: LAMA2; (-) strand; PAM type: YTN; PAM sequence: CTT
gagaaatagatatgagctgg

SEQ ID NO: 244682 - DNA, 20 bp, Artificial Sequence
  Description of Artificial Sequence: Synthetic oligonucleotide
  Target: LAMA2; (-) strand; PAM type: YTN; PAM sequence: CTA
tgatatcacacagccttgag

SEQ ID NO: 244683 - DNA, 20 bp, Artificial Sequence
  Description of Artificial Sequence: Synthetic oligonucleotide
  Target: LAMA2; (-) strand; PAM type: YTN; PAM sequence: TTC
tatgatatcacacagccttg

SEQ ID NO: 244684 - DNA, 20 bp, Artificial Sequence
  Description of Artificial Sequence: Synthetic oligonucleotide
  Target: LAMA2; (-) strand; PAM type: YTN; PAM sequence: TTC
attctatgatatcacacagc

SEQ ID NO: 244685 - DNA, 20 bp, Artificial Sequence
  Description of Artificial Sequence: Synthetic oligonucleotide
  Target: LAMA2; (-) strand; PAM type: YTN; PAM sequence: CTC
catcattcattctatgatat

SEQ ID NO: 244686 - DNA, 20 bp, Artificial Sequence
  Description of Artificial Sequence: Synthetic oligonucleotide
  Target: LAMA2; (-) strand; PAM type: YTN; PAM sequence: TTG
actccatcattcattctatg

SEQ ID NO: 244687 - DNA, 20 bp, Artificial Sequence
  Description of Artificial Sequence: Synthetic oligonucleotide
  Target: LAMA2; (-) strand; PAM type: YTN; PAM sequence: TTT
gactccatcattcattctat

SEQ ID NO: 244688 - DNA, 20 bp, Artificial Sequence
  Description of Artificial Sequence: Synthetic oligonucleotide
  Target: LAMA2; (-) strand; PAM type: YTN; PAM sequence: TTA
tttgactccatcattcattc

SEQ ID NO: 244689 - DNA, 20 bp, Artificial Sequence
  Description of Artificial Sequence: Synthetic oligonucleotide
  Target: LAMA2; (-) strand; PAM type: YTN; PAM sequence: TTT
atttgactccatcattcatt

SEQ ID NO: 244690 - DNA, 20 bp, Artificial Sequence
  Description of Artificial Sequence: Synthetic oligonucleotide
  Target: LAMA2; (-) strand; PAM type: YTN; PAM sequence: TTA
tttatttgactccatcattc

SEQ ID NO: 244691 - DNA, 20 bp, Artificial Sequence
  Description of Artificial Sequence: Synthetic oligonucleotide
  Target: LAMA2; (-) strand; PAM type: YTN; PAM sequence: TTT
atttatttgactccatcatt

SEQ ID NO: 244692 - DNA, 20 bp, Artificial Sequence
  Description of Artificial Sequence: Synthetic oligonucleotide
  Target: LAMA2; (-) strand; PAM type: YTN; PAM sequence: CTG
ataaataaataaataaatat

SEQ ID NO: 244693 - DNA, 20 bp, Artificial Sequence
  Description of Artificial Sequence: Synthetic oligonucleotide
  Target: LAMA2; (-) strand; PAM type: YTN; PAM sequence: TTG
actgataaataaataaataa

SEQ ID NO: 244694 - DNA, 20 bp, Artificial Sequence
  Description of Artificial Sequence: Synthetic oligonucleotide
  Target: LAMA2; (-) strand; PAM type: YTN; PAM sequence: TTT
gactgataaataaataaata

SEQ ID NO: 244695 - DNA, 20 bp, Artificial Sequence
  Description of Artificial Sequence: Synthetic oligonucleotide
  Target: LAMA2; (-) strand; PAM type: YTN; PAM sequence: TTA
tttgactgataaataaataa

SEQ ID NO: 244696 - DNA, 20 bp, Artificial Sequence
  Description of Artificial Sequence: Synthetic oligonucleotide
  Target: LAMA2; (-) strand; PAM type: YTN; PAM sequence: TTT
atttgactgataaataaata

SEQ ID NO: 244697 - DNA, 20 bp, Artificial Sequence
  Description of Artificial Sequence: Synthetic oligonucleotide
  Target: LAMA2; (-) strand; PAM type: YTN; PAM sequence: TTA
aatcagatttatttgactga

SEQ ID NO: 244698 - DNA, 20 bp, Artificial Sequence
  Description of Artificial Sequence: Synthetic oligonucleotide
  Target: LAMA2; (-) strand; PAM type: YTN; PAM sequence: CTA
aaaaattaaatcagatttat

SEQ ID NO: 244699 - DNA, 20 bp, Artificial Sequence
  Description of Artificial Sequence: Synthetic oligonucleotide
  Target: LAMA2; (-) strand; PAM type: YTN; PAM sequence: TTC
taaaaaattaaatcagattt

SEQ ID NO: 244700 - DNA, 20 bp, Artificial Sequence
  Description of Artificial Sequence: Synthetic oligonucleotide
  Target: LAMA2; (-) strand; PAM type: YTN; PAM sequence: TTA
agttctaaaaaattaaatca

SEQ ID NO: 244701 - DNA, 20 bp, Artificial Sequence
  Description of Artificial Sequence: Synthetic oligonucleotide
  Target: LAMA2; (-) strand; PAM type: YTN; PAM sequence: CTA
aatgttaagttctaaaaaat

SEQ ID NO: 244702 - DNA, 20 bp, Artificial Sequence
  Description of Artificial Sequence: Synthetic oligonucleotide
  Target: LAMA2; (-) strand; PAM type: YTN; PAM sequence: CTA
ctaaatgttaagttctaaaa

SEQ ID NO: 244703 - DNA, 20 bp, Artificial Sequence
  Description of Artificial Sequence: Synthetic oligonucleotide
  Target: LAMA2; (-) strand; PAM type: YTN; PAM sequence: CTC
acagctactaaatgttaagt

SEQ ID NO: 244704 - DNA, 20 bp, Artificial Sequence
  Description of Artificial Sequence: Synthetic oligonucleotide
  Target: LAMA2; (-) strand; PAM type: YTN; PAM sequence: CTG
taagatctcacagctactaa

SEQ ID NO: 244705 - DNA, 20 bp, Artificial Sequence
  Description of Artificial Sequence: Synthetic oligonucleotide
  Target: LAMA2; (-) strand; PAM type: YTN; PAM sequence: CTC
tgtaagatctcacagctact

SEQ ID NO: 244706 - DNA, 20 bp, Artificial Sequence
  Description of Artificial Sequence: Synthetic oligonucleotide
  Target: LAMA2; (-) strand; PAM type: YTN; PAM sequence: TTA
tagataaagtgacaaaggat

SEQ ID NO: 244707 - DNA, 20 bp, Artificial Sequence
  Description of Artificial Sequence: Synthetic oligonucleotide
  Target: LAMA2; (-) strand; PAM type: YTN; PAM sequence: TTT
atagataaagtgacaaagga

SEQ ID NO: 244708 - DNA, 20 bp, Artificial Sequence
  Description of Artificial Sequence: Synthetic oligonucleotide
  Target: LAMA2; (-) strand; PAM type: YTN; PAM sequence: TTT
tatagataaagtgacaaagg

SEQ ID NO: 244709 - DNA, 20 bp, Artificial Sequence
  Description of Artificial Sequence: Synthetic oligonucleotide
  Target: LAMA2; (-) strand; PAM type: YTN; PAM sequence: CTC
cattttatagataaagtgac

SEQ ID NO: 244710 - DNA, 20 bp, Artificial Sequence
  Description of Artificial Sequence: Synthetic oligonucleotide
  Target: LAMA2; (-) strand; PAM type: YTN; PAM sequence: CTC
tccattttatagataaagtg

SEQ ID NO: 244711 - DNA, 20 bp, Artificial Sequence
  Description of Artificial Sequence: Synthetic oligonucleotide
  Target: LAMA2; (-) strand; PAM type: YTN; PAM sequence: TTA
cactctccattttatagata

SEQ ID NO: 244712 - DNA, 20 bp, Artificial Sequence
  Description of Artificial Sequence: Synthetic oligonucleotide
  Target: LAMA2; (-) strand; PAM type: YTN; PAM sequence: TTT
acactctccattttatagat

SEQ ID NO: 244713 - DNA, 20 bp, Artificial Sequence
  Description of Artificial Sequence: Synthetic oligonucleotide
  Target: LAMA2; (-) strand; PAM type: YTN; PAM sequence: CTA
agaagtagtatttacactct

SEQ ID NO: 244714 - DNA, 20 bp, Artificial Sequence
  Description of Artificial Sequence: Synthetic oligonucleotide
  Target: LAMA2; (-) strand; PAM type: YTN; PAM sequence: CTC
taagaagtagtatttacact

SEQ ID NO: 244715 - DNA, 20 bp, Artificial Sequence
  Description of Artificial Sequence: Synthetic oligonucleotide
  Target: LAMA2; (-) strand; PAM type: YTN; PAM sequence: TTA
aagaatcatgataactctaa

SEQ ID NO: 244716 - DNA, 20 bp, Artificial Sequence
  Description of Artificial Sequence: Synthetic oligonucleotide
  Target: LAMA2; (-) strand; PAM type: YTN; PAM sequence: TTA
gattaaagaatcatgataac

SEQ ID NO: 244717 - DNA, 20 bp, Artificial Sequence
  Description of Artificial Sequence: Synthetic oligonucleotide
  Target: LAMA2; (-) strand; PAM type: YTN; PAM sequence: TTA
ttagattaaagaatcatgat

SEQ ID NO: 244718 - DNA, 20 bp, Artificial Sequence
  Description of Artificial Sequence: Synthetic oligonucleotide
  Target: LAMA2; (-) strand; PAM type: YTN; PAM sequence: CTC
atgagttattagattaaaga

SEQ ID NO: 244719 - DNA, 20 bp, Artificial Sequence
  Description of Artificial Sequence: Synthetic oligonucleotide
  Target: LAMA2; (-) strand; PAM type: YTN; PAM sequence: TTA
catatccagtgtctcatgag

SEQ ID NO: 244720 - DNA, 20 bp, Artificial Sequence
  Description of Artificial Sequence: Synthetic oligonucleotide
  Target: LAMA2; (-) strand; PAM type: YTN; PAM sequence: CTA
ttacatatccagtgtctcat

SEQ ID NO: 244721 - DNA, 20 bp, Artificial Sequence
  Description of Artificial Sequence: Synthetic oligonucleotide
  Target: LAMA2; (-) strand; PAM type: YTN; PAM sequence: TTC
ctattacatatccagtgtct

SEQ ID NO: 244722 - DNA, 20 bp, Artificial Sequence
  Description of Artificial Sequence: Synthetic oligonucleotide
  Target: LAMA2; (-) strand; PAM type: YTN; PAM sequence: TTC
agttcctattacatatccag

SEQ ID NO: 244723 - DNA, 20 bp, Artificial Sequence
  Description of Artificial Sequence: Synthetic oligonucleotide
  Target: LAMA2; (-) strand; PAM type: YTN; PAM sequence: TTA
ttcagttcctattacatatc

SEQ ID NO: 244724 - DNA, 20 bp, Artificial Sequence
  Description of Artificial Sequence: Synthetic oligonucleotide
  Target: LAMA2; (-) strand; PAM type: YTN; PAM sequence: TTA
agaattattcagttcctatt

SEQ ID NO: 244725 - DNA, 20 bp, Artificial Sequence
  Description of Artificial Sequence: Synthetic oligonucleotide
  Target: LAMA2; (-) strand; PAM type: YTN; PAM sequence: CTG
gaaatgtcaagggaaagcaa

SEQ ID NO: 244726 - DNA, 20 bp, Artificial Sequence
  Description of Artificial Sequence: Synthetic oligonucleotide
  Target: LAMA2; (-) strand; PAM type: YTN; PAM sequence: TTC
tggaaatgtcaagggaaagc

SEQ ID NO: 244727 - DNA, 20 bp, Artificial Sequence
  Description of Artificial Sequence: Synthetic oligonucleotide
  Target: LAMA2; (-) strand; PAM type: YTN; PAM sequence: TTT
ctggaaatgtcaagggaaag

SEQ ID NO: 244728 - DNA, 20 bp, Artificial Sequence
  Description of Artificial Sequence: Synthetic oligonucleotide
  Target: LAMA2; (-) strand; PAM type: YTN; PAM sequence: TTT
tctggaaatgtcaagggaaa

SEQ ID NO: 244729 - DNA, 20 bp, Artificial Sequence
  Description of Artificial Sequence: Synthetic oligonucleotide
  Target: LAMA2; (-) strand; PAM type: YTN; PAM sequence: TTA
ttttctggaaatgtcaaggg

SEQ ID NO: 244730 - DNA, 20 bp, Artificial Sequence
  Description of Artificial Sequence: Synthetic oligonucleotide
  Target: LAMA2; (-) strand; PAM type: YTN; PAM sequence: TTT
attttctggaaatgtcaagg

SEQ ID NO: 244731 - DNA, 20 bp, Artificial Sequence
  Description of Artificial Sequence: Synthetic oligonucleotide
  Target: LAMA2; (-) strand; PAM type: YTN; PAM sequence: TTT
tattttctggaaatgtcaag

SEQ ID NO: 244732 - DNA, 20 bp, Artificial Sequence
  Description of Artificial Sequence: Synthetic oligonucleotide
  Target: LAMA2; (-) strand; PAM type: YTN; PAM sequence: CTC
aatcaagttttattttctgg

SEQ ID NO: 244733 - DNA, 20 bp, Artificial Sequence
  Description of Artificial Sequence: Synthetic oligonucleotide
  Target: LAMA2; (-) strand; PAM type: YTN; PAM sequence: TTA
gatactcaatcaagttttat

SEQ ID NO: 244734 - DNA, 20 bp, Artificial Sequence
  Description of Artificial Sequence: Synthetic oligonucleotide
  Target: LAMA2; (-) strand; PAM type: YTN; PAM sequence: CTT
agatactcaatcaagtttta

SEQ ID NO: 244735 - DNA, 20 bp, Artificial Sequence
  Description of Artificial Sequence: Synthetic oligonucleotide
  Target: LAMA2; (-) strand; PAM type: YTN; PAM sequence: TTA
tataatcttagatactcaat

SEQ ID NO: 244736 - DNA, 20 bp, Artificial Sequence
  Description of Artificial Sequence: Synthetic oligonucleotide
  Target: LAMA2; (-) strand; PAM type: YTN; PAM sequence: CTG
ttatataatcttagatactc

SEQ ID NO: 244737 - DNA, 20 bp, Artificial Sequence
  Description of Artificial Sequence: Synthetic oligonucleotide
  Target: LAMA2; (-) strand; PAM type: YTN; PAM sequence: CTA
gtgggatctgttatataatc

SEQ ID NO: 244738 - DNA, 20 bp, Artificial Sequence
  Description of Artificial Sequence: Synthetic oligonucleotide
  Target: LAMA2; (-) strand; PAM type: YTN; PAM sequence: TTA
gtctagtgggatctgttata

SEQ ID NO: 244739 - DNA, 20 bp, Artificial Sequence
  Description of Artificial Sequence: Synthetic oligonucleotide
  Target: LAMA2; (-) strand; PAM type: YTN; PAM sequence: CTT
agtctagtgggatctgttat

SEQ ID NO: 244740 - DNA, 20 bp, Artificial Sequence
  Description of Artificial Sequence: Synthetic oligonucleotide
  Target: LAMA2; (-) strand; PAM type: YTN; PAM sequence: TTC
acttagtctagtgggatctg

SEQ ID NO: 244741 - DNA, 20 bp, Artificial Sequence
  Description of Artificial Sequence: Synthetic oligonucleotide
  Target: LAMA2; (-) strand; PAM type: YTN; PAM sequence: CTC
agattcacttagtctagtgg

SEQ ID NO: 244742 - DNA, 20 bp, Artificial Sequence
  Description of Artificial Sequence: Synthetic oligonucleotide
  Target: LAMA2; (-) strand; PAM type: YTN; PAM sequence: TTC
cctcagattcacttagtcta

SEQ ID NO: 244743 - DNA, 20 bp, Artificial Sequence
  Description of Artificial Sequence: Synthetic oligonucleotide
  Target: LAMA2; (-) strand; PAM type: YTN; PAM sequence: CTT
ccctcagattcacttagtct

SEQ ID NO: 244744 - DNA, 20 bp, Artificial Sequence
  Description of Artificial Sequence: Synthetic oligonucleotide
  Target: LAMA2; (-) strand; PAM type: YTN; PAM sequence: TTA
aaaaccaaagaagagaagaa

SEQ ID NO: 244745 - DNA, 20 bp, Artificial Sequence
  Description of Artificial Sequence: Synthetic oligonucleotide
  Target: LAMA2; (-) strand; PAM type: YTN; PAM sequence: TTT
aaaaaccaaagaagagaaga

SEQ ID NO: 244746 - DNA, 20 bp, Artificial Sequence
  Description of Artificial Sequence: Synthetic oligonucleotide
  Target: LAMA2; (-) strand; PAM type: YTN; PAM sequence: TTT
taaaaaccaaagaagagaag

SEQ ID NO: 244747 - DNA, 20 bp, Artificial Sequence
  Description of Artificial Sequence: Synthetic oligonucleotide
  Target: LAMA2; (-) strand; PAM type: YTN; PAM sequence: TTT
ttaaaaaccaaagaagagaa

SEQ ID NO: 244748 - DNA, 20 bp, Artificial Sequence
  Description of Artificial Sequence: Synthetic oligonucleotide
  Target: LAMA2; (-) strand; PAM type: YTN; PAM sequence: CTT
tttaaaaaccaaagaagaga

SEQ ID NO: 244749 - DNA, 20 bp, Artificial Sequence
  Description of Artificial Sequence: Synthetic oligonucleotide
  Target: LAMA2; (-) strand; PAM type: YTN; PAM sequence: CTA
atgatactttttaaaaacca

SEQ ID NO: 244750 - DNA, 20 bp, Artificial Sequence
  Description of Artificial Sequence: Synthetic oligonucleotide
  Target: LAMA2; (-) strand; PAM type: YTN; PAM sequence: TTC
taatgatactttttaaaaac

SEQ ID NO: 244751 - DNA, 20 bp, Artificial Sequence
  Description of Artificial Sequence: Synthetic oligonucleotide
  Target: LAMA2; (-) strand; PAM type: YTN; PAM sequence: TTT
ctaatgatactttttaaaaa

SEQ ID NO: 244752 - DNA, 20 bp, Artificial Sequence
  Description of Artificial Sequence: Synthetic oligonucleotide
  Target: LAMA2; (-) strand; PAM type: YTN; PAM sequence: CTA
tttctaatgatactttttaa

SEQ ID NO: 244753 - DNA, 20 bp, Artificial Sequence
  Description of Artificial Sequence: Synthetic oligonucleotide
  Target: LAMA2; (-) strand; PAM type: YTN; PAM sequence: TTC
tatttctaatgatacttttt

SEQ ID NO: 244754 - DNA, 20 bp, Artificial Sequence
  Description of Artificial Sequence: Synthetic oligonucleotide
  Target: LAMA2; (-) strand; PAM type: YTN; PAM sequence: CTG
attctatttctaatgatact

SEQ ID NO: 244755 - DNA, 20 bp, Artificial Sequence
  Description of Artificial Sequence: Synthetic oligonucleotide
  Target: LAMA2; (-) strand; PAM type: YTN; PAM sequence: TTA
ctgattctatttctaatgat

SEQ ID NO: 244756 - DNA, 20 bp, Artificial Sequence
  Description of Artificial Sequence: Synthetic oligonucleotide
  Target: LAMA2; (-) strand; PAM type: YTN; PAM sequence: TTA
tagttactgattctatttct

SEQ ID NO: 244757 - DNA, 20 bp, Artificial Sequence
  Description of Artificial Sequence: Synthetic oligonucleotide
  Target: LAMA2; (-) strand; PAM type: YTN; PAM sequence: TTT
atagttactgattctatttc

SEQ ID NO: 244758 - DNA, 20 bp, Artificial Sequence
  Description of Artificial Sequence: Synthetic oligonucleotide
  Target: LAMA2; (-) strand; PAM type: YTN; PAM sequence: TTG
tttatagttactgattctat

SEQ ID NO: 244759 - DNA, 20 bp, Artificial Sequence
  Description of Artificial Sequence: Synthetic oligonucleotide
  Target: LAMA2; (-) strand; PAM type: YTN; PAM sequence: TTT
gtttatagttactgattcta

SEQ ID NO: 244760 - DNA, 20 bp, Artificial Sequence
  Description of Artificial Sequence: Synthetic oligonucleotide
  Target: LAMA2; (-) strand; PAM type: YTN; PAM sequence: CTG
gatcagtacacagaaatttg

SEQ ID NO: 244761 - DNA, 20 bp, Artificial Sequence
  Description of Artificial Sequence: Synthetic oligonucleotide
  Target: LAMA2; (-) strand; PAM type: YTN; PAM sequence: TTA
atactggatcagtacacaga

SEQ ID NO: 244762 - DNA, 20 bp, Artificial Sequence
  Description of Artificial Sequence: Synthetic oligonucleotide
  Target: LAMA2; (-) strand; PAM type: YTN; PAM sequence: CTG
ttaatactggatcagtacac

SEQ ID NO: 244763 - DNA, 20 bp, Artificial Sequence
  Description of Artificial Sequence: Synthetic oligonucleotide
  Target: LAMA2; (-) strand; PAM type: YTN; PAM sequence: CTC
tgttaatactggatcagtac

SEQ ID NO: 244764 - DNA, 20 bp, Artificial Sequence
  Description of Artificial Sequence: Synthetic oligonucleotide
  Target: LAMA2; (-) strand; PAM type: YTN; PAM sequence: TTC
tctgttaatactggatcagt

SEQ ID NO: 244765 - DNA, 20 bp, Artificial Sequence
  Description of Artificial Sequence: Synthetic oligonucleotide
  Target: LAMA2; (-) strand; PAM type: YTN; PAM sequence: TTT
ctctgttaatactggatcag

SEQ ID NO: 244766 - DNA, 20 bp, Artificial Sequence
  Description of Artificial Sequence: Synthetic oligonucleotide
  Target: LAMA2; (-) strand; PAM type: YTN; PAM sequence: TTT
tctctgttaatactggatca

SEQ ID NO: 244767 - DNA, 20 bp, Artificial Sequence
  Description of Artificial Sequence: Synthetic oligonucleotide
  Target: LAMA2; (-) strand; PAM type: YTN; PAM sequence: TTA
ttttctctgttaatactgga

SEQ ID NO: 244768 - DNA, 20 bp, Artificial Sequence
  Description of Artificial Sequence: Synthetic oligonucleotide
  Target: LAMA2; (-) strand; PAM type: YTN; PAM sequence: TTG
cacagtaaggcacagtcaac

SEQ ID NO: 244769 - DNA, 20 bp, Artificial Sequence
  Description of Artificial Sequence: Synthetic oligonucleotide
  Target: LAMA2; (-) strand; PAM type: YTN; PAM sequence: CTT
gcacagtaaggcacagtcaa

SEQ ID NO: 244770 - DNA, 20 bp, Artificial Sequence
  Description of Artificial Sequence: Synthetic oligonucleotide
  Target: LAMA2; (-) strand; PAM type: YTN; PAM sequence: TTG
ccttgcacagtaaggcacag

SEQ ID NO: 244771 - DNA, 20 bp, Artificial Sequence
  Description of Artificial Sequence: Synthetic oligonucleotide
  Target: LAMA2; (-) strand; PAM type: YTN; PAM sequence: TTT
gccttgcacagtaaggcaca

SEQ ID NO: 244772 - DNA, 20 bp, Artificial Sequence
  Description of Artificial Sequence: Synthetic oligonucleotide
  Target: LAMA2; (-) strand; PAM type: YTN; PAM sequence: TTT
tgccttgcacagtaaggcac

SEQ ID NO: 244773 - DNA, 20 bp, Artificial Sequence
  Description of Artificial Sequence: Synthetic oligonucleotide
  Target: LAMA2; (-) strand; PAM type: YTN; PAM sequence: TTT
ttgccttgcacagtaaggca

SEQ ID NO: 244774 - DNA, 20 bp, Artificial Sequence
  Description of Artificial Sequence: Synthetic oligonucleotide
  Target: LAMA2; (-) strand; PAM type: YTN; PAM sequence: CTC
atttttgccttgcacagtaa

SEQ ID NO: 244775 - DNA, 20 bp, Artificial Sequence
  Description of Artificial Sequence: Synthetic oligonucleotide
  Target: LAMA2; (-) strand; PAM type: YTN; PAM sequence: TTG
agctcatttttgccttgcac

SEQ ID NO: 244776 - DNA, 20 bp, Artificial Sequence
  Description of Artificial Sequence: Synthetic oligonucleotide
  Target: LAMA2; (-) strand; PAM type: YTN; PAM sequence: CTT
gagctcatttttgccttgca

SEQ ID NO: 244777 - DNA, 20 bp, Artificial Sequence
  Description of Artificial Sequence: Synthetic oligonucleotide
  Target: LAMA2; (-) strand; PAM type: YTN; PAM sequence: TTG
ataatatcttgagctcattt

SEQ ID NO: 244778 - DNA, 20 bp, Artificial Sequence
  Description of Artificial Sequence: Synthetic oligonucleotide
  Target: LAMA2; (-) strand; PAM type: YTN; PAM sequence: TTT
gataatatcttgagctcatt

SEQ ID NO: 244779 - DNA, 20 bp, Artificial Sequence
  Description of Artificial Sequence: Synthetic oligonucleotide
  Target: LAMA2; (-) strand; PAM type: YTN; PAM sequence: CTT
tgataatatcttgagctcat

SEQ ID NO: 244780 - DNA, 20 bp, Artificial Sequence
  Description of Artificial Sequence: Synthetic oligonucleotide
  Target: LAMA2; (-) strand; PAM type: YTN; PAM sequence: TTC
atgactttgataatatcttg

SEQ ID NO: 244781 - DNA, 20 bp, Artificial Sequence
  Description of Artificial Sequence: Synthetic oligonucleotide
  Target: LAMA2; (-) strand; PAM type: YTN; PAM sequence: CTG
attcatgactttgataatat

SEQ ID NO: 244782 - DNA, 20 bp, Artificial Sequence
  Description of Artificial Sequence: Synthetic oligonucleotide
  Target: LAMA2; (-) strand; PAM type: YTN; PAM sequence: TTC
tgattcatgactttgataat

SEQ ID NO: 244783 - DNA, 20 bp, Artificial Sequence
  Description of Artificial Sequence: Synthetic oligonucleotide
  Target: LAMA2; (-) strand; PAM type: YTN; PAM sequence: TTT
ctgattcatgactttgataa

SEQ ID NO: 244784 - DNA, 20 bp, Artificial Sequence
  Description of Artificial Sequence: Synthetic oligonucleotide
  Target: LAMA2; (-) strand; PAM type: YTN; PAM sequence: CTT
tctgattcatgactttgata

SEQ ID NO: 244785 - DNA, 20 bp, Artificial Sequence
  Description of Artificial Sequence: Synthetic oligonucleotide
  Target: LAMA2; (-) strand; PAM type: YTN; PAM sequence: CTC
tttctgattcatgactttga

SEQ ID NO: 244786 - DNA, 20 bp, Artificial Sequence
  Description of Artificial Sequence: Synthetic oligonucleotide
  Target: LAMA2; (-) strand; PAM type: YTN; PAM sequence: TTC
tctttctgattcatgacttt

SEQ ID NO: 244787 - DNA, 20 bp, Artificial Sequence
  Description of Artificial Sequence: Synthetic oligonucleotide
  Target: LAMA2; (-) strand; PAM type: YTN; PAM sequence: TTG
taaaacgaaattctctttct

SEQ ID NO: 244788 - DNA, 20 bp, Artificial Sequence
  Description of Artificial Sequence: Synthetic oligonucleotide
  Target: LAMA2; (-) strand; PAM type: YTN; PAM sequence: TTT
gtaaaacgaaattctctttc

SEQ ID NO: 244789 - DNA, 20 bp, Artificial Sequence
  Description of Artificial Sequence: Synthetic oligonucleotide
  Target: LAMA2; (-) strand; PAM type: YTN; PAM sequence: CTA
tccatcatttgtaaaacgaa

SEQ ID NO: 244790 - DNA, 20 bp, Artificial Sequence
  Description of Artificial Sequence: Synthetic oligonucleotide
  Target: LAMA2; (-) strand; PAM type: YTN; PAM sequence: TTG
tggctatccatcatttgtaa

SEQ ID NO: 244791 - DNA, 20 bp, Artificial Sequence
  Description of Artificial Sequence: Synthetic oligonucleotide
  Target: LAMA2; (-) strand; PAM type: YTN; PAM sequence: TTT
gtggctatccatcatttgta

SEQ ID NO: 244792 - DNA, 20 bp, Artificial Sequence
  Description of Artificial Sequence: Synthetic oligonucleotide
  Target: LAMA2; (-) strand; PAM type: YTN; PAM sequence: TTT
tgtggctatccatcatttgt

SEQ ID NO: 244793 - DNA, 20 bp, Artificial Sequence
  Description of Artificial Sequence: Synthetic oligonucleotide
  Target: LAMA2; (-) strand; PAM type: YTN; PAM sequence: TTG
ttttgtggctatccatcatt

SEQ ID NO: 244794 - DNA, 20 bp, Artificial Sequence
  Description of Artificial Sequence: Synthetic oligonucleotide
  Target: LAMA2; (-) strand; PAM type: YTN; PAM sequence: CTA
gttgttttgtggctatccat

SEQ ID NO: 244795 - DNA, 20 bp, Artificial Sequence
  Description of Artificial Sequence: Synthetic oligonucleotide
  Target: LAMA2; (-) strand; PAM type: YTN; PAM sequence: TTG
tatgtcctagttgttttgtg

SEQ ID NO: 244796 - DNA, 20 bp, Artificial Sequence
  Description of Artificial Sequence: Synthetic oligonucleotide
  Target: LAMA2; (-) strand; PAM type: YTN; PAM sequence: TTG
tgtaatcagagattgtatgt

SEQ ID NO: 244797 - DNA, 20 bp, Artificial Sequence
  Description of Artificial Sequence: Synthetic oligonucleotide
  Target: LAMA2; (-) strand; PAM type: YTN; PAM sequence: CTG
cagttgtgtaatcagagatt

SEQ ID NO: 244798 - DNA, 20 bp, Artificial Sequence
  Description of Artificial Sequence: Synthetic oligonucleotide
  Target: LAMA2; (-) strand; PAM type: YTN; PAM sequence: CTA
tagactgcagttgtgtaatc

SEQ ID NO: 244799 - DNA, 20 bp, Artificial Sequence
  Description of Artificial Sequence: Synthetic oligonucleotide
  Target: LAMA2; (-) strand; PAM type: YTN; PAM sequence: CTG
cagaatgtagctatagactg

SEQ ID NO: 244800 - DNA, 20 bp, Artificial Sequence
  Description of Artificial Sequence: Synthetic oligonucleotide
  Target: LAMA2; (-) strand; PAM type: YTN; PAM sequence: TTA
atctgcagaatgtagctata

SEQ ID NO: 244801 - DNA, 20 bp, Artificial Sequence
  Description of Artificial Sequence: Synthetic oligonucleotide
  Target: LAMA2; (-) strand; PAM type: YTN; PAM sequence: TTT
aatctgcagaatgtagctat

SEQ ID NO: 244802 - DNA, 20 bp, Artificial Sequence
  Description of Artificial Sequence: Synthetic oligonucleotide
  Target: LAMA2; (-) strand; PAM type: YTN; PAM sequence: CTG
tggtgtttaatctgcagaat

SEQ ID NO: 244803 - DNA, 20 bp, Artificial Sequence
  Description of Artificial Sequence: Synthetic oligonucleotide
  Target: LAMA2; (-) strand; PAM type: YTN; PAM sequence: CTA
ctgtggtgtttaatctgcag

SEQ ID NO: 244804 - DNA, 20 bp, Artificial Sequence
  Description of Artificial Sequence: Synthetic oligonucleotide
  Target: LAMA2; (-) strand; PAM type: YTN; PAM sequence: CTC
tactgtggtgtttaatctgc

SEQ ID NO: 244805 - DNA, 20 bp, Artificial Sequence
  Description of Artificial Sequence: Synthetic oligonucleotide
  Target: LAMA2; (-) strand; PAM type: YTN; PAM sequence: TTC
catctctactgtggtgttta

SEQ ID NO: 244806 - DNA, 20 bp, Artificial Sequence
  Description of Artificial Sequence: Synthetic oligonucleotide
  Target: LAMA2; (-) strand; PAM type: YTN; PAM sequence: TTT
ccatctctactgtggtgttt

SEQ ID NO: 244807 - DNA, 20 bp, Artificial Sequence
  Description of Artificial Sequence: Synthetic oligonucleotide
  Target: LAMA2; (-) strand; PAM type: YTN; PAM sequence: TTC
ataaaatataaacaataaag

SEQ ID NO: 244808 - DNA, 20 bp, Artificial Sequence
  Description of Artificial Sequence: Synthetic oligonucleotide
  Target: LAMA2; (-) strand; PAM type: YTN; PAM sequence: TTT
cataaaatataaacaataaa

SEQ ID NO: 244809 - DNA, 20 bp, Artificial Sequence
  Description of Artificial Sequence: Synthetic oligonucleotide
  Target: LAMA2; (-) strand; PAM type: YTN; PAM sequence: TTT
tcataaaatataaacaataa

SEQ ID NO: 244810 - DNA, 20 bp, Artificial Sequence
  Description of Artificial Sequence: Synthetic oligonucleotide
  Target: LAMA2; (-) strand; PAM type: YTN; PAM sequence: CTG
acataaaaacaaaagagaac

SEQ ID NO: 244811 - DNA, 20 bp, Artificial Sequence
  Description of Artificial Sequence: Synthetic oligonucleotide
  Target: LAMA2; (-) strand; PAM type: YTN; PAM sequence: CTC
aaactgacataaaaacaaaa

SEQ ID NO: 244812 - DNA, 20 bp, Artificial Sequence
  Description of Artificial Sequence: Synthetic oligonucleotide
  Target: LAMA2; (-) strand; PAM type: YTN; PAM sequence: CTC
tcaaactgacataaaaacaa

SEQ ID NO: 244813 - DNA, 20 bp, Artificial Sequence
  Description of Artificial Sequence: Synthetic oligonucleotide
  Target: LAMA2; (-) strand; PAM type: YTN; PAM sequence: CTA
ctctcaaactgacataaaaa

SEQ ID NO: 244814 - DNA, 20 bp, Artificial Sequence
  Description of Artificial Sequence: Synthetic oligonucleotide
  Target: LAMA2; (-) strand; PAM type: YTN; PAM sequence: TTC
tactctcaaactgacataaa

SEQ ID NO: 244815 - DNA, 20 bp, Artificial Sequence
  Description of Artificial Sequence: Synthetic oligonucleotide
  Target: LAMA2; (-) strand; PAM type: YTN; PAM sequence: CTT
ctactctcaaactgacataa

SEQ ID NO: 244816 - DNA, 20 bp, Artificial Sequence
  Description of Artificial Sequence: Synthetic oligonucleotide
  Target: LAMA2; (-) strand; PAM type: YTN; PAM sequence: TTC
ttctactctcaaactgacat

SEQ ID NO: 244817 - DNA, 20 bp, Artificial Sequence
  Description of Artificial Sequence: Synthetic oligonucleotide
  Target: LAMA2; (-) strand; PAM type: YTN; PAM sequence: CTC
aaggatattcttctactctc

SEQ ID NO: 244818 - DNA, 20 bp, Artificial Sequence
  Description of Artificial Sequence: Synthetic oligonucleotide
  Target: LAMA2; (-) strand; PAM type: YTN; PAM sequence: TTG
ccctcaaggatattcttcta

SEQ ID NO: 244819 - DNA, 20 bp, Artificial Sequence
  Description of Artificial Sequence: Synthetic oligonucleotide
  Target: LAMA2; (-) strand; PAM type: YTN; PAM sequence: TTT
gccctcaaggatattcttct

SEQ ID NO: 244820 - DNA, 20 bp, Artificial Sequence
  Description of Artificial Sequence: Synthetic oligonucleotide
  Target: LAMA2; (-) strand; PAM type: YTN; PAM sequence: TTT
tgccctcaaggatattcttc

SEQ ID NO: 244821 - DNA, 20 bp, Artificial Sequence
  Description of Artificial Sequence: Synthetic oligonucleotide
  Target: LAMA2; (-) strand; PAM type: YTN; PAM sequence: CTA
atgtatgaaaggcatgtttt

SEQ ID NO: 244822 - DNA, 20 bp, Artificial Sequence
  Description of Artificial Sequence: Synthetic oligonucleotide
  Target: LAMA2; (-) strand; PAM type: YTN; PAM sequence: CTC
taatgtatgaaaggcatgtt

SEQ ID NO: 244823 - DNA, 20 bp, Artificial Sequence
  Description of Artificial Sequence: Synthetic oligonucleotide
  Target: LAMA2; (-) strand; PAM type: YTN; PAM sequence: CTA
ggcagctctaatgtatgaaa

SEQ ID NO: 244824 - DNA, 20 bp, Artificial Sequence
  Description of Artificial Sequence: Synthetic oligonucleotide
  Target: LAMA2; (-) strand; PAM type: YTN; PAM sequence: CTC
taggcagctctaatgtatga

SEQ ID NO: 244825 - DNA, 20 bp, Artificial Sequence
  Description of Artificial Sequence: Synthetic oligonucleotide
  Target: LAMA2; (-) strand; PAM type: YTN; PAM sequence: CTA
tgctctaggcagctctaatg

SEQ ID NO: 244826 - DNA, 20 bp, Artificial Sequence
  Description of Artificial Sequence: Synthetic oligonucleotide
  Target: LAMA2; (-) strand; PAM type: YTN; PAM sequence: TTA
tataatgtgccagactatgc

SEQ ID NO: 244827 - DNA, 20 bp, Artificial Sequence
  Description of Artificial Sequence: Synthetic oligonucleotide
  Target: LAMA2; (-) strand; PAM type: YTN; PAM sequence: TTT
atataatgtgccagactatg

SEQ ID NO: 244828 - DNA, 20 bp, Artificial Sequence
  Description of Artificial Sequence: Synthetic oligonucleotide
  Target: LAMA2; (-) strand; PAM type: YTN; PAM sequence: TTA
atatttatataatgtgccag

SEQ ID NO: 244829 - DNA, 20 bp, Artificial Sequence
  Description of Artificial Sequence: Synthetic oligonucleotide
  Target: LAMA2; (-) strand; PAM type: YTN; PAM sequence: TTT
aatatttatataatgtgcca

SEQ ID NO: 244830 - DNA, 20 bp, Artificial Sequence
  Description of Artificial Sequence: Synthetic oligonucleotide
  Target: LAMA2; (-) strand; PAM type: YTN; PAM sequence: TTA
tttaatatttatataatgtg

SEQ ID NO: 244831 - DNA, 20 bp, Artificial Sequence
  Description of Artificial Sequence: Synthetic oligonucleotide
  Target: LAMA2; (-) strand; PAM type: YTN; PAM sequence: TTA
taggaattatttaatattta

SEQ ID NO: 244832 - DNA, 20 bp, Artificial Sequence
  Description of Artificial Sequence: Synthetic oligonucleotide
  Target: LAMA2; (-) strand; PAM type: YTN; PAM sequence: TTA
attataggaattatttaata

SEQ ID NO: 244833 - DNA, 20 bp, Artificial Sequence
  Description of Artificial Sequence: Synthetic oligonucleotide
  Target: LAMA2; (-) strand; PAM type: YTN; PAM sequence: TTT
aattataggaattatttaat

SEQ ID NO: 244834 - DNA, 20 bp, Artificial Sequence
  Description of Artificial Sequence: Synthetic oligonucleotide
  Target: LAMA2; (-) strand; PAM type: YTN; PAM sequence: TTC
caaagaacatcagtttaatt

SEQ ID NO: 244835 - DNA, 20 bp, Artificial Sequence
  Description of Artificial Sequence: Synthetic oligonucleotide
  Target: LAMA2; (-) strand; PAM type: YTN; PAM sequence: CTC
attccaaagaacatcagttt

SEQ ID NO: 244836 - DNA, 20 bp, Artificial Sequence
  Description of Artificial Sequence: Synthetic oligonucleotide
  Target: LAMA2; (-) strand; PAM type: YTN; PAM sequence: CTC
catcctcattccaaagaaca

SEQ ID NO: 244837 - DNA, 20 bp, Artificial Sequence
  Description of Artificial Sequence: Synthetic oligonucleotide
  Target: LAMA2; (-) strand; PAM type: YTN; PAM sequence: CTA
tgtgtctccatcctcattcc

SEQ ID NO: 244838 - DNA, 20 bp, Artificial Sequence
  Description of Artificial Sequence: Synthetic oligonucleotide
  Target: LAMA2; (-) strand; PAM type: YTN; PAM sequence: TTC
agataactatgtgtctccat

SEQ ID NO: 244839 - DNA, 20 bp, Artificial Sequence
  Description of Artificial Sequence: Synthetic oligonucleotide
  Target: LAMA2; (-) strand; PAM type: YTN; PAM sequence: TTA
aggcaattcagataactatg

SEQ ID NO: 244840 - DNA, 20 bp, Artificial Sequence
  Description of Artificial Sequence: Synthetic oligonucleotide
  Target: LAMA2; (-) strand; PAM type: YTN; PAM sequence: CTT
aaggcaattcagataactat

SEQ ID NO: 244841 - DNA, 20 bp, Artificial Sequence
  Description of Artificial Sequence: Synthetic oligonucleotide
  Target: LAMA2; (-) strand; PAM type: YTN; PAM sequence: CTA
gcttaaggcaattcagataa

SEQ ID NO: 244842 - DNA, 20 bp, Artificial Sequence
  Description of Artificial Sequence: Synthetic oligonucleotide
  Target: LAMA2; (-) strand; PAM type: YTN; PAM sequence: TTG
caaaactagcttaaggcaat

SEQ ID NO: 244843 - DNA, 20 bp, Artificial Sequence
  Description of Artificial Sequence: Synthetic oligonucleotide
  Target: LAMA2; (-) strand; PAM type: YTN; PAM sequence: TTA
ttgcaaaactagcttaaggc

SEQ ID NO: 244844 - DNA, 20 bp, Artificial Sequence
  Description of Artificial Sequence: Synthetic oligonucleotide
  Target: LAMA2; (-) strand; PAM type: YTN; PAM sequence: CTT
attgcaaaactagcttaagg

SEQ ID NO: 244845 - DNA, 20 bp, Artificial Sequence
  Description of Artificial Sequence: Synthetic oligonucleotide
  Target: LAMA2; (-) strand; PAM type: YTN; PAM sequence: CTA
cttattgcaaaactagctta

SEQ ID NO: 244846 - DNA, 20 bp, Artificial Sequence
  Description of Artificial Sequence: Synthetic oligonucleotide
  Target: LAMA2; (-) strand; PAM type: YTN; PAM sequence: CTA
gaatagtaaaaatctactta

SEQ ID NO: 244847 - DNA, 20 bp, Artificial Sequence
  Description of Artificial Sequence: Synthetic oligonucleotide
  Target: LAMA2; (-) strand; PAM type: YTN; PAM sequence: TTC
tagaatagtaaaaatctact

SEQ ID NO: 244848 - DNA, 20 bp, Artificial Sequence
  Description of Artificial Sequence: Synthetic oligonucleotide
  Target: LAMA2; (-) strand; PAM type: YTN; PAM sequence: TTA
catattctagaatagtaaaa

SEQ ID NO: 244849 - DNA, 20 bp, Artificial Sequence
  Description of Artificial Sequence: Synthetic oligonucleotide
  Target: LAMA2; (-) strand; PAM type: YTN; PAM sequence: TTC
attacatattctagaatagt

SEQ ID NO: 244850 - DNA, 20 bp, Artificial Sequence
  Description of Artificial Sequence: Synthetic oligonucleotide
  Target: LAMA2; (-) strand; PAM type: YTN; PAM sequence: TTC
attcattacatattctagaa

SEQ ID NO: 244851 - DNA, 20 bp, Artificial Sequence
  Description of Artificial Sequence: Synthetic oligonucleotide
  Target: LAMA2; (-) strand; PAM type: YTN; PAM sequence: TTG
taacatagcatgattcattc

SEQ ID NO: 244852 - DNA, 20 bp, Artificial Sequence
  Description of Artificial Sequence: Synthetic oligonucleotide
  Target: LAMA2; (-) strand; PAM type: YTN; PAM sequence: CTT
gtaacatagcatgattcatt

SEQ ID NO: 244853 - DNA, 20 bp, Artificial Sequence
  Description of Artificial Sequence: Synthetic oligonucleotide
  Target: LAMA2; (-) strand; PAM type: YTN; PAM sequence: TTA
cttgtaacatagcatgattc

SEQ ID NO: 244854 - DNA, 20 bp, Artificial Sequence
  Description of Artificial Sequence: Synthetic oligonucleotide
  Target: LAMA2; (-) strand; PAM type: YTN; PAM sequence: CTT
acttgtaacatagcatgatt

SEQ ID NO: 244855 - DNA, 20 bp, Artificial Sequence
  Description of Artificial Sequence: Synthetic oligonucleotide
  Target: LAMA2; (-) strand; PAM type: YTN; PAM sequence: TTA
atacttacttgtaacatagc

SEQ ID NO: 244856 - DNA, 20 bp, Artificial Sequence
  Description of Artificial Sequence: Synthetic oligonucleotide
  Target: LAMA2; (-) strand; PAM type: YTN; PAM sequence: TTA
attaatacttacttgtaaca

SEQ ID NO: 244857 - DNA, 20 bp, Artificial Sequence
  Description of Artificial Sequence: Synthetic oligonucleotide
  Target: LAMA2; (-) strand; PAM type: YTN; PAM sequence: TTC
aaccattaattaatacttac

SEQ ID NO: 244858 - DNA, 20 bp, Artificial Sequence
  Description of Artificial Sequence: Synthetic oligonucleotide
  Target: LAMA2; (-) strand; PAM type: YTN; PAM sequence: CTT
caaccattaattaatactta

SEQ ID NO: 244859 - DNA, 20 bp, Artificial Sequence
  Description of Artificial Sequence: Synthetic oligonucleotide
  Target: LAMA2; (-) strand; PAM type: YTN; PAM sequence: TTG
tacttcaaccattaattaat

SEQ ID NO: 244860 - DNA, 20 bp, Artificial Sequence
  Description of Artificial Sequence: Synthetic oligonucleotide
  Target: LAMA2; (-) strand; PAM type: YTN; PAM sequence: TTT
gtacttcaaccattaattaa

SEQ ID NO: 244861 - DNA, 20 bp, Artificial Sequence
  Description of Artificial Sequence: Synthetic oligonucleotide
  Target: LAMA2; (-) strand; PAM type: YTN; PAM sequence: TTT
tgtacttcaaccattaatta

SEQ ID NO: 244862 - DNA, 20 bp, Artificial Sequence
  Description of Artificial Sequence: Synthetic oligonucleotide
  Target: LAMA2; (-) strand; PAM type: YTN; PAM sequence: TTT
ttgtacttcaaccattaatt

SEQ ID NO: 244863 - DNA, 20 bp, Artificial Sequence
  Description of Artificial Sequence: Synthetic oligonucleotide
  Target: LAMA2; (-) strand; PAM type: YTN; PAM sequence: TTC
aaggaagatgtttttgtact

SEQ ID NO: 244864 - DNA, 20 bp, Artificial Sequence
  Description of Artificial Sequence: Synthetic oligonucleotide
  Target: LAMA2; (-) strand; PAM type: YTN; PAM sequence: TTA
tcatataattcaaggaagat

SEQ ID NO: 244865 - DNA, 20 bp, Artificial Sequence
  Description of Artificial Sequence: Synthetic oligonucleotide
  Target: LAMA2; (-) strand; PAM type: YTN; PAM sequence: CTG
tgatgtagattatcatataa

SEQ ID NO: 244866 - DNA, 20 bp, Artificial Sequence
  Description of Artificial Sequence: Synthetic oligonucleotide
  Target: LAMA2; (-) strand; PAM type: YTN; PAM sequence: TTC
actgtgatgtagattatcat

SEQ ID NO: 244867 - DNA, 20 bp, Artificial Sequence
  Description of Artificial Sequence: Synthetic oligonucleotide
  Target: LAMA2; (-) strand; PAM type: YTN; PAM sequence: TTT
cactgtgatgtagattatca

SEQ ID NO: 244868 - DNA, 20 bp, Artificial Sequence
  Description of Artificial Sequence: Synthetic oligonucleotide
  Target: LAMA2; (-) strand; PAM type: YTN; PAM sequence: CTT
tcactgtgatgtagattatc

SEQ ID NO: 244869 - DNA, 20 bp, Artificial Sequence
  Description of Artificial Sequence: Synthetic oligonucleotide
  Target: LAMA2; (-) strand; PAM type: YTN; PAM sequence: TTC
ctttcactgtgatgtagatt

SEQ ID NO: 244870 - DNA, 20 bp, Artificial Sequence
  Description of Artificial Sequence: Synthetic oligonucleotide
  Target: LAMA2; (-) strand; PAM type: YTN; PAM sequence: TTG
tcatgataaattcctttcac

SEQ ID NO: 244871 - DNA, 20 bp, Artificial Sequence
  Description of Artificial Sequence: Synthetic oligonucleotide
  Target: LAMA2; (-) strand; PAM type: YTN; PAM sequence: TTT
gtcatgataaattcctttca

SEQ ID NO: 244872 - DNA, 20 bp, Artificial Sequence
  Description of Artificial Sequence: Synthetic oligonucleotide
  Target: LAMA2; (-) strand; PAM type: YTN; PAM sequence: CTA
gcatttgtcatgataaattc

SEQ ID NO: 244873 - DNA, 20 bp, Artificial Sequence
  Description of Artificial Sequence: Synthetic oligonucleotide
  Target: LAMA2; (-) strand; PAM type: YTN; PAM sequence: TTG
actagcatttgtcatgataa

SEQ ID NO: 244874 - DNA, 20 bp, Artificial Sequence
  Description of Artificial Sequence: Synthetic oligonucleotide
  Target: LAMA2; (-) strand; PAM type: YTN; PAM sequence: TTC
aacattgactagcatttgtc

SEQ ID NO: 244875 - DNA, 20 bp, Artificial Sequence
  Description of Artificial Sequence: Synthetic oligonucleotide
  Target: LAMA2; (-) strand; PAM type: YTN; PAM sequence: CTG
tgattcaacattgactagca

SEQ ID NO: 244876 - DNA, 20 bp, Artificial Sequence
  Description of Artificial Sequence: Synthetic oligonucleotide
  Target: LAMA2; (-) strand; PAM type: YTN; PAM sequence: CTC
tgtgattcaacattgactag

SEQ ID NO: 244877 - DNA, 20 bp, Artificial Sequence
  Description of Artificial Sequence: Synthetic oligonucleotide
  Target: LAMA2; (-) strand; PAM type: YTN; PAM sequence: CTC
atatagccctctgtgattca

SEQ ID NO: 244878 - DNA, 20 bp, Artificial Sequence
  Description of Artificial Sequence: Synthetic oligonucleotide
  Target: LAMA2; (-) strand; PAM type: YTN; PAM sequence: TTA
agaatgaaaatggatctcat

SEQ ID NO: 244879 - DNA, 20 bp, Artificial Sequence
  Description of Artificial Sequence: Synthetic oligonucleotide
  Target: LAMA2; (-) strand; PAM type: YTN; PAM sequence: TTT
aagaatgaaaatggatctca

SEQ ID NO: 244880 - DNA, 20 bp, Artificial Sequence
  Description of Artificial Sequence: Synthetic oligonucleotide
  Target: LAMA2; (-) strand; PAM type: YTN; PAM sequence: CTT
taagaatgaaaatggatctc

SEQ ID NO: 244881 - DNA, 20 bp, Artificial Sequence
  Description of Artificial Sequence: Synthetic oligonucleotide
  Target: LAMA2; (-) strand; PAM type: YTN; PAM sequence: TTC
tttaagaatgaaaatggatc

SEQ ID NO: 244882 - DNA, 20 bp, Artificial Sequence
  Description of Artificial Sequence: Synthetic oligonucleotide
  Target: LAMA2; (-) strand; PAM type: YTN; PAM sequence: TTT
ctttaagaatgaaaatggat

SEQ ID NO: 244883 - DNA, 20 bp, Artificial Sequence
  Description of Artificial Sequence: Synthetic oligonucleotide
  Target: LAMA2; (-) strand; PAM type: YTN; PAM sequence: TTT
tctttaagaatgaaaatgga

SEQ ID NO: 244884 - DNA, 20 bp, Artificial Sequence
  Description of Artificial Sequence: Synthetic oligonucleotide
  Target: LAMA2; (-) strand; PAM type: YTN; PAM sequence: TTA
ataaaaagatataataattt

SEQ ID NO: 244885 - DNA, 20 bp, Artificial Sequence
  Description of Artificial Sequence: Synthetic oligonucleotide
  Target: LAMA2; (-) strand; PAM type: YTN; PAM sequence: CTG
agtaaatatccaccatatta

SEQ ID NO: 244886 - DNA, 20 bp, Artificial Sequence
  Description of Artificial Sequence: Synthetic oligonucleotide
  Target: LAMA2; (-) strand; PAM type: YTN; PAM sequence: TTA
ctgagtaaatatccaccata

SEQ ID NO: 244887 - DNA, 20 bp, Artificial Sequence
  Description of Artificial Sequence: Synthetic oligonucleotide
  Target: LAMA2; (-) strand; PAM type: YTN; PAM sequence: TTT
actgagtaaatatccaccat

SEQ ID NO: 244888 - DNA, 20 bp, Artificial Sequence
  Description of Artificial Sequence: Synthetic oligonucleotide
  Target: LAMA2; (-) strand; PAM type: YTN; PAM sequence: TTA
tttactgagtaaatatccac

SEQ ID NO: 244889 - DNA, 20 bp, Artificial Sequence
  Description of Artificial Sequence: Synthetic oligonucleotide
  Target: LAMA2; (-) strand; PAM type: YTN; PAM sequence: TTA
ttatttactgagtaaatatc

SEQ ID NO: 244890 - DNA, 20 bp, Artificial Sequence
  Description of Artificial Sequence: Synthetic oligonucleotide
  Target: LAMA2; (-) strand; PAM type: YTN; PAM sequence: TTT
attatttactgagtaaatat

SEQ ID NO: 244891 - DNA, 20 bp, Artificial Sequence
  Description of Artificial Sequence: Synthetic oligonucleotide
  Target: LAMA2; (-) strand; PAM type: YTN; PAM sequence: CTT
tattatttactgagtaaata

SEQ ID NO: 244892 - DNA, 20 bp, Artificial Sequence
  Description of Artificial Sequence: Synthetic oligonucleotide
  Target: LAMA2; (-) strand; PAM type: YTN; PAM sequence: TTC
tttattatttactgagtaaa

SEQ ID NO: 244893 - DNA, 20 bp, Artificial Sequence
  Description of Artificial Sequence: Synthetic oligonucleotide
  Target: LAMA2; (-) strand; PAM type: YTN; PAM sequence: TTT
ctttattatttactgagtaa

SEQ ID NO: 244894 - DNA, 20 bp, Artificial Sequence
  Description of Artificial Sequence: Synthetic oligonucleotide
  Target: LAMA2; (-) strand; PAM type: YTN; PAM sequence: TTT
tctttattatttactgagta

SEQ ID NO: 244895 - DNA, 20 bp, Artificial Sequence
  Description of Artificial Sequence: Synthetic oligonucleotide
  Target: LAMA2; (-) strand; PAM type: YTN; PAM sequence: TTA
gttttctttattatttactg

SEQ ID NO: 244896 - DNA, 20 bp, Artificial Sequence
  Description of Artificial Sequence: Synthetic oligonucleotide
  Target: LAMA2; (-) strand; PAM type: YTN; PAM sequence: TTC
atattagttttctttattat

SEQ ID NO: 244897 - DNA, 20 bp, Artificial Sequence
  Description of Artificial Sequence: Synthetic oligonucleotide
  Target: LAMA2; (-) strand; PAM type: YTN; PAM sequence: CTT
catattagttttctttatta

SEQ ID NO: 244898 - DNA, 20 bp, Artificial Sequence
  Description of Artificial Sequence: Synthetic oligonucleotide
  Target: LAMA2; (-) strand; PAM type: YTN; PAM sequence: TTG
cacttcatattagttttctt

SEQ ID NO: 244899 - DNA, 20 bp, Artificial Sequence
  Description of Artificial Sequence: Synthetic oligonucleotide
  Target: LAMA2; (-) strand; PAM type: YTN; PAM sequence: TTA
caaattgcacttcatattag

SEQ ID NO: 244900 - DNA, 20 bp, Artificial Sequence
  Description of Artificial Sequence: Synthetic oligonucleotide
  Target: LAMA2; (-) strand; PAM type: YTN; PAM sequence: TTG
tgcaacaaaaatcatgcatc

SEQ ID NO: 244901 - DNA, 20 bp, Artificial Sequence
  Description of Artificial Sequence: Synthetic oligonucleotide
  Target: LAMA2; (-) strand; PAM type: YTN; PAM sequence: CTA
attgtgcaacaaaaatcatg

SEQ ID NO: 244902 - DNA, 20 bp, Artificial Sequence
  Description of Artificial Sequence: Synthetic oligonucleotide
  Target: LAMA2; (-) strand; PAM type: YTN; PAM sequence: TTC
taattgtgcaacaaaaatca

SEQ ID NO: 244903 - DNA, 20 bp, Artificial Sequence
  Description of Artificial Sequence: Synthetic oligonucleotide
  Target: LAMA2; (-) strand; PAM type: YTN; PAM sequence: TTT
ctaattgtgcaacaaaaatc

SEQ ID NO: 244904 - DNA, 20 bp, Artificial Sequence
  Description of Artificial Sequence: Synthetic oligonucleotide
  Target: LAMA2; (-) strand; PAM type: YTN; PAM sequence: TTT
tctaattgtgcaacaaaaat

SEQ ID NO: 244905 - DNA, 20 bp, Artificial Sequence
  Description of Artificial Sequence: Synthetic oligonucleotide
  Target: LAMA2; (-) strand; PAM type: YTN; PAM sequence: TTA
agtattttctaattgtgcaa

SEQ ID NO: 244906 - DNA, 20 bp, Artificial Sequence
  Description of Artificial Sequence: Synthetic oligonucleotide
  Target: LAMA2; (-) strand; PAM type: YTN; PAM sequence: CTT
aagtattttctaattgtgca

SEQ ID NO: 244907 - DNA, 20 bp, Artificial Sequence
  Description of Artificial Sequence: Synthetic oligonucleotide
  Target: LAMA2; (-) strand; PAM type: YTN; PAM sequence: CTC
aagaacttaagtattttcta

SEQ ID NO: 244908 - DNA, 20 bp, Artificial Sequence
  Description of Artificial Sequence: Synthetic oligonucleotide
  Target: LAMA2; (-) strand; PAM type: YTN; PAM sequence: TTC
tcaagaacttaagtattttc

SEQ ID NO: 244909 - DNA, 20 bp, Artificial Sequence
  Description of Artificial Sequence: Synthetic oligonucleotide
  Target: LAMA2; (-) strand; PAM type: YTN; PAM sequence: CTA
ttctcaagaacttaagtatt

SEQ ID NO: 244910 - DNA, 20 bp, Artificial Sequence
  Description of Artificial Sequence: Synthetic oligonucleotide
  Target: LAMA2; (-) strand; PAM type: YTN; PAM sequence: TTC
caactattctcaagaactta

SEQ ID NO: 244911 - DNA, 20 bp, Artificial Sequence
  Description of Artificial Sequence: Synthetic oligonucleotide
  Target: LAMA2; (-) strand; PAM type: YTN; PAM sequence: TTT
ccaactattctcaagaactt

SEQ ID NO: 244912 - DNA, 20 bp, Artificial Sequence
  Description of Artificial Sequence: Synthetic oligonucleotide
  Target: LAMA2; (-) strand; PAM type: YTN; PAM sequence: CTT
tccaactattctcaagaact

SEQ ID NO: 244913 - DNA, 20 bp, Artificial Sequence
  Description of Artificial Sequence: Synthetic oligonucleotide
  Target: LAMA2; (-) strand; PAM type: YTN; PAM sequence: TTA
caaccctttccaactattct

SEQ ID NO: 244914 - DNA, 20 bp, Artificial Sequence
  Description of Artificial Sequence: Synthetic oligonucleotide
  Target: LAMA2; (-) strand; PAM type: YTN; PAM sequence: CTG
atcattacaaccctttccaa

SEQ ID NO: 244915 - DNA, 20 bp, Artificial Sequence
  Description of Artificial Sequence: Synthetic oligonucleotide
  Target: LAMA2; (-) strand; PAM type: YTN; PAM sequence: TTC
tgatcattacaaccctttcc

SEQ ID NO: 244916 - DNA, 20 bp, Artificial Sequence
  Description of Artificial Sequence: Synthetic oligonucleotide
  Target: LAMA2; (-) strand; PAM type: YTN; PAM sequence: TTT
ctgatcattacaaccctttc

SEQ ID NO: 244917 - DNA, 20 bp, Artificial Sequence
  Description of Artificial Sequence: Synthetic oligonucleotide
  Target: LAMA2; (-) strand; PAM type: YTN; PAM sequence: TTA
ggtataatatgtgtttctga

SEQ ID NO: 244918 - DNA, 20 bp, Artificial Sequence
  Description of Artificial Sequence: Synthetic oligonucleotide
  Target: LAMA2; (-) strand; PAM type: YTN; PAM sequence: TTT
aggtataatatgtgtttctg

SEQ ID NO: 244919 - DNA, 20 bp, Artificial Sequence
  Description of Artificial Sequence: Synthetic oligonucleotide
  Target: LAMA2; (-) strand; PAM type: YTN; PAM sequence: TTA
atacatgtttaggtataata

SEQ ID NO: 244920 - DNA, 20 bp, Artificial Sequence
  Description of Artificial Sequence: Synthetic oligonucleotide
  Target: LAMA2; (-) strand; PAM type: YTN; PAM sequence: CTT
aatacatgtttaggtataat

SEQ ID NO: 244921 - DNA, 20 bp, Artificial Sequence
  Description of Artificial Sequence: Synthetic oligonucleotide
  Target: LAMA2; (-) strand; PAM type: YTN; PAM sequence: TTA
aaacaaggtcttaatacatg

SEQ ID NO: 244922 - DNA, 20 bp, Artificial Sequence
  Description of Artificial Sequence: Synthetic oligonucleotide
  Target: LAMA2; (-) strand; PAM type: YTN; PAM sequence: TTT
aaaacaaggtcttaatacat

SEQ ID NO: 244923 - DNA, 20 bp, Artificial Sequence
  Description of Artificial Sequence: Synthetic oligonucleotide
  Target: LAMA2; (-) strand; PAM type: YTN; PAM sequence: TTT
taaaacaaggtcttaataca

SEQ ID NO: 244924 - DNA, 20 bp, Artificial Sequence
  Description of Artificial Sequence: Synthetic oligonucleotide
  Target: LAMA2; (-) strand; PAM type: YTN; PAM sequence: TTT
ttaaaacaaggtcttaatac

SEQ ID NO: 244925 - DNA, 20 bp, Artificial Sequence
  Description of Artificial Sequence: Synthetic oligonucleotide
  Target: LAMA2; (-) strand; PAM type: YTN; PAM sequence: CTA
atttttaaaacaaggtctta

SEQ ID NO: 244926 - DNA, 20 bp, Artificial Sequence
  Description of Artificial Sequence: Synthetic oligonucleotide
  Target: LAMA2; (-) strand; PAM type: YTN; PAM sequence: CTC
caagatctaatttttaaaac

SEQ ID NO: 244927 - DNA, 20 bp, Artificial Sequence
  Description of Artificial Sequence: Synthetic oligonucleotide
  Target: LAMA2; (-) strand; PAM type: YTN; PAM sequence: TTG
ctccaagatctaatttttaa

SEQ ID NO: 244928 - DNA, 20 bp, Artificial Sequence
  Description of Artificial Sequence: Synthetic oligonucleotide
  Target: LAMA2; (-) strand; PAM type: YTN; PAM sequence: CTT
gctccaagatctaattttta

SEQ ID NO: 244929 - DNA, 20 bp, Artificial Sequence
  Description of Artificial Sequence: Synthetic oligonucleotide
  Target: LAMA2; (-) strand; PAM type: YTN; PAM sequence: TTC
ttgctccaagatctaatttt

SEQ ID NO: 244930 - DNA, 20 bp, Artificial Sequence
  Description of Artificial Sequence: Synthetic oligonucleotide
  Target: LAMA2; (-) strand; PAM type: YTN; PAM sequence: CTT
cttgctccaagatctaattt

SEQ ID NO: 244931 - DNA, 20 bp, Artificial Sequence
  Description of Artificial Sequence: Synthetic oligonucleotide
  Target: LAMA2; (-) strand; PAM type: YTN; PAM sequence: TTA
ccttcttgctccaagatcta

SEQ ID NO: 244932 - DNA, 20 bp, Artificial Sequence
  Description of Artificial Sequence: Synthetic oligonucleotide
  Target: LAMA2; (-) strand; PAM type: YTN; PAM sequence: CTT
accttcttgctccaagatct

SEQ ID NO: 244933 - DNA, 20 bp, Artificial Sequence
  Description of Artificial Sequence: Synthetic oligonucleotide
  Target: LAMA2; (-) strand; PAM type: YTN; PAM sequence: CTA
agaacgtaatgatacagctt

SEQ ID NO: 244934 - DNA, 20 bp, Artificial Sequence
  Description of Artificial Sequence: Synthetic oligonucleotide
  Target: LAMA2; (-) strand; PAM type: YTN; PAM sequence: TTC
taagaacgtaatgatacagc

SEQ ID NO: 244935 - DNA, 20 bp, Artificial Sequence
  Description of Artificial Sequence: Synthetic oligonucleotide
  Target: LAMA2; (-) strand; PAM type: YTN; PAM sequence: CTG
tattctaagaacgtaatgat

SEQ ID NO: 244936 - DNA, 20 bp, Artificial Sequence
  Description of Artificial Sequence: Synthetic oligonucleotide
  Target: LAMA2; (-) strand; PAM type: YTN; PAM sequence: TTA
caggcatgagcccccacgcc

SEQ ID NO: 244937 - DNA, 20 bp, Artificial Sequence
  Description of Artificial Sequence: Synthetic oligonucleotide
  Target: LAMA2; (-) strand; PAM type: YTN; PAM sequence: CTG
ggattacaggcatgagcccc

SEQ ID NO: 244938 - DNA, 20 bp, Artificial Sequence
  Description of Artificial Sequence: Synthetic oligonucleotide
  Target: LAMA2; (-) strand; PAM type: YTN; PAM sequence: CTC
ccaaaatgctgggattacag

SEQ ID NO: 244939 - DNA, 20 bp, Artificial Sequence
  Description of Artificial Sequence: Synthetic oligonucleotide
  Target: LAMA2; (-) strand; PAM type: YTN; PAM sequence: CTC
agcctcccaaaatgctggga

SEQ ID NO: 244940 - DNA, 20 bp, Artificial Sequence
  Description of Artificial Sequence: Synthetic oligonucleotide
  Target: LAMA2; (-) strand; PAM type: YTN; PAM sequence: CTC
gtgatccacccgcctcagcc

SEQ ID NO: 244941 - DNA, 20 bp, Artificial Sequence
  Description of Artificial Sequence: Synthetic oligonucleotide
  Target: LAMA2; (-) strand; PAM type: YTN; PAM sequence: CTG
acctcgtgatccacccgcct

SEQ ID NO: 244942 - DNA, 20 bp, Artificial Sequence
  Description of Artificial Sequence: Synthetic oligonucleotide
  Target: LAMA2; (-) strand; PAM type: YTN; PAM sequence: CTC
ctgacctcgtgatccacccg

SEQ ID NO: 244943 - DNA, 20 bp, Artificial Sequence
  Description of Artificial Sequence: Synthetic oligonucleotide
  Target: LAMA2; (-) strand; PAM type: YTN; PAM sequence: TTG
atctcctgacctcgtgatcc

SEQ ID NO: 244944 - DNA, 20 bp, Artificial Sequence
  Description of Artificial Sequence: Synthetic oligonucleotide
  Target: LAMA2; (-) strand; PAM type: YTN; PAM sequence: CTT
gatctcctgacctcgtgatc

SEQ ID NO: 244945 - DNA, 20 bp, Artificial Sequence
  Description of Artificial Sequence: Synthetic oligonucleotide
  Target: LAMA2; (-) strand; PAM type: YTN; PAM sequence: TTG
gccaggatggtcttgatctc

SEQ ID NO: 244946 - DNA, 20 bp, Artificial Sequence
  Description of Artificial Sequence: Synthetic oligonucleotide
  Target: LAMA2; (-) strand; PAM type: YTN; PAM sequence: TTC
gtcatgttggccaggatggt

SEQ ID NO: 244947 - DNA, 20 bp, Artificial Sequence
  Description of Artificial Sequence: Synthetic oligonucleotide
  Target: LAMA2; (-) strand; PAM type: YTN; PAM sequence: TTT
cgtcatgttggccaggatgg

SEQ ID NO: 244948 - DNA, 20 bp, Artificial Sequence
  Description of Artificial Sequence: Synthetic oligonucleotide
  Target: LAMA2; (-) strand; PAM type: YTN; PAM sequence: TTA
gtacagacagggtttcgtca

SEQ ID NO: 244949 - DNA, 20 bp, Artificial Sequence
  Description of Artificial Sequence: Synthetic oligonucleotide
  Target: LAMA2; (-) strand; PAM type: YTN; PAM sequence: TTT
agtacagacagggtttcgtc

SEQ ID NO: 244950 - DNA, 20 bp, Artificial Sequence
  Description of Artificial Sequence: Synthetic oligonucleotide
  Target: LAMA2; (-) strand; PAM type: YTN; PAM sequence: TTT
tagtacagacagggtttcgt

SEQ ID NO: 244951 - DNA, 20 bp, Artificial Sequence
  Description of Artificial Sequence: Synthetic oligonucleotide
  Target: LAMA2; (-) strand; PAM type: YTN; PAM sequence: TTT
ttagtacagacagggtttcg

SEQ ID NO: 244952 - DNA, 20 bp, Artificial Sequence
  Description of Artificial Sequence: Synthetic oligonucleotide
  Target: LAMA2; (-) strand; PAM type: YTN; PAM sequence: TTG
tatttttagtacagacaggg

SEQ ID NO: 244953 - DNA, 20 bp, Artificial Sequence
  Description of Artificial Sequence: Synthetic oligonucleotide
  Target: LAMA2; (-) strand; PAM type: YTN; PAM sequence: TTT
gtatttttagtacagacagg

SEQ ID NO: 244954 - DNA, 20 bp, Artificial Sequence
  Description of Artificial Sequence: Synthetic oligonucleotide
  Target: LAMA2; (-) strand; PAM type: YTN; PAM sequence: TTT
tgtatttttagtacagacag

SEQ ID NO: 244955 - DNA, 20 bp, Artificial Sequence
  Description of Artificial Sequence: Synthetic oligonucleotide
  Target: LAMA2; (-) strand; PAM type: YTN; PAM sequence: TTT
ttgtatttttagtacagaca

SEQ ID NO: 244956 - DNA, 20 bp, Artificial Sequence
  Description of Artificial Sequence: Synthetic oligonucleotide
  Target: LAMA2; (-) strand; PAM type: YTN; PAM sequence: TTA
caggcacacgccaccatacc

SEQ ID NO: 244957 - DNA, 20 bp, Artificial Sequence
  Description of Artificial Sequence: Synthetic oligonucleotide
  Target: LAMA2; (-) strand; PAM type: YTN; PAM sequence: CTG
ggattacaggcacacgccac

SEQ ID NO: 244958 - DNA, 20 bp, Artificial Sequence
  Description of Artificial Sequence: Synthetic oligonucleotide
  Target: LAMA2; (-) strand; PAM type: YTN; PAM sequence: CTC
ccaagtagctgggattacag

SEQ ID NO: 244959 - DNA, 20 bp, Artificial Sequence
  Description of Artificial Sequence: Synthetic oligonucleotide
  Target: LAMA2; (-) strand; PAM type: YTN; PAM sequence: CTC
agcctcccaagtagctggga

SEQ ID NO: 244960 - DNA, 20 bp, Artificial Sequence
  Description of Artificial Sequence: Synthetic oligonucleotide
  Target: LAMA2; (-) strand; PAM type: YTN; PAM sequence: CTG
cctcagcctcccaagtagct

SEQ ID NO: 244961 - DNA, 20 bp, Artificial Sequence
  Description of Artificial Sequence: Synthetic oligonucleotide
  Target: LAMA2; (-) strand; PAM type: YTN; PAM sequence: CTC
ctgcctcagcctcccaagta

SEQ ID NO: 244962 - DNA, 20 bp, Artificial Sequence
  Description of Artificial Sequence: Synthetic oligonucleotide
  Target: LAMA2; (-) strand; PAM type: YTN; PAM sequence: TTC
tcctgcctcagcctcccaag

SEQ ID NO: 244963 - DNA, 20 bp, Artificial Sequence
  Description of Artificial Sequence: Synthetic oligonucleotide
  Target: LAMA2; (-) strand; PAM type: YTN; PAM sequence: TTC
aagcgattctcctgcctcag

SEQ ID NO: 244964 - DNA, 20 bp, Artificial Sequence
  Description of Artificial Sequence: Synthetic oligonucleotide
  Target: LAMA2; (-) strand; PAM type: YTN; PAM sequence: CTG
ggttcaagcgattctcctgc

SEQ ID NO: 244965 - DNA, 20 bp, Artificial Sequence
  Description of Artificial Sequence: Synthetic oligonucleotide
  Target: LAMA2; (-) strand; PAM type: YTN; PAM sequence: CTC
ctgggttcaagcgattctcc

SEQ ID NO: 244966 - DNA, 20 bp, Artificial Sequence
  Description of Artificial Sequence: Synthetic oligonucleotide
  Target: LAMA2; (-) strand; PAM type: YTN; PAM sequence: CTC
cgcctcctgggttcaagcga

SEQ ID NO: 244967 - DNA, 20 bp, Artificial Sequence
  Description of Artificial Sequence: Synthetic oligonucleotide
  Target: LAMA2; (-) strand; PAM type: YTN; PAM sequence: CTG
caacctccgcctcctgggtt

SEQ ID NO: 244968 - DNA, 20 bp, Artificial Sequence
  Description of Artificial Sequence: Synthetic oligonucleotide
  Target: LAMA2; (-) strand; PAM type: YTN; PAM sequence: CTC
actgcaacctccgcctcctg

SEQ ID NO: 244969 - DNA, 20 bp, Artificial Sequence
  Description of Artificial Sequence: Synthetic oligonucleotide
  Target: LAMA2; (-) strand; PAM type: YTN; PAM sequence: CTC
agctcactgcaacctccgcc

SEQ ID NO: 244970 - DNA, 20 bp, Artificial Sequence
  Description of Artificial Sequence: Synthetic oligonucleotide
  Target: LAMA2; (-) strand; PAM type: YTN; PAM sequence: CTG
gagtgcagaggcacgatctc

SEQ ID NO: 244971 - DNA, 20 bp, Artificial Sequence
  Description of Artificial Sequence: Synthetic oligonucleotide
  Target: LAMA2; (-) strand; PAM type: YTN; PAM sequence: CTG
tcaccaggctggagtgcaga

SEQ ID NO: 244972 - DNA, 20 bp, Artificial Sequence
  Description of Artificial Sequence: Synthetic oligonucleotide
  Target: LAMA2; (-) strand; PAM type: YTN; PAM sequence: CTC
tgtcaccaggctggagtgca

SEQ ID NO: 244973 - DNA, 20 bp, Artificial Sequence
  Description of Artificial Sequence: Synthetic oligonucleotide
  Target: LAMA2; (-) strand; PAM type: YTN; PAM sequence: CTC
gctctgtcaccaggctggag

SEQ ID NO: 244974 - DNA, 20 bp, Artificial Sequence
  Description of Artificial Sequence: Synthetic oligonucleotide
  Target: LAMA2; (-) strand; PAM type: YTN; PAM sequence: TTG
agatggagtctcgctctgtc

SEQ ID NO: 244975 - DNA, 20 bp, Artificial Sequence
  Description of Artificial Sequence: Synthetic oligonucleotide
  Target: LAMA2; (-) strand; PAM type: YTN; PAM sequence: TTT
gagatggagtctcgctctgt

SEQ ID NO: 244976 - DNA, 20 bp, Artificial Sequence
  Description of Artificial Sequence: Synthetic oligonucleotide
  Target: LAMA2; (-) strand; PAM type: YTN; PAM sequence: TTT
tgagatggagtctcgctctg

SEQ ID NO: 244977 - DNA, 20 bp, Artificial Sequence
  Description of Artificial Sequence: Synthetic oligonucleotide
  Target: LAMA2; (-) strand; PAM type: YTN; PAM sequence: TTT
ttgagatggagtctcgctct

SEQ ID NO: 244978 - DNA, 20 bp, Artificial Sequence
  Description of Artificial Sequence: Synthetic oligonucleotide
  Target: LAMA2; (-) strand; PAM type: YTN; PAM sequence: TTT
tttgagatggagtctcgctc

SEQ ID NO: 244979 - DNA, 20 bp, Artificial Sequence
  Description of Artificial Sequence: Synthetic oligonucleotide
  Target: LAMA2; (-) strand; PAM type: YTN; PAM sequence: TTT
ttttgagatggagtctcgct

SEQ ID NO: 244980 - DNA, 20 bp, Artificial Sequence
  Description of Artificial Sequence: Synthetic oligonucleotide
  Target: LAMA2; (-) strand; PAM type: YTN; PAM sequence: TTT
tttttgagatggagtctcgc

SEQ ID NO: 244981 - DNA, 20 bp, Artificial Sequence
  Description of Artificial Sequence: Synthetic oligonucleotide
  Target: LAMA2; (-) strand; PAM type: YTN; PAM sequence: TTT
ttttttgagatggagtctcg

SEQ ID NO: 244982 - DNA, 20 bp, Artificial Sequence
  Description of Artificial Sequence: Synthetic oligonucleotide
  Target: LAMA2; (-) strand; PAM type: YTN; PAM sequence: TTT
tttttttgagatggagtctc

SEQ ID NO: 244983 - DNA, 20 bp, Artificial Sequence
  Description of Artificial Sequence: Synthetic oligonucleotide
  Target: LAMA2; (-) strand; PAM type: YTN; PAM sequence: TTA
ttttttttttgagatggagt

SEQ ID NO: 244984 - DNA, 20 bp, Artificial Sequence
  Description of Artificial Sequence: Synthetic oligonucleotide
  Target: LAMA2; (-) strand; PAM type: YTN; PAM sequence: TTA
ttattttttttttgagatgg

SEQ ID NO: 244985 - DNA, 20 bp, Artificial Sequence
  Description of Artificial Sequence: Synthetic oligonucleotide
  Target: LAMA2; (-) strand; PAM type: YTN; PAM sequence: TTA
ttattattttttttttgaga

SEQ ID NO: 244986 - DNA, 20 bp, Artificial Sequence
  Description of Artificial Sequence: Synthetic oligonucleotide
  Target: LAMA2; (-) strand; PAM type: YTN; PAM sequence: TTA
ttattattattttttttttg

SEQ ID NO: 244987 - DNA, 20 bp, Artificial Sequence
  Description of Artificial Sequence: Synthetic oligonucleotide
  Target: LAMA2; (-) strand; PAM type: YTN; PAM sequence: TTA
ttattattattatttttttt

SEQ ID NO: 244988 - DNA, 20 bp, Artificial Sequence
  Description of Artificial Sequence: Synthetic oligonucleotide
  Target: LAMA2; (-) strand; PAM type: YTN; PAM sequence: CTT
attattattattattttttt

SEQ ID NO: 244989 - DNA, 20 bp, Artificial Sequence
  Description of Artificial Sequence: Synthetic oligonucleotide
  Target: LAMA2; (-) strand; PAM type: YTN; PAM sequence: TTA
cccttattattattattatt

SEQ ID NO: 244990 - DNA, 20 bp, Artificial Sequence
  Description of Artificial Sequence: Synthetic oligonucleotide
  Target: LAMA2; (-) strand; PAM type: YTN; PAM sequence: TTT
acccttattattattattat

SEQ ID NO: 244991 - DNA, 20 bp, Artificial Sequence
  Description of Artificial Sequence: Synthetic oligonucleotide
  Target: LAMA2; (-) strand; PAM type: YTN; PAM sequence: TTG
tatttacccttattattatt

SEQ ID NO: 244992 - DNA, 20 bp, Artificial Sequence
  Description of Artificial Sequence: Synthetic oligonucleotide
  Target: LAMA2; (-) strand; PAM type: YTN; PAM sequence: CTT
gtatttacccttattattat

SEQ ID NO: 244993 - DNA, 20 bp, Artificial Sequence
  Description of Artificial Sequence: Synthetic oligonucleotide
  Target: LAMA2; (-) strand; PAM type: YTN; PAM sequence: CTC
cttgtatttacccttattat

SEQ ID NO: 244994 - DNA, 20 bp, Artificial Sequence
  Description of Artificial Sequence: Synthetic oligonucleotide
  Target: LAMA2; (-) strand; PAM type: YTN; PAM sequence: TTC
aaaacacactccttgtattt

SEQ ID NO: 244995 - DNA, 20 bp, Artificial Sequence
  Description of Artificial Sequence: Synthetic oligonucleotide
  Target: LAMA2; (-) strand; PAM type: YTN; PAM sequence: TTG
tattcaaaacacactccttg

SEQ ID NO: 244996 - DNA, 20 bp, Artificial Sequence
  Description of Artificial Sequence: Synthetic oligonucleotide
  Target: LAMA2; (-) strand; PAM type: YTN; PAM sequence: TTT
gtattcaaaacacactcctt

SEQ ID NO: 244997 - DNA, 20 bp, Artificial Sequence
  Description of Artificial Sequence: Synthetic oligonucleotide
  Target: LAMA2; (-) strand; PAM type: YTN; PAM sequence: TTT
tgtattcaaaacacactcct

SEQ ID NO: 244998 - DNA, 20 bp, Artificial Sequence
  Description of Artificial Sequence: Synthetic oligonucleotide
  Target: LAMA2; (-) strand; PAM type: YTN; PAM sequence: CTA
aaaatagatattttgtattc

SEQ ID NO: 244999 - DNA, 20 bp, Artificial Sequence
  Description of Artificial Sequence: Synthetic oligonucleotide
  Target: LAMA2; (-) strand; PAM type: YTN; PAM sequence: TTC
taaaaatagatattttgtat

SEQ ID NO: 245000 - DNA, 20 bp, Artificial Sequence
  Description of Artificial Sequence: Synthetic oligonucleotide
  Target: LAMA2; (-) strand; PAM type: YTN; PAM sequence: TTG
agattctaaaaatagatatt

SEQ ID NO: 245001 - DNA, 20 bp, Artificial Sequence
  Description of Artificial Sequence: Synthetic oligonucleotide
  Target: LAMA2; (-) strand; PAM type: YTN; PAM sequence: TTT
gagattctaaaaatagatat

SEQ ID NO: 245002 - DNA, 20 bp, Artificial Sequence
  Description of Artificial Sequence: Synthetic oligonucleotide
  Target: LAMA2; (-) strand; PAM type: YTN; PAM sequence: CTC
atgggtttgagattctaaaa

SEQ ID NO: 245003 - DNA, 20 bp, Artificial Sequence
  Description of Artificial Sequence: Synthetic oligonucleotide
  Target: LAMA2; (-) strand; PAM type: YTN; PAM sequence: TTA
tatatggaagaaagtaactc

SEQ ID NO: 245004 - DNA, 20 bp, Artificial Sequence
  Description of Artificial Sequence: Synthetic oligonucleotide
  Target: LAMA2; (-) strand; PAM type: YTN; PAM sequence: CTT
atatatggaagaaagtaact

SEQ ID NO: 245005 - DNA, 20 bp, Artificial Sequence
  Description of Artificial Sequence: Synthetic oligonucleotide
  Target: LAMA2; (-) strand; PAM type: YTN; PAM sequence: TTG
ggacttatatatggaagaaa

SEQ ID NO: 245006 - DNA, 20 bp, Artificial Sequence
  Description of Artificial Sequence: Synthetic oligonucleotide
  Target: LAMA2; (-) strand; PAM type: YTN; PAM sequence: TTA
tagaaaacatgttgggactt

SEQ ID NO: 245007 - DNA, 20 bp, Artificial Sequence
  Description of Artificial Sequence: Synthetic oligonucleotide
  Target: LAMA2; (-) strand; PAM type: YTN; PAM sequence: CTG
attatagaaaacatgttggg

SEQ ID NO: 245008 - DNA, 20 bp, Artificial Sequence
  Description of Artificial Sequence: Synthetic oligonucleotide
  Target: LAMA2; (-) strand; PAM type: YTN; PAM sequence: CTA
atagacatagactgattata

SEQ ID NO: 245009 - DNA, 20 bp, Artificial Sequence
  Description of Artificial Sequence: Synthetic oligonucleotide
  Target: LAMA2; (-) strand; PAM type: YTN; PAM sequence: TTA
cacatctaatagacatagac

SEQ ID NO: 245010 - DNA, 20 bp, Artificial Sequence
  Description of Artificial Sequence: Synthetic oligonucleotide
  Target: LAMA2; (-) strand; PAM type: YTN; PAM sequence: TTA
atataattacacatctaata

SEQ ID NO: 245011 - DNA, 20 bp, Artificial Sequence
  Description of Artificial Sequence: Synthetic oligonucleotide
  Target: LAMA2; (-) strand; PAM type: YTN; PAM sequence: TTA
cataattaatataattacac

SEQ ID NO: 245012 - DNA, 20 bp, Artificial Sequence
  Description of Artificial Sequence: Synthetic oligonucleotide
  Target: LAMA2; (-) strand; PAM type: YTN; PAM sequence: TTT
acataattaatataattaca

SEQ ID NO: 245013 - DNA, 20 bp, Artificial Sequence
  Description of Artificial Sequence: Synthetic oligonucleotide
  Target: LAMA2; (-) strand; PAM type: YTN; PAM sequence: TTC
atgtgcatttacataattaa

SEQ ID NO: 245014 - DNA, 20 bp, Artificial Sequence
  Description of Artificial Sequence: Synthetic oligonucleotide
  Target: LAMA2; (-) strand; PAM type: YTN; PAM sequence: TTG
gtattcatgtgcatttacat

SEQ ID NO: 245015 - DNA, 20 bp, Artificial Sequence
  Description of Artificial Sequence: Synthetic oligonucleotide
  Target: LAMA2; (-) strand; PAM type: YTN; PAM sequence: TTT
ggtattcatgtgcatttaca

SEQ ID NO: 245016 - DNA, 20 bp, Artificial Sequence
  Description of Artificial Sequence: Synthetic oligonucleotide
  Target: LAMA2; (-) strand; PAM type: YTN; PAM sequence: TTA
accaaataatttggtattca

SEQ ID NO: 245017 - DNA, 20 bp, Artificial Sequence
  Description of Artificial Sequence: Synthetic oligonucleotide
  Target: LAMA2; (-) strand; PAM type: YTN; PAM sequence: TTC
gaagattaaccaaataattt

SEQ ID NO: 245018 - DNA, 20 bp, Artificial Sequence
  Description of Artificial Sequence: Synthetic oligonucleotide
  Target: LAMA2; (-) strand; PAM type: YTN; PAM sequence: CTA
aaagaaattcgaagattaac

SEQ ID NO: 245019 - DNA, 20 bp, Artificial Sequence
  Description of Artificial Sequence: Synthetic oligonucleotide
  Target: LAMA2; (-) strand; PAM type: YTN; PAM sequence: TTG
ctaaaagaaattcgaagatt

SEQ ID NO: 245020 - DNA, 20 bp, Artificial Sequence
  Description of Artificial Sequence: Synthetic oligonucleotide
  Target: LAMA2; (-) strand; PAM type: YTN; PAM sequence: CTG
gaggagagtatataattgct

SEQ ID NO: 245021 - DNA, 20 bp, Artificial Sequence
  Description of Artificial Sequence: Synthetic oligonucleotide
  Target: LAMA2; (-) strand; PAM type: YTN; PAM sequence: CTA
acctggaggagagtatataa

SEQ ID NO: 245022 - DNA, 20 bp, Artificial Sequence
  Description of Artificial Sequence: Synthetic oligonucleotide
  Target: LAMA2; (-) strand; PAM type: YTN; PAM sequence: CTC
aatctaacctggaggagagt

SEQ ID NO: 245023 - DNA, 20 bp, Artificial Sequence
  Description of Artificial Sequence: Synthetic oligonucleotide
  Target: LAMA2; (-) strand; PAM type: YTN; PAM sequence: TTG
aagggaaagctcaatctaac

SEQ ID NO: 245024 - DNA, 20 bp, Artificial Sequence
  Description of Artificial Sequence: Synthetic oligonucleotide
  Target: LAMA2; (-) strand; PAM type: YTN; PAM sequence: CTG
agttgaagggaaagctcaat

SEQ ID NO: 245025 - DNA, 20 bp, Artificial Sequence
  Description of Artificial Sequence: Synthetic oligonucleotide
  Target: LAMA2; (-) strand; PAM type: YTN; PAM sequence: CTC
tgagttgaagggaaagctca

SEQ ID NO: 245026 - DNA, 20 bp, Artificial Sequence
  Description of Artificial Sequence: Synthetic oligonucleotide
  Target: LAMA2; (-) strand; PAM type: YTN; PAM sequence: TTC
tctgagttgaagggaaagct

SEQ ID NO: 245027 - DNA, 20 bp, Artificial Sequence
  Description of Artificial Sequence: Synthetic oligonucleotide
  Target: LAMA2; (-) strand; PAM type: YTN; PAM sequence: TTT
ctctgagttgaagggaaagc

SEQ ID NO: 245028 - DNA, 20 bp, Artificial Sequence
  Description of Artificial Sequence: Synthetic oligonucleotide
  Target: LAMA2; (-) strand; PAM type: YTN; PAM sequence: CTG
atttctctgagttgaaggga

SEQ ID NO: 245029 - DNA, 20 bp, Artificial Sequence
  Description of Artificial Sequence: Synthetic oligonucleotide
  Target: LAMA2; (-) strand; PAM type: YTN; PAM sequence: TTG
acactgatttctctgagttg

SEQ ID NO: 245030 - DNA, 20 bp, Artificial Sequence
  Description of Artificial Sequence: Synthetic oligonucleotide
  Target: LAMA2; (-) strand; PAM type: YTN; PAM sequence: CTG
ttgacactgatttctctgag

SEQ ID NO: 245031 - DNA, 20 bp, Artificial Sequence
  Description of Artificial Sequence: Synthetic oligonucleotide
  Target: LAMA2; (-) strand; PAM type: YTN; PAM sequence: TTA
cagaaggtagcctgttgaca

SEQ ID NO: 245032 - DNA, 20 bp, Artificial Sequence
  Description of Artificial Sequence: Synthetic oligonucleotide
  Target: LAMA2; (-) strand; PAM type: YTN; PAM sequence: CTT
acagaaggtagcctgttgac

SEQ ID NO: 245033 - DNA, 20 bp, Artificial Sequence
  Description of Artificial Sequence: Synthetic oligonucleotide
  Target: LAMA2; (-) strand; PAM type: YTN; PAM sequence: CTG
gtagtcttacagaaggtagc

SEQ ID NO: 245034 - DNA, 20 bp, Artificial Sequence
  Description of Artificial Sequence: Synthetic oligonucleotide
  Target: LAMA2; (-) strand; PAM type: YTN; PAM sequence: CTC
tggtagtcttacagaaggta

SEQ ID NO: 245035 - DNA, 20 bp, Artificial Sequence
  Description of Artificial Sequence: Synthetic oligonucleotide
  Target: LAMA2; (-) strand; PAM type: YTN; PAM sequence: CTC
tctggtagtcttacagaagg

SEQ ID NO: 245036 - DNA, 20 bp, Artificial Sequence
  Description of Artificial Sequence: Synthetic oligonucleotide
  Target: LAMA2; (-) strand; PAM type: YTN; PAM sequence: TTG
tacagagtaatgcatagctc

SEQ ID NO: 245037 - DNA, 20 bp, Artificial Sequence
  Description of Artificial Sequence: Synthetic oligonucleotide
  Target: LAMA2; (-) strand; PAM type: YTN; PAM sequence: TTT
gtacagagtaatgcatagct

SEQ ID NO: 245038 - DNA, 20 bp, Artificial Sequence
  Description of Artificial Sequence: Synthetic oligonucleotide
  Target: LAMA2; (-) strand; PAM type: YTN; PAM sequence: CTT
tgtacagagtaatgcatagc

SEQ ID NO: 245039 - DNA, 20 bp, Artificial Sequence
  Description of Artificial Sequence: Synthetic oligonucleotide
  Target: LAMA2; (-) strand; PAM type: YTN; PAM sequence: TTA
taggagaaatatcctttgta

SEQ ID NO: 245040 - DNA, 20 bp, Artificial Sequence
  Description of Artificial Sequence: Synthetic oligonucleotide
  Target: LAMA2; (-) strand; PAM type: YTN; PAM sequence: TTT
ataggagaaatatcctttgt

SEQ ID NO: 245041 - DNA, 20 bp, Artificial Sequence
  Description of Artificial Sequence: Synthetic oligonucleotide
  Target: LAMA2; (-) strand; PAM type: YTN; PAM sequence: CTA
tttataggagaaatatcctt

SEQ ID NO: 245042 - DNA, 20 bp, Artificial Sequence
  Description of Artificial Sequence: Synthetic oligonucleotide
  Target: LAMA2; (-) strand; PAM type: YTN; PAM sequence: TTG
aaagcactatttataggaga

SEQ ID NO: 245043 - DNA, 20 bp, Artificial Sequence
  Description of Artificial Sequence: Synthetic oligonucleotide
  Target: LAMA2; (-) strand; PAM type: YTN; PAM sequence: CTA
ttgaaagcactatttatagg

SEQ ID NO: 245044 - DNA, 20 bp, Artificial Sequence
  Description of Artificial Sequence: Synthetic oligonucleotide
  Target: LAMA2; (-) strand; PAM type: YTN; PAM sequence: CTC
tattgaaagcactatttata

SEQ ID NO: 245045 - DNA, 20 bp, Artificial Sequence
  Description of Artificial Sequence: Synthetic oligonucleotide
  Target: LAMA2; (-) strand; PAM type: YTN; PAM sequence: TTC
tctattgaaagcactattta

SEQ ID NO: 245046 - DNA, 20 bp, Artificial Sequence
  Description of Artificial Sequence: Synthetic oligonucleotide
  Target: LAMA2; (-) strand; PAM type: YTN; PAM sequence: TTT
ctctattgaaagcactattt

SEQ ID NO: 245047 - DNA, 20 bp, Artificial Sequence
  Description of Artificial Sequence: Synthetic oligonucleotide
  Target: LAMA2; (-) strand; PAM type: YTN; PAM sequence: TTT
tctctattgaaagcactatt

SEQ ID NO: 245048 - DNA, 20 bp, Artificial Sequence
  Description of Artificial Sequence: Synthetic oligonucleotide
  Target: LAMA2; (-) strand; PAM type: YTN; PAM sequence: CTG
acaacatgataacagatttt

SEQ ID NO: 245049 - DNA, 20 bp, Artificial Sequence
  Description of Artificial Sequence: Synthetic oligonucleotide
  Target: LAMA2; (-) strand; PAM type: YTN; PAM sequence: TTA
ctgacaacatgataacagat

SEQ ID NO: 245050 - DNA, 20 bp, Artificial Sequence
  Description of Artificial Sequence: Synthetic oligonucleotide
  Target: LAMA2; (-) strand; PAM type: YTN; PAM sequence: TTT
actgacaacatgataacaga

SEQ ID NO: 245051 - DNA, 20 bp, Artificial Sequence
  Description of Artificial Sequence: Synthetic oligonucleotide
  Target: LAMA2; (-) strand; PAM type: YTN; PAM sequence: TTG
aatttactgacaacatgata

SEQ ID NO: 245052 - DNA, 20 bp, Artificial Sequence
  Description of Artificial Sequence: Synthetic oligonucleotide
  Target: LAMA2; (-) strand; PAM type: YTN; PAM sequence: TTT
gaatttactgacaacatgat

SEQ ID NO: 245053 - DNA, 20 bp, Artificial Sequence
  Description of Artificial Sequence: Synthetic oligonucleotide
  Target: LAMA2; (-) strand; PAM type: YTN; PAM sequence: TTC
caaaagagaaaatatttgaa

SEQ ID NO: 245054 - DNA, 20 bp, Artificial Sequence
  Description of Artificial Sequence: Synthetic oligonucleotide
  Target: LAMA2; (-) strand; PAM type: YTN; PAM sequence: TTA
ataggaacagagtattccaa

SEQ ID NO: 245055 - DNA, 20 bp, Artificial Sequence
  Description of Artificial Sequence: Synthetic oligonucleotide
  Target: LAMA2; (-) strand; PAM type: YTN; PAM sequence: TTT
aataggaacagagtattcca

SEQ ID NO: 245056 - DNA, 20 bp, Artificial Sequence
  Description of Artificial Sequence: Synthetic oligonucleotide
  Target: LAMA2; (-) strand; PAM type: YTN; PAM sequence: TTT
taataggaacagagtattcc

SEQ ID NO: 245057 - DNA, 20 bp, Artificial Sequence
  Description of Artificial Sequence: Synthetic oligonucleotide
  Target: LAMA2; (-) strand; PAM type: YTN; PAM sequence: TTG
ttttaataggaacagagtat

SEQ ID NO: 245058 - DNA, 20 bp, Artificial Sequence
  Description of Artificial Sequence: Synthetic oligonucleotide
  Target: LAMA2; (-) strand; PAM type: YTN; PAM sequence: CTT
gttttaataggaacagagta

SEQ ID NO: 245059 - DNA, 20 bp, Artificial Sequence
  Description of Artificial Sequence: Synthetic oligonucleotide
  Target: LAMA2; (-) strand; PAM type: YTN; PAM sequence: CTC
ttgttttaataggaacagag

SEQ ID NO: 245060 - DNA, 20 bp, Artificial Sequence
  Description of Artificial Sequence: Synthetic oligonucleotide
  Target: LAMA2; (-) strand; PAM type: YTN; PAM sequence: TTC
aaagaaggaaacagctcttg

SEQ ID NO: 245061 - DNA, 20 bp, Artificial Sequence
  Description of Artificial Sequence: Synthetic oligonucleotide
  Target: LAMA2; (-) strand; PAM type: YTN; PAM sequence: TTT
caaagaaggaaacagctctt

SEQ ID NO: 245062 - DNA, 20 bp, Artificial Sequence
  Description of Artificial Sequence: Synthetic oligonucleotide
  Target: LAMA2; (-) strand; PAM type: YTN; PAM sequence: TTG
tttcaaagaaggaaacagct

SEQ ID NO: 245063 - DNA, 20 bp, Artificial Sequence
  Description of Artificial Sequence: Synthetic oligonucleotide
  Target: LAMA2; (-) strand; PAM type: YTN; PAM sequence: CTT
gtttcaaagaaggaaacagc

SEQ ID NO: 245064 - DNA, 20 bp, Artificial Sequence
  Description of Artificial Sequence: Synthetic oligonucleotide
  Target: LAMA2; (-) strand; PAM type: YTN; PAM sequence: TTA
accacataaatataaataac

SEQ ID NO: 245065 - DNA, 20 bp, Artificial Sequence
  Description of Artificial Sequence: Synthetic oligonucleotide
  Target: LAMA2; (-) strand; PAM type: YTN; PAM sequence: CTT
aaccacataaatataaataa

SEQ ID NO: 245066 - DNA, 20 bp, Artificial Sequence
  Description of Artificial Sequence: Synthetic oligonucleotide
  Target: LAMA2; (-) strand; PAM type: YTN; PAM sequence: TTA
agataggatatcttaaccac

SEQ ID NO: 245067 - DNA, 20 bp, Artificial Sequence
  Description of Artificial Sequence: Synthetic oligonucleotide
  Target: LAMA2; (-) strand; PAM type: YTN; PAM sequence: TTT
aagataggatatcttaacca

SEQ ID NO: 245068 - DNA, 20 bp, Artificial Sequence
  Description of Artificial Sequence: Synthetic oligonucleotide
  Target: LAMA2; (-) strand; PAM type: YTN; PAM sequence: TTA
tggtttaagataggatatct

SEQ ID NO: 245069 - DNA, 20 bp, Artificial Sequence
  Description of Artificial Sequence: Synthetic oligonucleotide
  Target: LAMA2; (-) strand; PAM type: YTN; PAM sequence: CTT
atggtttaagataggatatc

SEQ ID NO: 245070 - DNA, 20 bp, Artificial Sequence
  Description of Artificial Sequence: Synthetic oligonucleotide
  Target: LAMA2; (-) strand; PAM type: YTN; PAM sequence: TTC
aaaaaggtcttatggtttaa

SEQ ID NO: 245071 - DNA, 20 bp, Artificial Sequence
  Description of Artificial Sequence: Synthetic oligonucleotide
  Target: LAMA2; (-) strand; PAM type: YTN; PAM sequence: CTG
tatgtgaagtattcaaaaag

SEQ ID NO: 245072 - DNA, 20 bp, Artificial Sequence
  Description of Artificial Sequence: Synthetic oligonucleotide
  Target: LAMA2; (-) strand; PAM type: YTN; PAM sequence: TTC
tgtatgtgaagtattcaaaa

SEQ ID NO: 245073 - DNA, 20 bp, Artificial Sequence
  Description of Artificial Sequence: Synthetic oligonucleotide
  Target: LAMA2; (-) strand; PAM type: YTN; PAM sequence: TTT
ctgtatgtgaagtattcaaa

SEQ ID NO: 245074 - DNA, 20 bp, Artificial Sequence
  Description of Artificial Sequence: Synthetic oligonucleotide
  Target: LAMA2; (-) strand; PAM type: YTN; PAM sequence: TTT
tctgtatgtgaagtattcaa

SEQ ID NO: 245075 - DNA, 20 bp, Artificial Sequence
  Description of Artificial Sequence: Synthetic oligonucleotide
  Target: LAMA2; (-) strand; PAM type: YTN; PAM sequence: TTT
ttctgtatgtgaagtattca

SEQ ID NO: 245076 - DNA, 20 bp, Artificial Sequence
  Description of Artificial Sequence: Synthetic oligonucleotide
  Target: LAMA2; (-) strand; PAM type: YTN; PAM sequence: TTC
atttttctgtatgtgaagta

SEQ ID NO: 245077 - DNA, 20 bp, Artificial Sequence
  Description of Artificial Sequence: Synthetic oligonucleotide
  Target: LAMA2; (-) strand; PAM type: YTN; PAM sequence: TTT
catttttctgtatgtgaagt

SEQ ID NO: 245078 - DNA, 20 bp, Artificial Sequence
  Description of Artificial Sequence: Synthetic oligonucleotide
  Target: LAMA2; (-) strand; PAM type: YTN; PAM sequence: TTT
tcatttttctgtatgtgaag

SEQ ID NO: 245079 - DNA, 20 bp, Artificial Sequence
  Description of Artificial Sequence: Synthetic oligonucleotide
  Target: LAMA2; (-) strand; PAM type: YTN; PAM sequence: TTT
ttcatttttctgtatgtgaa

SEQ ID NO: 245080 - DNA, 20 bp, Artificial Sequence
  Description of Artificial Sequence: Synthetic oligonucleotide
  Target: LAMA2; (-) strand; PAM type: YTN; PAM sequence: TTT
tttcatttttctgtatgtga

SEQ ID NO: 245081 - DNA, 20 bp, Artificial Sequence
  Description of Artificial Sequence: Synthetic oligonucleotide
  Target: LAMA2; (-) strand; PAM type: YTN; PAM sequence: TTT
ttttcatttttctgtatgtg

SEQ ID NO: 245082 - DNA, 20 bp, Artificial Sequence
  Description of Artificial Sequence: Synthetic oligonucleotide
  Target: LAMA2; (-) strand; PAM type: YTN; PAM sequence: TTA
atttttttcatttttctgta

SEQ ID NO: 245083 - DNA, 20 bp, Artificial Sequence
  Description of Artificial Sequence: Synthetic oligonucleotide
  Target: LAMA2; (-) strand; PAM type: YTN; PAM sequence: TTT
aatttttttcatttttctgt

SEQ ID NO: 245084 - DNA, 20 bp, Artificial Sequence
  Description of Artificial Sequence: Synthetic oligonucleotide
  Target: LAMA2; (-) strand; PAM type: YTN; PAM sequence: TTG
tttaatttttttcatttttc

SEQ ID NO: 245085 - DNA, 20 bp, Artificial Sequence
  Description of Artificial Sequence: Synthetic oligonucleotide
  Target: LAMA2; (-) strand; PAM type: YTN; PAM sequence: TTT
gtttaatttttttcattttt

SEQ ID NO: 245086 - DNA, 20 bp, Artificial Sequence
  Description of Artificial Sequence: Synthetic oligonucleotide
  Target: LAMA2; (-) strand; PAM type: YTN; PAM sequence: CTG
atatttgtttaatttttttc

SEQ ID NO: 245087 - DNA, 20 bp, Artificial Sequence
  Description of Artificial Sequence: Synthetic oligonucleotide
  Target: LAMA2; (-) strand; PAM type: YTN; PAM sequence: CTC
tgatatttgtttaatttttt

SEQ ID NO: 245088 - DNA, 20 bp, Artificial Sequence
  Description of Artificial Sequence: Synthetic oligonucleotide
  Target: LAMA2; (-) strand; PAM type: YTN; PAM sequence: TTC
ccagcaactctgatatttgt

SEQ ID NO: 245089 - DNA, 20 bp, Artificial Sequence
  Description of Artificial Sequence: Synthetic oligonucleotide
  Target: LAMA2; (-) strand; PAM type: YTN; PAM sequence: CTG
gggttcccagcaactctgat

SEQ ID NO: 245090 - DNA, 20 bp, Artificial Sequence
  Description of Artificial Sequence: Synthetic oligonucleotide
  Target: LAMA2; (-) strand; PAM type: YTN; PAM sequence: TTA
tatcctggggttcccagcaa

SEQ ID NO: 245091 - DNA, 20 bp, Artificial Sequence
  Description of Artificial Sequence: Synthetic oligonucleotide
  Target: LAMA2; (-) strand; PAM type: YTN; PAM sequence: CTA
tccacagtagattatatcct

SEQ ID NO: 245092 - DNA, 20 bp, Artificial Sequence
  Description of Artificial Sequence: Synthetic oligonucleotide
  Target: LAMA2; (-) strand; PAM type: YTN; PAM sequence: CTA
tgaatgactatccacagtag

SEQ ID NO: 245093 - DNA, 20 bp, Artificial Sequence
  Description of Artificial Sequence: Synthetic oligonucleotide
  Target: LAMA2; (-) strand; PAM type: YTN; PAM sequence: TTG
tctatgaatgactatccaca

SEQ ID NO: 245094 - DNA, 20 bp, Artificial Sequence
  Description of Artificial Sequence: Synthetic oligonucleotide
  Target: LAMA2; (-) strand; PAM type: YTN; PAM sequence: TTT
gtctatgaatgactatccac

SEQ ID NO: 245095 - DNA, 20 bp, Artificial Sequence
  Description of Artificial Sequence: Synthetic oligonucleotide
  Target: LAMA2; (-) strand; PAM type: YTN; PAM sequence: CTT
tgtctatgaatgactatcca

SEQ ID NO: 245096 - DNA, 20 bp, Artificial Sequence
  Description of Artificial Sequence: Synthetic oligonucleotide
  Target: LAMA2; (-) strand; PAM type: YTN; PAM sequence: CTA
taaataggaggtgtctttgt

SEQ ID NO: 245097 - DNA, 20 bp, Artificial Sequence
  Description of Artificial Sequence: Synthetic oligonucleotide
  Target: LAMA2; (-) strand; PAM type: YTN; PAM sequence: CTG
tcccaagcctataaatagga

SEQ ID NO: 245098 - DNA, 20 bp, Artificial Sequence
  Description of Artificial Sequence: Synthetic oligonucleotide
  Target: LAMA2; (-) strand; PAM type: YTN; PAM sequence: CTG
aactgtcccaagcctataaa

SEQ ID NO: 245099 - DNA, 20 bp, Artificial Sequence
  Description of Artificial Sequence: Synthetic oligonucleotide
  Target: LAMA2; (-) strand; PAM type: YTN; PAM sequence: TTG
gagaagctgaactgtcccaa

SEQ ID NO: 245100 - DNA, 20 bp, Artificial Sequence
  Description of Artificial Sequence: Synthetic oligonucleotide
  Target: LAMA2; (-) strand; PAM type: YTN; PAM sequence: TTC
aagttggagaagctgaactg

SEQ ID NO: 245101 - DNA, 20 bp, Artificial Sequence
  Description of Artificial Sequence: Synthetic oligonucleotide
  Target: LAMA2; (-) strand; PAM type: YTN; PAM sequence: CTT
caagttggagaagctgaact

SEQ ID NO: 245102 - DNA, 20 bp, Artificial Sequence
  Description of Artificial Sequence: Synthetic oligonucleotide
  Target: LAMA2; (-) strand; PAM type: YTN; PAM sequence: CTC
ttcaagttggagaagctgaa

SEQ ID NO: 245103 - DNA, 20 bp, Artificial Sequence
  Description of Artificial Sequence: Synthetic oligonucleotide
  Target: LAMA2; (-) strand; PAM type: YTN; PAM sequence: CTC
tcttcaagttggagaagctg

SEQ ID NO: 245104 - DNA, 20 bp, Artificial Sequence
  Description of Artificial Sequence: Synthetic oligonucleotide
  Target: LAMA2; (-) strand; PAM type: YTN; PAM sequence: TTC
aaaactctcttcaagttgga

SEQ ID NO: 245105 - DNA, 20 bp, Artificial Sequence
  Description of Artificial Sequence: Synthetic oligonucleotide
  Target: LAMA2; (-) strand; PAM type: YTN; PAM sequence: CTT
caaaactctcttcaagttgg

SEQ ID NO: 245106 - DNA, 20 bp, Artificial Sequence
  Description of Artificial Sequence: Synthetic oligonucleotide
  Target: LAMA2; (-) strand; PAM type: YTN; PAM sequence: TTG
atcttcaaaactctcttcaa

SEQ ID NO: 245107 - DNA, 20 bp, Artificial Sequence
  Description of Artificial Sequence: Synthetic oligonucleotide
  Target: LAMA2; (-) strand; PAM type: YTN; PAM sequence: TTT
gatcttcaaaactctcttca

SEQ ID NO: 245108 - DNA, 20 bp, Artificial Sequence
  Description of Artificial Sequence: Synthetic oligonucleotide
  Target: LAMA2; (-) strand; PAM type: YTN; PAM sequence: TTG
tatttgatcttcaaaactct

SEQ ID NO: 245109 - DNA, 20 bp, Artificial Sequence
  Description of Artificial Sequence: Synthetic oligonucleotide
  Target: LAMA2; (-) strand; PAM type: YTN; PAM sequence: TTT
gtatttgatcttcaaaactc

SEQ ID NO: 245110 - DNA, 20 bp, Artificial Sequence
  Description of Artificial Sequence: Synthetic oligonucleotide
  Target: LAMA2; (-) strand; PAM type: YTN; PAM sequence: TTC
acaagacccatttgtatttg

SEQ ID NO: 245111 - DNA, 20 bp, Artificial Sequence
  Description of Artificial Sequence: Synthetic oligonucleotide
  Target: LAMA2; (-) strand; PAM type: YTN; PAM sequence: CTT
cacaagacccatttgtattt

SEQ ID NO: 245112 - DNA, 20 bp, Artificial Sequence
  Description of Artificial Sequence: Synthetic oligonucleotide
  Target: LAMA2; (-) strand; PAM type: YTN; PAM sequence: TTG
aaacttcacaagacccattt

SEQ ID NO: 245113 - DNA, 20 bp, Artificial Sequence
  Description of Artificial Sequence: Synthetic oligonucleotide
  Target: LAMA2; (-) strand; PAM type: YTN; PAM sequence: TTT
gaaacttcacaagacccatt

SEQ ID NO: 245114 - DNA, 20 bp, Artificial Sequence
  Description of Artificial Sequence: Synthetic oligonucleotide
  Target: LAMA2; (-) strand; PAM type: YTN; PAM sequence: TTT
tgaaacttcacaagacccat

SEQ ID NO: 245115 - DNA, 20 bp, Artificial Sequence
  Description of Artificial Sequence: Synthetic oligonucleotide
  Target: LAMA2; (-) strand; PAM type: YTN; PAM sequence: TTT
ttgaaacttcacaagaccca

SEQ ID NO: 245116 - DNA, 20 bp, Artificial Sequence
  Description of Artificial Sequence: Synthetic oligonucleotide
  Target: LAMA2; (-) strand; PAM type: YTN; PAM sequence: TTT
tttgaaacttcacaagaccc

SEQ ID NO: 245117 - DNA, 20 bp, Artificial Sequence
  Description of Artificial Sequence: Synthetic oligonucleotide
  Target: LAMA2; (-) strand; PAM type: YTN; PAM sequence: TTG
agaaacattttttgaaactt

SEQ ID NO: 245118 - DNA, 20 bp, Artificial Sequence
  Description of Artificial Sequence: Synthetic oligonucleotide
  Target: LAMA2; (-) strand; PAM type: YTN; PAM sequence: TTT
gagaaacattttttgaaact

SEQ ID NO: 245119 - DNA, 20 bp, Artificial Sequence
  Description of Artificial Sequence: Synthetic oligonucleotide
  Target: LAMA2; (-) strand; PAM type: YTN; PAM sequence: CTT
tgagaaacattttttgaaac

SEQ ID NO: 245120 - DNA, 20 bp, Artificial Sequence
  Description of Artificial Sequence: Synthetic oligonucleotide
  Target: LAMA2; (-) strand; PAM type: YTN; PAM sequence: CTC
aaaggactttgagaaacatt

SEQ ID NO: 245121 - DNA, 20 bp, Artificial Sequence
  Description of Artificial Sequence: Synthetic oligonucleotide
  Target: LAMA2; (-) strand; PAM type: YTN; PAM sequence: TTC
tcaaaggactttgagaaaca

SEQ ID NO: 245122 - DNA, 20 bp, Artificial Sequence
  Description of Artificial Sequence: Synthetic oligonucleotide
  Target: LAMA2; (-) strand; PAM type: YTN; PAM sequence: TTT
ctcaaaggactttgagaaac

SEQ ID NO: 245123 - DNA, 20 bp, Artificial Sequence
  Description of Artificial Sequence: Synthetic oligonucleotide
  Target: LAMA2; (-) strand; PAM type: YTN; PAM sequence: TTT
tctcaaaggactttgagaaa

SEQ ID NO: 245124 - DNA, 20 bp, Artificial Sequence
  Description of Artificial Sequence: Synthetic oligonucleotide
  Target: LAMA2; (-) strand; PAM type: YTN; PAM sequence: TTT
ttctcaaaggactttgagaa

SEQ ID NO: 245125 - DNA, 20 bp, Artificial Sequence
  Description of Artificial Sequence: Synthetic oligonucleotide
  Target: LAMA2; (-) strand; PAM type: YTN; PAM sequence: TTA
tttttctcaaaggactttga

SEQ ID NO: 245126 - DNA, 20 bp, Artificial Sequence
  Description of Artificial Sequence: Synthetic oligonucleotide
  Target: LAMA2; (-) strand; PAM type: YTN; PAM sequence: TTT
atttttctcaaaggactttg

SEQ ID NO: 245127 - DNA, 20 bp, Artificial Sequence
  Description of Artificial Sequence: Synthetic oligonucleotide
  Target: LAMA2; (-) strand; PAM type: YTN; PAM sequence: CTA
caggcccaagtttatttttc

SEQ ID NO: 245128 - DNA, 20 bp, Artificial Sequence
  Description of Artificial Sequence: Synthetic oligonucleotide
  Target: LAMA2; (-) strand; PAM type: YTN; PAM sequence: TTG
gctacaggcccaagtttatt

SEQ ID NO: 245129 - DNA, 20 bp, Artificial Sequence
  Description of Artificial Sequence: Synthetic oligonucleotide
  Target: LAMA2; (-) strand; PAM type: YTN; PAM sequence: CTA
ttggctacaggcccaagttt

SEQ ID NO: 245130 - DNA, 20 bp, Artificial Sequence
  Description of Artificial Sequence: Synthetic oligonucleotide
  Target: LAMA2; (-) strand; PAM type: YTN; PAM sequence: CTG
gaatacaaactattggctac

SEQ ID NO: 245131 - DNA, 20 bp, Artificial Sequence
  Description of Artificial Sequence: Synthetic oligonucleotide
  Target: LAMA2; (-) strand; PAM type: YTN; PAM sequence: TTA
aaagcctggaatacaaacta

SEQ ID NO: 245132 - DNA, 20 bp, Artificial Sequence
  Description of Artificial Sequence: Synthetic oligonucleotide
  Target: LAMA2; (-) strand; PAM type: YTN; PAM sequence: TTT
aaaagcctggaatacaaact

SEQ ID NO: 245133 - DNA, 20 bp, Artificial Sequence
  Description of Artificial Sequence: Synthetic oligonucleotide
  Target: LAMA2; (-) strand; PAM type: YTN; PAM sequence: TTT
taaaagcctggaatacaaac

SEQ ID NO: 245134 - DNA, 20 bp, Artificial Sequence
  Description of Artificial Sequence: Synthetic oligonucleotide
  Target: LAMA2; (-) strand; PAM type: YTN; PAM sequence: TTT
ttaaaagcctggaatacaaa

SEQ ID NO: 245135 - DNA, 20 bp, Artificial Sequence
  Description of Artificial Sequence: Synthetic oligonucleotide
  Target: LAMA2; (-) strand; PAM type: YTN; PAM sequence: TTT
tttaaaagcctggaatacaa

SEQ ID NO: 245136 - DNA, 20 bp, Artificial Sequence
  Description of Artificial Sequence: Synthetic oligonucleotide
  Target: LAMA2; (-) strand; PAM type: YTN; PAM sequence: TTT
ttttaaaagcctggaataca

SEQ ID NO: 245137 - DNA, 20 bp, Artificial Sequence
  Description of Artificial Sequence: Synthetic oligonucleotide
  Target: LAMA2; (-) strand; PAM type: YTN; PAM sequence: TTT
tttttaaaagcctggaatac

SEQ ID NO: 245138 - DNA, 20 bp, Artificial Sequence
  Description of Artificial Sequence: Synthetic oligonucleotide
  Target: LAMA2; (-) strand; PAM type: YTN; PAM sequence: TTG
aattttttttaaaagcctgg

SEQ ID NO: 245139 - DNA, 20 bp, Artificial Sequence
  Description of Artificial Sequence: Synthetic oligonucleotide
  Target: LAMA2; (-) strand; PAM type: YTN; PAM sequence: TTT
gaattttttttaaaagcctg

SEQ ID NO: 245140 - DNA, 20 bp, Artificial Sequence
  Description of Artificial Sequence: Synthetic oligonucleotide
  Target: LAMA2; (-) strand; PAM type: YTN; PAM sequence: CTG
tatttgaattttttttaaaa

SEQ ID NO: 245141 - DNA, 20 bp, Artificial Sequence
  Description of Artificial Sequence: Synthetic oligonucleotide
  Target: LAMA2; (-) strand; PAM type: YTN; PAM sequence: TTC
tgtatttgaattttttttaa

SEQ ID NO: 245142 - DNA, 20 bp, Artificial Sequence
  Description of Artificial Sequence: Synthetic oligonucleotide
  Target: LAMA2; (-) strand; PAM type: YTN; PAM sequence: TTT
ctgtatttgaatttttttta

SEQ ID NO: 245143 - DNA, 20 bp, Artificial Sequence
  Description of Artificial Sequence: Synthetic oligonucleotide
  Target: LAMA2; (-) strand; PAM type: YTN; PAM sequence: CTG
atgtttctgtatttgaattt

SEQ ID NO: 245144 - DNA, 20 bp, Artificial Sequence
  Description of Artificial Sequence: Synthetic oligonucleotide
  Target: LAMA2; (-) strand; PAM type: YTN; PAM sequence: CTA
tggcaatgaaaatctgatgt

SEQ ID NO: 245145 - DNA, 20 bp, Artificial Sequence
  Description of Artificial Sequence: Synthetic oligonucleotide
  Target: LAMA2; (-) strand; PAM type: YTN; PAM sequence: TTA
aaagatgtcatgacccctat

SEQ ID NO: 245146 - DNA, 20 bp, Artificial Sequence
  Description of Artificial Sequence: Synthetic oligonucleotide
  Target: LAMA2; (-) strand; PAM type: YTN; PAM sequence: TTA
tgttaaaagatgtcatgacc

SEQ ID NO: 245147 - DNA, 20 bp, Artificial Sequence
  Description of Artificial Sequence: Synthetic oligonucleotide
  Target: LAMA2; (-) strand; PAM type: YTN; PAM sequence: CTT
atgttaaaagatgtcatgac

SEQ ID NO: 245148 - DNA, 20 bp, Artificial Sequence
  Description of Artificial Sequence: Synthetic oligonucleotide
  Target: LAMA2; (-) strand; PAM type: YTN; PAM sequence: CTG
cacttatgttaaaagatgtc

SEQ ID NO: 245149 - DNA, 20 bp, Artificial Sequence
  Description of Artificial Sequence: Synthetic oligonucleotide
  Target: LAMA2; (-) strand; PAM type: YTN; PAM sequence: TTC
tgcacttatgttaaaagatg

SEQ ID NO: 245150 - DNA, 20 bp, Artificial Sequence
  Description of Artificial Sequence: Synthetic oligonucleotide
  Target: LAMA2; (-) strand; PAM type: YTN; PAM sequence: TTT
ctgcacttatgttaaaagat

SEQ ID NO: 245151 - DNA, 20 bp, Artificial Sequence
  Description of Artificial Sequence: Synthetic oligonucleotide
  Target: LAMA2; (-) strand; PAM type: YTN; PAM sequence: TTA
cagatagtttctgcacttat

SEQ ID NO: 245152 - DNA, 20 bp, Artificial Sequence
  Description of Artificial Sequence: Synthetic oligonucleotide
  Target: LAMA2; (-) strand; PAM type: YTN; PAM sequence: TTC
attacagatagtttctgcac

SEQ ID NO: 245153 - DNA, 20 bp, Artificial Sequence
  Description of Artificial Sequence: Synthetic oligonucleotide
  Target: LAMA2; (-) strand; PAM type: YTN; PAM sequence: TTG
attcattacagatagtttct

SEQ ID NO: 245154 - DNA, 20 bp, Artificial Sequence
  Description of Artificial Sequence: Synthetic oligonucleotide
  Target: LAMA2; (-) strand; PAM type: YTN; PAM sequence: TTT
gattcattacagatagtttc

SEQ ID NO: 245155 - DNA, 20 bp, Artificial Sequence
  Description of Artificial Sequence: Synthetic oligonucleotide
  Target: LAMA2; (-) strand; PAM type: YTN; PAM sequence: TTT
tgattcattacagatagttt

SEQ ID NO: 245156 - DNA, 20 bp, Artificial Sequence
  Description of Artificial Sequence: Synthetic oligonucleotide
  Target: LAMA2; (-) strand; PAM type: YTN; PAM sequence: TTA
agttttgattcattacagat

SEQ ID NO: 245157 - DNA, 20 bp, Artificial Sequence
  Description of Artificial Sequence: Synthetic oligonucleotide
  Target: LAMA2; (-) strand; PAM type: YTN; PAM sequence: TTT
aagttttgattcattacaga

SEQ ID NO: 245158 - DNA, 20 bp, Artificial Sequence
  Description of Artificial Sequence: Synthetic oligonucleotide
  Target: LAMA2; (-) strand; PAM type: YTN; PAM sequence: CTG
atttaagttttgattcatta

SEQ ID NO: 245159 - DNA, 20 bp, Artificial Sequence
  Description of Artificial Sequence: Synthetic oligonucleotide
  Target: LAMA2; (-) strand; PAM type: YTN; PAM sequence: TTA
atgtcatctgatttaagttt

SEQ ID NO: 245160 - DNA, 20 bp, Artificial Sequence
  Description of Artificial Sequence: Synthetic oligonucleotide
  Target: LAMA2; (-) strand; PAM type: YTN; PAM sequence: CTT
aatgtcatctgatttaagtt

SEQ ID NO: 245161 - DNA, 20 bp, Artificial Sequence
  Description of Artificial Sequence: Synthetic oligonucleotide
  Target: LAMA2; (-) strand; PAM type: YTN; PAM sequence: CTG
gtcttaatgtcatctgattt

SEQ ID NO: 245162 - DNA, 20 bp, Artificial Sequence
  Description of Artificial Sequence: Synthetic oligonucleotide
  Target: LAMA2; (-) strand; PAM type: YTN; PAM sequence: CTG
tggtaatagcaaagctggtc

SEQ ID NO: 245163 - DNA, 20 bp, Artificial Sequence
  Description of Artificial Sequence: Synthetic oligonucleotide
  Target: LAMA2; (-) strand; PAM type: YTN; PAM sequence: TTG
tgatgccatctgtggtaata

SEQ ID NO: 245164 - DNA, 20 bp, Artificial Sequence
  Description of Artificial Sequence: Synthetic oligonucleotide
  Target: LAMA2; (-) strand; PAM type: YTN; PAM sequence: TTA
attgtgatgccatctgtggt

SEQ ID NO: 245165 - DNA, 20 bp, Artificial Sequence
  Description of Artificial Sequence: Synthetic oligonucleotide
  Target: LAMA2; (-) strand; PAM type: YTN; PAM sequence: TTA
aaagttaattgtgatgccat

SEQ ID NO: 245166 - DNA, 20 bp, Artificial Sequence
  Description of Artificial Sequence: Synthetic oligonucleotide
  Target: LAMA2; (-) strand; PAM type: YTN; PAM sequence: TTG
atatattaaaagttaattgt

SEQ ID NO: 245167 - DNA, 20 bp, Artificial Sequence
  Description of Artificial Sequence: Synthetic oligonucleotide
  Target: LAMA2; (-) strand; PAM type: YTN; PAM sequence: TTT
gatatattaaaagttaattg

SEQ ID NO: 245168 - DNA, 20 bp, Artificial Sequence
  Description of Artificial Sequence: Synthetic oligonucleotide
  Target: LAMA2; (-) strand; PAM type: YTN; PAM sequence: TTT
tgatatattaaaagttaatt

SEQ ID NO: 245169 - DNA, 20 bp, Artificial Sequence
  Description of Artificial Sequence: Synthetic oligonucleotide
  Target: LAMA2; (-) strand; PAM type: YTN; PAM sequence: TTT
ttgatatattaaaagttaat

SEQ ID NO: 245170 - DNA, 20 bp, Artificial Sequence
  Description of Artificial Sequence: Synthetic oligonucleotide
  Target: LAMA2; (-) strand; PAM type: YTN; PAM sequence: CTC
acatttttgatatattaaaa

SEQ ID NO: 245171 - DNA, 20 bp, Artificial Sequence
  Description of Artificial Sequence: Synthetic oligonucleotide
  Target: LAMA2; (-) strand; PAM type: YTN; PAM sequence: CTG
ataatatatgagtacactca

SEQ ID NO: 245172 - DNA, 20 bp, Artificial Sequence
  Description of Artificial Sequence: Synthetic oligonucleotide
  Target: LAMA2; (-) strand; PAM type: YTN; PAM sequence: TTG
gaatatcatgatcaaatgac

SEQ ID NO: 245173 - DNA, 20 bp, Artificial Sequence
  Description of Artificial Sequence: Synthetic oligonucleotide
  Target: LAMA2; (-) strand; PAM type: YTN; PAM sequence: TTA
atgttggaatatcatgatca

SEQ ID NO: 245174 - DNA, 20 bp, Artificial Sequence
  Description of Artificial Sequence: Synthetic oligonucleotide
  Target: LAMA2; (-) strand; PAM type: YTN; PAM sequence: CTG
agatgttaatgttggaatat

SEQ ID NO: 245175 - DNA, 20 bp, Artificial Sequence
  Description of Artificial Sequence: Synthetic oligonucleotide
  Target: LAMA2; (-) strand; PAM type: YTN; PAM sequence: TTC
acaatacactgagatgttaa

SEQ ID NO: 245176 - DNA, 20 bp, Artificial Sequence
  Description of Artificial Sequence: Synthetic oligonucleotide
  Target: LAMA2; (-) strand; PAM type: YTN; PAM sequence: TTT
cacaatacactgagatgtta

SEQ ID NO: 245177 - DNA, 20 bp, Artificial Sequence
  Description of Artificial Sequence: Synthetic oligonucleotide
  Target: LAMA2; (-) strand; PAM type: YTN; PAM sequence: TTT
tcacaatacactgagatgtt

SEQ ID NO: 245178 - DNA, 20 bp, Artificial Sequence
  Description of Artificial Sequence: Synthetic oligonucleotide
  Target: LAMA2; (-) strand; PAM type: YTN; PAM sequence: TTG
tacaaatgaatcattttcac

SEQ ID NO: 245179 - DNA, 20 bp, Artificial Sequence
  Description of Artificial Sequence: Synthetic oligonucleotide
  Target: LAMA2; (-) strand; PAM type: YTN; PAM sequence: CTA
gaagaagaaaaatattgtac

SEQ ID NO: 245180 - DNA, 20 bp, Artificial Sequence
  Description of Artificial Sequence: Synthetic oligonucleotide
  Target: LAMA2; (-) strand; PAM type: YTN; PAM sequence: TTA
aaagtctagaagaagaaaaa

SEQ ID NO: 245181 - DNA, 20 bp, Artificial Sequence
  Description of Artificial Sequence: Synthetic oligonucleotide
  Target: LAMA2; (-) strand; PAM type: YTN; PAM sequence: TTC
aagaaattaaaagtctagaa

SEQ ID NO: 245182 - DNA, 20 bp, Artificial Sequence
  Description of Artificial Sequence: Synthetic oligonucleotide
  Target: LAMA2; (-) strand; PAM type: YTN; PAM sequence: CTT
caagaaattaaaagtctaga

SEQ ID NO: 245183 - DNA, 20 bp, Artificial Sequence
  Description of Artificial Sequence: Synthetic oligonucleotide
  Target: LAMA2; (-) strand; PAM type: YTN; PAM sequence: TTC
cttcaagaaattaaaagtct

SEQ ID NO: 245184 - DNA, 20 bp, Artificial Sequence
  Description of Artificial Sequence: Synthetic oligonucleotide
  Target: LAMA2; (-) strand; PAM type: YTN; PAM sequence: CTT
ccttcaagaaattaaaagtc

SEQ ID NO: 245185 - DNA, 20 bp, Artificial Sequence
  Description of Artificial Sequence: Synthetic oligonucleotide
  Target: LAMA2; (-) strand; PAM type: YTN; PAM sequence: TTC
cttccttcaagaaattaaaa

SEQ ID NO: 245186 - DNA, 20 bp, Artificial Sequence
  Description of Artificial Sequence: Synthetic oligonucleotide
  Target: LAMA2; (-) strand; PAM type: YTN; PAM sequence: CTA
caagatgagtaaaatgcgtt

SEQ ID NO: 245187 - DNA, 20 bp, Artificial Sequence
  Description of Artificial Sequence: Synthetic oligonucleotide
  Target: LAMA2; (-) strand; PAM type: YTN; PAM sequence: CTC
aggcaacatgtacagggagg

SEQ ID NO: 245188 - DNA, 20 bp, Artificial Sequence
  Description of Artificial Sequence: Synthetic oligonucleotide
  Target: LAMA2; (-) strand; PAM type: YTN; PAM sequence: TTA
tgtctcaggcaacatgtaca

SEQ ID NO: 245189 - DNA, 20 bp, Artificial Sequence
  Description of Artificial Sequence: Synthetic oligonucleotide
  Target: LAMA2; (-) strand; PAM type: YTN; PAM sequence: TTA
ttatgtctcaggcaacatgt

SEQ ID NO: 245190 - DNA, 20 bp, Artificial Sequence
  Description of Artificial Sequence: Synthetic oligonucleotide
  Target: LAMA2; (-) strand; PAM type: YTN; PAM sequence: TTG
aatagttattatgtctcagg

SEQ ID NO: 245191 - DNA, 20 bp, Artificial Sequence
  Description of Artificial Sequence: Synthetic oligonucleotide
  Target: LAMA2; (-) strand; PAM type: YTN; PAM sequence: TTT
gaatagttattatgtctcag

SEQ ID NO: 245192 - DNA, 20 bp, Artificial Sequence
  Description of Artificial Sequence: Synthetic oligonucleotide
  Target: LAMA2; (-) strand; PAM type: YTN; PAM sequence: TTT
tgaatagttattatgtctca

SEQ ID NO: 245193 - DNA, 20 bp, Artificial Sequence
  Description of Artificial Sequence: Synthetic oligonucleotide
  Target: LAMA2; (-) strand; PAM type: YTN; PAM sequence: TTT
ttgaatagttattatgtctc

SEQ ID NO: 245194 - DNA, 20 bp, Artificial Sequence
  Description of Artificial Sequence: Synthetic oligonucleotide
  Target: LAMA2; (-) strand; PAM type: YTN; PAM sequence: CTG
taaacatttttgaatagtta

SEQ ID NO: 245195 - DNA, 20 bp, Artificial Sequence
  Description of Artificial Sequence: Synthetic oligonucleotide
  Target: LAMA2; (-) strand; PAM type: YTN; PAM sequence: TTG
aatactgtaaacatttttga

SEQ ID NO: 245196 - DNA, 20 bp, Artificial Sequence
  Description of Artificial Sequence: Synthetic oligonucleotide
  Target: LAMA2; (-) strand; PAM type: YTN; PAM sequence: TTC
attgaatactgtaaacattt

SEQ ID NO: 245197 - DNA, 20 bp, Artificial Sequence
  Description of Artificial Sequence: Synthetic oligonucleotide
  Target: LAMA2; (-) strand; PAM type: YTN; PAM sequence: TTT
cattgaatactgtaaacatt

SEQ ID NO: 245198 - DNA, 20 bp, Artificial Sequence
  Description of Artificial Sequence: Synthetic oligonucleotide
  Target: LAMA2; (-) strand; PAM type: YTN; PAM sequence: TTA
tataatttcattgaatactg

SEQ ID NO: 245199 - DNA, 20 bp, Artificial Sequence
  Description of Artificial Sequence: Synthetic oligonucleotide
  Target: LAMA2; (-) strand; PAM type: YTN; PAM sequence: TTT
atataatttcattgaatact

SEQ ID NO: 245200 - DNA, 20 bp, Artificial Sequence
  Description of Artificial Sequence: Synthetic oligonucleotide
  Target: LAMA2; (-) strand; PAM type: YTN; PAM sequence: TTA
aaccaagatttatataattt

SEQ ID NO: 245201 - DNA, 20 bp, Artificial Sequence
  Description of Artificial Sequence: Synthetic oligonucleotide
  Target: LAMA2; (-) strand; PAM type: YTN; PAM sequence: TTT
aaaccaagatttatataatt

SEQ ID NO: 245202 - DNA, 20 bp, Artificial Sequence
  Description of Artificial Sequence: Synthetic oligonucleotide
  Target: LAMA2; (-) strand; PAM type: YTN; PAM sequence: TTT
taaaccaagatttatataat

SEQ ID NO: 245203 - DNA, 20 bp, Artificial Sequence
  Description of Artificial Sequence: Synthetic oligonucleotide
  Target: LAMA2; (-) strand; PAM type: YTN; PAM sequence: TTT
ttaaaccaagatttatataa

SEQ ID NO: 245204 - DNA, 20 bp, Artificial Sequence
  Description of Artificial Sequence: Synthetic oligonucleotide
  Target: LAMA2; (-) strand; PAM type: YTN; PAM sequence: CTT
tttaaaccaagatttatata

SEQ ID NO: 245205 - DNA, 20 bp, Artificial Sequence
  Description of Artificial Sequence: Synthetic oligonucleotide
  Target: LAMA2; (-) strand; PAM type: YTN; PAM sequence: TTG
tatatcaagctttttaaacc

SEQ ID NO: 245206 - DNA, 20 bp, Artificial Sequence
  Description of Artificial Sequence: Synthetic oligonucleotide
  Target: LAMA2; (-) strand; PAM type: YTN; PAM sequence: TTC
attgtatatcaagcttttta

SEQ ID NO: 245207 - DNA, 20 bp, Artificial Sequence
  Description of Artificial Sequence: Synthetic oligonucleotide
  Target: LAMA2; (-) strand; PAM type: YTN; PAM sequence: TTT
cattgtatatcaagcttttt

SEQ ID NO: 245208 - DNA, 20 bp, Artificial Sequence
  Description of Artificial Sequence: Synthetic oligonucleotide
  Target: LAMA2; (-) strand; PAM type: YTN; PAM sequence: TTG
cccaagtatgtttcattgta

SEQ ID NO: 245209 - DNA, 20 bp, Artificial Sequence
  Description of Artificial Sequence: Synthetic oligonucleotide
  Target: LAMA2; (-) strand; PAM type: YTN; PAM sequence: TTT
gcccaagtatgtttcattgt

SEQ ID NO: 245210 - DNA, 20 bp, Artificial Sequence
  Description of Artificial Sequence: Synthetic oligonucleotide
  Target: LAMA2; (-) strand; PAM type: YTN; PAM sequence: TTA
taatttgcccaagtatgttt

SEQ ID NO: 245211 - DNA, 20 bp, Artificial Sequence
  Description of Artificial Sequence: Synthetic oligonucleotide
  Target: LAMA2; (-) strand; PAM type: YTN; PAM sequence: TTT
ataatttgcccaagtatgtt

SEQ ID NO: 245212 - DNA, 20 bp, Artificial Sequence
  Description of Artificial Sequence: Synthetic oligonucleotide
  Target: LAMA2; (-) strand; PAM type: YTN; PAM sequence: CTT
tataatttgcccaagtatgt

SEQ ID NO: 245213 - DNA, 20 bp, Artificial Sequence
  Description of Artificial Sequence: Synthetic oligonucleotide
  Target: LAMA2; (-) strand; PAM type: YTN; PAM sequence: CTC
aggaacagctttataatttg

SEQ ID NO: 245214 - DNA, 20 bp, Artificial Sequence
  Description of Artificial Sequence: Synthetic oligonucleotide
  Target: LAMA2; (-) strand; PAM type: YTN; PAM sequence: TTC
tcaggaacagctttataatt

SEQ ID NO: 245215 - DNA, 20 bp, Artificial Sequence
  Description of Artificial Sequence: Synthetic oligonucleotide
  Target: LAMA2; (-) strand; PAM type: YTN; PAM sequence: CTC
attctcaggaacagctttat

SEQ ID NO: 245216 - DNA, 20 bp, Artificial Sequence
  Description of Artificial Sequence: Synthetic oligonucleotide
  Target: LAMA2; (-) strand; PAM type: YTN; PAM sequence: TTA
gctcattctcaggaacagct

SEQ ID NO: 245217 - DNA, 20 bp, Artificial Sequence
  Description of Artificial Sequence: Synthetic oligonucleotide
  Target: LAMA2; (-) strand; PAM type: YTN; PAM sequence: CTA
aatatgtattagctcattct

SEQ ID NO: 245218 - DNA, 20 bp, Artificial Sequence
  Description of Artificial Sequence: Synthetic oligonucleotide
  Target: LAMA2; (-) strand; PAM type: YTN; PAM sequence: TTA
acaactaaatatgtattagc

SEQ ID NO: 245219 - DNA, 20 bp, Artificial Sequence
  Description of Artificial Sequence: Synthetic oligonucleotide
  Target: LAMA2; (-) strand; PAM type: YTN; PAM sequence: TTT
aacaactaaatatgtattag

SEQ ID NO: 245220 - DNA, 20 bp, Artificial Sequence
  Description of Artificial Sequence: Synthetic oligonucleotide
  Target: LAMA2; (-) strand; PAM type: YTN; PAM sequence: TTT
taacaactaaatatgtatta

SEQ ID NO: 245221 - DNA, 20 bp, Artificial Sequence
  Description of Artificial Sequence: Synthetic oligonucleotide
  Target: LAMA2; (-) strand; PAM type: YTN; PAM sequence: CTC
agaattttaacaactaaata

SEQ ID NO: 245222 - DNA, 20 bp, Artificial Sequence
  Description of Artificial Sequence: Synthetic oligonucleotide
  Target: LAMA2; (-) strand; PAM type: YTN; PAM sequence: TTC
ccctcagaattttaacaact

SEQ ID NO: 245223 - DNA, 20 bp, Artificial Sequence
  Description of Artificial Sequence: Synthetic oligonucleotide
  Target: LAMA2; (-) strand; PAM type: YTN; PAM sequence: TTT
cccctcagaattttaacaac

SEQ ID NO: 245224 - DNA, 20 bp, Artificial Sequence
  Description of Artificial Sequence: Synthetic oligonucleotide
  Target: LAMA2; (-) strand; PAM type: YTN; PAM sequence: TTT
tcccctcagaattttaacaa

SEQ ID NO: 245225 - DNA, 20 bp, Artificial Sequence
  Description of Artificial Sequence: Synthetic oligonucleotide
  Target: LAMA2; (-) strand; PAM type: YTN; PAM sequence: TTA
cattttcccctcagaatttt

SEQ ID NO: 245226 - DNA, 20 bp, Artificial Sequence
  Description of Artificial Sequence: Synthetic oligonucleotide
  Target: LAMA2; (-) strand; PAM type: YTN; PAM sequence: TTT
acattttcccctcagaattt

SEQ ID NO: 245227 - DNA, 20 bp, Artificial Sequence
  Description of Artificial Sequence: Synthetic oligonucleotide
  Target: LAMA2; (-) strand; PAM type: YTN; PAM sequence: CTA
atttacattttcccctcaga

SEQ ID NO: 245228 - DNA, 20 bp, Artificial Sequence
  Description of Artificial Sequence: Synthetic oligonucleotide
  Target: LAMA2; (-) strand; PAM type: YTN; PAM sequence: TTC
acatctaatttacattttcc

SEQ ID NO: 245229 - DNA, 20 bp, Artificial Sequence
  Description of Artificial Sequence: Synthetic oligonucleotide
  Target: LAMA2; (-) strand; PAM type: YTN; PAM sequence: TTG
tagaggtagttcacatctaa

SEQ ID NO: 245230 - DNA, 20 bp, Artificial Sequence
  Description of Artificial Sequence: Synthetic oligonucleotide
  Target: LAMA2; (-) strand; PAM type: YTN; PAM sequence: TTA
tattgtagaggtagttcaca

SEQ ID NO: 245231 - DNA, 20 bp, Artificial Sequence
  Description of Artificial Sequence: Synthetic oligonucleotide
  Target: LAMA2; (-) strand; PAM type: YTN; PAM sequence: CTT
atattgtagaggtagttcac

SEQ ID NO: 245232 - DNA, 20 bp, Artificial Sequence
  Description of Artificial Sequence: Synthetic oligonucleotide
  Target: LAMA2; (-) strand; PAM type: YTN; PAM sequence: CTA
tcttatattgtagaggtagt

SEQ ID NO: 245233 - DNA, 20 bp, Artificial Sequence
  Description of Artificial Sequence: Synthetic oligonucleotide
  Target: LAMA2; (-) strand; PAM type: YTN; PAM sequence: CTG
ctatcttatattgtagaggt

SEQ ID NO: 245234 - DNA, 20 bp, Artificial Sequence
  Description of Artificial Sequence: Synthetic oligonucleotide
  Target: LAMA2; (-) strand; PAM type: YTN; PAM sequence: CTA
ctgctatcttatattgtaga

SEQ ID NO: 245235 - DNA, 20 bp, Artificial Sequence
  Description of Artificial Sequence: Synthetic oligonucleotide
  Target: LAMA2; (-) strand; PAM type: YTN; PAM sequence: TTA
cagcctactgctatcttata

SEQ ID NO: 245236 - DNA, 20 bp, Artificial Sequence
  Description of Artificial Sequence: Synthetic oligonucleotide
  Target: LAMA2; (-) strand; PAM type: YTN; PAM sequence: CTT
acagcctactgctatcttat

SEQ ID NO: 245237 - DNA, 20 bp, Artificial Sequence
  Description of Artificial Sequence: Synthetic oligonucleotide
  Target: LAMA2; (-) strand; PAM type: YTN; PAM sequence: TTA
acttacagcctactgctatc

SEQ ID NO: 245238 - DNA, 20 bp, Artificial Sequence
  Description of Artificial Sequence: Synthetic oligonucleotide
  Target: LAMA2; (-) strand; PAM type: YTN; PAM sequence: TTT
aacttacagcctactgctat

SEQ ID NO: 245239 - DNA, 20 bp, Artificial Sequence
  Description of Artificial Sequence: Synthetic oligonucleotide
  Target: LAMA2; (-) strand; PAM type: YTN; PAM sequence: TTT
taacttacagcctactgcta

SEQ ID NO: 245240 - DNA, 20 bp, Artificial Sequence
  Description of Artificial Sequence: Synthetic oligonucleotide
  Target: LAMA2; (-) strand; PAM type: YTN; PAM sequence: TTA
ttttaacttacagcctactg

SEQ ID NO: 245241 - DNA, 20 bp, Artificial Sequence
  Description of Artificial Sequence: Synthetic oligonucleotide
  Target: LAMA2; (-) strand; PAM type: YTN; PAM sequence: CTG
aaaaatgagaaaaatgatta

SEQ ID NO: 245242 - DNA, 20 bp, Artificial Sequence
  Description of Artificial Sequence: Synthetic oligonucleotide
  Target: LAMA2; (-) strand; PAM type: YTN; PAM sequence: TTA
ctgaaaaatgagaaaaatga

SEQ ID NO: 245243 - DNA, 20 bp, Artificial Sequence
  Description of Artificial Sequence: Synthetic oligonucleotide
  Target: LAMA2; (-) strand; PAM type: YTN; PAM sequence: TTA
atgaatgttactgaaaaatg

SEQ ID NO: 245244 - DNA, 20 bp, Artificial Sequence
  Description of Artificial Sequence: Synthetic oligonucleotide
  Target: LAMA2; (-) strand; PAM type: YTN; PAM sequence: TTT
aatgaatgttactgaaaaat

SEQ ID NO: 245245 - DNA, 20 bp, Artificial Sequence
  Description of Artificial Sequence: Synthetic oligonucleotide
  Target: LAMA2; (-) strand; PAM type: YTN; PAM sequence: TTG
tatcaggcatttaatgaatg

SEQ ID NO: 245246 - DNA, 20 bp, Artificial Sequence
  Description of Artificial Sequence: Synthetic oligonucleotide
  Target: LAMA2; (-) strand; PAM type: YTN; PAM sequence: TTC
agaaagtacagaattgtatc

SEQ ID NO: 245247 - DNA, 20 bp, Artificial Sequence
  Description of Artificial Sequence: Synthetic oligonucleotide
  Target: LAMA2; (-) strand; PAM type: YTN; PAM sequence: TTT
cagaaagtacagaattgtat

SEQ ID NO: 245248 - DNA, 20 bp, Artificial Sequence
  Description of Artificial Sequence: Synthetic oligonucleotide
  Target: LAMA2; (-) strand; PAM type: YTN; PAM sequence: TTT
tcagaaagtacagaattgta

SEQ ID NO: 245249 - DNA, 20 bp, Artificial Sequence
  Description of Artificial Sequence: Synthetic oligonucleotide
  Target: LAMA2; (-) strand; PAM type: YTN; PAM sequence: TTA
tagtcaattttcagaaagta

SEQ ID NO: 245250 - DNA, 20 bp, Artificial Sequence
  Description of Artificial Sequence: Synthetic oligonucleotide
  Target: LAMA2; (-) strand; PAM type: YTN; PAM sequence: TTA
ttatagtcaattttcagaaa

SEQ ID NO: 245251 - DNA, 20 bp, Artificial Sequence
  Description of Artificial Sequence: Synthetic oligonucleotide
  Target: LAMA2; (-) strand; PAM type: YTN; PAM sequence: TTT
attatagtcaattttcagaa

SEQ ID NO: 245252 - DNA, 20 bp, Artificial Sequence
  Description of Artificial Sequence: Synthetic oligonucleotide
  Target: LAMA2; (-) strand; PAM type: YTN; PAM sequence: CTT
tattatagtcaattttcaga

SEQ ID NO: 245253 - DNA, 20 bp, Artificial Sequence
  Description of Artificial Sequence: Synthetic oligonucleotide
  Target: LAMA2; (-) strand; PAM type: YTN; PAM sequence: TTC
tttattatagtcaattttca

SEQ ID NO: 245254 - DNA, 20 bp, Artificial Sequence
  Description of Artificial Sequence: Synthetic oligonucleotide
  Target: LAMA2; (-) strand; PAM type: YTN; PAM sequence: TTT
ctttattatagtcaattttc

SEQ ID NO: 245255 - DNA, 20 bp, Artificial Sequence
  Description of Artificial Sequence: Synthetic oligonucleotide
  Target: LAMA2; (-) strand; PAM type: YTN; PAM sequence: TTA
taatggccaggatttcttta

SEQ ID NO: 245256 - DNA, 20 bp, Artificial Sequence
  Description of Artificial Sequence: Synthetic oligonucleotide
  Target: LAMA2; (-) strand; PAM type: YTN; PAM sequence: TTT
ataatggccaggatttcttt

SEQ ID NO: 245257 - DNA, 20 bp, Artificial Sequence
  Description of Artificial Sequence: Synthetic oligonucleotide
  Target: LAMA2; (-) strand; PAM type: YTN; PAM sequence: TTT
tataatggccaggatttctt

SEQ ID NO: 245258 - DNA, 20 bp, Artificial Sequence
  Description of Artificial Sequence: Synthetic oligonucleotide
  Target: LAMA2; (-) strand; PAM type: YTN; PAM sequence: CTA
tgagtggatgacaattttat

SEQ ID NO: 245259 - DNA, 20 bp, Artificial Sequence
  Description of Artificial Sequence: Synthetic oligonucleotide
  Target: LAMA2; (-) strand; PAM type: YTN; PAM sequence: CTA
cctatgagtggatgacaatt

SEQ ID NO: 245260 - DNA, 20 bp, Artificial Sequence
  Description of Artificial Sequence: Synthetic oligonucleotide
  Target: LAMA2; (-) strand; PAM type: YTN; PAM sequence: TTC
tacctatgagtggatgacaa

SEQ ID NO: 245261 - DNA, 20 bp, Artificial Sequence
  Description of Artificial Sequence: Synthetic oligonucleotide
  Target: LAMA2; (-) strand; PAM type: YTN; PAM sequence: TTA
ttctacctatgagtggatga

SEQ ID NO: 245262 - DNA, 20 bp, Artificial Sequence
  Description of Artificial Sequence: Synthetic oligonucleotide
  Target: LAMA2; (-) strand; PAM type: YTN; PAM sequence: TTT
attctacctatgagtggatg

SEQ ID NO: 245263 - DNA, 20 bp, Artificial Sequence
  Description of Artificial Sequence: Synthetic oligonucleotide
  Target: LAMA2; (-) strand; PAM type: YTN; PAM sequence: CTC
atttattctacctatgagtg

SEQ ID NO: 245264 - DNA, 20 bp, Artificial Sequence
  Description of Artificial Sequence: Synthetic oligonucleotide
  Target: LAMA2; (-) strand; PAM type: YTN; PAM sequence: CTC
tcatttattctacctatgag

SEQ ID NO: 245265 - DNA, 20 bp, Artificial Sequence
  Description of Artificial Sequence: Synthetic oligonucleotide
  Target: LAMA2; (-) strand; PAM type: YTN; PAM sequence: TTC
tctcatttattctacctatg

SEQ ID NO: 245266 - DNA, 20 bp, Artificial Sequence
  Description of Artificial Sequence: Synthetic oligonucleotide
  Target: LAMA2; (-) strand; PAM type: YTN; PAM sequence: TTA
gatcaccataattctctcat

SEQ ID NO: 245267 - DNA, 20 bp, Artificial Sequence
  Description of Artificial Sequence: Synthetic oligonucleotide
  Target: LAMA2; (-) strand; PAM type: YTN; PAM sequence: TTT
agatcaccataattctctca

SEQ ID NO: 245268 - DNA, 20 bp, Artificial Sequence
  Description of Artificial Sequence: Synthetic oligonucleotide
  Target: LAMA2; (-) strand; PAM type: YTN; PAM sequence: CTA
tatttagatcaccataattc

SEQ ID NO: 245269 - DNA, 20 bp, Artificial Sequence
  Description of Artificial Sequence: Synthetic oligonucleotide
  Target: LAMA2; (-) strand; PAM type: YTN; PAM sequence: TTC
tatatttagatcaccataat

SEQ ID NO: 245270 - DNA, 20 bp, Artificial Sequence
  Description of Artificial Sequence: Synthetic oligonucleotide
  Target: LAMA2; (-) strand; PAM type: YTN; PAM sequence: TTT
ctatatttagatcaccataa

SEQ ID NO: 245271 - DNA, 20 bp, Artificial Sequence
  Description of Artificial Sequence: Synthetic oligonucleotide
  Target: LAMA2; (-) strand; PAM type: YTN; PAM sequence: CTT
tctatatttagatcaccata

SEQ ID NO: 245272 - DNA, 20 bp, Artificial Sequence
  Description of Artificial Sequence: Synthetic oligonucleotide
  Target: LAMA2; (-) strand; PAM type: YTN; PAM sequence: TTA
aatgctttctatatttagat

SEQ ID NO: 245273 - DNA, 20 bp, Artificial Sequence
  Description of Artificial Sequence: Synthetic oligonucleotide
  Target: LAMA2; (-) strand; PAM type: YTN; PAM sequence: TTT
aaatgctttctatatttaga

SEQ ID NO: 245274 - DNA, 20 bp, Artificial Sequence
  Description of Artificial Sequence: Synthetic oligonucleotide
  Target: LAMA2; (-) strand; PAM type: YTN; PAM sequence: CTA
atttaaatgctttctatatt

SEQ ID NO: 245275 - DNA, 20 bp, Artificial Sequence
  Description of Artificial Sequence: Synthetic oligonucleotide
  Target: LAMA2; (-) strand; PAM type: YTN; PAM sequence: CTC
taatttaaatgctttctata

SEQ ID NO: 245276 - DNA, 20 bp, Artificial Sequence
  Description of Artificial Sequence: Synthetic oligonucleotide
  Target: LAMA2; (-) strand; PAM type: YTN; PAM sequence: TTC
tctaatttaaatgctttcta

SEQ ID NO: 245277 - DNA, 20 bp, Artificial Sequence
  Description of Artificial Sequence: Synthetic oligonucleotide
  Target: LAMA2; (-) strand; PAM type: YTN; PAM sequence: CTG
ttctctaatttaaatgcttt

SEQ ID NO: 245278 - DNA, 20 bp, Artificial Sequence
  Description of Artificial Sequence: Synthetic oligonucleotide
  Target: LAMA2; (-) strand; PAM type: YTN; PAM sequence: TTC
agctgttctctaatttaaat

SEQ ID NO: 245279 - DNA, 20 bp, Artificial Sequence
  Description of Artificial Sequence: Synthetic oligonucleotide
  Target: LAMA2; (-) strand; PAM type: YTN; PAM sequence: TTT
cagctgttctctaatttaaa

SEQ ID NO: 245280 - DNA, 20 bp, Artificial Sequence
  Description of Artificial Sequence: Synthetic oligonucleotide
  Target: LAMA2; (-) strand; PAM type: YTN; PAM sequence: TTA
gaagcacaatttcagctgtt

SEQ ID NO: 245281 - DNA, 20 bp, Artificial Sequence
  Description of Artificial Sequence: Synthetic oligonucleotide
  Target: LAMA2; (-) strand; PAM type: YTN; PAM sequence: TTT
agaagcacaatttcagctgt

SEQ ID NO: 245282 - DNA, 20 bp, Artificial Sequence
  Description of Artificial Sequence: Synthetic oligonucleotide
  Target: LAMA2; (-) strand; PAM type: YTN; PAM sequence: TTT
tagaagcacaatttcagctg

SEQ ID NO: 245283 - DNA, 20 bp, Artificial Sequence
  Description of Artificial Sequence: Synthetic oligonucleotide
  Target: LAMA2; (-) strand; PAM type: YTN; PAM sequence: CTG
aaatgttttagaagcacaat

SEQ ID NO: 245284 - DNA, 20 bp, Artificial Sequence
  Description of Artificial Sequence: Synthetic oligonucleotide
  Target: LAMA2; (-) strand; PAM type: YTN; PAM sequence: TTC
aatataacatatagaaaatg

SEQ ID NO: 245285 - DNA, 20 bp, Artificial Sequence
  Description of Artificial Sequence: Synthetic oligonucleotide
  Target: LAMA2; (-) strand; PAM type: YTN; PAM sequence: TTT
caatataacatatagaaaat

SEQ ID NO: 245286 - DNA, 20 bp, Artificial Sequence
  Description of Artificial Sequence: Synthetic oligonucleotide
  Target: LAMA2; (-) strand; PAM type: YTN; PAM sequence: TTT
tcaatataacatatagaaaa

SEQ ID NO: 245287 - DNA, 20 bp, Artificial Sequence
  Description of Artificial Sequence: Synthetic oligonucleotide
  Target: LAMA2; (-) strand; PAM type: YTN; PAM sequence: TTT
ttcaatataacatatagaaa

SEQ ID NO: 245288 - DNA, 20 bp, Artificial Sequence
  Description of Artificial Sequence: Synthetic oligonucleotide
  Target: LAMA2; (-) strand; PAM type: YTN; PAM sequence: TTT
tttcaatataacatatagaa

SEQ ID NO: 245289 - DNA, 20 bp, Artificial Sequence
  Description of Artificial Sequence: Synthetic oligonucleotide
  Target: LAMA2; (-) strand; PAM type: YTN; PAM sequence: CTT
ttttcaatataacatataga

SEQ ID NO: 245290 - DNA, 20 bp, Artificial Sequence
  Description of Artificial Sequence: Synthetic oligonucleotide
  Target: LAMA2; (-) strand; PAM type: YTN; PAM sequence: TTA
cttttttcaatataacatat

SEQ ID NO: 245291 - DNA, 20 bp, Artificial Sequence
  Description of Artificial Sequence: Synthetic oligonucleotide
  Target: LAMA2; (-) strand; PAM type: YTN; PAM sequence: TTC
catattacttttttcaatat

SEQ ID NO: 245292 - DNA, 20 bp, Artificial Sequence
  Description of Artificial Sequence: Synthetic oligonucleotide
  Target: LAMA2; (-) strand; PAM type: YTN; PAM sequence: TTT
ccatattacttttttcaata

SEQ ID NO: 245293 - DNA, 20 bp, Artificial Sequence
  Description of Artificial Sequence: Synthetic oligonucleotide
  Target: LAMA2; (-) strand; PAM type: YTN; PAM sequence: TTA
catttccatattactttttt

SEQ ID NO: 245294 - DNA, 20 bp, Artificial Sequence
  Description of Artificial Sequence: Synthetic oligonucleotide
  Target: LAMA2; (-) strand; PAM type: YTN; PAM sequence: CTG
caaatgaaaacattacattt

SEQ ID NO: 245295 - DNA, 20 bp, Artificial Sequence
  Description of Artificial Sequence: Synthetic oligonucleotide
  Target: LAMA2; (-) strand; PAM type: YTN; PAM sequence: TTA
agcatctgcaaatgaaaaca

SEQ ID NO: 245296 - DNA, 20 bp, Artificial Sequence
  Description of Artificial Sequence: Synthetic oligonucleotide
  Target: LAMA2; (-) strand; PAM type: YTN; PAM sequence: TTT
aagcatctgcaaatgaaaac

SEQ ID NO: 245297 - DNA, 20 bp, Artificial Sequence
  Description of Artificial Sequence: Synthetic oligonucleotide
  Target: LAMA2; (-) strand; PAM type: YTN; PAM sequence: CTA
aatttaagcatctgcaaatg

SEQ ID NO: 245298 - DNA, 20 bp, Artificial Sequence
  Description of Artificial Sequence: Synthetic oligonucleotide
  Target: LAMA2; (-) strand; PAM type: YTN; PAM sequence: TTA
aacatgtatctaaatttaag

SEQ ID NO: 245299 - DNA, 20 bp, Artificial Sequence
  Description of Artificial Sequence: Synthetic oligonucleotide
  Target: LAMA2; (-) strand; PAM type: YTN; PAM sequence: TTA
cagtattaaacatgtatcta

SEQ ID NO: 245300 - DNA, 20 bp, Artificial Sequence
  Description of Artificial Sequence: Synthetic oligonucleotide
  Target: LAMA2; (-) strand; PAM type: YTN; PAM sequence: TTG
atcaaaatgattacagtatt

SEQ ID NO: 245301 - DNA, 20 bp, Artificial Sequence
  Description of Artificial Sequence: Synthetic oligonucleotide
  Target: LAMA2; (-) strand; PAM type: YTN; PAM sequence: TTT
gatcaaaatgattacagtat

SEQ ID NO: 245302 - DNA, 20 bp, Artificial Sequence
  Description of Artificial Sequence: Synthetic oligonucleotide
  Target: LAMA2; (-) strand; PAM type: YTN; PAM sequence: CTG
tttgatcaaaatgattacag

SEQ ID NO: 245303 - DNA, 20 bp, Artificial Sequence
  Description of Artificial Sequence: Synthetic oligonucleotide
  Target: LAMA2; (-) strand; PAM type: YTN; PAM sequence: CTG
ctgtttgatcaaaatgatta

SEQ ID NO: 245304 - DNA, 20 bp, Artificial Sequence
  Description of Artificial Sequence: Synthetic oligonucleotide
  Target: LAMA2; (-) strand; PAM type: YTN; PAM sequence: TTG
aataataaataatagctgct

SEQ ID NO: 245305 - DNA, 20 bp, Artificial Sequence
  Description of Artificial Sequence: Synthetic oligonucleotide
  Target: LAMA2; (-) strand; PAM type: YTN; PAM sequence: TTA
catataaatattgaataata

SEQ ID NO: 245306 - DNA, 20 bp, Artificial Sequence
  Description of Artificial Sequence: Synthetic oligonucleotide
  Target: LAMA2; (-) strand; PAM type: YTN; PAM sequence: TTT
acatataaatattgaataat

SEQ ID NO: 245307 - DNA, 20 bp, Artificial Sequence
  Description of Artificial Sequence: Synthetic oligonucleotide
  Target: LAMA2; (-) strand; PAM type: YTN; PAM sequence: TTT
tacatataaatattgaataa

SEQ ID NO: 245308 - DNA, 20 bp, Artificial Sequence
  Description of Artificial Sequence: Synthetic oligonucleotide
  Target: LAMA2; (-) strand; PAM type: YTN; PAM sequence: TTC
aggttttacatataaatatt

SEQ ID NO: 245309 - DNA, 20 bp, Artificial Sequence
  Description of Artificial Sequence: Synthetic oligonucleotide
  Target: LAMA2; (-) strand; PAM type: YTN; PAM sequence: TTT
caggttttacatataaatat

SEQ ID NO: 245310 - DNA, 20 bp, Artificial Sequence
  Description of Artificial Sequence: Synthetic oligonucleotide
  Target: LAMA2; (-) strand; PAM type: YTN; PAM sequence: TTA
aggtagatgaaagtttcagg

SEQ ID NO: 245311 - DNA, 20 bp, Artificial Sequence
  Description of Artificial Sequence: Synthetic oligonucleotide
  Target: LAMA2; (-) strand; PAM type: YTN; PAM sequence: TTA
tcacaataccatcattaagg

SEQ ID NO: 245312 - DNA, 20 bp, Artificial Sequence
  Description of Artificial Sequence: Synthetic oligonucleotide
  Target: LAMA2; (-) strand; PAM type: YTN; PAM sequence: TTT
atcacaataccatcattaag

SEQ ID NO: 245313 - DNA, 20 bp, Artificial Sequence
  Description of Artificial Sequence: Synthetic oligonucleotide
  Target: LAMA2; (-) strand; PAM type: YTN; PAM sequence: TTT
tatcacaataccatcattaa

SEQ ID NO: 245314 - DNA, 20 bp, Artificial Sequence
  Description of Artificial Sequence: Synthetic oligonucleotide
  Target: LAMA2; (-) strand; PAM type: YTN; PAM sequence: CTT
ttatcacaataccatcatta

SEQ ID NO: 245315 - DNA, 20 bp, Artificial Sequence
  Description of Artificial Sequence: Synthetic oligonucleotide
  Target: LAMA2; (-) strand; PAM type: YTN; PAM sequence: TTG
gtgatacatgggtactttta

SEQ ID NO: 245316 - DNA, 20 bp, Artificial Sequence
  Description of Artificial Sequence: Synthetic oligonucleotide
  Target: LAMA2; (-) strand; PAM type: YTN; PAM sequence: CTT
ggtgatacatgggtactttt

SEQ ID NO: 245317 - DNA, 20 bp, Artificial Sequence
  Description of Artificial Sequence: Synthetic oligonucleotide
  Target: LAMA2; (-) strand; PAM type: YTN; PAM sequence: TTG
gcaaatcttggtgatacatg

SEQ ID NO: 245318 - DNA, 20 bp, Artificial Sequence
  Description of Artificial Sequence: Synthetic oligonucleotide
  Target: LAMA2; (-) strand; PAM type: YTN; PAM sequence: TTA
aggaataaaaagaattggca

SEQ ID NO: 245319 - DNA, 20 bp, Artificial Sequence
  Description of Artificial Sequence: Synthetic oligonucleotide
  Target: LAMA2; (-) strand; PAM type: YTN; PAM sequence: TTT
aaggaataaaaagaattggc

SEQ ID NO: 245320 - DNA, 20 bp, Artificial Sequence
  Description of Artificial Sequence: Synthetic oligonucleotide
  Target: LAMA2; (-) strand; PAM type: YTN; PAM sequence: CTT
taaggaataaaaagaattgg

SEQ ID NO: 245321 - DNA, 20 bp, Artificial Sequence
  Description of Artificial Sequence: Synthetic oligonucleotide
  Target: LAMA2; (-) strand; PAM type: YTN; PAM sequence: TTC
tttaaggaataaaaagaatt

SEQ ID NO: 245322 - DNA, 20 bp, Artificial Sequence
  Description of Artificial Sequence: Synthetic oligonucleotide
  Target: LAMA2; (-) strand; PAM type: YTN; PAM sequence: TTG
tcagatattctttaaggaat

SEQ ID NO: 245323 - DNA, 20 bp, Artificial Sequence
  Description of Artificial Sequence: Synthetic oligonucleotide
  Target: LAMA2; (-) strand; PAM type: YTN; PAM sequence: TTA
tacaaaccagcaaattgtca

SEQ ID NO: 245324 - DNA, 20 bp, Artificial Sequence
  Description of Artificial Sequence: Synthetic oligonucleotide
  Target: LAMA2; (-) strand; PAM type: YTN; PAM sequence: CTT
atacaaaccagcaaattgtc

SEQ ID NO: 245325 - DNA, 20 bp, Artificial Sequence
  Description of Artificial Sequence: Synthetic oligonucleotide
  Target: LAMA2; (-) strand; PAM type: YTN; PAM sequence: CTC
aaacttatacaaaccagcaa

SEQ ID NO: 245326 - DNA, 20 bp, Artificial Sequence
  Description of Artificial Sequence: Synthetic oligonucleotide
  Target: LAMA2; (-) strand; PAM type: YTN; PAM sequence: TTA
actcaaacttatacaaacca

SEQ ID NO: 245327 - DNA, 20 bp, Artificial Sequence
  Description of Artificial Sequence: Synthetic oligonucleotide
  Target: LAMA2; (-) strand; PAM type: YTN; PAM sequence: CTT
aactcaaacttatacaaacc

SEQ ID NO: 245328 - DNA, 20 bp, Artificial Sequence
  Description of Artificial Sequence: Synthetic oligonucleotide
  Target: LAMA2; (-) strand; PAM type: YTN; PAM sequence: TTA
cggtgtcttaactcaaactt

SEQ ID NO: 245329 - DNA, 20 bp, Artificial Sequence
  Description of Artificial Sequence: Synthetic oligonucleotide
  Target: LAMA2; (-) strand; PAM type: YTN; PAM sequence: TTA
ttacggtgtcttaactcaaa

SEQ ID NO: 245330 - DNA, 20 bp, Artificial Sequence
  Description of Artificial Sequence: Synthetic oligonucleotide
  Target: LAMA2; (-) strand; PAM type: YTN; PAM sequence: CTG
caggacattattacggtgtc

SEQ ID NO: 245331 - DNA, 20 bp, Artificial Sequence
  Description of Artificial Sequence: Synthetic oligonucleotide
  Target: LAMA2; (-) strand; PAM type: YTN; PAM sequence: TTG
acatatatactgcaggacat

SEQ ID NO: 245332 - DNA, 20 bp, Artificial Sequence
  Description of Artificial Sequence: Synthetic oligonucleotide
  Target: LAMA2; (-) strand; PAM type: YTN; PAM sequence: TTT
gacatatatactgcaggaca

SEQ ID NO: 245333 - DNA, 20 bp, Artificial Sequence
  Description of Artificial Sequence: Synthetic oligonucleotide
  Target: LAMA2; (-) strand; PAM type: YTN; PAM sequence: TTT
tgacatatatactgcaggac

SEQ ID NO: 245334 - DNA, 20 bp, Artificial Sequence
  Description of Artificial Sequence: Synthetic oligonucleotide
  Target: LAMA2; (-) strand; PAM type: YTN; PAM sequence: TTG
acccatgtattttgacatat

SEQ ID NO: 245335 - DNA, 20 bp, Artificial Sequence
  Description of Artificial Sequence: Synthetic oligonucleotide
  Target: LAMA2; (-) strand; PAM type: YTN; PAM sequence: TTT
gacccatgtattttgacata

SEQ ID NO: 245336 - DNA, 20 bp, Artificial Sequence
  Description of Artificial Sequence: Synthetic oligonucleotide
  Target: LAMA2; (-) strand; PAM type: YTN; PAM sequence: TTT
tgacccatgtattttgacat

SEQ ID NO: 245337 - DNA, 20 bp, Artificial Sequence
  Description of Artificial Sequence: Synthetic oligonucleotide
  Target: LAMA2; (-) strand; PAM type: YTN; PAM sequence: TTT
ttgacccatgtattttgaca

SEQ ID NO: 245338 - DNA, 20 bp, Artificial Sequence
  Description of Artificial Sequence: Synthetic oligonucleotide
  Target: LAMA2; (-) strand; PAM type: YTN; PAM sequence: CTT
tttgacccatgtattttgac

SEQ ID NO: 245339 - DNA, 20 bp, Artificial Sequence
  Description of Artificial Sequence: Synthetic oligonucleotide
  Target: LAMA2; (-) strand; PAM type: YTN; PAM sequence: TTA
gagtgtctttttgacccatg

SEQ ID NO: 245340 - DNA, 20 bp, Artificial Sequence
  Description of Artificial Sequence: Synthetic oligonucleotide
  Target: LAMA2; (-) strand; PAM type: YTN; PAM sequence: TTT
agagtgtctttttgacccat

SEQ ID NO: 245341 - DNA, 20 bp, Artificial Sequence
  Description of Artificial Sequence: Synthetic oligonucleotide
  Target: LAMA2; (-) strand; PAM type: YTN; PAM sequence: TTT
tagagtgtctttttgaccca

SEQ ID NO: 245342 - DNA, 20 bp, Artificial Sequence
  Description of Artificial Sequence: Synthetic oligonucleotide
  Target: LAMA2; (-) strand; PAM type: YTN; PAM sequence: CTA
ttttagagtgtctttttgac

SEQ ID NO: 245343 - DNA, 20 bp, Artificial Sequence
  Description of Artificial Sequence: Synthetic oligonucleotide
  Target: LAMA2; (-) strand; PAM type: YTN; PAM sequence: CTG
ctattttagagtgtcttttt

SEQ ID NO: 245344 - DNA, 20 bp, Artificial Sequence
  Description of Artificial Sequence: Synthetic oligonucleotide
  Target: LAMA2; (-) strand; PAM type: YTN; PAM sequence: TTG
gagactgctattttagagtg

SEQ ID NO: 245345 - DNA, 20 bp, Artificial Sequence
  Description of Artificial Sequence: Synthetic oligonucleotide
  Target: LAMA2; (-) strand; PAM type: YTN; PAM sequence: CTT
ggagactgctattttagagt

SEQ ID NO: 245346 - DNA, 20 bp, Artificial Sequence
  Description of Artificial Sequence: Synthetic oligonucleotide
  Target: LAMA2; (-) strand; PAM type: YTN; PAM sequence: TTC
ttggagactgctattttaga

SEQ ID NO: 245347 - DNA, 20 bp, Artificial Sequence
  Description of Artificial Sequence: Synthetic oligonucleotide
  Target: LAMA2; (-) strand; PAM type: YTN; PAM sequence: CTG
ggttcttggagactgctatt

SEQ ID NO: 245348 - DNA, 20 bp, Artificial Sequence
  Description of Artificial Sequence: Synthetic oligonucleotide
  Target: LAMA2; (-) strand; PAM type: YTN; PAM sequence: TTC
ctgggttcttggagactgct

SEQ ID NO: 245349 - DNA, 20 bp, Artificial Sequence
  Description of Artificial Sequence: Synthetic oligonucleotide
  Target: LAMA2; (-) strand; PAM type: YTN; PAM sequence: CTT
cctgggttcttggagactgc

SEQ ID NO: 245350 - DNA, 20 bp, Artificial Sequence
  Description of Artificial Sequence: Synthetic oligonucleotide
  Target: LAMA2; (-) strand; PAM type: YTN; PAM sequence: CTA
tggatcacatacttcctggg

SEQ ID NO: 245351 - DNA, 20 bp, Artificial Sequence
  Description of Artificial Sequence: Synthetic oligonucleotide
  Target: LAMA2; (-) strand; PAM type: YTN; PAM sequence: CTC
ctatggatcacatacttcct

SEQ ID NO: 245352 - DNA, 20 bp, Artificial Sequence
  Description of Artificial Sequence: Synthetic oligonucleotide
  Target: LAMA2; (-) strand; PAM type: YTN; PAM sequence: TTA
aagaaaataaaatatgtaca

SEQ ID NO: 245353 - DNA, 20 bp, Artificial Sequence
  Description of Artificial Sequence: Synthetic oligonucleotide
  Target: LAMA2; (-) strand; PAM type: YTN; PAM sequence: TTT
aaagaaaataaaatatgtac

SEQ ID NO: 245354 - DNA, 20 bp, Artificial Sequence
  Description of Artificial Sequence: Synthetic oligonucleotide
  Target: LAMA2; (-) strand; PAM type: YTN; PAM sequence: TTT
taaagaaaataaaatatgta

SEQ ID NO: 245355 - DNA, 20 bp, Artificial Sequence
  Description of Artificial Sequence: Synthetic oligonucleotide
  Target: LAMA2; (-) strand; PAM type: YTN; PAM sequence: TTT
ttaaagaaaataaaatatgt

SEQ ID NO: 245356 - DNA, 20 bp, Artificial Sequence
  Description of Artificial Sequence: Synthetic oligonucleotide
  Target: LAMA2; (-) strand; PAM type: YTN; PAM sequence: TTT
tttaaagaaaataaaatatg

SEQ ID NO: 245357 - DNA, 20 bp, Artificial Sequence
  Description of Artificial Sequence: Synthetic oligonucleotide
  Target: LAMA2; (-) strand; PAM type: YTN; PAM sequence: TTA
ttttttaaagaaaataaaat

SEQ ID NO: 245358 - DNA, 20 bp, Artificial Sequence
  Description of Artificial Sequence: Synthetic oligonucleotide
  Target: LAMA2; (-) strand; PAM type: YTN; PAM sequence: CTT
attttttaaagaaaataaaa

SEQ ID NO: 245359 - DNA, 20 bp, Artificial Sequence
  Description of Artificial Sequence: Synthetic oligonucleotide
  Target: LAMA2; (-) strand; PAM type: YTN; PAM sequence: CTG
tcttattttttaaagaaaat

SEQ ID NO: 245360 - DNA, 20 bp, Artificial Sequence
  Description of Artificial Sequence: Synthetic oligonucleotide
  Target: LAMA2; (-) strand; PAM type: YTN; PAM sequence: TTG
agaagtgtctgtcttatttt

SEQ ID NO: 245361 - DNA, 20 bp, Artificial Sequence
  Description of Artificial Sequence: Synthetic oligonucleotide
  Target: LAMA2; (-) strand; PAM type: YTN; PAM sequence: TTT
gagaagtgtctgtcttattt

SEQ ID NO: 245362 - DNA, 20 bp, Artificial Sequence
  Description of Artificial Sequence: Synthetic oligonucleotide
  Target: LAMA2; (-) strand; PAM type: YTN; PAM sequence: TTT
tgagaagtgtctgtcttatt

SEQ ID NO: 245363 - DNA, 20 bp, Artificial Sequence
  Description of Artificial Sequence: Synthetic oligonucleotide
  Target: LAMA2; (-) strand; PAM type: YTN; PAM sequence: CTT
ttgagaagtgtctgtcttat

SEQ ID NO: 245364 - DNA, 20 bp, Artificial Sequence
  Description of Artificial Sequence: Synthetic oligonucleotide
  Target: LAMA2; (-) strand; PAM type: YTN; PAM sequence: TTC
ttttgagaagtgtctgtctt

SEQ ID NO: 245365 - DNA, 20 bp, Artificial Sequence
  Description of Artificial Sequence: Synthetic oligonucleotide
  Target: LAMA2; (-) strand; PAM type: YTN; PAM sequence: CTT
cttttgagaagtgtctgtct

SEQ ID NO: 245366 - DNA, 20 bp, Artificial Sequence
  Description of Artificial Sequence: Synthetic oligonucleotide
  Target: LAMA2; (-) strand; PAM type: YTN; PAM sequence: CTG
cataaatgtcttcttttgag

SEQ ID NO: 245367 - DNA, 20 bp, Artificial Sequence
  Description of Artificial Sequence: Synthetic oligonucleotide
  Target: LAMA2; (-) strand; PAM type: YTN; PAM sequence: TTG
gctgcataaatgtcttcttt

SEQ ID NO: 245368 - DNA, 20 bp, Artificial Sequence
  Description of Artificial Sequence: Synthetic oligonucleotide
  Target: LAMA2; (-) strand; PAM type: YTN; PAM sequence: TTT
ggctgcataaatgtcttctt

SEQ ID NO: 245369 - DNA, 20 bp, Artificial Sequence
  Description of Artificial Sequence: Synthetic oligonucleotide
  Target: LAMA2; (-) strand; PAM type: YTN; PAM sequence: TTT
tggctgcataaatgtcttct

SEQ ID NO: 245370 - DNA, 20 bp, Artificial Sequence
  Description of Artificial Sequence: Synthetic oligonucleotide
  Target: LAMA2; (-) strand; PAM type: YTN; PAM sequence: TTT
ttggctgcataaatgtcttc

SEQ ID NO: 245371 - DNA, 20 bp, Artificial Sequence
  Description of Artificial Sequence: Synthetic oligonucleotide
  Target: LAMA2; (-) strand; PAM type: YTN; PAM sequence: TTT
tttggctgcataaatgtctt

SEQ ID NO: 245372 - DNA, 20 bp, Artificial Sequence
  Description of Artificial Sequence: Synthetic oligonucleotide
  Target: LAMA2; (-) strand; PAM type: YTN; PAM sequence: TTC
atgtgttttttggctgcata

SEQ ID NO: 245373 - DNA, 20 bp, Artificial Sequence
  Description of Artificial Sequence: Synthetic oligonucleotide
  Target: LAMA2; (-) strand; PAM type: YTN; PAM sequence: TTT
catgtgttttttggctgcat

SEQ ID NO: 245374 - DNA, 20 bp, Artificial Sequence
  Description of Artificial Sequence: Synthetic oligonucleotide
  Target: LAMA2; (-) strand; PAM type: YTN; PAM sequence: TTT
tcatgtgttttttggctgca

SEQ ID NO: 245375 - DNA, 20 bp, Artificial Sequence
  Description of Artificial Sequence: Synthetic oligonucleotide
  Target: LAMA2; (-) strand; PAM type: YTN; PAM sequence: TTT
ttcatgtgttttttggctgc

SEQ ID NO: 245376 - DNA, 20 bp, Artificial Sequence
  Description of Artificial Sequence: Synthetic oligonucleotide
  Target: LAMA2; (-) strand; PAM type: YTN; PAM sequence: TTT
tttcatgtgttttttggctg

SEQ ID NO: 245377 - DNA, 20 bp, Artificial Sequence
  Description of Artificial Sequence: Synthetic oligonucleotide
  Target: LAMA2; (-) strand; PAM type: YTN; PAM sequence: CTG
atggccagtgatggtgagca

SEQ ID NO: 245378 - DNA, 20 bp, Artificial Sequence
  Description of Artificial Sequence: Synthetic oligonucleotide
  Target: LAMA2; (-) strand; PAM type: YTN; PAM sequence: CTC
tgatggccagtgatggtgag

SEQ ID NO: 245379 - DNA, 20 bp, Artificial Sequence
  Description of Artificial Sequence: Synthetic oligonucleotide
  Target: LAMA2; (-) strand; PAM type: YTN; PAM sequence: TTC
tctgatggccagtgatggtg

SEQ ID NO: 245380 - DNA, 20 bp, Artificial Sequence
  Description of Artificial Sequence: Synthetic oligonucleotide
  Target: LAMA2; (-) strand; PAM type: YTN; PAM sequence: TTT
ctctgatggccagtgatggt

SEQ ID NO: 245381 - DNA, 20 bp, Artificial Sequence
  Description of Artificial Sequence: Synthetic oligonucleotide
  Target: LAMA2; (-) strand; PAM type: YTN; PAM sequence: TTG
catttctctgatggccagtg

SEQ ID NO: 245382 - DNA, 20 bp, Artificial Sequence
  Description of Artificial Sequence: Synthetic oligonucleotide
  Target: LAMA2; (-) strand; PAM type: YTN; PAM sequence: TTT
gcatttctctgatggccagt

SEQ ID NO: 245383 - DNA, 20 bp, Artificial Sequence
  Description of Artificial Sequence: Synthetic oligonucleotide
  Target: LAMA2; (-) strand; PAM type: YTN; PAM sequence: TTG
atttgcatttctctgatggc

SEQ ID NO: 245384 - DNA, 20 bp, Artificial Sequence
  Description of Artificial Sequence: Synthetic oligonucleotide
  Target: LAMA2; (-) strand; PAM type: YTN; PAM sequence: TTT
gatttgcatttctctgatgg

SEQ ID NO: 245385 - DNA, 20 bp, Artificial Sequence
  Description of Artificial Sequence: Synthetic oligonucleotide
  Target: LAMA2; (-) strand; PAM type: YTN; PAM sequence: TTT
tgatttgcatttctctgatg

SEQ ID NO: 245386 - DNA, 20 bp, Artificial Sequence
  Description of Artificial Sequence: Synthetic oligonucleotide
  Target: LAMA2; (-) strand; PAM type: YTN; PAM sequence: TTG
tggttttgatttgcatttct

SEQ ID NO: 245387 - DNA, 20 bp, Artificial Sequence
  Description of Artificial Sequence: Synthetic oligonucleotide
  Target: LAMA2; (-) strand; PAM type: YTN; PAM sequence: CTC
attgtggttttgatttgcat

SEQ ID NO: 245388 - DNA, 20 bp, Artificial Sequence
  Description of Artificial Sequence: Synthetic oligonucleotide
  Target: LAMA2; (-) strand; PAM type: YTN; PAM sequence: TTG
gtgtgagatggtatctcatt

SEQ ID NO: 245389 - DNA, 20 bp, Artificial Sequence
  Description of Artificial Sequence: Synthetic oligonucleotide
  Target: LAMA2; (-) strand; PAM type: YTN; PAM sequence: CTA
attggtgtgagatggtatct

SEQ ID NO: 245390 - DNA, 20 bp, Artificial Sequence
  Description of Artificial Sequence: Synthetic oligonucleotide
  Target: LAMA2; (-) strand; PAM type: YTN; PAM sequence: TTC
taattggtgtgagatggtat

SEQ ID NO: 245391 - DNA, 20 bp, Artificial Sequence
  Description of Artificial Sequence: Synthetic oligonucleotide
  Target: LAMA2; (-) strand; PAM type: YTN; PAM sequence: CTG
ccattctaattggtgtgaga

SEQ ID NO: 245392 - DNA, 20 bp, Artificial Sequence
  Description of Artificial Sequence: Synthetic oligonucleotide
  Target: LAMA2; (-) strand; PAM type: YTN; PAM sequence: TTA
atgactgccattctaattgg

SEQ ID NO: 245393 - DNA, 20 bp, Artificial Sequence
  Description of Artificial Sequence: Synthetic oligonucleotide
  Target: LAMA2; (-) strand; PAM type: YTN; PAM sequence: TTT
aatgactgccattctaattg

SEQ ID NO: 245394 - DNA, 20 bp, Artificial Sequence
  Description of Artificial Sequence: Synthetic oligonucleotide
  Target: LAMA2; (-) strand; PAM type: YTN; PAM sequence: TTT
taatgactgccattctaatt

SEQ ID NO: 245395 - DNA, 20 bp, Artificial Sequence
  Description of Artificial Sequence: Synthetic oligonucleotide
  Target: LAMA2; (-) strand; PAM type: YTN; PAM sequence: TTT
ttaatgactgccattctaat

SEQ ID NO: 245396 - DNA, 20 bp, Artificial Sequence
  Description of Artificial Sequence: Synthetic oligonucleotide
  Target: LAMA2; (-) strand; PAM type: YTN; PAM sequence: CTT
tttaatgactgccattctaa

SEQ ID NO: 245397 - DNA, 20 bp, Artificial Sequence
  Description of Artificial Sequence: Synthetic oligonucleotide
  Target: LAMA2; (-) strand; PAM type: YTN; PAM sequence: CTG
actttttaatgactgccatt

SEQ ID NO: 245398 - DNA, 20 bp, Artificial Sequence
  Description of Artificial Sequence: Synthetic oligonucleotide
  Target: LAMA2; (-) strand; PAM type: YTN; PAM sequence: TTC
ctgactttttaatgactgcc

SEQ ID NO: 245399 - DNA, 20 bp, Artificial Sequence
  Description of Artificial Sequence: Synthetic oligonucleotide
  Target: LAMA2; (-) strand; PAM type: YTN; PAM sequence: TTT
cctgactttttaatgactgc

SEQ ID NO: 245400 - DNA, 20 bp, Artificial Sequence
  Description of Artificial Sequence: Synthetic oligonucleotide
  Target: LAMA2; (-) strand; PAM type: YTN; PAM sequence: TTG
tttcctgactttttaatgac

SEQ ID NO: 245401 - DNA, 20 bp, Artificial Sequence
  Description of Artificial Sequence: Synthetic oligonucleotide
  Target: LAMA2; (-) strand; PAM type: YTN; PAM sequence: CTG
ttgtttcctgactttttaat

SEQ ID NO: 245402 - DNA, 20 bp, Artificial Sequence
  Description of Artificial Sequence: Synthetic oligonucleotide
  Target: LAMA2; (-) strand; PAM type: YTN; PAM sequence: CTC
cagcatctgttgtttcctga

SEQ ID NO: 245403 - DNA, 20 bp, Artificial Sequence
  Description of Artificial Sequence: Synthetic oligonucleotide
  Target: LAMA2; (-) strand; PAM type: YTN; PAM sequence: CTC
tccagcatctgttgtttcct

SEQ ID NO: 245404 - DNA, 20 bp, Artificial Sequence
  Description of Artificial Sequence: Synthetic oligonucleotide
  Target: LAMA2; (-) strand; PAM type: YTN; PAM sequence: CTC
cacatcctctccagcatctg

SEQ ID NO: 245405 - DNA, 20 bp, Artificial Sequence
  Description of Artificial Sequence: Synthetic oligonucleotide
  Target: LAMA2; (-) strand; PAM type: YTN; PAM sequence: TTC
tccacatcctctccagcatc

SEQ ID NO: 245406 - DNA, 20 bp, Artificial Sequence
  Description of Artificial Sequence: Synthetic oligonucleotide
  Target: LAMA2; (-) strand; PAM type: YTN; PAM sequence: TTT
ctccacatcctctccagcat

SEQ ID NO: 245407 - DNA, 20 bp, Artificial Sequence
  Description of Artificial Sequence: Synthetic oligonucleotide
  Target: LAMA2; (-) strand; PAM type: YTN; PAM sequence: CTA
tttctccacatcctctccag

SEQ ID NO: 245408 - DNA, 20 bp, Artificial Sequence
  Description of Artificial Sequence: Synthetic oligonucleotide
  Target: LAMA2; (-) strand; PAM type: YTN; PAM sequence: TTC
ctatttctccacatcctctc

SEQ ID NO: 245409 - DNA, 20 bp, Artificial Sequence
  Description of Artificial Sequence: Synthetic oligonucleotide
  Target: LAMA2; (-) strand; PAM type: YTN; PAM sequence: TTA
cagtcccaccaacagtgtaa

SEQ ID NO: 245410 - DNA, 20 bp, Artificial Sequence
  Description of Artificial Sequence: Synthetic oligonucleotide
  Target: LAMA2; (-) strand; PAM type: YTN; PAM sequence: TTT
acagtcccaccaacagtgta

SEQ ID NO: 245411 - DNA, 20 bp, Artificial Sequence
  Description of Artificial Sequence: Synthetic oligonucleotide
  Target: LAMA2; (-) strand; PAM type: YTN; PAM sequence: CTA
gtttacagtcccaccaacag

SEQ ID NO: 245412 - DNA, 20 bp, Artificial Sequence
  Description of Artificial Sequence: Synthetic oligonucleotide
  Target: LAMA2; (-) strand; PAM type: YTN; PAM sequence: TTA
aactagtttacagtcccacc

SEQ ID NO: 245413 - DNA, 20 bp, Artificial Sequence
  Description of Artificial Sequence: Synthetic oligonucleotide
  Target: LAMA2; (-) strand; PAM type: YTN; PAM sequence: TTC
cacaatggttaaactagttt

SEQ ID NO: 245414 - DNA, 20 bp, Artificial Sequence
  Description of Artificial Sequence: Synthetic oligonucleotide
  Target: LAMA2; (-) strand; PAM type: YTN; PAM sequence: CTT
ccacaatggttaaactagtt

SEQ ID NO: 245415 - DNA, 20 bp, Artificial Sequence
  Description of Artificial Sequence: Synthetic oligonucleotide
  Target: LAMA2; (-) strand; PAM type: YTN; PAM sequence: CTG
acttccacaatggttaaact

SEQ ID NO: 245416 - DNA, 20 bp, Artificial Sequence
  Description of Artificial Sequence: Synthetic oligonucleotide
  Target: LAMA2; (-) strand; PAM type: YTN; PAM sequence: CTG
aggaatcaccacactgactt

SEQ ID NO: 245417 - DNA, 20 bp, Artificial Sequence
  Description of Artificial Sequence: Synthetic oligonucleotide
  Target: LAMA2; (-) strand; PAM type: YTN; PAM sequence: CTA
gatccctgaggaatcaccac

SEQ ID NO: 245418 - DNA, 20 bp, Artificial Sequence
  Description of Artificial Sequence: Synthetic oligonucleotide
  Target: LAMA2; (-) strand; PAM type: YTN; PAM sequence: TTC
tagatccctgaggaatcacc

SEQ ID NO: 245419 - DNA, 20 bp, Artificial Sequence
  Description of Artificial Sequence: Synthetic oligonucleotide
  Target: LAMA2; (-) strand; PAM type: YTN; PAM sequence: TTC
aagttctagatccctgagga

SEQ ID NO: 245420 - DNA, 20 bp, Artificial Sequence
  Description of Artificial Sequence: Synthetic oligonucleotide
  Target: LAMA2; (-) strand; PAM type: YTN; PAM sequence: TTT
caagttctagatccctgagg

SEQ ID NO: 245421 - DNA, 20 bp, Artificial Sequence
  Description of Artificial Sequence: Synthetic oligonucleotide
  Target: LAMA2; (-) strand; PAM type: YTN; PAM sequence: CTG
ggtcaaatggtatttcaagt

SEQ ID NO: 245422 - DNA, 20 bp, Artificial Sequence
  Description of Artificial Sequence: Synthetic oligonucleotide
  Target: LAMA2; (-) strand; PAM type: YTN; PAM sequence: TTG
ggtacatacccagtaatggg

SEQ ID NO: 245423 - DNA, 20 bp, Artificial Sequence
  Description of Artificial Sequence: Synthetic oligonucleotide
  Target: LAMA2; (-) strand; PAM type: YTN; PAM sequence: TTT
gggtacatacccagtaatgg

SEQ ID NO: 245424 - DNA, 20 bp, Artificial Sequence
  Description of Artificial Sequence: Synthetic oligonucleotide
  Target: LAMA2; (-) strand; PAM type: YTN; PAM sequence: CTT
tgggtacatacccagtaatg

SEQ ID NO: 245425 - DNA, 20 bp, Artificial Sequence
  Description of Artificial Sequence: Synthetic oligonucleotide
  Target: LAMA2; (-) strand; PAM type: YTN; PAM sequence: TTA
tagtcctttgggtacatacc

SEQ ID NO: 245426 - DNA, 20 bp, Artificial Sequence
  Description of Artificial Sequence: Synthetic oligonucleotide
  Target: LAMA2; (-) strand; PAM type: YTN; PAM sequence: TTT
atagtcctttgggtacatac

SEQ ID NO: 245427 - DNA, 20 bp, Artificial Sequence
  Description of Artificial Sequence: Synthetic oligonucleotide
  Target: LAMA2; (-) strand; PAM type: YTN; PAM sequence: TTA
tagcagcatgatttatagtc

SEQ ID NO: 245428 - DNA, 20 bp, Artificial Sequence
  Description of Artificial Sequence: Synthetic oligonucleotide
  Target: LAMA2; (-) strand; PAM type: YTN; PAM sequence: TTT
atagcagcatgatttatagt

SEQ ID NO: 245429 - DNA, 20 bp, Artificial Sequence
  Description of Artificial Sequence: Synthetic oligonucleotide
  Target: LAMA2; (-) strand; PAM type: YTN; PAM sequence: CTT
tatagcagcatgatttatag

SEQ ID NO: 245430 - DNA, 20 bp, Artificial Sequence
  Description of Artificial Sequence: Synthetic oligonucleotide
  Target: LAMA2; (-) strand; PAM type: YTN; PAM sequence: TTG
tgaatagtgccacaataaac

SEQ ID NO: 245431 - DNA, 20 bp, Artificial Sequence
  Description of Artificial Sequence: Synthetic oligonucleotide
  Target: LAMA2; (-) strand; PAM type: YTN; PAM sequence: CTA
ttgtgaatagtgccacaata

SEQ ID NO: 245432 - DNA, 20 bp, Artificial Sequence
  Description of Artificial Sequence: Synthetic oligonucleotide
  Target: LAMA2; (-) strand; PAM type: YTN; PAM sequence: TTG
ctattgtgaatagtgccaca

SEQ ID NO: 245433 - DNA, 20 bp, Artificial Sequence
  Description of Artificial Sequence: Synthetic oligonucleotide
  Target: LAMA2; (-) strand; PAM type: YTN; PAM sequence: TTT
gctattgtgaatagtgccac

SEQ ID NO: 245434 - DNA, 20 bp, Artificial Sequence
  Description of Artificial Sequence: Synthetic oligonucleotide
  Target: LAMA2; (-) strand; PAM type: YTN; PAM sequence: CTT
tgctattgtgaatagtgcca

SEQ ID NO: 245435 - DNA, 20 bp, Artificial Sequence
  Description of Artificial Sequence: Synthetic oligonucleotide
  Target: LAMA2; (-) strand; PAM type: YTN; PAM sequence: TTC
caagtctttgctattgtgaa

SEQ ID NO: 245436 - DNA, 20 bp, Artificial Sequence
  Description of Artificial Sequence: Synthetic oligonucleotide
  Target: LAMA2; (-) strand; PAM type: YTN; PAM sequence: TTG
gttccaagtctttgctattg

SEQ ID NO: 245437 - DNA, 20 bp, Artificial Sequence
  Description of Artificial Sequence: Synthetic oligonucleotide
  Target: LAMA2; (-) strand; PAM type: YTN; PAM sequence: TTG
ggttggttccaagtctttgc

SEQ ID NO: 245438 - DNA, 20 bp, Artificial Sequence
  Description of Artificial Sequence: Synthetic oligonucleotide
  Target: LAMA2; (-) strand; PAM type: YTN; PAM sequence: TTT
gggttggttccaagtctttg

SEQ ID NO: 245439 - DNA, 20 bp, Artificial Sequence
  Description of Artificial Sequence: Synthetic oligonucleotide
  Target: LAMA2; (-) strand; PAM type: YTN; PAM sequence: TTG
gacatttgggttggttccaa

SEQ ID NO: 245440 - DNA, 20 bp, Artificial Sequence
  Description of Artificial Sequence: Synthetic oligonucleotide
  Target: LAMA2; (-) strand; PAM type: YTN; PAM sequence: TTG
ttggacatttgggttggttc

SEQ ID NO: 245441 - DNA, 20 bp, Artificial Sequence
  Description of Artificial Sequence: Synthetic oligonucleotide
  Target: LAMA2; (-) strand; PAM type: YTN; PAM sequence: CTA
tcattgttggacatttgggt

SEQ ID NO: 245442 - DNA, 20 bp, Artificial Sequence
  Description of Artificial Sequence: Synthetic oligonucleotide
  Target: LAMA2; (-) strand; PAM type: YTN; PAM sequence: TTA
atccagtctatcattgttgg

SEQ ID NO: 245443 - DNA, 20 bp, Artificial Sequence
  Description of Artificial Sequence: Synthetic oligonucleotide
  Target: LAMA2; (-) strand; PAM type: YTN; PAM sequence: CTT
aatccagtctatcattgttg

SEQ ID NO: 245444 - DNA, 20 bp, Artificial Sequence
  Description of Artificial Sequence: Synthetic oligonucleotide
  Target: LAMA2; (-) strand; PAM type: YTN; PAM sequence: TTC
ttaatccagtctatcattgt

SEQ ID NO: 245445 - DNA, 20 bp, Artificial Sequence
  Description of Artificial Sequence: Synthetic oligonucleotide
  Target: LAMA2; (-) strand; PAM type: YTN; PAM sequence: TTT
cttaatccagtctatcattg

SEQ ID NO: 245446 - DNA, 20 bp, Artificial Sequence
  Description of Artificial Sequence: Synthetic oligonucleotide
  Target: LAMA2; (-) strand; PAM type: YTN; PAM sequence: TTT
tcttaatccagtctatcatt

SEQ ID NO: 245447 - DNA, 20 bp, Artificial Sequence
  Description of Artificial Sequence: Synthetic oligonucleotide
  Target: LAMA2; (-) strand; PAM type: YTN; PAM sequence: TTC
catggtgtatatgtgccaca

SEQ ID NO: 245448 - DNA, 20 bp, Artificial Sequence
  Description of Artificial Sequence: Synthetic oligonucleotide
  Target: LAMA2; (-) strand; PAM type: YTN; PAM sequence: CTG
catagtattccatggtgtat

SEQ ID NO: 245449 - DNA, 20 bp, Artificial Sequence
  Description of Artificial Sequence: Synthetic oligonucleotide
  Target: LAMA2; (-) strand; PAM type: YTN; PAM sequence: TTA
tggctgcatagtattccatg

SEQ ID NO: 245450 - DNA, 20 bp, Artificial Sequence
  Description of Artificial Sequence: Synthetic oligonucleotide
  Target: LAMA2; (-) strand; PAM type: YTN; PAM sequence: TTT
atggctgcatagtattccat

SEQ ID NO: 245451 - DNA, 20 bp, Artificial Sequence
  Description of Artificial Sequence: Synthetic oligonucleotide
  Target: LAMA2; (-) strand; PAM type: YTN; PAM sequence: TTT
tatggctgcatagtattcca

SEQ ID NO: 245452 - DNA, 20 bp, Artificial Sequence
  Description of Artificial Sequence: Synthetic oligonucleotide
  Target: LAMA2; (-) strand; PAM type: YTN; PAM sequence: TTT
ttatggctgcatagtattcc

SEQ ID NO: 245453 - DNA, 20 bp, Artificial Sequence
  Description of Artificial Sequence: Synthetic oligonucleotide
  Target: LAMA2; (-) strand; PAM type: YTN; PAM sequence: TTT
tttatggctgcatagtattc

SEQ ID NO: 245454 - DNA, 20 bp, Artificial Sequence
  Description of Artificial Sequence: Synthetic oligonucleotide
  Target: LAMA2; (-) strand; PAM type: YTN; PAM sequence: CTC
atcattttttatggctgcat

SEQ ID NO: 245455 - DNA, 20 bp, Artificial Sequence
  Description of Artificial Sequence: Synthetic oligonucleotide
  Target: LAMA2; (-) strand; PAM type: YTN; PAM sequence: CTA
caaaggacatgaactcatca

SEQ ID NO: 245456 - DNA, 20 bp, Artificial Sequence
  Description of Artificial Sequence: Synthetic oligonucleotide
  Target: LAMA2; (-) strand; PAM type: YTN; PAM sequence: TTC
atccatgtccctacaaagga

SEQ ID NO: 245457 - DNA, 20 bp, Artificial Sequence
  Description of Artificial Sequence: Synthetic oligonucleotide
  Target: LAMA2; (-) strand; PAM type: YTN; PAM sequence: TTT
catccatgtccctacaaagg

SEQ ID NO: 245458 - DNA, 20 bp, Artificial Sequence
  Description of Artificial Sequence: Synthetic oligonucleotide
  Target: LAMA2; (-) strand; PAM type: YTN; PAM sequence: TTC
caatttcatccatgtcccta

SEQ ID NO: 245459 - DNA, 20 bp, Artificial Sequence
  Description of Artificial Sequence: Synthetic oligonucleotide
  Target: LAMA2; (-) strand; PAM type: YTN; PAM sequence: TTT
ccaatttcatccatgtccct

SEQ ID NO: 245460 - DNA, 20 bp, Artificial Sequence
  Description of Artificial Sequence: Synthetic oligonucleotide
  Target: LAMA2; (-) strand; PAM type: YTN; PAM sequence: CTG
agaatgatgatttccaattt

SEQ ID NO: 245461 - DNA, 20 bp, Artificial Sequence
  Description of Artificial Sequence: Synthetic oligonucleotide
  Target: LAMA2; (-) strand; PAM type: YTN; PAM sequence: TTA
ctgagaatgatgatttccaa

SEQ ID NO: 245462 - DNA, 20 bp, Artificial Sequence
  Description of Artificial Sequence: Synthetic oligonucleotide
  Target: LAMA2; (-) strand; PAM type: YTN; PAM sequence: TTT
actgagaatgatgatttcca

SEQ ID NO: 245463 - DNA, 20 bp, Artificial Sequence
  Description of Artificial Sequence: Synthetic oligonucleotide
  Target: LAMA2; (-) strand; PAM type: YTN; PAM sequence: TTG
tgatagtttactgagaatga

SEQ ID NO: 245464 - DNA, 20 bp, Artificial Sequence
  Description of Artificial Sequence: Synthetic oligonucleotide
  Target: LAMA2; (-) strand; PAM type: YTN; PAM sequence: CTT
gtgatagtttactgagaatg

SEQ ID NO: 245465 - DNA, 20 bp, Artificial Sequence
  Description of Artificial Sequence: Synthetic oligonucleotide
  Target: LAMA2; (-) strand; PAM type: YTN; PAM sequence: TTG
tccttgtgatagtttactga

SEQ ID NO: 245466 - DNA, 20 bp, Artificial Sequence
  Description of Artificial Sequence: Synthetic oligonucleotide
  Target: LAMA2; (-) strand; PAM type: YTN; PAM sequence: TTT
gtccttgtgatagtttactg

SEQ ID NO: 245467 - DNA, 20 bp, Artificial Sequence
  Description of Artificial Sequence: Synthetic oligonucleotide
  Target: LAMA2; (-) strand; PAM type: YTN; PAM sequence: TTT
tgtccttgtgatagtttact

SEQ ID NO: 245468 - DNA, 20 bp, Artificial Sequence
  Description of Artificial Sequence: Synthetic oligonucleotide
  Target: LAMA2; (-) strand; PAM type: YTN; PAM sequence: TTT
ttgtccttgtgatagtttac

SEQ ID NO: 245469 - DNA, 20 bp, Artificial Sequence
  Description of Artificial Sequence: Synthetic oligonucleotide
  Target: LAMA2; (-) strand; PAM type: YTN; PAM sequence: TTT
tttgtccttgtgatagttta

SEQ ID NO: 245470 - DNA, 20 bp, Artificial Sequence
  Description of Artificial Sequence: Synthetic oligonucleotide
  Target: LAMA2; (-) strand; PAM type: YTN; PAM sequence: TTT
ttttgtccttgtgatagttt

SEQ ID NO: 245471 - DNA, 20 bp, Artificial Sequence
  Description of Artificial Sequence: Synthetic oligonucleotide
  Target: LAMA2; (-) strand; PAM type: YTN; PAM sequence: TTG
tttttttgtccttgtgatag

SEQ ID NO: 245472 - DNA, 20 bp, Artificial Sequence
  Description of Artificial Sequence: Synthetic oligonucleotide
  Target: LAMA2; (-) strand; PAM type: YTN; PAM sequence: TTT
gtttttttgtccttgtgata

SEQ ID NO: 245473 - DNA, 20 bp, Artificial Sequence
  Description of Artificial Sequence: Synthetic oligonucleotide
  Target: LAMA2; (-) strand; PAM type: YTN; PAM sequence: CTA
tgagtgagaacatgtggtgt

SEQ ID NO: 245474 - DNA, 20 bp, Artificial Sequence
  Description of Artificial Sequence: Synthetic oligonucleotide
  Target: LAMA2; (-) strand; PAM type: YTN; PAM sequence: TTC
ccacctatgagtgagaacat

SEQ ID NO: 245475 - DNA, 20 bp, Artificial Sequence
  Description of Artificial Sequence: Synthetic oligonucleotide
  Target: LAMA2; (-) strand; PAM type: YTN; PAM sequence: TTC
aattcccacctatgagtgag

SEQ ID NO: 245476 - DNA, 20 bp, Artificial Sequence
  Description of Artificial Sequence: Synthetic oligonucleotide
  Target: LAMA2; (-) strand; PAM type: YTN; PAM sequence: TTG
ttcaattcccacctatgagt

SEQ ID NO: 245477 - DNA, 20 bp, Artificial Sequence
  Description of Artificial Sequence: Synthetic oligonucleotide
  Target: LAMA2; (-) strand; PAM type: YTN; PAM sequence: CTC
attgttcaattcccacctat

SEQ ID NO: 245478 - DNA, 20 bp, Artificial Sequence
  Description of Artificial Sequence: Synthetic oligonucleotide
  Target: LAMA2; (-) strand; PAM type: YTN; PAM sequence: TTC
tcattgttcaattcccacct

SEQ ID NO: 245479 - DNA, 20 bp, Artificial Sequence
  Description of Artificial Sequence: Synthetic oligonucleotide
  Target: LAMA2; (-) strand; PAM type: YTN; PAM sequence: CTG
tgtccatgtgttctcattgt

SEQ ID NO: 245480 - DNA, 20 bp, Artificial Sequence
  Description of Artificial Sequence: Synthetic oligonucleotide
  Target: LAMA2; (-) strand; PAM type: YTN; PAM sequence: TTC
ctgtgtccatgtgttctcat

SEQ ID NO: 245481 - DNA, 20 bp, Artificial Sequence
  Description of Artificial Sequence: Synthetic oligonucleotide
  Target: LAMA2; (-) strand; PAM type: YTN; PAM sequence: CTT
cctgtgtccatgtgttctca

SEQ ID NO: 245482 - DNA, 20 bp, Artificial Sequence
  Description of Artificial Sequence: Synthetic oligonucleotide
  Target: LAMA2; (-) strand; PAM type: YTN; PAM sequence: TTC
cccttcctgtgtccatgtgt

SEQ ID NO: 245483 - DNA, 20 bp, Artificial Sequence
  Description of Artificial Sequence: Synthetic oligonucleotide
  Target: LAMA2; (-) strand; PAM type: YTN; PAM sequence: CTC
ccccccaccccacaacagtc

SEQ ID NO: 245484 - DNA, 20 bp, Artificial Sequence
  Description of Artificial Sequence: Synthetic oligonucleotide
  Target: LAMA2; (-) strand; PAM type: YTN; PAM sequence: CTC
ccccctcccccccaccccac

SEQ ID NO: 245485 - DNA, 20 bp, Artificial Sequence
  Description of Artificial Sequence: Synthetic oligonucleotide
  Target: LAMA2; (-) strand; PAM type: YTN; PAM sequence: CTC
tcccccctcccccccacccc

SEQ ID NO: 245486 - DNA, 20 bp, Artificial Sequence
  Description of Artificial Sequence: Synthetic oligonucleotide
  Target: LAMA2; (-) strand; PAM type: YTN; PAM sequence: CTA
tctctcccccctccccccca

SEQ ID NO: 245487 - DNA, 20 bp, Artificial Sequence
  Description of Artificial Sequence: Synthetic oligonucleotide
  Target: LAMA2; (-) strand; PAM type: YTN; PAM sequence: CTA
atgctatctctcccccctcc

SEQ ID NO: 245488 - DNA, 20 bp, Artificial Sequence
  Description of Artificial Sequence: Synthetic oligonucleotide
  Target: LAMA2; (-) strand; PAM type: YTN; PAM sequence: CTC
ctaatgctatctctcccccc

SEQ ID NO: 245489 - DNA, 20 bp, Artificial Sequence
  Description of Artificial Sequence: Synthetic oligonucleotide
  Target: LAMA2; (-) strand; PAM type: YTN; PAM sequence: TTA
gcatctcctaatgctatctc

SEQ ID NO: 245490 - DNA, 20 bp, Artificial Sequence
  Description of Artificial Sequence: Synthetic oligonucleotide
  Target: LAMA2; (-) strand; PAM type: YTN; PAM sequence: TTT
agcatctcctaatgctatct

SEQ ID NO: 245491 - DNA, 20 bp, Artificial Sequence
  Description of Artificial Sequence: Synthetic oligonucleotide
  Target: LAMA2; (-) strand; PAM type: YTN; PAM sequence: CTC
gtcatttagcatctcctaat

SEQ ID NO: 245492 - DNA, 20 bp, Artificial Sequence
  Description of Artificial Sequence: Synthetic oligonucleotide
  Target: LAMA2; (-) strand; PAM type: YTN; PAM sequence: TTA
actcgtcatttagcatctcc

SEQ ID NO: 245493 - DNA, 20 bp, Artificial Sequence
  Description of Artificial Sequence: Synthetic oligonucleotide
  Target: LAMA2; (-) strand; PAM type: YTN; PAM sequence: CTG
cacccattaactcgtcattt

SEQ ID NO: 245494 - DNA, 20 bp, Artificial Sequence
  Description of Artificial Sequence: Synthetic oligonucleotide
  Target: LAMA2; (-) strand; PAM type: YTN; PAM sequence: CTG
gtgtgctgcacccattaact

SEQ ID NO: 245495 - DNA, 20 bp, Artificial Sequence
  Description of Artificial Sequence: Synthetic oligonucleotide
  Target: LAMA2; (-) strand; PAM type: YTN; PAM sequence: TTA
catatgtatacatgtgccat

SEQ ID NO: 245496 - DNA, 20 bp, Artificial Sequence
  Description of Artificial Sequence: Synthetic oligonucleotide
  Target: LAMA2; (-) strand; PAM type: YTN; PAM sequence: TTA
gttacatatgtatacatgtg

SEQ ID NO: 245497 - DNA, 20 bp, Artificial Sequence
  Description of Artificial Sequence: Synthetic oligonucleotide
  Target: LAMA2; (-) strand; PAM type: YTN; PAM sequence: TTA
gggtacatgtgcaccatgtg

SEQ ID NO: 245498 - DNA, 20 bp, Artificial Sequence
  Description of Artificial Sequence: Synthetic oligonucleotide
  Target: LAMA2; (-) strand; PAM type: YTN; PAM sequence: TTT
agggtacatgtgcaccatgt

SEQ ID NO: 245499 - DNA, 20 bp, Artificial Sequence
  Description of Artificial Sequence: Synthetic oligonucleotide
  Target: LAMA2; (-) strand; PAM type: YTN; PAM sequence: TTT
tagggtacatgtgcaccatg

SEQ ID NO: 245500 - DNA, 20 bp, Artificial Sequence
  Description of Artificial Sequence: Synthetic oligonucleotide
  Target: LAMA2; (-) strand; PAM type: YTN; PAM sequence: TTA
agttttagggtacatgtgca

SEQ ID NO: 245501 - DNA, 20 bp, Artificial Sequence
  Description of Artificial Sequence: Synthetic oligonucleotide
  Target: LAMA2; (-) strand; PAM type: YTN; PAM sequence: TTT
aagttttagggtacatgtgc

SEQ ID NO: 245502 - DNA, 20 bp, Artificial Sequence
  Description of Artificial Sequence: Synthetic oligonucleotide
  Target: LAMA2; (-) strand; PAM type: YTN; PAM sequence: CTT
taagttttagggtacatgtg

SEQ ID NO: 245503 - DNA, 20 bp, Artificial Sequence
  Description of Artificial Sequence: Synthetic oligonucleotide
  Target: LAMA2; (-) strand; PAM type: YTN; PAM sequence: TTA
tactttaagttttagggtac

SEQ ID NO: 245504 - DNA, 20 bp, Artificial Sequence
  Description of Artificial Sequence: Synthetic oligonucleotide
  Target: LAMA2; (-) strand; PAM type: YTN; PAM sequence: TTA
ttatactttaagttttaggg

SEQ ID NO: 245505 - DNA, 20 bp, Artificial Sequence
  Description of Artificial Sequence: Synthetic oligonucleotide
  Target: LAMA2; (-) strand; PAM type: YTN; PAM sequence: TTA
ttattatactttaagtttta

SEQ ID NO: 245506 - DNA, 20 bp, Artificial Sequence
  Description of Artificial Sequence: Synthetic oligonucleotide
  Target: LAMA2; (-) strand; PAM type: YTN; PAM sequence: TTA
ttattattatactttaagtt

SEQ ID NO: 245507 - DNA, 20 bp, Artificial Sequence
  Description of Artificial Sequence: Synthetic oligonucleotide
  Target: LAMA2; (-) strand; PAM type: YTN; PAM sequence: TTT
attattattatactttaagt

SEQ ID NO: 245508 - DNA, 20 bp, Artificial Sequence
  Description of Artificial Sequence: Synthetic oligonucleotide
  Target: LAMA2; (-) strand; PAM type: YTN; PAM sequence: TTT
tattattattatactttaag

SEQ ID NO: 245509 - DNA, 20 bp, Artificial Sequence
  Description of Artificial Sequence: Synthetic oligonucleotide
  Target: LAMA2; (-) strand; PAM type: YTN; PAM sequence: TTA
ttttattattattatacttt

SEQ ID NO: 245510 - DNA, 20 bp, Artificial Sequence
  Description of Artificial Sequence: Synthetic oligonucleotide
  Target: LAMA2; (-) strand; PAM type: YTN; PAM sequence: TTT
attttattattattatactt

SEQ ID NO: 245511 - DNA, 20 bp, Artificial Sequence
  Description of Artificial Sequence: Synthetic oligonucleotide
  Target: LAMA2; (-) strand; PAM type: YTN; PAM sequence: TTT
tattttattattattatact

SEQ ID NO: 245512 - DNA, 20 bp, Artificial Sequence
  Description of Artificial Sequence: Synthetic oligonucleotide
  Target: LAMA2; (-) strand; PAM type: YTN; PAM sequence: TTT
ttattttattattattatac

SEQ ID NO: 245513 - DNA, 20 bp, Artificial Sequence
  Description of Artificial Sequence: Synthetic oligonucleotide
  Target: LAMA2; (-) strand; PAM type: YTN; PAM sequence: TTA
tttttattttattattatta

SEQ ID NO: 245514 - DNA, 20 bp, Artificial Sequence
  Description of Artificial Sequence: Synthetic oligonucleotide
  Target: LAMA2; (-) strand; PAM type: YTN; PAM sequence: TTT
atttttattttattattatt

SEQ ID NO: 245515 - DNA, 20 bp, Artificial Sequence
  Description of Artificial Sequence: Synthetic oligonucleotide
  Target: LAMA2; (-) strand; PAM type: YTN; PAM sequence: TTT
tatttttattttattattat

SEQ ID NO: 245516 - DNA, 20 bp, Artificial Sequence
  Description of Artificial Sequence: Synthetic oligonucleotide
  Target: LAMA2; (-) strand; PAM type: YTN; PAM sequence: TTA
ttttatttttattttattat

SEQ ID NO: 245517 - DNA, 20 bp, Artificial Sequence
  Description of Artificial Sequence: Synthetic oligonucleotide
  Target: LAMA2; (-) strand; PAM type: YTN; PAM sequence: TTT
attttatttttattttatta

SEQ ID NO: 245518 - DNA, 20 bp, Artificial Sequence
  Description of Artificial Sequence: Synthetic oligonucleotide
  Target: LAMA2; (-) strand; PAM type: YTN; PAM sequence: TTT
tattttatttttattttatt

SEQ ID NO: 245519 - DNA, 20 bp, Artificial Sequence
  Description of Artificial Sequence: Synthetic oligonucleotide
  Target: LAMA2; (-) strand; PAM type: YTN; PAM sequence: TTA
ttttattttatttttatttt

SEQ ID NO: 245520 - DNA, 20 bp, Artificial Sequence
  Description of Artificial Sequence: Synthetic oligonucleotide
  Target: LAMA2; (-) strand; PAM type: YTN; PAM sequence: CTT
attttattttatttttattt

SEQ ID NO: 245521 - DNA, 20 bp, Artificial Sequence
  Description of Artificial Sequence: Synthetic oligonucleotide
  Target: LAMA2; (-) strand; PAM type: YTN; PAM sequence: TTA
atggtcttattttattttat

SEQ ID NO: 245522 - DNA, 20 bp, Artificial Sequence
  Description of Artificial Sequence: Synthetic oligonucleotide
  Target: LAMA2; (-) strand; PAM type: YTN; PAM sequence: TTT
aatggtcttattttatttta

SEQ ID NO: 245523 - DNA, 20 bp, Artificial Sequence
  Description of Artificial Sequence: Synthetic oligonucleotide
  Target: LAMA2; (-) strand; PAM type: YTN; PAM sequence: TTT
taatggtcttattttatttt

SEQ ID NO: 245524 - DNA, 20 bp, Artificial Sequence
  Description of Artificial Sequence: Synthetic oligonucleotide
  Target: LAMA2; (-) strand; PAM type: YTN; PAM sequence: TTT
ttaatggtcttattttattt

SEQ ID NO: 245525 - DNA, 20 bp, Artificial Sequence
  Description of Artificial Sequence: Synthetic oligonucleotide
  Target: LAMA2; (-) strand; PAM type: YTN; PAM sequence: TTT
tttaatggtcttattttatt

SEQ ID NO: 245526 - DNA, 20 bp, Artificial Sequence
  Description of Artificial Sequence: Synthetic oligonucleotide
  Target: LAMA2; (-) strand; PAM type: YTN; PAM sequence: TTT
ttttaatggtcttattttat

SEQ ID NO: 245527 - DNA, 20 bp, Artificial Sequence
  Description of Artificial Sequence: Synthetic oligonucleotide
  Target: LAMA2; (-) strand; PAM type: YTN; PAM sequence: TTT
tttttaatggtcttatttta

SEQ ID NO: 245528 - DNA, 20 bp, Artificial Sequence
  Description of Artificial Sequence: Synthetic oligonucleotide
  Target: LAMA2; (-) strand; PAM type: YTN; PAM sequence: CTT
ttttttaatggtcttatttt

SEQ ID NO: 245529 - DNA, 20 bp, Artificial Sequence
  Description of Artificial Sequence: Synthetic oligonucleotide
  Target: LAMA2; (-) strand; PAM type: YTN; PAM sequence: CTC
caccagggagcagcccagtg

SEQ ID NO: 245530 - DNA, 20 bp, Artificial Sequence
  Description of Artificial Sequence: Synthetic oligonucleotide
  Target: LAMA2; (-) strand; PAM type: YTN; PAM sequence: CTG
gtactccaccagggagcagc

SEQ ID NO: 245531 - DNA, 20 bp, Artificial Sequence
  Description of Artificial Sequence: Synthetic oligonucleotide
  Target: LAMA2; (-) strand; PAM type: YTN; PAM sequence: TTG
agctggtactccaccaggga

SEQ ID NO: 245532 - DNA, 20 bp, Artificial Sequence
  Description of Artificial Sequence: Synthetic oligonucleotide
  Target: LAMA2; (-) strand; PAM type: YTN; PAM sequence: CTT
gagctggtactccaccaggg

SEQ ID NO: 245533 - DNA, 20 bp, Artificial Sequence
  Description of Artificial Sequence: Synthetic oligonucleotide
  Target: LAMA2; (-) strand; PAM type: YTN; PAM sequence: CTC
aaaacatcttgagctggtac

SEQ ID NO: 245534 - DNA, 20 bp, Artificial Sequence
  Description of Artificial Sequence: Synthetic oligonucleotide
  Target: LAMA2; (-) strand; PAM type: YTN; PAM sequence: TTC
ctcaaaacatcttgagctgg

SEQ ID NO: 245535 - DNA, 20 bp, Artificial Sequence
  Description of Artificial Sequence: Synthetic oligonucleotide
  Target: LAMA2; (-) strand; PAM type: YTN; PAM sequence: TTT
cctcaaaacatcttgagctg

SEQ ID NO: 245536 - DNA, 20 bp, Artificial Sequence
  Description of Artificial Sequence: Synthetic oligonucleotide
  Target: LAMA2; (-) strand; PAM type: YTN; PAM sequence: TTT
tcctcaaaacatcttgagct

SEQ ID NO: 245537 - DNA, 20 bp, Artificial Sequence
  Description of Artificial Sequence: Synthetic oligonucleotide
  Target: LAMA2; (-) strand; PAM type: YTN; PAM sequence: TTT
ttcctcaaaacatcttgagc

SEQ ID NO: 245538 - DNA, 20 bp, Artificial Sequence
  Description of Artificial Sequence: Synthetic oligonucleotide
  Target: LAMA2; (-) strand; PAM type: YTN; PAM sequence: TTT
tttcctcaaaacatcttgag

SEQ ID NO: 245539 - DNA, 20 bp, Artificial Sequence
  Description of Artificial Sequence: Synthetic oligonucleotide
  Target: LAMA2; (-) strand; PAM type: YTN; PAM sequence: TTG
gtaaatgcaaattttttcct

SEQ ID NO: 245540 - DNA, 20 bp, Artificial Sequence
  Description of Artificial Sequence: Synthetic oligonucleotide
  Target: LAMA2; (-) strand; PAM type: YTN; PAM sequence: CTT
ggtaaatgcaaattttttcc

SEQ ID NO: 245541 - DNA, 20 bp, Artificial Sequence
  Description of Artificial Sequence: Synthetic oligonucleotide
  Target: LAMA2; (-) strand; PAM type: YTN; PAM sequence: CTC
ccacttggtaaatgcaaatt

SEQ ID NO: 245542 - DNA, 20 bp, Artificial Sequence
  Description of Artificial Sequence: Synthetic oligonucleotide
  Target: LAMA2; (-) strand; PAM type: YTN; PAM sequence: CTA
taaatcctcccacttggtaa

SEQ ID NO: 245543 - DNA, 20 bp, Artificial Sequence
  Description of Artificial Sequence: Synthetic oligonucleotide
  Target: LAMA2; (-) strand; PAM type: YTN; PAM sequence: CTA
aatcaatgaacaagtgaaat

SEQ ID NO: 245544 - DNA, 20 bp, Artificial Sequence
  Description of Artificial Sequence: Synthetic oligonucleotide
  Target: LAMA2; (-) strand; PAM type: YTN; PAM sequence: TTC
atatgtctaaatcaatgaac

SEQ ID NO: 245545 - DNA, 20 bp, Artificial Sequence
  Description of Artificial Sequence: Synthetic oligonucleotide
  Target: LAMA2; (-) strand; PAM type: YTN; PAM sequence: TTT
catatgtctaaatcaatgaa

SEQ ID NO: 245546 - DNA, 20 bp, Artificial Sequence
  Description of Artificial Sequence: Synthetic oligonucleotide
  Target: LAMA2; (-) strand; PAM type: YTN; PAM sequence: TTG
tgcaaaaaatataatatttc

SEQ ID NO: 245547 - DNA, 20 bp, Artificial Sequence
  Description of Artificial Sequence: Synthetic oligonucleotide
  Target: LAMA2; (-) strand; PAM type: YTN; PAM sequence: TTA
gttgtgcaaaaaatataata

SEQ ID NO: 245548 - DNA, 20 bp, Artificial Sequence
  Description of Artificial Sequence: Synthetic oligonucleotide
  Target: LAMA2; (-) strand; PAM type: YTN; PAM sequence: CTT
agttgtgcaaaaaatataat

SEQ ID NO: 245549 - DNA, 20 bp, Artificial Sequence
  Description of Artificial Sequence: Synthetic oligonucleotide
  Target: LAMA2; (-) strand; PAM type: YTN; PAM sequence: CTG
aaagccaacttagttgtgca

SEQ ID NO: 245550 - DNA, 20 bp, Artificial Sequence
  Description of Artificial Sequence: Synthetic oligonucleotide
  Target: LAMA2; (-) strand; PAM type: YTN; PAM sequence: TTA
aaaatatggtcatataatct

SEQ ID NO: 245551 - DNA, 20 bp, Artificial Sequence
  Description of Artificial Sequence: Synthetic oligonucleotide
  Target: LAMA2; (-) strand; PAM type: YTN; PAM sequence: TTA
gttaaaaatatggtcatata

SEQ ID NO: 245552 - DNA, 20 bp, Artificial Sequence
  Description of Artificial Sequence: Synthetic oligonucleotide
  Target: LAMA2; (-) strand; PAM type: YTN; PAM sequence: TTT
agttaaaaatatggtcatat

SEQ ID NO: 245553 - DNA, 20 bp, Artificial Sequence
  Description of Artificial Sequence: Synthetic oligonucleotide
  Target: LAMA2; (-) strand; PAM type: YTN; PAM sequence: TTC
atttagttaaaaatatggtc

SEQ ID NO: 245554 - DNA, 20 bp, Artificial Sequence
  Description of Artificial Sequence: Synthetic oligonucleotide
  Target: LAMA2; (-) strand; PAM type: YTN; PAM sequence: CTT
catttagttaaaaatatggt

SEQ ID NO: 245555 - DNA, 20 bp, Artificial Sequence
  Description of Artificial Sequence: Synthetic oligonucleotide
  Target: LAMA2; (-) strand; PAM type: YTN; PAM sequence: TTC
agcaaagcttcatttagtta

SEQ ID NO: 245556 - DNA, 20 bp, Artificial Sequence
  Description of Artificial Sequence: Synthetic oligonucleotide
  Target: LAMA2; (-) strand; PAM type: YTN; PAM sequence: TTA
ttcagcaaagcttcatttag

SEQ ID NO: 245557 - DNA, 20 bp, Artificial Sequence
  Description of Artificial Sequence: Synthetic oligonucleotide
  Target: LAMA2; (-) strand; PAM type: YTN; PAM sequence: TTT
attcagcaaagcttcattta

SEQ ID NO: 245558 - DNA, 20 bp, Artificial Sequence
  Description of Artificial Sequence: Synthetic oligonucleotide
  Target: LAMA2; (-) strand; PAM type: YTN; PAM sequence: TTA
agtcatgtatttattcagca

SEQ ID NO: 245559 - DNA, 20 bp, Artificial Sequence
  Description of Artificial Sequence: Synthetic oligonucleotide
  Target: LAMA2; (-) strand; PAM type: YTN; PAM sequence: TTG
aaggaatatattaagtcatg

SEQ ID NO: 245560 - DNA, 20 bp, Artificial Sequence
  Description of Artificial Sequence: Synthetic oligonucleotide
  Target: LAMA2; (-) strand; PAM type: YTN; PAM sequence: TTT
gaaggaatatattaagtcat

SEQ ID NO: 245561 - DNA, 20 bp, Artificial Sequence
  Description of Artificial Sequence: Synthetic oligonucleotide
  Target: LAMA2; (-) strand; PAM type: YTN; PAM sequence: TTT
tgaaggaatatattaagtca

SEQ ID NO: 245562 - DNA, 20 bp, Artificial Sequence
  Description of Artificial Sequence: Synthetic oligonucleotide
  Target: LAMA2; (-) strand; PAM type: YTN; PAM sequence: TTT
ttgaaggaatatattaagtc

SEQ ID NO: 245563 - DNA, 20 bp, Artificial Sequence
  Description of Artificial Sequence: Synthetic oligonucleotide
  Target: LAMA2; (-) strand; PAM type: YTN; PAM sequence: TTT
tttgaaggaatatattaagt

SEQ ID NO: 245564 - DNA, 20 bp, Artificial Sequence
  Description of Artificial Sequence: Synthetic oligonucleotide
  Target: LAMA2; (-) strand; PAM type: YTN; PAM sequence: CTA
tatgttttttgaaggaatat

SEQ ID NO: 245565 - DNA, 20 bp, Artificial Sequence
  Description of Artificial Sequence: Synthetic oligonucleotide
  Target: LAMA2; (-) strand; PAM type: YTN; PAM sequence: TTC
actatatgttttttgaagga

SEQ ID NO: 245566 - DNA, 20 bp, Artificial Sequence
  Description of Artificial Sequence: Synthetic oligonucleotide
  Target: LAMA2; (-) strand; PAM type: YTN; PAM sequence: TTT
cactatatgttttttgaagg

SEQ ID NO: 245567 - DNA, 20 bp, Artificial Sequence
  Description of Artificial Sequence: Synthetic oligonucleotide
  Target: LAMA2; (-) strand; PAM type: YTN; PAM sequence: TTA
tttcactatatgttttttga

SEQ ID NO: 245568 - DNA, 20 bp, Artificial Sequence
  Description of Artificial Sequence: Synthetic oligonucleotide
  Target: LAMA2; (-) strand; PAM type: YTN; PAM sequence: TTA
atattatttcactatatgtt

SEQ ID NO: 245569 - DNA, 20 bp, Artificial Sequence
  Description of Artificial Sequence: Synthetic oligonucleotide
  Target: LAMA2; (-) strand; PAM type: YTN; PAM sequence: TTG
tgtagttaatattatttcac

SEQ ID NO: 245570 - DNA, 20 bp, Artificial Sequence
  Description of Artificial Sequence: Synthetic oligonucleotide
  Target: LAMA2; (-) strand; PAM type: YTN; PAM sequence: TTT
gtgtagttaatattatttca

SEQ ID NO: 245571 - DNA, 20 bp, Artificial Sequence
  Description of Artificial Sequence: Synthetic oligonucleotide
  Target: LAMA2; (-) strand; PAM type: YTN; PAM sequence: CTT
tgtgtagttaatattatttc

SEQ ID NO: 245572 - DNA, 20 bp, Artificial Sequence
  Description of Artificial Sequence: Synthetic oligonucleotide
  Target: LAMA2; (-) strand; PAM type: YTN; PAM sequence: TTA
tctttgtgtagttaatatta

SEQ ID NO: 245573 - DNA, 20 bp, Artificial Sequence
  Description of Artificial Sequence: Synthetic oligonucleotide
  Target: LAMA2; (-) strand; PAM type: YTN; PAM sequence: CTT
atctttgtgtagttaatatt

SEQ ID NO: 245574 - DNA, 20 bp, Artificial Sequence
  Description of Artificial Sequence: Synthetic oligonucleotide
  Target: LAMA2; (-) strand; PAM type: YTN; PAM sequence: TTG
cttatctttgtgtagttaat

SEQ ID NO: 245575 - DNA, 20 bp, Artificial Sequence
  Description of Artificial Sequence: Synthetic oligonucleotide
  Target: LAMA2; (-) strand; PAM type: YTN; PAM sequence: CTC
attgcttatctttgtgtagt

SEQ ID NO: 245576 - DNA, 20 bp, Artificial Sequence
  Description of Artificial Sequence: Synthetic oligonucleotide
  Target: LAMA2; (-) strand; PAM type: YTN; PAM sequence: TTG
ctcattgcttatctttgtgt

SEQ ID NO: 245577 - DNA, 20 bp, Artificial Sequence
  Description of Artificial Sequence: Synthetic oligonucleotide
  Target: LAMA2; (-) strand; PAM type: YTN; PAM sequence: TTT
gctcattgcttatctttgtg

SEQ ID NO: 245578 - DNA, 20 bp, Artificial Sequence
  Description of Artificial Sequence: Synthetic oligonucleotide
  Target: LAMA2; (-) strand; PAM type: YTN; PAM sequence: TTT
tgctcattgcttatctttgt

SEQ ID NO: 245579 - DNA, 20 bp, Artificial Sequence
  Description of Artificial Sequence: Synthetic oligonucleotide
  Target: LAMA2; (-) strand; PAM type: YTN; PAM sequence: TTT
ttgctcattgcttatctttg

SEQ ID NO: 245580 - DNA, 20 bp, Artificial Sequence
  Description of Artificial Sequence: Synthetic oligonucleotide
  Target: LAMA2; (-) strand; PAM type: YTN; PAM sequence: TTT
tttgctcattgcttatcttt

SEQ ID NO: 245581 - DNA, 20 bp, Artificial Sequence
  Description of Artificial Sequence: Synthetic oligonucleotide
  Target: LAMA2; (-) strand; PAM type: YTN; PAM sequence: TTT
ttttgctcattgcttatctt

SEQ ID NO: 245582 - DNA, 20 bp, Artificial Sequence
  Description of Artificial Sequence: Synthetic oligonucleotide
  Target: LAMA2; (-) strand; PAM type: YTN; PAM sequence: CTA
gtgtttttttgctcattgct

SEQ ID NO: 245583 - DNA, 20 bp, Artificial Sequence
  Description of Artificial Sequence: Synthetic oligonucleotide
  Target: LAMA2; (-) strand; PAM type: YTN; PAM sequence: TTA
ccaagagcagtggtaagcac

SEQ ID NO: 245584 - DNA, 20 bp, Artificial Sequence
  Description of Artificial Sequence: Synthetic oligonucleotide
  Target: LAMA2; (-) strand; PAM type: YTN; PAM sequence: CTT
accaagagcagtggtaagca

SEQ ID NO: 245585 - DNA, 20 bp, Artificial Sequence
  Description of Artificial Sequence: Synthetic oligonucleotide
  Target: LAMA2; (-) strand; PAM type: YTN; PAM sequence: CTC
ttaccaagagcagtggtaag

SEQ ID NO: 245586 - DNA, 20 bp, Artificial Sequence
  Description of Artificial Sequence: Synthetic oligonucleotide
  Target: LAMA2; (-) strand; PAM type: YTN; PAM sequence: CTG
aaggaaagctcttaccaaga

SEQ ID NO: 245587 - DNA, 20 bp, Artificial Sequence
  Description of Artificial Sequence: Synthetic oligonucleotide
  Target: LAMA2; (-) strand; PAM type: YTN; PAM sequence: TTG
tgcctgaaggaaagctctta

SEQ ID NO: 245588 - DNA, 20 bp, Artificial Sequence
  Description of Artificial Sequence: Synthetic oligonucleotide
  Target: LAMA2; (-) strand; PAM type: YTN; PAM sequence: TTT
gtgcctgaaggaaagctctt

SEQ ID NO: 245589 - DNA, 20 bp, Artificial Sequence
  Description of Artificial Sequence: Synthetic oligonucleotide
  Target: LAMA2; (-) strand; PAM type: YTN; PAM sequence: TTT
tgtgcctgaaggaaagctct

SEQ ID NO: 245590 - DNA, 20 bp, Artificial Sequence
  Description of Artificial Sequence: Synthetic oligonucleotide
  Target: LAMA2; (-) strand; PAM type: YTN; PAM sequence: CTC
attttgtgcctgaaggaaag

SEQ ID NO: 245591 - DNA, 20 bp, Artificial Sequence
  Description of Artificial Sequence: Synthetic oligonucleotide
  Target: LAMA2; (-) strand; PAM type: YTN; PAM sequence: TTA
tctcattttgtgcctgaagg

SEQ ID NO: 245592 - DNA, 20 bp, Artificial Sequence
  Description of Artificial Sequence: Synthetic oligonucleotide
  Target: LAMA2; (-) strand; PAM type: YTN; PAM sequence: TTT
atctcattttgtgcctgaag

SEQ ID NO: 245593 - DNA, 20 bp, Artificial Sequence
  Description of Artificial Sequence: Synthetic oligonucleotide
  Target: LAMA2; (-) strand; PAM type: YTN; PAM sequence: TTT
tatctcattttgtgcctgaa

SEQ ID NO: 245594 - DNA, 20 bp, Artificial Sequence
  Description of Artificial Sequence: Synthetic oligonucleotide
  Target: LAMA2; (-) strand; PAM type: YTN; PAM sequence: CTT
ttatctcattttgtgcctga

SEQ ID NO: 245595 - DNA, 20 bp, Artificial Sequence
  Description of Artificial Sequence: Synthetic oligonucleotide
  Target: LAMA2; (-) strand; PAM type: YTN; PAM sequence: TTA
cttttatctcattttgtgcc

SEQ ID NO: 245596 - DNA, 20 bp, Artificial Sequence
  Description of Artificial Sequence: Synthetic oligonucleotide
  Target: LAMA2; (-) strand; PAM type: YTN; PAM sequence: TTG
tcattacttttatctcattt

SEQ ID NO: 245597 - DNA, 20 bp, Artificial Sequence
  Description of Artificial Sequence: Synthetic oligonucleotide
  Target: LAMA2; (-) strand; PAM type: YTN; PAM sequence: CTT
gtcattacttttatctcatt

SEQ ID NO: 245598 - DNA, 20 bp, Artificial Sequence
  Description of Artificial Sequence: Synthetic oligonucleotide
  Target: LAMA2; (-) strand; PAM type: YTN; PAM sequence: TTA
ccttgtcattacttttatct

SEQ ID NO: 245599 - DNA, 20 bp, Artificial Sequence
  Description of Artificial Sequence: Synthetic oligonucleotide
  Target: LAMA2; (-) strand; PAM type: YTN; PAM sequence: TTT
accttgtcattacttttatc

SEQ ID NO: 245600 - DNA, 20 bp, Artificial Sequence
  Description of Artificial Sequence: Synthetic oligonucleotide
  Target: LAMA2; (-) strand; PAM type: YTN; PAM sequence: TTT
taccttgtcattacttttat

SEQ ID NO: 245601 - DNA, 20 bp, Artificial Sequence
  Description of Artificial Sequence: Synthetic oligonucleotide
  Target: LAMA2; (-) strand; PAM type: YTN; PAM sequence: TTC
atccagttttaccttgtcat

SEQ ID NO: 245602 - DNA, 20 bp, Artificial Sequence
  Description of Artificial Sequence: Synthetic oligonucleotide
  Target: LAMA2; (-) strand; PAM type: YTN; PAM sequence: TTT
catccagttttaccttgtca

SEQ ID NO: 245603 - DNA, 20 bp, Artificial Sequence
  Description of Artificial Sequence: Synthetic oligonucleotide
  Target: LAMA2; (-) strand; PAM type: YTN; PAM sequence: TTT
tcatccagttttaccttgtc

SEQ ID NO: 245604 - DNA, 20 bp, Artificial Sequence
  Description of Artificial Sequence: Synthetic oligonucleotide
  Target: LAMA2; (-) strand; PAM type: YTN; PAM sequence: TTG
accaattttcatccagtttt

SEQ ID NO: 245605 - DNA, 20 bp, Artificial Sequence
  Description of Artificial Sequence: Synthetic oligonucleotide
  Target: LAMA2; (-) strand; PAM type: YTN; PAM sequence: TTG
ttgaccaattttcatccagt

SEQ ID NO: 245606 - DNA, 20 bp, Artificial Sequence
  Description of Artificial Sequence: Synthetic oligonucleotide
  Target: LAMA2; (-) strand; PAM type: YTN; PAM sequence: CTT
gttgaccaattttcatccag

SEQ ID NO: 245607 - DNA, 20 bp, Artificial Sequence
  Description of Artificial Sequence: Synthetic oligonucleotide
  Target: LAMA2; (-) strand; PAM type: YTN; PAM sequence: CTC
acttgttgaccaattttcat

SEQ ID NO: 245608 - DNA, 20 bp, Artificial Sequence
  Description of Artificial Sequence: Synthetic oligonucleotide
  Target: LAMA2; (-) strand; PAM type: YTN; PAM sequence: TTC
ctcacttgttgaccaatttt

SEQ ID NO: 245609 - DNA, 20 bp, Artificial Sequence
  Description of Artificial Sequence: Synthetic oligonucleotide
  Target: LAMA2; (-) strand; PAM type: YTN; PAM sequence: TTA
attcctcacttgttgaccaa

SEQ ID NO: 245610 - DNA, 20 bp, Artificial Sequence
  Description of Artificial Sequence: Synthetic oligonucleotide
  Target: LAMA2; (-) strand; PAM type: YTN; PAM sequence: TTG
caaggcagttaattcctcac

SEQ ID NO: 245611 - DNA, 20 bp, Artificial Sequence
  Description of Artificial Sequence: Synthetic oligonucleotide
  Target: LAMA2; (-) strand; PAM type: YTN; PAM sequence: TTT
gcaaggcagttaattcctca

SEQ ID NO: 245612 - DNA, 20 bp, Artificial Sequence
  Description of Artificial Sequence: Synthetic oligonucleotide
  Target: LAMA2; (-) strand; PAM type: YTN; PAM sequence: TTT
tgcaaggcagttaattcctc

SEQ ID NO: 245613 - DNA, 20 bp, Artificial Sequence
  Description of Artificial Sequence: Synthetic oligonucleotide
  Target: LAMA2; (-) strand; PAM type: YTN; PAM sequence: CTT
ttgcaaggcagttaattcct

SEQ ID NO: 245614 - DNA, 20 bp, Artificial Sequence
  Description of Artificial Sequence: Synthetic oligonucleotide
  Target: LAMA2; (-) strand; PAM type: YTN; PAM sequence: CTG
cttttgcaaggcagttaatt

SEQ ID NO: 245615 - DNA, 20 bp, Artificial Sequence
  Description of Artificial Sequence: Synthetic oligonucleotide
  Target: LAMA2; (-) strand; PAM type: YTN; PAM sequence: CTG
tataataaaaactgcttttg

SEQ ID NO: 245616 - DNA, 20 bp, Artificial Sequence
  Description of Artificial Sequence: Synthetic oligonucleotide
  Target: LAMA2; (-) strand; PAM type: YTN; PAM sequence: TTC
tgtataataaaaactgcttt

SEQ ID NO: 245617 - DNA, 20 bp, Artificial Sequence
  Description of Artificial Sequence: Synthetic oligonucleotide
  Target: LAMA2; (-) strand; PAM type: YTN; PAM sequence: TTT
ctgtataataaaaactgctt

SEQ ID NO: 245618 - DNA, 20 bp, Artificial Sequence
  Description of Artificial Sequence: Synthetic oligonucleotide
  Target: LAMA2; (-) strand; PAM type: YTN; PAM sequence: TTC
aaaatggtttctgtataata

SEQ ID NO: 245619 - DNA, 20 bp, Artificial Sequence
  Description of Artificial Sequence: Synthetic oligonucleotide
  Target: LAMA2; (-) strand; PAM type: YTN; PAM sequence: TTT
caaaatggtttctgtataat

SEQ ID NO: 245620 - DNA, 20 bp, Artificial Sequence
  Description of Artificial Sequence: Synthetic oligonucleotide
  Target: LAMA2; (-) strand; PAM type: YTN; PAM sequence: CTT
tcaaaatggtttctgtataa

SEQ ID NO: 245621 - DNA, 20 bp, Artificial Sequence
  Description of Artificial Sequence: Synthetic oligonucleotide
  Target: LAMA2; (-) strand; PAM type: YTN; PAM sequence: CTG
ctttcaaaatggtttctgta

SEQ ID NO: 245622 - DNA, 20 bp, Artificial Sequence
  Description of Artificial Sequence: Synthetic oligonucleotide
  Target: LAMA2; (-) strand; PAM type: YTN; PAM sequence: CTG
aataactgctttcaaaatgg

SEQ ID NO: 245623 - DNA, 20 bp, Artificial Sequence
  Description of Artificial Sequence: Synthetic oligonucleotide
  Target: LAMA2; (-) strand; PAM type: YTN; PAM sequence: TTC
tgaataactgctttcaaaat

SEQ ID NO: 245624 - DNA, 20 bp, Artificial Sequence
  Description of Artificial Sequence: Synthetic oligonucleotide
  Target: LAMA2; (-) strand; PAM type: YTN; PAM sequence: TTT
ctgaataactgctttcaaaa

SEQ ID NO: 245625 - DNA, 20 bp, Artificial Sequence
  Description of Artificial Sequence: Synthetic oligonucleotide
  Target: LAMA2; (-) strand; PAM type: YTN; PAM sequence: CTT
tctgaataactgctttcaaa

SEQ ID NO: 245626 - DNA, 20 bp, Artificial Sequence
  Description of Artificial Sequence: Synthetic oligonucleotide
  Target: LAMA2; (-) strand; PAM type: YTN; PAM sequence: CTG
atagaaactttctgaataac

SEQ ID NO: 245627 - DNA, 20 bp, Artificial Sequence
  Description of Artificial Sequence: Synthetic oligonucleotide
  Target: LAMA2; (-) strand; PAM type: YTN; PAM sequence: CTA
caaatcatatactgatagaa

SEQ ID NO: 245628 - DNA, 20 bp, Artificial Sequence
  Description of Artificial Sequence: Synthetic oligonucleotide
  Target: LAMA2; (-) strand; PAM type: YTN; PAM sequence: TTG
agctacaaatcatatactga

SEQ ID NO: 245629 - DNA, 20 bp, Artificial Sequence
  Description of Artificial Sequence: Synthetic oligonucleotide
  Target: LAMA2; (-) strand; PAM type: YTN; PAM sequence: TTT
gagctacaaatcatatactg

SEQ ID NO: 245630 - DNA, 20 bp, Artificial Sequence
  Description of Artificial Sequence: Synthetic oligonucleotide
  Target: LAMA2; (-) strand; PAM type: YTN; PAM sequence: TTG
atagaccaacaataatttga

SEQ ID NO: 245631 - DNA, 20 bp, Artificial Sequence
  Description of Artificial Sequence: Synthetic oligonucleotide
  Target: LAMA2; (-) strand; PAM type: YTN; PAM sequence: TTG
tgattgatagaccaacaata

SEQ ID NO: 245632 - DNA, 20 bp, Artificial Sequence
  Description of Artificial Sequence: Synthetic oligonucleotide
  Target: LAMA2; (-) strand; PAM type: YTN; PAM sequence: TTT
gtgattgatagaccaacaat

SEQ ID NO: 245633 - DNA, 20 bp, Artificial Sequence
  Description of Artificial Sequence: Synthetic oligonucleotide
  Target: LAMA2; (-) strand; PAM type: YTN; PAM sequence: TTA
tgcagaaaatagtatttgtg

SEQ ID NO: 245634 - DNA, 20 bp, Artificial Sequence
  Description of Artificial Sequence: Synthetic oligonucleotide
  Target: LAMA2; (-) strand; PAM type: YTN; PAM sequence: CTA
tattatgcagaaaatagtat

SEQ ID NO: 245635 - DNA, 20 bp, Artificial Sequence
  Description of Artificial Sequence: Synthetic oligonucleotide
  Target: LAMA2; (-) strand; PAM type: YTN; PAM sequence: CTA
gctatattatgcagaaaata

SEQ ID NO: 245636 - DNA, 20 bp, Artificial Sequence
  Description of Artificial Sequence: Synthetic oligonucleotide
  Target: LAMA2; (-) strand; PAM type: YTN; PAM sequence: TTC
tagctatattatgcagaaaa

SEQ ID NO: 245637 - DNA, 20 bp, Artificial Sequence
  Description of Artificial Sequence: Synthetic oligonucleotide
  Target: LAMA2; (-) strand; PAM type: YTN; PAM sequence: TTT
ctagctatattatgcagaaa

SEQ ID NO: 245638 - DNA, 20 bp, Artificial Sequence
  Description of Artificial Sequence: Synthetic oligonucleotide
  Target: LAMA2; (-) strand; PAM type: YTN; PAM sequence: TTT
tctagctatattatgcagaa

SEQ ID NO: 245639 - DNA, 20 bp, Artificial Sequence
  Description of Artificial Sequence: Synthetic oligonucleotide
  Target: LAMA2; (-) strand; PAM type: YTN; PAM sequence: TTA
tattttctagctatattatg

SEQ ID NO: 245640 - DNA, 20 bp, Artificial Sequence
  Description of Artificial Sequence: Synthetic oligonucleotide
  Target: LAMA2; (-) strand; PAM type: YTN; PAM sequence: TTA
gataattatattttctagct

SEQ ID NO: 245641 - DNA, 20 bp, Artificial Sequence
  Description of Artificial Sequence: Synthetic oligonucleotide
  Target: LAMA2; (-) strand; PAM type: YTN; PAM sequence: TTA
aaaataagttagataattat

SEQ ID NO: 245642 - DNA, 20 bp, Artificial Sequence
  Description of Artificial Sequence: Synthetic oligonucleotide
  Target: LAMA2; (-) strand; PAM type: YTN; PAM sequence: TTT
aaaaataagttagataatta

SEQ ID NO: 245643 - DNA, 20 bp, Artificial Sequence
  Description of Artificial Sequence: Synthetic oligonucleotide
  Target: LAMA2; (-) strand; PAM type: YTN; PAM sequence: CTT
taaaaataagttagataatt

SEQ ID NO: 245644 - DNA, 20 bp, Artificial Sequence
  Description of Artificial Sequence: Synthetic oligonucleotide
  Target: LAMA2; (-) strand; PAM type: YTN; PAM sequence: TTA
gaagactttaaaaataagtt

SEQ ID NO: 245645 - DNA, 20 bp, Artificial Sequence
  Description of Artificial Sequence: Synthetic oligonucleotide
  Target: LAMA2; (-) strand; PAM type: YTN; PAM sequence: TTT
agaagactttaaaaataagt

SEQ ID NO: 245646 - DNA, 20 bp, Artificial Sequence
  Description of Artificial Sequence: Synthetic oligonucleotide
  Target: LAMA2; (-) strand; PAM type: YTN; PAM sequence: TTC
atgtttagaagactttaaaa

SEQ ID NO: 245647 - DNA, 20 bp, Artificial Sequence
  Description of Artificial Sequence: Synthetic oligonucleotide
  Target: LAMA2; (-) strand; PAM type: YTN; PAM sequence: CTT
catgtttagaagactttaaa

SEQ ID NO: 245648 - DNA, 20 bp, Artificial Sequence
  Description of Artificial Sequence: Synthetic oligonucleotide
  Target: LAMA2; (-) strand; PAM type: YTN; PAM sequence: CTG
aaacttcatgtttagaagac

SEQ ID NO: 245649 - DNA, 20 bp, Artificial Sequence
  Description of Artificial Sequence: Synthetic oligonucleotide
  Target: LAMA2; (-) strand; PAM type: YTN; PAM sequence: CTC
actgaaacttcatgtttaga

SEQ ID NO: 245650 - DNA, 20 bp, Artificial Sequence
  Description of Artificial Sequence: Synthetic oligonucleotide
  Target: LAMA2; (-) strand; PAM type: YTN; PAM sequence: TTC
aaagctcactgaaacttcat

SEQ ID NO: 245651 - DNA, 20 bp, Artificial Sequence
  Description of Artificial Sequence: Synthetic oligonucleotide
  Target: LAMA2; (-) strand; PAM type: YTN; PAM sequence: CTT
caaagctcactgaaacttca

SEQ ID NO: 245652 - DNA, 20 bp, Artificial Sequence
  Description of Artificial Sequence: Synthetic oligonucleotide
  Target: LAMA2; (-) strand; PAM type: YTN; PAM sequence: TTA
acaaaaagcttcaaagctca

SEQ ID NO: 245653 - DNA, 20 bp, Artificial Sequence
  Description of Artificial Sequence: Synthetic oligonucleotide
  Target: LAMA2; (-) strand; PAM type: YTN; PAM sequence: TTT
aacaaaaagcttcaaagctc

SEQ ID NO: 245654 - DNA, 20 bp, Artificial Sequence
  Description of Artificial Sequence: Synthetic oligonucleotide
  Target: LAMA2; (-) strand; PAM type: YTN; PAM sequence: TTA
acatatttaacaaaaagctt

SEQ ID NO: 245655 - DNA, 20 bp, Artificial Sequence
  Description of Artificial Sequence: Synthetic oligonucleotide
  Target: LAMA2; (-) strand; PAM type: YTN; PAM sequence: TTT
aacatatttaacaaaaagct

SEQ ID NO: 245656 - DNA, 20 bp, Artificial Sequence
  Description of Artificial Sequence: Synthetic oligonucleotide
  Target: LAMA2; (-) strand; PAM type: YTN; PAM sequence: TTT
taacatatttaacaaaaagc

SEQ ID NO: 245657 - DNA, 20 bp, Artificial Sequence
  Description of Artificial Sequence: Synthetic oligonucleotide
  Target: LAMA2; (-) strand; PAM type: YTN; PAM sequence: TTG
gaaagtatgacattttaaca

SEQ ID NO: 245658 - DNA, 20 bp, Artificial Sequence
  Description of Artificial Sequence: Synthetic oligonucleotide
  Target: LAMA2; (-) strand; PAM type: YTN; PAM sequence: TTT
ggaaagtatgacattttaac

SEQ ID NO: 245659 - DNA, 20 bp, Artificial Sequence
  Description of Artificial Sequence: Synthetic oligonucleotide
  Target: LAMA2; (-) strand; PAM type: YTN; PAM sequence: CTA
tttggaaagtatgacatttt

SEQ ID NO: 245660 - DNA, 20 bp, Artificial Sequence
  Description of Artificial Sequence: Synthetic oligonucleotide
  Target: LAMA2; (-) strand; PAM type: YTN; PAM sequence: TTG
gaaactatttggaaagtatg

SEQ ID NO: 245661 - DNA, 20 bp, Artificial Sequence
  Description of Artificial Sequence: Synthetic oligonucleotide
  Target: LAMA2; (-) strand; PAM type: YTN; PAM sequence: TTA
taattggaaactatttggaa

SEQ ID NO: 245662 - DNA, 20 bp, Artificial Sequence
  Description of Artificial Sequence: Synthetic oligonucleotide
  Target: LAMA2; (-) strand; PAM type: YTN; PAM sequence: TTG
gttataattggaaactattt

SEQ ID NO: 245663 - DNA, 20 bp, Artificial Sequence
  Description of Artificial Sequence: Synthetic oligonucleotide
  Target: LAMA2; (-) strand; PAM type: YTN; PAM sequence: CTA
attggttataattggaaact

SEQ ID NO: 245664 - DNA, 20 bp, Artificial Sequence
  Description of Artificial Sequence: Synthetic oligonucleotide
  Target: LAMA2; (-) strand; PAM type: YTN; PAM sequence: CTG
atgctaattggttataattg

SEQ ID NO: 245665 - DNA, 20 bp, Artificial Sequence
  Description of Artificial Sequence: Synthetic oligonucleotide
  Target: LAMA2; (-) strand; PAM type: YTN; PAM sequence: TTC
tgatgctaattggttataat

SEQ ID NO: 245666 - DNA, 20 bp, Artificial Sequence
  Description of Artificial Sequence: Synthetic oligonucleotide
  Target: LAMA2; (-) strand; PAM type: YTN; PAM sequence: TTT
ctgatgctaattggttataa

SEQ ID NO: 245667 - DNA, 20 bp, Artificial Sequence
  Description of Artificial Sequence: Synthetic oligonucleotide
  Target: LAMA2; (-) strand; PAM type: YTN; PAM sequence: TTT
tctgatgctaattggttata

SEQ ID NO: 245668 - DNA, 20 bp, Artificial Sequence
  Description of Artificial Sequence: Synthetic oligonucleotide
  Target: LAMA2; (-) strand; PAM type: YTN; PAM sequence: CTA
ataaattttctgatgctaat

SEQ ID NO: 245669 - DNA, 20 bp, Artificial Sequence
  Description of Artificial Sequence: Synthetic oligonucleotide
  Target: LAMA2; (-) strand; PAM type: YTN; PAM sequence: TTG
gctaataaattttctgatgc

SEQ ID NO: 245670 - DNA, 20 bp, Artificial Sequence
  Description of Artificial Sequence: Synthetic oligonucleotide
  Target: LAMA2; (-) strand; PAM type: YTN; PAM sequence: TTT
ggctaataaattttctgatg

SEQ ID NO: 245671 - DNA, 20 bp, Artificial Sequence
  Description of Artificial Sequence: Synthetic oligonucleotide
  Target: LAMA2; (-) strand; PAM type: YTN; PAM sequence: TTG
gtgaaatttggctaataaat

SEQ ID NO: 245672 - DNA, 20 bp, Artificial Sequence
  Description of Artificial Sequence: Synthetic oligonucleotide
  Target: LAMA2; (-) strand; PAM type: YTN; PAM sequence: CTT
ggtgaaatttggctaataaa

SEQ ID NO: 245673 - DNA, 20 bp, Artificial Sequence
  Description of Artificial Sequence: Synthetic oligonucleotide
  Target: LAMA2; (-) strand; PAM type: YTN; PAM sequence: TTC
ttggtgaaatttggctaata

SEQ ID NO: 245674 - DNA, 20 bp, Artificial Sequence
  Description of Artificial Sequence: Synthetic oligonucleotide
  Target: LAMA2; (-) strand; PAM type: YTN; PAM sequence: TTA
ggttcttggtgaaatttggc

SEQ ID NO: 245675 - DNA, 20 bp, Artificial Sequence
  Description of Artificial Sequence: Synthetic oligonucleotide
  Target: LAMA2; (-) strand; PAM type: YTN; PAM sequence: CTC
acaaattaggttcttggtga

SEQ ID NO: 245676 - DNA, 20 bp, Artificial Sequence
  Description of Artificial Sequence: Synthetic oligonucleotide
  Target: LAMA2; (-) strand; PAM type: YTN; PAM sequence: CTC
tcacaaattaggttcttggt

SEQ ID NO: 245677 - DNA, 20 bp, Artificial Sequence
  Description of Artificial Sequence: Synthetic oligonucleotide
  Target: LAMA2; (-) strand; PAM type: YTN; PAM sequence: TTC
tctcacaaattaggttcttg

SEQ ID NO: 245678 - DNA, 20 bp, Artificial Sequence
  Description of Artificial Sequence: Synthetic oligonucleotide
  Target: LAMA2; (-) strand; PAM type: YTN; PAM sequence: TTC
aattctctcacaaattaggt

SEQ ID NO: 245679 - DNA, 20 bp, Artificial Sequence
  Description of Artificial Sequence: Synthetic oligonucleotide
  Target: LAMA2; (-) strand; PAM type: YTN; PAM sequence: TTT
caattctctcacaaattagg

SEQ ID NO: 245680 - DNA, 20 bp, Artificial Sequence
  Description of Artificial Sequence: Synthetic oligonucleotide
  Target: LAMA2; (-) strand; PAM type: YTN; PAM sequence: TTT
tcaattctctcacaaattag

SEQ ID NO: 245681 - DNA, 20 bp, Artificial Sequence
  Description of Artificial Sequence: Synthetic oligonucleotide
  Target: LAMA2; (-) strand; PAM type: YTN; PAM sequence: TTT
ttcaattctctcacaaatta

SEQ ID NO: 245682 - DNA, 20 bp, Artificial Sequence
  Description of Artificial Sequence: Synthetic oligonucleotide
  Target: LAMA2; (-) strand; PAM type: YTN; PAM sequence: CTC
atttttcaattctctcacaa

SEQ ID NO: 245683 - DNA, 20 bp, Artificial Sequence
  Description of Artificial Sequence: Synthetic oligonucleotide
  Target: LAMA2; (-) strand; PAM type: YTN; PAM sequence: TTA
tggtactcatttttcaattc

SEQ ID NO: 245684 - DNA, 20 bp, Artificial Sequence
  Description of Artificial Sequence: Synthetic oligonucleotide
  Target: LAMA2; (-) strand; PAM type: YTN; PAM sequence: CTA
aattatggtactcatttttc

SEQ ID NO: 245685 - DNA, 20 bp, Artificial Sequence
  Description of Artificial Sequence: Synthetic oligonucleotide
  Target: LAMA2; (-) strand; PAM type: YTN; PAM sequence: CTG
agcatactaaattatggtac

SEQ ID NO: 245686 - DNA, 20 bp, Artificial Sequence
  Description of Artificial Sequence: Synthetic oligonucleotide
  Target: LAMA2; (-) strand; PAM type: YTN; PAM sequence: TTA
catcagtggctgagcatact

SEQ ID NO: 245687 - DNA, 20 bp, Artificial Sequence
  Description of Artificial Sequence: Synthetic oligonucleotide
  Target: LAMA2; (-) strand; PAM type: YTN; PAM sequence: TTA
taagcattacatcagtggct

SEQ ID NO: 245688 - DNA, 20 bp, Artificial Sequence
  Description of Artificial Sequence: Synthetic oligonucleotide
  Target: LAMA2; (-) strand; PAM type: YTN; PAM sequence: CTG
aaaagagatacagcacagac

SEQ ID NO: 245689 - DNA, 20 bp, Artificial Sequence
  Description of Artificial Sequence: Synthetic oligonucleotide
  Target: LAMA2; (-) strand; PAM type: YTN; PAM sequence: TTC
acagctgaaaagagatacag

SEQ ID NO: 245690 - DNA, 20 bp, Artificial Sequence
  Description of Artificial Sequence: Synthetic oligonucleotide
  Target: LAMA2; (-) strand; PAM type: YTN; PAM sequence: TTT
cacagctgaaaagagataca

SEQ ID NO: 245691 - DNA, 20 bp, Artificial Sequence
  Description of Artificial Sequence: Synthetic oligonucleotide
  Target: LAMA2; (-) strand; PAM type: YTN; PAM sequence: TTT
tcacagctgaaaagagatac

SEQ ID NO: 245692 - DNA, 20 bp, Artificial Sequence
  Description of Artificial Sequence: Synthetic oligonucleotide
  Target: LAMA2; (-) strand; PAM type: YTN; PAM sequence: TTA
gtaataatagttttcacagc

SEQ ID NO: 245693 - DNA, 20 bp, Artificial Sequence
  Description of Artificial Sequence: Synthetic oligonucleotide
  Target: LAMA2; (-) strand; PAM type: YTN; PAM sequence: CTT
agtaataatagttttcacag

SEQ ID NO: 245694 - DNA, 20 bp, Artificial Sequence
  Description of Artificial Sequence: Synthetic oligonucleotide
  Target: LAMA2; (-) strand; PAM type: YTN; PAM sequence: TTA
atacttagtaataatagttt

SEQ ID NO: 245695 - DNA, 20 bp, Artificial Sequence
  Description of Artificial Sequence: Synthetic oligonucleotide
  Target: LAMA2; (-) strand; PAM type: YTN; PAM sequence: TTT
aatacttagtaataatagtt

SEQ ID NO: 245696 - DNA, 20 bp, Artificial Sequence
  Description of Artificial Sequence: Synthetic oligonucleotide
  Target: LAMA2; (-) strand; PAM type: YTN; PAM sequence: TTT
taatacttagtaataatagt

SEQ ID NO: 245697 - DNA, 20 bp, Artificial Sequence
  Description of Artificial Sequence: Synthetic oligonucleotide
  Target: LAMA2; (-) strand; PAM type: YTN; PAM sequence: TTG
ttttaatacttagtaataat

SEQ ID NO: 245698 - DNA, 20 bp, Artificial Sequence
  Description of Artificial Sequence: Synthetic oligonucleotide
  Target: LAMA2; (-) strand; PAM type: YTN; PAM sequence: TTT
gttttaatacttagtaataa

SEQ ID NO: 245699 - DNA, 20 bp, Artificial Sequence
  Description of Artificial Sequence: Synthetic oligonucleotide
  Target: LAMA2; (-) strand; PAM type: YTN; PAM sequence: CTC
agtttgttttaatacttagt

SEQ ID NO: 245700 - DNA, 20 bp, Artificial Sequence
  Description of Artificial Sequence: Synthetic oligonucleotide
  Target: LAMA2; (-) strand; PAM type: YTN; PAM sequence: TTG
ccctcagtttgttttaatac

SEQ ID NO: 245701 - DNA, 20 bp, Artificial Sequence
  Description of Artificial Sequence: Synthetic oligonucleotide
  Target: LAMA2; (-) strand; PAM type: YTN; PAM sequence: CTT
gccctcagtttgttttaata

SEQ ID NO: 245702 - DNA, 20 bp, Artificial Sequence
  Description of Artificial Sequence: Synthetic oligonucleotide
  Target: LAMA2; (-) strand; PAM type: YTN; PAM sequence: CTG
ggaatacgggcatgagccac

SEQ ID NO: 245703 - DNA, 20 bp, Artificial Sequence
  Description of Artificial Sequence: Synthetic oligonucleotide
  Target: LAMA2; (-) strand; PAM type: YTN; PAM sequence: CTC
ccacagtgctgggaatacgg

SEQ ID NO: 245704 - DNA, 20 bp, Artificial Sequence
  Description of Artificial Sequence: Synthetic oligonucleotide
  Target: LAMA2; (-) strand; PAM type: YTN; PAM sequence: CTC
ggcctcccacagtgctggga

SEQ ID NO: 245705 - DNA, 20 bp, Artificial Sequence
  Description of Artificial Sequence: Synthetic oligonucleotide
  Target: LAMA2; (-) strand; PAM type: YTN; PAM sequence: CTC
ctcggcctcccacagtgctg

SEQ ID NO: 245706 - DNA, 20 bp, Artificial Sequence
  Description of Artificial Sequence: Synthetic oligonucleotide
  Target: LAMA2; (-) strand; PAM type: YTN; PAM sequence: CTG
aagtgatccaccctcctcgg

SEQ ID NO: 245707 - DNA, 20 bp, Artificial Sequence
  Description of Artificial Sequence: Synthetic oligonucleotide
  Target: LAMA2; (-) strand; PAM type: YTN; PAM sequence: CTG
atctgaagtgatccaccctc

SEQ ID NO: 245708 - DNA, 20 bp, Artificial Sequence
  Description of Artificial Sequence: Synthetic oligonucleotide
  Target: LAMA2; (-) strand; PAM type: YTN; PAM sequence: CTC
ctgatctgaagtgatccacc

SEQ ID NO: 245709 - DNA, 20 bp, Artificial Sequence
  Description of Artificial Sequence: Synthetic oligonucleotide
  Target: LAMA2; (-) strand; PAM type: YTN; PAM sequence: TTG
aactcctgatctgaagtgat

SEQ ID NO: 245710 - DNA, 20 bp, Artificial Sequence
  Description of Artificial Sequence: Synthetic oligonucleotide
  Target: LAMA2; (-) strand; PAM type: YTN; PAM sequence: CTT
gaactcctgatctgaagtga

SEQ ID NO: 245711 - DNA, 20 bp, Artificial Sequence
  Description of Artificial Sequence: Synthetic oligonucleotide
  Target: LAMA2; (-) strand; PAM type: YTN; PAM sequence: CTG
gtcttgaactcctgatctga

SEQ ID NO: 245712 - DNA, 20 bp, Artificial Sequence
  Description of Artificial Sequence: Synthetic oligonucleotide
  Target: LAMA2; (-) strand; PAM type: YTN; PAM sequence: TTG
gcaaggctggtcttgaactc

SEQ ID NO: 245713 - DNA, 20 bp, Artificial Sequence
  Description of Artificial Sequence: Synthetic oligonucleotide
  Target: LAMA2; (-) strand; PAM type: YTN; PAM sequence: TTC
accgcgttggcaaggctggt

SEQ ID NO: 245714 - DNA, 20 bp, Artificial Sequence
  Description of Artificial Sequence: Synthetic oligonucleotide
  Target: LAMA2; (-) strand; PAM type: YTN; PAM sequence: TTT
caccgcgttggcaaggctgg

SEQ ID NO: 245715 - DNA, 20 bp, Artificial Sequence
  Description of Artificial Sequence: Synthetic oligonucleotide
  Target: LAMA2; (-) strand; PAM type: YTN; PAM sequence: TTA
gtagagacagggtttcaccg

SEQ ID NO: 245716 - DNA, 20 bp, Artificial Sequence
  Description of Artificial Sequence: Synthetic oligonucleotide
  Target: LAMA2; (-) strand; PAM type: YTN; PAM sequence: TTT
agtagagacagggtttcacc

SEQ ID NO: 245717 - DNA, 20 bp, Artificial Sequence
  Description of Artificial Sequence: Synthetic oligonucleotide
  Target: LAMA2; (-) strand; PAM type: YTN; PAM sequence: TTT
tagtagagacagggtttcac

SEQ ID NO: 245718 - DNA, 20 bp, Artificial Sequence
  Description of Artificial Sequence: Synthetic oligonucleotide
  Target: LAMA2; (-) strand; PAM type: YTN; PAM sequence: TTT
ttagtagagacagggtttca

SEQ ID NO: 245719 - DNA, 20 bp, Artificial Sequence
  Description of Artificial Sequence: Synthetic oligonucleotide
  Target: LAMA2; (-) strand; PAM type: YTN; PAM sequence: TTG
tatttttagtagagacaggg

SEQ ID NO: 245720 - DNA, 20 bp, Artificial Sequence
  Description of Artificial Sequence: Synthetic oligonucleotide
  Target: LAMA2; (-) strand; PAM type: YTN; PAM sequence: TTT
gtatttttagtagagacagg

SEQ ID NO: 245721 - DNA, 20 bp, Artificial Sequence
  Description of Artificial Sequence: Synthetic oligonucleotide
  Target: LAMA2; (-) strand; PAM type: YTN; PAM sequence: TTT
tgtatttttagtagagacag

SEQ ID NO: 245722 - DNA, 20 bp, Artificial Sequence
  Description of Artificial Sequence: Synthetic oligonucleotide
  Target: LAMA2; (-) strand; PAM type: YTN; PAM sequence: TTT
ttgtatttttagtagagaca

SEQ ID NO: 245723 - DNA, 20 bp, Artificial Sequence
  Description of Artificial Sequence: Synthetic oligonucleotide
  Target: LAMA2; (-) strand; PAM type: YTN; PAM sequence: CTA
atttttgtatttttagtaga

SEQ ID NO: 245724 - DNA, 20 bp, Artificial Sequence
  Description of Artificial Sequence: Synthetic oligonucleotide
  Target: LAMA2; (-) strand; PAM type: YTN; PAM sequence: TTA
caggcatgtgccaccatgcc

SEQ ID NO: 245725 - DNA, 20 bp, Artificial Sequence
  Description of Artificial Sequence: Synthetic oligonucleotide
  Target: LAMA2; (-) strand; PAM type: YTN; PAM sequence: CTG
ggattacaggcatgtgccac

SEQ ID NO: 245726 - DNA, 20 bp, Artificial Sequence
  Description of Artificial Sequence: Synthetic oligonucleotide
  Target: LAMA2; (-) strand; PAM type: YTN; PAM sequence: CTC
acgagtagctgggattacag

SEQ ID NO: 245727 - DNA, 20 bp, Artificial Sequence
  Description of Artificial Sequence: Synthetic oligonucleotide
  Target: LAMA2; (-) strand; PAM type: YTN; PAM sequence: CTC
agcctcacgagtagctggga

SEQ ID NO: 245728 - DNA, 20 bp, Artificial Sequence
  Description of Artificial Sequence: Synthetic oligonucleotide
  Target: LAMA2; (-) strand; PAM type: YTN; PAM sequence: CTG
cctcagcctcacgagtagct

SEQ ID NO: 245729 - DNA, 20 bp, Artificial Sequence
  Description of Artificial Sequence: Synthetic oligonucleotide
  Target: LAMA2; (-) strand; PAM type: YTN; PAM sequence: CTC
ctgcctcagcctcacgagta

SEQ ID NO: 245730 - DNA, 20 bp, Artificial Sequence
  Description of Artificial Sequence: Synthetic oligonucleotide
  Target: LAMA2; (-) strand; PAM type: YTN; PAM sequence: TTC
tcctgcctcagcctcacgag

SEQ ID NO: 245731 - DNA, 20 bp, Artificial Sequence
  Description of Artificial Sequence: Synthetic oligonucleotide
  Target: LAMA2; (-) strand; PAM type: YTN; PAM sequence: TTC
aagcgattctcctgcctcag

SEQ ID NO: 245732 - DNA, 20 bp, Artificial Sequence
  Description of Artificial Sequence: Synthetic oligonucleotide
  Target: LAMA2; (-) strand; PAM type: YTN; PAM sequence: CTC
ccaggttcaagcgattctcc

SEQ ID NO: 245733 - DNA, 20 bp, Artificial Sequence
  Description of Artificial Sequence: Synthetic oligonucleotide
  Target: LAMA2; (-) strand; PAM type: YTN; PAM sequence: TTG
tctcccaggttcaagcgatt

SEQ ID NO: 245734 - DNA, 20 bp, Artificial Sequence
  Description of Artificial Sequence: Synthetic oligonucleotide
  Target: LAMA2; (-) strand; PAM type: YTN; PAM sequence: CTT
gtctcccaggttcaagcgat

SEQ ID NO: 245735 - DNA, 20 bp, Artificial Sequence
  Description of Artificial Sequence: Synthetic oligonucleotide
  Target: LAMA2; (-) strand; PAM type: YTN; PAM sequence: CTC
ttgtctcccaggttcaagcg

SEQ ID NO: 245736 - DNA, 20 bp, Artificial Sequence
  Description of Artificial Sequence: Synthetic oligonucleotide
  Target: LAMA2; (-) strand; PAM type: YTN; PAM sequence: CTG
caacctcttgtctcccaggt

SEQ ID NO: 245737 - DNA, 20 bp, Artificial Sequence
  Description of Artificial Sequence: Synthetic oligonucleotide
  Target: LAMA2; (-) strand; PAM type: YTN; PAM sequence: CTC
actgcaacctcttgtctccc

SEQ ID NO: 245738 - DNA, 20 bp, Artificial Sequence
  Description of Artificial Sequence: Synthetic oligonucleotide
  Target: LAMA2; (-) strand; PAM type: YTN; PAM sequence: TTG
gctcactgcaacctcttgtc

SEQ ID NO: 245739 - DNA, 20 bp, Artificial Sequence
  Description of Artificial Sequence: Synthetic oligonucleotide
  Target: LAMA2; (-) strand; PAM type: YTN; PAM sequence: CTT
ggctcactgcaacctcttgt

SEQ ID NO: 245740 - DNA, 20 bp, Artificial Sequence
  Description of Artificial Sequence: Synthetic oligonucleotide
  Target: LAMA2; (-) strand; PAM type: YTN; PAM sequence: CTG
gagtgcagtggtgtgatctt

SEQ ID NO: 245741 - DNA, 20 bp, Artificial Sequence
  Description of Artificial Sequence: Synthetic oligonucleotide
  Target: LAMA2; (-) strand; PAM type: YTN; PAM sequence: CTC
ccaggctggagtgcagtggt

SEQ ID NO: 245742 - DNA, 20 bp, Artificial Sequence
  Description of Artificial Sequence: Synthetic oligonucleotide
  Target: LAMA2; (-) strand; PAM type: YTN; PAM sequence: CTG
tctcccaggctggagtgcag

SEQ ID NO: 245743 - DNA, 20 bp, Artificial Sequence
  Description of Artificial Sequence: Synthetic oligonucleotide
  Target: LAMA2; (-) strand; PAM type: YTN; PAM sequence: CTC
tgtctcccaggctggagtgc

SEQ ID NO: 245744 - DNA, 20 bp, Artificial Sequence
  Description of Artificial Sequence: Synthetic oligonucleotide
  Target: LAMA2; (-) strand; PAM type: YTN; PAM sequence: TTG
ctctgtctcccaggctggag

SEQ ID NO: 245745 - DNA, 20 bp, Artificial Sequence
  Description of Artificial Sequence: Synthetic oligonucleotide
  Target: LAMA2; (-) strand; PAM type: YTN; PAM sequence: CTT
gctctgtctcccaggctgga

SEQ ID NO: 245746 - DNA, 20 bp, Artificial Sequence
  Description of Artificial Sequence: Synthetic oligonucleotide
  Target: LAMA2; (-) strand; PAM type: YTN; PAM sequence: TTG
agatggagtcttgctctgtc

SEQ ID NO: 245747 - DNA, 20 bp, Artificial Sequence
  Description of Artificial Sequence: Synthetic oligonucleotide
  Target: LAMA2; (-) strand; PAM type: YTN; PAM sequence: TTT
gagatggagtcttgctctgt

SEQ ID NO: 245748 - DNA, 20 bp, Artificial Sequence
  Description of Artificial Sequence: Synthetic oligonucleotide
  Target: LAMA2; (-) strand; PAM type: YTN; PAM sequence: TTT
tgagatggagtcttgctctg

SEQ ID NO: 245749 - DNA, 20 bp, Artificial Sequence
  Description of Artificial Sequence: Synthetic oligonucleotide
  Target: LAMA2; (-) strand; PAM type: YTN; PAM sequence: TTT
ttgagatggagtcttgctct

SEQ ID NO: 245750 - DNA, 20 bp, Artificial Sequence
  Description of Artificial Sequence: Synthetic oligonucleotide
  Target: LAMA2; (-) strand; PAM type: YTN; PAM sequence: TTT
tttgagatggagtcttgctc

SEQ ID NO: 245751 - DNA, 20 bp, Artificial Sequence
  Description of Artificial Sequence: Synthetic oligonucleotide
  Target: LAMA2; (-) strand; PAM type: YTN; PAM sequence: TTT
ttttgagatggagtcttgct

SEQ ID NO: 245752 - DNA, 20 bp, Artificial Sequence
  Description of Artificial Sequence: Synthetic oligonucleotide
  Target: LAMA2; (-) strand; PAM type: YTN; PAM sequence: TTT
tttttgagatggagtcttgc

SEQ ID NO: 245753 - DNA, 20 bp, Artificial Sequence
  Description of Artificial Sequence: Synthetic oligonucleotide
  Target: LAMA2; (-) strand; PAM type: YTN; PAM sequence: TTT
ttttttgagatggagtcttg

SEQ ID NO: 245754 - DNA, 20 bp, Artificial Sequence
  Description of Artificial Sequence: Synthetic oligonucleotide
  Target: LAMA2; (-) strand; PAM type: YTN; PAM sequence: TTT
tttttttgagatggagtctt

SEQ ID NO: 245755 - DNA, 20 bp, Artificial Sequence
  Description of Artificial Sequence: Synthetic oligonucleotide
  Target: LAMA2; (-) strand; PAM type: YTN; PAM sequence: TTA
ttttttttttgagatggagt

SEQ ID NO: 245756 - DNA, 20 bp, Artificial Sequence
  Description of Artificial Sequence: Synthetic oligonucleotide
  Target: LAMA2; (-) strand; PAM type: YTN; PAM sequence: TTT
attttttttttgagatggag

SEQ ID NO: 245757 - DNA, 20 bp, Artificial Sequence
  Description of Artificial Sequence: Synthetic oligonucleotide
  Target: LAMA2; (-) strand; PAM type: YTN; PAM sequence: TTT
tattttttttttgagatgga

SEQ ID NO: 245758 - DNA, 20 bp, Artificial Sequence
  Description of Artificial Sequence: Synthetic oligonucleotide
  Target: LAMA2; (-) strand; PAM type: YTN; PAM sequence: TTT
ttattttttttttgagatgg

SEQ ID NO: 245759 - DNA, 20 bp, Artificial Sequence
  Description of Artificial Sequence: Synthetic oligonucleotide
  Target: LAMA2; (-) strand; PAM type: YTN; PAM sequence: TTA
atttttattttttttttgag

SEQ ID NO: 245760 - DNA, 20 bp, Artificial Sequence
  Description of Artificial Sequence: Synthetic oligonucleotide
  Target: LAMA2; (-) strand; PAM type: YTN; PAM sequence: TTT
aatttttattttttttttga

SEQ ID NO: 245761 - DNA, 20 bp, Artificial Sequence
  Description of Artificial Sequence: Synthetic oligonucleotide
  Target: LAMA2; (-) strand; PAM type: YTN; PAM sequence: TTT
taatttttattttttttttg

SEQ ID NO: 245762 - DNA, 20 bp, Artificial Sequence
  Description of Artificial Sequence: Synthetic oligonucleotide
  Target: LAMA2; (-) strand; PAM type: YTN; PAM sequence: TTT
ttaatttttatttttttttt

SEQ ID NO: 245763 - DNA, 20 bp, Artificial Sequence
  Description of Artificial Sequence: Synthetic oligonucleotide
  Target: LAMA2; (-) strand; PAM type: YTN; PAM sequence: TTT
tttaatttttattttttttt

SEQ ID NO: 245764 - DNA, 20 bp, Artificial Sequence
  Description of Artificial Sequence: Synthetic oligonucleotide
  Target: LAMA2; (-) strand; PAM type: YTN; PAM sequence: TTT
ttttaatttttatttttttt

SEQ ID NO: 245765 - DNA, 20 bp, Artificial Sequence
  Description of Artificial Sequence: Synthetic oligonucleotide
  Target: LAMA2; (-) strand; PAM type: YTN; PAM sequence: TTT
tttttaatttttattttttt

SEQ ID NO: 245766 - DNA, 20 bp, Artificial Sequence
  Description of Artificial Sequence: Synthetic oligonucleotide
  Target: LAMA2; (-) strand; PAM type: YTN; PAM sequence: TTT
ttttttaatttttatttttt

SEQ ID NO: 245767 - DNA, 20 bp, Artificial Sequence
  Description of Artificial Sequence: Synthetic oligonucleotide
  Target: LAMA2; (-) strand; PAM type: YTN; PAM sequence: CTT
tttttttaatttttattttt

SEQ ID NO: 245768 - DNA, 20 bp, Artificial Sequence
  Description of Artificial Sequence: Synthetic oligonucleotide
  Target: LAMA2; (-) strand; PAM type: YTN; PAM sequence: TTC
aggctttttttttaattttt

SEQ ID NO: 245769 - DNA, 20 bp, Artificial Sequence
  Description of Artificial Sequence: Synthetic oligonucleotide
  Target: LAMA2; (-) strand; PAM type: YTN; PAM sequence: CTA
ggttcaggctttttttttaa

SEQ ID NO: 245770 - DNA, 20 bp, Artificial Sequence
  Description of Artificial Sequence: Synthetic oligonucleotide
  Target: LAMA2; (-) strand; PAM type: YTN; PAM sequence: TTC
taggttcaggcttttttttt

SEQ ID NO: 245771 - DNA, 20 bp, Artificial Sequence
  Description of Artificial Sequence: Synthetic oligonucleotide
  Target: LAMA2; (-) strand; PAM type: YTN; PAM sequence: TTT
ctaggttcaggctttttttt

SEQ ID NO: 245772 - DNA, 20 bp, Artificial Sequence
  Description of Artificial Sequence: Synthetic oligonucleotide
  Target: LAMA2; (-) strand; PAM type: YTN; PAM sequence: TTG
taggtccgtttctaggttca

SEQ ID NO: 245773 - DNA, 20 bp, Artificial Sequence
  Description of Artificial Sequence: Synthetic oligonucleotide
  Target: LAMA2; (-) strand; PAM type: YTN; PAM sequence: TTT
gtaggtccgtttctaggttc

SEQ ID NO: 245774 - DNA, 20 bp, Artificial Sequence
  Description of Artificial Sequence: Synthetic oligonucleotide
  Target: LAMA2; (-) strand; PAM type: YTN; PAM sequence: TTG
acatttgtaggtccgtttct

SEQ ID NO: 245775 - DNA, 20 bp, Artificial Sequence
  Description of Artificial Sequence: Synthetic oligonucleotide
  Target: LAMA2; (-) strand; PAM type: YTN; PAM sequence: CTA
agtattgacatttgtaggtc

SEQ ID NO: 245776 - DNA, 20 bp, Artificial Sequence
  Description of Artificial Sequence: Synthetic oligonucleotide
  Target: LAMA2; (-) strand; PAM type: YTN; PAM sequence: TTA
ctaagtattgacatttgtag

SEQ ID NO: 245777 - DNA, 20 bp, Artificial Sequence
  Description of Artificial Sequence: Synthetic oligonucleotide
  Target: LAMA2; (-) strand; PAM type: YTN; PAM sequence: TTA
aaaatattactaagtattga

SEQ ID NO: 245778 - DNA, 20 bp, Artificial Sequence
  Description of Artificial Sequence: Synthetic oligonucleotide
  Target: LAMA2; (-) strand; PAM type: YTN; PAM sequence: TTA
ataattaaaaatattactaa

SEQ ID NO: 245779 - DNA, 20 bp, Artificial Sequence
  Description of Artificial Sequence: Synthetic oligonucleotide
  Target: LAMA2; (-) strand; PAM type: YTN; PAM sequence: CTT
aataattaaaaatattacta

SEQ ID NO: 245780 - DNA, 20 bp, Artificial Sequence
  Description of Artificial Sequence: Synthetic oligonucleotide
  Target: LAMA2; (-) strand; PAM type: YTN; PAM sequence: TTG
gcttaataattaaaaatatt

SEQ ID NO: 245781 - DNA, 20 bp, Artificial Sequence
  Description of Artificial Sequence: Synthetic oligonucleotide
  Target: LAMA2; (-) strand; PAM type: YTN; PAM sequence: CTT
ggcttaataattaaaaatat

SEQ ID NO: 245782 - DNA, 20 bp, Artificial Sequence
  Description of Artificial Sequence: Synthetic oligonucleotide
  Target: LAMA2; (-) strand; PAM type: YTN; PAM sequence: TTG
gaaatcttggcttaataatt

SEQ ID NO: 245783 - DNA, 20 bp, Artificial Sequence
  Description of Artificial Sequence: Synthetic oligonucleotide
  Target: LAMA2; (-) strand; PAM type: YTN; PAM sequence: TTT
ggaaatcttggcttaataat

SEQ ID NO: 245784 - DNA, 20 bp, Artificial Sequence
  Description of Artificial Sequence: Synthetic oligonucleotide
  Target: LAMA2; (-) strand; PAM type: YTN; PAM sequence: TTT
tggaaatcttggcttaataa

SEQ ID NO: 245785 - DNA, 20 bp, Artificial Sequence
  Description of Artificial Sequence: Synthetic oligonucleotide
  Target: LAMA2; (-) strand; PAM type: YTN; PAM sequence: TTT
ttggaaatcttggcttaata

SEQ ID NO: 245786 - DNA, 20 bp, Artificial Sequence
  Description of Artificial Sequence: Synthetic oligonucleotide
  Target: LAMA2; (-) strand; PAM type: YTN; PAM sequence: TTA
tttttggaaatcttggctta

SEQ ID NO: 245787 - DNA, 20 bp, Artificial Sequence
  Description of Artificial Sequence: Synthetic oligonucleotide
  Target: LAMA2; (-) strand; PAM type: YTN; PAM sequence: CTT
atttttggaaatcttggctt

SEQ ID NO: 245788 - DNA, 20 bp, Artificial Sequence
  Description of Artificial Sequence: Synthetic oligonucleotide
  Target: LAMA2; (-) strand; PAM type: YTN; PAM sequence: TTC
ttatttttggaaatcttggc

SEQ ID NO: 245789 - DNA, 20 bp, Artificial Sequence
  Description of Artificial Sequence: Synthetic oligonucleotide
  Target: LAMA2; (-) strand; PAM type: YTN; PAM sequence: TTT
cttatttttggaaatcttgg

SEQ ID NO: 245790 - DNA, 20 bp, Artificial Sequence
  Description of Artificial Sequence: Synthetic oligonucleotide
  Target: LAMA2; (-) strand; PAM type: YTN; PAM sequence: TTT
tcttatttttggaaatcttg

SEQ ID NO: 245791 - DNA, 20 bp, Artificial Sequence
  Description of Artificial Sequence: Synthetic oligonucleotide
  Target: LAMA2; (-) strand; PAM type: YTN; PAM sequence: CTT
ttcttatttttggaaatctt

SEQ ID NO: 245792 - DNA, 20 bp, Artificial Sequence
  Description of Artificial Sequence: Synthetic oligonucleotide
  Target: LAMA2; (-) strand; PAM type: YTN; PAM sequence: TTA
tgcttttcttatttttggaa

SEQ ID NO: 245793 - DNA, 20 bp, Artificial Sequence
  Description of Artificial Sequence: Synthetic oligonucleotide
  Target: LAMA2; (-) strand; PAM type: YTN; PAM sequence: TTC
caaatgaaaaaaaaaaaaaa

SEQ ID NO: 245794 - DNA, 20 bp, Artificial Sequence
  Description of Artificial Sequence: Synthetic oligonucleotide
  Target: LAMA2; (-) strand; PAM type: YTN; PAM sequence: TTA
tatgttccaaatgaaaaaaa

SEQ ID NO: 245795 - DNA, 20 bp, Artificial Sequence
  Description of Artificial Sequence: Synthetic oligonucleotide
  Target: LAMA2; (-) strand; PAM type: YTN; PAM sequence: CTC
aattatatgttccaaatgaa

SEQ ID NO: 245796 - DNA, 20 bp, Artificial Sequence
  Description of Artificial Sequence: Synthetic oligonucleotide
  Target: LAMA2; (-) strand; PAM type: YTN; PAM sequence: TTC
tcaattatatgttccaaatg

SEQ ID NO: 245797 - DNA, 20 bp, Artificial Sequence
  Description of Artificial Sequence: Synthetic oligonucleotide
  Target: LAMA2; (-) strand; PAM type: YTN; PAM sequence: TTT
ctcaattatatgttccaaat

SEQ ID NO: 245798 - DNA, 20 bp, Artificial Sequence
  Description of Artificial Sequence: Synthetic oligonucleotide
  Target: LAMA2; (-) strand; PAM type: YTN; PAM sequence: CTT
tctcaattatatgttccaaa

SEQ ID NO: 245799 - DNA, 20 bp, Artificial Sequence
  Description of Artificial Sequence: Synthetic oligonucleotide
  Target: LAMA2; (-) strand; PAM type: YTN; PAM sequence: CTA
aagctttctcaattatatgt

SEQ ID NO: 245800 - DNA, 20 bp, Artificial Sequence
  Description of Artificial Sequence: Synthetic oligonucleotide
  Target: LAMA2; (-) strand; PAM type: YTN; PAM sequence: TTG
atactaaagctttctcaatt

SEQ ID NO: 245801 - DNA, 20 bp, Artificial Sequence
  Description of Artificial Sequence: Synthetic oligonucleotide
  Target: LAMA2; (-) strand; PAM type: YTN; PAM sequence: CTT
gatactaaagctttctcaat

SEQ ID NO: 245802 - DNA, 20 bp, Artificial Sequence
  Description of Artificial Sequence: Synthetic oligonucleotide
  Target: LAMA2; (-) strand; PAM type: YTN; PAM sequence: TTA
catatgcttgatactaaagc

SEQ ID NO: 245803 - DNA, 20 bp, Artificial Sequence
  Description of Artificial Sequence: Synthetic oligonucleotide
  Target: LAMA2; (-) strand; PAM type: YTN; PAM sequence: TTT
acatatgcttgatactaaag

SEQ ID NO: 245804 - DNA, 20 bp, Artificial Sequence
  Description of Artificial Sequence: Synthetic oligonucleotide
  Target: LAMA2; (-) strand; PAM type: YTN; PAM sequence: CTT
tacatatgcttgatactaaa

SEQ ID NO: 245805 - DNA, 20 bp, Artificial Sequence
  Description of Artificial Sequence: Synthetic oligonucleotide
  Target: LAMA2; (-) strand; PAM type: YTN; PAM sequence: TTA
tgagtctttacatatgcttg

SEQ ID NO: 245806 - DNA, 20 bp, Artificial Sequence
  Description of Artificial Sequence: Synthetic oligonucleotide
  Target: LAMA2; (-) strand; PAM type: YTN; PAM sequence: TTT
atgagtctttacatatgctt

SEQ ID NO: 245807 - DNA, 20 bp, Artificial Sequence
  Description of Artificial Sequence: Synthetic oligonucleotide
  Target: LAMA2; (-) strand; PAM type: YTN; PAM sequence: TTT
tatgagtctttacatatgct

SEQ ID NO: 245808 - DNA, 20 bp, Artificial Sequence
  Description of Artificial Sequence: Synthetic oligonucleotide
  Target: LAMA2; (-) strand; PAM type: YTN; PAM sequence: TTA
ttttatgagtctttacatat

SEQ ID NO: 245809 - DNA, 20 bp, Artificial Sequence
  Description of Artificial Sequence: Synthetic oligonucleotide
  Target: LAMA2; (-) strand; PAM type: YTN; PAM sequence: TTA
ttattttatgagtctttaca

SEQ ID NO: 245810 - DNA, 20 bp, Artificial Sequence
  Description of Artificial Sequence: Synthetic oligonucleotide
  Target: LAMA2; (-) strand; PAM type: YTN; PAM sequence: CTT
attattttatgagtctttac

SEQ ID NO: 245811 - DNA, 20 bp, Artificial Sequence
  Description of Artificial Sequence: Synthetic oligonucleotide
  Target: LAMA2; (-) strand; PAM type: YTN; PAM sequence: TTC
cttattattttatgagtctt

SEQ ID NO: 245812 - DNA, 20 bp, Artificial Sequence
  Description of Artificial Sequence: Synthetic oligonucleotide
  Target: LAMA2; (-) strand; PAM type: YTN; PAM sequence: TTT
ccttattattttatgagtct

SEQ ID NO: 245813 - DNA, 20 bp, Artificial Sequence
  Description of Artificial Sequence: Synthetic oligonucleotide
  Target: LAMA2; (-) strand; PAM type: YTN; PAM sequence: CTT
tccttattattttatgagtc

SEQ ID NO: 245814 - DNA, 20 bp, Artificial Sequence
  Description of Artificial Sequence: Synthetic oligonucleotide
  Target: LAMA2; (-) strand; PAM type: YTN; PAM sequence: TTG
gcctttccttattattttat

SEQ ID NO: 245815 - DNA, 20 bp, Artificial Sequence
  Description of Artificial Sequence: Synthetic oligonucleotide
  Target: LAMA2; (-) strand; PAM type: YTN; PAM sequence: TTT
ggcctttccttattatttta

SEQ ID NO: 245816 - DNA, 20 bp, Artificial Sequence
  Description of Artificial Sequence: Synthetic oligonucleotide
  Target: LAMA2; (-) strand; PAM type: YTN; PAM sequence: CTA
tcaggcagtttggcctttcc

SEQ ID NO: 245817 - DNA, 20 bp, Artificial Sequence
  Description of Artificial Sequence: Synthetic oligonucleotide
  Target: LAMA2; (-) strand; PAM type: YTN; PAM sequence: TTG
gtctatcaggcagtttggcc

SEQ ID NO: 245818 - DNA, 20 bp, Artificial Sequence
  Description of Artificial Sequence: Synthetic oligonucleotide
  Target: LAMA2; (-) strand; PAM type: YTN; PAM sequence: TTT
ggtctatcaggcagtttggc

SEQ ID NO: 245819 - DNA, 20 bp, Artificial Sequence
  Description of Artificial Sequence: Synthetic oligonucleotide
  Target: LAMA2; (-) strand; PAM type: YTN; PAM sequence: TTT
tggtctatcaggcagtttgg

SEQ ID NO: 245820 - DNA, 20 bp, Artificial Sequence
  Description of Artificial Sequence: Synthetic oligonucleotide
  Target: LAMA2; (-) strand; PAM type: YTN; PAM sequence: TTT
ttggtctatcaggcagtttg

SEQ ID NO: 245821 - DNA, 20 bp, Artificial Sequence
  Description of Artificial Sequence: Synthetic oligonucleotide
  Target: LAMA2; (-) strand; PAM type: YTN; PAM sequence: TTT
tttggtctatcaggcagttt

SEQ ID NO: 245822 - DNA, 20 bp, Artificial Sequence
  Description of Artificial Sequence: Synthetic oligonucleotide
  Target: LAMA2; (-) strand; PAM type: YTN; PAM sequence: TTT
ttttggtctatcaggcagtt

SEQ ID NO: 245823 - DNA, 20 bp, Artificial Sequence
  Description of Artificial Sequence: Synthetic oligonucleotide
  Target: LAMA2; (-) strand; PAM type: YTN; PAM sequence: TTT
tttttggtctatcaggcagt

SEQ ID NO: 245824 - DNA, 20 bp, Artificial Sequence
  Description of Artificial Sequence: Synthetic oligonucleotide
  Target: LAMA2; (-) strand; PAM type: YTN; PAM sequence: TTT
ttttttggtctatcaggcag

SEQ ID NO: 245825 - DNA, 20 bp, Artificial Sequence
  Description of Artificial Sequence: Synthetic oligonucleotide
  Target: LAMA2; (-) strand; PAM type: YTN; PAM sequence: TTT
tttttttggtctatcaggca

SEQ ID NO: 245826 - DNA, 20 bp, Artificial Sequence
  Description of Artificial Sequence: Synthetic oligonucleotide
  Target: LAMA2; (-) strand; PAM type: YTN; PAM sequence: TTT
ttttttttggtctatcaggc

SEQ ID NO: 245827 - DNA, 20 bp, Artificial Sequence
  Description of Artificial Sequence: Synthetic oligonucleotide
  Target: LAMA2; (-) strand; PAM type: YTN; PAM sequence: TTT
tttttttttggtctatcagg

SEQ ID NO: 245828 - DNA, 20 bp, Artificial Sequence
  Description of Artificial Sequence: Synthetic oligonucleotide
  Target: LAMA2; (-) strand; PAM type: YTN; PAM sequence: TTT
ttttttttttggtctatcag

SEQ ID NO: 245829 - DNA, 20 bp, Artificial Sequence
  Description of Artificial Sequence: Synthetic oligonucleotide
  Target: LAMA2; (-) strand; PAM type: YTN; PAM sequence: TTG
atttttttttttttggtcta

SEQ ID NO: 245830 - DNA, 20 bp, Artificial Sequence
  Description of Artificial Sequence: Synthetic oligonucleotide
  Target: LAMA2; (-) strand; PAM type: YTN; PAM sequence: TTG
ttgatttttttttttttggt

SEQ ID NO: 245831 - DNA, 20 bp, Artificial Sequence
  Description of Artificial Sequence: Synthetic oligonucleotide
  Target: LAMA2; (-) strand; PAM type: YTN; PAM sequence: TTA
ttgttgattttttttttttt

SEQ ID NO: 245832 - DNA, 20 bp, Artificial Sequence
  Description of Artificial Sequence: Synthetic oligonucleotide
  Target: LAMA2; (-) strand; PAM type: YTN; PAM sequence: TTT
attgttgatttttttttttt

SEQ ID NO: 245833 - DNA, 20 bp, Artificial Sequence
  Description of Artificial Sequence: Synthetic oligonucleotide
  Target: LAMA2; (-) strand; PAM type: YTN; PAM sequence: CTG
taaaatgtttattgttgatt

SEQ ID NO: 245834 - DNA, 20 bp, Artificial Sequence
  Description of Artificial Sequence: Synthetic oligonucleotide
  Target: LAMA2; (-) strand; PAM type: YTN; PAM sequence: CTC
tgtaaaatgtttattgttga

SEQ ID NO: 245835 - DNA, 20 bp, Artificial Sequence
  Description of Artificial Sequence: Synthetic oligonucleotide
  Target: LAMA2; (-) strand; PAM type: YTN; PAM sequence: CTC
ctctgtaaaatgtttattgt

SEQ ID NO: 245836 - DNA, 20 bp, Artificial Sequence
  Description of Artificial Sequence: Synthetic oligonucleotide
  Target: LAMA2; (-) strand; PAM type: YTN; PAM sequence: TTC
tcctctgtaaaatgtttatt

SEQ ID NO: 245837 - DNA, 20 bp, Artificial Sequence
  Description of Artificial Sequence: Synthetic oligonucleotide
  Target: LAMA2; (-) strand; PAM type: YTN; PAM sequence: TTT
ctcctctgtaaaatgtttat

SEQ ID NO: 245838 - DNA, 20 bp, Artificial Sequence
  Description of Artificial Sequence: Synthetic oligonucleotide
  Target: LAMA2; (-) strand; PAM type: YTN; PAM sequence: CTG
tttctcctctgtaaaatgtt

SEQ ID NO: 245839 - DNA, 20 bp, Artificial Sequence
  Description of Artificial Sequence: Synthetic oligonucleotide
  Target: LAMA2; (-) strand; PAM type: YTN; PAM sequence: CTC
tgtttctcctctgtaaaatg

SEQ ID NO: 245840 - DNA, 20 bp, Artificial Sequence
  Description of Artificial Sequence: Synthetic oligonucleotide
  Target: LAMA2; (-) strand; PAM type: YTN; PAM sequence: TTC
tctgtttctcctctgtaaaa

SEQ ID NO: 245841 - DNA, 20 bp, Artificial Sequence
  Description of Artificial Sequence: Synthetic oligonucleotide
  Target: LAMA2; (-) strand; PAM type: YTN; PAM sequence: TTT
ctctgtttctcctctgtaaa

SEQ ID NO: 245842 - DNA, 20 bp, Artificial Sequence
  Description of Artificial Sequence: Synthetic oligonucleotide
  Target: LAMA2; (-) strand; PAM type: YTN; PAM sequence: CTG
tatatgtttctctgtttctc

SEQ ID NO: 245843 - DNA, 20 bp, Artificial Sequence
  Description of Artificial Sequence: Synthetic oligonucleotide
  Target: LAMA2; (-) strand; PAM type: YTN; PAM sequence: TTA
gctgtatatgtttctctgtt

SEQ ID NO: 245844 - DNA, 20 bp, Artificial Sequence
  Description of Artificial Sequence: Synthetic oligonucleotide
  Target: LAMA2; (-) strand; PAM type: YTN; PAM sequence: TTT
agctgtatatgtttctctgt

SEQ ID NO: 245845 - DNA, 20 bp, Artificial Sequence
  Description of Artificial Sequence: Synthetic oligonucleotide
  Target: LAMA2; (-) strand; PAM type: YTN; PAM sequence: TTT
tagctgtatatgtttctctg

SEQ ID NO: 245846 - DNA, 20 bp, Artificial Sequence
  Description of Artificial Sequence: Synthetic oligonucleotide
  Target: LAMA2; (-) strand; PAM type: YTN; PAM sequence: TTT
ttagctgtatatgtttctct

SEQ ID NO: 245847 - DNA, 20 bp, Artificial Sequence
  Description of Artificial Sequence: Synthetic oligonucleotide
  Target: LAMA2; (-) strand; PAM type: YTN; PAM sequence: TTC
catatgtttttagctgtata

SEQ ID NO: 245848 - DNA, 20 bp, Artificial Sequence
  Description of Artificial Sequence: Synthetic oligonucleotide
  Target: LAMA2; (-) strand; PAM type: YTN; PAM sequence: CTT
ccatatgtttttagctgtat

SEQ ID NO: 245849 - DNA, 20 bp, Artificial Sequence
  Description of Artificial Sequence: Synthetic oligonucleotide
  Target: LAMA2; (-) strand; PAM type: YTN; PAM sequence: CTC
aagatccttccatatgtttt

SEQ ID NO: 245850 - DNA, 20 bp, Artificial Sequence
  Description of Artificial Sequence: Synthetic oligonucleotide
  Target: LAMA2; (-) strand; PAM type: YTN; PAM sequence: CTA
taagactcaagatccttcca

SEQ ID NO: 245851 - DNA, 20 bp, Artificial Sequence
  Description of Artificial Sequence: Synthetic oligonucleotide
  Target: LAMA2; (-) strand; PAM type: YTN; PAM sequence: TTG
ctataagactcaagatcctt

SEQ ID NO: 245852 - DNA, 20 bp, Artificial Sequence
  Description of Artificial Sequence: Synthetic oligonucleotide
  Target: LAMA2; (-) strand; PAM type: YTN; PAM sequence: CTC
atcaatattgctataagact

SEQ ID NO: 245853 - DNA, 20 bp, Artificial Sequence
  Description of Artificial Sequence: Synthetic oligonucleotide
  Target: LAMA2; (-) strand; PAM type: YTN; PAM sequence: TTG
ctcatcaatattgctataag

SEQ ID NO: 245854 - DNA, 20 bp, Artificial Sequence
  Description of Artificial Sequence: Synthetic oligonucleotide
  Target: LAMA2; (-) strand; PAM type: YTN; PAM sequence: TTT
gctcatcaatattgctataa

SEQ ID NO: 245855 - DNA, 20 bp, Artificial Sequence
  Description of Artificial Sequence: Synthetic oligonucleotide
  Target: LAMA2; (-) strand; PAM type: YTN; PAM sequence: TTG
atttgctcatcaatattgct

SEQ ID NO: 245856 - DNA, 20 bp, Artificial Sequence
  Description of Artificial Sequence: Synthetic oligonucleotide
  Target: LAMA2; (-) strand; PAM type: YTN; PAM sequence: CTA
catattgatttgctcatcaa

SEQ ID NO: 245857 - DNA, 20 bp, Artificial Sequence
  Description of Artificial Sequence: Synthetic oligonucleotide
  Target: LAMA2; (-) strand; PAM type: YTN; PAM sequence: TTC
tacatattgatttgctcatc

SEQ ID NO: 245858 - DNA, 20 bp, Artificial Sequence
  Description of Artificial Sequence: Synthetic oligonucleotide
  Target: LAMA2; (-) strand; PAM type: YTN; PAM sequence: CTA
ttctacatattgatttgctc

SEQ ID NO: 245859 - DNA, 20 bp, Artificial Sequence
  Description of Artificial Sequence: Synthetic oligonucleotide
  Target: LAMA2; (-) strand; PAM type: YTN; PAM sequence: TTG
ctattctacatattgatttg

SEQ ID NO: 245860 - DNA, 20 bp, Artificial Sequence
  Description of Artificial Sequence: Synthetic oligonucleotide
  Target: LAMA2; (-) strand; PAM type: YTN; PAM sequence: TTT
gctattctacatattgattt

SEQ ID NO: 245861 - DNA, 20 bp, Artificial Sequence
  Description of Artificial Sequence: Synthetic oligonucleotide
  Target: LAMA2; (-) strand; PAM type: YTN; PAM sequence: CTG
atttgctattctacatattg

SEQ ID NO: 245862 - DNA, 20 bp, Artificial Sequence
  Description of Artificial Sequence: Synthetic oligonucleotide
  Target: LAMA2; (-) strand; PAM type: YTN; PAM sequence: TTG
ataatgatactgatttgcta

SEQ ID NO: 245863 - DNA, 20 bp, Artificial Sequence
  Description of Artificial Sequence: Synthetic oligonucleotide
  Target: LAMA2; (-) strand; PAM type: YTN; PAM sequence: TTT
gataatgatactgatttgct

SEQ ID NO: 245864 - DNA, 20 bp, Artificial Sequence
  Description of Artificial Sequence: Synthetic oligonucleotide
  Target: LAMA2; (-) strand; PAM type: YTN; PAM sequence: CTT
tgataatgatactgatttgc

SEQ ID NO: 245865 - DNA, 20 bp, Artificial Sequence
  Description of Artificial Sequence: Synthetic oligonucleotide
  Target: LAMA2; (-) strand; PAM type: YTN; PAM sequence: CTC
tttgataatgatactgattt

SEQ ID NO: 245866 - DNA, 20 bp, Artificial Sequence
  Description of Artificial Sequence: Synthetic oligonucleotide
  Target: LAMA2; (-) strand; PAM type: YTN; PAM sequence: TTA
tctctttgataatgatactg

SEQ ID NO: 245867 - DNA, 20 bp, Artificial Sequence
  Description of Artificial Sequence: Synthetic oligonucleotide
  Target: LAMA2; (-) strand; PAM type: YTN; PAM sequence: TTG
agtataaagagatatccatt

SEQ ID NO: 245868 - DNA, 20 bp, Artificial Sequence
  Description of Artificial Sequence: Synthetic oligonucleotide
  Target: LAMA2; (-) strand; PAM type: YTN; PAM sequence: TTG
ccaataaattgagtataaag

SEQ ID NO: 245869 - DNA, 20 bp, Artificial Sequence
  Description of Artificial Sequence: Synthetic oligonucleotide
  Target: LAMA2; (-) strand; PAM type: YTN; PAM sequence: TTA
ttgccaataaattgagtata

SEQ ID NO: 245870 - DNA, 20 bp, Artificial Sequence
  Description of Artificial Sequence: Synthetic oligonucleotide
  Target: LAMA2; (-) strand; PAM type: YTN; PAM sequence: TTA
attattgccaataaattgag

SEQ ID NO: 245871 - DNA, 20 bp, Artificial Sequence
  Description of Artificial Sequence: Synthetic oligonucleotide
  Target: LAMA2; (-) strand; PAM type: YTN; PAM sequence: CTT
aattattgccaataaattga

SEQ ID NO: 245872 - DNA, 20 bp, Artificial Sequence
  Description of Artificial Sequence: Synthetic oligonucleotide
  Target: LAMA2; (-) strand; PAM type: YTN; PAM sequence: TTC
ttaattattgccaataaatt

SEQ ID NO: 245873 - DNA, 20 bp, Artificial Sequence
  Description of Artificial Sequence: Synthetic oligonucleotide
  Target: LAMA2; (-) strand; PAM type: YTN; PAM sequence: TTA
aattcttaattattgccaat

SEQ ID NO: 245874 - DNA, 20 bp, Artificial Sequence
  Description of Artificial Sequence: Synthetic oligonucleotide
  Target: LAMA2; (-) strand; PAM type: YTN; PAM sequence: TTT
aaattcttaattattgccaa

SEQ ID NO: 245875 - DNA, 20 bp, Artificial Sequence
  Description of Artificial Sequence: Synthetic oligonucleotide
  Target: LAMA2; (-) strand; PAM type: YTN; PAM sequence: CTG
tagtttaaattcttaattat

SEQ ID NO: 245876 - DNA, 20 bp, Artificial Sequence
  Description of Artificial Sequence: Synthetic oligonucleotide
  Target: LAMA2; (-) strand; PAM type: YTN; PAM sequence: TTC
tgtagtttaaattcttaatt

SEQ ID NO: 245877 - DNA, 20 bp, Artificial Sequence
  Description of Artificial Sequence: Synthetic oligonucleotide
  Target: LAMA2; (-) strand; PAM type: YTN; PAM sequence: TTT
ctgtagtttaaattcttaat

SEQ ID NO: 245878 - DNA, 20 bp, Artificial Sequence
  Description of Artificial Sequence: Synthetic oligonucleotide
  Target: LAMA2; (-) strand; PAM type: YTN; PAM sequence: TTC
aatatttctgtagtttaaat

SEQ ID NO: 245879 - DNA, 20 bp, Artificial Sequence
  Description of Artificial Sequence: Synthetic oligonucleotide
  Target: LAMA2; (-) strand; PAM type: YTN; PAM sequence: TTT
caatatttctgtagtttaaa

SEQ ID NO: 245880 - DNA, 20 bp, Artificial Sequence
  Description of Artificial Sequence: Synthetic oligonucleotide
  Target: LAMA2; (-) strand; PAM type: YTN; PAM sequence: TTT
tcaatatttctgtagtttaa

SEQ ID NO: 245881 - DNA, 20 bp, Artificial Sequence
  Description of Artificial Sequence: Synthetic oligonucleotide
  Target: LAMA2; (-) strand; PAM type: YTN; PAM sequence: CTT
ttcaatatttctgtagttta

SEQ ID NO: 245882 - DNA, 20 bp, Artificial Sequence
  Description of Artificial Sequence: Synthetic oligonucleotide
  Target: LAMA2; (-) strand; PAM type: YTN; PAM sequence: TTC
aaatacttttcaatatttct

SEQ ID NO: 245883 - DNA, 20 bp, Artificial Sequence
  Description of Artificial Sequence: Synthetic oligonucleotide
  Target: LAMA2; (-) strand; PAM type: YTN; PAM sequence: TTG
attcaaatacttttcaatat

SEQ ID NO: 245884 - DNA, 20 bp, Artificial Sequence
  Description of Artificial Sequence: Synthetic oligonucleotide
  Target: LAMA2; (-) strand; PAM type: YTN; PAM sequence: CTG
gttgattcaaatacttttca

SEQ ID NO: 245885 - DNA, 20 bp, Artificial Sequence
  Description of Artificial Sequence: Synthetic oligonucleotide
  Target: LAMA2; (-) strand; PAM type: YTN; PAM sequence: CTA
tataagaaatctggttgatt

SEQ ID NO: 245886 - DNA, 20 bp, Artificial Sequence
  Description of Artificial Sequence: Synthetic oligonucleotide
  Target: LAMA2; (-) strand; PAM type: YTN; PAM sequence: TTA
gcactatataagaaatctgg

SEQ ID NO: 245887 - DNA, 20 bp, Artificial Sequence
  Description of Artificial Sequence: Synthetic oligonucleotide
  Target: LAMA2; (-) strand; PAM type: YTN; PAM sequence: TTA
tattagcactatataagaaa

SEQ ID NO: 245888 - DNA, 20 bp, Artificial Sequence
  Description of Artificial Sequence: Synthetic oligonucleotide
  Target: LAMA2; (-) strand; PAM type: YTN; PAM sequence: TTT
atattagcactatataagaa

SEQ ID NO: 245889 - DNA, 20 bp, Artificial Sequence
  Description of Artificial Sequence: Synthetic oligonucleotide
  Target: LAMA2; (-) strand; PAM type: YTN; PAM sequence: TTA
accaatttatattagcacta

SEQ ID NO: 245890 - DNA, 20 bp, Artificial Sequence
  Description of Artificial Sequence: Synthetic oligonucleotide
  Target: LAMA2; (-) strand; PAM type: YTN; PAM sequence: TTA
aaagataatgtcaagtggtt

SEQ ID NO: 245891 - DNA, 20 bp, Artificial Sequence
  Description of Artificial Sequence: Synthetic oligonucleotide
  Target: LAMA2; (-) strand; PAM type: YTN; PAM sequence: TTT
aaaagataatgtcaagtggt

SEQ ID NO: 245892 - DNA, 20 bp, Artificial Sequence
  Description of Artificial Sequence: Synthetic oligonucleotide
  Target: LAMA2; (-) strand; PAM type: YTN; PAM sequence: CTT
taaaagataatgtcaagtgg

SEQ ID NO: 245893 - DNA, 20 bp, Artificial Sequence
  Description of Artificial Sequence: Synthetic oligonucleotide
  Target: LAMA2; (-) strand; PAM type: YTN; PAM sequence: TTA
aactttaaaagataatgtca

SEQ ID NO: 245894 - DNA, 20 bp, Artificial Sequence
  Description of Artificial Sequence: Synthetic oligonucleotide
  Target: LAMA2; (-) strand; PAM type: YTN; PAM sequence: TTG
ggtcatagggtgtgtgaata

SEQ ID NO: 245895 - DNA, 20 bp, Artificial Sequence
  Description of Artificial Sequence: Synthetic oligonucleotide
  Target: LAMA2; (-) strand; PAM type: YTN; PAM sequence: TTG
ttgggtcatagggtgtgtga

SEQ ID NO: 245896 - DNA, 20 bp, Artificial Sequence
  Description of Artificial Sequence: Synthetic oligonucleotide
  Target: LAMA2; (-) strand; PAM type: YTN; PAM sequence: CTA
gaaaattgttgggtcatagg

SEQ ID NO: 245897 - DNA, 20 bp, Artificial Sequence
  Description of Artificial Sequence: Synthetic oligonucleotide
  Target: LAMA2; (-) strand; PAM type: YTN; PAM sequence: TTA
gtatatacatctagaaaatt

SEQ ID NO: 245898 - DNA, 20 bp, Artificial Sequence
  Description of Artificial Sequence: Synthetic oligonucleotide
  Target: LAMA2; (-) strand; PAM type: YTN; PAM sequence: TTT
agtatatacatctagaaaat

SEQ ID NO: 245899 - DNA, 20 bp, Artificial Sequence
  Description of Artificial Sequence: Synthetic oligonucleotide
  Target: LAMA2; (-) strand; PAM type: YTN; PAM sequence: CTT
tagtatatacatctagaaaa

SEQ ID NO: 245900 - DNA, 20 bp, Artificial Sequence
  Description of Artificial Sequence: Synthetic oligonucleotide
  Target: LAMA2; (-) strand; PAM type: YTN; PAM sequence: TTC
ctttagtatatacatctaga

SEQ ID NO: 245901 - DNA, 20 bp, Artificial Sequence
  Description of Artificial Sequence: Synthetic oligonucleotide
  Target: LAMA2; (-) strand; PAM type: YTN; PAM sequence: TTT
cctttagtatatacatctag

SEQ ID NO: 245902 - DNA, 20 bp, Artificial Sequence
  Description of Artificial Sequence: Synthetic oligonucleotide
  Target: LAMA2; (-) strand; PAM type: YTN; PAM sequence: CTG
ggtgcacaaatgtaataatt

SEQ ID NO: 245903 - DNA, 20 bp, Artificial Sequence
  Description of Artificial Sequence: Synthetic oligonucleotide
  Target: LAMA2; (-) strand; PAM type: YTN; PAM sequence: TTA
tctgggtgcacaaatgtaat

SEQ ID NO: 245904 - DNA, 20 bp, Artificial Sequence
  Description of Artificial Sequence: Synthetic oligonucleotide
  Target: LAMA2; (-) strand; PAM type: YTN; PAM sequence: TTT
atctgggtgcacaaatgtaa

SEQ ID NO: 245905 - DNA, 20 bp, Artificial Sequence
  Description of Artificial Sequence: Synthetic oligonucleotide
  Target: LAMA2; (-) strand; PAM type: YTN; PAM sequence: TTA
tgtgtttatctgggtgcaca

SEQ ID NO: 245906 - DNA, 20 bp, Artificial Sequence
  Description of Artificial Sequence: Synthetic oligonucleotide
  Target: LAMA2; (-) strand; PAM type: YTN; PAM sequence: TTT
atgtgtttatctgggtgcac

SEQ ID NO: 245907 - DNA, 20 bp, Artificial Sequence
  Description of Artificial Sequence: Synthetic oligonucleotide
  Target: LAMA2; (-) strand; PAM type: YTN; PAM sequence: TTT
tatgtgtttatctgggtgca

SEQ ID NO: 245908 - DNA, 20 bp, Artificial Sequence
  Description of Artificial Sequence: Synthetic oligonucleotide
  Target: LAMA2; (-) strand; PAM type: YTN; PAM sequence: CTT
ttatgtgtttatctgggtgc

SEQ ID NO: 245909 - DNA, 20 bp, Artificial Sequence
  Description of Artificial Sequence: Synthetic oligonucleotide
  Target: LAMA2; (-) strand; PAM type: YTN; PAM sequence: TTA
tgaacacttttatgtgttta

SEQ ID NO: 245910 - DNA, 20 bp, Artificial Sequence
  Description of Artificial Sequence: Synthetic oligonucleotide
  Target: LAMA2; (-) strand; PAM type: YTN; PAM sequence: TTT
atgaacacttttatgtgttt

SEQ ID NO: 245911 - DNA, 20 bp, Artificial Sequence
  Description of Artificial Sequence: Synthetic oligonucleotide
  Target: LAMA2; (-) strand; PAM type: YTN; PAM sequence: TTT
tatgaacacttttatgtgtt

SEQ ID NO: 245912 - DNA, 20 bp, Artificial Sequence
  Description of Artificial Sequence: Synthetic oligonucleotide
  Target: LAMA2; (-) strand; PAM type: YTN; PAM sequence: CTT
ttatgaacacttttatgtgt

SEQ ID NO: 245913 - DNA, 20 bp, Artificial Sequence
  Description of Artificial Sequence: Synthetic oligonucleotide
  Target: LAMA2; (-) strand; PAM type: YTN; PAM sequence: TTA
atataaacagtacttttatg

SEQ ID NO: 245914 - DNA, 20 bp, Artificial Sequence
  Description of Artificial Sequence: Synthetic oligonucleotide
  Target: LAMA2; (-) strand; PAM type: YTN; PAM sequence: CTT
aatataaacagtacttttat

SEQ ID NO: 245915 - DNA, 20 bp, Artificial Sequence
  Description of Artificial Sequence: Synthetic oligonucleotide
  Target: LAMA2; (-) strand; PAM type: YTN; PAM sequence: TTC
ttaatataaacagtactttt

SEQ ID NO: 245916 - DNA, 20 bp, Artificial Sequence
  Description of Artificial Sequence: Synthetic oligonucleotide
  Target: LAMA2; (-) strand; PAM type: YTN; PAM sequence: CTT
cttaatataaacagtacttt

SEQ ID NO: 245917 - DNA, 20 bp, Artificial Sequence
  Description of Artificial Sequence: Synthetic oligonucleotide
  Target: LAMA2; (-) strand; PAM type: YTN; PAM sequence: CTC
ttcttaatataaacagtact

SEQ ID NO: 245918 - DNA, 20 bp, Artificial Sequence
  Description of Artificial Sequence: Synthetic oligonucleotide
  Target: LAMA2; (-) strand; PAM type: YTN; PAM sequence: CTG
tcggctcttcttaatataaa

SEQ ID NO: 245919 - DNA, 20 bp, Artificial Sequence
  Description of Artificial Sequence: Synthetic oligonucleotide
  Target: LAMA2; (-) strand; PAM type: YTN; PAM sequence: CTG
ctgtcggctcttcttaatat

SEQ ID NO: 245920 - DNA, 20 bp, Artificial Sequence
  Description of Artificial Sequence: Synthetic oligonucleotide
  Target: LAMA2; (-) strand; PAM type: YTN; PAM sequence: CTG
gataggcatctgctgtcggc

SEQ ID NO: 245921 - DNA, 20 bp, Artificial Sequence
  Description of Artificial Sequence: Synthetic oligonucleotide
  Target: LAMA2; (-) strand; PAM type: YTN; PAM sequence: CTC
tggataggcatctgctgtcg

SEQ ID NO: 245922 - DNA, 20 bp, Artificial Sequence
  Description of Artificial Sequence: Synthetic oligonucleotide
  Target: LAMA2; (-) strand; PAM type: YTN; PAM sequence: TTA
cctctggataggcatctgct

SEQ ID NO: 245923 - DNA, 20 bp, Artificial Sequence
  Description of Artificial Sequence: Synthetic oligonucleotide
  Target: LAMA2; (-) strand; PAM type: YTN; PAM sequence: TTT
acctctggataggcatctgc

SEQ ID NO: 245924 - DNA, 20 bp, Artificial Sequence
  Description of Artificial Sequence: Synthetic oligonucleotide
  Target: LAMA2; (-) strand; PAM type: YTN; PAM sequence: TTG
tttacctctggataggcatc

SEQ ID NO: 245925 - DNA, 20 bp, Artificial Sequence
  Description of Artificial Sequence: Synthetic oligonucleotide
  Target: LAMA2; (-) strand; PAM type: YTN; PAM sequence: TTT
gtttacctctggataggcat

SEQ ID NO: 245926 - DNA, 20 bp, Artificial Sequence
  Description of Artificial Sequence: Synthetic oligonucleotide
  Target: LAMA2; (-) strand; PAM type: YTN; PAM sequence: TTA
caatttgtttacctctggat

SEQ ID NO: 245927 - DNA, 20 bp, Artificial Sequence
  Description of Artificial Sequence: Synthetic oligonucleotide
  Target: LAMA2; (-) strand; PAM type: YTN; PAM sequence: TTC
cagatatattacaatttgtt

SEQ ID NO: 245928 - DNA, 20 bp, Artificial Sequence
  Description of Artificial Sequence: Synthetic oligonucleotide
  Target: LAMA2; (-) strand; PAM type: YTN; PAM sequence: TTA
ttccagatatattacaattt

SEQ ID NO: 245929 - DNA, 20 bp, Artificial Sequence
  Description of Artificial Sequence: Synthetic oligonucleotide
  Target: LAMA2; (-) strand; PAM type: YTN; PAM sequence: TTG
caacaagttattccagatat

SEQ ID NO: 245930 - DNA, 20 bp, Artificial Sequence
  Description of Artificial Sequence: Synthetic oligonucleotide
  Target: LAMA2; (-) strand; PAM type: YTN; PAM sequence: TTC
attgcaacaagttattccag

SEQ ID NO: 245931 - DNA, 20 bp, Artificial Sequence
  Description of Artificial Sequence: Synthetic oligonucleotide
  Target: LAMA2; (-) strand; PAM type: YTN; PAM sequence: TTT
cattgcaacaagttattcca

SEQ ID NO: 245932 - DNA, 20 bp, Artificial Sequence
  Description of Artificial Sequence: Synthetic oligonucleotide
  Target: LAMA2; (-) strand; PAM type: YTN; PAM sequence: TTT
tcattgcaacaagttattcc

SEQ ID NO: 245933 - DNA, 20 bp, Artificial Sequence
  Description of Artificial Sequence: Synthetic oligonucleotide
  Target: LAMA2; (-) strand; PAM type: YTN; PAM sequence: TTA
ttttcattgcaacaagttat

SEQ ID NO: 245934 - DNA, 20 bp, Artificial Sequence
  Description of Artificial Sequence: Synthetic oligonucleotide
  Target: LAMA2; (-) strand; PAM type: YTN; PAM sequence: TTT
attttcattgcaacaagtta

SEQ ID NO: 245935 - DNA, 20 bp, Artificial Sequence
  Description of Artificial Sequence: Synthetic oligonucleotide
  Target: LAMA2; (-) strand; PAM type: YTN; PAM sequence: TTC
atttattttcattgcaacaa

SEQ ID NO: 245936 - DNA, 20 bp, Artificial Sequence
  Description of Artificial Sequence: Synthetic oligonucleotide
  Target: LAMA2; (-) strand; PAM type: YTN; PAM sequence: CTG
tagttcatttattttcattg

SEQ ID NO: 245937 - DNA, 20 bp, Artificial Sequence
  Description of Artificial Sequence: Synthetic oligonucleotide
  Target: LAMA2; (-) strand; PAM type: YTN; PAM sequence: TTA
tcacgtatacctgtagttca

SEQ ID NO: 245938 - DNA, 20 bp, Artificial Sequence
  Description of Artificial Sequence: Synthetic oligonucleotide
  Target: LAMA2; (-) strand; PAM type: YTN; PAM sequence: CTA
agcatcatattatcacgtat

SEQ ID NO: 245939 - DNA, 20 bp, Artificial Sequence
  Description of Artificial Sequence: Synthetic oligonucleotide
  Target: LAMA2; (-) strand; PAM type: YTN; PAM sequence: CTA
tcactaagcatcatattatc

SEQ ID NO: 245940 - DNA, 20 bp, Artificial Sequence
  Description of Artificial Sequence: Synthetic oligonucleotide
  Target: LAMA2; (-) strand; PAM type: YTN; PAM sequence: CTG
agaacctatcactaagcatc

SEQ ID NO: 245941 - DNA, 20 bp, Artificial Sequence
  Description of Artificial Sequence: Synthetic oligonucleotide
  Target: LAMA2; (-) strand; PAM type: YTN; PAM sequence: CTG
tgatcatctgagaacctatc

SEQ ID NO: 245942 - DNA, 20 bp, Artificial Sequence
  Description of Artificial Sequence: Synthetic oligonucleotide
  Target: LAMA2; (-) strand; PAM type: YTN; PAM sequence: TTA
taaagaccatcatgctgtga

SEQ ID NO: 245943 - DNA, 20 bp, Artificial Sequence
  Description of Artificial Sequence: Synthetic oligonucleotide
  Target: LAMA2; (-) strand; PAM type: YTN; PAM sequence: CTT
ataaagaccatcatgctgtg

SEQ ID NO: 245944 - DNA, 20 bp, Artificial Sequence
  Description of Artificial Sequence: Synthetic oligonucleotide
  Target: LAMA2; (-) strand; PAM type: YTN; PAM sequence: TTG
cttataaagaccatcatgct

SEQ ID NO: 245945 - DNA, 20 bp, Artificial Sequence
  Description of Artificial Sequence: Synthetic oligonucleotide
  Target: LAMA2; (-) strand; PAM type: YTN; PAM sequence: TTA
ttgcttataaagaccatcat

SEQ ID NO: 245946 - DNA, 20 bp, Artificial Sequence
  Description of Artificial Sequence: Synthetic oligonucleotide
  Target: LAMA2; (-) strand; PAM type: YTN; PAM sequence: CTC
aaaaatgttattgcttataa

SEQ ID NO: 245947 - DNA, 20 bp, Artificial Sequence
  Description of Artificial Sequence: Synthetic oligonucleotide
  Target: LAMA2; (-) strand; PAM type: YTN; PAM sequence: TTG
ctcaaaaatgttattgctta

SEQ ID NO: 245948 - DNA, 20 bp, Artificial Sequence
  Description of Artificial Sequence: Synthetic oligonucleotide
  Target: LAMA2; (-) strand; PAM type: YTN; PAM sequence: TTT
gctcaaaaatgttattgctt

SEQ ID NO: 245949 - DNA, 20 bp, Artificial Sequence
  Description of Artificial Sequence: Synthetic oligonucleotide
  Target: LAMA2; (-) strand; PAM type: YTN; PAM sequence: TTC
agcaaatatatgtttgctca

SEQ ID NO: 245950 - DNA, 20 bp, Artificial Sequence
  Description of Artificial Sequence: Synthetic oligonucleotide
  Target: LAMA2; (-) strand; PAM type: YTN; PAM sequence: TTT
cagcaaatatatgtttgctc

SEQ ID NO: 245951 - DNA, 20 bp, Artificial Sequence
  Description of Artificial Sequence: Synthetic oligonucleotide
  Target: LAMA2; (-) strand; PAM type: YTN; PAM sequence: TTA
aaaagataatttcagcaaat

SEQ ID NO: 245952 - DNA, 20 bp, Artificial Sequence
  Description of Artificial Sequence: Synthetic oligonucleotide
  Target: LAMA2; (-) strand; PAM type: YTN; PAM sequence: TTT
aaaaagataatttcagcaaa

SEQ ID NO: 245953 - DNA, 20 bp, Artificial Sequence
  Description of Artificial Sequence: Synthetic oligonucleotide
  Target: LAMA2; (-) strand; PAM type: YTN; PAM sequence: TTT
taaaaagataatttcagcaa

SEQ ID NO: 245954 - DNA, 20 bp, Artificial Sequence
  Description of Artificial Sequence: Synthetic oligonucleotide
  Target: LAMA2; (-) strand; PAM type: YTN; PAM sequence: TTT
ttaaaaagataatttcagca

SEQ ID NO: 245955 - DNA, 20 bp, Artificial Sequence
  Description of Artificial Sequence: Synthetic oligonucleotide
  Target: LAMA2; (-) strand; PAM type: YTN; PAM sequence: TTA
catttttaaaaagataattt

SEQ ID NO: 245956 - DNA, 20 bp, Artificial Sequence
  Description of Artificial Sequence: Synthetic oligonucleotide
  Target: LAMA2; (-) strand; PAM type: YTN; PAM sequence: CTT
acatttttaaaaagataatt

SEQ ID NO: 245957 - DNA, 20 bp, Artificial Sequence
  Description of Artificial Sequence: Synthetic oligonucleotide
  Target: LAMA2; (-) strand; PAM type: YTN; PAM sequence: TTC
ttacatttttaaaaagataa

SEQ ID NO: 245958 - DNA, 20 bp, Artificial Sequence
  Description of Artificial Sequence: Synthetic oligonucleotide
  Target: LAMA2; (-) strand; PAM type: YTN; PAM sequence: TTT
cttacatttttaaaaagata

SEQ ID NO: 245959 - DNA, 20 bp, Artificial Sequence
  Description of Artificial Sequence: Synthetic oligonucleotide
  Target: LAMA2; (-) strand; PAM type: YTN; PAM sequence: TTT
tcttacatttttaaaaagat

SEQ ID NO: 245960 - DNA, 20 bp, Artificial Sequence
  Description of Artificial Sequence: Synthetic oligonucleotide
  Target: LAMA2; (-) strand; PAM type: YTN; PAM sequence: TTA
ttttcttacatttttaaaaa

SEQ ID NO: 245961 - DNA, 20 bp, Artificial Sequence
  Description of Artificial Sequence: Synthetic oligonucleotide
  Target: LAMA2; (-) strand; PAM type: YTN; PAM sequence: TTA
tattattttcttacattttt

SEQ ID NO: 245962 - DNA, 20 bp, Artificial Sequence
  Description of Artificial Sequence: Synthetic oligonucleotide
  Target: LAMA2; (-) strand; PAM type: YTN; PAM sequence: TTT
atattattttcttacatttt

SEQ ID NO: 245963 - DNA, 20 bp, Artificial Sequence
  Description of Artificial Sequence: Synthetic oligonucleotide
  Target: LAMA2; (-) strand; PAM type: YTN; PAM sequence: TTG
tgtttatattattttcttac

SEQ ID NO: 245964 - DNA, 20 bp, Artificial Sequence
  Description of Artificial Sequence: Synthetic oligonucleotide
  Target: LAMA2; (-) strand; PAM type: YTN; PAM sequence: TTT
gtgtttatattattttctta

SEQ ID NO: 245965 - DNA, 20 bp, Artificial Sequence
  Description of Artificial Sequence: Synthetic oligonucleotide
  Target: LAMA2; (-) strand; PAM type: YTN; PAM sequence: TTT
tgtgtttatattattttctt

SEQ ID NO: 245966 - DNA, 20 bp, Artificial Sequence
  Description of Artificial Sequence: Synthetic oligonucleotide
  Target: LAMA2; (-) strand; PAM type: YTN; PAM sequence: CTG
aattttgtgtttatattatt

SEQ ID NO: 245967 - DNA, 20 bp, Artificial Sequence
  Description of Artificial Sequence: Synthetic oligonucleotide
  Target: LAMA2; (-) strand; PAM type: YTN; PAM sequence: CTG
acatgctgaattttgtgttt

SEQ ID NO: 245968 - DNA, 20 bp, Artificial Sequence
  Description of Artificial Sequence: Synthetic oligonucleotide
  Target: LAMA2; (-) strand; PAM type: YTN; PAM sequence: CTG
cagcataaccctgacatgct

SEQ ID NO: 245969 - DNA, 20 bp, Artificial Sequence
  Description of Artificial Sequence: Synthetic oligonucleotide
  Target: LAMA2; (-) strand; PAM type: YTN; PAM sequence: TTA
ccctgcagcataaccctgac

SEQ ID NO: 245970 - DNA, 20 bp, Artificial Sequence
  Description of Artificial Sequence: Synthetic oligonucleotide
  Target: LAMA2; (-) strand; PAM type: YTN; PAM sequence: CTC
accaccccgttaccctgcag

SEQ ID NO: 245971 - DNA, 20 bp, Artificial Sequence
  Description of Artificial Sequence: Synthetic oligonucleotide
  Target: LAMA2; (-) strand; PAM type: YTN; PAM sequence: CTA
tacaatcctcaccaccccgt

SEQ ID NO: 245972 - DNA, 20 bp, Artificial Sequence
  Description of Artificial Sequence: Synthetic oligonucleotide
  Target: LAMA2; (-) strand; PAM type: YTN; PAM sequence: CTA
tctatacaatcctcaccacc

SEQ ID NO: 245973 - DNA, 20 bp, Artificial Sequence
  Description of Artificial Sequence: Synthetic oligonucleotide
  Target: LAMA2; (-) strand; PAM type: YTN; PAM sequence: TTG
caactatctatacaatcctc

SEQ ID NO: 245974 - DNA, 20 bp, Artificial Sequence
  Description of Artificial Sequence: Synthetic oligonucleotide
  Target: LAMA2; (-) strand; PAM type: YTN; PAM sequence: TTT
gcaactatctatacaatcct

SEQ ID NO: 245975 - DNA, 20 bp, Artificial Sequence
  Description of Artificial Sequence: Synthetic oligonucleotide
  Target: LAMA2; (-) strand; PAM type: YTN; PAM sequence: TTG
aacatgagcaatgtttgcaa

SEQ ID NO: 245976 - DNA, 20 bp, Artificial Sequence
  Description of Artificial Sequence: Synthetic oligonucleotide
  Target: LAMA2; (-) strand; PAM type: YTN; PAM sequence: CTA
cccaacccaagaagttgaac

SEQ ID NO: 245977 - DNA, 20 bp, Artificial Sequence
  Description of Artificial Sequence: Synthetic oligonucleotide
  Target: LAMA2; (-) strand; PAM type: YTN; PAM sequence: TTA
gtgataaaagccaactaccc

SEQ ID NO: 245978 - DNA, 20 bp, Artificial Sequence
  Description of Artificial Sequence: Synthetic oligonucleotide
  Target: LAMA2; (-) strand; PAM type: YTN; PAM sequence: TTG
ttagtgataaaagccaacta

SEQ ID NO: 245979 - DNA, 20 bp, Artificial Sequence
  Description of Artificial Sequence: Synthetic oligonucleotide
  Target: LAMA2; (-) strand; PAM type: YTN; PAM sequence: TTT
gttagtgataaaagccaact

SEQ ID NO: 245980 - DNA, 20 bp, Artificial Sequence
  Description of Artificial Sequence: Synthetic oligonucleotide
  Target: LAMA2; (-) strand; PAM type: YTN; PAM sequence: CTT
tgttagtgataaaagccaac

SEQ ID NO: 245981 - DNA, 20 bp, Artificial Sequence
  Description of Artificial Sequence: Synthetic oligonucleotide
  Target: LAMA2; (-) strand; PAM type: YTN; PAM sequence: TTA
ctttgttagtgataaaagcc

SEQ ID NO: 245982 - DNA, 20 bp, Artificial Sequence
  Description of Artificial Sequence: Synthetic oligonucleotide
  Target: LAMA2; (-) strand; PAM type: YTN; PAM sequence: TTA
ttactttgttagtgataaaa

SEQ ID NO: 245983 - DNA, 20 bp, Artificial Sequence
  Description of Artificial Sequence: Synthetic oligonucleotide
  Target: LAMA2; (-) strand; PAM type: YTN; PAM sequence: CTT
attactttgttagtgataaa

SEQ ID NO: 245984 - DNA, 20 bp, Artificial Sequence
  Description of Artificial Sequence: Synthetic oligonucleotide
  Target: LAMA2; (-) strand; PAM type: YTN; PAM sequence: CTG
gcttattactttgttagtga

SEQ ID NO: 245985 - DNA, 20 bp, Artificial Sequence
  Description of Artificial Sequence: Synthetic oligonucleotide
  Target: LAMA2; (-) strand; PAM type: YTN; PAM sequence: TTC
cctggcttattactttgtta

SEQ ID NO: 245986 - DNA, 20 bp, Artificial Sequence
  Description of Artificial Sequence: Synthetic oligonucleotide
  Target: LAMA2; (-) strand; PAM type: YTN; PAM sequence: TTG
tattccctggcttattactt

SEQ ID NO: 245987 - DNA, 20 bp, Artificial Sequence
  Description of Artificial Sequence: Synthetic oligonucleotide
  Target: LAMA2; (-) strand; PAM type: YTN; PAM sequence: TTA
cccattgtattccctggctt

SEQ ID NO: 245988 - DNA, 20 bp, Artificial Sequence
  Description of Artificial Sequence: Synthetic oligonucleotide
  Target: LAMA2; (-) strand; PAM type: YTN; PAM sequence: TTT
acccattgtattccctggct

SEQ ID NO: 245989 - DNA, 20 bp, Artificial Sequence
  Description of Artificial Sequence: Synthetic oligonucleotide
  Target: LAMA2; (-) strand; PAM type: YTN; PAM sequence: TTC
atttacccattgtattccct

SEQ ID NO: 245990 - DNA, 20 bp, Artificial Sequence
  Description of Artificial Sequence: Synthetic oligonucleotide
  Target: LAMA2; (-) strand; PAM type: YTN; PAM sequence: TTT
catttacccattgtattccc

SEQ ID NO: 245991 - DNA, 20 bp, Artificial Sequence
  Description of Artificial Sequence: Synthetic oligonucleotide
  Target: LAMA2; (-) strand; PAM type: YTN; PAM sequence: TTT
tcatttacccattgtattcc

SEQ ID NO: 245992 - DNA, 20 bp, Artificial Sequence
  Description of Artificial Sequence: Synthetic oligonucleotide
  Target: LAMA2; (-) strand; PAM type: YTN; PAM sequence: TTT
ttcatttacccattgtattc

SEQ ID NO: 245993 - DNA, 20 bp, Artificial Sequence
  Description of Artificial Sequence: Synthetic oligonucleotide
  Target: LAMA2; (-) strand; PAM type: YTN; PAM sequence: TTT
tttcatttacccattgtatt

SEQ ID NO: 245994 - DNA, 20 bp, Artificial Sequence
  Description of Artificial Sequence: Synthetic oligonucleotide
  Target: LAMA2; (-) strand; PAM type: YTN; PAM sequence: TTA
ttttttcatttacccattgt

SEQ ID NO: 245995 - DNA, 20 bp, Artificial Sequence
  Description of Artificial Sequence: Synthetic oligonucleotide
  Target: LAMA2; (-) strand; PAM type: YTN; PAM sequence: TTT
attttttcatttacccattg

SEQ ID NO: 245996 - DNA, 20 bp, Artificial Sequence
  Description of Artificial Sequence: Synthetic oligonucleotide
  Target: LAMA2; (-) strand; PAM type: YTN; PAM sequence: TTT
tattttttcatttacccatt

SEQ ID NO: 245997 - DNA, 20 bp, Artificial Sequence
  Description of Artificial Sequence: Synthetic oligonucleotide
  Target: LAMA2; (-) strand; PAM type: YTN; PAM sequence: CTA
ttttattttttcatttaccc

SEQ ID NO: 245998 - DNA, 20 bp, Artificial Sequence
  Description of Artificial Sequence: Synthetic oligonucleotide
  Target: LAMA2; (-) strand; PAM type: YTN; PAM sequence: CTC
tattttattttttcatttac

SEQ ID NO: 245999 - DNA, 20 bp, Artificial Sequence
  Description of Artificial Sequence: Synthetic oligonucleotide
  Target: LAMA2; (-) strand; PAM type: YTN; PAM sequence: CTA
atcgtgactctattttattt

SEQ ID NO: 246000 - DNA, 20 bp, Artificial Sequence
  Description of Artificial Sequence: Synthetic oligonucleotide
  Target: LAMA2; (-) strand; PAM type: YTN; PAM sequence: TTG
gtctaatcgtgactctattt

SEQ ID NO: 246001 - DNA, 20 bp, Artificial Sequence
  Description of Artificial Sequence: Synthetic oligonucleotide
  Target: LAMA2; (-) strand; PAM type: YTN; PAM sequence: CTA
tcatcattggtctaatcgtg

SEQ ID NO: 246002 - DNA, 20 bp, Artificial Sequence
  Description of Artificial Sequence: Synthetic oligonucleotide
  Target: LAMA2; (-) strand; PAM type: YTN; PAM sequence: TTA
tgatatactatcatcattgg

SEQ ID NO: 246003 - DNA, 20 bp, Artificial Sequence
  Description of Artificial Sequence: Synthetic oligonucleotide
  Target: LAMA2; (-) strand; PAM type: YTN; PAM sequence: TTT
atgatatactatcatcattg

SEQ ID NO: 246004 - DNA, 20 bp, Artificial Sequence
  Description of Artificial Sequence: Synthetic oligonucleotide
  Target: LAMA2; (-) strand; PAM type: YTN; PAM sequence: TTG
atttatgatatactatcatc

SEQ ID NO: 246005 - DNA, 20 bp, Artificial Sequence
  Description of Artificial Sequence: Synthetic oligonucleotide
  Target: LAMA2; (-) strand; PAM type: YTN; PAM sequence: CTT
gatttatgatatactatcat

SEQ ID NO: 246006 - DNA, 20 bp, Artificial Sequence
  Description of Artificial Sequence: Synthetic oligonucleotide
  Target: LAMA2; (-) strand; PAM type: YTN; PAM sequence: TTA
aagatgagaagacttgattt

SEQ ID NO: 246007 - DNA, 20 bp, Artificial Sequence
  Description of Artificial Sequence: Synthetic oligonucleotide
  Target: LAMA2; (-) strand; PAM type: YTN; PAM sequence: TTT
aaagatgagaagacttgatt

SEQ ID NO: 246008 - DNA, 20 bp, Artificial Sequence
  Description of Artificial Sequence: Synthetic oligonucleotide
  Target: LAMA2; (-) strand; PAM type: YTN; PAM sequence: TTT
taaagatgagaagacttgat

SEQ ID NO: 246009 - DNA, 20 bp, Artificial Sequence
  Description of Artificial Sequence: Synthetic oligonucleotide
  Target: LAMA2; (-) strand; PAM type: YTN; PAM sequence: TTC
cattttaaagatgagaagac

SEQ ID NO: 246010 - DNA, 20 bp, Artificial Sequence
  Description of Artificial Sequence: Synthetic oligonucleotide
  Target: LAMA2; (-) strand; PAM type: YTN; PAM sequence: CTA
attccattttaaagatgaga

SEQ ID NO: 246011 - DNA, 20 bp, Artificial Sequence
  Description of Artificial Sequence: Synthetic oligonucleotide
  Target: LAMA2; (-) strand; PAM type: YTN; PAM sequence: CTA
ctaattccattttaaagatg

SEQ ID NO: 246012 - DNA, 20 bp, Artificial Sequence
  Description of Artificial Sequence: Synthetic oligonucleotide
  Target: LAMA2; (-) strand; PAM type: YTN; PAM sequence: CTC
ctactaattccattttaaag

SEQ ID NO: 246013 - DNA, 20 bp, Artificial Sequence
  Description of Artificial Sequence: Synthetic oligonucleotide
  Target: LAMA2; (-) strand; PAM type: YTN; PAM sequence: CTA
agtactcctactaattccat

SEQ ID NO: 246014 - DNA, 20 bp, Artificial Sequence
  Description of Artificial Sequence: Synthetic oligonucleotide
  Target: LAMA2; (-) strand; PAM type: YTN; PAM sequence: CTA
ggaagctaagtactcctact

SEQ ID NO: 246015 - DNA, 20 bp, Artificial Sequence
  Description of Artificial Sequence: Synthetic oligonucleotide
  Target: LAMA2; (-) strand; PAM type: YTN; PAM sequence: TTC
ataacaaccctaggaagcta

SEQ ID NO: 246016 - DNA, 20 bp, Artificial Sequence
  Description of Artificial Sequence: Synthetic oligonucleotide
  Target: LAMA2; (-) strand; PAM type: YTN; PAM sequence: CTT
cataacaaccctaggaagct

SEQ ID NO: 246017 - DNA, 20 bp, Artificial Sequence
  Description of Artificial Sequence: Synthetic oligonucleotide
  Target: LAMA2; (-) strand; PAM type: YTN; PAM sequence: TTC
aaccttcataacaaccctag

SEQ ID NO: 246018 - DNA, 20 bp, Artificial Sequence
  Description of Artificial Sequence: Synthetic oligonucleotide
  Target: LAMA2; (-) strand; PAM type: YTN; PAM sequence: TTT
caaccttcataacaacccta

SEQ ID NO: 246019 - DNA, 20 bp, Artificial Sequence
  Description of Artificial Sequence: Synthetic oligonucleotide
  Target: LAMA2; (-) strand; PAM type: YTN; PAM sequence: CTA
agaatttcaaccttcataac

SEQ ID NO: 246020 - DNA, 20 bp, Artificial Sequence
  Description of Artificial Sequence: Synthetic oligonucleotide
  Target: LAMA2; (-) strand; PAM type: YTN; PAM sequence: TTC
taagaatttcaaccttcata

SEQ ID NO: 246021 - DNA, 20 bp, Artificial Sequence
  Description of Artificial Sequence: Synthetic oligonucleotide
  Target: LAMA2; (-) strand; PAM type: YTN; PAM sequence: TTA
ttctaagaatttcaaccttc

SEQ ID NO: 246022 - DNA, 20 bp, Artificial Sequence
  Description of Artificial Sequence: Synthetic oligonucleotide
  Target: LAMA2; (-) strand; PAM type: YTN; PAM sequence: CTA
tgtaccaggcattattctaa

SEQ ID NO: 246023 - DNA, 20 bp, Artificial Sequence
  Description of Artificial Sequence: Synthetic oligonucleotide
  Target: LAMA2; (-) strand; PAM type: YTN; PAM sequence: TTA
aaaaaaaaaatgctatgtac

SEQ ID NO: 246024 - DNA, 20 bp, Artificial Sequence
  Description of Artificial Sequence: Synthetic oligonucleotide
  Target: LAMA2; (-) strand; PAM type: YTN; PAM sequence: CTT
aaaaaaaaaaatgctatgta

SEQ ID NO: 246025 - DNA, 20 bp, Artificial Sequence
  Description of Artificial Sequence: Synthetic oligonucleotide
  Target: LAMA2; (-) strand; PAM type: YTN; PAM sequence: TTA
acttaaaaaaaaaaatgcta

SEQ ID NO: 246026 - DNA, 20 bp, Artificial Sequence
  Description of Artificial Sequence: Synthetic oligonucleotide
  Target: LAMA2; (-) strand; PAM type: YTN; PAM sequence: CTT
aacttaaaaaaaaaaatgct

SEQ ID NO: 246027 - DNA, 20 bp, Artificial Sequence
  Description of Artificial Sequence: Synthetic oligonucleotide
  Target: LAMA2; (-) strand; PAM type: YTN; PAM sequence: CTA
gaacttaacttaaaaaaaaa

SEQ ID NO: 246028 - DNA, 20 bp, Artificial Sequence
  Description of Artificial Sequence: Synthetic oligonucleotide
  Target: LAMA2; (-) strand; PAM type: YTN; PAM sequence: TTG
tgcacatgtaccctagaact

SEQ ID NO: 246029 - DNA, 20 bp, Artificial Sequence
  Description of Artificial Sequence: Synthetic oligonucleotide
  Target: LAMA2; (-) strand; PAM type: YTN; PAM sequence: CTG
cacattgtgcacatgtaccc

SEQ ID NO: 246030 - DNA, 20 bp, Artificial Sequence
  Description of Artificial Sequence: Synthetic oligonucleotide
  Target: LAMA2; (-) strand; PAM type: YTN; PAM sequence: TTA
atggatgcagcacaccaaca

SEQ ID NO: 246031 - DNA, 20 bp, Artificial Sequence
  Description of Artificial Sequence: Synthetic oligonucleotide
  Target: LAMA2; (-) strand; PAM type: YTN; PAM sequence: CTA
acgtaaataacgagttaatg

SEQ ID NO: 246032 - DNA, 20 bp, Artificial Sequence
  Description of Artificial Sequence: Synthetic oligonucleotide
  Target: LAMA2; (-) strand; PAM type: YTN; PAM sequence: TTA
ggagatatacctaacgtaaa

SEQ ID NO: 246033 - DNA, 20 bp, Artificial Sequence
  Description of Artificial Sequence: Synthetic oligonucleotide
  Target: LAMA2; (-) strand; PAM type: YTN; PAM sequence: CTG
tcgtagggtggggggagggg

SEQ ID NO: 246034 - DNA, 20 bp, Artificial Sequence
  Description of Artificial Sequence: Synthetic oligonucleotide
  Target: LAMA2; (-) strand; PAM type: YTN; PAM sequence: TTG
gacacaggaaggggaacatc

SEQ ID NO: 246035 - DNA, 20 bp, Artificial Sequence
  Description of Artificial Sequence: Synthetic oligonucleotide
  Target: LAMA2; (-) strand; PAM type: YTN; PAM sequence: CTT
ggacacaggaaggggaacat

SEQ ID NO: 246036 - DNA, 20 bp, Artificial Sequence
  Description of Artificial Sequence: Synthetic oligonucleotide
  Target: LAMA2; (-) strand; PAM type: YTN; PAM sequence: CTG
aacaatgaaaacacttggac

SEQ ID NO: 246037 - DNA, 20 bp, Artificial Sequence
  Description of Artificial Sequence: Synthetic oligonucleotide
  Target: LAMA2; (-) strand; PAM type: YTN; PAM sequence: CTC
ataggtgggaactgaacaat

SEQ ID NO: 246038 - DNA, 20 bp, Artificial Sequence
  Description of Artificial Sequence: Synthetic oligonucleotide
  Target: LAMA2; (-) strand; PAM type: YTN; PAM sequence: CTC
actcataggtgggaactgaa

SEQ ID NO: 246039 - DNA, 20 bp, Artificial Sequence
  Description of Artificial Sequence: Synthetic oligonucleotide
  Target: LAMA2; (-) strand; PAM type: YTN; PAM sequence: TTC
tcactcataggtgggaactg

SEQ ID NO: 246040 - DNA, 20 bp, Artificial Sequence
  Description of Artificial Sequence: Synthetic oligonucleotide
  Target: LAMA2; (-) strand; PAM type: YTN; PAM sequence: CTA
aacatcgcatattctcactc

SEQ ID NO: 246041 - DNA, 20 bp, Artificial Sequence
  Description of Artificial Sequence: Synthetic oligonucleotide
  Target: LAMA2; (-) strand; PAM type: YTN; PAM sequence: CTA
tcacaaggacaacaaactaa

SEQ ID NO: 246042 - DNA, 20 bp, Artificial Sequence
  Description of Artificial Sequence: Synthetic oligonucleotide
  Target: LAMA2; (-) strand; PAM type: YTN; PAM sequence: CTC
agcaaactatcacaaggaca

SEQ ID NO: 246043 - DNA, 20 bp, Artificial Sequence
  Description of Artificial Sequence: Synthetic oligonucleotide
  Target: LAMA2; (-) strand; PAM type: YTN; PAM sequence: TTC
tcagcaaactatcacaagga

SEQ ID NO: 246044 - DNA, 20 bp, Artificial Sequence
  Description of Artificial Sequence: Synthetic oligonucleotide
  Target: LAMA2; (-) strand; PAM type: YTN; PAM sequence: CTA
gaaaccatcattctcagcaa

SEQ ID NO: 246045 - DNA, 20 bp, Artificial Sequence
  Description of Artificial Sequence: Synthetic oligonucleotide
  Target: LAMA2; (-) strand; PAM type: YTN; PAM sequence: TTG
tagggacatggatgaagcta

SEQ ID NO: 246046 - DNA, 20 bp, Artificial Sequence
  Description of Artificial Sequence: Synthetic oligonucleotide
  Target: LAMA2; (-) strand; PAM type: YTN; PAM sequence: TTT
gtagggacatggatgaagct

SEQ ID NO: 246047 - DNA, 20 bp, Artificial Sequence
  Description of Artificial Sequence: Synthetic oligonucleotide
  Target: LAMA2; (-) strand; PAM type: YTN; PAM sequence: CTT
tgtagggacatggatgaagc

SEQ ID NO: 246048 - DNA, 20 bp, Artificial Sequence
  Description of Artificial Sequence: Synthetic oligonucleotide
  Target: LAMA2; (-) strand; PAM type: YTN; PAM sequence: TTC
acgtcctttgtagggacatg

SEQ ID NO: 246049 - DNA, 20 bp, Artificial Sequence
  Description of Artificial Sequence: Synthetic oligonucleotide
  Target: LAMA2; (-) strand; PAM type: YTN; PAM sequence: CTA
tgcagccataaaaaaggatg

SEQ ID NO: 246050 - DNA, 20 bp, Artificial Sequence
  Description of Artificial Sequence: Synthetic oligonucleotide
  Target: LAMA2; (-) strand; PAM type: YTN; PAM sequence: TTA
agaaaatgtggcatgtatac

SEQ ID NO: 246051 - DNA, 20 bp, Artificial Sequence
  Description of Artificial Sequence: Synthetic oligonucleotide
  Target: LAMA2; (-) strand; PAM type: YTN; PAM sequence: CTG
gattaagaaaatgtggcatg

SEQ ID NO: 246052 - DNA, 20 bp, Artificial Sequence
  Description of Artificial Sequence: Synthetic oligonucleotide
  Target: LAMA2; (-) strand; PAM type: YTN; PAM sequence: TTG
gaaccaacccaaatgtccat

SEQ ID NO: 246053 - DNA, 20 bp, Artificial Sequence
  Description of Artificial Sequence: Synthetic oligonucleotide
  Target: LAMA2; (-) strand; PAM type: YTN; PAM sequence: CTT
ggaaccaacccaaatgtcca

SEQ ID NO: 246054 - DNA, 20 bp, Artificial Sequence
  Description of Artificial Sequence: Synthetic oligonucleotide
  Target: LAMA2; (-) strand; PAM type: YTN; PAM sequence: TTC
ataatagcaaagacttggaa

SEQ ID NO: 246055 - DNA, 20 bp, Artificial Sequence
  Description of Artificial Sequence: Synthetic oligonucleotide
  Target: LAMA2; (-) strand; PAM type: YTN; PAM sequence: CTA
ttcataatagcaaagacttg

SEQ ID NO: 246056 - DNA, 20 bp, Artificial Sequence
  Description of Artificial Sequence: Synthetic oligonucleotide
  Target: LAMA2; (-) strand; PAM type: YTN; PAM sequence: TTG
cggcactattcataatagca

SEQ ID NO: 246057 - DNA, 20 bp, Artificial Sequence
  Description of Artificial Sequence: Synthetic oligonucleotide
  Target: LAMA2; (-) strand; PAM type: YTN; PAM sequence: TTA
ttgcggcactattcataata

SEQ ID NO: 246058 - DNA, 20 bp, Artificial Sequence
  Description of Artificial Sequence: Synthetic oligonucleotide
  Target: LAMA2; (-) strand; PAM type: YTN; PAM sequence: TTT
attgcggcactattcataat

SEQ ID NO: 246059 - DNA, 20 bp, Artificial Sequence
  Description of Artificial Sequence: Synthetic oligonucleotide
  Target: LAMA2; (-) strand; PAM type: YTN; PAM sequence: CTA
taaagacacatgcacatgta

SEQ ID NO: 246060 - DNA, 20 bp, Artificial Sequence
  Description of Artificial Sequence: Synthetic oligonucleotide
  Target: LAMA2; (-) strand; PAM type: YTN; PAM sequence: CTG
ctataaagacacatgcacat

SEQ ID NO: 246061 - DNA, 20 bp, Artificial Sequence
  Description of Artificial Sequence: Synthetic oligonucleotide
  Target: LAMA2; (-) strand; PAM type: YTN; PAM sequence: TTA
taaatcatgctgctataaag

SEQ ID NO: 246062 - DNA, 20 bp, Artificial Sequence
  Description of Artificial Sequence: Synthetic oligonucleotide
  Target: LAMA2; (-) strand; PAM type: YTN; PAM sequence: CTG
ggtatatacccaaaggatta

SEQ ID NO: 246063 - DNA, 20 bp, Artificial Sequence
  Description of Artificial Sequence: Synthetic oligonucleotide
  Target: LAMA2; (-) strand; PAM type: YTN; PAM sequence: TTA
ctgggtatatacccaaagga

SEQ ID NO: 246064 - DNA, 20 bp, Artificial Sequence
  Description of Artificial Sequence: Synthetic oligonucleotide
  Target: LAMA2; (-) strand; PAM type: YTN; PAM sequence: TTG
acccagtcatcccattactg

SEQ ID NO: 246065 - DNA, 20 bp, Artificial Sequence
  Description of Artificial Sequence: Synthetic oligonucleotide
  Target: LAMA2; (-) strand; PAM type: YTN; PAM sequence: TTT
gacccagtcatcccattact

SEQ ID NO: 246066 - DNA, 20 bp, Artificial Sequence
  Description of Artificial Sequence: Synthetic oligonucleotide
  Target: LAMA2; (-) strand; PAM type: YTN; PAM sequence: CTA
gaaataccatttgacccagt

SEQ ID NO: 246067 - DNA, 20 bp, Artificial Sequence
  Description of Artificial Sequence: Synthetic oligonucleotide
  Target: LAMA2; (-) strand; PAM type: YTN; PAM sequence: CTA
gaactagaaataccatttga

SEQ ID NO: 246068 - DNA, 20 bp, Artificial Sequence
  Description of Artificial Sequence: Synthetic oligonucleotide
  Target: LAMA2; (-) strand; PAM type: YTN; PAM sequence: CTC
aaggatctagaactagaaat

SEQ ID NO: 246069 - DNA, 20 bp, Artificial Sequence
  Description of Artificial Sequence: Synthetic oligonucleotide
  Target: LAMA2; (-) strand; PAM type: YTN; PAM sequence: TTC
ctcaaggatctagaactaga

SEQ ID NO: 246070 - DNA, 20 bp, Artificial Sequence
  Description of Artificial Sequence: Synthetic oligonucleotide
  Target: LAMA2; (-) strand; PAM type: YTN; PAM sequence: TTG
tggaagacagtggggcgatt

SEQ ID NO: 246071 - DNA, 20 bp, Artificial Sequence
  Description of Artificial Sequence: Synthetic oligonucleotide
  Target: LAMA2; (-) strand; PAM type: YTN; PAM sequence: TTC
aaccattgtggaagacagtg

SEQ ID NO: 246072 - DNA, 20 bp, Artificial Sequence
  Description of Artificial Sequence: Synthetic oligonucleotide
  Target: LAMA2; (-) strand; PAM type: YTN; PAM sequence: CTA
gttcaaccattgtggaagac

SEQ ID NO: 246073 - DNA, 20 bp, Artificial Sequence
  Description of Artificial Sequence: Synthetic oligonucleotide
  Target: LAMA2; (-) strand; PAM type: YTN; PAM sequence: TTG
taaactagttcaaccattgt

SEQ ID NO: 246074 - DNA, 20 bp, Artificial Sequence
  Description of Artificial Sequence: Synthetic oligonucleotide
  Target: LAMA2; (-) strand; PAM type: YTN; PAM sequence: TTG
gtgggattgtaaactagttc

SEQ ID NO: 246075 - DNA, 20 bp, Artificial Sequence
  Description of Artificial Sequence: Synthetic oligonucleotide
  Target: LAMA2; (-) strand; PAM type: YTN; PAM sequence: CTG
ttggtgggattgtaaactag

SEQ ID NO: 246076 - DNA, 20 bp, Artificial Sequence
  Description of Artificial Sequence: Synthetic oligonucleotide
  Target: LAMA2; (-) strand; PAM type: YTN; PAM sequence: TTA
cactgttggtgggattgtaa

SEQ ID NO: 246077 - DNA, 20 bp, Artificial Sequence
  Description of Artificial Sequence: Synthetic oligonucleotide
  Target: LAMA2; (-) strand; PAM type: YTN; PAM sequence: TTT
acactgttggtgggattgta

SEQ ID NO: 246078 - DNA, 20 bp, Artificial Sequence
  Description of Artificial Sequence: Synthetic oligonucleotide
  Target: LAMA2; (-) strand; PAM type: YTN; PAM sequence: TTT
tacactgttggtgggattgt

SEQ ID NO: 246079 - DNA, 20 bp, Artificial Sequence
  Description of Artificial Sequence: Synthetic oligonucleotide
  Target: LAMA2; (-) strand; PAM type: YTN; PAM sequence: CTT
ttacactgttggtgggattg

SEQ ID NO: 246080 - DNA, 20 bp, Artificial Sequence
  Description of Artificial Sequence: Synthetic oligonucleotide
  Target: LAMA2; (-) strand; PAM type: YTN; PAM sequence: CTG
gagaggatgtggagaaatag

SEQ ID NO: 246081 - DNA, 20 bp, Artificial Sequence
  Description of Artificial Sequence: Synthetic oligonucleotide
  Target: LAMA2; (-) strand; PAM type: YTN; PAM sequence: CTG
gaaacaacaggtgctggaga

SEQ ID NO: 246082 - DNA, 20 bp, Artificial Sequence
  Description of Artificial Sequence: Synthetic oligonucleotide
  Target: LAMA2; (-) strand; PAM type: YTN; PAM sequence: TTA
aaaagtctggaaacaacagg

SEQ ID NO: 246083 - DNA, 20 bp, Artificial Sequence
  Description of Artificial Sequence: Synthetic oligonucleotide
  Target: LAMA2; (-) strand; PAM type: YTN; PAM sequence: CTG
gtgatcattaaaaagtctgg

SEQ ID NO: 246084 - DNA, 20 bp, Artificial Sequence
  Description of Artificial Sequence: Synthetic oligonucleotide
  Target: LAMA2; (-) strand; PAM type: YTN; PAM sequence: TTA
gactggtgatcattaaaaag

SEQ ID NO: 246085 - DNA, 20 bp, Artificial Sequence
  Description of Artificial Sequence: Synthetic oligonucleotide
  Target: LAMA2; (-) strand; PAM type: YTN; PAM sequence: CTA
caccagttagactggtgatc

SEQ ID NO: 246086 - DNA, 20 bp, Artificial Sequence
  Description of Artificial Sequence: Synthetic oligonucleotide
  Target: LAMA2; (-) strand; PAM type: YTN; PAM sequence: CTG
gccatcagagaaatgcaaat

SEQ ID NO: 246087 - DNA, 20 bp, Artificial Sequence
  Description of Artificial Sequence: Synthetic oligonucleotide
  Target: LAMA2; (-) strand; PAM type: YTN; PAM sequence: CTC
atcatcactggccatcagag

SEQ ID NO: 246088 - DNA, 20 bp, Artificial Sequence
  Description of Artificial Sequence: Synthetic oligonucleotide
  Target: LAMA2; (-) strand; PAM type: YTN; PAM sequence: CTG
atgcagccagcagacacatg

SEQ ID NO: 246089 - DNA, 20 bp, Artificial Sequence
  Description of Artificial Sequence: Synthetic oligonucleotide
  Target: LAMA2; (-) strand; PAM type: YTN; PAM sequence: CTC
aaaagaagacactgatgcag

SEQ ID NO: 246090 - DNA, 20 bp, Artificial Sequence
  Description of Artificial Sequence: Synthetic oligonucleotide
  Target: LAMA2; (-) strand; PAM type: YTN; PAM sequence: TTC
tcaaaagaagacactgatgc

SEQ ID NO: 246091 - DNA, 20 bp, Artificial Sequence
  Description of Artificial Sequence: Synthetic oligonucleotide
  Target: LAMA2; (-) strand; PAM type: YTN; PAM sequence: CTT
ctcaaaagaagacactgatg

SEQ ID NO: 246092 - DNA, 20 bp, Artificial Sequence
  Description of Artificial Sequence: Synthetic oligonucleotide
  Target: LAMA2; (-) strand; PAM type: YTN; PAM sequence: TTG
ggcaaaggatatgaacagac

SEQ ID NO: 246093 - DNA, 20 bp, Artificial Sequence
  Description of Artificial Sequence: Synthetic oligonucleotide
  Target: LAMA2; (-) strand; PAM type: YTN; PAM sequence: TTA
caagaaaaaaacaaataacc

SEQ ID NO: 246094 - DNA, 20 bp, Artificial Sequence
  Description of Artificial Sequence: Synthetic oligonucleotide
  Target: LAMA2; (-) strand; PAM type: YTN; PAM sequence: CTT
acaagaaaaaaacaaataac

SEQ ID NO: 246095 - DNA, 20 bp, Artificial Sequence
  Description of Artificial Sequence: Synthetic oligonucleotide
  Target: LAMA2; (-) strand; PAM type: YTN; PAM sequence: CTC
aaacaaacttacaagaaaaa

SEQ ID NO: 246096 - DNA, 20 bp, Artificial Sequence
  Description of Artificial Sequence: Synthetic oligonucleotide
  Target: LAMA2; (-) strand; PAM type: YTN; PAM sequence: CTA
caaagaactcaaacaaactt

SEQ ID NO: 246097 - DNA, 20 bp, Artificial Sequence
  Description of Artificial Sequence: Synthetic oligonucleotide
  Target: LAMA2; (-) strand; PAM type: YTN; PAM sequence: CTA
atatccagaatctacaaaga

SEQ ID NO: 246098 - DNA, 20 bp, Artificial Sequence
  Description of Artificial Sequence: Synthetic oligonucleotide
  Target: LAMA2; (-) strand; PAM type: YTN; PAM sequence: CTG
acaaagggctaatatccaga

SEQ ID NO: 246099 - DNA, 20 bp, Artificial Sequence
  Description of Artificial Sequence: Synthetic oligonucleotide
  Target: LAMA2; (-) strand; PAM type: YTN; PAM sequence: CTC
atctgacaaagggctaatat

SEQ ID NO: 246100 - DNA, 20 bp, Artificial Sequence
  Description of Artificial Sequence: Synthetic oligonucleotide
  Target: LAMA2; (-) strand; PAM type: YTN; PAM sequence: CTA
ctcatctgacaaagggctaa

SEQ ID NO: 246101 - DNA, 20 bp, Artificial Sequence
  Description of Artificial Sequence: Synthetic oligonucleotide
  Target: LAMA2; (-) strand; PAM type: YTN; PAM sequence: TTG
caatctactcatctgacaaa

SEQ ID NO: 246102 - DNA, 20 bp, Artificial Sequence
  Description of Artificial Sequence: Synthetic oligonucleotide
  Target: LAMA2; (-) strand; PAM type: YTN; PAM sequence: TTT
gcaatctactcatctgacaa

SEQ ID NO: 246103 - DNA, 20 bp, Artificial Sequence
  Description of Artificial Sequence: Synthetic oligonucleotide
  Target: LAMA2; (-) strand; PAM type: YTN; PAM sequence: TTT
tgcaatctactcatctgaca

SEQ ID NO: 246104 - DNA, 20 bp, Artificial Sequence
  Description of Artificial Sequence: Synthetic oligonucleotide
  Target: LAMA2; (-) strand; PAM type: YTN; PAM sequence: TTT
ttgcaatctactcatctgac

SEQ ID NO: 246105 - DNA, 20 bp, Artificial Sequence
  Description of Artificial Sequence: Synthetic oligonucleotide
  Target: LAMA2; (-) strand; PAM type: YTN; PAM sequence: CTA
cagaatgggagaagattttt

SEQ ID NO: 246106 - DNA, 20 bp, Artificial Sequence
  Description of Artificial Sequence: Synthetic oligonucleotide
  Target: LAMA2; (-) strand; PAM type: YTN; PAM sequence: CTA
ccatcagagtgaacaggcaa

SEQ ID NO: 246107 - DNA, 20 bp, Artificial Sequence
  Description of Artificial Sequence: Synthetic oligonucleotide
  Target: LAMA2; (-) strand; PAM type: YTN; PAM sequence: CTG
cacagcaaaagaaactacca

SEQ ID NO: 246108 - DNA, 20 bp, Artificial Sequence
  Description of Artificial Sequence: Synthetic oligonucleotide
  Target: LAMA2; (-) strand; PAM type: YTN; PAM sequence: TTC
tgcacagcaaaagaaactac

SEQ ID NO: 246109 - DNA, 20 bp, Artificial Sequence
  Description of Artificial Sequence: Synthetic oligonucleotide
  Target: LAMA2; (-) strand; PAM type: YTN; PAM sequence: CTT
ctgcacagcaaaagaaacta

SEQ ID NO: 246110 - DNA, 20 bp, Artificial Sequence
  Description of Artificial Sequence: Synthetic oligonucleotide
  Target: LAMA2; (-) strand; PAM type: YTN; PAM sequence: CTA
aagagcttctgcacagcaaa

SEQ ID NO: 246111 - DNA, 20 bp, Artificial Sequence
  Description of Artificial Sequence: Synthetic oligonucleotide
  Target: LAMA2; (-) strand; PAM type: YTN; PAM sequence: TTA
aactaaagagcttctgcaca

SEQ ID NO: 246112 - DNA, 20 bp, Artificial Sequence
  Description of Artificial Sequence: Synthetic oligonucleotide
  Target: LAMA2; (-) strand; PAM type: YTN; PAM sequence: CTA
attaaactaaagagcttctg

SEQ ID NO: 246113 - DNA, 20 bp, Artificial Sequence
  Description of Artificial Sequence: Synthetic oligonucleotide
  Target: LAMA2; (-) strand; PAM type: YTN; PAM sequence: TTG
acaaatgggatctaattaaa

SEQ ID NO: 246114 - DNA, 20 bp, Artificial Sequence
  Description of Artificial Sequence: Synthetic oligonucleotide
  Target: LAMA2; (-) strand; PAM type: YTN; PAM sequence: CTA
aaacacgaaaagcaagggca

SEQ ID NO: 246115 - DNA, 20 bp, Artificial Sequence
  Description of Artificial Sequence: Synthetic oligonucleotide
  Target: LAMA2; (-) strand; PAM type: YTN; PAM sequence: TTG
tctaaaacacgaaaagcaag

SEQ ID NO: 246116 - DNA, 20 bp, Artificial Sequence
  Description of Artificial Sequence: Synthetic oligonucleotide
  Target: LAMA2; (-) strand; PAM type: YTN; PAM sequence: TTT
gtctaaaacacgaaaagcaa

SEQ ID NO: 246117 - DNA, 20 bp, Artificial Sequence
  Description of Artificial Sequence: Synthetic oligonucleotide
  Target: LAMA2; (-) strand; PAM type: YTN; PAM sequence: TTT
tgtctaaaacacgaaaagca

SEQ ID NO: 246118 - DNA, 20 bp, Artificial Sequence
  Description of Artificial Sequence: Synthetic oligonucleotide
  Target: LAMA2; (-) strand; PAM type: YTN; PAM sequence: TTT
ttgtctaaaacacgaaaagc

SEQ ID NO: 246119 - DNA, 20 bp, Artificial Sequence
  Description of Artificial Sequence: Synthetic oligonucleotide
  Target: LAMA2; (-) strand; PAM type: YTN; PAM sequence: CTT
tttgtctaaaacacgaaaag

SEQ ID NO: 246120 - DNA, 20 bp, Artificial Sequence
  Description of Artificial Sequence: Synthetic oligonucleotide
  Target: LAMA2; (-) strand; PAM type: YTN; PAM sequence: TTG
aggacataggcatgggtaag

SEQ ID NO: 246121 - DNA, 20 bp, Artificial Sequence
  Description of Artificial Sequence: Synthetic oligonucleotide
  Target: LAMA2; (-) strand; PAM type: YTN; PAM sequence: CTA
ggcaataccattgaggacat

SEQ ID NO: 246122 - DNA, 20 bp, Artificial Sequence
  Description of Artificial Sequence: Synthetic oligonucleotide
  Target: LAMA2; (-) strand; PAM type: YTN; PAM sequence: CTA
gaagaaaacctaggcaatac

SEQ ID NO: 246123 - DNA, 20 bp, Artificial Sequence
  Description of Artificial Sequence: Synthetic oligonucleotide
  Target: LAMA2; (-) strand; PAM type: YTN; PAM sequence: TTA
gacataaaaccataaaaacc

SEQ ID NO: 246124 - DNA, 20 bp, Artificial Sequence
  Description of Artificial Sequence: Synthetic oligonucleotide
  Target: LAMA2; (-) strand; PAM type: YTN; PAM sequence: TTA
aatgttagacataaaaccat

SEQ ID NO: 246125 - DNA, 20 bp, Artificial Sequence
  Description of Artificial Sequence: Synthetic oligonucleotide
  Target: LAMA2; (-) strand; PAM type: YTN; PAM sequence: CTT
aaatgttagacataaaacca

SEQ ID NO: 246126 - DNA, 20 bp, Artificial Sequence
  Description of Artificial Sequence: Synthetic oligonucleotide
  Target: LAMA2; (-) strand; PAM type: YTN; PAM sequence: TTA
aagacttaaatgttagacat

SEQ ID NO: 246127 - DNA, 20 bp, Artificial Sequence
  Description of Artificial Sequence: Synthetic oligonucleotide
  Target: LAMA2; (-) strand; PAM type: YTN; PAM sequence: TTC
aagatggattaaagacttaa

SEQ ID NO: 246128 - DNA, 20 bp, Artificial Sequence
  Description of Artificial Sequence: Synthetic oligonucleotide
  Target: LAMA2; (-) strand; PAM type: YTN; PAM sequence: TTA
attcaagatggattaaagac

SEQ ID NO: 246129 - DNA, 20 bp, Artificial Sequence
  Description of Artificial Sequence: Synthetic oligonucleotide
  Target: LAMA2; (-) strand; PAM type: YTN; PAM sequence: TTA
tacaaaaattaattcaagat

SEQ ID NO: 246130 - DNA, 20 bp, Artificial Sequence
  Description of Artificial Sequence: Synthetic oligonucleotide
  Target: LAMA2; (-) strand; PAM type: YTN; PAM sequence: CTT
atacaaaaattaattcaaga

SEQ ID NO: 246131 - DNA, 20 bp, Artificial Sequence
  Description of Artificial Sequence: Synthetic oligonucleotide
  Target: LAMA2; (-) strand; PAM type: YTN; PAM sequence: TTA
caccttatacaaaaattaat

SEQ ID NO: 246132 - DNA, 20 bp, Artificial Sequence
  Description of Artificial Sequence: Synthetic oligonucleotide
  Target: LAMA2; (-) strand; PAM type: YTN; PAM sequence: CTT
acaccttatacaaaaattaa

SEQ ID NO: 246133 - DNA, 20 bp, Artificial Sequence
  Description of Artificial Sequence: Synthetic oligonucleotide
  Target: LAMA2; (-) strand; PAM type: YTN; PAM sequence: TTC
cttacaccttatacaaaaat

SEQ ID NO: 246134 - DNA, 20 bp, Artificial Sequence
  Description of Artificial Sequence: Synthetic oligonucleotide
  Target: LAMA2; (-) strand; PAM type: YTN; PAM sequence: CTT
ccttacaccttatacaaaaa

SEQ ID NO: 246135 - DNA, 20 bp, Artificial Sequence
  Description of Artificial Sequence: Synthetic oligonucleotide
  Target: LAMA2; (-) strand; PAM type: YTN; PAM sequence: CTG
gatcccttccttacacctta

SEQ ID NO: 246136 - DNA, 20 bp, Artificial Sequence
  Description of Artificial Sequence: Synthetic oligonucleotide
  Target: LAMA2; (-) strand; PAM type: YTN; PAM sequence: CTG
aaactggatcccttccttac

SEQ ID NO: 246137 - DNA, 20 bp, Artificial Sequence
  Description of Artificial Sequence: Synthetic oligonucleotide
  Target: LAMA2; (-) strand; PAM type: YTN; PAM sequence: CTA
gccatatgtagaaagctgaa

SEQ ID NO: 246138 - DNA, 20 bp, Artificial Sequence
  Description of Artificial Sequence: Synthetic oligonucleotide
  Target: LAMA2; (-) strand; PAM type: YTN; PAM sequence: CTG
gctagccatatgtagaaagc

SEQ ID NO: 246139 - DNA, 20 bp, Artificial Sequence
  Description of Artificial Sequence: Synthetic oligonucleotide
  Target: LAMA2; (-) strand; PAM type: YTN; PAM sequence: CTG
ggaaaactggctagccatat

SEQ ID NO: 246140 - DNA, 20 bp, Artificial Sequence
  Description of Artificial Sequence: Synthetic oligonucleotide
  Target: LAMA2; (-) strand; PAM type: YTN; PAM sequence: TTA
ataaatggtgctgggaaaac

SEQ ID NO: 246141 - DNA, 20 bp, Artificial Sequence
  Description of Artificial Sequence: Synthetic oligonucleotide
  Target: LAMA2; (-) strand; PAM type: YTN; PAM sequence: TTT
aataaatggtgctgggaaaa

SEQ ID NO: 246142 - DNA, 20 bp, Artificial Sequence
  Description of Artificial Sequence: Synthetic oligonucleotide
  Target: LAMA2; (-) strand; PAM type: YTN; PAM sequence: CTA
tttaataaatggtgctggga

SEQ ID NO: 246143 - DNA, 20 bp, Artificial Sequence
  Description of Artificial Sequence: Synthetic oligonucleotide
  Target: LAMA2; (-) strand; PAM type: YTN; PAM sequence: TTC
cctatttaataaatggtgct

SEQ ID NO: 246144 - DNA, 20 bp, Artificial Sequence
  Description of Artificial Sequence: Synthetic oligonucleotide
  Target: LAMA2; (-) strand; PAM type: YTN; PAM sequence: CTG
acaaaaacaagcaatgggga

SEQ ID NO: 246145 - DNA, 20 bp, Artificial Sequence
  Description of Artificial Sequence: Synthetic oligonucleotide
  Target: LAMA2; (-) strand; PAM type: YTN; PAM sequence: TTG
acaaacctgacaaaaacaag

SEQ ID NO: 246146 - DNA, 20 bp, Artificial Sequence
  Description of Artificial Sequence: Synthetic oligonucleotide
  Target: LAMA2; (-) strand; PAM type: YTN; PAM sequence: TTT
gacaaacctgacaaaaacaa

SEQ ID NO: 246147 - DNA, 20 bp, Artificial Sequence
  Description of Artificial Sequence: Synthetic oligonucleotide
  Target: LAMA2; (-) strand; PAM type: YTN; PAM sequence: CTT
tgacaaacctgacaaaaaca

SEQ ID NO: 246148 - DNA, 20 bp, Artificial Sequence
  Description of Artificial Sequence: Synthetic oligonucleotide
  Target: LAMA2; (-) strand; PAM type: YTN; PAM sequence: CTG
atctttgacaaacctgacaa

SEQ ID NO: 246149 - DNA, 20 bp, Artificial Sequence
  Description of Artificial Sequence: Synthetic oligonucleotide
  Target: LAMA2; (-) strand; PAM type: YTN; PAM sequence: CTA
caaccatctgatctttgaca

SEQ ID NO: 246150 - DNA, 20 bp, Artificial Sequence
  Description of Artificial Sequence: Synthetic oligonucleotide
  Target: LAMA2; (-) strand; PAM type: YTN; PAM sequence: CTC
agaaataataccacacatct

SEQ ID NO: 246151 - DNA, 20 bp, Artificial Sequence
  Description of Artificial Sequence: Synthetic oligonucleotide
  Target: LAMA2; (-) strand; PAM type: YTN; PAM sequence: CTG
gtaccaaaagagagatgtag

SEQ ID NO: 246152 - DNA, 20 bp, Artificial Sequence
  Description of Artificial Sequence: Synthetic oligonucleotide
  Target: LAMA2; (-) strand; PAM type: YTN; PAM sequence: CTA
cagtaaccaaaacagcatgg

SEQ ID NO: 246153 - DNA, 20 bp, Artificial Sequence
  Description of Artificial Sequence: Synthetic oligonucleotide
  Target: LAMA2; (-) strand; PAM type: YTN; PAM sequence: CTA
caaggctacagtaaccaaaa

SEQ ID NO: 246154 - DNA, 20 bp, Artificial Sequence
  Description of Artificial Sequence: Synthetic oligonucleotide
  Target: LAMA2; (-) strand; PAM type: YTN; PAM sequence: CTA
tactacaaggctacagtaac

SEQ ID NO: 246155 - DNA, 20 bp, Artificial Sequence
  Description of Artificial Sequence: Synthetic oligonucleotide
  Target: LAMA2; (-) strand; PAM type: YTN; PAM sequence: TTC
aaactatactacaaggctac

SEQ ID NO: 246156 - DNA, 20 bp, Artificial Sequence
  Description of Artificial Sequence: Synthetic oligonucleotide
  Target: LAMA2; (-) strand; PAM type: YTN; PAM sequence: CTT
caaactatactacaaggcta

SEQ ID NO: 246157 - DNA, 20 bp, Artificial Sequence
  Description of Artificial Sequence: Synthetic oligonucleotide
  Target: LAMA2; (-) strand; PAM type: YTN; PAM sequence: CTG
acttcaaactatactacaag

SEQ ID NO: 246158 - DNA, 20 bp, Artificial Sequence
  Description of Artificial Sequence: Synthetic oligonucleotide
  Target: LAMA2; (-) strand; PAM type: YTN; PAM sequence: CTA
cctgacttcaaactatacta

SEQ ID NO: 246159 - DNA, 20 bp, Artificial Sequence
  Description of Artificial Sequence: Synthetic oligonucleotide
  Target: LAMA2; (-) strand; PAM type: YTN; PAM sequence: CTG
gaggcatcatgctacctgac

SEQ ID NO: 246160 - DNA, 20 bp, Artificial Sequence
  Description of Artificial Sequence: Synthetic oligonucleotide
  Target: LAMA2; (-) strand; PAM type: YTN; PAM sequence: CTA
agccaaaagaacaaagctgg

SEQ ID NO: 246161 - DNA, 20 bp, Artificial Sequence
  Description of Artificial Sequence: Synthetic oligonucleotide
  Target: LAMA2; (-) strand; PAM type: YTN; PAM sequence: TTC
ccaagtcaatcctaagccaa

SEQ ID NO: 246162 - DNA, 20 bp, Artificial Sequence
  Description of Artificial Sequence: Synthetic oligonucleotide
  Target: LAMA2; (-) strand; PAM type: YTN; PAM sequence: TTC
atatggaaccaaaaaagagc

SEQ ID NO: 246163 - DNA, 20 bp, Artificial Sequence
  Description of Artificial Sequence: Synthetic oligonucleotide
  Target: LAMA2; (-) strand; PAM type: YTN; PAM sequence: TTA
aagttcatatggaaccaaaa

SEQ ID NO: 246164 - DNA, 20 bp, Artificial Sequence
  Description of Artificial Sequence: Synthetic oligonucleotide
  Target: LAMA2; (-) strand; PAM type: YTN; PAM sequence: TTT
aaagttcatatggaaccaaa

SEQ ID NO: 246165 - DNA, 20 bp, Artificial Sequence
  Description of Artificial Sequence: Synthetic oligonucleotide
  Target: LAMA2; (-) strand; PAM type: YTN; PAM sequence: CTT
taaagttcatatggaaccaa

SEQ ID NO: 246166 - DNA, 20 bp, Artificial Sequence
  Description of Artificial Sequence: Synthetic oligonucleotide
  Target: LAMA2; (-) strand; PAM type: YTN; PAM sequence: CTA
ctttaaagttcatatggaac

SEQ ID NO: 246167 - DNA, 20 bp, Artificial Sequence
  Description of Artificial Sequence: Synthetic oligonucleotide
  Target: LAMA2; (-) strand; PAM type: YTN; PAM sequence: TTG
gaaaaaaaactactttaaag

SEQ ID NO: 246168 - DNA, 20 bp, Artificial Sequence
  Description of Artificial Sequence: Synthetic oligonucleotide
  Target: LAMA2; (-) strand; PAM type: YTN; PAM sequence: TTC
acagaattggaaaaaaaact

SEQ ID NO: 246169 - DNA, 20 bp, Artificial Sequence
  Description of Artificial Sequence: Synthetic oligonucleotide
  Target: LAMA2; (-) strand; PAM type: YTN; PAM sequence: CTT
cacagaattggaaaaaaaac

SEQ ID NO: 246170 - DNA, 20 bp, Artificial Sequence
  Description of Artificial Sequence: Synthetic oligonucleotide
  Target: LAMA2; (-) strand; PAM type: YTN; PAM sequence: TTC
ttcacagaattggaaaaaaa

SEQ ID NO: 246171 - DNA, 20 bp, Artificial Sequence
  Description of Artificial Sequence: Synthetic oligonucleotide
  Target: LAMA2; (-) strand; PAM type: YTN; PAM sequence: TTT
cttcacagaattggaaaaaa

SEQ ID NO: 246172 - DNA, 20 bp, Artificial Sequence
  Description of Artificial Sequence: Synthetic oligonucleotide
  Target: LAMA2; (-) strand; PAM type: YTN; PAM sequence: CTT
tcttcacagaattggaaaaa

SEQ ID NO: 246173 - DNA, 20 bp, Artificial Sequence
  Description of Artificial Sequence: Synthetic oligonucleotide
  Target: LAMA2; (-) strand; PAM type: YTN; PAM sequence: CTA
ccagtgactttcttcacaga

SEQ ID NO: 246174 - DNA, 20 bp, Artificial Sequence
  Description of Artificial Sequence: Synthetic oligonucleotide
  Target: LAMA2; (-) strand; PAM type: YTN; PAM sequence: CTA
tcaagctaccagtgactttc

SEQ ID NO: 246175 - DNA, 20 bp, Artificial Sequence
  Description of Artificial Sequence: Synthetic oligonucleotide
  Target: LAMA2; (-) strand; PAM type: YTN; PAM sequence: TTC
aatgccatccctatcaagct

SEQ ID NO: 246176 - DNA, 20 bp, Artificial Sequence
  Description of Artificial Sequence: Synthetic oligonucleotide
  Target: LAMA2; (-) strand; PAM type: YTN; PAM sequence: TTC
atagattcaatgccatccct

SEQ ID NO: 246177 - DNA, 20 bp, Artificial Sequence
  Description of Artificial Sequence: Synthetic oligonucleotide
  Target: LAMA2; (-) strand; PAM type: YTN; PAM sequence: CTG
cccaaggtaattcatagatt

SEQ ID NO: 246178 - DNA, 20 bp, Artificial Sequence
  Description of Artificial Sequence: Synthetic oligonucleotide
  Target: LAMA2; (-) strand; PAM type: YTN; PAM sequence: TTA
tggataggaagaatcaatat

SEQ ID NO: 246179 - DNA, 20 bp, Artificial Sequence
  Description of Artificial Sequence: Synthetic oligonucleotide
  Target: LAMA2; (-) strand; PAM type: YTN; PAM sequence: CTT
atggataggaagaatcaata

SEQ ID NO: 246180 - DNA, 20 bp, Artificial Sequence
  Description of Artificial Sequence: Synthetic oligonucleotide
  Target: LAMA2; (-) strand; PAM type: YTN; PAM sequence: TTC
catgcttatggataggaaga

SEQ ID NO: 246181 - DNA, 20 bp, Artificial Sequence
  Description of Artificial Sequence: Synthetic oligonucleotide
  Target: LAMA2; (-) strand; PAM type: YTN; PAM sequence: CTC
aacaaaataaaagaggacac

SEQ ID NO: 246182 - DNA, 20 bp, Artificial Sequence
  Description of Artificial Sequence: Synthetic oligonucleotide
  Target: LAMA2; (-) strand; PAM type: YTN; PAM sequence: CTG
ctcaacaaaataaaagagga

SEQ ID NO: 246183 - DNA, 20 bp, Artificial Sequence
  Description of Artificial Sequence: Synthetic oligonucleotide
  Target: LAMA2; (-) strand; PAM type: YTN; PAM sequence: TTA
ctgctcaacaaaataaaaga

SEQ ID NO: 246184 - DNA, 20 bp, Artificial Sequence
  Description of Artificial Sequence: Synthetic oligonucleotide
  Target: LAMA2; (-) strand; PAM type: YTN; PAM sequence: CTG
caaattactgctcaacaaaa

SEQ ID NO: 246185 - DNA, 20 bp, Artificial Sequence
  Description of Artificial Sequence: Synthetic oligonucleotide
  Target: LAMA2; (-) strand; PAM type: YTN; PAM sequence: TTC
aaggagaactgcaaattact

SEQ ID NO: 246186 - DNA, 20 bp, Artificial Sequence
  Description of Artificial Sequence: Synthetic oligonucleotide
  Target: LAMA2; (-) strand; PAM type: YTN; PAM sequence: CTT
caaggagaactgcaaattac

SEQ ID NO: 246187 - DNA, 20 bp, Artificial Sequence
  Description of Artificial Sequence: Synthetic oligonucleotide
  Target: LAMA2; (-) strand; PAM type: YTN; PAM sequence: CTC
ttcaaggagaactgcaaatt

SEQ ID NO: 246188 - DNA, 20 bp, Artificial Sequence
  Description of Artificial Sequence: Synthetic oligonucleotide
  Target: LAMA2; (-) strand; PAM type: YTN; PAM sequence: TTA
caagggatgtgaaggacctc

SEQ ID NO: 246189 - DNA, 20 bp, Artificial Sequence
  Description of Artificial Sequence: Synthetic oligonucleotide
  Target: LAMA2; (-) strand; PAM type: YTN; PAM sequence: CTT
acaagggatgtgaaggacct

SEQ ID NO: 246190 - DNA, 20 bp, Artificial Sequence
  Description of Artificial Sequence: Synthetic oligonucleotide
  Target: LAMA2; (-) strand; PAM type: YTN; PAM sequence: CTA
ggaatccaacttacaaggga

SEQ ID NO: 246191 - DNA, 20 bp, Artificial Sequence
  Description of Artificial Sequence: Synthetic oligonucleotide
  Target: LAMA2; (-) strand; PAM type: YTN; PAM sequence: TTC
aaagagaataaaatacctag

SEQ ID NO: 246192 - DNA, 20 bp, Artificial Sequence
  Description of Artificial Sequence: Synthetic oligonucleotide
  Target: LAMA2; (-) strand; PAM type: YTN; PAM sequence: CTT
caaagagaataaaataccta

SEQ ID NO: 246193 - DNA, 20 bp, Artificial Sequence
  Description of Artificial Sequence: Synthetic oligonucleotide
  Target: LAMA2; (-) strand; PAM type: YTN; PAM sequence: TTG
cttcaaagagaataaaatac

SEQ ID NO: 246194 - DNA, 20 bp, Artificial Sequence
  Description of Artificial Sequence: Synthetic oligonucleotide
  Target: LAMA2; (-) strand; PAM type: YTN; PAM sequence: TTC
acaattgcttcaaagagaat

SEQ ID NO: 246195 - DNA, 20 bp, Artificial Sequence
  Description of Artificial Sequence: Synthetic oligonucleotide
  Target: LAMA2; (-) strand; PAM type: YTN; PAM sequence: CTA
ttcacaattgcttcaaagag

SEQ ID NO: 246196 - DNA, 20 bp, Artificial Sequence
  Description of Artificial Sequence: Synthetic oligonucleotide
  Target: LAMA2; (-) strand; PAM type: YTN; PAM sequence: CTC
ctattcacaattgcttcaaa

SEQ ID NO: 246197 - DNA, 20 bp, Artificial Sequence
  Description of Artificial Sequence: Synthetic oligonucleotide
  Target: LAMA2; (-) strand; PAM type: YTN; PAM sequence: CTA
acaacagacaatcagagagc

SEQ ID NO: 246198 - DNA, 20 bp, Artificial Sequence
  Description of Artificial Sequence: Synthetic oligonucleotide
  Target: LAMA2; (-) strand; PAM type: YTN; PAM sequence: TTA
tacactaacaacagacaatc

SEQ ID NO: 246199 - DNA, 20 bp, Artificial Sequence
  Description of Artificial Sequence: Synthetic oligonucleotide
  Target: LAMA2; (-) strand; PAM type: YTN; PAM sequence: CTT
atacactaacaacagacaat

SEQ ID NO: 246200 - DNA, 20 bp, Artificial Sequence
  Description of Artificial Sequence: Synthetic oligonucleotide
  Target: LAMA2; (-) strand; PAM type: YTN; PAM sequence: TTC
ttatacactaacaacagaca

SEQ ID NO: 246201 - DNA, 20 bp, Artificial Sequence
  Description of Artificial Sequence: Synthetic oligonucleotide
  Target: LAMA2; (-) strand; PAM type: YTN; PAM sequence: CTC
aggatacaaaatcaatgtag

SEQ ID NO: 246202 - DNA, 20 bp, Artificial Sequence
  Description of Artificial Sequence: Synthetic oligonucleotide
  Target: LAMA2; (-) strand; PAM type: YTN; PAM sequence: TTC
accaaagtctcaggatacaa

SEQ ID NO: 246203 - DNA, 20 bp, Artificial Sequence
  Description of Artificial Sequence: Synthetic oligonucleotide
  Target: LAMA2; (-) strand; PAM type: YTN; PAM sequence: CTT
caccaaagtctcaggataca

SEQ ID NO: 246204 - DNA, 20 bp, Artificial Sequence
  Description of Artificial Sequence: Synthetic oligonucleotide
  Target: LAMA2; (-) strand; PAM type: YTN; PAM sequence: CTG
ataagcaacttcaccaaagt

SEQ ID NO: 246205 - DNA, 20 bp, Artificial Sequence
  Description of Artificial Sequence: Synthetic oligonucleotide
  Target: LAMA2; (-) strand; PAM type: YTN; PAM sequence: CTA
aagctgataagcaacttcac

SEQ ID NO: 246206 - DNA, 20 bp, Artificial Sequence
  Description of Artificial Sequence: Synthetic oligonucleotide
  Target: LAMA2; (-) strand; PAM type: YTN; PAM sequence: CTC
ctaaagctgataagcaactt

SEQ ID NO: 246207 - DNA, 20 bp, Artificial Sequence
  Description of Artificial Sequence: Synthetic oligonucleotide
  Target: LAMA2; (-) strand; PAM type: YTN; PAM sequence: CTC
agcccaaaatctcctaaagc

SEQ ID NO: 246208 - DNA, 20 bp, Artificial Sequence
  Description of Artificial Sequence: Synthetic oligonucleotide
  Target: LAMA2; (-) strand; PAM type: YTN; PAM sequence: TTG
tctcagcccaaaatctccta

SEQ ID NO: 246209 - DNA, 20 bp, Artificial Sequence
  Description of Artificial Sequence: Synthetic oligonucleotide
  Target: LAMA2; (-) strand; PAM type: YTN; PAM sequence: TTA
gaaaaccccattgtctcagc

SEQ ID NO: 246210 - DNA, 20 bp, Artificial Sequence
  Description of Artificial Sequence: Synthetic oligonucleotide
  Target: LAMA2; (-) strand; PAM type: YTN; PAM sequence: TTT
agaaaaccccattgtctcag

SEQ ID NO: 246211 - DNA, 20 bp, Artificial Sequence
  Description of Artificial Sequence: Synthetic oligonucleotide
  Target: LAMA2; (-) strand; PAM type: YTN; PAM sequence: TTG
tatatttagaaaaccccatt

SEQ ID NO: 246212 - DNA, 20 bp, Artificial Sequence
  Description of Artificial Sequence: Synthetic oligonucleotide
  Target: LAMA2; (-) strand; PAM type: YTN; PAM sequence: TTG
cagatgacataattgtatat

SEQ ID NO: 246213 - DNA, 20 bp, Artificial Sequence
  Description of Artificial Sequence: Synthetic oligonucleotide
  Target: LAMA2; (-) strand; PAM type: YTN; PAM sequence: TTT
gcagatgacataattgtata

SEQ ID NO: 246214 - DNA, 20 bp, Artificial Sequence
  Description of Artificial Sequence: Synthetic oligonucleotide
  Target: LAMA2; (-) strand; PAM type: YTN; PAM sequence: CTG
tttgcagatgacataattgt

SEQ ID NO: 246215 - DNA, 20 bp, Artificial Sequence
  Description of Artificial Sequence: Synthetic oligonucleotide
  Target: LAMA2; (-) strand; PAM type: YTN; PAM sequence: TTG
tccctgtttgcagatgacat

SEQ ID NO: 246216 - DNA, 20 bp, Artificial Sequence
  Description of Artificial Sequence: Synthetic oligonucleotide
  Target: LAMA2; (-) strand; PAM type: YTN; PAM sequence: TTA
ggaaaagaggtagtcaaatt

SEQ ID NO: 246217 - DNA, 20 bp, Artificial Sequence
  Description of Artificial Sequence: Synthetic oligonucleotide
  Target: LAMA2; (-) strand; PAM type: YTN; PAM sequence: TTA
attaggaaaagaggtagtca

SEQ ID NO: 246218 - DNA, 20 bp, Artificial Sequence
  Description of Artificial Sequence: Synthetic oligonucleotide
  Target: LAMA2; (-) strand; PAM type: YTN; PAM sequence: TTT
aattaggaaaagaggtagtc

SEQ ID NO: 246219 - DNA, 20 bp, Artificial Sequence
  Description of Artificial Sequence: Synthetic oligonucleotide
  Target: LAMA2; (-) strand; PAM type: YTN; PAM sequence: CTG
gccagggcaatcaggcagga

SEQ ID NO: 246220 - DNA, 20 bp, Artificial Sequence
  Description of Artificial Sequence: Synthetic oligonucleotide
  Target: LAMA2; (-) strand; PAM type: YTN; PAM sequence: TTC
tggccagggcaatcaggcag

SEQ ID NO: 246221 - DNA, 20 bp, Artificial Sequence
  Description of Artificial Sequence: Synthetic oligonucleotide
  Target: LAMA2; (-) strand; PAM type: YTN; PAM sequence: TTG
gaagttctggccagggcaat

SEQ ID NO: 246222 - DNA, 20 bp, Artificial Sequence
  Description of Artificial Sequence: Synthetic oligonucleotide
  Target: LAMA2; (-) strand; PAM type: YTN; PAM sequence: TTC
aacatagtgttggaagttct

SEQ ID NO: 246223 - DNA, 20 bp, Artificial Sequence
  Description of Artificial Sequence: Synthetic oligonucleotide
  Target: LAMA2; (-) strand; PAM type: YTN; PAM sequence: CTA
ttcaacatagtgttggaagt

SEQ ID NO: 246224 - DNA, 20 bp, Artificial Sequence
  Description of Artificial Sequence: Synthetic oligonucleotide
  Target: LAMA2; (-) strand; PAM type: YTN; PAM sequence: CTC
ctattcaacatagtgttgga

SEQ ID NO: 246225 - DNA, 20 bp, Artificial Sequence
  Description of Artificial Sequence: Synthetic oligonucleotide
  Target: LAMA2; (-) strand; PAM type: YTN; PAM sequence: CTC
accactcctattcaacatag

SEQ ID NO: 246226 - DNA, 20 bp, Artificial Sequence
  Description of Artificial Sequence: Synthetic oligonucleotide
  Target: LAMA2; (-) strand; PAM type: YTN; PAM sequence: CTC
tcaccactcctattcaacat

SEQ ID NO: 246227 - DNA, 20 bp, Artificial Sequence
  Description of Artificial Sequence: Synthetic oligonucleotide
  Target: LAMA2; (-) strand; PAM type: YTN; PAM sequence: CTC
tctcaccactcctattcaac

SEQ ID NO: 246228 - DNA, 20 bp, Artificial Sequence
  Description of Artificial Sequence: Synthetic oligonucleotide
  Target: LAMA2; (-) strand; PAM type: YTN; PAM sequence: CTG
gcacaagacagggatgccct

SEQ ID NO: 246229 - DNA, 20 bp, Artificial Sequence
  Description of Artificial Sequence: Synthetic oligonucleotide
  Target: LAMA2; (-) strand; PAM type: YTN; PAM sequence: TTG
aaaactggcacaagacaggg

SEQ ID NO: 246230 - DNA, 20 bp, Artificial Sequence
  Description of Artificial Sequence: Synthetic oligonucleotide
  Target: LAMA2; (-) strand; PAM type: YTN; PAM sequence: TTT
gaaaactggcacaagacagg

SEQ ID NO: 246231 - DNA, 20 bp, Artificial Sequence
  Description of Artificial Sequence: Synthetic oligonucleotide
  Target: LAMA2; (-) strand; PAM type: YTN; PAM sequence: CTT
tgaaaactggcacaagacag

SEQ ID NO: 246232 - DNA, 20 bp, Artificial Sequence
  Description of Artificial Sequence: Synthetic oligonucleotide
  Target: LAMA2; (-) strand; PAM type: YTN; PAM sequence: TTC
cctttgaaaactggcacaag

SEQ ID NO: 246233 - DNA, 20 bp, Artificial Sequence
  Description of Artificial Sequence: Synthetic oligonucleotide
  Target: LAMA2; (-) strand; PAM type: YTN; PAM sequence: CTG
gaagcattccctttgaaaac

SEQ ID NO: 246234 - DNA, 20 bp, Artificial Sequence
  Description of Artificial Sequence: Synthetic oligonucleotide
  Target: LAMA2; (-) strand; PAM type: YTN; PAM sequence: CTG
aatgggcaaaaactggaagc

SEQ ID NO: 246235 - DNA, 20 bp, Artificial Sequence
  Description of Artificial Sequence: Synthetic oligonucleotide
  Target: LAMA2; (-) strand; PAM type: YTN; PAM sequence: CTA
tgacaaacccacagccaata

SEQ ID NO: 246236 - DNA, 20 bp, Artificial Sequence
  Description of Artificial Sequence: Synthetic oligonucleotide
  Target: LAMA2; (-) strand; PAM type: YTN; PAM sequence: CTA
tctatgacaaacccacagcc

SEQ ID NO: 246237 - DNA, 20 bp, Artificial Sequence
  Description of Artificial Sequence: Synthetic oligonucleotide
  Target: LAMA2; (-) strand; PAM type: YTN; PAM sequence: CTC
aaaataataagagctatcta

SEQ ID NO: 246238 - DNA, 20 bp, Artificial Sequence
  Description of Artificial Sequence: Synthetic oligonucleotide
  Target: LAMA2; (-) strand; PAM type: YTN; PAM sequence: TTG
atgggatgtatctcaaaata

SEQ ID NO: 246239 - DNA, 20 bp, Artificial Sequence
  Description of Artificial Sequence: Synthetic oligonucleotide
  Target: LAMA2; (-) strand; PAM type: YTN; PAM sequence: TTA
ggtattgatgggatgtatct

SEQ ID NO: 246240 - DNA, 20 bp, Artificial Sequence
  Description of Artificial Sequence: Synthetic oligonucleotide
  Target: LAMA2; (-) strand; PAM type: YTN; PAM sequence: CTC
aataaattaggtattgatgg

SEQ ID NO: 246241 - DNA, 20 bp, Artificial Sequence
  Description of Artificial Sequence: Synthetic oligonucleotide
  Target: LAMA2; (-) strand; PAM type: YTN; PAM sequence: CTC
tcaataaattaggtattgat

SEQ ID NO: 246242 - DNA, 20 bp, Artificial Sequence
  Description of Artificial Sequence: Synthetic oligonucleotide
  Target: LAMA2; (-) strand; PAM type: YTN; PAM sequence: TTC
atgccaaaaactctcaataa

SEQ ID NO: 246243 - DNA, 20 bp, Artificial Sequence
  Description of Artificial Sequence: Synthetic oligonucleotide
  Target: LAMA2; (-) strand; PAM type: YTN; PAM sequence: CTT
catgccaaaaactctcaata

SEQ ID NO: 246244 - DNA, 20 bp, Artificial Sequence
  Description of Artificial Sequence: Synthetic oligonucleotide
  Target: LAMA2; (-) strand; PAM type: YTN; PAM sequence: TTC
aacagcccttcatgccaaaa

SEQ ID NO: 246245 - DNA, 20 bp, Artificial Sequence
  Description of Artificial Sequence: Synthetic oligonucleotide
  Target: LAMA2; (-) strand; PAM type: YTN; PAM sequence: TTG
acaaaattcaacagcccttc

SEQ ID NO: 246246 - DNA, 20 bp, Artificial Sequence
  Description of Artificial Sequence: Synthetic oligonucleotide
  Target: LAMA2; (-) strand; PAM type: YTN; PAM sequence: TTT
gacaaaattcaacagccctt

SEQ ID NO: 246247 - DNA, 20 bp, Artificial Sequence
  Description of Artificial Sequence: Synthetic oligonucleotide
  Target: LAMA2; (-) strand; PAM type: YTN; PAM sequence: CTT
tgacaaaattcaacagccct

SEQ ID NO: 246248 - DNA, 20 bp, Artificial Sequence
  Description of Artificial Sequence: Synthetic oligonucleotide
  Target: LAMA2; (-) strand; PAM type: YTN; PAM sequence: CTC
aataaatgcagaaaaggcct

SEQ ID NO: 246249 - DNA, 20 bp, Artificial Sequence
  Description of Artificial Sequence: Synthetic oligonucleotide
  Target: LAMA2; (-) strand; PAM type: YTN; PAM sequence: TTA
tctcaataaatgcagaaaag

SEQ ID NO: 246250 - DNA, 20 bp, Artificial Sequence
  Description of Artificial Sequence: Synthetic oligonucleotide
  Target: LAMA2; (-) strand; PAM type: YTN; PAM sequence: TTC
aacatacacaaatcaataaa

SEQ ID NO: 246251 - DNA, 20 bp, Artificial Sequence
  Description of Artificial Sequence: Synthetic oligonucleotide
  Target: LAMA2; (-) strand; PAM type: YTN; PAM sequence: CTG
gttcaacatacacaaatcaa

SEQ ID NO: 246252 - DNA, 20 bp, Artificial Sequence
  Description of Artificial Sequence: Synthetic oligonucleotide
  Target: LAMA2; (-) strand; PAM type: YTN; PAM sequence: TTC
atccacgggatgcaaggctg

SEQ ID NO: 246253 - DNA, 20 bp, Artificial Sequence
  Description of Artificial Sequence: Synthetic oligonucleotide
  Target: LAMA2; (-) strand; PAM type: YTN; PAM sequence: CTT
catccacgggatgcaaggct

SEQ ID NO: 246254 - DNA, 20 bp, Artificial Sequence
  Description of Artificial Sequence: Synthetic oligonucleotide
  Target: LAMA2; (-) strand; PAM type: YTN; PAM sequence: TTA
tccaccacgatcaagtgggc

SEQ ID NO: 246255 - DNA, 20 bp, Artificial Sequence
  Description of Artificial Sequence: Synthetic oligonucleotide
  Target: LAMA2; (-) strand; PAM type: YTN; PAM sequence: CTT
atccaccacgatcaagtggg

SEQ ID NO: 246256 - DNA, 20 bp, Artificial Sequence
  Description of Artificial Sequence: Synthetic oligonucleotide
  Target: LAMA2; (-) strand; PAM type: YTN; PAM sequence: CTG
aatgcagcagcacatcaaaa

SEQ ID NO: 246257 - DNA, 20 bp, Artificial Sequence
  Description of Artificial Sequence: Synthetic oligonucleotide
  Target: LAMA2; (-) strand; PAM type: YTN; PAM sequence: CTC
aataaaataatggcaaactg

SEQ ID NO: 246258 - DNA, 20 bp, Artificial Sequence
  Description of Artificial Sequence: Synthetic oligonucleotide
  Target: LAMA2; (-) strand; PAM type: YTN; PAM sequence: CTG
atgaacatcaatgcaaaaat

SEQ ID NO: 246259 - DNA, 20 bp, Artificial Sequence
  Description of Artificial Sequence: Synthetic oligonucleotide
  Target: LAMA2; (-) strand; PAM type: YTN; PAM sequence: CTA
atatccctgatgaacatcaa

SEQ ID NO: 246260 - DNA, 20 bp, Artificial Sequence
  Description of Artificial Sequence: Synthetic oligonucleotide
  Target: LAMA2; (-) strand; PAM type: YTN; PAM sequence: TTG
actaatatccctgatgaaca

SEQ ID NO: 246261 - DNA, 20 bp, Artificial Sequence
  Description of Artificial Sequence: Synthetic oligonucleotide
  Target: LAMA2; (-) strand; PAM type: YTN; PAM sequence: TTT
gactaatatccctgatgaac

SEQ ID NO: 246262 - DNA, 20 bp, Artificial Sequence
  Description of Artificial Sequence: Synthetic oligonucleotide
  Target: LAMA2; (-) strand; PAM type: YTN; PAM sequence: TTT
tgactaatatccctgatgaa

SEQ ID NO: 246263 - DNA, 20 bp, Artificial Sequence
  Description of Artificial Sequence: Synthetic oligonucleotide
  Target: LAMA2; (-) strand; PAM type: YTN; PAM sequence: TTT
ttgactaatatccctgatga

SEQ ID NO: 246264 - DNA, 20 bp, Artificial Sequence
  Description of Artificial Sequence: Synthetic oligonucleotide
  Target: LAMA2; (-) strand; PAM type: YTN; PAM sequence: CTG
gcagagacacaacaaaaaag

SEQ ID NO: 246265 - DNA, 20 bp, Artificial Sequence
  Description of Artificial Sequence: Synthetic oligonucleotide
  Target: LAMA2; (-) strand; PAM type: YTN; PAM sequence: CTG
atacaaaagcctggcagaga

SEQ ID NO: 246266 - DNA, 20 bp, Artificial Sequence
  Description of Artificial Sequence: Synthetic oligonucleotide
  Target: LAMA2; (-) strand; PAM type: YTN; PAM sequence: CTC
ctgatacaaaagcctggcag

SEQ ID NO: 246267 - DNA, 20 bp, Artificial Sequence
  Description of Artificial Sequence: Synthetic oligonucleotide
  Target: LAMA2; (-) strand; PAM type: YTN; PAM sequence: TTG
atgaggccagcatcctcctg

SEQ ID NO: 246268 - DNA, 20 bp, Artificial Sequence
  Description of Artificial Sequence: Synthetic oligonucleotide
  Target: LAMA2; (-) strand; PAM type: YTN; PAM sequence: TTT
gatgaggccagcatcctcct

SEQ ID NO: 246269 - DNA, 20 bp, Artificial Sequence
  Description of Artificial Sequence: Synthetic oligonucleotide
  Target: LAMA2; (-) strand; PAM type: YTN; PAM sequence: CTC
atttgatgaggccagcatcc

SEQ ID NO: 246270 - DNA, 20 bp, Artificial Sequence
  Description of Artificial Sequence: Synthetic oligonucleotide
  Target: LAMA2; (-) strand; PAM type: YTN; PAM sequence: CTA
actcatttgatgaggccagc

SEQ ID NO: 246271 - DNA, 20 bp, Artificial Sequence
  Description of Artificial Sequence: Synthetic oligonucleotide
  Target: LAMA2; (-) strand; PAM type: YTN; PAM sequence: CTC
taactcatttgatgaggcca

SEQ ID NO: 246272 - DNA, 20 bp, Artificial Sequence
  Description of Artificial Sequence: Synthetic oligonucleotide
  Target: LAMA2; (-) strand; PAM type: YTN; PAM sequence: CTC
tctaactcatttgatgaggc

SEQ ID NO: 246273 - DNA, 20 bp, Artificial Sequence
  Description of Artificial Sequence: Synthetic oligonucleotide
  Target: LAMA2; (-) strand; PAM type: YTN; PAM sequence: TTC
caatcaatagaaaaagaggg

SEQ ID NO: 246274 - DNA, 20 bp, Artificial Sequence
  Description of Artificial Sequence: Synthetic oligonucleotide
  Target: LAMA2; (-) strand; PAM type: YTN; PAM sequence: CTA
ttccaatcaatagaaaaaga

SEQ ID NO: 246275 - DNA, 20 bp, Artificial Sequence
  Description of Artificial Sequence: Synthetic oligonucleotide
  Target: LAMA2; (-) strand; PAM type: YTN; PAM sequence: CTG
aaactattccaatcaataga

SEQ ID NO: 246276 - DNA, 20 bp, Artificial Sequence
  Description of Artificial Sequence: Synthetic oligonucleotide
  Target: LAMA2; (-) strand; PAM type: YTN; PAM sequence: TTC
tgaaactattccaatcaata

SEQ ID NO: 246277 - DNA, 20 bp, Artificial Sequence
  Description of Artificial Sequence: Synthetic oligonucleotide
  Target: LAMA2; (-) strand; PAM type: YTN; PAM sequence: CTT
ctgaaactattccaatcaat

SEQ ID NO: 246278 - DNA, 20 bp, Artificial Sequence
  Description of Artificial Sequence: Synthetic oligonucleotide
  Target: LAMA2; (-) strand; PAM type: YTN; PAM sequence: TTC
cttctgaaactattccaatc

SEQ ID NO: 246279 - DNA, 20 bp, Artificial Sequence
  Description of Artificial Sequence: Synthetic oligonucleotide
  Target: LAMA2; (-) strand; PAM type: YTN; PAM sequence: CTA
ccagaggtacaaggaggagg

SEQ ID NO: 246280 - DNA, 20 bp, Artificial Sequence
  Description of Artificial Sequence: Synthetic oligonucleotide
  Target: LAMA2; (-) strand; PAM type: YTN; PAM sequence: TTC
taccagaggtacaaggagga

SEQ ID NO: 246281 - DNA, 20 bp, Artificial Sequence
  Description of Artificial Sequence: Synthetic oligonucleotide
  Target: LAMA2; (-) strand; PAM type: YTN; PAM sequence: TTC
acagccgaattctaccagag

SEQ ID NO: 246282 - DNA, 20 bp, Artificial Sequence
  Description of Artificial Sequence: Synthetic oligonucleotide
  Target: LAMA2; (-) strand; PAM type: YTN; PAM sequence: CTA
ccaaccaaaaaaagtccagg

SEQ ID NO: 246283 - DNA, 20 bp, Artificial Sequence
  Description of Artificial Sequence: Synthetic oligonucleotide
  Target: LAMA2; (-) strand; PAM type: YTN; PAM sequence: TTA
atagcctaccaaccaaaaaa

SEQ ID NO: 246284 - DNA, 20 bp, Artificial Sequence
  Description of Artificial Sequence: Synthetic oligonucleotide
  Target: LAMA2; (-) strand; PAM type: YTN; PAM sequence: TTG
aggcaataattaatagccta

SEQ ID NO: 246285 - DNA, 20 bp, Artificial Sequence
  Description of Artificial Sequence: Synthetic oligonucleotide
  Target: LAMA2; (-) strand; PAM type: YTN; PAM sequence: CTG
aaattgaggcaataattaat

SEQ ID NO: 246286 - DNA, 20 bp, Artificial Sequence
  Description of Artificial Sequence: Synthetic oligonucleotide
  Target: LAMA2; (-) strand; PAM type: YTN; PAM sequence: CTC
tgaaattgaggcaataatta

SEQ ID NO: 246287 - DNA, 20 bp, Artificial Sequence
  Description of Artificial Sequence: Synthetic oligonucleotide
  Target: LAMA2; (-) strand; PAM type: YTN; PAM sequence: CTG
aatagaccaataacaggctc

SEQ ID NO: 246288 - DNA, 20 bp, Artificial Sequence
  Description of Artificial Sequence: Synthetic oligonucleotide
  Target: LAMA2; (-) strand; PAM type: YTN; PAM sequence: CTC
tgaatagaccaataacaggc

SEQ ID NO: 246289 - DNA, 20 bp, Artificial Sequence
  Description of Artificial Sequence: Synthetic oligonucleotide
  Target: LAMA2; (-) strand; PAM type: YTN; PAM sequence: TTG
aatctctgaatagaccaata

SEQ ID NO: 246290 - DNA, 20 bp, Artificial Sequence
  Description of Artificial Sequence: Synthetic oligonucleotide
  Target: LAMA2; (-) strand; PAM type: YTN; PAM sequence: CTA
aacaaggaagaagttgaatc

SEQ ID NO: 246291 - DNA, 20 bp, Artificial Sequence
  Description of Artificial Sequence: Synthetic oligonucleotide
  Target: LAMA2; (-) strand; PAM type: YTN; PAM sequence: CTC
ccaatactaaacaaggaaga

SEQ ID NO: 246292 - DNA, 20 bp, Artificial Sequence
  Description of Artificial Sequence: Synthetic oligonucleotide
  Target: LAMA2; (-) strand; PAM type: YTN; PAM sequence: CTG
gacacatacaccctcccaat

SEQ ID NO: 246293 - DNA, 20 bp, Artificial Sequence
  Description of Artificial Sequence: Synthetic oligonucleotide
  Target: LAMA2; (-) strand; PAM type: YTN; PAM sequence: TTC
ctggacacatacaccctccc

SEQ ID NO: 246294 - DNA, 20 bp, Artificial Sequence
  Description of Artificial Sequence: Synthetic oligonucleotide
  Target: LAMA2; (-) strand; PAM type: YTN; PAM sequence: TTG
aagaaatggatagattcctg

SEQ ID NO: 246295 - DNA, 20 bp, Artificial Sequence
  Description of Artificial Sequence: Synthetic oligonucleotide
  Target: LAMA2; (-) strand; PAM type: YTN; PAM sequence: CTT
gaagaaatggatagattcct

SEQ ID NO: 246296 - DNA, 20 bp, Artificial Sequence
  Description of Artificial Sequence: Synthetic oligonucleotide
  Target: LAMA2; (-) strand; PAM type: YTN; PAM sequence: CTA
gaaaatcttgaagaaatgga

SEQ ID NO: 246297 - DNA, 20 bp, Artificial Sequence
  Description of Artificial Sequence: Synthetic oligonucleotide
  Target: LAMA2; (-) strand; PAM type: YTN; PAM sequence: CTA
tgcaaataaactagaaaatc

SEQ ID NO: 246298 - DNA, 20 bp, Artificial Sequence
  Description of Artificial Sequence: Synthetic oligonucleotide
  Target: LAMA2; (-) strand; PAM type: YTN; PAM sequence: CTC
tatgcaaataaactagaaaa

SEQ ID NO: 246299 - DNA, 20 bp, Artificial Sequence
  Description of Artificial Sequence: Synthetic oligonucleotide
  Target: LAMA2; (-) strand; PAM type: YTN; PAM sequence: CTA
taaacacctctatgcaaata

SEQ ID NO: 246300 - DNA, 20 bp, Artificial Sequence
  Description of Artificial Sequence: Synthetic oligonucleotide
  Target: LAMA2; (-) strand; PAM type: YTN; PAM sequence: CTA
ccatcagagaatactataaa

SEQ ID NO: 246301 - DNA, 20 bp, Artificial Sequence
  Description of Artificial Sequence: Synthetic oligonucleotide
  Target: LAMA2; (-) strand; PAM type: YTN; PAM sequence: CTA
ataaagaagaaaagagagaa

SEQ ID NO: 246302 - DNA, 20 bp, Artificial Sequence
  Description of Artificial Sequence: Synthetic oligonucleotide
  Target: LAMA2; (-) strand; PAM type: YTN; PAM sequence: CTA
gcaagactaataaagaagaa

SEQ ID NO: 246303 - DNA, 20 bp, Artificial Sequence
  Description of Artificial Sequence: Synthetic oligonucleotide
  Target: LAMA2; (-) strand; PAM type: YTN; PAM sequence: CTG
ctagcaagactaataaagaa

SEQ ID NO: 246304 - DNA, 20 bp, Artificial Sequence
  Description of Artificial Sequence: Synthetic oligonucleotide
  Target: LAMA2; (-) strand; PAM type: YTN; PAM sequence: TTG
atagactgctagcaagacta

SEQ ID NO: 246305 - DNA, 20 bp, Artificial Sequence
  Description of Artificial Sequence: Synthetic oligonucleotide
  Target: LAMA2; (-) strand; PAM type: YTN; PAM sequence: TTG
aaaagatcaacaaaattgat

SEQ ID NO: 246306 - DNA, 20 bp, Artificial Sequence
  Description of Artificial Sequence: Synthetic oligonucleotide
  Target: LAMA2; (-) strand; PAM type: YTN; PAM sequence: TTT
gaaaagatcaacaaaattga

SEQ ID NO: 246307 - DNA, 20 bp, Artificial Sequence
  Description of Artificial Sequence: Synthetic oligonucleotide
  Target: LAMA2; (-) strand; PAM type: YTN; PAM sequence: TTT
tgaaaagatcaacaaaattg

SEQ ID NO: 246308 - DNA, 20 bp, Artificial Sequence
  Description of Artificial Sequence: Synthetic oligonucleotide
  Target: LAMA2; (-) strand; PAM type: YTN; PAM sequence: TTT
ttgaaaagatcaacaaaatt

SEQ ID NO: 246309 - DNA, 20 bp, Artificial Sequence
  Description of Artificial Sequence: Synthetic oligonucleotide
  Target: LAMA2; (-) strand; PAM type: YTN; PAM sequence: TTT
tttgaaaagatcaacaaaat

SEQ ID NO: 246310 - DNA, 20 bp, Artificial Sequence
  Description of Artificial Sequence: Synthetic oligonucleotide
  Target: LAMA2; (-) strand; PAM type: YTN; PAM sequence: TTC
aacaaatcagtgaatccagg

SEQ ID NO: 246311 - DNA, 20 bp, Artificial Sequence
  Description of Artificial Sequence: Synthetic oligonucleotide
  Target: LAMA2; (-) strand; PAM type: YTN; PAM sequence: CTT
caacaaatcagtgaatccag

SEQ ID NO: 246312 - DNA, 20 bp, Artificial Sequence
  Description of Artificial Sequence: Synthetic oligonucleotide
  Target: LAMA2; (-) strand; PAM type: YTN; PAM sequence: CTG
aaggagatagagtcacaaaa

SEQ ID NO: 246313 - DNA, 20 bp, Artificial Sequence
  Description of Artificial Sequence: Synthetic oligonucleotide
  Target: LAMA2; (-) strand; PAM type: YTN; PAM sequence: CTA
agatcagagcagaactgaag

SEQ ID NO: 246314 - DNA, 20 bp, Artificial Sequence
  Description of Artificial Sequence: Synthetic oligonucleotide
  Target: LAMA2; (-) strand; PAM type: YTN; PAM sequence: CTA
gcagaaggcaagaaataact

SEQ ID NO: 246315 - DNA, 20 bp, Artificial Sequence
  Description of Artificial Sequence: Synthetic oligonucleotide
  Target: LAMA2; (-) strand; PAM type: YTN; PAM sequence: CTC
aaaagctagcagaaggcaag

SEQ ID NO: 246316 - DNA, 20 bp, Artificial Sequence
  Description of Artificial Sequence: Synthetic oligonucleotide
  Target: LAMA2; (-) strand; PAM type: YTN; PAM sequence: CTA
gagaagcaagagcaaacaca

SEQ ID NO: 246317 - DNA, 20 bp, Artificial Sequence
  Description of Artificial Sequence: Synthetic oligonucleotide
  Target: LAMA2; (-) strand; PAM type: YTN; PAM sequence: TTA
aaagaactagagaagcaaga

SEQ ID NO: 246318 - DNA, 20 bp, Artificial Sequence
  Description of Artificial Sequence: Synthetic oligonucleotide
  Target: LAMA2; (-) strand; PAM type: YTN; PAM sequence: CTA
acatcacaattaaaagaact

SEQ ID NO: 246319 - DNA, 20 bp, Artificial Sequence
  Description of Artificial Sequence: Synthetic oligonucleotide
  Target: LAMA2; (-) strand; PAM type: YTN; PAM sequence: TTG
acaccctaacatcacaatta

SEQ ID NO: 246320 - DNA, 20 bp, Artificial Sequence
  Description of Artificial Sequence: Synthetic oligonucleotide
  Target: LAMA2; (-) strand; PAM type: YTN; PAM sequence: CTA
aatgcccacaagagaaagca

SEQ ID NO: 246321 - DNA, 20 bp, Artificial Sequence
  Description of Artificial Sequence: Synthetic oligonucleotide
  Target: LAMA2; (-) strand; PAM type: YTN; PAM sequence: TTA
tagcactaaatgcccacaag

SEQ ID NO: 246322 - DNA, 20 bp, Artificial Sequence
  Description of Artificial Sequence: Synthetic oligonucleotide
  Target: LAMA2; (-) strand; PAM type: YTN; PAM sequence: TTT
atagcactaaatgcccacaa

SEQ ID NO: 246323 - DNA, 20 bp, Artificial Sequence
  Description of Artificial Sequence: Synthetic oligonucleotide
  Target: LAMA2; (-) strand; PAM type: YTN; PAM sequence: TTA
aagcagtgtgtagagggaaa

SEQ ID NO: 246324 - DNA, 20 bp, Artificial Sequence
  Description of Artificial Sequence: Synthetic oligonucleotide
  Target: LAMA2; (-) strand; PAM type: YTN; PAM sequence: TTT
aaagcagtgtgtagagggaa

SEQ ID NO: 246325 - DNA, 20 bp, Artificial Sequence
  Description of Artificial Sequence: Synthetic oligonucleotide
  Target: LAMA2; (-) strand; PAM type: YTN; PAM sequence: CTG
ggacacatttaaagcagtgt

SEQ ID NO: 246326 - DNA, 20 bp, Artificial Sequence
  Description of Artificial Sequence: Synthetic oligonucleotide
  Target: LAMA2; (-) strand; PAM type: YTN; PAM sequence: CTC
tgggacacatttaaagcagt

SEQ ID NO: 246327 - DNA, 20 bp, Artificial Sequence
  Description of Artificial Sequence: Synthetic oligonucleotide
  Target: LAMA2; (-) strand; PAM type: YTN; PAM sequence: CTA
atgagaacaaagatacaaca

SEQ ID NO: 246328 - DNA, 20 bp, Artificial Sequence
  Description of Artificial Sequence: Synthetic oligonucleotide
  Target: LAMA2; (-) strand; PAM type: YTN; PAM sequence: TTG
aaactaatgagaacaaagat

SEQ ID NO: 246329 - DNA, 20 bp, Artificial Sequence
  Description of Artificial Sequence: Synthetic oligonucleotide
  Target: LAMA2; (-) strand; PAM type: YTN; PAM sequence: TTT
gaaactaatgagaacaaaga

SEQ ID NO: 246330 - DNA, 20 bp, Artificial Sequence
  Description of Artificial Sequence: Synthetic oligonucleotide
  Target: LAMA2; (-) strand; PAM type: YTN; PAM sequence: CTT
tgaaactaatgagaacaaag

SEQ ID NO: 246331 - DNA, 20 bp, Artificial Sequence
  Description of Artificial Sequence: Synthetic oligonucleotide
  Target: LAMA2; (-) strand; PAM type: YTN; PAM sequence: TTC
tttgaaactaatgagaacaa

SEQ ID NO: 246332 - DNA, 20 bp, Artificial Sequence
  Description of Artificial Sequence: Synthetic oligonucleotide
  Target: LAMA2; (-) strand; PAM type: YTN; PAM sequence: CTG
gaataaagatgttctttgaa

SEQ ID NO: 246333 - DNA, 20 bp, Artificial Sequence
  Description of Artificial Sequence: Synthetic oligonucleotide
  Target: LAMA2; (-) strand; PAM type: YTN; PAM sequence: CTG
ggtatataacgaaatgaagg

SEQ ID NO: 246334 - DNA, 20 bp, Artificial Sequence
  Description of Artificial Sequence: Synthetic oligonucleotide
  Target: LAMA2; (-) strand; PAM type: YTN; PAM sequence: CTA
ctgggtatataacgaaatga

SEQ ID NO: 246335 - DNA, 20 bp, Artificial Sequence
  Description of Artificial Sequence: Synthetic oligonucleotide
  Target: LAMA2; (-) strand; PAM type: YTN; PAM sequence: CTG
aatgactactgggtatataa

SEQ ID NO: 246336 - DNA, 20 bp, Artificial Sequence
  Description of Artificial Sequence: Synthetic oligonucleotide
  Target: LAMA2; (-) strand; PAM type: YTN; PAM sequence: TTC
ctgaatgactactgggtata

SEQ ID NO: 246337 - DNA, 20 bp, Artificial Sequence
  Description of Artificial Sequence: Synthetic oligonucleotide
  Target: LAMA2; (-) strand; PAM type: YTN; PAM sequence: CTG
ttcctgaatgactactgggt

SEQ ID NO: 246338 - DNA, 20 bp, Artificial Sequence
  Description of Artificial Sequence: Synthetic oligonucleotide
  Target: LAMA2; (-) strand; PAM type: YTN; PAM sequence: CTG
aacaacctgttcctgaatga

SEQ ID NO: 246339 - DNA, 20 bp, Artificial Sequence
  Description of Artificial Sequence: Synthetic oligonucleotide
  Target: LAMA2; (-) strand; PAM type: YTN; PAM sequence: CTA
catggaaactgaacaacctg

SEQ ID NO: 246340 - DNA, 20 bp, Artificial Sequence
  Description of Artificial Sequence: Synthetic oligonucleotide
  Target: LAMA2; (-) strand; PAM type: YTN; PAM sequence: CTC
aactacatggaaactgaaca

SEQ ID NO: 246341 - DNA, 20 bp, Artificial Sequence
  Description of Artificial Sequence: Synthetic oligonucleotide
  Target: LAMA2; (-) strand; PAM type: YTN; PAM sequence: CTG
aaaacggctcaactacatgg

SEQ ID NO: 246342 - DNA, 20 bp, Artificial Sequence
  Description of Artificial Sequence: Synthetic oligonucleotide
  Target: LAMA2; (-) strand; PAM type: YTN; PAM sequence: CTC
actgaaaacggctcaactac

SEQ ID NO: 246343 - DNA, 20 bp, Artificial Sequence
  Description of Artificial Sequence: Synthetic oligonucleotide
  Target: LAMA2; (-) strand; PAM type: YTN; PAM sequence: TTA
agaaactcactgaaaacggc

SEQ ID NO: 246344 - DNA, 20 bp, Artificial Sequence
  Description of Artificial Sequence: Synthetic oligonucleotide
  Target: LAMA2; (-) strand; PAM type: YTN; PAM sequence: CTC
aggattaagaaactcactga

SEQ ID NO: 246345 - DNA, 20 bp, Artificial Sequence
  Description of Artificial Sequence: Synthetic oligonucleotide
  Target: LAMA2; (-) strand; PAM type: YTN; PAM sequence: CTA
gaactcaggattaagaaact

SEQ ID NO: 246346 - DNA, 20 bp, Artificial Sequence
  Description of Artificial Sequence: Synthetic oligonucleotide
  Target: LAMA2; (-) strand; PAM type: YTN; PAM sequence: CTC
agaccacagtgcaatcaaac

SEQ ID NO: 246347 - DNA, 20 bp, Artificial Sequence
  Description of Artificial Sequence: Synthetic oligonucleotide
  Target: LAMA2; (-) strand; PAM type: YTN; PAM sequence: CTC
tcagaccacagtgcaatcaa

SEQ ID NO: 246348 - DNA, 20 bp, Artificial Sequence
  Description of Artificial Sequence: Synthetic oligonucleotide
  Target: LAMA2; (-) strand; PAM type: YTN; PAM sequence: CTG
tctctcagaccacagtgcaa

SEQ ID NO: 246349 - DNA, 20 bp, Artificial Sequence
  Description of Artificial Sequence: Synthetic oligonucleotide
  Target: LAMA2; (-) strand; PAM type: YTN; PAM sequence: TTA
taacaaactgtctctcagac

SEQ ID NO: 246350 - DNA, 20 bp, Artificial Sequence
  Description of Artificial Sequence: Synthetic oligonucleotide
  Target: LAMA2; (-) strand; PAM type: YTN; PAM sequence: CTC
agcaaatgtaaaagatcaga

SEQ ID NO: 246351 - DNA, 20 bp, Artificial Sequence
  Description of Artificial Sequence: Synthetic oligonucleotide
  Target: LAMA2; (-) strand; PAM type: YTN; PAM sequence: CTC
ctcagcaaatgtaaaagatc

SEQ ID NO: 246352 - DNA, 20 bp, Artificial Sequence
  Description of Artificial Sequence: Synthetic oligonucleotide
  Target: LAMA2; (-) strand; PAM type: YTN; PAM sequence: TTG
gaagtaaagcactcctcagc

SEQ ID NO: 246353 - DNA, 20 bp, Artificial Sequence
  Description of Artificial Sequence: Synthetic oligonucleotide
  Target: LAMA2; (-) strand; PAM type: YTN; PAM sequence: TTG
accacatagttggaagtaaa

SEQ ID NO: 246354 - DNA, 20 bp, Artificial Sequence
  Description of Artificial Sequence: Synthetic oligonucleotide
  Target: LAMA2; (-) strand; PAM type: YTN; PAM sequence: TTC
caaaattgaccacatagttg

SEQ ID NO: 246355 - DNA, 20 bp, Artificial Sequence
  Description of Artificial Sequence: Synthetic oligonucleotide
  Target: LAMA2; (-) strand; PAM type: YTN; PAM sequence: TTA
ttccaaaattgaccacatag

SEQ ID NO: 246356 - DNA, 20 bp, Artificial Sequence
  Description of Artificial Sequence: Synthetic oligonucleotide
  Target: LAMA2; (-) strand; PAM type: YTN; PAM sequence: CTT
attccaaaattgaccacata

SEQ ID NO: 246357 - DNA, 20 bp, Artificial Sequence
  Description of Artificial Sequence: Synthetic oligonucleotide
  Target: LAMA2; (-) strand; PAM type: YTN; PAM sequence: CTC
agcaccacatcacacttatt

SEQ ID NO: 246358 - DNA, 20 bp, Artificial Sequence
  Description of Artificial Sequence: Synthetic oligonucleotide
  Target: LAMA2; (-) strand; PAM type: YTN; PAM sequence: CTG
ctcagcaccacatcacactt

SEQ ID NO: 246359 - DNA, 20 bp, Artificial Sequence
  Description of Artificial Sequence: Synthetic oligonucleotide
  Target: LAMA2; (-) strand; PAM type: YTN; PAM sequence: TTC
tgctcagcaccacatcacac

SEQ ID NO: 246360 - DNA, 20 bp, Artificial Sequence
  Description of Artificial Sequence: Synthetic oligonucleotide
  Target: LAMA2; (-) strand; PAM type: YTN; PAM sequence: CTC
caccccaaatcaacagaata

SEQ ID NO: 246361 - DNA, 20 bp, Artificial Sequence
  Description of Artificial Sequence: Synthetic oligonucleotide
  Target: LAMA2; (-) strand; PAM type: YTN; PAM sequence: CTC
tccaccccaaatcaacagaa

SEQ ID NO: 246362 - DNA, 20 bp, Artificial Sequence
  Description of Artificial Sequence: Synthetic oligonucleotide
  Target: LAMA2; (-) strand; PAM type: YTN; PAM sequence: TTG
cagaactctccaccccaaat

SEQ ID NO: 246363 - DNA, 20 bp, Artificial Sequence
  Description of Artificial Sequence: Synthetic oligonucleotide
  Target: LAMA2; (-) strand; PAM type: YTN; PAM sequence: TTT
gcagaactctccaccccaaa

SEQ ID NO: 246364 - DNA, 20 bp, Artificial Sequence
  Description of Artificial Sequence: Synthetic oligonucleotide
  Target: LAMA2; (-) strand; PAM type: YTN; PAM sequence: CTA
atagacatttgcagaactct

SEQ ID NO: 246365 - DNA, 20 bp, Artificial Sequence
  Description of Artificial Sequence: Synthetic oligonucleotide
  Target: LAMA2; (-) strand; PAM type: YTN; PAM sequence: CTG
caccaagtggacctaataga

SEQ ID NO: 246366 - DNA, 20 bp, Artificial Sequence
  Description of Artificial Sequence: Synthetic oligonucleotide
  Target: LAMA2; (-) strand; PAM type: YTN; PAM sequence: CTC
tgcaccaagtggacctaata

SEQ ID NO: 246367 - DNA, 20 bp, Artificial Sequence
  Description of Artificial Sequence: Synthetic oligonucleotide
  Target: LAMA2; (-) strand; PAM type: YTN; PAM sequence: CTC
agctctgcaccaagtggacc

SEQ ID NO: 246368 - DNA, 20 bp, Artificial Sequence
  Description of Artificial Sequence: Synthetic oligonucleotide
  Target: LAMA2; (-) strand; PAM type: YTN; PAM sequence: TTG
aactcagctctgcaccaagt

SEQ ID NO: 246369 - DNA, 20 bp, Artificial Sequence
  Description of Artificial Sequence: Synthetic oligonucleotide
  Target: LAMA2; (-) strand; PAM type: YTN; PAM sequence: TTA
gacagatcaacgagacagaa

SEQ ID NO: 246370 - DNA, 20 bp, Artificial Sequence
  Description of Artificial Sequence: Synthetic oligonucleotide
  Target: LAMA2; (-) strand; PAM type: YTN; PAM sequence: CTG
tcaacattagacagatcaac

SEQ ID NO: 246371 - DNA, 20 bp, Artificial Sequence
  Description of Artificial Sequence: Synthetic oligonucleotide
  Target: LAMA2; (-) strand; PAM type: YTN; PAM sequence: TTA
acaccccactgtcaacatta

SEQ ID NO: 246372 - DNA, 20 bp, Artificial Sequence
  Description of Artificial Sequence: Synthetic oligonucleotide
  Target: LAMA2; (-) strand; PAM type: YTN; PAM sequence: TTT
aacaccccactgtcaacatt

SEQ ID NO: 246373 - DNA, 20 bp, Artificial Sequence
  Description of Artificial Sequence: Synthetic oligonucleotide
  Target: LAMA2; (-) strand; PAM type: YTN; PAM sequence: CTT
taacaccccactgtcaacat

SEQ ID NO: 246374 - DNA, 20 bp, Artificial Sequence
  Description of Artificial Sequence: Synthetic oligonucleotide
  Target: LAMA2; (-) strand; PAM type: YTN; PAM sequence: CTC
ccacacaataataatgggag

SEQ ID NO: 246375 - DNA, 20 bp, Artificial Sequence
  Description of Artificial Sequence: Synthetic oligonucleotide
  Target: LAMA2; (-) strand; PAM type: YTN; PAM sequence: TTA
gactcccacacaataataat

SEQ ID NO: 246376 - DNA, 20 bp, Artificial Sequence
  Description of Artificial Sequence: Synthetic oligonucleotide
  Target: LAMA2; (-) strand; PAM type: YTN; PAM sequence: CTT
agactcccacacaataataa

SEQ ID NO: 246377 - DNA, 20 bp, Artificial Sequence
  Description of Artificial Sequence: Synthetic oligonucleotide
  Target: LAMA2; (-) strand; PAM type: YTN; PAM sequence: CTA
caaagagacttagactccca

SEQ ID NO: 246378 - DNA, 20 bp, Artificial Sequence
  Description of Artificial Sequence: Synthetic oligonucleotide
  Target: LAMA2; (-) strand; PAM type: YTN; PAM sequence: TTA
gagacctacaaagagactta

SEQ ID NO: 246379 - DNA, 20 bp, Artificial Sequence
  Description of Artificial Sequence: Synthetic oligonucleotide
  Target: LAMA2; (-) strand; PAM type: YTN; PAM sequence: CTT
agagacctacaaagagactt

SEQ ID NO: 246380 - DNA, 20 bp, Artificial Sequence
  Description of Artificial Sequence: Synthetic oligonucleotide
  Target: LAMA2; (-) strand; PAM type: YTN; PAM sequence: TTC
ataaagcaagtccttagaga

SEQ ID NO: 246381 - DNA, 20 bp, Artificial Sequence
  Description of Artificial Sequence: Synthetic oligonucleotide
  Target: LAMA2; (-) strand; PAM type: YTN; PAM sequence: CTC
agattcataaagcaagtcct

SEQ ID NO: 246382 - DNA, 20 bp, Artificial Sequence
  Description of Artificial Sequence: Synthetic oligonucleotide
  Target: LAMA2; (-) strand; PAM type: YTN; PAM sequence: CTA
aatatatatgcacccaatac

SEQ ID NO: 246383 - DNA, 20 bp, Artificial Sequence
  Description of Artificial Sequence: Synthetic oligonucleotide
  Target: LAMA2; (-) strand; PAM type: YTN; PAM sequence: CTA
tcctaaatatatatgcaccc

SEQ ID NO: 246384 - DNA, 20 bp, Artificial Sequence
  Description of Artificial Sequence: Synthetic oligonucleotide
  Target: LAMA2; (-) strand; PAM type: YTN; PAM sequence: CTA
actatcctaaatatatatgc

SEQ ID NO: 246385 - DNA, 20 bp, Artificial Sequence
  Description of Artificial Sequence: Synthetic oligonucleotide
  Target: LAMA2; (-) strand; PAM type: YTN; PAM sequence: TTC
aacaagaagagctaactatc

SEQ ID NO: 246386 - DNA, 20 bp, Artificial Sequence
  Description of Artificial Sequence: Synthetic oligonucleotide
  Target: LAMA2; (-) strand; PAM type: YTN; PAM sequence: TTA
cataatggtaaagggatcaa

SEQ ID NO: 246387 - DNA, 20 bp, Artificial Sequence
  Description of Artificial Sequence: Synthetic oligonucleotide
  Target: LAMA2; (-) strand; PAM type: YTN; PAM sequence: TTA
aaccaacaaagatcaaaaga

SEQ ID NO: 246388 - DNA, 20 bp, Artificial Sequence
  Description of Artificial Sequence: Synthetic oligonucleotide
  Target: LAMA2; (-) strand; PAM type: YTN; PAM sequence: CTG
ataaaacagacattaaacca

SEQ ID NO: 246389 - DNA, 20 bp, Artificial Sequence
  Description of Artificial Sequence: Synthetic oligonucleotide
  Target: LAMA2; (-) strand; PAM type: YTN; PAM sequence: CTC
tgataaaacagacattaaac

SEQ ID NO: 246390 - DNA, 20 bp, Artificial Sequence
  Description of Artificial Sequence: Synthetic oligonucleotide
  Target: LAMA2; (-) strand; PAM type: YTN; PAM sequence: CTA
gtctctgataaaacagacat

SEQ ID NO: 246391 - DNA, 20 bp, Artificial Sequence
  Description of Artificial Sequence: Synthetic oligonucleotide
  Target: LAMA2; (-) strand; PAM type: YTN; PAM sequence: TTG
caaacctagtctctgataaa

SEQ ID NO: 246392 - DNA, 20 bp, Artificial Sequence
  Description of Artificial Sequence: Synthetic oligonucleotide
  Target: LAMA2; (-) strand; PAM type: YTN; PAM sequence: CTA
ccaaggaaatagaaaacaaa

SEQ ID NO: 246393 - DNA, 20 bp, Artificial Sequence
  Description of Artificial Sequence: Synthetic oligonucleotide
  Target: LAMA2; (-) strand; PAM type: YTN; PAM sequence: CTC
aaaataaagggatggaggaa

SEQ ID NO: 246394 - DNA, 20 bp, Artificial Sequence
  Description of Artificial Sequence: Synthetic oligonucleotide
  Target: LAMA2; (-) strand; PAM type: YTN; PAM sequence: CTC
atgtgcagagacacacacag

SEQ ID NO: 246395 - DNA, 20 bp, Artificial Sequence
  Description of Artificial Sequence: Synthetic oligonucleotide
  Target: LAMA2; (-) strand; PAM type: YTN; PAM sequence: TTC
aagagacccatctcatgtgc

SEQ ID NO: 246396 - DNA, 20 bp, Artificial Sequence
  Description of Artificial Sequence: Synthetic oligonucleotide
  Target: LAMA2; (-) strand; PAM type: YTN; PAM sequence: CTG
tattcaagagacccatctca

SEQ ID NO: 246397 - DNA, 20 bp, Artificial Sequence
  Description of Artificial Sequence: Synthetic oligonucleotide
  Target: LAMA2; (-) strand; PAM type: YTN; PAM sequence: CTC
aagacccatcagtgtgctgt

SEQ ID NO: 246398 - DNA, 20 bp, Artificial Sequence
  Description of Artificial Sequence: Synthetic oligonucleotide
  Target: LAMA2; (-) strand; PAM type: YTN; PAM sequence: TTG
gataaagactcaagacccat

SEQ ID NO: 246399 - DNA, 20 bp, Artificial Sequence
  Description of Artificial Sequence: Synthetic oligonucleotide
  Target: LAMA2; (-) strand; PAM type: YTN; PAM sequence: CTG
gcaaattggataaagactca

SEQ ID NO: 246400 - DNA, 20 bp, Artificial Sequence
  Description of Artificial Sequence: Synthetic oligonucleotide
  Target: LAMA2; (-) strand; PAM type: YTN; PAM sequence: TTA
aaagacacagactggcaaat

SEQ ID NO: 246401 - DNA, 20 bp, Artificial Sequence
  Description of Artificial Sequence: Synthetic oligonucleotide
  Target: LAMA2; (-) strand; PAM type: YTN; PAM sequence: CTA
attaaaagacacagactggc

SEQ ID NO: 246402 - DNA, 20 bp, Artificial Sequence
  Description of Artificial Sequence: Synthetic oligonucleotide
  Target: LAMA2; (-) strand; PAM type: YTN; PAM sequence: CTC
taattaaaagacacagactg

SEQ ID NO: 246403 - DNA, 20 bp, Artificial Sequence
  Description of Artificial Sequence: Synthetic oligonucleotide
  Target: LAMA2; (-) strand; PAM type: YTN; PAM sequence: CTA
aatgctctaattaaaagaca

SEQ ID NO: 246404 - DNA, 20 bp, Artificial Sequence
  Description of Artificial Sequence: Synthetic oligonucleotide
  Target: LAMA2; (-) strand; PAM type: YTN; PAM sequence: TTA
aacgtaaatgggctaaatgc

SEQ ID NO: 246405 - DNA, 20 bp, Artificial Sequence
  Description of Artificial Sequence: Synthetic oligonucleotide
  Target: LAMA2; (-) strand; PAM type: YTN; PAM sequence: CTT
aaacgtaaatgggctaaatg

SEQ ID NO: 246406 - DNA, 20 bp, Artificial Sequence
  Description of Artificial Sequence: Synthetic oligonucleotide
  Target: LAMA2; (-) strand; PAM type: YTN; PAM sequence: TTA
accttaaacgtaaatgggct

SEQ ID NO: 246407 - DNA, 20 bp, Artificial Sequence
  Description of Artificial Sequence: Synthetic oligonucleotide
  Target: LAMA2; (-) strand; PAM type: YTN; PAM sequence: TTC
acacataatattaaccttaa

SEQ ID NO: 246408 - DNA, 20 bp, Artificial Sequence
  Description of Artificial Sequence: Synthetic oligonucleotide
  Target: LAMA2; (-) strand; PAM type: YTN; PAM sequence: CTA
acatcataatgacaggatca

SEQ ID NO: 246409 - DNA, 20 bp, Artificial Sequence
  Description of Artificial Sequence: Synthetic oligonucleotide
  Target: LAMA2; (-) strand; PAM type: YTN; PAM sequence: CTA
acgagcaaaataaccagcta

SEQ ID NO: 246410 - DNA, 20 bp, Artificial Sequence
  Description of Artificial Sequence: Synthetic oligonucleotide
  Target: LAMA2; (-) strand; PAM type: YTN; PAM sequence: CTG
aaacaactaacgagcaaaat

SEQ ID NO: 246411 - DNA, 20 bp, Artificial Sequence
  Description of Artificial Sequence: Synthetic oligonucleotide
  Target: LAMA2; (-) strand; PAM type: YTN; PAM sequence: CTA
ggaagaaactgaaacaacta

SEQ ID NO: 246412 - DNA, 20 bp, Artificial Sequence
  Description of Artificial Sequence: Synthetic oligonucleotide
  Target: LAMA2; (-) strand; PAM type: YTN; PAM sequence: TTG
taaagaccatcgatgctagg

SEQ ID NO: 246413 - DNA, 20 bp, Artificial Sequence
  Description of Artificial Sequence: Synthetic oligonucleotide
  Target: LAMA2; (-) strand; PAM type: YTN; PAM sequence: CTG
caaaaacatgccaaattgta

SEQ ID NO: 246414 - DNA, 20 bp, Artificial Sequence
  Description of Artificial Sequence: Synthetic oligonucleotide
  Target: LAMA2; (-) strand; PAM type: YTN; PAM sequence: CTA
aacatggaaaggaacaacca

SEQ ID NO: 246415 - DNA, 20 bp, Artificial Sequence
  Description of Artificial Sequence: Synthetic oligonucleotide
  Target: LAMA2; (-) strand; PAM type: YTN; PAM sequence: CTG
aaggaagtgctaaacatgga

SEQ ID NO: 246416 - DNA, 20 bp, Artificial Sequence
  Description of Artificial Sequence: Synthetic oligonucleotide
  Target: LAMA2; (-) strand; PAM type: YTN; PAM sequence: CTC
ctgaaggaagtgctaaacat

SEQ ID NO: 246417 - DNA, 20 bp, Artificial Sequence
  Description of Artificial Sequence: Synthetic oligonucleotide
  Target: LAMA2; (-) strand; PAM type: YTN; PAM sequence: CTA
aaagagctcctgaaggaagt

SEQ ID NO: 246418 - DNA, 20 bp, Artificial Sequence
  Description of Artificial Sequence: Synthetic oligonucleotide
  Target: LAMA2; (-) strand; PAM type: YTN; PAM sequence: CTG
ccctaaaagagctcctgaag

SEQ ID NO: 246419 - DNA, 20 bp, Artificial Sequence
  Description of Artificial Sequence: Synthetic oligonucleotide
  Target: LAMA2; (-) strand; PAM type: YTN; PAM sequence: TTG
tcaccaccaggcctgcccta

SEQ ID NO: 246420 - DNA, 20 bp, Artificial Sequence
  Description of Artificial Sequence: Synthetic oligonucleotide
  Target: LAMA2; (-) strand; PAM type: YTN; PAM sequence: TTT
gtcaccaccaggcctgccct

SEQ ID NO: 246421 - DNA, 20 bp, Artificial Sequence
  Description of Artificial Sequence: Synthetic oligonucleotide
  Target: LAMA2; (-) strand; PAM type: YTN; PAM sequence: TTT
tgtcaccaccaggcctgccc

SEQ ID NO: 246422 - DNA, 20 bp, Artificial Sequence
  Description of Artificial Sequence: Synthetic oligonucleotide
  Target: LAMA2; (-) strand; PAM type: YTN; PAM sequence: CTG
agagattttgtcaccaccag

SEQ ID NO: 246423 - DNA, 20 bp, Artificial Sequence
  Description of Artificial Sequence: Synthetic oligonucleotide
  Target: LAMA2; (-) strand; PAM type: YTN; PAM sequence: TTA
cagacaagcaaatgctgaga

SEQ ID NO: 246424 - DNA, 20 bp, Artificial Sequence
  Description of Artificial Sequence: Synthetic oligonucleotide
  Target: LAMA2; (-) strand; PAM type: YTN; PAM sequence: TTT
acagacaagcaaatgctgag

SEQ ID NO: 246425 - DNA, 20 bp, Artificial Sequence
  Description of Artificial Sequence: Synthetic oligonucleotide
  Target: LAMA2; (-) strand; PAM type: YTN; PAM sequence: CTT
tacagacaagcaaatgctga

SEQ ID NO: 246426 - DNA, 20 bp, Artificial Sequence
  Description of Artificial Sequence: Synthetic oligonucleotide
  Target: LAMA2; (-) strand; PAM type: YTN; PAM sequence: TTC
ataagtgaaggagaaataaa

SEQ ID NO: 246427 - DNA, 20 bp, Artificial Sequence
  Description of Artificial Sequence: Synthetic oligonucleotide
  Target: LAMA2; (-) strand; PAM type: YTN; PAM sequence: CTT
cataagtgaaggagaaataa

SEQ ID NO: 246428 - DNA, 20 bp, Artificial Sequence
  Description of Artificial Sequence: Synthetic oligonucleotide
  Target: LAMA2; (-) strand; PAM type: YTN; PAM sequence: CTA
agcttcataagtgaaggaga

SEQ ID NO: 246429 - DNA, 20 bp, Artificial Sequence
  Description of Artificial Sequence: Synthetic oligonucleotide
  Target: LAMA2; (-) strand; PAM type: YTN; PAM sequence: TTC
atatccagccaaactaagct

SEQ ID NO: 246430 - DNA, 20 bp, Artificial Sequence
  Description of Artificial Sequence: Synthetic oligonucleotide
  Target: LAMA2; (-) strand; PAM type: YTN; PAM sequence: TTT
catatccagccaaactaagc

SEQ ID NO: 246431 - DNA, 20 bp, Artificial Sequence
  Description of Artificial Sequence: Synthetic oligonucleotide
  Target: LAMA2; (-) strand; PAM type: YTN; PAM sequence: TTC
aacccagaatttcatatcca

SEQ ID NO: 246432 - DNA, 20 bp, Artificial Sequence
  Description of Artificial Sequence: Synthetic oligonucleotide
  Target: LAMA2; (-) strand; PAM type: YTN; PAM sequence: TTT
caacccagaatttcatatcc

SEQ ID NO: 246433 - DNA, 20 bp, Artificial Sequence
  Description of Artificial Sequence: Synthetic oligonucleotide
  Target: LAMA2; (-) strand; PAM type: YTN; PAM sequence: TTT
tcaacccagaatttcatatc

SEQ ID NO: 246434 - DNA, 20 bp, Artificial Sequence
  Description of Artificial Sequence: Synthetic oligonucleotide
  Target: LAMA2; (-) strand; PAM type: YTN; PAM sequence: TTA
aagaaaagaattttcaaccc

SEQ ID NO: 246435 - DNA, 20 bp, Artificial Sequence
  Description of Artificial Sequence: Synthetic oligonucleotide
  Target: LAMA2; (-) strand; PAM type: YTN; PAM sequence: CTT
aaagaaaagaattttcaacc

SEQ ID NO: 246436 - DNA, 20 bp, Artificial Sequence
  Description of Artificial Sequence: Synthetic oligonucleotide
  Target: LAMA2; (-) strand; PAM type: YTN; PAM sequence: TTC
ttaaagaaaagaattttcaa

SEQ ID NO: 246437 - DNA, 20 bp, Artificial Sequence
  Description of Artificial Sequence: Synthetic oligonucleotide
  Target: LAMA2; (-) strand; PAM type: YTN; PAM sequence: TTC
aacattcttaaagaaaagaa

SEQ ID NO: 246438 - DNA, 20 bp, Artificial Sequence
  Description of Artificial Sequence: Synthetic oligonucleotide
  Target: LAMA2; (-) strand; PAM type: YTN; PAM sequence: CTA
caagccggaagagagtgggg

SEQ ID NO: 246439 - DNA, 20 bp, Artificial Sequence
  Description of Artificial Sequence: Synthetic oligonucleotide
  Target: LAMA2; (-) strand; PAM type: YTN; PAM sequence: CTC
tacaagccggaagagagtgg

SEQ ID NO: 246440 - DNA, 20 bp, Artificial Sequence
  Description of Artificial Sequence: Synthetic oligonucleotide
  Target: LAMA2; (-) strand; PAM type: YTN; PAM sequence: CTC
ggcagaaactctacaagccg

SEQ ID NO: 246441 - DNA, 20 bp, Artificial Sequence
  Description of Artificial Sequence: Synthetic oligonucleotide
  Target: LAMA2; (-) strand; PAM type: YTN; PAM sequence: CTA
acagcagatcgctcggcaga

SEQ ID NO: 246442 - DNA, 20 bp, Artificial Sequence
  Description of Artificial Sequence: Synthetic oligonucleotide
  Target: LAMA2; (-) strand; PAM type: YTN; PAM sequence: CTC
aaagggaagcccatcagact

SEQ ID NO: 246443 - DNA, 20 bp, Artificial Sequence
  Description of Artificial Sequence: Synthetic oligonucleotide
  Target: LAMA2; (-) strand; PAM type: YTN; PAM sequence: TTA
ccctcaaagggaagcccatc

SEQ ID NO: 246444 - DNA, 20 bp, Artificial Sequence
  Description of Artificial Sequence: Synthetic oligonucleotide
  Target: LAMA2; (-) strand; PAM type: YTN; PAM sequence: TTA
agggcagccagagagaaagg

SEQ ID NO: 246445 - DNA, 20 bp, Artificial Sequence
  Description of Artificial Sequence: Synthetic oligonucleotide
  Target: LAMA2; (-) strand; PAM type: YTN; PAM sequence: TTG
aaatgaaggaaaaaatgtta

SEQ ID NO: 246446 - DNA, 20 bp, Artificial Sequence
  Description of Artificial Sequence: Synthetic oligonucleotide
  Target: LAMA2; (-) strand; PAM type: YTN; PAM sequence: TTC
accaaagttgaaatgaagga

SEQ ID NO: 246447 - DNA, 20 bp, Artificial Sequence
  Description of Artificial Sequence: Synthetic oligonucleotide
  Target: LAMA2; (-) strand; PAM type: YTN; PAM sequence: TTG
tcagattcaccaaagttgaa

SEQ ID NO: 246448 - DNA, 20 bp, Artificial Sequence
  Description of Artificial Sequence: Synthetic oligonucleotide
  Target: LAMA2; (-) strand; PAM type: YTN; PAM sequence: TTC
aagacacataattgtcagat

SEQ ID NO: 246449 - DNA, 20 bp, Artificial Sequence
  Description of Artificial Sequence: Synthetic oligonucleotide
  Target: LAMA2; (-) strand; PAM type: YTN; PAM sequence: CTT
caagacacataattgtcaga

SEQ ID NO: 246450 - DNA, 20 bp, Artificial Sequence
  Description of Artificial Sequence: Synthetic oligonucleotide
  Target: LAMA2; (-) strand; PAM type: YTN; PAM sequence: CTC
gagaagagcaacttcaagac

SEQ ID NO: 246451 - DNA, 20 bp, Artificial Sequence
  Description of Artificial Sequence: Synthetic oligonucleotide
  Target: LAMA2; (-) strand; PAM type: YTN; PAM sequence: CTC
ctcgagaagagcaacttcaa

SEQ ID NO: 246452 - DNA, 20 bp, Artificial Sequence
  Description of Artificial Sequence: Synthetic oligonucleotide
  Target: LAMA2; (-) strand; PAM type: YTN; PAM sequence: TTC
aggaaacacagagaatgcca

SEQ ID NO: 246453 - DNA, 20 bp, Artificial Sequence
  Description of Artificial Sequence: Synthetic oligonucleotide
  Target: LAMA2; (-) strand; PAM type: YTN; PAM sequence: TTC
aaattcaggaaacacagaga

SEQ ID NO: 246454 - DNA, 20 bp, Artificial Sequence
  Description of Artificial Sequence: Synthetic oligonucleotide
  Target: LAMA2; (-) strand; PAM type: YTN; PAM sequence: CTA
gcaaggcaggccaacattca

SEQ ID NO: 246455 - DNA, 20 bp, Artificial Sequence
  Description of Artificial Sequence: Synthetic oligonucleotide
  Target: LAMA2; (-) strand; PAM type: YTN; PAM sequence: TTC
cccaacctagcaaggcaggc

SEQ ID NO: 246456 - DNA, 20 bp, Artificial Sequence
  Description of Artificial Sequence: Synthetic oligonucleotide
  Target: LAMA2; (-) strand; PAM type: YTN; PAM sequence: CTT
ccccaacctagcaaggcagg

SEQ ID NO: 246457 - DNA, 20 bp, Artificial Sequence
  Description of Artificial Sequence: Synthetic oligonucleotide
  Target: LAMA2; (-) strand; PAM type: YTN; PAM sequence: TTA
tccaggagaacttccccaac

SEQ ID NO: 246458 - DNA, 20 bp, Artificial Sequence
  Description of Artificial Sequence: Synthetic oligonucleotide
  Target: LAMA2; (-) strand; PAM type: YTN; PAM sequence: CTG
caggatattatccaggagaa

SEQ ID NO: 246459 - DNA, 20 bp, Artificial Sequence
  Description of Artificial Sequence: Synthetic oligonucleotide
  Target: LAMA2; (-) strand; PAM type: YTN; PAM sequence: TTC
tgcaggatattatccaggag

SEQ ID NO: 246460 - DNA, 20 bp, Artificial Sequence
  Description of Artificial Sequence: Synthetic oligonucleotide
  Target: LAMA2; (-) strand; PAM type: YTN; PAM sequence: TTG
gaaaacattctgcaggatat

SEQ ID NO: 246461 - DNA, 20 bp, Artificial Sequence
  Description of Artificial Sequence: Synthetic oligonucleotide
  Target: LAMA2; (-) strand; PAM type: YTN; PAM sequence: TTG
ggtacatgaaagtggcgggg

SEQ ID NO: 246462 - DNA, 20 bp, Artificial Sequence
  Description of Artificial Sequence: Synthetic oligonucleotide
  Target: LAMA2; (-) strand; PAM type: YTN; PAM sequence: CTG
attgggtacatgaaagtggc

SEQ ID NO: 246463 - DNA, 20 bp, Artificial Sequence
  Description of Artificial Sequence: Synthetic oligonucleotide
  Target: LAMA2; (-) strand; PAM type: YTN; PAM sequence: CTA
tgcctgattgggtacatgaa

SEQ ID NO: 246464 - DNA, 20 bp, Artificial Sequence
  Description of Artificial Sequence: Synthetic oligonucleotide
  Target: LAMA2; (-) strand; PAM type: YTN; PAM sequence: CTA
tgtgaaaagaccaaatctat

SEQ ID NO: 246465 - DNA, 20 bp, Artificial Sequence
  Description of Artificial Sequence: Synthetic oligonucleotide
  Target: LAMA2; (-) strand; PAM type: YTN; PAM sequence: CTC
caagaaatatgggactatgt

SEQ ID NO: 246466 - DNA, 20 bp, Artificial Sequence
  Description of Artificial Sequence: Synthetic oligonucleotide
  Target: LAMA2; (-) strand; PAM type: YTN; PAM sequence: TTA
gagaaaaaagagtaaaagga

SEQ ID NO: 246467 - DNA, 20 bp, Artificial Sequence
  Description of Artificial Sequence: Synthetic oligonucleotide
  Target: LAMA2; (-) strand; PAM type: YTN; PAM sequence: TTT
agagaaaaaagagtaaaagg

SEQ ID NO: 246468 - DNA, 20 bp, Artificial Sequence
  Description of Artificial Sequence: Synthetic oligonucleotide
  Target: LAMA2; (-) strand; PAM type: YTN; PAM sequence: TTG
aagatcaaatgaatgaaatg

SEQ ID NO: 246469 - DNA, 20 bp, Artificial Sequence
  Description of Artificial Sequence: Synthetic oligonucleotide
  Target: LAMA2; (-) strand; PAM type: YTN; PAM sequence: CTG
gaagaaagggtatcagtgat

SEQ ID NO: 246470 - DNA, 20 bp, Artificial Sequence
  Description of Artificial Sequence: Synthetic oligonucleotide
  Target: LAMA2; (-) strand; PAM type: YTN; PAM sequence: TTC
gatcaactggaagaaagggt

SEQ ID NO: 246471 - DNA, 20 bp, Artificial Sequence
  Description of Artificial Sequence: Synthetic oligonucleotide
  Target: LAMA2; (-) strand; PAM type: YTN; PAM sequence: CTG
attcgatcaactggaagaaa

SEQ ID NO: 246472 - DNA, 20 bp, Artificial Sequence
  Description of Artificial Sequence: Synthetic oligonucleotide
  Target: LAMA2; (-) strand; PAM type: YTN; PAM sequence: CTC
aggagctgattcgatcaact

SEQ ID NO: 246473 - DNA, 20 bp, Artificial Sequence
  Description of Artificial Sequence: Synthetic oligonucleotide
  Target: LAMA2; (-) strand; PAM type: YTN; PAM sequence: CTG
acaaatgcacaagcctcagg

SEQ ID NO: 246474 - DNA, 20 bp, Artificial Sequence
  Description of Artificial Sequence: Synthetic oligonucleotide
  Target: LAMA2; (-) strand; PAM type: YTN; PAM sequence: CTA
tggcacgagaagtacctgac

SEQ ID NO: 246475 - DNA, 20 bp, Artificial Sequence
  Description of Artificial Sequence: Synthetic oligonucleotide
  Target: LAMA2; (-) strand; PAM type: YTN; PAM sequence: CTG
aaaactatggcacgagaagt

SEQ ID NO: 246476 - DNA, 20 bp, Artificial Sequence
  Description of Artificial Sequence: Synthetic oligonucleotide
  Target: LAMA2; (-) strand; PAM type: YTN; PAM sequence: CTG
atggagctgaaaactatggc

SEQ ID NO: 246477 - DNA, 20 bp, Artificial Sequence
  Description of Artificial Sequence: Synthetic oligonucleotide
  Target: LAMA2; (-) strand; PAM type: YTN; PAM sequence: TTA
aatgacctgatggagctgaa

SEQ ID NO: 246478 - DNA, 20 bp, Artificial Sequence
  Description of Artificial Sequence: Synthetic oligonucleotide
  Target: LAMA2; (-) strand; PAM type: YTN; PAM sequence: CTT
aaatgacctgatggagctga

SEQ ID NO: 246479 - DNA, 20 bp, Artificial Sequence
  Description of Artificial Sequence: Synthetic oligonucleotide
  Target: LAMA2; (-) strand; PAM type: YTN; PAM sequence: CTA
gaataaccagtgtagagaag

SEQ ID NO: 246480 - DNA, 20 bp, Artificial Sequence
  Description of Artificial Sequence: Synthetic oligonucleotide
  Target: LAMA2; (-) strand; PAM type: YTN; PAM sequence: CTA
cctagaataaccagtgtaga

SEQ ID NO: 246481 - DNA, 20 bp, Artificial Sequence
  Description of Artificial Sequence: Synthetic oligonucleotide
  Target: LAMA2; (-) strand; PAM type: YTN; PAM sequence: TTG
aaaaaagataggacaaatgg

SEQ ID NO: 246482 - DNA, 20 bp, Artificial Sequence
  Description of Artificial Sequence: Synthetic oligonucleotide
  Target: LAMA2; (-) strand; PAM type: YTN; PAM sequence: CTT
gaaaaaagataggacaaatg

SEQ ID NO: 246483 - DNA, 20 bp, Artificial Sequence
  Description of Artificial Sequence: Synthetic oligonucleotide
  Target: LAMA2; (-) strand; PAM type: YTN; PAM sequence: CTA
aaaaccttgaaaaaagatag

SEQ ID NO: 246484 - DNA, 20 bp, Artificial Sequence
  Description of Artificial Sequence: Synthetic oligonucleotide
  Target: LAMA2; (-) strand; PAM type: YTN; PAM sequence: TTC
gaacccatcacaaagaagct

SEQ ID NO: 246485 - DNA, 20 bp, Artificial Sequence
  Description of Artificial Sequence: Synthetic oligonucleotide
  Target: LAMA2; (-) strand; PAM type: YTN; PAM sequence: CTA
aaggaggaagttcgaaccca

SEQ ID NO: 246486 - DNA, 20 bp, Artificial Sequence
  Description of Artificial Sequence: Synthetic oligonucleotide
  Target: LAMA2; (-) strand; PAM type: YTN; PAM sequence: CTG
agctaaaggaggaagttcga

SEQ ID NO: 246487 - DNA, 20 bp, Artificial Sequence
  Description of Artificial Sequence: Synthetic oligonucleotide
  Target: LAMA2; (-) strand; PAM type: YTN; PAM sequence: CTC
tgagctaaaggaggaagttc

SEQ ID NO: 246488 - DNA, 20 bp, Artificial Sequence
  Description of Artificial Sequence: Synthetic oligonucleotide
  Target: LAMA2; (-) strand; PAM type: YTN; PAM sequence: TTC
tctgagctaaaggaggaagt

SEQ ID NO: 246489 - DNA, 20 bp, Artificial Sequence
  Description of Artificial Sequence: Synthetic oligonucleotide
  Target: LAMA2; (-) strand; PAM type: YTN; PAM sequence: CTT
ctctgagctaaaggaggaag

SEQ ID NO: 246490 - DNA, 20 bp, Artificial Sequence
  Description of Artificial Sequence: Synthetic oligonucleotide
  Target: LAMA2; (-) strand; PAM type: YTN; PAM sequence: TTC
agacgatcaaacttctctga

SEQ ID NO: 246491 - DNA, 20 bp, Artificial Sequence
  Description of Artificial Sequence: Synthetic oligonucleotide
  Target: LAMA2; (-) strand; PAM type: YTN; PAM sequence: CTT
cagacgatcaaacttctctg

SEQ ID NO: 246492 - DNA, 20 bp, Artificial Sequence
  Description of Artificial Sequence: Synthetic oligonucleotide
  Target: LAMA2; (-) strand; PAM type: YTN; PAM sequence: TTG
agagaagaaggcttcagacg

SEQ ID NO: 246493 - DNA, 20 bp, Artificial Sequence
  Description of Artificial Sequence: Synthetic oligonucleotide
  Target: LAMA2; (-) strand; PAM type: YTN; PAM sequence: TTG
aggagttgagagaagaaggc

SEQ ID NO: 246494 - DNA, 20 bp, Artificial Sequence
  Description of Artificial Sequence: Synthetic oligonucleotide
  Target: LAMA2; (-) strand; PAM type: YTN; PAM sequence: TTT
gaggagttgagagaagaagg

SEQ ID NO: 246495 - DNA, 20 bp, Artificial Sequence
  Description of Artificial Sequence: Synthetic oligonucleotide
  Target: LAMA2; (-) strand; PAM type: YTN; PAM sequence: CTT
tgaggagttgagagaagaag

SEQ ID NO: 246496 - DNA, 20 bp, Artificial Sequence
  Description of Artificial Sequence: Synthetic oligonucleotide
  Target: LAMA2; (-) strand; PAM type: YTN; PAM sequence: CTG
gatggagaatgactttgagg

SEQ ID NO: 246497 - DNA, 20 bp, Artificial Sequence
  Description of Artificial Sequence: Synthetic oligonucleotide
  Target: LAMA2; (-) strand; PAM type: YTN; PAM sequence: TTG
ccagcaatggaacaaagctg

SEQ ID NO: 246498 - DNA, 20 bp, Artificial Sequence
  Description of Artificial Sequence: Synthetic oligonucleotide
  Target: LAMA2; (-) strand; PAM type: YTN; PAM sequence: CTT
gccagcaatggaacaaagct

SEQ ID NO: 246499 - DNA, 20 bp, Artificial Sequence
  Description of Artificial Sequence: Synthetic oligonucleotide
  Target: LAMA2; (-) strand; PAM type: YTN; PAM sequence: CTC
cttgccagcaatggaacaaa

SEQ ID NO: 246500 - DNA, 20 bp, Artificial Sequence
  Description of Artificial Sequence: Synthetic oligonucleotide
  Target: LAMA2; (-) strand; PAM type: YTN; PAM sequence: CTC
caaaggaatgaagctccttg

SEQ ID NO: 246501 - DNA, 20 bp, Artificial Sequence
  Description of Artificial Sequence: Synthetic oligonucleotide
  Target: LAMA2; (-) strand; PAM type: YTN; PAM sequence: CTC
ctccaaaggaatgaagctcc

SEQ ID NO: 246502 - DNA, 20 bp, Artificial Sequence
  Description of Artificial Sequence: Synthetic oligonucleotide
  Target: LAMA2; (-) strand; PAM type: YTN; PAM sequence: CTC
ctcctccaaaggaatgaagc

SEQ ID NO: 246503 - DNA, 20 bp, Artificial Sequence
  Description of Artificial Sequence: Synthetic oligonucleotide
  Target: LAMA2; (-) strand; PAM type: YTN; PAM sequence: CTC
tcctcctccaaaggaatgaa

SEQ ID NO: 246504 - DNA, 20 bp, Artificial Sequence
  Description of Artificial Sequence: Synthetic oligonucleotide
  Target: LAMA2; (-) strand; PAM type: YTN; PAM sequence: CTA
aaaatcagagcgcctctcct

SEQ ID NO: 246505 - DNA, 20 bp, Artificial Sequence
  Description of Artificial Sequence: Synthetic oligonucleotide
  Target: LAMA2; (-) strand; PAM type: YTN; PAM sequence: CTC
taaaaatcagagcgcctctc

SEQ ID NO: 246506 - DNA, 20 bp, Artificial Sequence
  Description of Artificial Sequence: Synthetic oligonucleotide
  Target: LAMA2; (-) strand; PAM type: YTN; PAM sequence: CTG
aaaactctaaaaatcagagc

SEQ ID NO: 246507 - DNA, 20 bp, Artificial Sequence
  Description of Artificial Sequence: Synthetic oligonucleotide
  Target: LAMA2; (-) strand; PAM type: YTN; PAM sequence: CTA
acaaatagaaaggacaccca

SEQ ID NO: 246508 - DNA, 20 bp, Artificial Sequence
  Description of Artificial Sequence: Synthetic oligonucleotide
  Target: LAMA2; (-) strand; PAM type: YTN; PAM sequence: CTG
taagaaggaaaactaacaaa

SEQ ID NO: 246509 - DNA, 20 bp, Artificial Sequence
  Description of Artificial Sequence: Synthetic oligonucleotide
  Target: LAMA2; (-) strand; PAM type: YTN; PAM sequence: CTG
actgtaagaaggaaaactaa

SEQ ID NO: 246510 - DNA, 20 bp, Artificial Sequence
  Description of Artificial Sequence: Synthetic oligonucleotide
  Target: LAMA2; (-) strand; PAM type: YTN; PAM sequence: CTG
agggtcctgactgtaagaag

SEQ ID NO: 246511 - DNA, 20 bp, Artificial Sequence
  Description of Artificial Sequence: Synthetic oligonucleotide
  Target: LAMA2; (-) strand; PAM type: YTN; PAM sequence: CTG
cagctgagggtcctgactgt

SEQ ID NO: 246512 - DNA, 20 bp, Artificial Sequence
  Description of Artificial Sequence: Synthetic oligonucleotide
  Target: LAMA2; (-) strand; PAM type: YTN; PAM sequence: CTC
caacagacctgcagctgagg

SEQ ID NO: 246513 - DNA, 20 bp, Artificial Sequence
  Description of Artificial Sequence: Synthetic oligonucleotide
  Target: LAMA2; (-) strand; PAM type: YTN; PAM sequence: CTC
cagcaaactccaacagacct

SEQ ID NO: 246514 - DNA, 20 bp, Artificial Sequence
  Description of Artificial Sequence: Synthetic oligonucleotide
  Target: LAMA2; (-) strand; PAM type: YTN; PAM sequence: CTG
gagtggacctccagcaaact

SEQ ID NO: 246515 - DNA, 20 bp, Artificial Sequence
  Description of Artificial Sequence: Synthetic oligonucleotide
  Target: LAMA2; (-) strand; PAM type: YTN; PAM sequence: CTG
atacccaggcaaacagggtc

SEQ ID NO: 246516 - DNA, 20 bp, Artificial Sequence
  Description of Artificial Sequence: Synthetic oligonucleotide
  Target: LAMA2; (-) strand; PAM type: YTN; PAM sequence: CTG
ctgatacccaggcaaacagg

SEQ ID NO: 246517 - DNA, 20 bp, Artificial Sequence
  Description of Artificial Sequence: Synthetic oligonucleotide
  Target: LAMA2; (-) strand; PAM type: YTN; PAM sequence: CTC
cgctgctgatacccaggcaa

SEQ ID NO: 246518 - DNA, 20 bp, Artificial Sequence
  Description of Artificial Sequence: Synthetic oligonucleotide
  Target: LAMA2; (-) strand; PAM type: YTN; PAM sequence: CTG
cagcctccgctgctgatacc

SEQ ID NO: 246519 - DNA, 20 bp, Artificial Sequence
  Description of Artificial Sequence: Synthetic oligonucleotide
  Target: LAMA2; (-) strand; PAM type: YTN; PAM sequence: TTC
tgcagcctccgctgctgata

SEQ ID NO: 246520 - DNA, 20 bp, Artificial Sequence
  Description of Artificial Sequence: Synthetic oligonucleotide
  Target: LAMA2; (-) strand; PAM type: YTN; PAM sequence: CTG
ttctgcagcctccgctgctg

SEQ ID NO: 246521 - DNA, 20 bp, Artificial Sequence
  Description of Artificial Sequence: Synthetic oligonucleotide
  Target: LAMA2; (-) strand; PAM type: YTN; PAM sequence: CTG
ctgttctgcagcctccgctg

SEQ ID NO: 246522 - DNA, 20 bp, Artificial Sequence
  Description of Artificial Sequence: Synthetic oligonucleotide
  Target: LAMA2; (-) strand; PAM type: YTN; PAM sequence: TTC
agcaatatctgctgttctgc

SEQ ID NO: 246523 - DNA, 20 bp, Artificial Sequence
  Description of Artificial Sequence: Synthetic oligonucleotide
  Target: LAMA2; (-) strand; PAM type: YTN; PAM sequence: CTG
ttcagcaatatctgctgttc

SEQ ID NO: 246524 - DNA, 20 bp, Artificial Sequence
  Description of Artificial Sequence: Synthetic oligonucleotide
  Target: LAMA2; (-) strand; PAM type: YTN; PAM sequence: TTG
ctgttcagcaatatctgctg

SEQ ID NO: 246525 - DNA, 20 bp, Artificial Sequence
  Description of Artificial Sequence: Synthetic oligonucleotide
  Target: LAMA2; (-) strand; PAM type: YTN; PAM sequence: TTT
gctgttcagcaatatctgct

SEQ ID NO: 246526 - DNA, 20 bp, Artificial Sequence
  Description of Artificial Sequence: Synthetic oligonucleotide
  Target: LAMA2; (-) strand; PAM type: YTN; PAM sequence: TTC
cagaggaacgatcaggcggc

SEQ ID NO: 246527 - DNA, 20 bp, Artificial Sequence
  Description of Artificial Sequence: Synthetic oligonucleotide
  Target: LAMA2; (-) strand; PAM type: YTN; PAM sequence: CTT
ccagaggaacgatcaggcgg

SEQ ID NO: 246528 - DNA, 20 bp, Artificial Sequence
  Description of Artificial Sequence: Synthetic oligonucleotide
  Target: LAMA2; (-) strand; PAM type: YTN; PAM sequence: CTG
agacgaagcttccagaggaa

SEQ ID NO: 246529 - DNA, 20 bp, Artificial Sequence
  Description of Artificial Sequence: Synthetic oligonucleotide
  Target: LAMA2; (-) strand; PAM type: YTN; PAM sequence: CTC
tgagacgaagcttccagagg

SEQ ID NO: 246530 - DNA, 20 bp, Artificial Sequence
  Description of Artificial Sequence: Synthetic oligonucleotide
  Target: LAMA2; (-) strand; PAM type: YTN; PAM sequence: CTG
acatcccacacggccgagta

SEQ ID NO: 246531 - DNA, 20 bp, Artificial Sequence
  Description of Artificial Sequence: Synthetic oligonucleotide
  Target: LAMA2; (-) strand; PAM type: YTN; PAM sequence: CTG
tgaggcaccacccagtaggg

SEQ ID NO: 246532 - DNA, 20 bp, Artificial Sequence
  Description of Artificial Sequence: Synthetic oligonucleotide
  Target: LAMA2; (-) strand; PAM type: YTN; PAM sequence: CTA
actgtgaggcaccacccagt

SEQ ID NO: 246533 - DNA, 20 bp, Artificial Sequence
  Description of Artificial Sequence: Synthetic oligonucleotide
  Target: LAMA2; (-) strand; PAM type: YTN; PAM sequence: CTG
aatagcctaactgtgaggca

SEQ ID NO: 246534 - DNA, 20 bp, Artificial Sequence
  Description of Artificial Sequence: Synthetic oligonucleotide
  Target: LAMA2; (-) strand; PAM type: YTN; PAM sequence: CTG
agccctgaatagcctaactg

SEQ ID NO: 246535 - DNA, 20 bp, Artificial Sequence
  Description of Artificial Sequence: Synthetic oligonucleotide
  Target: LAMA2; (-) strand; PAM type: YTN; PAM sequence: CTC
aagtggatccctgagccctg

SEQ ID NO: 246536 - DNA, 20 bp, Artificial Sequence
  Description of Artificial Sequence: Synthetic oligonucleotide
  Target: LAMA2; (-) strand; PAM type: YTN; PAM sequence: CTC
ctcaagtggatccctgagcc

SEQ ID NO: 246537 - DNA, 20 bp, Artificial Sequence
  Description of Artificial Sequence: Synthetic oligonucleotide
  Target: LAMA2; (-) strand; PAM type: YTN; PAM sequence: CTG
cctcctcaagtggatccctg

SEQ ID NO: 246538 - DNA, 20 bp, Artificial Sequence
  Description of Artificial Sequence: Synthetic oligonucleotide
  Target: LAMA2; (-) strand; PAM type: YTN; PAM sequence: CTG
agaatgaacagactgcctcc

SEQ ID NO: 246539 - DNA, 20 bp, Artificial Sequence
  Description of Artificial Sequence: Synthetic oligonucleotide
  Target: LAMA2; (-) strand; PAM type: YTN; PAM sequence: TTG
agatctgagaatgaacagac

SEQ ID NO: 246540 - DNA, 20 bp, Artificial Sequence
  Description of Artificial Sequence: Synthetic oligonucleotide
  Target: LAMA2; (-) strand; PAM type: YTN; PAM sequence: TTT
gagatctgagaatgaacaga

SEQ ID NO: 246541 - DNA, 20 bp, Artificial Sequence
  Description of Artificial Sequence: Synthetic oligonucleotide
  Target: LAMA2; (-) strand; PAM type: YTN; PAM sequence: CTC
ccagcatggagtttgagatc

SEQ ID NO: 246542 - DNA, 20 bp, Artificial Sequence
  Description of Artificial Sequence: Synthetic oligonucleotide
  Target: LAMA2; (-) strand; PAM type: YTN; PAM sequence: TTC
tcccagcatggagtttgaga

SEQ ID NO: 246543 - DNA, 20 bp, Artificial Sequence
  Description of Artificial Sequence: Synthetic oligonucleotide
  Target: LAMA2; (-) strand; PAM type: YTN; PAM sequence: TTG
aagagagtagtggttctccc

SEQ ID NO: 246544 - DNA, 20 bp, Artificial Sequence
  Description of Artificial Sequence: Synthetic oligonucleotide
  Target: LAMA2; (-) strand; PAM type: YTN; PAM sequence: TTT
gaagagagtagtggttctcc

SEQ ID NO: 246545 - DNA, 20 bp, Artificial Sequence
  Description of Artificial Sequence: Synthetic oligonucleotide
  Target: LAMA2; (-) strand; PAM type: YTN; PAM sequence: CTT
tgaagagagtagtggttctc

SEQ ID NO: 246546 - DNA, 20 bp, Artificial Sequence
  Description of Artificial Sequence: Synthetic oligonucleotide
  Target: LAMA2; (-) strand; PAM type: YTN; PAM sequence: CTG
acagctttgaagagagtagt

SEQ ID NO: 246547 - DNA, 20 bp, Artificial Sequence
  Description of Artificial Sequence: Synthetic oligonucleotide
  Target: LAMA2; (-) strand; PAM type: YTN; PAM sequence: CTG
tctgacagctttgaagagag

SEQ ID NO: 246548 - DNA, 20 bp, Artificial Sequence
  Description of Artificial Sequence: Synthetic oligonucleotide
  Target: LAMA2; (-) strand; PAM type: YTN; PAM sequence: TTA
aatgtccctgtctgacagct

SEQ ID NO: 246549 - DNA, 20 bp, Artificial Sequence
  Description of Artificial Sequence: Synthetic oligonucleotide
  Target: LAMA2; (-) strand; PAM type: YTN; PAM sequence: CTT
aaatgtccctgtctgacagc

SEQ ID NO: 246550 - DNA, 20 bp, Artificial Sequence
  Description of Artificial Sequence: Synthetic oligonucleotide
  Target: LAMA2; (-) strand; PAM type: YTN; PAM sequence: CTG
cagacttaaatgtccctgtc

SEQ ID NO: 246551 - DNA, 20 bp, Artificial Sequence
  Description of Artificial Sequence: Synthetic oligonucleotide
  Target: LAMA2; (-) strand; PAM type: YTN; PAM sequence: CTC
tgcagacttaaatgtccctg

SEQ ID NO: 246552 - DNA, 20 bp, Artificial Sequence
  Description of Artificial Sequence: Synthetic oligonucleotide
  Target: LAMA2; (-) strand; PAM type: YTN; PAM sequence: CTG
ggagtaggacatagccgaac

SEQ ID NO: 246553 - DNA, 20 bp, Artificial Sequence
  Description of Artificial Sequence: Synthetic oligonucleotide
  Target: LAMA2; (-) strand; PAM type: YTN; PAM sequence: CTC
tgggagtaggacatagccga

SEQ ID NO: 246554 - DNA, 20 bp, Artificial Sequence
  Description of Artificial Sequence: Synthetic oligonucleotide
  Target: LAMA2; (-) strand; PAM type: YTN; PAM sequence: CTC
cacctctgggagtaggacat

SEQ ID NO: 246555 - DNA, 20 bp, Artificial Sequence
  Description of Artificial Sequence: Synthetic oligonucleotide
  Target: LAMA2; (-) strand; PAM type: YTN; PAM sequence: CTG
tagactccacctctgggagt

SEQ ID NO: 246556 - DNA, 20 bp, Artificial Sequence
  Description of Artificial Sequence: Synthetic oligonucleotide
  Target: LAMA2; (-) strand; PAM type: YTN; PAM sequence: CTC
tgtagactccacctctggga

SEQ ID NO: 246557 - DNA, 20 bp, Artificial Sequence
  Description of Artificial Sequence: Synthetic oligonucleotide
  Target: LAMA2; (-) strand; PAM type: YTN; PAM sequence: CTG
cctctgtagactccacctct

SEQ ID NO: 246558 - DNA, 20 bp, Artificial Sequence
  Description of Artificial Sequence: Synthetic oligonucleotide
  Target: LAMA2; (-) strand; PAM type: YTN; PAM sequence: CTG
cctgcctctgtagactccac

SEQ ID NO: 246559 - DNA, 20 bp, Artificial Sequence
  Description of Artificial Sequence: Synthetic oligonucleotide
  Target: LAMA2; (-) strand; PAM type: YTN; PAM sequence: CTC
aaggatgcctgcctgcctct

SEQ ID NO: 246560 - DNA, 20 bp, Artificial Sequence
  Description of Artificial Sequence: Synthetic oligonucleotide
  Target: LAMA2; (-) strand; PAM type: YTN; PAM sequence: CTG
cagctcaaggatgcctgcct

SEQ ID NO: 246561 - DNA, 20 bp, Artificial Sequence
  Description of Artificial Sequence: Synthetic oligonucleotide
  Target: LAMA2; (-) strand; PAM type: YTN; PAM sequence: CTG
ggtgaagcccactgcagctc

SEQ ID NO: 246562 - DNA, 20 bp, Artificial Sequence
  Description of Artificial Sequence: Synthetic oligonucleotide
  Target: LAMA2; (-) strand; PAM type: YTN; PAM sequence: TTG
aactgggtgaagcccactgc

SEQ ID NO: 246563 - DNA, 20 bp, Artificial Sequence
  Description of Artificial Sequence: Synthetic oligonucleotide
  Target: LAMA2; (-) strand; PAM type: YTN; PAM sequence: CTT
gaactgggtgaagcccactg

SEQ ID NO: 246564 - DNA, 20 bp, Artificial Sequence
  Description of Artificial Sequence: Synthetic oligonucleotide
  Target: LAMA2; (-) strand; PAM type: YTN; PAM sequence: CTG
ggaagcttgaactgggtgaa

SEQ ID NO: 246565 - DNA, 20 bp, Artificial Sequence
  Description of Artificial Sequence: Synthetic oligonucleotide
  Target: LAMA2; (-) strand; PAM type: YTN; PAM sequence: CTG
tggctgggaagcttgaactg

SEQ ID NO: 246566 - DNA, 20 bp, Artificial Sequence
  Description of Artificial Sequence: Synthetic oligonucleotide
  Target: LAMA2; (-) strand; PAM type: YTN; PAM sequence: TTG
agtaggcaaacaaactgtgg

SEQ ID NO: 246567 - DNA, 20 bp, Artificial Sequence
  Description of Artificial Sequence: Synthetic oligonucleotide
  Target: LAMA2; (-) strand; PAM type: YTN; PAM sequence: CTT
gagtaggcaaacaaactgtg

SEQ ID NO: 246568 - DNA, 20 bp, Artificial Sequence
  Description of Artificial Sequence: Synthetic oligonucleotide
  Target: LAMA2; (-) strand; PAM type: YTN; PAM sequence: TTG
ccgaggcttgagtaggcaaa

SEQ ID NO: 246569 - DNA, 20 bp, Artificial Sequence
  Description of Artificial Sequence: Synthetic oligonucleotide
  Target: LAMA2; (-) strand; PAM type: YTN; PAM sequence: TTG
ggagaggggcgcccgccatt

SEQ ID NO: 246570 - DNA, 20 bp, Artificial Sequence
  Description of Artificial Sequence: Synthetic oligonucleotide
  Target: LAMA2; (-) strand; PAM type: YTN; PAM sequence: CTG
caaggtggcagcaaggttgg

SEQ ID NO: 246571 - DNA, 20 bp, Artificial Sequence
  Description of Artificial Sequence: Synthetic oligonucleotide
  Target: LAMA2; (-) strand; PAM type: YTN; PAM sequence: CTG
aactgcaaggtggcagcaag

SEQ ID NO: 246572 - DNA, 20 bp, Artificial Sequence
  Description of Artificial Sequence: Synthetic oligonucleotide
  Target: LAMA2; (-) strand; PAM type: YTN; PAM sequence: CTG
agactgaactgcaaggtggc

SEQ ID NO: 246573 - DNA, 20 bp, Artificial Sequence
  Description of Artificial Sequence: Synthetic oligonucleotide
  Target: LAMA2; (-) strand; PAM type: YTN; PAM sequence: CTA
gcccagcagtctgagactga

SEQ ID NO: 246574 - DNA, 20 bp, Artificial Sequence
  Description of Artificial Sequence: Synthetic oligonucleotide
  Target: LAMA2; (-) strand; PAM type: YTN; PAM sequence: TTG
ctagcccagcagtctgagac

SEQ ID NO: 246575 - DNA, 20 bp, Artificial Sequence
  Description of Artificial Sequence: Synthetic oligonucleotide
  Target: LAMA2; (-) strand; PAM type: YTN; PAM sequence: TTC
attgctagcccagcagtctg

SEQ ID NO: 246576 - DNA, 20 bp, Artificial Sequence
  Description of Artificial Sequence: Synthetic oligonucleotide
  Target: LAMA2; (-) strand; PAM type: YTN; PAM sequence: TTG
ttcattgctagcccagcagt

SEQ ID NO: 246577 - DNA, 20 bp, Artificial Sequence
  Description of Artificial Sequence: Synthetic oligonucleotide
  Target: LAMA2; (-) strand; PAM type: YTN; PAM sequence: CTT
gttcattgctagcccagcag

SEQ ID NO: 246578 - DNA, 20 bp, Artificial Sequence
  Description of Artificial Sequence: Synthetic oligonucleotide
  Target: LAMA2; (-) strand; PAM type: YTN; PAM sequence: CTA
cggagccttgttcattgcta

SEQ ID NO: 246579 - DNA, 20 bp, Artificial Sequence
  Description of Artificial Sequence: Synthetic oligonucleotide
  Target: LAMA2; (-) strand; PAM type: YTN; PAM sequence: CTC
ggagggtcccatgcctacgg

SEQ ID NO: 246580 - DNA, 20 bp, Artificial Sequence
  Description of Artificial Sequence: Synthetic oligonucleotide
  Target: LAMA2; (-) strand; PAM type: YTN; PAM sequence: CTG
gctcggagggtcccatgcct

SEQ ID NO: 246581 - DNA, 20 bp, Artificial Sequence
  Description of Artificial Sequence: Synthetic oligonucleotide
  Target: LAMA2; (-) strand; PAM type: YTN; PAM sequence: TTA
tatcccacacctggctcgga

SEQ ID NO: 246582 - DNA, 20 bp, Artificial Sequence
  Description of Artificial Sequence: Synthetic oligonucleotide
  Target: LAMA2; (-) strand; PAM type: YTN; PAM sequence: TTA
gcaaacggcacaccaggaga

SEQ ID NO: 246583 - DNA, 20 bp, Artificial Sequence
  Description of Artificial Sequence: Synthetic oligonucleotide
  Target: LAMA2; (-) strand; PAM type: YTN; PAM sequence: CTT
agcaaacggcacaccaggag

SEQ ID NO: 246584 - DNA, 20 bp, Artificial Sequence
  Description of Artificial Sequence: Synthetic oligonucleotide
  Target: LAMA2; (-) strand; PAM type: YTN; PAM sequence: TTC
caatggtcttagcaaacggc

SEQ ID NO: 246585 - DNA, 20 bp, Artificial Sequence
  Description of Artificial Sequence: Synthetic oligonucleotide
  Target: LAMA2; (-) strand; PAM type: YTN; PAM sequence: TTT
ccaatggtcttagcaaacgg

SEQ ID NO: 246586 - DNA, 20 bp, Artificial Sequence
  Description of Artificial Sequence: Synthetic oligonucleotide
  Target: LAMA2; (-) strand; PAM type: YTN; PAM sequence: TTT
tccaatggtcttagcaaacg

SEQ ID NO: 246587 - DNA, 20 bp, Artificial Sequence
  Description of Artificial Sequence: Synthetic oligonucleotide
  Target: LAMA2; (-) strand; PAM type: YTN; PAM sequence: CTT
ttccaatggtcttagcaaac

SEQ ID NO: 246588 - DNA, 20 bp, Artificial Sequence
  Description of Artificial Sequence: Synthetic oligonucleotide
  Target: LAMA2; (-) strand; PAM type: YTN; PAM sequence: CTA
ataccacgcttttccaatgg

SEQ ID NO: 246589 - DNA, 20 bp, Artificial Sequence
  Description of Artificial Sequence: Synthetic oligonucleotide
  Target: LAMA2; (-) strand; PAM type: YTN; PAM sequence: CTC
ccaccctaataccacgcttt

SEQ ID NO: 246590 - DNA, 20 bp, Artificial Sequence
  Description of Artificial Sequence: Synthetic oligonucleotide
  Target: LAMA2; (-) strand; PAM type: YTN; PAM sequence: CTG
gaaaatcgggtcactcccac

SEQ ID NO: 246591 - DNA, 20 bp, Artificial Sequence
  Description of Artificial Sequence: Synthetic oligonucleotide
  Target: LAMA2; (-) strand; PAM type: YTN; PAM sequence: CTG
tgacagacggcacctggaaa

SEQ ID NO: 246592 - DNA, 20 bp, Artificial Sequence
  Description of Artificial Sequence: Synthetic oligonucleotide
  Target: LAMA2; (-) strand; PAM type: YTN; PAM sequence: CTA
gccaagggaagctgtgacag

SEQ ID NO: 246593 - DNA, 20 bp, Artificial Sequence
  Description of Artificial Sequence: Synthetic oligonucleotide
  Target: LAMA2; (-) strand; PAM type: YTN; PAM sequence: TTC
ctagccaagggaagctgtga

SEQ ID NO: 246594 - DNA, 20 bp, Artificial Sequence
  Description of Artificial Sequence: Synthetic oligonucleotide
  Target: LAMA2; (-) strand; PAM type: YTN; PAM sequence: TTT
cctagccaagggaagctgtg

SEQ ID NO: 246595 - DNA, 20 bp, Artificial Sequence
  Description of Artificial Sequence: Synthetic oligonucleotide
  Target: LAMA2; (-) strand; PAM type: YTN; PAM sequence: CTT
tcctagccaagggaagctgt

SEQ ID NO: 246596 - DNA, 20 bp, Artificial Sequence
  Description of Artificial Sequence: Synthetic oligonucleotide
  Target: LAMA2; (-) strand; PAM type: YTN; PAM sequence: TTC
cctttcctagccaagggaag

SEQ ID NO: 246597 - DNA, 20 bp, Artificial Sequence
  Description of Artificial Sequence: Synthetic oligonucleotide
  Target: LAMA2; (-) strand; PAM type: YTN; PAM sequence: CTC
acccgggaagcacaaggggt

SEQ ID NO: 246598 - DNA, 20 bp, Artificial Sequence
  Description of Artificial Sequence: Synthetic oligonucleotide
  Target: LAMA2; (-) strand; PAM type: YTN; PAM sequence: TTG
cagcccatcaagtgtcagcc

SEQ ID NO: 246599 - DNA, 20 bp, Artificial Sequence
  Description of Artificial Sequence: Synthetic oligonucleotide
  Target: LAMA2; (-) strand; PAM type: YTN; PAM sequence: CTG
acagtgggtgcaggacagtg

SEQ ID NO: 246600 - DNA, 20 bp, Artificial Sequence
  Description of Artificial Sequence: Synthetic oligonucleotide
  Target: LAMA2; (-) strand; PAM type: YTN; PAM sequence: TTG
tctgacagtgggtgcaggac

SEQ ID NO: 246601 - DNA, 20 bp, Artificial Sequence
  Description of Artificial Sequence: Synthetic oligonucleotide
  Target: LAMA2; (-) strand; PAM type: YTN; PAM sequence: CTT
gtctgacagtgggtgcagga

SEQ ID NO: 246602 - DNA, 20 bp, Artificial Sequence
  Description of Artificial Sequence: Synthetic oligonucleotide
  Target: LAMA2; (-) strand; PAM type: YTN; PAM sequence: CTG
gggcttgtctgacagtgggt

SEQ ID NO: 246603 - DNA, 20 bp, Artificial Sequence
  Description of Artificial Sequence: Synthetic oligonucleotide
  Target: LAMA2; (-) strand; PAM type: YTN; PAM sequence: CTC
actggggcttgtctgacagt

SEQ ID NO: 246604 - DNA, 20 bp, Artificial Sequence
  Description of Artificial Sequence: Synthetic oligonucleotide
  Target: LAMA2; (-) strand; PAM type: YTN; PAM sequence: TTC
acctcactggggcttgtctg

SEQ ID NO: 246605 - DNA, 20 bp, Artificial Sequence
  Description of Artificial Sequence: Synthetic oligonucleotide
  Target: LAMA2; (-) strand; PAM type: YTN; PAM sequence: TTG
aggtaccaggttcacctcac

SEQ ID NO: 246606 - DNA, 20 bp, Artificial Sequence
  Description of Artificial Sequence: Synthetic oligonucleotide
  Target: LAMA2; (-) strand; PAM type: YTN; PAM sequence: TTC
caattgaggtaccaggttca

SEQ ID NO: 246607 - DNA, 20 bp, Artificial Sequence
  Description of Artificial Sequence: Synthetic oligonucleotide
  Target: LAMA2; (-) strand; PAM type: YTN; PAM sequence: TTT
ccaattgaggtaccaggttc

SEQ ID NO: 246608 - DNA, 20 bp, Artificial Sequence
  Description of Artificial Sequence: Synthetic oligonucleotide
  Target: LAMA2; (-) strand; PAM type: YTN; PAM sequence: TTC
cacatttccaattgaggtac

SEQ ID NO: 246609 - DNA, 20 bp, Artificial Sequence
  Description of Artificial Sequence: Synthetic oligonucleotide
  Target: LAMA2; (-) strand; PAM type: YTN; PAM sequence: CTT
ccacatttccaattgaggta

SEQ ID NO: 246610 - DNA, 20 bp, Artificial Sequence
  Description of Artificial Sequence: Synthetic oligonucleotide
  Target: LAMA2; (-) strand; PAM type: YTN; PAM sequence: CTC
ccagcatgagcgacacagaa

SEQ ID NO: 246611 - DNA, 20 bp, Artificial Sequence
  Description of Artificial Sequence: Synthetic oligonucleotide
  Target: LAMA2; (-) strand; PAM type: YTN; PAM sequence: CTA
cagctcccagcatgagcgac

SEQ ID NO: 246612 - DNA, 20 bp, Artificial Sequence
  Description of Artificial Sequence: Synthetic oligonucleotide
  Target: LAMA2; (-) strand; PAM type: YTN; PAM sequence: CTC
cagtctacagctcccagcat

SEQ ID NO: 246613 - DNA, 20 bp, Artificial Sequence
  Description of Artificial Sequence: Synthetic oligonucleotide
  Target: LAMA2; (-) strand; PAM type: YTN; PAM sequence: TTG
gaataggaacagctccagtc

SEQ ID NO: 246614 - DNA, 20 bp, Artificial Sequence
  Description of Artificial Sequence: Synthetic oligonucleotide
  Target: LAMA2; (-) strand; PAM type: YTN; PAM sequence: TTA
gaaaccagtataattggaat

SEQ ID NO: 246615 - DNA, 20 bp, Artificial Sequence
  Description of Artificial Sequence: Synthetic oligonucleotide
  Target: LAMA2; (-) strand; PAM type: YTN; PAM sequence: TTT
agaaaccagtataattggaa

SEQ ID NO: 246616 - DNA, 20 bp, Artificial Sequence
  Description of Artificial Sequence: Synthetic oligonucleotide
  Target: LAMA2; (-) strand; PAM type: YTN; PAM sequence: TTT
tagaaaccagtataattgga

SEQ ID NO: 246617 - DNA, 20 bp, Artificial Sequence
  Description of Artificial Sequence: Synthetic oligonucleotide
  Target: LAMA2; (-) strand; PAM type: YTN; PAM sequence: TTT
ttagaaaccagtataattgg

SEQ ID NO: 246618 - DNA, 20 bp, Artificial Sequence
  Description of Artificial Sequence: Synthetic oligonucleotide
  Target: LAMA2; (-) strand; PAM type: YTN; PAM sequence: TTT
tttagaaaccagtataattg

SEQ ID NO: 246619 - DNA, 20 bp, Artificial Sequence
  Description of Artificial Sequence: Synthetic oligonucleotide
  Target: LAMA2; (-) strand; PAM type: YTN; PAM sequence: CTT
ttttagaaaccagtataatt

SEQ ID NO: 246620 - DNA, 20 bp, Artificial Sequence
  Description of Artificial Sequence: Synthetic oligonucleotide
  Target: LAMA2; (-) strand; PAM type: YTN; PAM sequence: TTA
caatcttttttagaaaccag

SEQ ID NO: 246621 - DNA, 20 bp, Artificial Sequence
  Description of Artificial Sequence: Synthetic oligonucleotide
  Target: LAMA2; (-) strand; PAM type: YTN; PAM sequence: CTC
aacaatatattacaatcttt

SEQ ID NO: 246622 - DNA, 20 bp, Artificial Sequence
  Description of Artificial Sequence: Synthetic oligonucleotide
  Target: LAMA2; (-) strand; PAM type: YTN; PAM sequence: CTC
tcaacaatatattacaatct

SEQ ID NO: 246623 - DNA, 20 bp, Artificial Sequence
  Description of Artificial Sequence: Synthetic oligonucleotide
  Target: LAMA2; (-) strand; PAM type: YTN; PAM sequence: TTC
actctcaacaatatattaca

SEQ ID NO: 246624 - DNA, 20 bp, Artificial Sequence
  Description of Artificial Sequence: Synthetic oligonucleotide
  Target: LAMA2; (-) strand; PAM type: YTN; PAM sequence: CTT
cactctcaacaatatattac

SEQ ID NO: 246625 - DNA, 20 bp, Artificial Sequence
  Description of Artificial Sequence: Synthetic oligonucleotide
  Target: LAMA2; (-) strand; PAM type: YTN; PAM sequence: CTC
ccttcactctcaacaatata

SEQ ID NO: 246626 - DNA, 20 bp, Artificial Sequence
  Description of Artificial Sequence: Synthetic oligonucleotide
  Target: LAMA2; (-) strand; PAM type: YTN; PAM sequence: TTG
atataaaactcccttcactc

SEQ ID NO: 246627 - DNA, 20 bp, Artificial Sequence
  Description of Artificial Sequence: Synthetic oligonucleotide
  Target: LAMA2; (-) strand; PAM type: YTN; PAM sequence: TTA
ttgatataaaactcccttca

SEQ ID NO: 246628 - DNA, 20 bp, Artificial Sequence
  Description of Artificial Sequence: Synthetic oligonucleotide
  Target: LAMA2; (-) strand; PAM type: YTN; PAM sequence: TTA
attattgatataaaactccc

SEQ ID NO: 246629 - DNA, 20 bp, Artificial Sequence
  Description of Artificial Sequence: Synthetic oligonucleotide
  Target: LAMA2; (-) strand; PAM type: YTN; PAM sequence: TTT
aattattgatataaaactcc

SEQ ID NO: 246630 - DNA, 20 bp, Artificial Sequence
  Description of Artificial Sequence: Synthetic oligonucleotide
  Target: LAMA2; (-) strand; PAM type: YTN; PAM sequence: TTA
aaataatttaattattgata

SEQ ID NO: 246631 - DNA, 20 bp, Artificial Sequence
  Description of Artificial Sequence: Synthetic oligonucleotide
  Target: LAMA2; (-) strand; PAM type: YTN; PAM sequence: TTT
aaaataatttaattattgat

SEQ ID NO: 246632 - DNA, 20 bp, Artificial Sequence
  Description of Artificial Sequence: Synthetic oligonucleotide
  Target: LAMA2; (-) strand; PAM type: YTN; PAM sequence: TTT
taaaataatttaattattga

SEQ ID NO: 246633 - DNA, 20 bp, Artificial Sequence
  Description of Artificial Sequence: Synthetic oligonucleotide
  Target: LAMA2; (-) strand; PAM type: YTN; PAM sequence: TTG
aagtatgagaaatgaaataa

SEQ ID NO: 246634 - DNA, 20 bp, Artificial Sequence
  Description of Artificial Sequence: Synthetic oligonucleotide
  Target: LAMA2; (-) strand; PAM type: YTN; PAM sequence: TTT
gaagtatgagaaatgaaata

SEQ ID NO: 246635 - DNA, 20 bp, Artificial Sequence
  Description of Artificial Sequence: Synthetic oligonucleotide
  Target: LAMA2; (-) strand; PAM type: YTN; PAM sequence: TTA
aaatgtaaataagtaatttg

SEQ ID NO: 246636 - DNA, 20 bp, Artificial Sequence
  Description of Artificial Sequence: Synthetic oligonucleotide
  Target: LAMA2; (-) strand; PAM type: YTN; PAM sequence: TTA
ttaaaatgtaaataagtaat

SEQ ID NO: 246637 - DNA, 20 bp, Artificial Sequence
  Description of Artificial Sequence: Synthetic oligonucleotide
  Target: LAMA2; (-) strand; PAM type: YTN; PAM sequence: CTA
atatattattaaaatgtaaa

SEQ ID NO: 246638 - DNA, 20 bp, Artificial Sequence
  Description of Artificial Sequence: Synthetic oligonucleotide
  Target: LAMA2; (-) strand; PAM type: YTN; PAM sequence: TTA
tgatactaatatattattaa

SEQ ID NO: 246639 - DNA, 20 bp, Artificial Sequence
  Description of Artificial Sequence: Synthetic oligonucleotide
  Target: LAMA2; (-) strand; PAM type: YTN; PAM sequence: TTA
tacacatgtgttatgatact

SEQ ID NO: 246640 - DNA, 20 bp, Artificial Sequence
  Description of Artificial Sequence: Synthetic oligonucleotide
  Target: LAMA2; (-) strand; PAM type: YTN; PAM sequence: CTG
tattatacacatgtgttatg

SEQ ID NO: 246641 - DNA, 20 bp, Artificial Sequence
  Description of Artificial Sequence: Synthetic oligonucleotide
  Target: LAMA2; (-) strand; PAM type: YTN; PAM sequence: CTA
gctgtattatacacatgtgt

SEQ ID NO: 246642 - DNA, 20 bp, Artificial Sequence
  Description of Artificial Sequence: Synthetic oligonucleotide
  Target: LAMA2; (-) strand; PAM type: YTN; PAM sequence: TTC
tagctgtattatacacatgt

SEQ ID NO: 246643 - DNA, 20 bp, Artificial Sequence
  Description of Artificial Sequence: Synthetic oligonucleotide
  Target: LAMA2; (-) strand; PAM type: YTN; PAM sequence: TTT
ctagctgtattatacacatg

SEQ ID NO: 246644 - DNA, 20 bp, Artificial Sequence
  Description of Artificial Sequence: Synthetic oligonucleotide
  Target: LAMA2; (-) strand; PAM type: YTN; PAM sequence: CTT
tctagctgtattatacacat

SEQ ID NO: 246645 - DNA, 20 bp, Artificial Sequence
  Description of Artificial Sequence: Synthetic oligonucleotide
  Target: LAMA2; (-) strand; PAM type: YTN; PAM sequence: CTC
tttctagctgtattatacac

SEQ ID NO: 246646 - DNA, 20 bp, Artificial Sequence
  Description of Artificial Sequence: Synthetic oligonucleotide
  Target: LAMA2; (-) strand; PAM type: YTN; PAM sequence: CTC
tctttctagctgtattatac

SEQ ID NO: 246647 - DNA, 20 bp, Artificial Sequence
  Description of Artificial Sequence: Synthetic oligonucleotide
  Target: LAMA2; (-) strand; PAM type: YTN; PAM sequence: CTC
tctctttctagctgtattat

SEQ ID NO: 246648 - DNA, 20 bp, Artificial Sequence
  Description of Artificial Sequence: Synthetic oligonucleotide
  Target: LAMA2; (-) strand; PAM type: YTN; PAM sequence: TTC
agggtatatatgctctctct

SEQ ID NO: 246649 - DNA, 20 bp, Artificial Sequence
  Description of Artificial Sequence: Synthetic oligonucleotide
  Target: LAMA2; (-) strand; PAM type: YTN; PAM sequence: CTT
cagggtatatatgctctctc

SEQ ID NO: 246650 - DNA, 20 bp, Artificial Sequence
  Description of Artificial Sequence: Synthetic oligonucleotide
  Target: LAMA2; (-) strand; PAM type: YTN; PAM sequence: TTA
aaaatgccttcagggtatat

SEQ ID NO: 246651 - DNA, 20 bp, Artificial Sequence
  Description of Artificial Sequence: Synthetic oligonucleotide
  Target: LAMA2; (-) strand; PAM type: YTN; PAM sequence: TTA
taattaaaaatgccttcagg

SEQ ID NO: 246652 - DNA, 20 bp, Artificial Sequence
  Description of Artificial Sequence: Synthetic oligonucleotide
  Target: LAMA2; (-) strand; PAM type: YTN; PAM sequence: TTA
caatattataattaaaaatg

SEQ ID NO: 246653 - DNA, 20 bp, Artificial Sequence
  Description of Artificial Sequence: Synthetic oligonucleotide
  Target: LAMA2; (-) strand; PAM type: YTN; PAM sequence: TTT
acaatattataattaaaaat

SEQ ID NO: 246654 - DNA, 20 bp, Artificial Sequence
  Description of Artificial Sequence: Synthetic oligonucleotide
  Target: LAMA2; (-) strand; PAM type: YTN; PAM sequence: TTT
tacaatattataattaaaaa

SEQ ID NO: 246655 - DNA, 20 bp, Artificial Sequence
  Description of Artificial Sequence: Synthetic oligonucleotide
  Target: LAMA2; (-) strand; PAM type: YTN; PAM sequence: TTG
gttttacaatattataatta

SEQ ID NO: 246656 - DNA, 20 bp, Artificial Sequence
  Description of Artificial Sequence: Synthetic oligonucleotide
  Target: LAMA2; (-) strand; PAM type: YTN; PAM sequence: TTT
ggttttacaatattataatt

SEQ ID NO: 246657 - DNA, 20 bp, Artificial Sequence
  Description of Artificial Sequence: Synthetic oligonucleotide
  Target: LAMA2; (-) strand; PAM type: YTN; PAM sequence: TTA
gagtttggttttacaatatt

SEQ ID NO: 246658 - DNA, 20 bp, Artificial Sequence
  Description of Artificial Sequence: Synthetic oligonucleotide
  Target: LAMA2; (-) strand; PAM type: YTN; PAM sequence: TTT
agagtttggttttacaatat

SEQ ID NO: 246659 - DNA, 20 bp, Artificial Sequence
  Description of Artificial Sequence: Synthetic oligonucleotide
  Target: LAMA2; (-) strand; PAM type: YTN; PAM sequence: CTT
tagagtttggttttacaata

SEQ ID NO: 246660 - DNA, 20 bp, Artificial Sequence
  Description of Artificial Sequence: Synthetic oligonucleotide
  Target: LAMA2; (-) strand; PAM type: YTN; PAM sequence: CTA
gaacaggagtctttagagtt

SEQ ID NO: 246661 - DNA, 20 bp, Artificial Sequence
  Description of Artificial Sequence: Synthetic oligonucleotide
  Target: LAMA2; (-) strand; PAM type: YTN; PAM sequence: TTA
cctagaacaggagtctttag

SEQ ID NO: 246662 - DNA, 20 bp, Artificial Sequence
  Description of Artificial Sequence: Synthetic oligonucleotide
  Target: LAMA2; (-) strand; PAM type: YTN; PAM sequence: CTA
atcaattacctagaacagga

SEQ ID NO: 246663 - DNA, 20 bp, Artificial Sequence
  Description of Artificial Sequence: Synthetic oligonucleotide
  Target: LAMA2; (-) strand; PAM type: YTN; PAM sequence: CTG
gactaatcaattacctagaa

SEQ ID NO: 246664 - DNA, 20 bp, Artificial Sequence
  Description of Artificial Sequence: Synthetic oligonucleotide
  Target: LAMA2; (-) strand; PAM type: YTN; PAM sequence: TTA
ctggactaatcaattaccta

SEQ ID NO: 246665 - DNA, 20 bp, Artificial Sequence
  Description of Artificial Sequence: Synthetic oligonucleotide
  Target: LAMA2; (-) strand; PAM type: YTN; PAM sequence: TTT
actggactaatcaattacct

SEQ ID NO: 246666 - DNA, 20 bp, Artificial Sequence
  Description of Artificial Sequence: Synthetic oligonucleotide
  Target: LAMA2; (-) strand; PAM type: YTN; PAM sequence: CTA
catttactggactaatcaat

SEQ ID NO: 246667 - DNA, 20 bp, Artificial Sequence
  Description of Artificial Sequence: Synthetic oligonucleotide
  Target: LAMA2; (-) strand; PAM type: YTN; PAM sequence: TTA
tgcctacatttactggacta

SEQ ID NO: 246668 - DNA, 20 bp, Artificial Sequence
  Description of Artificial Sequence: Synthetic oligonucleotide
  Target: LAMA2; (-) strand; PAM type: YTN; PAM sequence: CTT
atgcctacatttactggact

SEQ ID NO: 246669 - DNA, 20 bp, Artificial Sequence
  Description of Artificial Sequence: Synthetic oligonucleotide
  Target: LAMA2; (-) strand; PAM type: YTN; PAM sequence: TTC
ttatgcctacatttactgga

SEQ ID NO: 246670 - DNA, 20 bp, Artificial Sequence
  Description of Artificial Sequence: Synthetic oligonucleotide
  Target: LAMA2; (-) strand; PAM type: YTN; PAM sequence: TTT
cttatgcctacatttactgg

SEQ ID NO: 246671 - DNA, 20 bp, Artificial Sequence
  Description of Artificial Sequence: Synthetic oligonucleotide
  Target: LAMA2; (-) strand; PAM type: YTN; PAM sequence: TTT
tcttatgcctacatttactg

SEQ ID NO: 246672 - DNA, 20 bp, Artificial Sequence
  Description of Artificial Sequence: Synthetic oligonucleotide
  Target: LAMA2; (-) strand; PAM type: YTN; PAM sequence: TTT
ttcttatgcctacatttact

SEQ ID NO: 246673 - DNA, 20 bp, Artificial Sequence
  Description of Artificial Sequence: Synthetic oligonucleotide
  Target: LAMA2; (-) strand; PAM type: YTN; PAM sequence: TTC
atacatttttcttatgccta

SEQ ID NO: 246674 - DNA, 20 bp, Artificial Sequence
  Description of Artificial Sequence: Synthetic oligonucleotide
  Target: LAMA2; (-) strand; PAM type: YTN; PAM sequence: TTT
catacatttttcttatgcct

SEQ ID NO: 246675 - DNA, 20 bp, Artificial Sequence
  Description of Artificial Sequence: Synthetic oligonucleotide
  Target: LAMA2; (-) strand; PAM type: YTN; PAM sequence: CTA
tttcatacatttttcttatg

SEQ ID NO: 246676 - DNA, 20 bp, Artificial Sequence
  Description of Artificial Sequence: Synthetic oligonucleotide
  Target: LAMA2; (-) strand; PAM type: YTN; PAM sequence: TTA
acgtcatctatttcatacat

SEQ ID NO: 246677 - DNA, 20 bp, Artificial Sequence
  Description of Artificial Sequence: Synthetic oligonucleotide
  Target: LAMA2; (-) strand; PAM type: YTN; PAM sequence: TTG
tgcatgaaagattaacgtca

SEQ ID NO: 246678 - DNA, 20 bp, Artificial Sequence
  Description of Artificial Sequence: Synthetic oligonucleotide
  Target: LAMA2; (-) strand; PAM type: YTN; PAM sequence: TTA
ttgtgcatgaaagattaacg

SEQ ID NO: 246679 - DNA, 20 bp, Artificial Sequence
  Description of Artificial Sequence: Synthetic oligonucleotide
  Target: LAMA2; (-) strand; PAM type: YTN; PAM sequence: CTG
gagaaaggtgttattgtgca

SEQ ID NO: 246680 - DNA, 20 bp, Artificial Sequence
  Description of Artificial Sequence: Synthetic oligonucleotide
  Target: LAMA2; (-) strand; PAM type: YTN; PAM sequence: TTA
gagccacagctggagaaagg

SEQ ID NO: 246681 - DNA, 20 bp, Artificial Sequence
  Description of Artificial Sequence: Synthetic oligonucleotide
  Target: LAMA2; (-) strand; PAM type: YTN; PAM sequence: CTG
agagcagtaaagaatccatc

SEQ ID NO: 246682 - DNA, 20 bp, Artificial Sequence
  Description of Artificial Sequence: Synthetic oligonucleotide
  Target: LAMA2; (-) strand; PAM type: YTN; PAM sequence: TTA
gctgagagcagtaaagaatc

SEQ ID NO: 246683 - DNA, 20 bp, Artificial Sequence
  Description of Artificial Sequence: Synthetic oligonucleotide
  Target: LAMA2; (-) strand; PAM type: YTN; PAM sequence: CTA
aaaccatataatggattagc

SEQ ID NO: 246684 - DNA, 20 bp, Artificial Sequence
  Description of Artificial Sequence: Synthetic oligonucleotide
  Target: LAMA2; (-) strand; PAM type: YTN; PAM sequence: CTG
gatgtctaaaaccatataat

SEQ ID NO: 246685 - DNA, 20 bp, Artificial Sequence
  Description of Artificial Sequence: Synthetic oligonucleotide
  Target: LAMA2; (-) strand; PAM type: YTN; PAM sequence: CTA
tcctggatgtctaaaaccat

SEQ ID NO: 246686 - DNA, 20 bp, Artificial Sequence
  Description of Artificial Sequence: Synthetic oligonucleotide
  Target: LAMA2; (-) strand; PAM type: YTN; PAM sequence: TTC
agtgtctatcctggatgtct

SEQ ID NO: 246687 - DNA, 20 bp, Artificial Sequence
  Description of Artificial Sequence: Synthetic oligonucleotide
  Target: LAMA2; (-) strand; PAM type: YTN; PAM sequence: TTT
cagtgtctatcctggatgtc

SEQ ID NO: 246688 - DNA, 20 bp, Artificial Sequence
  Description of Artificial Sequence: Synthetic oligonucleotide
  Target: LAMA2; (-) strand; PAM type: YTN; PAM sequence: CTT
tcagtgtctatcctggatgt

SEQ ID NO: 246689 - DNA, 20 bp, Artificial Sequence
  Description of Artificial Sequence: Synthetic oligonucleotide
  Target: LAMA2; (-) strand; PAM type: YTN; PAM sequence: TTC
ctttcagtgtctatcctgga

SEQ ID NO: 246690 - DNA, 20 bp, Artificial Sequence
  Description of Artificial Sequence: Synthetic oligonucleotide
  Target: LAMA2; (-) strand; PAM type: YTN; PAM sequence: TTA
ttcctttcagtgtctatcct

SEQ ID NO: 246691 - DNA, 20 bp, Artificial Sequence
  Description of Artificial Sequence: Synthetic oligonucleotide
  Target: LAMA2; (-) strand; PAM type: YTN; PAM sequence: TTG
taatagttattcctttcagt

SEQ ID NO: 246692 - DNA, 20 bp, Artificial Sequence
  Description of Artificial Sequence: Synthetic oligonucleotide
  Target: LAMA2; (-) strand; PAM type: YTN; PAM sequence: TTT
gtaatagttattcctttcag

SEQ ID NO: 246693 - DNA, 20 bp, Artificial Sequence
  Description of Artificial Sequence: Synthetic oligonucleotide
  Target: LAMA2; (-) strand; PAM type: YTN; PAM sequence: TTT
tgtaatagttattcctttca

SEQ ID NO: 246694 - DNA, 20 bp, Artificial Sequence
  Description of Artificial Sequence: Synthetic oligonucleotide
  Target: LAMA2; (-) strand; PAM type: YTN; PAM sequence: CTT
ttgtaatagttattcctttc

SEQ ID NO: 246695 - DNA, 20 bp, Artificial Sequence
  Description of Artificial Sequence: Synthetic oligonucleotide
  Target: LAMA2; (-) strand; PAM type: YTN; PAM sequence: TTA
cttttgtaatagttattcct

SEQ ID NO: 246696 - DNA, 20 bp, Artificial Sequence
  Description of Artificial Sequence: Synthetic oligonucleotide
  Target: LAMA2; (-) strand; PAM type: YTN; PAM sequence: TTA
aaattacttttgtaatagtt

SEQ ID NO: 246697 - DNA, 20 bp, Artificial Sequence
  Description of Artificial Sequence: Synthetic oligonucleotide
  Target: LAMA2; (-) strand; PAM type: YTN; PAM sequence: CTT
aaaattacttttgtaatagt

SEQ ID NO: 246698 - DNA, 20 bp, Artificial Sequence
  Description of Artificial Sequence: Synthetic oligonucleotide
  Target: LAMA2; (-) strand; PAM type: YTN; PAM sequence: CTC
ttaaaattacttttgtaata

SEQ ID NO: 246699 - DNA, 20 bp, Artificial Sequence
  Description of Artificial Sequence: Synthetic oligonucleotide
  Target: LAMA2; (-) strand; PAM type: YTN; PAM sequence: CTC
ctcttaaaattacttttgta

SEQ ID NO: 246700 - DNA, 20 bp, Artificial Sequence
  Description of Artificial Sequence: Synthetic oligonucleotide
  Target: LAMA2; (-) strand; PAM type: YTN; PAM sequence: TTC
aatacatacacacaatgaat

SEQ ID NO: 246701 - DNA, 20 bp, Artificial Sequence
  Description of Artificial Sequence: Synthetic oligonucleotide
  Target: LAMA2; (-) strand; PAM type: YTN; PAM sequence: TTG
aatacatacaatgaatacac

SEQ ID NO: 246702 - DNA, 20 bp, Artificial Sequence
  Description of Artificial Sequence: Synthetic oligonucleotide
  Target: LAMA2; (-) strand; PAM type: YTN; PAM sequence: TTG
aatattgaatacatacaatg

SEQ ID NO: 246703 - DNA, 20 bp, Artificial Sequence
  Description of Artificial Sequence: Synthetic oligonucleotide
  Target: LAMA2; (-) strand; PAM type: YTN; PAM sequence: CTG
gaatcaaaccaccaatcaaa

SEQ ID NO: 246704 - DNA, 20 bp, Artificial Sequence
  Description of Artificial Sequence: Synthetic oligonucleotide
  Target: LAMA2; (-) strand; PAM type: YTN; PAM sequence: TTA
atataactggaatcaaacca

SEQ ID NO: 246705 - DNA, 20 bp, Artificial Sequence
  Description of Artificial Sequence: Synthetic oligonucleotide
  Target: LAMA2; (-) strand; PAM type: YTN; PAM sequence: CTG
gcaagttaatataactggaa

SEQ ID NO: 246706 - DNA, 20 bp, Artificial Sequence
  Description of Artificial Sequence: Synthetic oligonucleotide
  Target: LAMA2; (-) strand; PAM type: YTN; PAM sequence: TTC
tggcaagttaatataactgg

SEQ ID NO: 246707 - DNA, 20 bp, Artificial Sequence
  Description of Artificial Sequence: Synthetic oligonucleotide
  Target: LAMA2; (-) strand; PAM type: YTN; PAM sequence: TTT
ctggcaagttaatataactg

SEQ ID NO: 246708 - DNA, 20 bp, Artificial Sequence
  Description of Artificial Sequence: Synthetic oligonucleotide
  Target: LAMA2; (-) strand; PAM type: YTN; PAM sequence: CTA
gaaagtttctggcaagttaa

SEQ ID NO: 246709 - DNA, 20 bp, Artificial Sequence
  Description of Artificial Sequence: Synthetic oligonucleotide
  Target: LAMA2; (-) strand; PAM type: YTN; PAM sequence: TTG
gaaactagaaagtttctggc

SEQ ID NO: 246710 - DNA, 20 bp, Artificial Sequence
  Description of Artificial Sequence: Synthetic oligonucleotide
  Target: LAMA2; (-) strand; PAM type: YTN; PAM sequence: TTT
ggaaactagaaagtttctgg

SEQ ID NO: 246711 - DNA, 20 bp, Artificial Sequence
  Description of Artificial Sequence: Synthetic oligonucleotide
  Target: LAMA2; (-) strand; PAM type: YTN; PAM sequence: CTG
tttggaaactagaaagtttc

SEQ ID NO: 246712 - DNA, 20 bp, Artificial Sequence
  Description of Artificial Sequence: Synthetic oligonucleotide
  Target: LAMA2; (-) strand; PAM type: YTN; PAM sequence: TTC
actgtttggaaactagaaag

SEQ ID NO: 246713 - DNA, 20 bp, Artificial Sequence
  Description of Artificial Sequence: Synthetic oligonucleotide
  Target: LAMA2; (-) strand; PAM type: YTN; PAM sequence: TTG
tattcactgtttggaaacta

SEQ ID NO: 246714 - DNA, 20 bp, Artificial Sequence
  Description of Artificial Sequence: Synthetic oligonucleotide
  Target: LAMA2; (-) strand; PAM type: YTN; PAM sequence: CTA
agttgtattcactgtttgga

SEQ ID NO: 246715 - DNA, 20 bp, Artificial Sequence
  Description of Artificial Sequence: Synthetic oligonucleotide
  Target: LAMA2; (-) strand; PAM type: YTN; PAM sequence: TTC
atgaggtctaagttgtattc

SEQ ID NO: 246716 - DNA, 20 bp, Artificial Sequence
  Description of Artificial Sequence: Synthetic oligonucleotide
  Target: LAMA2; (-) strand; PAM type: YTN; PAM sequence: CTT
catgaggtctaagttgtatt

SEQ ID NO: 246717 - DNA, 20 bp, Artificial Sequence
  Description of Artificial Sequence: Synthetic oligonucleotide
  Target: LAMA2; (-) strand; PAM type: YTN; PAM sequence: CTA
gaatgtaagcttcatgaggt

SEQ ID NO: 246718 - DNA, 20 bp, Artificial Sequence
  Description of Artificial Sequence: Synthetic oligonucleotide
  Target: LAMA2; (-) strand; PAM type: YTN; PAM sequence: CTA
actagaatgtaagcttcatg

SEQ ID NO: 246719 - DNA, 20 bp, Artificial Sequence
  Description of Artificial Sequence: Synthetic oligonucleotide
  Target: LAMA2; (-) strand; PAM type: YTN; PAM sequence: TTC
taactagaatgtaagcttca

SEQ ID NO: 246720 - DNA, 20 bp, Artificial Sequence
  Description of Artificial Sequence: Synthetic oligonucleotide
  Target: LAMA2; (-) strand; PAM type: YTN; PAM sequence: CTT
ctaactagaatgtaagcttc

SEQ ID NO: 246721 - DNA, 20 bp, Artificial Sequence
  Description of Artificial Sequence: Synthetic oligonucleotide
  Target: LAMA2; (-) strand; PAM type: YTN; PAM sequence: CTC
ttctaactagaatgtaagct

SEQ ID NO: 246722 - DNA, 20 bp, Artificial Sequence
  Description of Artificial Sequence: Synthetic oligonucleotide
  Target: LAMA2; (-) strand; PAM type: YTN; PAM sequence: CTC
tcttctaactagaatgtaag

SEQ ID NO: 246723 - DNA, 20 bp, Artificial Sequence
  Description of Artificial Sequence: Synthetic oligonucleotide
  Target: LAMA2; (-) strand; PAM type: YTN; PAM sequence: TTC
tctcttctaactagaatgta

SEQ ID NO: 246724 - DNA, 20 bp, Artificial Sequence
  Description of Artificial Sequence: Synthetic oligonucleotide
  Target: LAMA2; (-) strand; PAM type: YTN; PAM sequence: TTA
atattctctcttctaactag

SEQ ID NO: 246725 - DNA, 20 bp, Artificial Sequence
  Description of Artificial Sequence: Synthetic oligonucleotide
  Target: LAMA2; (-) strand; PAM type: YTN; PAM sequence: CTA
attaatattctctcttctaa

SEQ ID NO: 246726 - DNA, 20 bp, Artificial Sequence
  Description of Artificial Sequence: Synthetic oligonucleotide
  Target: LAMA2; (-) strand; PAM type: YTN; PAM sequence: TTA
tctaattaatattctctctt

SEQ ID NO: 246727 - DNA, 20 bp, Artificial Sequence
  Description of Artificial Sequence: Synthetic oligonucleotide
  Target: LAMA2; (-) strand; PAM type: YTN; PAM sequence: CTT
atctaattaatattctctct

SEQ ID NO: 246728 - DNA, 20 bp, Artificial Sequence
  Description of Artificial Sequence: Synthetic oligonucleotide
  Target: LAMA2; (-) strand; PAM type: YTN; PAM sequence: TTA
tgtgcttatctaattaatat

SEQ ID NO: 246729 - DNA, 20 bp, Artificial Sequence
  Description of Artificial Sequence: Synthetic oligonucleotide
  Target: LAMA2; (-) strand; PAM type: YTN; PAM sequence: TTT
atgtgcttatctaattaata

SEQ ID NO: 246730 - DNA, 20 bp, Artificial Sequence
  Description of Artificial Sequence: Synthetic oligonucleotide
  Target: LAMA2; (-) strand; PAM type: YTN; PAM sequence: TTT
tatgtgcttatctaattaat

SEQ ID NO: 246731 - DNA, 20 bp, Artificial Sequence
  Description of Artificial Sequence: Synthetic oligonucleotide
  Target: LAMA2; (-) strand; PAM type: YTN; PAM sequence: CTA
acacatgtatattttatgtg

SEQ ID NO: 246732 - DNA, 20 bp, Artificial Sequence
  Description of Artificial Sequence: Synthetic oligonucleotide
  Target: LAMA2; (-) strand; PAM type: YTN; PAM sequence: CTA
tctaacacatgtatatttta

SEQ ID NO: 246733 - DNA, 20 bp, Artificial Sequence
  Description of Artificial Sequence: Synthetic oligonucleotide
  Target: LAMA2; (-) strand; PAM type: YTN; PAM sequence: TTA
tcactatctaacacatgtat

SEQ ID NO: 246734 - DNA, 20 bp, Artificial Sequence
  Description of Artificial Sequence: Synthetic oligonucleotide
  Target: LAMA2; (-) strand; PAM type: YTN; PAM sequence: TTT
atcactatctaacacatgta

SEQ ID NO: 246735 - DNA, 20 bp, Artificial Sequence
  Description of Artificial Sequence: Synthetic oligonucleotide
  Target: LAMA2; (-) strand; PAM type: YTN; PAM sequence: TTG
tcatttatcactatctaaca

SEQ ID NO: 246736 - DNA, 20 bp, Artificial Sequence
  Description of Artificial Sequence: Synthetic oligonucleotide
  Target: LAMA2; (-) strand; PAM type: YTN; PAM sequence: CTT
gtcatttatcactatctaac

SEQ ID NO: 246737 - DNA, 20 bp, Artificial Sequence
  Description of Artificial Sequence: Synthetic oligonucleotide
  Target: LAMA2; (-) strand; PAM type: YTN; PAM sequence: TTC
ttgtcatttatcactatcta

SEQ ID NO: 246738 - DNA, 20 bp, Artificial Sequence
  Description of Artificial Sequence: Synthetic oligonucleotide
  Target: LAMA2; (-) strand; PAM type: YTN; PAM sequence: TTT
cttgtcatttatcactatct

SEQ ID NO: 246739 - DNA, 20 bp, Artificial Sequence
  Description of Artificial Sequence: Synthetic oligonucleotide
  Target: LAMA2; (-) strand; PAM type: YTN; PAM sequence: TTT
tcttgtcatttatcactatc

SEQ ID NO: 246740 - DNA, 20 bp, Artificial Sequence
  Description of Artificial Sequence: Synthetic oligonucleotide
  Target: LAMA2; (-) strand; PAM type: YTN; PAM sequence: TTT
ttcttgtcatttatcactat

SEQ ID NO: 246741 - DNA, 20 bp, Artificial Sequence
  Description of Artificial Sequence: Synthetic oligonucleotide
  Target: LAMA2; (-) strand; PAM type: YTN; PAM sequence: TTT
tttcttgtcatttatcacta

SEQ ID NO: 246742 - DNA, 20 bp, Artificial Sequence
  Description of Artificial Sequence: Synthetic oligonucleotide
  Target: LAMA2; (-) strand; PAM type: YTN; PAM sequence: TTT
ttttcttgtcatttatcact

SEQ ID NO: 246743 - DNA, 20 bp, Artificial Sequence
  Description of Artificial Sequence: Synthetic oligonucleotide
  Target: LAMA2; (-) strand; PAM type: YTN; PAM sequence: CTT
tttttcttgtcatttatcac

SEQ ID NO: 246744 - DNA, 20 bp, Artificial Sequence
  Description of Artificial Sequence: Synthetic oligonucleotide
  Target: LAMA2; (-) strand; PAM type: YTN; PAM sequence: CTA
ctttttttcttgtcatttat

SEQ ID NO: 246745 - DNA, 20 bp, Artificial Sequence
  Description of Artificial Sequence: Synthetic oligonucleotide
  Target: LAMA2; (-) strand; PAM type: YTN; PAM sequence: CTC
tactttttttcttgtcattt

SEQ ID NO: 246746 - DNA, 20 bp, Artificial Sequence
  Description of Artificial Sequence: Synthetic oligonucleotide
  Target: LAMA2; (-) strand; PAM type: YTN; PAM sequence: CTC
catgctctactttttttctt

SEQ ID NO: 246747 - DNA, 20 bp, Artificial Sequence
  Description of Artificial Sequence: Synthetic oligonucleotide
  Target: LAMA2; (-) strand; PAM type: YTN; PAM sequence: CTA
ggccctccatgctctacttt

SEQ ID NO: 246748 - DNA, 20 bp, Artificial Sequence
  Description of Artificial Sequence: Synthetic oligonucleotide
  Target: LAMA2; (-) strand; PAM type: YTN; PAM sequence: TTC
ctaggccctccatgctctac

SEQ ID NO: 246749 - DNA, 20 bp, Artificial Sequence
  Description of Artificial Sequence: Synthetic oligonucleotide
  Target: LAMA2; (-) strand; PAM type: YTN; PAM sequence: CTT
cctaggccctccatgctcta

SEQ ID NO: 246750 - DNA, 20 bp, Artificial Sequence
  Description of Artificial Sequence: Synthetic oligonucleotide
  Target: LAMA2; (-) strand; PAM type: YTN; PAM sequence: CTA
tcatccttcctaggccctcc

SEQ ID NO: 246751 - DNA, 20 bp, Artificial Sequence
  Description of Artificial Sequence: Synthetic oligonucleotide
  Target: LAMA2; (-) strand; PAM type: YTN; PAM sequence: TTC
aaccactatcatccttccta

SEQ ID NO: 246752 - DNA, 20 bp, Artificial Sequence
  Description of Artificial Sequence: Synthetic oligonucleotide
  Target: LAMA2; (-) strand; PAM type: YTN; PAM sequence: CTA
ttcaaccactatcatccttc

SEQ ID NO: 246753 - DNA, 20 bp, Artificial Sequence
  Description of Artificial Sequence: Synthetic oligonucleotide
  Target: LAMA2; (-) strand; PAM type: YTN; PAM sequence: TTA
aagtctattcaaccactatc

SEQ ID NO: 246754 - DNA, 20 bp, Artificial Sequence
  Description of Artificial Sequence: Synthetic oligonucleotide
  Target: LAMA2; (-) strand; PAM type: YTN; PAM sequence: CTA
tataaaattaaagtctattc

SEQ ID NO: 246755 - DNA, 20 bp, Artificial Sequence
  Description of Artificial Sequence: Synthetic oligonucleotide
  Target: LAMA2; (-) strand; PAM type: YTN; PAM sequence: TTC
tatataaaattaaagtctat

SEQ ID NO: 246756 - DNA, 20 bp, Artificial Sequence
  Description of Artificial Sequence: Synthetic oligonucleotide
  Target: LAMA2; (-) strand; PAM type: YTN; PAM sequence: CTA
atattctatataaaattaaa

SEQ ID NO: 246757 - DNA, 20 bp, Artificial Sequence
  Description of Artificial Sequence: Synthetic oligonucleotide
  Target: LAMA2; (-) strand; PAM type: YTN; PAM sequence: CTG
acctaatattctatataaaa

SEQ ID NO: 246758 - DNA, 20 bp, Artificial Sequence
  Description of Artificial Sequence: Synthetic oligonucleotide
  Target: LAMA2; (-) strand; PAM type: YTN; PAM sequence: CTC
tgacctaatattctatataa

SEQ ID NO: 246759 - DNA, 20 bp, Artificial Sequence
  Description of Artificial Sequence: Synthetic oligonucleotide
  Target: LAMA2; (-) strand; PAM type: YTN; PAM sequence: TTC
agatctctgacctaatattc

SEQ ID NO: 246760 - DNA, 20 bp, Artificial Sequence
  Description of Artificial Sequence: Synthetic oligonucleotide
  Target: LAMA2; (-) strand; PAM type: YTN; PAM sequence: CTT
cagatctctgacctaatatt

SEQ ID NO: 246761 - DNA, 20 bp, Artificial Sequence
  Description of Artificial Sequence: Synthetic oligonucleotide
  Target: LAMA2; (-) strand; PAM type: YTN; PAM sequence: CTA
gtcaccttcagatctctgac

SEQ ID NO: 246762 - DNA, 20 bp, Artificial Sequence
  Description of Artificial Sequence: Synthetic oligonucleotide
  Target: LAMA2; (-) strand; PAM type: YTN; PAM sequence: TTC
ctagtcaccttcagatctct

SEQ ID NO: 246763 - DNA, 20 bp, Artificial Sequence
  Description of Artificial Sequence: Synthetic oligonucleotide
  Target: LAMA2; (-) strand; PAM type: YTN; PAM sequence: TTT
cctagtcaccttcagatctc

SEQ ID NO: 246764 - DNA, 20 bp, Artificial Sequence
  Description of Artificial Sequence: Synthetic oligonucleotide
  Target: LAMA2; (-) strand; PAM type: YTN; PAM sequence: TTT
tcctagtcaccttcagatct

SEQ ID NO: 246765 - DNA, 20 bp, Artificial Sequence
  Description of Artificial Sequence: Synthetic oligonucleotide
  Target: LAMA2; (-) strand; PAM type: YTN; PAM sequence: TTT
ttcctagtcaccttcagatc

SEQ ID NO: 246766 - DNA, 20 bp, Artificial Sequence
  Description of Artificial Sequence: Synthetic oligonucleotide
  Target: LAMA2; (-) strand; PAM type: YTN; PAM sequence: CTT
tttcctagtcaccttcagat

SEQ ID NO: 246767 - DNA, 20 bp, Artificial Sequence
  Description of Artificial Sequence: Synthetic oligonucleotide
  Target: LAMA2; (-) strand; PAM type: YTN; PAM sequence: CTC
cagatacccacataactttt

SEQ ID NO: 246768 - DNA, 20 bp, Artificial Sequence
  Description of Artificial Sequence: Synthetic oligonucleotide
  Target: LAMA2; (-) strand; PAM type: YTN; PAM sequence: TTG
ctccagatacccacataact

SEQ ID NO: 246769 - DNA, 20 bp, Artificial Sequence
  Description of Artificial Sequence: Synthetic oligonucleotide
  Target: LAMA2; (-) strand; PAM type: YTN; PAM sequence: CTT
gctccagatacccacataac

SEQ ID NO: 246770 - DNA, 20 bp, Artificial Sequence
  Description of Artificial Sequence: Synthetic oligonucleotide
  Target: LAMA2; (-) strand; PAM type: YTN; PAM sequence: CTC
ttgctccagatacccacata

SEQ ID NO: 246771 - DNA, 20 bp, Artificial Sequence
  Description of Artificial Sequence: Synthetic oligonucleotide
  Target: LAMA2; (-) strand; PAM type: YTN; PAM sequence: CTA
agatgctcttgctccagata

SEQ ID NO: 246772 - DNA, 20 bp, Artificial Sequence
  Description of Artificial Sequence: Synthetic oligonucleotide
  Target: LAMA2; (-) strand; PAM type: YTN; PAM sequence: TTG
tcctaagatgctcttgctcc

SEQ ID NO: 246773 - DNA, 20 bp, Artificial Sequence
  Description of Artificial Sequence: Synthetic oligonucleotide
  Target: LAMA2; (-) strand; PAM type: YTN; PAM sequence: TTT
gtcctaagatgctcttgctc

SEQ ID NO: 246774 - DNA, 20 bp, Artificial Sequence
  Description of Artificial Sequence: Synthetic oligonucleotide
  Target: LAMA2; (-) strand; PAM type: YTN; PAM sequence: CTT
tgtcctaagatgctcttgct

SEQ ID NO: 246775 - DNA, 20 bp, Artificial Sequence
  Description of Artificial Sequence: Synthetic oligonucleotide
  Target: LAMA2; (-) strand; PAM type: YTN; PAM sequence: CTC
tttgtcctaagatgctcttg

SEQ ID NO: 246776 - DNA, 20 bp, Artificial Sequence
  Description of Artificial Sequence: Synthetic oligonucleotide
  Target: LAMA2; (-) strand; PAM type: YTN; PAM sequence: TTC
tctttgtcctaagatgctct

SEQ ID NO: 246777 - DNA, 20 bp, Artificial Sequence
  Description of Artificial Sequence: Synthetic oligonucleotide
  Target: LAMA2; (-) strand; PAM type: YTN; PAM sequence: TTT
ctctttgtcctaagatgctc

SEQ ID NO: 246778 - DNA, 20 bp, Artificial Sequence
  Description of Artificial Sequence: Synthetic oligonucleotide
  Target: LAMA2; (-) strand; PAM type: YTN; PAM sequence: CTT
tctctttgtcctaagatgct

SEQ ID NO: 246779 - DNA, 20 bp, Artificial Sequence
  Description of Artificial Sequence: Synthetic oligonucleotide
  Target: LAMA2; (-) strand; PAM type: YTN; PAM sequence: TTA
ctttctctttgtcctaagat

SEQ ID NO: 246780 - DNA, 20 bp, Artificial Sequence
  Description of Artificial Sequence: Synthetic oligonucleotide
  Target: LAMA2; (-) strand; PAM type: YTN; PAM sequence: CTT
actttctctttgtcctaaga

SEQ ID NO: 246781 - DNA, 20 bp, Artificial Sequence
  Description of Artificial Sequence: Synthetic oligonucleotide
  Target: LAMA2; (-) strand; PAM type: YTN; PAM sequence: TTC
acttactttctctttgtcct

SEQ ID NO: 246782 - DNA, 20 bp, Artificial Sequence
  Description of Artificial Sequence: Synthetic oligonucleotide
  Target: LAMA2; (-) strand; PAM type: YTN; PAM sequence: TTT
cacttactttctctttgtcc

SEQ ID NO: 246783 - DNA, 20 bp, Artificial Sequence
  Description of Artificial Sequence: Synthetic oligonucleotide
  Target: LAMA2; (-) strand; PAM type: YTN; PAM sequence: TTT
tcacttactttctctttgtc

SEQ ID NO: 246784 - DNA, 20 bp, Artificial Sequence
  Description of Artificial Sequence: Synthetic oligonucleotide
  Target: LAMA2; (-) strand; PAM type: YTN; PAM sequence: CTT
ttcacttactttctctttgt

SEQ ID NO: 246785 - DNA, 20 bp, Artificial Sequence
  Description of Artificial Sequence: Synthetic oligonucleotide
  Target: LAMA2; (-) strand; PAM type: YTN; PAM sequence: TTA
gggccttttcacttactttc

SEQ ID NO: 246786 - DNA, 20 bp, Artificial Sequence
  Description of Artificial Sequence: Synthetic oligonucleotide
  Target: LAMA2; (-) strand; PAM type: YTN; PAM sequence: CTT
agggccttttcacttacttt

SEQ ID NO: 246787 - DNA, 20 bp, Artificial Sequence
  Description of Artificial Sequence: Synthetic oligonucleotide
  Target: LAMA2; (-) strand; PAM type: YTN; PAM sequence: TTC
atatcttagggccttttcac

SEQ ID NO: 246788 - DNA, 20 bp, Artificial Sequence
  Description of Artificial Sequence: Synthetic oligonucleotide
  Target: LAMA2; (-) strand; PAM type: YTN; PAM sequence: TTG
aacatgccagccacattcat

SEQ ID NO: 246789 - DNA, 20 bp, Artificial Sequence
  Description of Artificial Sequence: Synthetic oligonucleotide
  Target: LAMA2; (-) strand; PAM type: YTN; PAM sequence: TTT
gaacatgccagccacattca

SEQ ID NO: 246790 - DNA, 20 bp, Artificial Sequence
  Description of Artificial Sequence: Synthetic oligonucleotide
  Target: LAMA2; (-) strand; PAM type: YTN; PAM sequence: CTT
tgaacatgccagccacattc

SEQ ID NO: 246791 - DNA, 20 bp, Artificial Sequence
  Description of Artificial Sequence: Synthetic oligonucleotide
  Target: LAMA2; (-) strand; PAM type: YTN; PAM sequence: TTG
agggtctttgaacatgccag

SEQ ID NO: 246792 - DNA, 20 bp, Artificial Sequence
  Description of Artificial Sequence: Synthetic oligonucleotide
  Target: LAMA2; (-) strand; PAM type: YTN; PAM sequence: CTT
gagggtctttgaacatgcca

SEQ ID NO: 246793 - DNA, 20 bp, Artificial Sequence
  Description of Artificial Sequence: Synthetic oligonucleotide
  Target: LAMA2; (-) strand; PAM type: YTN; PAM sequence: TTA
ccccatccttgagggtcttt

SEQ ID NO: 246794 - DNA, 20 bp, Artificial Sequence
  Description of Artificial Sequence: Synthetic oligonucleotide
  Target: LAMA2; (-) strand; PAM type: YTN; PAM sequence: CTT
accccatccttgagggtctt

SEQ ID NO: 246795 - DNA, 20 bp, Artificial Sequence
  Description of Artificial Sequence: Synthetic oligonucleotide
  Target: LAMA2; (-) strand; PAM type: YTN; PAM sequence: CTC
ttaccccatccttgagggtc

SEQ ID NO: 246796 - DNA, 20 bp, Artificial Sequence
  Description of Artificial Sequence: Synthetic oligonucleotide
  Target: LAMA2; (-) strand; PAM type: YTN; PAM sequence: TTC
cccactcttaccccatcctt

SEQ ID NO: 246797 - DNA, 20 bp, Artificial Sequence
  Description of Artificial Sequence: Synthetic oligonucleotide
  Target: LAMA2; (-) strand; PAM type: YTN; PAM sequence: CTT
ccccactcttaccccatcct

SEQ ID NO: 246798 - DNA, 20 bp, Artificial Sequence
  Description of Artificial Sequence: Synthetic oligonucleotide
  Target: LAMA2; (-) strand; PAM type: YTN; PAM sequence: CTC
ttccccactcttaccccatc

SEQ ID NO: 246799 - DNA, 20 bp, Artificial Sequence
  Description of Artificial Sequence: Synthetic oligonucleotide
  Target: LAMA2; (-) strand; PAM type: YTN; PAM sequence: TTC
aactcttccccactcttacc

SEQ ID NO: 246800 - DNA, 20 bp, Artificial Sequence
  Description of Artificial Sequence: Synthetic oligonucleotide
  Target: LAMA2; (-) strand; PAM type: YTN; PAM sequence: CTT
caactcttccccactcttac

SEQ ID NO: 246801 - DNA, 20 bp, Artificial Sequence
  Description of Artificial Sequence: Synthetic oligonucleotide
  Target: LAMA2; (-) strand; PAM type: YTN; PAM sequence: TTC
cccatatccttcaactcttc

SEQ ID NO: 246802 - DNA, 20 bp, Artificial Sequence
  Description of Artificial Sequence: Synthetic oligonucleotide
  Target: LAMA2; (-) strand; PAM type: YTN; PAM sequence: CTT
ccccatatccttcaactctt

SEQ ID NO: 246803 - DNA, 20 bp, Artificial Sequence
  Description of Artificial Sequence: Synthetic oligonucleotide
  Target: LAMA2; (-) strand; PAM type: YTN; PAM sequence: TTC
cccttccccatatccttcaa

SEQ ID NO: 246804 - DNA, 20 bp, Artificial Sequence
  Description of Artificial Sequence: Synthetic oligonucleotide
  Target: LAMA2; (-) strand; PAM type: YTN; PAM sequence: TTT
ccccttccccatatccttca

SEQ ID NO: 246805 - DNA, 20 bp, Artificial Sequence
  Description of Artificial Sequence: Synthetic oligonucleotide
  Target: LAMA2; (-) strand; PAM type: YTN; PAM sequence: TTT
tccccttccccatatccttc

SEQ ID NO: 246806 - DNA, 20 bp, Artificial Sequence
  Description of Artificial Sequence: Synthetic oligonucleotide
  Target: LAMA2; (-) strand; PAM type: YTN; PAM sequence: CTA
cgatattttccccttcccca

SEQ ID NO: 246807 - DNA, 20 bp, Artificial Sequence
  Description of Artificial Sequence: Synthetic oligonucleotide
  Target: LAMA2; (-) strand; PAM type: YTN; PAM sequence: CTA
cagtgtgccaaagacctacg

SEQ ID NO: 246808 - DNA, 20 bp, Artificial Sequence
  Description of Artificial Sequence: Synthetic oligonucleotide
  Target: LAMA2; (-) strand; PAM type: YTN; PAM sequence: TTA
actacagtgtgccaaagacc

SEQ ID NO: 246809 - DNA, 20 bp, Artificial Sequence
  Description of Artificial Sequence: Synthetic oligonucleotide
  Target: LAMA2; (-) strand; PAM type: YTN; PAM sequence: TTG
caagaaaaatgtgaagacat

SEQ ID NO: 246810 - DNA, 20 bp, Artificial Sequence
  Description of Artificial Sequence: Synthetic oligonucleotide
  Target: LAMA2; (-) strand; PAM type: YTN; PAM sequence: TTG
cattgcaagaaaaatgtgaa

SEQ ID NO: 246811 - DNA, 20 bp, Artificial Sequence
  Description of Artificial Sequence: Synthetic oligonucleotide
  Target: LAMA2; (-) strand; PAM type: YTN; PAM sequence: CTC
attgcattgcaagaaaaatg

SEQ ID NO: 246812 - DNA, 20 bp, Artificial Sequence
  Description of Artificial Sequence: Synthetic oligonucleotide
  Target: LAMA2; (-) strand; PAM type: YTN; PAM sequence: TTC
tcattgcattgcaagaaaaa

SEQ ID NO: 246813 - DNA, 20 bp, Artificial Sequence
  Description of Artificial Sequence: Synthetic oligonucleotide
  Target: LAMA2; (-) strand; PAM type: YTN; PAM sequence: TTT
ctcattgcattgcaagaaaa

SEQ ID NO: 246814 - DNA, 20 bp, Artificial Sequence
  Description of Artificial Sequence: Synthetic oligonucleotide
  Target: LAMA2; (-) strand; PAM type: YTN; PAM sequence: CTG
tgtttctcattgcattgcaa

SEQ ID NO: 246815 - DNA, 20 bp, Artificial Sequence
  Description of Artificial Sequence: Synthetic oligonucleotide
  Target: LAMA2; (-) strand; PAM type: YTN; PAM sequence: TTA
catgtctgtgtttctcattg

SEQ ID NO: 246816 - DNA, 20 bp, Artificial Sequence
  Description of Artificial Sequence: Synthetic oligonucleotide
  Target: LAMA2; (-) strand; PAM type: YTN; PAM sequence: CTC
agatcattacatgtctgtgt

SEQ ID NO: 246817 - DNA, 20 bp, Artificial Sequence
  Description of Artificial Sequence: Synthetic oligonucleotide
  Target: LAMA2; (-) strand; PAM type: YTN; PAM sequence: TTA
aaacataactcagatcatta

SEQ ID NO: 246818 - DNA, 20 bp, Artificial Sequence
  Description of Artificial Sequence: Synthetic oligonucleotide
  Target: LAMA2; (-) strand; PAM type: YTN; PAM sequence: CTA
ttaaaacataactcagatca

SEQ ID NO: 246819 - DNA, 20 bp, Artificial Sequence
  Description of Artificial Sequence: Synthetic oligonucleotide
  Target: LAMA2; (-) strand; PAM type: YTN; PAM sequence: CTA
accctattaaaacataactc

SEQ ID NO: 246820 - DNA, 20 bp, Artificial Sequence
  Description of Artificial Sequence: Synthetic oligonucleotide
  Target: LAMA2; (-) strand; PAM type: YTN; PAM sequence: CTC
aaagtaacaatcatactaac

SEQ ID NO: 246821 - DNA, 20 bp, Artificial Sequence
  Description of Artificial Sequence: Synthetic oligonucleotide
  Target: LAMA2; (-) strand; PAM type: YTN; PAM sequence: CTC
tcaaagtaacaatcatacta

SEQ ID NO: 246822 - DNA, 20 bp, Artificial Sequence
  Description of Artificial Sequence: Synthetic oligonucleotide
  Target: LAMA2; (-) strand; PAM type: YTN; PAM sequence: TTC
aaccaactctcaaagtaaca

SEQ ID NO: 246823 - DNA, 20 bp, Artificial Sequence
  Description of Artificial Sequence: Synthetic oligonucleotide
  Target: LAMA2; (-) strand; PAM type: YTN; PAM sequence: CTC
attcaaccaactctcaaagt

SEQ ID NO: 246824 - DNA, 20 bp, Artificial Sequence
  Description of Artificial Sequence: Synthetic oligonucleotide
  Target: LAMA2; (-) strand; PAM type: YTN; PAM sequence: TTG
tcctcattcaaccaactctc

SEQ ID NO: 246825 - DNA, 20 bp, Artificial Sequence
  Description of Artificial Sequence: Synthetic oligonucleotide
  Target: LAMA2; (-) strand; PAM type: YTN; PAM sequence: TTT
gtcctcattcaaccaactct

SEQ ID NO: 246826 - DNA, 20 bp, Artificial Sequence
  Description of Artificial Sequence: Synthetic oligonucleotide
  Target: LAMA2; (-) strand; PAM type: YTN; PAM sequence: CTG
tttgtcctcattcaaccaac

SEQ ID NO: 246827 - DNA, 20 bp, Artificial Sequence
  Description of Artificial Sequence: Synthetic oligonucleotide
  Target: LAMA2; (-) strand; PAM type: YTN; PAM sequence: CTA
tctgtttgtcctcattcaac

SEQ ID NO: 246828 - DNA, 20 bp, Artificial Sequence
  Description of Artificial Sequence: Synthetic oligonucleotide
  Target: LAMA2; (-) strand; PAM type: YTN; PAM sequence: CTG
gtctatctgtttgtcctcat

SEQ ID NO: 246829 - DNA, 20 bp, Artificial Sequence
  Description of Artificial Sequence: Synthetic oligonucleotide
  Target: LAMA2; (-) strand; PAM type: YTN; PAM sequence: TTA
actggtctatctgtttgtcc

SEQ ID NO: 246830 - DNA, 20 bp, Artificial Sequence
  Description of Artificial Sequence: Synthetic oligonucleotide
  Target: LAMA2; (-) strand; PAM type: YTN; PAM sequence: CTT
aactggtctatctgtttgtc

SEQ ID NO: 246831 - DNA, 20 bp, Artificial Sequence
  Description of Artificial Sequence: Synthetic oligonucleotide
  Target: LAMA2; (-) strand; PAM type: YTN; PAM sequence: CTC
ttaactggtctatctgtttg

SEQ ID NO: 246832 - DNA, 20 bp, Artificial Sequence
  Description of Artificial Sequence: Synthetic oligonucleotide
  Target: LAMA2; (-) strand; PAM type: YTN; PAM sequence: CTG
gatgaatgccaagtctctta

SEQ ID NO: 246833 - DNA, 20 bp, Artificial Sequence
  Description of Artificial Sequence: Synthetic oligonucleotide
  Target: LAMA2; (-) strand; PAM type: YTN; PAM sequence: CTA
atgactggatgaatgccaag

SEQ ID NO: 246834 - DNA, 20 bp, Artificial Sequence
  Description of Artificial Sequence: Synthetic oligonucleotide
  Target: LAMA2; (-) strand; PAM type: YTN; PAM sequence: TTC
acagctaatgactggatgaa

SEQ ID NO: 246835 - DNA, 20 bp, Artificial Sequence
  Description of Artificial Sequence: Synthetic oligonucleotide
  Target: LAMA2; (-) strand; PAM type: YTN; PAM sequence: CTT
cacagctaatgactggatga

SEQ ID NO: 246836 - DNA, 20 bp, Artificial Sequence
  Description of Artificial Sequence: Synthetic oligonucleotide
  Target: LAMA2; (-) strand; PAM type: YTN; PAM sequence: CTG
tggtccaagacttcacagct

SEQ ID NO: 246837 - DNA, 20 bp, Artificial Sequence
  Description of Artificial Sequence: Synthetic oligonucleotide
  Target: LAMA2; (-) strand; PAM type: YTN; PAM sequence: TTA
tcactgtggtccaagacttc

SEQ ID NO: 246838 - DNA, 20 bp, Artificial Sequence
  Description of Artificial Sequence: Synthetic oligonucleotide
  Target: LAMA2; (-) strand; PAM type: YTN; PAM sequence: TTC
accattatcactgtggtcca

SEQ ID NO: 246839 - DNA, 20 bp, Artificial Sequence
  Description of Artificial Sequence: Synthetic oligonucleotide
  Target: LAMA2; (-) strand; PAM type: YTN; PAM sequence: TTT
caccattatcactgtggtcc

SEQ ID NO: 246840 - DNA, 20 bp, Artificial Sequence
  Description of Artificial Sequence: Synthetic oligonucleotide
  Target: LAMA2; (-) strand; PAM type: YTN; PAM sequence: TTT
tcaccattatcactgtggtc

SEQ ID NO: 246841 - DNA, 20 bp, Artificial Sequence
  Description of Artificial Sequence: Synthetic oligonucleotide
  Target: LAMA2; (-) strand; PAM type: YTN; PAM sequence: TTG
atcattttcaccattatcac

SEQ ID NO: 246842 - DNA, 20 bp, Artificial Sequence
  Description of Artificial Sequence: Synthetic oligonucleotide
  Target: LAMA2; (-) strand; PAM type: YTN; PAM sequence: CTT
gatcattttcaccattatca

SEQ ID NO: 246843 - DNA, 20 bp, Artificial Sequence
  Description of Artificial Sequence: Synthetic oligonucleotide
  Target: LAMA2; (-) strand; PAM type: YTN; PAM sequence: CTG
gaatcaaaccacacttgatc

SEQ ID NO: 246844 - DNA, 20 bp, Artificial Sequence
  Description of Artificial Sequence: Synthetic oligonucleotide
  Target: LAMA2; (-) strand; PAM type: YTN; PAM sequence: TTC
aaaatgtatctggaatcaaa

SEQ ID NO: 246845 - DNA, 20 bp, Artificial Sequence
  Description of Artificial Sequence: Synthetic oligonucleotide
  Target: LAMA2; (-) strand; PAM type: YTN; PAM sequence: CTT
caaaatgtatctggaatcaa

SEQ ID NO: 246846 - DNA, 20 bp, Artificial Sequence
  Description of Artificial Sequence: Synthetic oligonucleotide
  Target: LAMA2; (-) strand; PAM type: YTN; PAM sequence: TTA
ccttcaaaatgtatctggaa

SEQ ID NO: 246847 - DNA, 20 bp, Artificial Sequence
  Description of Artificial Sequence: Synthetic oligonucleotide
  Target: LAMA2; (-) strand; PAM type: YTN; PAM sequence: TTC
agcattaccttcaaaatgta

SEQ ID NO: 246848 - DNA, 20 bp, Artificial Sequence
  Description of Artificial Sequence: Synthetic oligonucleotide
  Target: LAMA2; (-) strand; PAM type: YTN; PAM sequence: TTT
cagcattaccttcaaaatgt

SEQ ID NO: 246849 - DNA, 20 bp, Artificial Sequence
  Description of Artificial Sequence: Synthetic oligonucleotide
  Target: LAMA2; (-) strand; PAM type: YTN; PAM sequence: TTT
tcagcattaccttcaaaatg

SEQ ID NO: 246850 - DNA, 20 bp, Artificial Sequence
  Description of Artificial Sequence: Synthetic oligonucleotide
  Target: LAMA2; (-) strand; PAM type: YTN; PAM sequence: CTT
ttcagcattaccttcaaaat

SEQ ID NO: 246851 - DNA, 20 bp, Artificial Sequence
  Description of Artificial Sequence: Synthetic oligonucleotide
  Target: LAMA2; (-) strand; PAM type: YTN; PAM sequence: TTA
gcatatcttttcagcattac

SEQ ID NO: 246852 - DNA, 20 bp, Artificial Sequence
  Description of Artificial Sequence: Synthetic oligonucleotide
  Target: LAMA2; (-) strand; PAM type: YTN; PAM sequence: CTA
ttagcatatcttttcagcat

SEQ ID NO: 246853 - DNA, 20 bp, Artificial Sequence
  Description of Artificial Sequence: Synthetic oligonucleotide
  Target: LAMA2; (-) strand; PAM type: YTN; PAM sequence: TTC
cacagccaaactattagcat

SEQ ID NO: 246854 - DNA, 20 bp, Artificial Sequence
  Description of Artificial Sequence: Synthetic oligonucleotide
  Target: LAMA2; (-) strand; PAM type: YTN; PAM sequence: TTC
atgttccacagccaaactat

SEQ ID NO: 246855 - DNA, 20 bp, Artificial Sequence
  Description of Artificial Sequence: Synthetic oligonucleotide
  Target: LAMA2; (-) strand; PAM type: YTN; PAM sequence: TTT
catgttccacagccaaacta

SEQ ID NO: 246856 - DNA, 20 bp, Artificial Sequence
  Description of Artificial Sequence: Synthetic oligonucleotide
  Target: LAMA2; (-) strand; PAM type: YTN; PAM sequence: CTT
tcatgttccacagccaaact

SEQ ID NO: 246857 - DNA, 20 bp, Artificial Sequence
  Description of Artificial Sequence: Synthetic oligonucleotide
  Target: LAMA2; (-) strand; PAM type: YTN; PAM sequence: TTC
tttcatgttccacagccaaa

SEQ ID NO: 246858 - DNA, 20 bp, Artificial Sequence
  Description of Artificial Sequence: Synthetic oligonucleotide
  Target: LAMA2; (-) strand; PAM type: YTN; PAM sequence: TTT
ctttcatgttccacagccaa

SEQ ID NO: 246859 - DNA, 20 bp, Artificial Sequence
  Description of Artificial Sequence: Synthetic oligonucleotide
  Target: LAMA2; (-) strand; PAM type: YTN; PAM sequence: CTT
tctttcatgttccacagcca

SEQ ID NO: 246860 - DNA, 20 bp, Artificial Sequence
  Description of Artificial Sequence: Synthetic oligonucleotide
  Target: LAMA2; (-) strand; PAM type: YTN; PAM sequence: CTC
tttctttcatgttccacagc

SEQ ID NO: 246861 - DNA, 20 bp, Artificial Sequence
  Description of Artificial Sequence: Synthetic oligonucleotide
  Target: LAMA2; (-) strand; PAM type: YTN; PAM sequence: CTC
ctctttctttcatgttccac

SEQ ID NO: 246862 - DNA, 20 bp, Artificial Sequence
  Description of Artificial Sequence: Synthetic oligonucleotide
  Target: LAMA2; (-) strand; PAM type: YTN; PAM sequence: CTC
aactcctctttctttcatgt

SEQ ID NO: 246863 - DNA, 20 bp, Artificial Sequence
  Description of Artificial Sequence: Synthetic oligonucleotide
  Target: LAMA2; (-) strand; PAM type: YTN; PAM sequence: TTG
ggaaataatcctcaactcct

SEQ ID NO: 246864 - DNA, 20 bp, Artificial Sequence
  Description of Artificial Sequence: Synthetic oligonucleotide
  Target: LAMA2; (-) strand; PAM type: YTN; PAM sequence: CTC
aggtccatagttgggaaata

SEQ ID NO: 246865 - DNA, 20 bp, Artificial Sequence
  Description of Artificial Sequence: Synthetic oligonucleotide
  Target: LAMA2; (-) strand; PAM type: YTN; PAM sequence: TTG
ctcaggtccatagttgggaa

SEQ ID NO: 246866 - DNA, 20 bp, Artificial Sequence
  Description of Artificial Sequence: Synthetic oligonucleotide
  Target: LAMA2; (-) strand; PAM type: YTN; PAM sequence: TTA
gttgctcaggtccatagttg

SEQ ID NO: 246867 - DNA, 20 bp, Artificial Sequence
  Description of Artificial Sequence: Synthetic oligonucleotide
  Target: LAMA2; (-) strand; PAM type: YTN; PAM sequence: TTT
agttgctcaggtccatagtt

SEQ ID NO: 246868 - DNA, 20 bp, Artificial Sequence
  Description of Artificial Sequence: Synthetic oligonucleotide
  Target: LAMA2; (-) strand; PAM type: YTN; PAM sequence: TTT
tagttgctcaggtccatagt

SEQ ID NO: 246869 - DNA, 20 bp, Artificial Sequence
  Description of Artificial Sequence: Synthetic oligonucleotide
  Target: LAMA2; (-) strand; PAM type: YTN; PAM sequence: CTT
ttagttgctcaggtccatag

SEQ ID NO: 246870 - DNA, 20 bp, Artificial Sequence
  Description of Artificial Sequence: Synthetic oligonucleotide
  Target: LAMA2; (-) strand; PAM type: YTN; PAM sequence: CTA
aatcaatgacaagtctttta

SEQ ID NO: 246871 - DNA, 20 bp, Artificial Sequence
  Description of Artificial Sequence: Synthetic oligonucleotide
  Target: LAMA2; (-) strand; PAM type: YTN; PAM sequence: TTC
cccatctaaatcaatgacaa

SEQ ID NO: 246872 - DNA, 20 bp, Artificial Sequence
  Description of Artificial Sequence: Synthetic oligonucleotide
  Target: LAMA2; (-) strand; PAM type: YTN; PAM sequence: CTT
ccccatctaaatcaatgaca

SEQ ID NO: 246873 - DNA, 20 bp, Artificial Sequence
  Description of Artificial Sequence: Synthetic oligonucleotide
  Target: LAMA2; (-) strand; PAM type: YTN; PAM sequence: TTA
ccacagtcttccccatctaa

SEQ ID NO: 246874 - DNA, 20 bp, Artificial Sequence
  Description of Artificial Sequence: Synthetic oligonucleotide
  Target: LAMA2; (-) strand; PAM type: YTN; PAM sequence: TTT
accacagtcttccccatcta

SEQ ID NO: 246875 - DNA, 20 bp, Artificial Sequence
  Description of Artificial Sequence: Synthetic oligonucleotide
  Target: LAMA2; (-) strand; PAM type: YTN; PAM sequence: TTT
taccacagtcttccccatct

SEQ ID NO: 246876 - DNA, 20 bp, Artificial Sequence
  Description of Artificial Sequence: Synthetic oligonucleotide
  Target: LAMA2; (-) strand; PAM type: YTN; PAM sequence: TTT
ttaccacagtcttccccatc

SEQ ID NO: 246877 - DNA, 20 bp, Artificial Sequence
  Description of Artificial Sequence: Synthetic oligonucleotide
  Target: LAMA2; (-) strand; PAM type: YTN; PAM sequence: TTG
tttttaccacagtcttcccc

SEQ ID NO: 246878 - DNA, 20 bp, Artificial Sequence
  Description of Artificial Sequence: Synthetic oligonucleotide
  Target: LAMA2; (-) strand; PAM type: YTN; PAM sequence: TTT
gtttttaccacagtcttccc

SEQ ID NO: 246879 - DNA, 20 bp, Artificial Sequence
  Description of Artificial Sequence: Synthetic oligonucleotide
  Target: LAMA2; (-) strand; PAM type: YTN; PAM sequence: CTG
taaaaaatttgtttttacca

SEQ ID NO: 246880 - DNA, 20 bp, Artificial Sequence
  Description of Artificial Sequence: Synthetic oligonucleotide
  Target: LAMA2; (-) strand; PAM type: YTN; PAM sequence: CTC
ctgtaaaaaatttgttttta

SEQ ID NO: 246881 - DNA, 20 bp, Artificial Sequence
  Description of Artificial Sequence: Synthetic oligonucleotide
  Target: LAMA2; (-) strand; PAM type: YTN; PAM sequence: TTC
atgatctcctgtaaaaaatt

SEQ ID NO: 246882 - DNA, 20 bp, Artificial Sequence
  Description of Artificial Sequence: Synthetic oligonucleotide
  Target: LAMA2; (-) strand; PAM type: YTN; PAM sequence: CTG
agttcatgatctcctgtaaa

SEQ ID NO: 246883 - DNA, 20 bp, Artificial Sequence
  Description of Artificial Sequence: Synthetic oligonucleotide
  Target: LAMA2; (-) strand; PAM type: YTN; PAM sequence: CTA
agctgagttcatgatctcct

SEQ ID NO: 246884 - DNA, 20 bp, Artificial Sequence
  Description of Artificial Sequence: Synthetic oligonucleotide
  Target: LAMA2; (-) strand; PAM type: YTN; PAM sequence: TTA
gctaagctgagttcatgatc

SEQ ID NO: 246885 - DNA, 20 bp, Artificial Sequence
  Description of Artificial Sequence: Synthetic oligonucleotide
  Target: LAMA2; (-) strand; PAM type: YTN; PAM sequence: TTA
tataattagctaagctgagt

SEQ ID NO: 246886 - DNA, 20 bp, Artificial Sequence
  Description of Artificial Sequence: Synthetic oligonucleotide
  Target: LAMA2; (-) strand; PAM type: YTN; PAM sequence: TTT
atataattagctaagctgag

SEQ ID NO: 246887 - DNA, 20 bp, Artificial Sequence
  Description of Artificial Sequence: Synthetic oligonucleotide
  Target: LAMA2; (-) strand; PAM type: YTN; PAM sequence: CTT
tatataattagctaagctga

SEQ ID NO: 246888 - DNA, 20 bp, Artificial Sequence
  Description of Artificial Sequence: Synthetic oligonucleotide
  Target: LAMA2; (-) strand; PAM type: YTN; PAM sequence: CTA
actttatataattagctaag

SEQ ID NO: 246889 - DNA, 20 bp, Artificial Sequence
  Description of Artificial Sequence: Synthetic oligonucleotide
  Target: LAMA2; (-) strand; PAM type: YTN; PAM sequence: CTC
taactttatataattagcta

SEQ ID NO: 246890 - DNA, 20 bp, Artificial Sequence
  Description of Artificial Sequence: Synthetic oligonucleotide
  Target: LAMA2; (-) strand; PAM type: YTN; PAM sequence: CTC
gatatataataggcatctct

SEQ ID NO: 246891 - DNA, 20 bp, Artificial Sequence
  Description of Artificial Sequence: Synthetic oligonucleotide
  Target: LAMA2; (-) strand; PAM type: YTN; PAM sequence: TTA
cacctcgatatataataggc

SEQ ID NO: 246892 - DNA, 20 bp, Artificial Sequence
  Description of Artificial Sequence: Synthetic oligonucleotide
  Target: LAMA2; (-) strand; PAM type: YTN; PAM sequence: TTT
acacctcgatatataatagg

SEQ ID NO: 246893 - DNA, 20 bp, Artificial Sequence
  Description of Artificial Sequence: Synthetic oligonucleotide
  Target: LAMA2; (-) strand; PAM type: YTN; PAM sequence: TTA
acatttacacctcgatatat

SEQ ID NO: 246894 - DNA, 20 bp, Artificial Sequence
  Description of Artificial Sequence: Synthetic oligonucleotide
  Target: LAMA2; (-) strand; PAM type: YTN; PAM sequence: TTT
aacatttacacctcgatata

SEQ ID NO: 246895 - DNA, 20 bp, Artificial Sequence
  Description of Artificial Sequence: Synthetic oligonucleotide
  Target: LAMA2; (-) strand; PAM type: YTN; PAM sequence: CTT
taacatttacacctcgatat

SEQ ID NO: 246896 - DNA, 20 bp, Artificial Sequence
  Description of Artificial Sequence: Synthetic oligonucleotide
  Target: LAMA2; (-) strand; PAM type: YTN; PAM sequence: CTA
tcactttaacatttacacct

SEQ ID NO: 246897 - DNA, 20 bp, Artificial Sequence
  Description of Artificial Sequence: Synthetic oligonucleotide
  Target: LAMA2; (-) strand; PAM type: YTN; PAM sequence: CTA
gctatcactttaacatttac

SEQ ID NO: 246898 - DNA, 20 bp, Artificial Sequence
  Description of Artificial Sequence: Synthetic oligonucleotide
  Target: LAMA2; (-) strand; PAM type: YTN; PAM sequence: TTG
tatactagctatcactttaa

SEQ ID NO: 246899 - DNA, 20 bp, Artificial Sequence
  Description of Artificial Sequence: Synthetic oligonucleotide
  Target: LAMA2; (-) strand; PAM type: YTN; PAM sequence: CTT
gtatactagctatcacttta

SEQ ID NO: 246900 - DNA, 20 bp, Artificial Sequence
  Description of Artificial Sequence: Synthetic oligonucleotide
  Target: LAMA2; (-) strand; PAM type: YTN; PAM sequence: TTC
agacttgtatactagctatc

SEQ ID NO: 246901 - DNA, 20 bp, Artificial Sequence
  Description of Artificial Sequence: Synthetic oligonucleotide
  Target: LAMA2; (-) strand; PAM type: YTN; PAM sequence: CTT
cagacttgtatactagctat

SEQ ID NO: 246902 - DNA, 20 bp, Artificial Sequence
  Description of Artificial Sequence: Synthetic oligonucleotide
  Target: LAMA2; (-) strand; PAM type: YTN; PAM sequence: CTG
acccaatgaacttcagactt

SEQ ID NO: 246903 - DNA, 20 bp, Artificial Sequence
  Description of Artificial Sequence: Synthetic oligonucleotide
  Target: LAMA2; (-) strand; PAM type: YTN; PAM sequence: TTC
ctgacccaatgaacttcaga

SEQ ID NO: 246904 - DNA, 20 bp, Artificial Sequence
  Description of Artificial Sequence: Synthetic oligonucleotide
  Target: LAMA2; (-) strand; PAM type: YTN; PAM sequence: TTC
agatgttcctgacccaatga

SEQ ID NO: 246905 - DNA, 20 bp, Artificial Sequence
  Description of Artificial Sequence: Synthetic oligonucleotide
  Target: LAMA2; (-) strand; PAM type: YTN; PAM sequence: TTC
agttcagatgttcctgaccc

SEQ ID NO: 246906 - DNA, 20 bp, Artificial Sequence
  Description of Artificial Sequence: Synthetic oligonucleotide
  Target: LAMA2; (-) strand; PAM type: YTN; PAM sequence: CTT
cagttcagatgttcctgacc

SEQ ID NO: 246907 - DNA, 20 bp, Artificial Sequence
  Description of Artificial Sequence: Synthetic oligonucleotide
  Target: LAMA2; (-) strand; PAM type: YTN; PAM sequence: TTA
catcttcagttcagatgttc

SEQ ID NO: 246908 - DNA, 20 bp, Artificial Sequence
  Description of Artificial Sequence: Synthetic oligonucleotide
  Target: LAMA2; (-) strand; PAM type: YTN; PAM sequence: TTT
acatcttcagttcagatgtt

SEQ ID NO: 246909 - DNA, 20 bp, Artificial Sequence
  Description of Artificial Sequence: Synthetic oligonucleotide
  Target: LAMA2; (-) strand; PAM type: YTN; PAM sequence: TTT
tacatcttcagttcagatgt

SEQ ID NO: 246910 - DNA, 20 bp, Artificial Sequence
  Description of Artificial Sequence: Synthetic oligonucleotide
  Target: LAMA2; (-) strand; PAM type: YTN; PAM sequence: TTC
aaacattttacatcttcagt

SEQ ID NO: 246911 - DNA, 20 bp, Artificial Sequence
  Description of Artificial Sequence: Synthetic oligonucleotide
  Target: LAMA2; (-) strand; PAM type: YTN; PAM sequence: TTG
atgattcaaacattttacat

SEQ ID NO: 246912 - DNA, 20 bp, Artificial Sequence
  Description of Artificial Sequence: Synthetic oligonucleotide
  Target: LAMA2; (-) strand; PAM type: YTN; PAM sequence: TTA
aatgacatatggattgatga

SEQ ID NO: 246913 - DNA, 20 bp, Artificial Sequence
  Description of Artificial Sequence: Synthetic oligonucleotide
  Target: LAMA2; (-) strand; PAM type: YTN; PAM sequence: TTT
aaatgacatatggattgatg

SEQ ID NO: 246914 - DNA, 20 bp, Artificial Sequence
  Description of Artificial Sequence: Synthetic oligonucleotide
  Target: LAMA2; (-) strand; PAM type: YTN; PAM sequence: CTG
gtttaaatgacatatggatt

SEQ ID NO: 246915 - DNA, 20 bp, Artificial Sequence
  Description of Artificial Sequence: Synthetic oligonucleotide
  Target: LAMA2; (-) strand; PAM type: YTN; PAM sequence: TTC
tggtttaaatgacatatgga

SEQ ID NO: 246916 - DNA, 20 bp, Artificial Sequence
  Description of Artificial Sequence: Synthetic oligonucleotide
  Target: LAMA2; (-) strand; PAM type: YTN; PAM sequence: CTT
ctggtttaaatgacatatgg

SEQ ID NO: 246917 - DNA, 20 bp, Artificial Sequence
  Description of Artificial Sequence: Synthetic oligonucleotide
  Target: LAMA2; (-) strand; PAM type: YTN; PAM sequence: CTA
gtcttctggtttaaatgaca

SEQ ID NO: 246918 - DNA, 20 bp, Artificial Sequence
  Description of Artificial Sequence: Synthetic oligonucleotide
  Target: LAMA2; (-) strand; PAM type: YTN; PAM sequence: TTA
tcacatctagtcttctggtt

SEQ ID NO: 246919 - DNA, 20 bp, Artificial Sequence
  Description of Artificial Sequence: Synthetic oligonucleotide
  Target: LAMA2; (-) strand; PAM type: YTN; PAM sequence: TTG
gttatcacatctagtcttct

SEQ ID NO: 246920 - DNA, 20 bp, Artificial Sequence
  Description of Artificial Sequence: Synthetic oligonucleotide
  Target: LAMA2; (-) strand; PAM type: YTN; PAM sequence: CTT
ggttatcacatctagtcttc

SEQ ID NO: 246921 - DNA, 20 bp, Artificial Sequence
  Description of Artificial Sequence: Synthetic oligonucleotide
  Target: LAMA2; (-) strand; PAM type: YTN; PAM sequence: TTC
ttggttatcacatctagtct

SEQ ID NO: 246922 - DNA, 20 bp, Artificial Sequence
  Description of Artificial Sequence: Synthetic oligonucleotide
  Target: LAMA2; (-) strand; PAM type: YTN; PAM sequence: TTT
cttggttatcacatctagtc

SEQ ID NO: 246923 - DNA, 20 bp, Artificial Sequence
  Description of Artificial Sequence: Synthetic oligonucleotide
  Target: LAMA2; (-) strand; PAM type: YTN; PAM sequence: TTT
tcttggttatcacatctagt

SEQ ID NO: 246924 - DNA, 20 bp, Artificial Sequence
  Description of Artificial Sequence: Synthetic oligonucleotide
  Target: LAMA2; (-) strand; PAM type: YTN; PAM sequence: TTC
attttcttggttatcacatc

SEQ ID NO: 246925 - DNA, 20 bp, Artificial Sequence
  Description of Artificial Sequence: Synthetic oligonucleotide
  Target: LAMA2; (-) strand; PAM type: YTN; PAM sequence: TTA
ttcattttcttggttatcac

SEQ ID NO: 246926 - DNA, 20 bp, Artificial Sequence
  Description of Artificial Sequence: Synthetic oligonucleotide
  Target: LAMA2; (-) strand; PAM type: YTN; PAM sequence: CTC
gttattcattttcttggtta

SEQ ID NO: 246927 - DNA, 20 bp, Artificial Sequence
  Description of Artificial Sequence: Synthetic oligonucleotide
  Target: LAMA2; (-) strand; PAM type: YTN; PAM sequence: TTG
tctcgttattcattttcttg

SEQ ID NO: 246928 - DNA, 20 bp, Artificial Sequence
  Description of Artificial Sequence: Synthetic oligonucleotide
  Target: LAMA2; (-) strand; PAM type: YTN; PAM sequence: TTT
gtctcgttattcattttctt

SEQ ID NO: 246929 - DNA, 20 bp, Artificial Sequence
  Description of Artificial Sequence: Synthetic oligonucleotide
  Target: LAMA2; (-) strand; PAM type: YTN; PAM sequence: TTT
tgtctcgttattcattttct

SEQ ID NO: 246930 - DNA, 20 bp, Artificial Sequence
  Description of Artificial Sequence: Synthetic oligonucleotide
  Target: LAMA2; (-) strand; PAM type: YTN; PAM sequence: CTC
atattttgtctcgttattca

SEQ ID NO: 246931 - DNA, 20 bp, Artificial Sequence
  Description of Artificial Sequence: Synthetic oligonucleotide
  Target: LAMA2; (-) strand; PAM type: YTN; PAM sequence: TTA
gatctcatattttgtctcgt

SEQ ID NO: 246932 - DNA, 20 bp, Artificial Sequence
  Description of Artificial Sequence: Synthetic oligonucleotide
  Target: LAMA2; (-) strand; PAM type: YTN; PAM sequence: CTT
agatctcatattttgtctcg

SEQ ID NO: 246933 - DNA, 20 bp, Artificial Sequence
  Description of Artificial Sequence: Synthetic oligonucleotide
  Target: LAMA2; (-) strand; PAM type: YTN; PAM sequence: CTA
tagggcccaatccttagatc

SEQ ID NO: 246934 - DNA, 20 bp, Artificial Sequence
  Description of Artificial Sequence: Synthetic oligonucleotide
  Target: LAMA2; (-) strand; PAM type: YTN; PAM sequence: TTG
gggtgctatagggcccaatc

SEQ ID NO: 246935 - DNA, 20 bp, Artificial Sequence
  Description of Artificial Sequence: Synthetic oligonucleotide
  Target: LAMA2; (-) strand; PAM type: YTN; PAM sequence: CTA
aatgttggggtgctataggg

SEQ ID NO: 246936 - DNA, 20 bp, Artificial Sequence
  Description of Artificial Sequence: Synthetic oligonucleotide
  Target: LAMA2; (-) strand; PAM type: YTN; PAM sequence: CTC
taaatgttggggtgctatag

SEQ ID NO: 246937 - DNA, 20 bp, Artificial Sequence
  Description of Artificial Sequence: Synthetic oligonucleotide
  Target: LAMA2; (-) strand; PAM type: YTN; PAM sequence: CTA
acctctaaatgttggggtgc

SEQ ID NO: 246938 - DNA, 20 bp, Artificial Sequence
  Description of Artificial Sequence: Synthetic oligonucleotide
  Target: LAMA2; (-) strand; PAM type: YTN; PAM sequence: TTC
ctaacctctaaatgttgggg

SEQ ID NO: 246939 - DNA, 20 bp, Artificial Sequence
  Description of Artificial Sequence: Synthetic oligonucleotide
  Target: LAMA2; (-) strand; PAM type: YTN; PAM sequence: TTT
cctaacctctaaatgttggg

SEQ ID NO: 246940 - DNA, 20 bp, Artificial Sequence
  Description of Artificial Sequence: Synthetic oligonucleotide
  Target: LAMA2; (-) strand; PAM type: YTN; PAM sequence: CTC
agtttcctaacctctaaatg

SEQ ID NO: 246941 - DNA, 20 bp, Artificial Sequence
  Description of Artificial Sequence: Synthetic oligonucleotide
  Target: LAMA2; (-) strand; PAM type: YTN; PAM sequence: TTC
gtcctcagtttcctaacctc

SEQ ID NO: 246942 - DNA, 20 bp, Artificial Sequence
  Description of Artificial Sequence: Synthetic oligonucleotide
  Target: LAMA2; (-) strand; PAM type: YTN; PAM sequence: CTA
gttcgtcctcagtttcctaa

SEQ ID NO: 246943 - DNA, 20 bp, Artificial Sequence
  Description of Artificial Sequence: Synthetic oligonucleotide
  Target: LAMA2; (-) strand; PAM type: YTN; PAM sequence: TTC
tagttcgtcctcagtttcct

SEQ ID NO: 246944 - DNA, 20 bp, Artificial Sequence
  Description of Artificial Sequence: Synthetic oligonucleotide
  Target: LAMA2; (-) strand; PAM type: YTN; PAM sequence: TTT
ctagttcgtcctcagtttcc

SEQ ID NO: 246945 - DNA, 20 bp, Artificial Sequence
  Description of Artificial Sequence: Synthetic oligonucleotide
  Target: LAMA2; (-) strand; PAM type: YTN; PAM sequence: CTT
tctagttcgtcctcagtttc

SEQ ID NO: 246946 - DNA, 20 bp, Artificial Sequence
  Description of Artificial Sequence: Synthetic oligonucleotide
  Target: LAMA2; (-) strand; PAM type: YTN; PAM sequence: CTC
ctttctagttcgtcctcagt

SEQ ID NO: 246947 - DNA, 20 bp, Artificial Sequence
  Description of Artificial Sequence: Synthetic oligonucleotide
  Target: LAMA2; (-) strand; PAM type: YTN; PAM sequence: TTA
gtctcctttctagttcgtcc

SEQ ID NO: 246948 - DNA, 20 bp, Artificial Sequence
  Description of Artificial Sequence: Synthetic oligonucleotide
  Target: LAMA2; (-) strand; PAM type: YTN; PAM sequence: CTT
agtctcctttctagttcgtc

SEQ ID NO: 246949 - DNA, 20 bp, Artificial Sequence
  Description of Artificial Sequence: Synthetic oligonucleotide
  Target: LAMA2; (-) strand; PAM type: YTN; PAM sequence: TTC
ttagtctcctttctagttcg

SEQ ID NO: 246950 - DNA, 20 bp, Artificial Sequence
  Description of Artificial Sequence: Synthetic oligonucleotide
  Target: LAMA2; (-) strand; PAM type: YTN; PAM sequence: CTG
attcttagtctcctttctag

SEQ ID NO: 246951 - DNA, 20 bp, Artificial Sequence
  Description of Artificial Sequence: Synthetic oligonucleotide
  Target: LAMA2; (-) strand; PAM type: YTN; PAM sequence: TTG
gtcactgattcttagtctcc

SEQ ID NO: 246952 - DNA, 20 bp, Artificial Sequence
  Description of Artificial Sequence: Synthetic oligonucleotide
  Target: LAMA2; (-) strand; PAM type: YTN; PAM sequence: TTT
ggtcactgattcttagtctc

SEQ ID NO: 246953 - DNA, 20 bp, Artificial Sequence
  Description of Artificial Sequence: Synthetic oligonucleotide
  Target: LAMA2; (-) strand; PAM type: YTN; PAM sequence: TTT
tggtcactgattcttagtct

SEQ ID NO: 246954 - DNA, 20 bp, Artificial Sequence
  Description of Artificial Sequence: Synthetic oligonucleotide
  Target: LAMA2; (-) strand; PAM type: YTN; PAM sequence: TTT
ttggtcactgattcttagtc

SEQ ID NO: 246955 - DNA, 20 bp, Artificial Sequence
  Description of Artificial Sequence: Synthetic oligonucleotide
  Target: LAMA2; (-) strand; PAM type: YTN; PAM sequence: TTT
tttggtcactgattcttagt

SEQ ID NO: 246956 - DNA, 20 bp, Artificial Sequence
  Description of Artificial Sequence: Synthetic oligonucleotide
  Target: LAMA2; (-) strand; PAM type: YTN; PAM sequence: CTT
ttttggtcactgattcttag

SEQ ID NO: 246957 - DNA, 20 bp, Artificial Sequence
  Description of Artificial Sequence: Synthetic oligonucleotide
  Target: LAMA2; (-) strand; PAM type: YTN; PAM sequence: CTA
cttttttggtcactgattct

SEQ ID NO: 246958 - DNA, 20 bp, Artificial Sequence
  Description of Artificial Sequence: Synthetic oligonucleotide
  Target: LAMA2; (-) strand; PAM type: YTN; PAM sequence: TTC
tacttttttggtcactgatt

SEQ ID NO: 246959 - DNA, 20 bp, Artificial Sequence
  Description of Artificial Sequence: Synthetic oligonucleotide
  Target: LAMA2; (-) strand; PAM type: YTN; PAM sequence: CTT
ctacttttttggtcactgat

SEQ ID NO: 246960 - DNA, 20 bp, Artificial Sequence
  Description of Artificial Sequence: Synthetic oligonucleotide
  Target: LAMA2; (-) strand; PAM type: YTN; PAM sequence: TTC
cttctacttttttggtcact

SEQ ID NO: 246961 - DNA, 20 bp, Artificial Sequence
  Description of Artificial Sequence: Synthetic oligonucleotide
  Target: LAMA2; (-) strand; PAM type: YTN; PAM sequence: TTT
ccttctacttttttggtcac

SEQ ID NO: 246962 - DNA, 20 bp, Artificial Sequence
  Description of Artificial Sequence: Synthetic oligonucleotide
  Target: LAMA2; (-) strand; PAM type: YTN; PAM sequence: TTT
tccttctacttttttggtca

SEQ ID NO: 246963 - DNA, 20 bp, Artificial Sequence
  Description of Artificial Sequence: Synthetic oligonucleotide
  Target: LAMA2; (-) strand; PAM type: YTN; PAM sequence: CTG
tggttttccttctacttttt

SEQ ID NO: 246964 - DNA, 20 bp, Artificial Sequence
  Description of Artificial Sequence: Synthetic oligonucleotide
  Target: LAMA2; (-) strand; PAM type: YTN; PAM sequence: TTC
tgtggttttccttctacttt

SEQ ID NO: 246965 - DNA, 20 bp, Artificial Sequence
  Description of Artificial Sequence: Synthetic oligonucleotide
  Target: LAMA2; (-) strand; PAM type: YTN; PAM sequence: CTT
ctgtggttttccttctactt

SEQ ID NO: 246966 - DNA, 20 bp, Artificial Sequence
  Description of Artificial Sequence: Synthetic oligonucleotide
  Target: LAMA2; (-) strand; PAM type: YTN; PAM sequence: TTC
aatacatgacttctgtggtt

SEQ ID NO: 246967 - DNA, 20 bp, Artificial Sequence
  Description of Artificial Sequence: Synthetic oligonucleotide
  Target: LAMA2; (-) strand; PAM type: YTN; PAM sequence: TTT
caatacatgacttctgtggt

SEQ ID NO: 246968 - DNA, 20 bp, Artificial Sequence
  Description of Artificial Sequence: Synthetic oligonucleotide
  Target: LAMA2; (-) strand; PAM type: YTN; PAM sequence: CTT
tcaatacatgacttctgtgg

SEQ ID NO: 246969 - DNA, 20 bp, Artificial Sequence
  Description of Artificial Sequence: Synthetic oligonucleotide
  Target: LAMA2; (-) strand; PAM type: YTN; PAM sequence: TTC
aaatgactttcaatacatga

SEQ ID NO: 246970 - DNA, 20 bp, Artificial Sequence
  Description of Artificial Sequence: Synthetic oligonucleotide
  Target: LAMA2; (-) strand; PAM type: YTN; PAM sequence: TTC
attcaaatgactttcaatac

SEQ ID NO: 246971 - DNA, 20 bp, Artificial Sequence
  Description of Artificial Sequence: Synthetic oligonucleotide
  Target: LAMA2; (-) strand; PAM type: YTN; PAM sequence: TTG
attcattcaaatgactttca

SEQ ID NO: 246972 - DNA, 20 bp, Artificial Sequence
  Description of Artificial Sequence: Synthetic oligonucleotide
  Target: LAMA2; (-) strand; PAM type: YTN; PAM sequence: CTT
gattcattcaaatgactttc

SEQ ID NO: 246973 - DNA, 20 bp, Artificial Sequence
  Description of Artificial Sequence: Synthetic oligonucleotide
  Target: LAMA2; (-) strand; PAM type: YTN; PAM sequence: TTG
atcacttgattcattcaaat

SEQ ID NO: 246974 - DNA, 20 bp, Artificial Sequence
  Description of Artificial Sequence: Synthetic oligonucleotide
  Target: LAMA2; (-) strand; PAM type: YTN; PAM sequence: CTG
acaaagttgatcacttgatt

SEQ ID NO: 246975 - DNA, 20 bp, Artificial Sequence
  Description of Artificial Sequence: Synthetic oligonucleotide
  Target: LAMA2; (-) strand; PAM type: YTN; PAM sequence: TTG
gcccatcaacagtatctgac

SEQ ID NO: 246976 - DNA, 20 bp, Artificial Sequence
  Description of Artificial Sequence: Synthetic oligonucleotide
  Target: LAMA2; (-) strand; PAM type: YTN; PAM sequence: TTT
ggcccatcaacagtatctga

SEQ ID NO: 246977 - DNA, 20 bp, Artificial Sequence
  Description of Artificial Sequence: Synthetic oligonucleotide
  Target: LAMA2; (-) strand; PAM type: YTN; PAM sequence: TTA
tttggcccatcaacagtatc

SEQ ID NO: 246978 - DNA, 20 bp, Artificial Sequence
  Description of Artificial Sequence: Synthetic oligonucleotide
  Target: LAMA2; (-) strand; PAM type: YTN; PAM sequence: CTT
atttggcccatcaacagtat

SEQ ID NO: 246979 - DNA, 20 bp, Artificial Sequence
  Description of Artificial Sequence: Synthetic oligonucleotide
  Target: LAMA2; (-) strand; PAM type: YTN; PAM sequence: TTA
ccttatttggcccatcaaca

SEQ ID NO: 246980 - DNA, 20 bp, Artificial Sequence
  Description of Artificial Sequence: Synthetic oligonucleotide
  Target: LAMA2; (-) strand; PAM type: YTN; PAM sequence: CTT
accttatttggcccatcaac

SEQ ID NO: 246981 - DNA, 20 bp, Artificial Sequence
  Description of Artificial Sequence: Synthetic oligonucleotide
  Target: LAMA2; (-) strand; PAM type: YTN; PAM sequence: TTC
ttaccttatttggcccatca

SEQ ID NO: 246982 - DNA, 20 bp, Artificial Sequence
  Description of Artificial Sequence: Synthetic oligonucleotide
  Target: LAMA2; (-) strand; PAM type: YTN; PAM sequence: TTT
cttaccttatttggcccatc

SEQ ID NO: 246983 - DNA, 20 bp, Artificial Sequence
  Description of Artificial Sequence: Synthetic oligonucleotide
  Target: LAMA2; (-) strand; PAM type: YTN; PAM sequence: CTC
atttcttaccttatttggcc

SEQ ID NO: 246984 - DNA, 20 bp, Artificial Sequence
  Description of Artificial Sequence: Synthetic oligonucleotide
  Target: LAMA2; (-) strand; PAM type: YTN; PAM sequence: TTC
tcatttcttaccttatttgg

SEQ ID NO: 246985 - DNA, 20 bp, Artificial Sequence
  Description of Artificial Sequence: Synthetic oligonucleotide
  Target: LAMA2; (-) strand; PAM type: YTN; PAM sequence: CTA
tatccaatggtcaattctca

SEQ ID NO: 246986 - DNA, 20 bp, Artificial Sequence
  Description of Artificial Sequence: Synthetic oligonucleotide
  Target: LAMA2; (-) strand; PAM type: YTN; PAM sequence: TTG
ctatatccaatggtcaattc

SEQ ID NO: 246987 - DNA, 20 bp, Artificial Sequence
  Description of Artificial Sequence: Synthetic oligonucleotide
  Target: LAMA2; (-) strand; PAM type: YTN; PAM sequence: TTG
gtcgaatgcattgctatatc

SEQ ID NO: 246988 - DNA, 20 bp, Artificial Sequence
  Description of Artificial Sequence: Synthetic oligonucleotide
  Target: LAMA2; (-) strand; PAM type: YTN; PAM sequence: CTC
aaggtcattggtcgaatgca

SEQ ID NO: 246989 - DNA, 20 bp, Artificial Sequence
  Description of Artificial Sequence: Synthetic oligonucleotide
  Target: LAMA2; (-) strand; PAM type: YTN; PAM sequence: TTC
tcaaggtcattggtcgaatg

SEQ ID NO: 246990 - DNA, 20 bp, Artificial Sequence
  Description of Artificial Sequence: Synthetic oligonucleotide
  Target: LAMA2; (-) strand; PAM type: YTN; PAM sequence: CTT
ctcaaggtcattggtcgaat

SEQ ID NO: 246991 - DNA, 20 bp, Artificial Sequence
  Description of Artificial Sequence: Synthetic oligonucleotide
  Target: LAMA2; (-) strand; PAM type: YTN; PAM sequence: CTC
ttctcaaggtcattggtcga

SEQ ID NO: 246992 - DNA, 20 bp, Artificial Sequence
  Description of Artificial Sequence: Synthetic oligonucleotide
  Target: LAMA2; (-) strand; PAM type: YTN; PAM sequence: CTG
aaatactcttctcaaggtca

SEQ ID NO: 246993 - DNA, 20 bp, Artificial Sequence
  Description of Artificial Sequence: Synthetic oligonucleotide
  Target: LAMA2; (-) strand; PAM type: YTN; PAM sequence: TTC
cactgaaatactcttctcaa

SEQ ID NO: 246994 - DNA, 20 bp, Artificial Sequence
  Description of Artificial Sequence: Synthetic oligonucleotide
  Target: LAMA2; (-) strand; PAM type: YTN; PAM sequence: TTC
attccactgaaatactcttc

SEQ ID NO: 246995 - DNA, 20 bp, Artificial Sequence
  Description of Artificial Sequence: Synthetic oligonucleotide
  Target: LAMA2; (-) strand; PAM type: YTN; PAM sequence: CTT
cattccactgaaatactctt

SEQ ID NO: 246996 - DNA, 20 bp, Artificial Sequence
  Description of Artificial Sequence: Synthetic oligonucleotide
  Target: LAMA2; (-) strand; PAM type: YTN; PAM sequence: TTG
cccttcattccactgaaata

SEQ ID NO: 246997 - DNA, 20 bp, Artificial Sequence
  Description of Artificial Sequence: Synthetic oligonucleotide
  Target: LAMA2; (-) strand; PAM type: YTN; PAM sequence: TTC
catgttgcccttcattccac

SEQ ID NO: 246998 - DNA, 20 bp, Artificial Sequence
  Description of Artificial Sequence: Synthetic oligonucleotide
  Target: LAMA2; (-) strand; PAM type: YTN; PAM sequence: TTT
ccatgttgcccttcattcca

SEQ ID NO: 246999 - DNA, 20 bp, Artificial Sequence
  Description of Artificial Sequence: Synthetic oligonucleotide
  Target: LAMA2; (-) strand; PAM type: YTN; PAM sequence: CTA
gtttccatgttgcccttcat

SEQ ID NO: 247000 - DNA, 20 bp, Artificial Sequence
  Description of Artificial Sequence: Synthetic oligonucleotide
  Target: LAMA2; (-) strand; PAM type: YTN; PAM sequence: CTC
tagtttccatgttgcccttc

SEQ ID NO: 247001 - DNA, 20 bp, Artificial Sequence
  Description of Artificial Sequence: Synthetic oligonucleotide
  Target: LAMA2; (-) strand; PAM type: YTN; PAM sequence: TTA
aatccactctagtttccatg

SEQ ID NO: 247002 - DNA, 20 bp, Artificial Sequence
  Description of Artificial Sequence: Synthetic oligonucleotide
  Target: LAMA2; (-) strand; PAM type: YTN; PAM sequence: CTT
aaatccactctagtttccat

SEQ ID NO: 247003 - DNA, 20 bp, Artificial Sequence
  Description of Artificial Sequence: Synthetic oligonucleotide
  Target: LAMA2; (-) strand; PAM type: YTN; PAM sequence: CTC
ttaaatccactctagtttcc

SEQ ID NO: 247004 - DNA, 20 bp, Artificial Sequence
  Description of Artificial Sequence: Synthetic oligonucleotide
  Target: LAMA2; (-) strand; PAM type: YTN; PAM sequence: CTC
tcttaaatccactctagttt

SEQ ID NO: 247005 - DNA, 20 bp, Artificial Sequence
  Description of Artificial Sequence: Synthetic oligonucleotide
  Target: LAMA2; (-) strand; PAM type: YTN; PAM sequence: TTC
tctcttaaatccactctagt

SEQ ID NO: 247006 - DNA, 20 bp, Artificial Sequence
  Description of Artificial Sequence: Synthetic oligonucleotide
  Target: LAMA2; (-) strand; PAM type: YTN; PAM sequence: TTA
ttctctcttaaatccactct

SEQ ID NO: 247007 - DNA, 20 bp, Artificial Sequence
  Description of Artificial Sequence: Synthetic oligonucleotide
  Target: LAMA2; (-) strand; PAM type: YTN; PAM sequence: CTT
attctctcttaaatccactc

SEQ ID NO: 247008 - DNA, 20 bp, Artificial Sequence
  Description of Artificial Sequence: Synthetic oligonucleotide
  Target: LAMA2; (-) strand; PAM type: YTN; PAM sequence: TTC
ttattctctcttaaatccac

SEQ ID NO: 247009 - DNA, 20 bp, Artificial Sequence
  Description of Artificial Sequence: Synthetic oligonucleotide
  Target: LAMA2; (-) strand; PAM type: YTN; PAM sequence: CTT
cttattctctcttaaatcca

SEQ ID NO: 247010 - DNA, 20 bp, Artificial Sequence
  Description of Artificial Sequence: Synthetic oligonucleotide
  Target: LAMA2; (-) strand; PAM type: YTN; PAM sequence: TTC
ttcttattctctcttaaatc

SEQ ID NO: 247011 - DNA, 20 bp, Artificial Sequence
  Description of Artificial Sequence: Synthetic oligonucleotide
  Target: LAMA2; (-) strand; PAM type: YTN; PAM sequence: TTT
cttcttattctctcttaaat

SEQ ID NO: 247012 - DNA, 20 bp, Artificial Sequence
  Description of Artificial Sequence: Synthetic oligonucleotide
  Target: LAMA2; (-) strand; PAM type: YTN; PAM sequence: CTT
tcttcttattctctcttaaa

SEQ ID NO: 247013 - DNA, 20 bp, Artificial Sequence
  Description of Artificial Sequence: Synthetic oligonucleotide
  Target: LAMA2; (-) strand; PAM type: YTN; PAM sequence: TTC
tttcttcttattctctctta

SEQ ID NO: 247014 - DNA, 20 bp, Artificial Sequence
  Description of Artificial Sequence: Synthetic oligonucleotide
  Target: LAMA2; (-) strand; PAM type: YTN; PAM sequence: CTC
catattctttcttcttattc

SEQ ID NO: 247015 - DNA, 20 bp, Artificial Sequence
  Description of Artificial Sequence: Synthetic oligonucleotide
  Target: LAMA2; (-) strand; PAM type: YTN; PAM sequence: CTA
tctccatattctttcttctt

SEQ ID NO: 247016 - DNA, 20 bp, Artificial Sequence
  Description of Artificial Sequence: Synthetic oligonucleotide
  Target: LAMA2; (-) strand; PAM type: YTN; PAM sequence: TTG
ctatctccatattctttctt

SEQ ID NO: 247017 - DNA, 20 bp, Artificial Sequence
  Description of Artificial Sequence: Synthetic oligonucleotide
  Target: LAMA2; (-) strand; PAM type: YTN; PAM sequence: CTT
gctatctccatattctttct

SEQ ID NO: 247018 - DNA, 20 bp, Artificial Sequence
  Description of Artificial Sequence: Synthetic oligonucleotide
  Target: LAMA2; (-) strand; PAM type: YTN; PAM sequence: CTA
cacttgctatctccatattc

SEQ ID NO: 247019 - DNA, 20 bp, Artificial Sequence
  Description of Artificial Sequence: Synthetic oligonucleotide
  Target: LAMA2; (-) strand; PAM type: YTN; PAM sequence: CTA
gaaaaagacaagtctacact

SEQ ID NO: 247020 - DNA, 20 bp, Artificial Sequence
  Description of Artificial Sequence: Synthetic oligonucleotide
  Target: LAMA2; (-) strand; PAM type: YTN; PAM sequence: TTC
tagaaaaagacaagtctaca

SEQ ID NO: 247021 - DNA, 20 bp, Artificial Sequence
  Description of Artificial Sequence: Synthetic oligonucleotide
  Target: LAMA2; (-) strand; PAM type: YTN; PAM sequence: TTT
ctagaaaaagacaagtctac

SEQ ID NO: 247022 - DNA, 20 bp, Artificial Sequence
  Description of Artificial Sequence: Synthetic oligonucleotide
  Target: LAMA2; (-) strand; PAM type: YTN; PAM sequence: CTT
tctagaaaaagacaagtcta

SEQ ID NO: 247023 - DNA, 20 bp, Artificial Sequence
  Description of Artificial Sequence: Synthetic oligonucleotide
  Target: LAMA2; (-) strand; PAM type: YTN; PAM sequence: TTC
tttctagaaaaagacaagtc

SEQ ID NO: 247024 - DNA, 20 bp, Artificial Sequence
  Description of Artificial Sequence: Synthetic oligonucleotide
  Target: LAMA2; (-) strand; PAM type: YTN; PAM sequence: TTT
ctttctagaaaaagacaagt

SEQ ID NO: 247025 - DNA, 20 bp, Artificial Sequence
  Description of Artificial Sequence: Synthetic oligonucleotide
  Target: LAMA2; (-) strand; PAM type: YTN; PAM sequence: TTT
tctttctagaaaaagacaag

SEQ ID NO: 247026 - DNA, 20 bp, Artificial Sequence
  Description of Artificial Sequence: Synthetic oligonucleotide
  Target: LAMA2; (-) strand; PAM type: YTN; PAM sequence: TTA
ttttctttctagaaaaagac

SEQ ID NO: 247027 - DNA, 20 bp, Artificial Sequence
  Description of Artificial Sequence: Synthetic oligonucleotide
  Target: LAMA2; (-) strand; PAM type: YTN; PAM sequence: CTT
attttctttctagaaaaaga

SEQ ID NO: 247028 - DNA, 20 bp, Artificial Sequence
  Description of Artificial Sequence: Synthetic oligonucleotide
  Target: LAMA2; (-) strand; PAM type: YTN; PAM sequence: CTA
tgcccttattttctttctag

SEQ ID NO: 247029 - DNA, 20 bp, Artificial Sequence
  Description of Artificial Sequence: Synthetic oligonucleotide
  Target: LAMA2; (-) strand; PAM type: YTN; PAM sequence: TTC
cacatcccataaaagtatct

SEQ ID NO: 247030 - DNA, 20 bp, Artificial Sequence
  Description of Artificial Sequence: Synthetic oligonucleotide
  Target: LAMA2; (-) strand; PAM type: YTN; PAM sequence: TTC
cacatgtcccagcaccattc

SEQ ID NO: 247031 - DNA, 20 bp, Artificial Sequence
  Description of Artificial Sequence: Synthetic oligonucleotide
  Target: LAMA2; (-) strand; PAM type: YTN; PAM sequence: CTT
ccacatgtcccagcaccatt

SEQ ID NO: 247032 - DNA, 20 bp, Artificial Sequence
  Description of Artificial Sequence: Synthetic oligonucleotide
  Target: LAMA2; (-) strand; PAM type: YTN; PAM sequence: CTA
agaatatacagaccaataga

SEQ ID NO: 247033 - DNA, 20 bp, Artificial Sequence
  Description of Artificial Sequence: Synthetic oligonucleotide
  Target: LAMA2; (-) strand; PAM type: YTN; PAM sequence: TTC
taagaatatacagaccaata

SEQ ID NO: 247034 - DNA, 20 bp, Artificial Sequence
  Description of Artificial Sequence: Synthetic oligonucleotide
  Target: LAMA2; (-) strand; PAM type: YTN; PAM sequence: TTT
ctaagaatatacagaccaat

SEQ ID NO: 247035 - DNA, 20 bp, Artificial Sequence
  Description of Artificial Sequence: Synthetic oligonucleotide
  Target: LAMA2; (-) strand; PAM type: YTN; PAM sequence: TTT
tctaagaatatacagaccaa

SEQ ID NO: 247036 - DNA, 20 bp, Artificial Sequence
  Description of Artificial Sequence: Synthetic oligonucleotide
  Target: LAMA2; (-) strand; PAM type: YTN; PAM sequence: CTA
ttttctaagaatatacagac

SEQ ID NO: 247037 - DNA, 20 bp, Artificial Sequence
  Description of Artificial Sequence: Synthetic oligonucleotide
  Target: LAMA2; (-) strand; PAM type: YTN; PAM sequence: TTC
tattttctaagaatatacag

SEQ ID NO: 247038 - DNA, 20 bp, Artificial Sequence
  Description of Artificial Sequence: Synthetic oligonucleotide
  Target: LAMA2; (-) strand; PAM type: YTN; PAM sequence: TTT
ctattttctaagaatataca

SEQ ID NO: 247039 - DNA, 20 bp, Artificial Sequence
  Description of Artificial Sequence: Synthetic oligonucleotide
  Target: LAMA2; (-) strand; PAM type: YTN; PAM sequence: TTT
tctattttctaagaatatac

SEQ ID NO: 247040 - DNA, 20 bp, Artificial Sequence
  Description of Artificial Sequence: Synthetic oligonucleotide
  Target: LAMA2; (-) strand; PAM type: YTN; PAM sequence: TTA
ttttctattttctaagaata

SEQ ID NO: 247041 - DNA, 20 bp, Artificial Sequence
  Description of Artificial Sequence: Synthetic oligonucleotide
  Target: LAMA2; (-) strand; PAM type: YTN; PAM sequence: CTC
aattattttctattttctaa

SEQ ID NO: 247042 - DNA, 20 bp, Artificial Sequence
  Description of Artificial Sequence: Synthetic oligonucleotide
  Target: LAMA2; (-) strand; PAM type: YTN; PAM sequence: CTC
atactcaattattttctatt

SEQ ID NO: 247043 - DNA, 20 bp, Artificial Sequence
  Description of Artificial Sequence: Synthetic oligonucleotide
  Target: LAMA2; (-) strand; PAM type: YTN; PAM sequence: TTC
tcatactcaattattttcta

SEQ ID NO: 247044 - DNA, 20 bp, Artificial Sequence
  Description of Artificial Sequence: Synthetic oligonucleotide
  Target: LAMA2; (-) strand; PAM type: YTN; PAM sequence: CTC
ccatgttctcatactcaatt

SEQ ID NO: 247045 - DNA, 20 bp, Artificial Sequence
  Description of Artificial Sequence: Synthetic oligonucleotide
  Target: LAMA2; (-) strand; PAM type: YTN; PAM sequence: TTC
ctcccatgttctcatactca

SEQ ID NO: 247046 - DNA, 20 bp, Artificial Sequence
  Description of Artificial Sequence: Synthetic oligonucleotide
  Target: LAMA2; (-) strand; PAM type: YTN; PAM sequence: TTT
cctcccatgttctcatactc

SEQ ID NO: 247047 - DNA, 20 bp, Artificial Sequence
  Description of Artificial Sequence: Synthetic oligonucleotide
  Target: LAMA2; (-) strand; PAM type: YTN; PAM sequence: TTT
tcctcccatgttctcatact

SEQ ID NO: 247048 - DNA, 20 bp, Artificial Sequence
  Description of Artificial Sequence: Synthetic oligonucleotide
  Target: LAMA2; (-) strand; PAM type: YTN; PAM sequence: TTC
agcattttcctcccatgttc

SEQ ID NO: 247049 - DNA, 20 bp, Artificial Sequence
  Description of Artificial Sequence: Synthetic oligonucleotide
  Target: LAMA2; (-) strand; PAM type: YTN; PAM sequence: CTT
cagcattttcctcccatgtt

SEQ ID NO: 247050 - DNA, 20 bp, Artificial Sequence
  Description of Artificial Sequence: Synthetic oligonucleotide
  Target: LAMA2; (-) strand; PAM type: YTN; PAM sequence: TTG
aatcttcagcattttcctcc

SEQ ID NO: 247051 - DNA, 20 bp, Artificial Sequence
  Description of Artificial Sequence: Synthetic oligonucleotide
  Target: LAMA2; (-) strand; PAM type: YTN; PAM sequence: CTT
gaatcttcagcattttcctc

SEQ ID NO: 247052 - DNA, 20 bp, Artificial Sequence
  Description of Artificial Sequence: Synthetic oligonucleotide
  Target: LAMA2; (-) strand; PAM type: YTN; PAM sequence: CTC
cttgaatcttcagcattttc

SEQ ID NO: 247053 - DNA, 20 bp, Artificial Sequence
  Description of Artificial Sequence: Synthetic oligonucleotide
  Target: LAMA2; (-) strand; PAM type: YTN; PAM sequence: TTC
tccttgaatcttcagcattt

SEQ ID NO: 247054 - DNA, 20 bp, Artificial Sequence
  Description of Artificial Sequence: Synthetic oligonucleotide
  Target: LAMA2; (-) strand; PAM type: YTN; PAM sequence: TTT
ctccttgaatcttcagcatt

SEQ ID NO: 247055 - DNA, 20 bp, Artificial Sequence
  Description of Artificial Sequence: Synthetic oligonucleotide
  Target: LAMA2; (-) strand; PAM type: YTN; PAM sequence: TTT
tctccttgaatcttcagcat

SEQ ID NO: 247056 - DNA, 20 bp, Artificial Sequence
  Description of Artificial Sequence: Synthetic oligonucleotide
  Target: LAMA2; (-) strand; PAM type: YTN; PAM sequence: CTT
ttctccttgaatcttcagca

SEQ ID NO: 247057 - DNA, 20 bp, Artificial Sequence
  Description of Artificial Sequence: Synthetic oligonucleotide
  Target: LAMA2; (-) strand; PAM type: YTN; PAM sequence: CTC
ttttctccttgaatcttcag

SEQ ID NO: 247058 - DNA, 20 bp, Artificial Sequence
  Description of Artificial Sequence: Synthetic oligonucleotide
  Target: LAMA2; (-) strand; PAM type: YTN; PAM sequence: TTC
tcttttctccttgaatcttc

SEQ ID NO: 247059 - DNA, 20 bp, Artificial Sequence
  Description of Artificial Sequence: Synthetic oligonucleotide
  Target: LAMA2; (-) strand; PAM type: YTN; PAM sequence: TTT
ctcttttctccttgaatctt

SEQ ID NO: 247060 - DNA, 20 bp, Artificial Sequence
  Description of Artificial Sequence: Synthetic oligonucleotide
  Target: LAMA2; (-) strand; PAM type: YTN; PAM sequence: CTT
tctcttttctccttgaatct

SEQ ID NO: 247061 - DNA, 20 bp, Artificial Sequence
  Description of Artificial Sequence: Synthetic oligonucleotide
  Target: LAMA2; (-) strand; PAM type: YTN; PAM sequence: TTC
atactttctcttttctcctt

SEQ ID NO: 247062 - DNA, 20 bp, Artificial Sequence
  Description of Artificial Sequence: Synthetic oligonucleotide
  Target: LAMA2; (-) strand; PAM type: YTN; PAM sequence: TTT
catactttctcttttctcct

SEQ ID NO: 247063 - DNA, 20 bp, Artificial Sequence
  Description of Artificial Sequence: Synthetic oligonucleotide
  Target: LAMA2; (-) strand; PAM type: YTN; PAM sequence: TTT
tcatactttctcttttctcc

SEQ ID NO: 247064 - DNA, 20 bp, Artificial Sequence
  Description of Artificial Sequence: Synthetic oligonucleotide
  Target: LAMA2; (-) strand; PAM type: YTN; PAM sequence: TTT
ttcatactttctcttttctc

SEQ ID NO: 247065 - DNA, 20 bp, Artificial Sequence
  Description of Artificial Sequence: Synthetic oligonucleotide
  Target: LAMA2; (-) strand; PAM type: YTN; PAM sequence: CTT
tttcatactttctcttttct

SEQ ID NO: 247066 - DNA, 20 bp, Artificial Sequence
  Description of Artificial Sequence: Synthetic oligonucleotide
  Target: LAMA2; (-) strand; PAM type: YTN; PAM sequence: CTG
gatactttttcatactttct

SEQ ID NO: 247067 - DNA, 20 bp, Artificial Sequence
  Description of Artificial Sequence: Synthetic oligonucleotide
  Target: LAMA2; (-) strand; PAM type: YTN; PAM sequence: TTC
ctggatactttttcatactt

SEQ ID NO: 247068 - DNA, 20 bp, Artificial Sequence
  Description of Artificial Sequence: Synthetic oligonucleotide
  Target: LAMA2; (-) strand; PAM type: YTN; PAM sequence: CTA
tgttcctggatactttttca

SEQ ID NO: 247069 - DNA, 20 bp, Artificial Sequence
  Description of Artificial Sequence: Synthetic oligonucleotide
  Target: LAMA2; (-) strand; PAM type: YTN; PAM sequence: TTG
ctatgttcctggatactttt

SEQ ID NO: 247070 - DNA, 20 bp, Artificial Sequence
  Description of Artificial Sequence: Synthetic oligonucleotide
  Target: LAMA2; (-) strand; PAM type: YTN; PAM sequence: TTT
gctatgttcctggatacttt

SEQ ID NO: 247071 - DNA, 20 bp, Artificial Sequence
  Description of Artificial Sequence: Synthetic oligonucleotide
  Target: LAMA2; (-) strand; PAM type: YTN; PAM sequence: CTT
tgctatgttcctggatactt

SEQ ID NO: 247072 - DNA, 20 bp, Artificial Sequence
  Description of Artificial Sequence: Synthetic oligonucleotide
  Target: LAMA2; (-) strand; PAM type: YTN; PAM sequence: TTC
tttgctatgttcctggatac

SEQ ID NO: 247073 - DNA, 20 bp, Artificial Sequence
  Description of Artificial Sequence: Synthetic oligonucleotide
  Target: LAMA2; (-) strand; PAM type: YTN; PAM sequence: CTG
gtccatgttctttgctatgt

SEQ ID NO: 247074 - DNA, 20 bp, Artificial Sequence
  Description of Artificial Sequence: Synthetic oligonucleotide
  Target: LAMA2; (-) strand; PAM type: YTN; PAM sequence: CTG
tctggtccatgttctttgct

SEQ ID NO: 247075 - DNA, 20 bp, Artificial Sequence
  Description of Artificial Sequence: Synthetic oligonucleotide
  Target: LAMA2; (-) strand; PAM type: YTN; PAM sequence: CTA
atgctgtctggtccatgttc

SEQ ID NO: 247076 - DNA, 20 bp, Artificial Sequence
  Description of Artificial Sequence: Synthetic oligonucleotide
  Target: LAMA2; (-) strand; PAM type: YTN; PAM sequence: CTC
acatagatccctaatgctgt

SEQ ID NO: 247077 - DNA, 20 bp, Artificial Sequence
  Description of Artificial Sequence: Synthetic oligonucleotide
  Target: LAMA2; (-) strand; PAM type: YTN; PAM sequence: CTA
aactcacatagatccctaat

SEQ ID NO: 247078 - DNA, 20 bp, Artificial Sequence
  Description of Artificial Sequence: Synthetic oligonucleotide
  Target: LAMA2; (-) strand; PAM type: YTN; PAM sequence: TTA
ctaaactcacatagatccct

SEQ ID NO: 247079 - DNA, 20 bp, Artificial Sequence
  Description of Artificial Sequence: Synthetic oligonucleotide
  Target: LAMA2; (-) strand; PAM type: YTN; PAM sequence: TTC
atgattactaaactcacata

SEQ ID NO: 247080 - DNA, 20 bp, Artificial Sequence
  Description of Artificial Sequence: Synthetic oligonucleotide
  Target: LAMA2; (-) strand; PAM type: YTN; PAM sequence: TTC
aaattcatgattactaaact

SEQ ID NO: 247081 - DNA, 20 bp, Artificial Sequence
  Description of Artificial Sequence: Synthetic oligonucleotide
  Target: LAMA2; (-) strand; PAM type: YTN; PAM sequence: CTT
caaattcatgattactaaac

SEQ ID NO: 247082 - DNA, 20 bp, Artificial Sequence
  Description of Artificial Sequence: Synthetic oligonucleotide
  Target: LAMA2; (-) strand; PAM type: YTN; PAM sequence: TTG
cttcaaattcatgattacta

SEQ ID NO: 247083 - DNA, 20 bp, Artificial Sequence
  Description of Artificial Sequence: Synthetic oligonucleotide
  Target: LAMA2; (-) strand; PAM type: YTN; PAM sequence: CTT
gcttcaaattcatgattact

SEQ ID NO: 247084 - DNA, 20 bp, Artificial Sequence
  Description of Artificial Sequence: Synthetic oligonucleotide
  Target: LAMA2; (-) strand; PAM type: YTN; PAM sequence: CTG
accttgcttcaaattcatga

SEQ ID NO: 247085 - DNA, 20 bp, Artificial Sequence
  Description of Artificial Sequence: Synthetic oligonucleotide
  Target: LAMA2; (-) strand; PAM type: YTN; PAM sequence: TTG
actgaccttgcttcaaattc

SEQ ID NO: 247086 - DNA, 20 bp, Artificial Sequence
  Description of Artificial Sequence: Synthetic oligonucleotide
  Target: LAMA2; (-) strand; PAM type: YTN; PAM sequence: CTG
ttgactgaccttgcttcaaa

SEQ ID NO: 247087 - DNA, 20 bp, Artificial Sequence
  Description of Artificial Sequence: Synthetic oligonucleotide
  Target: LAMA2; (-) strand; PAM type: YTN; PAM sequence: CTC
atagtacctgttgactgacc

SEQ ID NO: 247088 - DNA, 20 bp, Artificial Sequence
  Description of Artificial Sequence: Synthetic oligonucleotide
  Target: LAMA2; (-) strand; PAM type: YTN; PAM sequence: CTG
aagaaactcatagtacctgt

SEQ ID NO: 247089 - DNA, 20 bp, Artificial Sequence
  Description of Artificial Sequence: Synthetic oligonucleotide
  Target: LAMA2; (-) strand; PAM type: YTN; PAM sequence: CTG
gatacatctgaagaaactca

SEQ ID NO: 247090 - DNA, 20 bp, Artificial Sequence
  Description of Artificial Sequence: Synthetic oligonucleotide
  Target: LAMA2; (-) strand; PAM type: YTN; PAM sequence: CTG
agctggatacatctgaagaa

SEQ ID NO: 247091 - DNA, 20 bp, Artificial Sequence
  Description of Artificial Sequence: Synthetic oligonucleotide
  Target: LAMA2; (-) strand; PAM type: YTN; PAM sequence: CTG
ctgagctggatacatctgaa

SEQ ID NO: 247092 - DNA, 20 bp, Artificial Sequence
  Description of Artificial Sequence: Synthetic oligonucleotide
  Target: LAMA2; (-) strand; PAM type: YTN; PAM sequence: CTG
caactgctgagctggataca

SEQ ID NO: 247093 - DNA, 20 bp, Artificial Sequence
  Description of Artificial Sequence: Synthetic oligonucleotide
  Target: LAMA2; (-) strand; PAM type: YTN; PAM sequence: CTG
tacctgcaactgctgagctg

SEQ ID NO: 247094 - DNA, 20 bp, Artificial Sequence
  Description of Artificial Sequence: Synthetic oligonucleotide
  Target: LAMA2; (-) strand; PAM type: YTN; PAM sequence: CTC
tgtacctgcaactgctgagc

SEQ ID NO: 247095 - DNA, 20 bp, Artificial Sequence
  Description of Artificial Sequence: Synthetic oligonucleotide
  Target: LAMA2; (-) strand; PAM type: YTN; PAM sequence: TTC
tctgtacctgcaactgctga

SEQ ID NO: 247096 - DNA, 20 bp, Artificial Sequence
  Description of Artificial Sequence: Synthetic oligonucleotide
  Target: LAMA2; (-) strand; PAM type: YTN; PAM sequence: CTT
ctctgtacctgcaactgctg

SEQ ID NO: 247097 - DNA, 20 bp, Artificial Sequence
  Description of Artificial Sequence: Synthetic oligonucleotide
  Target: LAMA2; (-) strand; PAM type: YTN; PAM sequence: CTA
tcttctctgtacctgcaact

SEQ ID NO: 247098 - DNA, 20 bp, Artificial Sequence
  Description of Artificial Sequence: Synthetic oligonucleotide
  Target: LAMA2; (-) strand; PAM type: YTN; PAM sequence: CTC
tatcttctctgtacctgcaa

SEQ ID NO: 247099 - DNA, 20 bp, Artificial Sequence
  Description of Artificial Sequence: Synthetic oligonucleotide
  Target: LAMA2; (-) strand; PAM type: YTN; PAM sequence: CTA
acctctatcttctctgtacc

SEQ ID NO: 247100 - DNA, 20 bp, Artificial Sequence
  Description of Artificial Sequence: Synthetic oligonucleotide
  Target: LAMA2; (-) strand; PAM type: YTN; PAM sequence: TTA
aatctaacctctatcttctc

SEQ ID NO: 247101 - DNA, 20 bp, Artificial Sequence
  Description of Artificial Sequence: Synthetic oligonucleotide
  Target: LAMA2; (-) strand; PAM type: YTN; PAM sequence: TTA
accacaacgtcagttaaatc

SEQ ID NO: 247102 - DNA, 20 bp, Artificial Sequence
  Description of Artificial Sequence: Synthetic oligonucleotide
  Target: LAMA2; (-) strand; PAM type: YTN; PAM sequence: CTT
aaccacaacgtcagttaaat

SEQ ID NO: 247103 - DNA, 20 bp, Artificial Sequence
  Description of Artificial Sequence: Synthetic oligonucleotide
  Target: LAMA2; (-) strand; PAM type: YTN; PAM sequence: TTG
gcttaaccacaacgtcagtt

SEQ ID NO: 247104 - DNA, 20 bp, Artificial Sequence
  Description of Artificial Sequence: Synthetic oligonucleotide
  Target: LAMA2; (-) strand; PAM type: YTN; PAM sequence: CTT
ggcttaaccacaacgtcagt

SEQ ID NO: 247105 - DNA, 20 bp, Artificial Sequence
  Description of Artificial Sequence: Synthetic oligonucleotide
  Target: LAMA2; (-) strand; PAM type: YTN; PAM sequence: TTC
acttggcttaaccacaacgt

SEQ ID NO: 247106 - DNA, 20 bp, Artificial Sequence
  Description of Artificial Sequence: Synthetic oligonucleotide
  Target: LAMA2; (-) strand; PAM type: YTN; PAM sequence: CTG
tattcacttggcttaaccac

SEQ ID NO: 247107 - DNA, 20 bp, Artificial Sequence
  Description of Artificial Sequence: Synthetic oligonucleotide
  Target: LAMA2; (-) strand; PAM type: YTN; PAM sequence: TTA
ctgtattcacttggcttaac

SEQ ID NO: 247108 - DNA, 20 bp, Artificial Sequence
  Description of Artificial Sequence: Synthetic oligonucleotide
  Target: LAMA2; (-) strand; PAM type: YTN; PAM sequence: TTT
actgtattcacttggcttaa

SEQ ID NO: 247109 - DNA, 20 bp, Artificial Sequence
  Description of Artificial Sequence: Synthetic oligonucleotide
  Target: LAMA2; (-) strand; PAM type: YTN; PAM sequence: TTT
tactgtattcacttggctta

SEQ ID NO: 247110 - DNA, 20 bp, Artificial Sequence
  Description of Artificial Sequence: Synthetic oligonucleotide
  Target: LAMA2; (-) strand; PAM type: YTN; PAM sequence: CTA
gttttactgtattcacttgg

SEQ ID NO: 247111 - DNA, 20 bp, Artificial Sequence
  Description of Artificial Sequence: Synthetic oligonucleotide
  Target: LAMA2; (-) strand; PAM type: YTN; PAM sequence: CTC
tagttttactgtattcactt

SEQ ID NO: 247112 - DNA, 20 bp, Artificial Sequence
  Description of Artificial Sequence: Synthetic oligonucleotide
  Target: LAMA2; (-) strand; PAM type: YTN; PAM sequence: TTA
atctctagttttactgtatt

SEQ ID NO: 247113 - DNA, 20 bp, Artificial Sequence
  Description of Artificial Sequence: Synthetic oligonucleotide
  Target: LAMA2; (-) strand; PAM type: YTN; PAM sequence: TTT
aatctctagttttactgtat

SEQ ID NO: 247114 - DNA, 20 bp, Artificial Sequence
  Description of Artificial Sequence: Synthetic oligonucleotide
  Target: LAMA2; (-) strand; PAM type: YTN; PAM sequence: TTT
taatctctagttttactgta

SEQ ID NO: 247115 - DNA, 20 bp, Artificial Sequence
  Description of Artificial Sequence: Synthetic oligonucleotide
  Target: LAMA2; (-) strand; PAM type: YTN; PAM sequence: TTA
ttttaatctctagttttact

SEQ ID NO: 247116 - DNA, 20 bp, Artificial Sequence
  Description of Artificial Sequence: Synthetic oligonucleotide
  Target: LAMA2; (-) strand; PAM type: YTN; PAM sequence: TTC
catggtcaattattttaatc

SEQ ID NO: 247117 - DNA, 20 bp, Artificial Sequence
  Description of Artificial Sequence: Synthetic oligonucleotide
  Target: LAMA2; (-) strand; PAM type: YTN; PAM sequence: TTA
gattccatggtcaattattt

SEQ ID NO: 247118 - DNA, 20 bp, Artificial Sequence
  Description of Artificial Sequence: Synthetic oligonucleotide
  Target: LAMA2; (-) strand; PAM type: YTN; PAM sequence: CTT
agattccatggtcaattatt

SEQ ID NO: 247119 - DNA, 20 bp, Artificial Sequence
  Description of Artificial Sequence: Synthetic oligonucleotide
  Target: LAMA2; (-) strand; PAM type: YTN; PAM sequence: CTG
tcttagattccatggtcaat

SEQ ID NO: 247120 - DNA, 20 bp, Artificial Sequence
  Description of Artificial Sequence: Synthetic oligonucleotide
  Target: LAMA2; (-) strand; PAM type: YTN; PAM sequence: CTC
atcactgtcttagattccat

SEQ ID NO: 247121 - DNA, 20 bp, Artificial Sequence
  Description of Artificial Sequence: Synthetic oligonucleotide
  Target: LAMA2; (-) strand; PAM type: YTN; PAM sequence: TTC
tcatcactgtcttagattcc

SEQ ID NO: 247122 - DNA, 20 bp, Artificial Sequence
  Description of Artificial Sequence: Synthetic oligonucleotide
  Target: LAMA2; (-) strand; PAM type: YTN; PAM sequence: TTT
ctcatcactgtcttagattc

SEQ ID NO: 247123 - DNA, 20 bp, Artificial Sequence
  Description of Artificial Sequence: Synthetic oligonucleotide
  Target: LAMA2; (-) strand; PAM type: YTN; PAM sequence: TTG
agggtttctcatcactgtct

SEQ ID NO: 247124 - DNA, 20 bp, Artificial Sequence
  Description of Artificial Sequence: Synthetic oligonucleotide
  Target: LAMA2; (-) strand; PAM type: YTN; PAM sequence: CTT
gagggtttctcatcactgtc

SEQ ID NO: 247125 - DNA, 20 bp, Artificial Sequence
  Description of Artificial Sequence: Synthetic oligonucleotide
  Target: LAMA2; (-) strand; PAM type: YTN; PAM sequence: CTG
tagcttgagggtttctcatc

SEQ ID NO: 247126 - DNA, 20 bp, Artificial Sequence
  Description of Artificial Sequence: Synthetic oligonucleotide
  Target: LAMA2; (-) strand; PAM type: YTN; PAM sequence: TTA
gggagacaatgggaaatcgc

SEQ ID NO: 247127 - DNA, 20 bp, Artificial Sequence
  Description of Artificial Sequence: Synthetic oligonucleotide
  Target: LAMA2; (-) strand; PAM type: YTN; PAM sequence: TTT
agggagacaatgggaaatcg

SEQ ID NO: 247128 - DNA, 20 bp, Artificial Sequence
  Description of Artificial Sequence: Synthetic oligonucleotide
  Target: LAMA2; (-) strand; PAM type: YTN; PAM sequence: CTA
atagcatttagggagacaat

SEQ ID NO: 247129 - DNA, 20 bp, Artificial Sequence
  Description of Artificial Sequence: Synthetic oligonucleotide
  Target: LAMA2; (-) strand; PAM type: YTN; PAM sequence: CTA
cagtactaatagcatttagg

SEQ ID NO: 247130 - DNA, 20 bp, Artificial Sequence
  Description of Artificial Sequence: Synthetic oligonucleotide
  Target: LAMA2; (-) strand; PAM type: YTN; PAM sequence: TTG
gctacagtactaatagcatt

SEQ ID NO: 247131 - DNA, 20 bp, Artificial Sequence
  Description of Artificial Sequence: Synthetic oligonucleotide
  Target: LAMA2; (-) strand; PAM type: YTN; PAM sequence: CTT
ggctacagtactaatagcat

SEQ ID NO: 247132 - DNA, 20 bp, Artificial Sequence
  Description of Artificial Sequence: Synthetic oligonucleotide
  Target: LAMA2; (-) strand; PAM type: YTN; PAM sequence: TTG
tcttggctacagtactaata

SEQ ID NO: 247133 - DNA, 20 bp, Artificial Sequence
  Description of Artificial Sequence: Synthetic oligonucleotide
  Target: LAMA2; (-) strand; PAM type: YTN; PAM sequence: CTT
gtcttggctacagtactaat

SEQ ID NO: 247134 - DNA, 20 bp, Artificial Sequence
  Description of Artificial Sequence: Synthetic oligonucleotide
  Target: LAMA2; (-) strand; PAM type: YTN; PAM sequence: CTA
taaaagaaagacttgtcttg

SEQ ID NO: 247135 - DNA, 20 bp, Artificial Sequence
  Description of Artificial Sequence: Synthetic oligonucleotide
  Target: LAMA2; (-) strand; PAM type: YTN; PAM sequence: TTG
tatagtcctataaaagaaag

SEQ ID NO: 247136 - DNA, 20 bp, Artificial Sequence
  Description of Artificial Sequence: Synthetic oligonucleotide
  Target: LAMA2; (-) strand; PAM type: YTN; PAM sequence: CTT
gtatagtcctataaaagaaa

SEQ ID NO: 247137 - DNA, 20 bp, Artificial Sequence
  Description of Artificial Sequence: Synthetic oligonucleotide
  Target: LAMA2; (-) strand; PAM type: YTN; PAM sequence: CTA
aggccttgtatagtcctata

SEQ ID NO: 247138 - DNA, 20 bp, Artificial Sequence
  Description of Artificial Sequence: Synthetic oligonucleotide
  Target: LAMA2; (-) strand; PAM type: YTN; PAM sequence: CTC
taaggccttgtatagtccta

SEQ ID NO: 247139 - DNA, 20 bp, Artificial Sequence
  Description of Artificial Sequence: Synthetic oligonucleotide
  Target: LAMA2; (-) strand; PAM type: YTN; PAM sequence: CTA
aatatcctctaaggccttgt

SEQ ID NO: 247140 - DNA, 20 bp, Artificial Sequence
  Description of Artificial Sequence: Synthetic oligonucleotide
  Target: LAMA2; (-) strand; PAM type: YTN; PAM sequence: TTA
ggccaaggatactaaatatc

SEQ ID NO: 247141 - DNA, 20 bp, Artificial Sequence
  Description of Artificial Sequence: Synthetic oligonucleotide
  Target: LAMA2; (-) strand; PAM type: YTN; PAM sequence: TTT
aggccaaggatactaaatat

SEQ ID NO: 247142 - DNA, 20 bp, Artificial Sequence
  Description of Artificial Sequence: Synthetic oligonucleotide
  Target: LAMA2; (-) strand; PAM type: YTN; PAM sequence: CTT
taggccaaggatactaaata

SEQ ID NO: 247143 - DNA, 20 bp, Artificial Sequence
  Description of Artificial Sequence: Synthetic oligonucleotide
  Target: LAMA2; (-) strand; PAM type: YTN; PAM sequence: TTA
tcctttaggccaaggatact

SEQ ID NO: 247144 - DNA, 20 bp, Artificial Sequence
  Description of Artificial Sequence: Synthetic oligonucleotide
  Target: LAMA2; (-) strand; PAM type: YTN; PAM sequence: TTT
atcctttaggccaaggatac

SEQ ID NO: 247145 - DNA, 20 bp, Artificial Sequence
  Description of Artificial Sequence: Synthetic oligonucleotide
  Target: LAMA2; (-) strand; PAM type: YTN; PAM sequence: CTT
tatcctttaggccaaggata

SEQ ID NO: 247146 - DNA, 20 bp, Artificial Sequence
  Description of Artificial Sequence: Synthetic oligonucleotide
  Target: LAMA2; (-) strand; PAM type: YTN; PAM sequence: TTA
cctttatcctttaggccaag

SEQ ID NO: 247147 - DNA, 20 bp, Artificial Sequence
  Description of Artificial Sequence: Synthetic oligonucleotide
  Target: LAMA2; (-) strand; PAM type: YTN; PAM sequence: TTT
acctttatcctttaggccaa

SEQ ID NO: 247148 - DNA, 20 bp, Artificial Sequence
  Description of Artificial Sequence: Synthetic oligonucleotide
  Target: LAMA2; (-) strand; PAM type: YTN; PAM sequence: CTT
tacctttatcctttaggcca

SEQ ID NO: 247149 - DNA, 20 bp, Artificial Sequence
  Description of Artificial Sequence: Synthetic oligonucleotide
  Target: LAMA2; (-) strand; PAM type: YTN; PAM sequence: CTG
taccactttacctttatcct

SEQ ID NO: 247150 - DNA, 20 bp, Artificial Sequence
  Description of Artificial Sequence: Synthetic oligonucleotide
  Target: LAMA2; (-) strand; PAM type: YTN; PAM sequence: CTA
aatgtgtactgtaccacttt

SEQ ID NO: 247151 - DNA, 20 bp, Artificial Sequence
  Description of Artificial Sequence: Synthetic oligonucleotide
  Target: LAMA2; (-) strand; PAM type: YTN; PAM sequence: TTA
gtgtacagcacactaaatgt

SEQ ID NO: 247152 - DNA, 20 bp, Artificial Sequence
  Description of Artificial Sequence: Synthetic oligonucleotide
  Target: LAMA2; (-) strand; PAM type: YTN; PAM sequence: TTT
agtgtacagcacactaaatg

SEQ ID NO: 247153 - DNA, 20 bp, Artificial Sequence
  Description of Artificial Sequence: Synthetic oligonucleotide
  Target: LAMA2; (-) strand; PAM type: YTN; PAM sequence: CTG
atatttagtgtacagcacac

SEQ ID NO: 247154 - DNA, 20 bp, Artificial Sequence
  Description of Artificial Sequence: Synthetic oligonucleotide
  Target: LAMA2; (-) strand; PAM type: YTN; PAM sequence: CTA
ctgatatttagtgtacagca

SEQ ID NO: 247155 - DNA, 20 bp, Artificial Sequence
  Description of Artificial Sequence: Synthetic oligonucleotide
  Target: LAMA2; (-) strand; PAM type: YTN; PAM sequence: TTG
tggcaaagtgctactgatat

SEQ ID NO: 247156 - DNA, 20 bp, Artificial Sequence
  Description of Artificial Sequence: Synthetic oligonucleotide
  Target: LAMA2; (-) strand; PAM type: YTN; PAM sequence: TTT
gtggcaaagtgctactgata

SEQ ID NO: 247157 - DNA, 20 bp, Artificial Sequence
  Description of Artificial Sequence: Synthetic oligonucleotide
  Target: LAMA2; (-) strand; PAM type: YTN; PAM sequence: TTA
atttgtggcaaagtgctact

SEQ ID NO: 247158 - DNA, 20 bp, Artificial Sequence
  Description of Artificial Sequence: Synthetic oligonucleotide
  Target: LAMA2; (-) strand; PAM type: YTN; PAM sequence: TTT
aatttgtggcaaagtgctac

SEQ ID NO: 247159 - DNA, 20 bp, Artificial Sequence
  Description of Artificial Sequence: Synthetic oligonucleotide
  Target: LAMA2; (-) strand; PAM type: YTN; PAM sequence: CTT
taatttgtggcaaagtgcta

SEQ ID NO: 247160 - DNA, 20 bp, Artificial Sequence
  Description of Artificial Sequence: Synthetic oligonucleotide
  Target: LAMA2; (-) strand; PAM type: YTN; PAM sequence: TTC
ctttaatttgtggcaaagtg

SEQ ID NO: 247161 - DNA, 20 bp, Artificial Sequence
  Description of Artificial Sequence: Synthetic oligonucleotide
  Target: LAMA2; (-) strand; PAM type: YTN; PAM sequence: CTG
ttcctttaatttgtggcaaa

SEQ ID NO: 247162 - DNA, 20 bp, Artificial Sequence
  Description of Artificial Sequence: Synthetic oligonucleotide
  Target: LAMA2; (-) strand; PAM type: YTN; PAM sequence: TTA
tatactgttcctttaatttg

SEQ ID NO: 247163 - DNA, 20 bp, Artificial Sequence
  Description of Artificial Sequence: Synthetic oligonucleotide
  Target: LAMA2; (-) strand; PAM type: YTN; PAM sequence: CTG
tcaaggattatatactgttc

SEQ ID NO: 247164 - DNA, 20 bp, Artificial Sequence
  Description of Artificial Sequence: Synthetic oligonucleotide
  Target: LAMA2; (-) strand; PAM type: YTN; PAM sequence: TTA
aagcactgtcaaggattata

SEQ ID NO: 247165 - DNA, 20 bp, Artificial Sequence
  Description of Artificial Sequence: Synthetic oligonucleotide
  Target: LAMA2; (-) strand; PAM type: YTN; PAM sequence: CTA
aaaaagaaggaaatgcaatg

SEQ ID NO: 247166 - DNA, 20 bp, Artificial Sequence
  Description of Artificial Sequence: Synthetic oligonucleotide
  Target: LAMA2; (-) strand; PAM type: YTN; PAM sequence: TTC
taaaaaagaaggaaatgcaa

SEQ ID NO: 247167 - DNA, 20 bp, Artificial Sequence
  Description of Artificial Sequence: Synthetic oligonucleotide
  Target: LAMA2; (-) strand; PAM type: YTN; PAM sequence: TTC
cattctaaaaaagaaggaaa

SEQ ID NO: 247168 - DNA, 20 bp, Artificial Sequence
  Description of Artificial Sequence: Synthetic oligonucleotide
  Target: LAMA2; (-) strand; PAM type: YTN; PAM sequence: TTG
gggaacatatagaaaaaaat

SEQ ID NO: 247169 - DNA, 20 bp, Artificial Sequence
  Description of Artificial Sequence: Synthetic oligonucleotide
  Target: LAMA2; (-) strand; PAM type: YTN; PAM sequence: TTT
ggggaacatatagaaaaaaa

SEQ ID NO: 247170 - DNA, 20 bp, Artificial Sequence
  Description of Artificial Sequence: Synthetic oligonucleotide
  Target: LAMA2; (-) strand; PAM type: YTN; PAM sequence: CTT
tggggaacatatagaaaaaa

SEQ ID NO: 247171 - DNA, 20 bp, Artificial Sequence
  Description of Artificial Sequence: Synthetic oligonucleotide
  Target: LAMA2; (-) strand; PAM type: YTN; PAM sequence: TTG
ctttggggaacatatagaaa

SEQ ID NO: 247172 - DNA, 20 bp, Artificial Sequence
  Description of Artificial Sequence: Synthetic oligonucleotide
  Target: LAMA2; (-) strand; PAM type: YTN; PAM sequence: CTT
gctttggggaacatatagaa

SEQ ID NO: 247173 - DNA, 20 bp, Artificial Sequence
  Description of Artificial Sequence: Synthetic oligonucleotide
  Target: LAMA2; (-) strand; PAM type: YTN; PAM sequence: CTA
gccttgctttggggaacata

SEQ ID NO: 247174 - DNA, 20 bp, Artificial Sequence
  Description of Artificial Sequence: Synthetic oligonucleotide
  Target: LAMA2; (-) strand; PAM type: YTN; PAM sequence: TTA
tataaactagccttgctttg

SEQ ID NO: 247175 - DNA, 20 bp, Artificial Sequence
  Description of Artificial Sequence: Synthetic oligonucleotide
  Target: LAMA2; (-) strand; PAM type: YTN; PAM sequence: TTA
atgttatataaactagcctt

SEQ ID NO: 247176 - DNA, 20 bp, Artificial Sequence
  Description of Artificial Sequence: Synthetic oligonucleotide
  Target: LAMA2; (-) strand; PAM type: YTN; PAM sequence: TTT
aatgttatataaactagcct

SEQ ID NO: 247177 - DNA, 20 bp, Artificial Sequence
  Description of Artificial Sequence: Synthetic oligonucleotide
  Target: LAMA2; (-) strand; PAM type: YTN; PAM sequence: TTG
cataagtaatttaatgttat

SEQ ID NO: 247178 - DNA, 20 bp, Artificial Sequence
  Description of Artificial Sequence: Synthetic oligonucleotide
  Target: LAMA2; (-) strand; PAM type: YTN; PAM sequence: TTT
gcataagtaatttaatgtta

SEQ ID NO: 247179 - DNA, 20 bp, Artificial Sequence
  Description of Artificial Sequence: Synthetic oligonucleotide
  Target: LAMA2; (-) strand; PAM type: YTN; PAM sequence: TTG
catttgcataagtaatttaa

SEQ ID NO: 247180 - DNA, 20 bp, Artificial Sequence
  Description of Artificial Sequence: Synthetic oligonucleotide
  Target: LAMA2; (-) strand; PAM type: YTN; PAM sequence: TTT
gcatttgcataagtaattta

SEQ ID NO: 247181 - DNA, 20 bp, Artificial Sequence
  Description of Artificial Sequence: Synthetic oligonucleotide
  Target: LAMA2; (-) strand; PAM type: YTN; PAM sequence: TTT
tgcatttgcataagtaattt

SEQ ID NO: 247182 - DNA, 20 bp, Artificial Sequence
  Description of Artificial Sequence: Synthetic oligonucleotide
  Target: LAMA2; (-) strand; PAM type: YTN; PAM sequence: TTT
ttgcatttgcataagtaatt

SEQ ID NO: 247183 - DNA, 20 bp, Artificial Sequence
  Description of Artificial Sequence: Synthetic oligonucleotide
  Target: LAMA2; (-) strand; PAM type: YTN; PAM sequence: TTA
atttttgcatttgcataagt

SEQ ID NO: 247184 - DNA, 20 bp, Artificial Sequence
  Description of Artificial Sequence: Synthetic oligonucleotide
  Target: LAMA2; (-) strand; PAM type: YTN; PAM sequence: TTC
agattaatttttgcatttgc

SEQ ID NO: 247185 - DNA, 20 bp, Artificial Sequence
  Description of Artificial Sequence: Synthetic oligonucleotide
  Target: LAMA2; (-) strand; PAM type: YTN; PAM sequence: CTA
gatataataaatagatgttc

SEQ ID NO: 247186 - DNA, 20 bp, Artificial Sequence
  Description of Artificial Sequence: Synthetic oligonucleotide
  Target: LAMA2; (-) strand; PAM type: YTN; PAM sequence: TTG
tgctagatataataaataga

SEQ ID NO: 247187 - DNA, 20 bp, Artificial Sequence
  Description of Artificial Sequence: Synthetic oligonucleotide
  Target: LAMA2; (-) strand; PAM type: YTN; PAM sequence: TTT
gtgctagatataataaatag

SEQ ID NO: 247188 - DNA, 20 bp, Artificial Sequence
  Description of Artificial Sequence: Synthetic oligonucleotide
  Target: LAMA2; (-) strand; PAM type: YTN; PAM sequence: TTT
tgtgctagatataataaata

SEQ ID NO: 247189 - DNA, 20 bp, Artificial Sequence
  Description of Artificial Sequence: Synthetic oligonucleotide
  Target: LAMA2; (-) strand; PAM type: YTN; PAM sequence: CTA
tgttttgtgctagatataat

SEQ ID NO: 247190 - DNA, 20 bp, Artificial Sequence
  Description of Artificial Sequence: Synthetic oligonucleotide
  Target: LAMA2; (-) strand; PAM type: YTN; PAM sequence: TTC
tatgttttgtgctagatata

SEQ ID NO: 247191 - DNA, 20 bp, Artificial Sequence
  Description of Artificial Sequence: Synthetic oligonucleotide
  Target: LAMA2; (-) strand; PAM type: YTN; PAM sequence: TTT
ctatgttttgtgctagatat

SEQ ID NO: 247192 - DNA, 20 bp, Artificial Sequence
  Description of Artificial Sequence: Synthetic oligonucleotide
  Target: LAMA2; (-) strand; PAM type: YTN; PAM sequence: TTG
tttctatgttttgtgctaga

SEQ ID NO: 247193 - DNA, 20 bp, Artificial Sequence
  Description of Artificial Sequence: Synthetic oligonucleotide
  Target: LAMA2; (-) strand; PAM type: YTN; PAM sequence: TTT
gtttctatgttttgtgctag

SEQ ID NO: 247194 - DNA, 20 bp, Artificial Sequence
  Description of Artificial Sequence: Synthetic oligonucleotide
  Target: LAMA2; (-) strand; PAM type: YTN; PAM sequence: CTT
tgtttctatgttttgtgcta

SEQ ID NO: 247195 - DNA, 20 bp, Artificial Sequence
  Description of Artificial Sequence: Synthetic oligonucleotide
  Target: LAMA2; (-) strand; PAM type: YTN; PAM sequence: TTC
tttgtttctatgttttgtgc

SEQ ID NO: 247196 - DNA, 20 bp, Artificial Sequence
  Description of Artificial Sequence: Synthetic oligonucleotide
  Target: LAMA2; (-) strand; PAM type: YTN; PAM sequence: CTT
ctttgtttctatgttttgtg

SEQ ID NO: 247197 - DNA, 20 bp, Artificial Sequence
  Description of Artificial Sequence: Synthetic oligonucleotide
  Target: LAMA2; (-) strand; PAM type: YTN; PAM sequence: CTA
tgccttctttgtttctatgt

SEQ ID NO: 247198 - DNA, 20 bp, Artificial Sequence
  Description of Artificial Sequence: Synthetic oligonucleotide
  Target: LAMA2; (-) strand; PAM type: YTN; PAM sequence: TTC
aaaataataacctatgcctt

SEQ ID NO: 247199 - DNA, 20 bp, Artificial Sequence
  Description of Artificial Sequence: Synthetic oligonucleotide
  Target: LAMA2; (-) strand; PAM type: YTN; PAM sequence: TTT
caaaataataacctatgcct

SEQ ID NO: 247200 - DNA, 20 bp, Artificial Sequence
  Description of Artificial Sequence: Synthetic oligonucleotide
  Target: LAMA2; (-) strand; PAM type: YTN; PAM sequence: TTC
agtaaagcataatttcaaaa

SEQ ID NO: 247201 - DNA, 20 bp, Artificial Sequence
  Description of Artificial Sequence: Synthetic oligonucleotide
  Target: LAMA2; (-) strand; PAM type: YTN; PAM sequence: CTA
tgtgttcagtaaagcataat

SEQ ID NO: 247202 - DNA, 20 bp, Artificial Sequence
  Description of Artificial Sequence: Synthetic oligonucleotide
  Target: LAMA2; (-) strand; PAM type: YTN; PAM sequence: TTC
ctatgtgttcagtaaagcat

SEQ ID NO: 247203 - DNA, 20 bp, Artificial Sequence
  Description of Artificial Sequence: Synthetic oligonucleotide
  Target: LAMA2; (-) strand; PAM type: YTN; PAM sequence: TTG
gtagcaattcctatgtgttc

SEQ ID NO: 247204 - DNA, 20 bp, Artificial Sequence
  Description of Artificial Sequence: Synthetic oligonucleotide
  Target: LAMA2; (-) strand; PAM type: YTN; PAM sequence: TTA
aacgattggtagcaattcct

SEQ ID NO: 247205 - DNA, 20 bp, Artificial Sequence
  Description of Artificial Sequence: Synthetic oligonucleotide
  Target: LAMA2; (-) strand; PAM type: YTN; PAM sequence: TTT
aaacgattggtagcaattcc

SEQ ID NO: 247206 - DNA, 20 bp, Artificial Sequence
  Description of Artificial Sequence: Synthetic oligonucleotide
  Target: LAMA2; (-) strand; PAM type: YTN; PAM sequence: CTA
tttaaacgattggtagcaat

SEQ ID NO: 247207 - DNA, 20 bp, Artificial Sequence
  Description of Artificial Sequence: Synthetic oligonucleotide
  Target: LAMA2; (-) strand; PAM type: YTN; PAM sequence: CTA
agaaataaggcaactattta

SEQ ID NO: 247208 - DNA, 20 bp, Artificial Sequence
  Description of Artificial Sequence: Synthetic oligonucleotide
  Target: LAMA2; (-) strand; PAM type: YTN; PAM sequence: TTG
tctaagaaataaggcaacta

SEQ ID NO: 247209 - DNA, 20 bp, Artificial Sequence
  Description of Artificial Sequence: Synthetic oligonucleotide
  Target: LAMA2; (-) strand; PAM type: YTN; PAM sequence: TTT
gtctaagaaataaggcaact

SEQ ID NO: 247210 - DNA, 20 bp, Artificial Sequence
  Description of Artificial Sequence: Synthetic oligonucleotide
  Target: LAMA2; (-) strand; PAM type: YTN; PAM sequence: CTA
tttgtctaagaaataaggca

SEQ ID NO: 247211 - DNA, 20 bp, Artificial Sequence
  Description of Artificial Sequence: Synthetic oligonucleotide
  Target: LAMA2; (-) strand; PAM type: YTN; PAM sequence: TTA
ctatttgtctaagaaataag

SEQ ID NO: 247212 - DNA, 20 bp, Artificial Sequence
  Description of Artificial Sequence: Synthetic oligonucleotide
  Target: LAMA2; (-) strand; PAM type: YTN; PAM sequence: TTC
agttactatttgtctaagaa

SEQ ID NO: 247213 - DNA, 20 bp, Artificial Sequence
  Description of Artificial Sequence: Synthetic oligonucleotide
  Target: LAMA2; (-) strand; PAM type: YTN; PAM sequence: TTT
cagttactatttgtctaaga

SEQ ID NO: 247214 - DNA, 20 bp, Artificial Sequence
  Description of Artificial Sequence: Synthetic oligonucleotide
  Target: LAMA2; (-) strand; PAM type: YTN; PAM sequence: CTC
catacatttcagttactatt

SEQ ID NO: 247215 - DNA, 20 bp, Artificial Sequence
  Description of Artificial Sequence: Synthetic oligonucleotide
  Target: LAMA2; (-) strand; PAM type: YTN; PAM sequence: TTC
caaatatatgcatgaatgct

SEQ ID NO: 247216 - DNA, 20 bp, Artificial Sequence
  Description of Artificial Sequence: Synthetic oligonucleotide
  Target: LAMA2; (-) strand; PAM type: YTN; PAM sequence: TTA
atacattccaaatatatgca

SEQ ID NO: 247217 - DNA, 20 bp, Artificial Sequence
  Description of Artificial Sequence: Synthetic oligonucleotide
  Target: LAMA2; (-) strand; PAM type: YTN; PAM sequence: CTT
aatacattccaaatatatgc

SEQ ID NO: 247218 - DNA, 20 bp, Artificial Sequence
  Description of Artificial Sequence: Synthetic oligonucleotide
  Target: LAMA2; (-) strand; PAM type: YTN; PAM sequence: CTG
cgccaggtatacacatgaac

SEQ ID NO: 247219 - DNA, 20 bp, Artificial Sequence
  Description of Artificial Sequence: Synthetic oligonucleotide
  Target: LAMA2; (-) strand; PAM type: YTN; PAM sequence: CTC
tgcgccaggtatacacatga

SEQ ID NO: 247220 - DNA, 20 bp, Artificial Sequence
  Description of Artificial Sequence: Synthetic oligonucleotide
  Target: LAMA2; (-) strand; PAM type: YTN; PAM sequence: TTA
actctgcgccaggtatacac

SEQ ID NO: 247221 - DNA, 20 bp, Artificial Sequence
  Description of Artificial Sequence: Synthetic oligonucleotide
  Target: LAMA2; (-) strand; PAM type: YTN; PAM sequence: CTG
tgggaaaatcaaatcagata

SEQ ID NO: 247222 - DNA, 20 bp, Artificial Sequence
  Description of Artificial Sequence: Synthetic oligonucleotide
  Target: LAMA2; (-) strand; PAM type: YTN; PAM sequence: TTC
atggcactgtgggaaaatca

SEQ ID NO: 247223 - DNA, 20 bp, Artificial Sequence
  Description of Artificial Sequence: Synthetic oligonucleotide
  Target: LAMA2; (-) strand; PAM type: YTN; PAM sequence: CTT
catggcactgtgggaaaatc

SEQ ID NO: 247224 - DNA, 20 bp, Artificial Sequence
  Description of Artificial Sequence: Synthetic oligonucleotide
  Target: LAMA2; (-) strand; PAM type: YTN; PAM sequence: TTC
atacttcatggcactgtggg

SEQ ID NO: 247225 - DNA, 20 bp, Artificial Sequence
  Description of Artificial Sequence: Synthetic oligonucleotide
  Target: LAMA2; (-) strand; PAM type: YTN; PAM sequence: CTA
tataatagtgataatgataa

SEQ ID NO: 247226 - DNA, 20 bp, Artificial Sequence
  Description of Artificial Sequence: Synthetic oligonucleotide
  Target: LAMA2; (-) strand; PAM type: YTN; PAM sequence: TTA
ctatataatagtgataatga

SEQ ID NO: 247227 - DNA, 20 bp, Artificial Sequence
  Description of Artificial Sequence: Synthetic oligonucleotide
  Target: LAMA2; (-) strand; PAM type: YTN; PAM sequence: TTT
actatataatagtgataatg

SEQ ID NO: 247228 - DNA, 20 bp, Artificial Sequence
  Description of Artificial Sequence: Synthetic oligonucleotide
  Target: LAMA2; (-) strand; PAM type: YTN; PAM sequence: CTG
tttactatataatagtgata

SEQ ID NO: 247229 - DNA, 20 bp, Artificial Sequence
  Description of Artificial Sequence: Synthetic oligonucleotide
  Target: LAMA2; (-) strand; PAM type: YTN; PAM sequence: TTA
tactgtttactatataatag

SEQ ID NO: 247230 - DNA, 20 bp, Artificial Sequence
  Description of Artificial Sequence: Synthetic oligonucleotide
  Target: LAMA2; (-) strand; PAM type: YTN; PAM sequence: TTT
atactgtttactatataata

SEQ ID NO: 247231 - DNA, 20 bp, Artificial Sequence
  Description of Artificial Sequence: Synthetic oligonucleotide
  Target: LAMA2; (-) strand; PAM type: YTN; PAM sequence: TTT
tatactgtttactatataat

SEQ ID NO: 247232 - DNA, 20 bp, Artificial Sequence
  Description of Artificial Sequence: Synthetic oligonucleotide
  Target: LAMA2; (-) strand; PAM type: YTN; PAM sequence: TTT
ttatactgtttactatataa

SEQ ID NO: 247233 - DNA, 20 bp, Artificial Sequence
  Description of Artificial Sequence: Synthetic oligonucleotide
  Target: LAMA2; (-) strand; PAM type: YTN; PAM sequence: CTC
caagtcatagacacattttt

SEQ ID NO: 247234 - DNA, 20 bp, Artificial Sequence
  Description of Artificial Sequence: Synthetic oligonucleotide
  Target: LAMA2; (-) strand; PAM type: YTN; PAM sequence: TTC
tccaagtcatagacacattt

SEQ ID NO: 247235 - DNA, 20 bp, Artificial Sequence
  Description of Artificial Sequence: Synthetic oligonucleotide
  Target: LAMA2; (-) strand; PAM type: YTN; PAM sequence: TTC
cattctccaagtcatagaca

SEQ ID NO: 247236 - DNA, 20 bp, Artificial Sequence
  Description of Artificial Sequence: Synthetic oligonucleotide
  Target: LAMA2; (-) strand; PAM type: YTN; PAM sequence: TTT
ccattctccaagtcatagac

SEQ ID NO: 247237 - DNA, 20 bp, Artificial Sequence
  Description of Artificial Sequence: Synthetic oligonucleotide
  Target: LAMA2; (-) strand; PAM type: YTN; PAM sequence: TTT
tccattctccaagtcataga

SEQ ID NO: 247238 - DNA, 20 bp, Artificial Sequence
  Description of Artificial Sequence: Synthetic oligonucleotide
  Target: LAMA2; (-) strand; PAM type: YTN; PAM sequence: TTT
ttccattctccaagtcatag

SEQ ID NO: 247239 - DNA, 20 bp, Artificial Sequence
  Description of Artificial Sequence: Synthetic oligonucleotide
  Target: LAMA2; (-) strand; PAM type: YTN; PAM sequence: TTG
taaaacatttttccattctc

SEQ ID NO: 247240 - DNA, 20 bp, Artificial Sequence
  Description of Artificial Sequence: Synthetic oligonucleotide
  Target: LAMA2; (-) strand; PAM type: YTN; PAM sequence: TTC
aatgtcaacatgaatggaag

SEQ ID NO: 247241 - DNA, 20 bp, Artificial Sequence
  Description of Artificial Sequence: Synthetic oligonucleotide
  Target: LAMA2; (-) strand; PAM type: YTN; PAM sequence: CTA
gaacaattcaatgtcaacat

SEQ ID NO: 247242 - DNA, 20 bp, Artificial Sequence
  Description of Artificial Sequence: Synthetic oligonucleotide
  Target: LAMA2; (-) strand; PAM type: YTN; PAM sequence: TTA
gcagcctagaacaattcaat

SEQ ID NO: 247243 - DNA, 20 bp, Artificial Sequence
  Description of Artificial Sequence: Synthetic oligonucleotide
  Target: LAMA2; (-) strand; PAM type: YTN; PAM sequence: CTT
agcagcctagaacaattcaa

SEQ ID NO: 247244 - DNA, 20 bp, Artificial Sequence
  Description of Artificial Sequence: Synthetic oligonucleotide
  Target: LAMA2; (-) strand; PAM type: YTN; PAM sequence: CTG
ccttagcagcctagaacaat

SEQ ID NO: 247245 - DNA, 20 bp, Artificial Sequence
  Description of Artificial Sequence: Synthetic oligonucleotide
  Target: LAMA2; (-) strand; PAM type: YTN; PAM sequence: CTG
acagtgctgccttagcagcc

SEQ ID NO: 247246 - DNA, 20 bp, Artificial Sequence
  Description of Artificial Sequence: Synthetic oligonucleotide
  Target: LAMA2; (-) strand; PAM type: YTN; PAM sequence: TTC
tgacagtgctgccttagcag

SEQ ID NO: 247247 - DNA, 20 bp, Artificial Sequence
  Description of Artificial Sequence: Synthetic oligonucleotide
  Target: LAMA2; (-) strand; PAM type: YTN; PAM sequence: CTT
ctgacagtgctgccttagca

SEQ ID NO: 247248 - DNA, 20 bp, Artificial Sequence
  Description of Artificial Sequence: Synthetic oligonucleotide
  Target: LAMA2; (-) strand; PAM type: YTN; PAM sequence: CTA
gaaaaaacgtggcttctgac

SEQ ID NO: 247249 - DNA, 20 bp, Artificial Sequence
  Description of Artificial Sequence: Synthetic oligonucleotide
  Target: LAMA2; (-) strand; PAM type: YTN; PAM sequence: CTA
aaggacaaaggaataaagtg

SEQ ID NO: 247250 - DNA, 20 bp, Artificial Sequence
  Description of Artificial Sequence: Synthetic oligonucleotide
  Target: LAMA2; (-) strand; PAM type: YTN; PAM sequence: TTA
aggaactaaaggacaaagga

SEQ ID NO: 247251 - DNA, 20 bp, Artificial Sequence
  Description of Artificial Sequence: Synthetic oligonucleotide
  Target: LAMA2; (-) strand; PAM type: YTN; PAM sequence: TTT
aaggaactaaaggacaaagg

SEQ ID NO: 247252 - DNA, 20 bp, Artificial Sequence
  Description of Artificial Sequence: Synthetic oligonucleotide
  Target: LAMA2; (-) strand; PAM type: YTN; PAM sequence: TTA
atcatcaatgtaaaaagaaa

SEQ ID NO: 247253 - DNA, 20 bp, Artificial Sequence
  Description of Artificial Sequence: Synthetic oligonucleotide
  Target: LAMA2; (-) strand; PAM type: YTN; PAM sequence: TTT
aatcatcaatgtaaaaagaa

SEQ ID NO: 247254 - DNA, 20 bp, Artificial Sequence
  Description of Artificial Sequence: Synthetic oligonucleotide
  Target: LAMA2; (-) strand; PAM type: YTN; PAM sequence: TTT
taatcatcaatgtaaaaaga

SEQ ID NO: 247255 - DNA, 20 bp, Artificial Sequence
  Description of Artificial Sequence: Synthetic oligonucleotide
  Target: LAMA2; (-) strand; PAM type: YTN; PAM sequence: CTA
ttttaatcatcaatgtaaaa

SEQ ID NO: 247256 - DNA, 20 bp, Artificial Sequence
  Description of Artificial Sequence: Synthetic oligonucleotide
  Target: LAMA2; (-) strand; PAM type: YTN; PAM sequence: CTC
actattttaatcatcaatgt

SEQ ID NO: 247257 - DNA, 20 bp, Artificial Sequence
  Description of Artificial Sequence: Synthetic oligonucleotide
  Target: LAMA2; (-) strand; PAM type: YTN; PAM sequence: TTC
aggctcactattttaatcat

SEQ ID NO: 247258 - DNA, 20 bp, Artificial Sequence
  Description of Artificial Sequence: Synthetic oligonucleotide
  Target: LAMA2; (-) strand; PAM type: YTN; PAM sequence: TTA
aaaaaattcaggctcactat

SEQ ID NO: 247259 - DNA, 20 bp, Artificial Sequence
  Description of Artificial Sequence: Synthetic oligonucleotide
  Target: LAMA2; (-) strand; PAM type: YTN; PAM sequence: TTT
aaaaaaattcaggctcacta

SEQ ID NO: 247260 - DNA, 20 bp, Artificial Sequence
  Description of Artificial Sequence: Synthetic oligonucleotide
  Target: LAMA2; (-) strand; PAM type: YTN; PAM sequence: TTA
tttaaaaaaattcaggctca

SEQ ID NO: 247261 - DNA, 20 bp, Artificial Sequence
  Description of Artificial Sequence: Synthetic oligonucleotide
  Target: LAMA2; (-) strand; PAM type: YTN; PAM sequence: TTT
atttaaaaaaattcaggctc

SEQ ID NO: 247262 - DNA, 20 bp, Artificial Sequence
  Description of Artificial Sequence: Synthetic oligonucleotide
  Target: LAMA2; (-) strand; PAM type: YTN; PAM sequence: TTT
tatttaaaaaaattcaggct

SEQ ID NO: 247263 - DNA, 20 bp, Artificial Sequence
  Description of Artificial Sequence: Synthetic oligonucleotide
  Target: LAMA2; (-) strand; PAM type: YTN; PAM sequence: TTT
ttatttaaaaaaattcaggc

SEQ ID NO: 247264 - DNA, 20 bp, Artificial Sequence
  Description of Artificial Sequence: Synthetic oligonucleotide
  Target: LAMA2; (-) strand; PAM type: YTN; PAM sequence: TTG
gtttttatttaaaaaaattc

SEQ ID NO: 247265 - DNA, 20 bp, Artificial Sequence
  Description of Artificial Sequence: Synthetic oligonucleotide
  Target: LAMA2; (-) strand; PAM type: YTN; PAM sequence: TTA
gttggtttttatttaaaaaa

SEQ ID NO: 247266 - DNA, 20 bp, Artificial Sequence
  Description of Artificial Sequence: Synthetic oligonucleotide
  Target: LAMA2; (-) strand; PAM type: YTN; PAM sequence: CTT
agttggtttttatttaaaaa

SEQ ID NO: 247267 - DNA, 20 bp, Artificial Sequence
  Description of Artificial Sequence: Synthetic oligonucleotide
  Target: LAMA2; (-) strand; PAM type: YTN; PAM sequence: CTC
caaataataaataataaaaa

SEQ ID NO: 247268 - DNA, 20 bp, Artificial Sequence
  Description of Artificial Sequence: Synthetic oligonucleotide
  Target: LAMA2; (-) strand; PAM type: YTN; PAM sequence: TTC
ctccaaataataaataataa

SEQ ID NO: 247269 - DNA, 20 bp, Artificial Sequence
  Description of Artificial Sequence: Synthetic oligonucleotide
  Target: LAMA2; (-) strand; PAM type: YTN; PAM sequence: TTG
gagggcatatgttcctccaa

SEQ ID NO: 247270 - DNA, 20 bp, Artificial Sequence
  Description of Artificial Sequence: Synthetic oligonucleotide
  Target: LAMA2; (-) strand; PAM type: YTN; PAM sequence: TTT
ggagggcatatgttcctcca

SEQ ID NO: 247271 - DNA, 20 bp, Artificial Sequence
  Description of Artificial Sequence: Synthetic oligonucleotide
  Target: LAMA2; (-) strand; PAM type: YTN; PAM sequence: TTT
tggagggcatatgttcctcc

SEQ ID NO: 247272 - DNA, 20 bp, Artificial Sequence
  Description of Artificial Sequence: Synthetic oligonucleotide
  Target: LAMA2; (-) strand; PAM type: YTN; PAM sequence: CTA
aatgatattttggagggcat

SEQ ID NO: 247273 - DNA, 20 bp, Artificial Sequence
  Description of Artificial Sequence: Synthetic oligonucleotide
  Target: LAMA2; (-) strand; PAM type: YTN; PAM sequence: CTA
agatgcactaaatgatattt

SEQ ID NO: 247274 - DNA, 20 bp, Artificial Sequence
  Description of Artificial Sequence: Synthetic oligonucleotide
  Target: LAMA2; (-) strand; PAM type: YTN; PAM sequence: TTA
tgtctaagatgcactaaatg

SEQ ID NO: 247275 - DNA, 20 bp, Artificial Sequence
  Description of Artificial Sequence: Synthetic oligonucleotide
  Target: LAMA2; (-) strand; PAM type: YTN; PAM sequence: TTT
atgtctaagatgcactaaat

SEQ ID NO: 247276 - DNA, 20 bp, Artificial Sequence
  Description of Artificial Sequence: Synthetic oligonucleotide
  Target: LAMA2; (-) strand; PAM type: YTN; PAM sequence: TTT
tatgtctaagatgcactaaa

SEQ ID NO: 247277 - DNA, 20 bp, Artificial Sequence
  Description of Artificial Sequence: Synthetic oligonucleotide
  Target: LAMA2; (-) strand; PAM type: YTN; PAM sequence: TTG
ttttatgtctaagatgcact

SEQ ID NO: 247278 - DNA, 20 bp, Artificial Sequence
  Description of Artificial Sequence: Synthetic oligonucleotide
  Target: LAMA2; (-) strand; PAM type: YTN; PAM sequence: TTA
aattgttttatgtctaagat

SEQ ID NO: 247279 - DNA, 20 bp, Artificial Sequence
  Description of Artificial Sequence: Synthetic oligonucleotide
  Target: LAMA2; (-) strand; PAM type: YTN; PAM sequence: TTC
aagcagttaaattgttttat

SEQ ID NO: 247280 - DNA, 20 bp, Artificial Sequence
  Description of Artificial Sequence: Synthetic oligonucleotide
  Target: LAMA2; (-) strand; PAM type: YTN; PAM sequence: CTT
caagcagttaaattgtttta

SEQ ID NO: 247281 - DNA, 20 bp, Artificial Sequence
  Description of Artificial Sequence: Synthetic oligonucleotide
  Target: LAMA2; (-) strand; PAM type: YTN; PAM sequence: TTC
ttcaagcagttaaattgttt

SEQ ID NO: 247282 - DNA, 20 bp, Artificial Sequence
  Description of Artificial Sequence: Synthetic oligonucleotide
  Target: LAMA2; (-) strand; PAM type: YTN; PAM sequence: TTT
cttcaagcagttaaattgtt

SEQ ID NO: 247283 - DNA, 20 bp, Artificial Sequence
  Description of Artificial Sequence: Synthetic oligonucleotide
  Target: LAMA2; (-) strand; PAM type: YTN; PAM sequence: TTT
tcttcaagcagttaaattgt

SEQ ID NO: 247284 - DNA, 20 bp, Artificial Sequence
  Description of Artificial Sequence: Synthetic oligonucleotide
  Target: LAMA2; (-) strand; PAM type: YTN; PAM sequence: CTG
gacattttcttcaagcagtt

SEQ ID NO: 247285 - DNA, 20 bp, Artificial Sequence
  Description of Artificial Sequence: Synthetic oligonucleotide
  Target: LAMA2; (-) strand; PAM type: YTN; PAM sequence: TTC
agaagctggacattttcttc

SEQ ID NO: 247286 - DNA, 20 bp, Artificial Sequence
  Description of Artificial Sequence: Synthetic oligonucleotide
  Target: LAMA2; (-) strand; PAM type: YTN; PAM sequence: TTT
cagaagctggacattttctt

SEQ ID NO: 247287 - DNA, 20 bp, Artificial Sequence
  Description of Artificial Sequence: Synthetic oligonucleotide
  Target: LAMA2; (-) strand; PAM type: YTN; PAM sequence: CTA
atggcatgccatttcagaag

SEQ ID NO: 247288 - DNA, 20 bp, Artificial Sequence
  Description of Artificial Sequence: Synthetic oligonucleotide
  Target: LAMA2; (-) strand; PAM type: YTN; PAM sequence: CTA
atatctaatggcatgccatt

SEQ ID NO: 247289 - DNA, 20 bp, Artificial Sequence
  Description of Artificial Sequence: Synthetic oligonucleotide
  Target: LAMA2; (-) strand; PAM type: YTN; PAM sequence: TTA
taaacaaatgtcactaatat

SEQ ID NO: 247290 - DNA, 20 bp, Artificial Sequence
  Description of Artificial Sequence: Synthetic oligonucleotide
  Target: LAMA2; (-) strand; PAM type: YTN; PAM sequence: TTT
ataaacaaatgtcactaata

SEQ ID NO: 247291 - DNA, 20 bp, Artificial Sequence
  Description of Artificial Sequence: Synthetic oligonucleotide
  Target: LAMA2; (-) strand; PAM type: YTN; PAM sequence: TTG
tttataaacaaatgtcacta

SEQ ID NO: 247292 - DNA, 20 bp, Artificial Sequence
  Description of Artificial Sequence: Synthetic oligonucleotide
  Target: LAMA2; (-) strand; PAM type: YTN; PAM sequence: TTT
gtttataaacaaatgtcact

SEQ ID NO: 247293 - DNA, 20 bp, Artificial Sequence
  Description of Artificial Sequence: Synthetic oligonucleotide
  Target: LAMA2; (-) strand; PAM type: YTN; PAM sequence: TTA
tttgtttataaacaaatgtc

SEQ ID NO: 247294 - DNA, 20 bp, Artificial Sequence
  Description of Artificial Sequence: Synthetic oligonucleotide
  Target: LAMA2; (-) strand; PAM type: YTN; PAM sequence: TTT
atttgtttataaacaaatgt

SEQ ID NO: 247295 - DNA, 20 bp, Artificial Sequence
  Description of Artificial Sequence: Synthetic oligonucleotide
  Target: LAMA2; (-) strand; PAM type: YTN; PAM sequence: TTG
aagacatttatttgtttata

SEQ ID NO: 247296 - DNA, 20 bp, Artificial Sequence
  Description of Artificial Sequence: Synthetic oligonucleotide
  Target: LAMA2; (-) strand; PAM type: YTN; PAM sequence: CTA
catagaggttgaagacattt

SEQ ID NO: 247297 - DNA, 20 bp, Artificial Sequence
  Description of Artificial Sequence: Synthetic oligonucleotide
  Target: LAMA2; (-) strand; PAM type: YTN; PAM sequence: TTG
atagtaactacatagaggtt

SEQ ID NO: 247298 - DNA, 20 bp, Artificial Sequence
  Description of Artificial Sequence: Synthetic oligonucleotide
  Target: LAMA2; (-) strand; PAM type: YTN; PAM sequence: CTA
tattgatagtaactacatag

SEQ ID NO: 247299 - DNA, 20 bp, Artificial Sequence
  Description of Artificial Sequence: Synthetic oligonucleotide
  Target: LAMA2; (-) strand; PAM type: YTN; PAM sequence: TTG
catggctatattgatagtaa

SEQ ID NO: 247300 - DNA, 20 bp, Artificial Sequence
  Description of Artificial Sequence: Synthetic oligonucleotide
  Target: LAMA2; (-) strand; PAM type: YTN; PAM sequence: CTC
catatatattgcatggctat

SEQ ID NO: 247301 - DNA, 20 bp, Artificial Sequence
  Description of Artificial Sequence: Synthetic oligonucleotide
  Target: LAMA2; (-) strand; PAM type: YTN; PAM sequence: TTG
gaactccatatatattgcat

SEQ ID NO: 247302 - DNA, 20 bp, Artificial Sequence
  Description of Artificial Sequence: Synthetic oligonucleotide
  Target: LAMA2; (-) strand; PAM type: YTN; PAM sequence: TTT
ggaactccatatatattgca

SEQ ID NO: 247303 - DNA, 20 bp, Artificial Sequence
  Description of Artificial Sequence: Synthetic oligonucleotide
  Target: LAMA2; (-) strand; PAM type: YTN; PAM sequence: TTG
aaaggtatttggaactccat

SEQ ID NO: 247304 - DNA, 20 bp, Artificial Sequence
  Description of Artificial Sequence: Synthetic oligonucleotide
  Target: LAMA2; (-) strand; PAM type: YTN; PAM sequence: TTT
gaaaggtatttggaactcca

SEQ ID NO: 247305 - DNA, 20 bp, Artificial Sequence
  Description of Artificial Sequence: Synthetic oligonucleotide
  Target: LAMA2; (-) strand; PAM type: YTN; PAM sequence: TTT
tgaaaggtatttggaactcc

SEQ ID NO: 247306 - DNA, 20 bp, Artificial Sequence
  Description of Artificial Sequence: Synthetic oligonucleotide
  Target: LAMA2; (-) strand; PAM type: YTN; PAM sequence: TTT
ttgaaaggtatttggaactc

SEQ ID NO: 247307 - DNA, 20 bp, Artificial Sequence
  Description of Artificial Sequence: Synthetic oligonucleotide
  Target: LAMA2; (-) strand; PAM type: YTN; PAM sequence: CTT
tttgaaaggtatttggaact

SEQ ID NO: 247308 - DNA, 20 bp, Artificial Sequence
  Description of Artificial Sequence: Synthetic oligonucleotide
  Target: LAMA2; (-) strand; PAM type: YTN; PAM sequence: TTA
ctttttgaaaggtatttgga

SEQ ID NO: 247309 - DNA, 20 bp, Artificial Sequence
  Description of Artificial Sequence: Synthetic oligonucleotide
  Target: LAMA2; (-) strand; PAM type: YTN; PAM sequence: CTG
tatcaacattactttttgaa

SEQ ID NO: 247310 - DNA, 20 bp, Artificial Sequence
  Description of Artificial Sequence: Synthetic oligonucleotide
  Target: LAMA2; (-) strand; PAM type: YTN; PAM sequence: CTA
ctgtatcaacattacttttt

SEQ ID NO: 247311 - DNA, 20 bp, Artificial Sequence
  Description of Artificial Sequence: Synthetic oligonucleotide
  Target: LAMA2; (-) strand; PAM type: YTN; PAM sequence: TTC
aatcaaaaggacataagtga

SEQ ID NO: 247312 - DNA, 20 bp, Artificial Sequence
  Description of Artificial Sequence: Synthetic oligonucleotide
  Target: LAMA2; (-) strand; PAM type: YTN; PAM sequence: TTT
caatcaaaaggacataagtg

SEQ ID NO: 247313 - DNA, 20 bp, Artificial Sequence
  Description of Artificial Sequence: Synthetic oligonucleotide
  Target: LAMA2; (-) strand; PAM type: YTN; PAM sequence: TTC
gtataatgcagtttcaatca

SEQ ID NO: 247314 - DNA, 20 bp, Artificial Sequence
  Description of Artificial Sequence: Synthetic oligonucleotide
  Target: LAMA2; (-) strand; PAM type: YTN; PAM sequence: CTT
cgtataatgcagtttcaatc

SEQ ID NO: 247315 - DNA, 20 bp, Artificial Sequence
  Description of Artificial Sequence: Synthetic oligonucleotide
  Target: LAMA2; (-) strand; PAM type: YTN; PAM sequence: CTG
aaaggaaagaacttcgtata

SEQ ID NO: 247316 - DNA, 20 bp, Artificial Sequence
  Description of Artificial Sequence: Synthetic oligonucleotide
  Target: LAMA2; (-) strand; PAM type: YTN; PAM sequence: TTG
tgctgaaaggaaagaacttc

SEQ ID NO: 247317 - DNA, 20 bp, Artificial Sequence
  Description of Artificial Sequence: Synthetic oligonucleotide
  Target: LAMA2; (-) strand; PAM type: YTN; PAM sequence: TTA
ttgtgctgaaaggaaagaac

SEQ ID NO: 247318 - DNA, 20 bp, Artificial Sequence
  Description of Artificial Sequence: Synthetic oligonucleotide
  Target: LAMA2; (-) strand; PAM type: YTN; PAM sequence: TTC
aggttattgtgctgaaagga

SEQ ID NO: 247319 - DNA, 20 bp, Artificial Sequence
  Description of Artificial Sequence: Synthetic oligonucleotide
  Target: LAMA2; (-) strand; PAM type: YTN; PAM sequence: TTT
caggttattgtgctgaaagg

SEQ ID NO: 247320 - DNA, 20 bp, Artificial Sequence
  Description of Artificial Sequence: Synthetic oligonucleotide
  Target: LAMA2; (-) strand; PAM type: YTN; PAM sequence: TTT
tcaggttattgtgctgaaag

SEQ ID NO: 247321 - DNA, 20 bp, Artificial Sequence
  Description of Artificial Sequence: Synthetic oligonucleotide
  Target: LAMA2; (-) strand; PAM type: YTN; PAM sequence: TTT
ttcaggttattgtgctgaaa

SEQ ID NO: 247322 - DNA, 20 bp, Artificial Sequence
  Description of Artificial Sequence: Synthetic oligonucleotide
  Target: LAMA2; (-) strand; PAM type: YTN; PAM sequence: CTA
tatttttcaggttattgtgc

SEQ ID NO: 247323 - DNA, 20 bp, Artificial Sequence
  Description of Artificial Sequence: Synthetic oligonucleotide
  Target: LAMA2; (-) strand; PAM type: YTN; PAM sequence: TTA
aatagacagctatatttttc

SEQ ID NO: 247324 - DNA, 20 bp, Artificial Sequence
  Description of Artificial Sequence: Synthetic oligonucleotide
  Target: LAMA2; (-) strand; PAM type: YTN; PAM sequence: TTT
aaatagacagctatattttt

SEQ ID NO: 247325 - DNA, 20 bp, Artificial Sequence
  Description of Artificial Sequence: Synthetic oligonucleotide
  Target: LAMA2; (-) strand; PAM type: YTN; PAM sequence: CTT
taaatagacagctatatttt

SEQ ID NO: 247326 - DNA, 20 bp, Artificial Sequence
  Description of Artificial Sequence: Synthetic oligonucleotide
  Target: LAMA2; (-) strand; PAM type: YTN; PAM sequence: TTC
tttaaatagacagctatatt

SEQ ID NO: 247327 - DNA, 20 bp, Artificial Sequence
  Description of Artificial Sequence: Synthetic oligonucleotide
  Target: LAMA2; (-) strand; PAM type: YTN; PAM sequence: CTT
ctttaaatagacagctatat

SEQ ID NO: 247328 - DNA, 20 bp, Artificial Sequence
  Description of Artificial Sequence: Synthetic oligonucleotide
  Target: LAMA2; (-) strand; PAM type: YTN; PAM sequence: CTG
ccaaacaagaaaatgtcttc

SEQ ID NO: 247329 - DNA, 20 bp, Artificial Sequence
  Description of Artificial Sequence: Synthetic oligonucleotide
  Target: LAMA2; (-) strand; PAM type: YTN; PAM sequence: TTC
tgccaaacaagaaaatgtct

SEQ ID NO: 247330 - DNA, 20 bp, Artificial Sequence
  Description of Artificial Sequence: Synthetic oligonucleotide
  Target: LAMA2; (-) strand; PAM type: YTN; PAM sequence: CTG
tatgatgataatattctgcc

SEQ ID NO: 247331 - DNA, 20 bp, Artificial Sequence
  Description of Artificial Sequence: Synthetic oligonucleotide
  Target: LAMA2; (-) strand; PAM type: YTN; PAM sequence: TTG
tacatatgctgtatgatgat

SEQ ID NO: 247332 - DNA, 20 bp, Artificial Sequence
  Description of Artificial Sequence: Synthetic oligonucleotide
  Target: LAMA2; (-) strand; PAM type: YTN; PAM sequence: TTA
ggaccatattgtacatatgc

SEQ ID NO: 247333 - DNA, 20 bp, Artificial Sequence
  Description of Artificial Sequence: Synthetic oligonucleotide
  Target: LAMA2; (-) strand; PAM type: YTN; PAM sequence: CTA
gcacatatcgacacaaatta

SEQ ID NO: 247334 - DNA, 20 bp, Artificial Sequence
  Description of Artificial Sequence: Synthetic oligonucleotide
  Target: LAMA2; (-) strand; PAM type: YTN; PAM sequence: CTA
agcctagcacatatcgacac

SEQ ID NO: 247335 - DNA, 20 bp, Artificial Sequence
  Description of Artificial Sequence: Synthetic oligonucleotide
  Target: LAMA2; (-) strand; PAM type: YTN; PAM sequence: TTC
taagcctagcacatatcgac

SEQ ID NO: 247336 - DNA, 20 bp, Artificial Sequence
  Description of Artificial Sequence: Synthetic oligonucleotide
  Target: LAMA2; (-) strand; PAM type: YTN; PAM sequence: TTT
ctaagcctagcacatatcga

SEQ ID NO: 247337 - DNA, 20 bp, Artificial Sequence
  Description of Artificial Sequence: Synthetic oligonucleotide
  Target: LAMA2; (-) strand; PAM type: YTN; PAM sequence: TTT
tctaagcctagcacatatcg

SEQ ID NO: 247338 - DNA, 20 bp, Artificial Sequence
  Description of Artificial Sequence: Synthetic oligonucleotide
  Target: LAMA2; (-) strand; PAM type: YTN; PAM sequence: TTA
aagtgagttttctaagccta

SEQ ID NO: 247339 - DNA, 20 bp, Artificial Sequence
  Description of Artificial Sequence: Synthetic oligonucleotide
  Target: LAMA2; (-) strand; PAM type: YTN; PAM sequence: CTT
aaagtgagttttctaagcct

SEQ ID NO: 247340 - DNA, 20 bp, Artificial Sequence
  Description of Artificial Sequence: Synthetic oligonucleotide
  Target: LAMA2; (-) strand; PAM type: YTN; PAM sequence: TTA
gtaaaacttaaagtgagttt

SEQ ID NO: 247341 - DNA, 20 bp, Artificial Sequence
  Description of Artificial Sequence: Synthetic oligonucleotide
  Target: LAMA2; (-) strand; PAM type: YTN; PAM sequence: TTT
agtaaaacttaaagtgagtt

SEQ ID NO: 247342 - DNA, 20 bp, Artificial Sequence
  Description of Artificial Sequence: Synthetic oligonucleotide
  Target: LAMA2; (-) strand; PAM type: YTN; PAM sequence: CTC
caaaataaatttagtaaaac

SEQ ID NO: 247343 - DNA, 20 bp, Artificial Sequence
  Description of Artificial Sequence: Synthetic oligonucleotide
  Target: LAMA2; (-) strand; PAM type: YTN; PAM sequence: TTA
aactccaaaataaatttagt

SEQ ID NO: 247344 - DNA, 20 bp, Artificial Sequence
  Description of Artificial Sequence: Synthetic oligonucleotide
  Target: LAMA2; (-) strand; PAM type: YTN; PAM sequence: TTA
gaatataaatcatgtcaaaa

SEQ ID NO: 247345 - DNA, 20 bp, Artificial Sequence
  Description of Artificial Sequence: Synthetic oligonucleotide
  Target: LAMA2; (-) strand; PAM type: YTN; PAM sequence: CTT
agaatataaatcatgtcaaa

SEQ ID NO: 247346 - DNA, 20 bp, Artificial Sequence
  Description of Artificial Sequence: Synthetic oligonucleotide
  Target: LAMA2; (-) strand; PAM type: YTN; PAM sequence: CTC
cttagaatataaatcatgtc

SEQ ID NO: 247347 - DNA, 20 bp, Artificial Sequence
  Description of Artificial Sequence: Synthetic oligonucleotide
  Target: LAMA2; (-) strand; PAM type: YTN; PAM sequence: CTG
agatctccttagaatataaa

SEQ ID NO: 247348 - DNA, 20 bp, Artificial Sequence
  Description of Artificial Sequence: Synthetic oligonucleotide
  Target: LAMA2; (-) strand; PAM type: YTN; PAM sequence: TTA
agcaggaagaagctgagatc

SEQ ID NO: 247349 - DNA, 20 bp, Artificial Sequence
  Description of Artificial Sequence: Synthetic oligonucleotide
  Target: LAMA2; (-) strand; PAM type: YTN; PAM sequence: TTT
aagcaggaagaagctgagat

SEQ ID NO: 247350 - DNA, 20 bp, Artificial Sequence
  Description of Artificial Sequence: Synthetic oligonucleotide
  Target: LAMA2; (-) strand; PAM type: YTN; PAM sequence: CTA
tgtaatgtcatttaagcagg

SEQ ID NO: 247351 - DNA, 20 bp, Artificial Sequence
  Description of Artificial Sequence: Synthetic oligonucleotide
  Target: LAMA2; (-) strand; PAM type: YTN; PAM sequence: CTA
tctatgtaatgtcatttaag

SEQ ID NO: 247352 - DNA, 20 bp, Artificial Sequence
  Description of Artificial Sequence: Synthetic oligonucleotide
  Target: LAMA2; (-) strand; PAM type: YTN; PAM sequence: TTC
tatctatgtaatgtcattta

SEQ ID NO: 247353 - DNA, 20 bp, Artificial Sequence
  Description of Artificial Sequence: Synthetic oligonucleotide
  Target: LAMA2; (-) strand; PAM type: YTN; PAM sequence: TTT
ctatctatgtaatgtcattt

SEQ ID NO: 247354 - DNA, 20 bp, Artificial Sequence
  Description of Artificial Sequence: Synthetic oligonucleotide
  Target: LAMA2; (-) strand; PAM type: YTN; PAM sequence: CTT
tctatctatgtaatgtcatt

SEQ ID NO: 247355 - DNA, 20 bp, Artificial Sequence
  Description of Artificial Sequence: Synthetic oligonucleotide
  Target: LAMA2; (-) strand; PAM type: YTN; PAM sequence: CTA
taataagaatatataccttt

SEQ ID NO: 247356 - DNA, 20 bp, Artificial Sequence
  Description of Artificial Sequence: Synthetic oligonucleotide
  Target: LAMA2; (-) strand; PAM type: YTN; PAM sequence: CTG
ctataataagaatatatacc

SEQ ID NO: 247357 - DNA, 20 bp, Artificial Sequence
  Description of Artificial Sequence: Synthetic oligonucleotide
  Target: LAMA2; (-) strand; PAM type: YTN; PAM sequence: CTG
gcagacactgctataataag

SEQ ID NO: 247358 - DNA, 20 bp, Artificial Sequence
  Description of Artificial Sequence: Synthetic oligonucleotide
  Target: LAMA2; (-) strand; PAM type: YTN; PAM sequence: CTG
cagccctggcagacactgct

SEQ ID NO: 247359 - DNA, 20 bp, Artificial Sequence
  Description of Artificial Sequence: Synthetic oligonucleotide
  Target: LAMA2; (-) strand; PAM type: YTN; PAM sequence: CTA
acaacaggactgcagccctg

SEQ ID NO: 247360 - DNA, 20 bp, Artificial Sequence
  Description of Artificial Sequence: Synthetic oligonucleotide
  Target: LAMA2; (-) strand; PAM type: YTN; PAM sequence: TTC
taacaacaggactgcagccc

SEQ ID NO: 247361 - DNA, 20 bp, Artificial Sequence
  Description of Artificial Sequence: Synthetic oligonucleotide
  Target: LAMA2; (-) strand; PAM type: YTN; PAM sequence: CTT
ctaacaacaggactgcagcc

SEQ ID NO: 247362 - DNA, 20 bp, Artificial Sequence
  Description of Artificial Sequence: Synthetic oligonucleotide
  Target: LAMA2; (-) strand; PAM type: YTN; PAM sequence: CTG
acagccttctaacaacagga

SEQ ID NO: 247363 - DNA, 20 bp, Artificial Sequence
  Description of Artificial Sequence: Synthetic oligonucleotide
  Target: LAMA2; (-) strand; PAM type: YTN; PAM sequence: TTC
tgacagccttctaacaacag

SEQ ID NO: 247364 - DNA, 20 bp, Artificial Sequence
  Description of Artificial Sequence: Synthetic oligonucleotide
  Target: LAMA2; (-) strand; PAM type: YTN; PAM sequence: TTA
aaattctgacagccttctaa

SEQ ID NO: 247365 - DNA, 20 bp, Artificial Sequence
  Description of Artificial Sequence: Synthetic oligonucleotide
  Target: LAMA2; (-) strand; PAM type: YTN; PAM sequence: TTT
aaaattctgacagccttcta

SEQ ID NO: 247366 - DNA, 20 bp, Artificial Sequence
  Description of Artificial Sequence: Synthetic oligonucleotide
  Target: LAMA2; (-) strand; PAM type: YTN; PAM sequence: TTA
catttaaaattctgacagcc

SEQ ID NO: 247367 - DNA, 20 bp, Artificial Sequence
  Description of Artificial Sequence: Synthetic oligonucleotide
  Target: LAMA2; (-) strand; PAM type: YTN; PAM sequence: CTT
acatttaaaattctgacagc

SEQ ID NO: 247368 - DNA, 20 bp, Artificial Sequence
  Description of Artificial Sequence: Synthetic oligonucleotide
  Target: LAMA2; (-) strand; PAM type: YTN; PAM sequence: CTG
ggaaaggaaggcttacattt

SEQ ID NO: 247369 - DNA, 20 bp, Artificial Sequence
  Description of Artificial Sequence: Synthetic oligonucleotide
  Target: LAMA2; (-) strand; PAM type: YTN; PAM sequence: TTA
taacacctgggaaaggaagg

SEQ ID NO: 247370 - DNA, 20 bp, Artificial Sequence
  Description of Artificial Sequence: Synthetic oligonucleotide
  Target: LAMA2; (-) strand; PAM type: YTN; PAM sequence: TTA
aattataacacctgggaaag

SEQ ID NO: 247371 - DNA, 20 bp, Artificial Sequence
  Description of Artificial Sequence: Synthetic oligonucleotide
  Target: LAMA2; (-) strand; PAM type: YTN; PAM sequence: TTA
gaagattaaattataacacc

SEQ ID NO: 247372 - DNA, 20 bp, Artificial Sequence
  Description of Artificial Sequence: Synthetic oligonucleotide
  Target: LAMA2; (-) strand; PAM type: YTN; PAM sequence: TTA
ataggagttagaagattaaa

SEQ ID NO: 247373 - DNA, 20 bp, Artificial Sequence
  Description of Artificial Sequence: Synthetic oligonucleotide
  Target: LAMA2; (-) strand; PAM type: YTN; PAM sequence: TTC
agaaattaataggagttaga

SEQ ID NO: 247374 - DNA, 20 bp, Artificial Sequence
  Description of Artificial Sequence: Synthetic oligonucleotide
  Target: LAMA2; (-) strand; PAM type: YTN; PAM sequence: CTT
cagaaattaataggagttag

SEQ ID NO: 247375 - DNA, 20 bp, Artificial Sequence
  Description of Artificial Sequence: Synthetic oligonucleotide
  Target: LAMA2; (-) strand; PAM type: YTN; PAM sequence: CTA
agatataggatggccccaca

SEQ ID NO: 247376 - DNA, 20 bp, Artificial Sequence
  Description of Artificial Sequence: Synthetic oligonucleotide
  Target: LAMA2; (-) strand; PAM type: YTN; PAM sequence: TTC
taagatataggatggcccca

SEQ ID NO: 247377 - DNA, 20 bp, Artificial Sequence
  Description of Artificial Sequence: Synthetic oligonucleotide
  Target: LAMA2; (-) strand; PAM type: YTN; PAM sequence: TTG
ttctaagatataggatggcc

SEQ ID NO: 247378 - DNA, 20 bp, Artificial Sequence
  Description of Artificial Sequence: Synthetic oligonucleotide
  Target: LAMA2; (-) strand; PAM type: YTN; PAM sequence: TTT
gttctaagatataggatggc

SEQ ID NO: 247379 - DNA, 20 bp, Artificial Sequence
  Description of Artificial Sequence: Synthetic oligonucleotide
  Target: LAMA2; (-) strand; PAM type: YTN; PAM sequence: TTT
tgttctaagatataggatgg

SEQ ID NO: 247380 - DNA, 20 bp, Artificial Sequence
  Description of Artificial Sequence: Synthetic oligonucleotide
  Target: LAMA2; (-) strand; PAM type: YTN; PAM sequence: CTA
tattttgttctaagatatag

SEQ ID NO: 247381 - DNA, 20 bp, Artificial Sequence
  Description of Artificial Sequence: Synthetic oligonucleotide
  Target: LAMA2; (-) strand; PAM type: YTN; PAM sequence: TTG
ggggaaggtaaatatggaga

SEQ ID NO: 247382 - DNA, 20 bp, Artificial Sequence
  Description of Artificial Sequence: Synthetic oligonucleotide
  Target: LAMA2; (-) strand; PAM type: YTN; PAM sequence: TTT
gggggaaggtaaatatggag

SEQ ID NO: 247383 - DNA, 20 bp, Artificial Sequence
  Description of Artificial Sequence: Synthetic oligonucleotide
  Target: LAMA2; (-) strand; PAM type: YTN; PAM sequence: TTA
aaacatttgggggaaggtaa

SEQ ID NO: 247384 - DNA, 20 bp, Artificial Sequence
  Description of Artificial Sequence: Synthetic oligonucleotide
  Target: LAMA2; (-) strand; PAM type: YTN; PAM sequence: TTG
aaataataaaattaaaacat

SEQ ID NO: 247385 - DNA, 20 bp, Artificial Sequence
  Description of Artificial Sequence: Synthetic oligonucleotide
  Target: LAMA2; (-) strand; PAM type: YTN; PAM sequence: TTT
gaaataataaaattaaaaca

SEQ ID NO: 247386 - DNA, 20 bp, Artificial Sequence
  Description of Artificial Sequence: Synthetic oligonucleotide
  Target: LAMA2; (-) strand; PAM type: YTN; PAM sequence: TTT
tgaaataataaaattaaaac

SEQ ID NO: 247387 - DNA, 20 bp, Artificial Sequence
  Description of Artificial Sequence: Synthetic oligonucleotide
  Target: LAMA2; (-) strand; PAM type: YTN; PAM sequence: TTA
taattttgaaataataaaat

SEQ ID NO: 247388 - DNA, 20 bp, Artificial Sequence
  Description of Artificial Sequence: Synthetic oligonucleotide
  Target: LAMA2; (-) strand; PAM type: YTN; PAM sequence: TTA
ttataattttgaaataataa

SEQ ID NO: 247389 - DNA, 20 bp, Artificial Sequence
  Description of Artificial Sequence: Synthetic oligonucleotide
  Target: LAMA2; (-) strand; PAM type: YTN; PAM sequence: CTA
ttattataattttgaaataa

SEQ ID NO: 247390 - DNA, 20 bp, Artificial Sequence
  Description of Artificial Sequence: Synthetic oligonucleotide
  Target: LAMA2; (-) strand; PAM type: YTN; PAM sequence: TTG
ctattattataattttgaaa

SEQ ID NO: 247391 - DNA, 20 bp, Artificial Sequence
  Description of Artificial Sequence: Synthetic oligonucleotide
  Target: LAMA2; (-) strand; PAM type: YTN; PAM sequence: TTG
aaatccattgctattattat

SEQ ID NO: 247392 - DNA, 20 bp, Artificial Sequence
  Description of Artificial Sequence: Synthetic oligonucleotide
  Target: LAMA2; (-) strand; PAM type: YTN; PAM sequence: TTT
gaaatccattgctattatta

SEQ ID NO: 247393 - DNA, 20 bp, Artificial Sequence
  Description of Artificial Sequence: Synthetic oligonucleotide
  Target: LAMA2; (-) strand; PAM type: YTN; PAM sequence: TTA
atttgaaatccattgctatt

SEQ ID NO: 247394 - DNA, 20 bp, Artificial Sequence
  Description of Artificial Sequence: Synthetic oligonucleotide
  Target: LAMA2; (-) strand; PAM type: YTN; PAM sequence: TTT
aatttgaaatccattgctat

SEQ ID NO: 247395 - DNA, 20 bp, Artificial Sequence
  Description of Artificial Sequence: Synthetic oligonucleotide
  Target: LAMA2; (-) strand; PAM type: YTN; PAM sequence: TTT
taatttgaaatccattgcta

SEQ ID NO: 247396 - DNA, 20 bp, Artificial Sequence
  Description of Artificial Sequence: Synthetic oligonucleotide
  Target: LAMA2; (-) strand; PAM type: YTN; PAM sequence: CTA
gccagaattttaatttgaaa

SEQ ID NO: 247397 - DNA, 20 bp, Artificial Sequence
  Description of Artificial Sequence: Synthetic oligonucleotide
  Target: LAMA2; (-) strand; PAM type: YTN; PAM sequence: TTC
actagccagaattttaattt

SEQ ID NO: 247398 - DNA, 20 bp, Artificial Sequence
  Description of Artificial Sequence: Synthetic oligonucleotide
  Target: LAMA2; (-) strand; PAM type: YTN; PAM sequence: CTG
agggattcactagccagaat

SEQ ID NO: 247399 - DNA, 20 bp, Artificial Sequence
  Description of Artificial Sequence: Synthetic oligonucleotide
  Target: LAMA2; (-) strand; PAM type: YTN; PAM sequence: CTA
caacatacaaatcagtcaat

SEQ ID NO: 247400 - DNA, 20 bp, Artificial Sequence
  Description of Artificial Sequence: Synthetic oligonucleotide
  Target: LAMA2; (-) strand; PAM type: YTN; PAM sequence: TTA
gcctacaacatacaaatcag

SEQ ID NO: 247401 - DNA, 20 bp, Artificial Sequence
  Description of Artificial Sequence: Synthetic oligonucleotide
  Target: LAMA2; (-) strand; PAM type: YTN; PAM sequence: TTT
agcctacaacatacaaatca

SEQ ID NO: 247402 - DNA, 20 bp, Artificial Sequence
  Description of Artificial Sequence: Synthetic oligonucleotide
  Target: LAMA2; (-) strand; PAM type: YTN; PAM sequence: TTA
tttagcctacaacatacaaa

SEQ ID NO: 247403 - DNA, 20 bp, Artificial Sequence
  Description of Artificial Sequence: Synthetic oligonucleotide
  Target: LAMA2; (-) strand; PAM type: YTN; PAM sequence: TTG
gaggagggcattatttagcc

SEQ ID NO: 247404 - DNA, 20 bp, Artificial Sequence
  Description of Artificial Sequence: Synthetic oligonucleotide
  Target: LAMA2; (-) strand; PAM type: YTN; PAM sequence: CTT
ggaggagggcattatttagc

SEQ ID NO: 247405 - DNA, 20 bp, Artificial Sequence
  Description of Artificial Sequence: Synthetic oligonucleotide
  Target: LAMA2; (-) strand; PAM type: YTN; PAM sequence: CTA
tgggtatcttggaggagggc

SEQ ID NO: 247406 - DNA, 20 bp, Artificial Sequence
  Description of Artificial Sequence: Synthetic oligonucleotide
  Target: LAMA2; (-) strand; PAM type: YTN; PAM sequence: TTC
agctatgggtatcttggagg

SEQ ID NO: 247407 - DNA, 20 bp, Artificial Sequence
  Description of Artificial Sequence: Synthetic oligonucleotide
  Target: LAMA2; (-) strand; PAM type: YTN; PAM sequence: CTG
gaaattcagctatgggtatc

SEQ ID NO: 247408 - DNA, 20 bp, Artificial Sequence
  Description of Artificial Sequence: Synthetic oligonucleotide
  Target: LAMA2; (-) strand; PAM type: YTN; PAM sequence: TTC
tggaaattcagctatgggta

SEQ ID NO: 247409 - DNA, 20 bp, Artificial Sequence
  Description of Artificial Sequence: Synthetic oligonucleotide
  Target: LAMA2; (-) strand; PAM type: YTN; PAM sequence: TTA
caggttctggaaattcagct

SEQ ID NO: 247410 - DNA, 20 bp, Artificial Sequence
  Description of Artificial Sequence: Synthetic oligonucleotide
  Target: LAMA2; (-) strand; PAM type: YTN; PAM sequence: TTT
acaggttctggaaattcagc

SEQ ID NO: 247411 - DNA, 20 bp, Artificial Sequence
  Description of Artificial Sequence: Synthetic oligonucleotide
  Target: LAMA2; (-) strand; PAM type: YTN; PAM sequence: TTG
ccatgtaagagggaacatat

SEQ ID NO: 247412 - DNA, 20 bp, Artificial Sequence
  Description of Artificial Sequence: Synthetic oligonucleotide
  Target: LAMA2; (-) strand; PAM type: YTN; PAM sequence: TTT
gccatgtaagagggaacata

SEQ ID NO: 247413 - DNA, 20 bp, Artificial Sequence
  Description of Artificial Sequence: Synthetic oligonucleotide
  Target: LAMA2; (-) strand; PAM type: YTN; PAM sequence: TTT
tgccatgtaagagggaacat

SEQ ID NO: 247414 - DNA, 20 bp, Artificial Sequence
  Description of Artificial Sequence: Synthetic oligonucleotide
  Target: LAMA2; (-) strand; PAM type: YTN; PAM sequence: CTT
ttgccatgtaagagggaaca

SEQ ID NO: 247415 - DNA, 20 bp, Artificial Sequence
  Description of Artificial Sequence: Synthetic oligonucleotide
  Target: LAMA2; (-) strand; PAM type: YTN; PAM sequence: TTG
caaagtcccttttgccatgt

SEQ ID NO: 247416 - DNA, 20 bp, Artificial Sequence
  Description of Artificial Sequence: Synthetic oligonucleotide
  Target: LAMA2; (-) strand; PAM type: YTN; PAM sequence: TTT
gcaaagtcccttttgccatg

SEQ ID NO: 247417 - DNA, 20 bp, Artificial Sequence
  Description of Artificial Sequence: Synthetic oligonucleotide
  Target: LAMA2; (-) strand; PAM type: YTN; PAM sequence: TTA
gtcacatttgcaaagtccct

SEQ ID NO: 247418 - DNA, 20 bp, Artificial Sequence
  Description of Artificial Sequence: Synthetic oligonucleotide
  Target: LAMA2; (-) strand; PAM type: YTN; PAM sequence: CTT
agtcacatttgcaaagtccc

SEQ ID NO: 247419 - DNA, 20 bp, Artificial Sequence
  Description of Artificial Sequence: Synthetic oligonucleotide
  Target: LAMA2; (-) strand; PAM type: YTN; PAM sequence: TTA
aacttagtcacatttgcaaa

SEQ ID NO: 247420 - DNA, 20 bp, Artificial Sequence
  Description of Artificial Sequence: Synthetic oligonucleotide
  Target: LAMA2; (-) strand; PAM type: YTN; PAM sequence: CTT
aaacttagtcacatttgcaa

SEQ ID NO: 247421 - DNA, 20 bp, Artificial Sequence
  Description of Artificial Sequence: Synthetic oligonucleotide
  Target: LAMA2; (-) strand; PAM type: YTN; PAM sequence: TTC
ttaaacttagtcacatttgc

SEQ ID NO: 247422 - DNA, 20 bp, Artificial Sequence
  Description of Artificial Sequence: Synthetic oligonucleotide
  Target: LAMA2; (-) strand; PAM type: YTN; PAM sequence: TTA
aggttcttaaacttagtcac

SEQ ID NO: 247423 - DNA, 20 bp, Artificial Sequence
  Description of Artificial Sequence: Synthetic oligonucleotide
  Target: LAMA2; (-) strand; PAM type: YTN; PAM sequence: CTT
aaggttcttaaacttagtca

SEQ ID NO: 247424 - DNA, 20 bp, Artificial Sequence
  Description of Artificial Sequence: Synthetic oligonucleotide
  Target: LAMA2; (-) strand; PAM type: YTN; PAM sequence: TTC
ccaccttaaggttcttaaac

SEQ ID NO: 247425 - DNA, 20 bp, Artificial Sequence
  Description of Artificial Sequence: Synthetic oligonucleotide
  Target: LAMA2; (-) strand; PAM type: YTN; PAM sequence: CTT
cccaccttaaggttcttaaa

SEQ ID NO: 247426 - DNA, 20 bp, Artificial Sequence
  Description of Artificial Sequence: Synthetic oligonucleotide
  Target: LAMA2; (-) strand; PAM type: YTN; PAM sequence: CTG
gataacgcaggatcatcttc

SEQ ID NO: 247427 - DNA, 20 bp, Artificial Sequence
  Description of Artificial Sequence: Synthetic oligonucleotide
  Target: LAMA2; (-) strand; PAM type: YTN; PAM sequence: TTC
ggtccacctggataacgcag

SEQ ID NO: 247428 - DNA, 20 bp, Artificial Sequence
  Description of Artificial Sequence: Synthetic oligonucleotide
  Target: LAMA2; (-) strand; PAM type: YTN; PAM sequence: CTG
gattcggtccacctggataa

SEQ ID NO: 247429 - DNA, 20 bp, Artificial Sequence
  Description of Artificial Sequence: Synthetic oligonucleotide
  Target: LAMA2; (-) strand; PAM type: YTN; PAM sequence: CTC
atgtgactggattcggtcca

SEQ ID NO: 247430 - DNA, 20 bp, Artificial Sequence
  Description of Artificial Sequence: Synthetic oligonucleotide
  Target: LAMA2; (-) strand; PAM type: YTN; PAM sequence: TTA
aggtctcatgtgactggatt

SEQ ID NO: 247431 - DNA, 20 bp, Artificial Sequence
  Description of Artificial Sequence: Synthetic oligonucleotide
  Target: LAMA2; (-) strand; PAM type: YTN; PAM sequence: TTT
aaggtctcatgtgactggat

SEQ ID NO: 247432 - DNA, 20 bp, Artificial Sequence
  Description of Artificial Sequence: Synthetic oligonucleotide
  Target: LAMA2; (-) strand; PAM type: YTN; PAM sequence: TTT
taaggtctcatgtgactgga

SEQ ID NO: 247433 - DNA, 20 bp, Artificial Sequence
  Description of Artificial Sequence: Synthetic oligonucleotide
  Target: LAMA2; (-) strand; PAM type: YTN; PAM sequence: CTT
ttaaggtctcatgtgactgg

SEQ ID NO: 247434 - DNA, 20 bp, Artificial Sequence
  Description of Artificial Sequence: Synthetic oligonucleotide
  Target: LAMA2; (-) strand; PAM type: YTN; PAM sequence: CTA
cttttaaggtctcatgtgac

SEQ ID NO: 247435 - DNA, 20 bp, Artificial Sequence
  Description of Artificial Sequence: Synthetic oligonucleotide
  Target: LAMA2; (-) strand; PAM type: YTN; PAM sequence: TTC
tacttttaaggtctcatgtg

SEQ ID NO: 247436 - DNA, 20 bp, Artificial Sequence
  Description of Artificial Sequence: Synthetic oligonucleotide
  Target: LAMA2; (-) strand; PAM type: YTN; PAM sequence: CTT
ctacttttaaggtctcatgt

SEQ ID NO: 247437 - DNA, 20 bp, Artificial Sequence
  Description of Artificial Sequence: Synthetic oligonucleotide
  Target: LAMA2; (-) strand; PAM type: YTN; PAM sequence: CTC
ttctacttttaaggtctcat

SEQ ID NO: 247438 - DNA, 20 bp, Artificial Sequence
  Description of Artificial Sequence: Synthetic oligonucleotide
  Target: LAMA2; (-) strand; PAM type: YTN; PAM sequence: CTG
accccctcttctacttttaa

SEQ ID NO: 247439 - DNA, 20 bp, Artificial Sequence
  Description of Artificial Sequence: Synthetic oligonucleotide
  Target: LAMA2; (-) strand; PAM type: YTN; PAM sequence: CTC
tgaccccctcttctactttt

SEQ ID NO: 247440 - DNA, 20 bp, Artificial Sequence
  Description of Artificial Sequence: Synthetic oligonucleotide
  Target: LAMA2; (-) strand; PAM type: YTN; PAM sequence: TTC
atcactctgaccccctcttc

SEQ ID NO: 247441 - DNA, 20 bp, Artificial Sequence
  Description of Artificial Sequence: Synthetic oligonucleotide
  Target: LAMA2; (-) strand; PAM type: YTN; PAM sequence: TTT
catcactctgaccccctctt

SEQ ID NO: 247442 - DNA, 20 bp, Artificial Sequence
  Description of Artificial Sequence: Synthetic oligonucleotide
  Target: LAMA2; (-) strand; PAM type: YTN; PAM sequence: TTG
tttcatcactctgaccccct

SEQ ID NO: 247443 - DNA, 20 bp, Artificial Sequence
  Description of Artificial Sequence: Synthetic oligonucleotide
  Target: LAMA2; (-) strand; PAM type: YTN; PAM sequence: TTC
cattgtttcatcactctgac

SEQ ID NO: 247444 - DNA, 20 bp, Artificial Sequence
  Description of Artificial Sequence: Synthetic oligonucleotide
  Target: LAMA2; (-) strand; PAM type: YTN; PAM sequence: CTT
ccattgtttcatcactctga

SEQ ID NO: 247445 - DNA, 20 bp, Artificial Sequence
  Description of Artificial Sequence: Synthetic oligonucleotide
  Target: LAMA2; (-) strand; PAM type: YTN; PAM sequence: TTC
ttccattgtttcatcactct

SEQ ID NO: 247446 - DNA, 20 bp, Artificial Sequence
  Description of Artificial Sequence: Synthetic oligonucleotide
  Target: LAMA2; (-) strand; PAM type: YTN; PAM sequence: CTT
cttccattgtttcatcactc

SEQ ID NO: 247447 - DNA, 20 bp, Artificial Sequence
  Description of Artificial Sequence: Synthetic oligonucleotide
  Target: LAMA2; (-) strand; PAM type: YTN; PAM sequence: CTC
ttcttccattgtttcatcac

SEQ ID NO: 247448 - DNA, 20 bp, Artificial Sequence
  Description of Artificial Sequence: Synthetic oligonucleotide
  Target: LAMA2; (-) strand; PAM type: YTN; PAM sequence: TTC
ctcttcttccattgtttcat

SEQ ID NO: 247449 - DNA, 20 bp, Artificial Sequence
  Description of Artificial Sequence: Synthetic oligonucleotide
  Target: LAMA2; (-) strand; PAM type: YTN; PAM sequence: CTT
cctcttcttccattgtttca

SEQ ID NO: 247450 - DNA, 20 bp, Artificial Sequence
  Description of Artificial Sequence: Synthetic oligonucleotide
  Target: LAMA2; (-) strand; PAM type: YTN; PAM sequence: CTC
cttcctcttcttccattgtt

SEQ ID NO: 247451 - DNA, 20 bp, Artificial Sequence
  Description of Artificial Sequence: Synthetic oligonucleotide
  Target: LAMA2; (-) strand; PAM type: YTN; PAM sequence: TTC
tccttcctcttcttccattg

SEQ ID NO: 247452 - DNA, 20 bp, Artificial Sequence
  Description of Artificial Sequence: Synthetic oligonucleotide
  Target: LAMA2; (-) strand; PAM type: YTN; PAM sequence: CTT
ctccttcctcttcttccatt

SEQ ID NO: 247453 - DNA, 20 bp, Artificial Sequence
  Description of Artificial Sequence: Synthetic oligonucleotide
  Target: LAMA2; (-) strand; PAM type: YTN; PAM sequence: TTC
aaacttctccttcctcttct

SEQ ID NO: 247454 - DNA, 20 bp, Artificial Sequence
  Description of Artificial Sequence: Synthetic oligonucleotide
  Target: LAMA2; (-) strand; PAM type: YTN; PAM sequence: CTT
caaacttctccttcctcttc

SEQ ID NO: 247455 - DNA, 20 bp, Artificial Sequence
  Description of Artificial Sequence: Synthetic oligonucleotide
  Target: LAMA2; (-) strand; PAM type: YTN; PAM sequence: TTC
atgcttcaaacttctccttc

SEQ ID NO: 247456 - DNA, 20 bp, Artificial Sequence
  Description of Artificial Sequence: Synthetic oligonucleotide
  Target: LAMA2; (-) strand; PAM type: YTN; PAM sequence: TTT
catgcttcaaacttctcctt

SEQ ID NO: 247457 - DNA, 20 bp, Artificial Sequence
  Description of Artificial Sequence: Synthetic oligonucleotide
  Target: LAMA2; (-) strand; PAM type: YTN; PAM sequence: TTT
tcatgcttcaaacttctcct

SEQ ID NO: 247458 - DNA, 20 bp, Artificial Sequence
  Description of Artificial Sequence: Synthetic oligonucleotide
  Target: LAMA2; (-) strand; PAM type: YTN; PAM sequence: TTT
ttcatgcttcaaacttctcc

SEQ ID NO: 247459 - DNA, 20 bp, Artificial Sequence
  Description of Artificial Sequence: Synthetic oligonucleotide
  Target: LAMA2; (-) strand; PAM type: YTN; PAM sequence: TTA
aagccagaaatgatgaatga

SEQ ID NO: 247460 - DNA, 20 bp, Artificial Sequence
  Description of Artificial Sequence: Synthetic oligonucleotide
  Target: LAMA2; (-) strand; PAM type: YTN; PAM sequence: TTT
aaagccagaaatgatgaatg

SEQ ID NO: 247461 - DNA, 20 bp, Artificial Sequence
  Description of Artificial Sequence: Synthetic oligonucleotide
  Target: LAMA2; (-) strand; PAM type: YTN; PAM sequence: CTT
taaagccagaaatgatgaat

SEQ ID NO: 247462 - DNA, 20 bp, Artificial Sequence
  Description of Artificial Sequence: Synthetic oligonucleotide
  Target: LAMA2; (-) strand; PAM type: YTN; PAM sequence: CTC
catctttaaagccagaaatg

SEQ ID NO: 247463 - DNA, 20 bp, Artificial Sequence
  Description of Artificial Sequence: Synthetic oligonucleotide
  Target: LAMA2; (-) strand; PAM type: YTN; PAM sequence: CTC
tccatctttaaagccagaaa

SEQ ID NO: 247464 - DNA, 20 bp, Artificial Sequence
  Description of Artificial Sequence: Synthetic oligonucleotide
  Target: LAMA2; (-) strand; PAM type: YTN; PAM sequence: TTC
aagggactctccatctttaa

SEQ ID NO: 247465 - DNA, 20 bp, Artificial Sequence
  Description of Artificial Sequence: Synthetic oligonucleotide
  Target: LAMA2; (-) strand; PAM type: YTN; PAM sequence: TTG
gttcaagggactctccatct

SEQ ID NO: 247466 - DNA, 20 bp, Artificial Sequence
  Description of Artificial Sequence: Synthetic oligonucleotide
  Target: LAMA2; (-) strand; PAM type: YTN; PAM sequence: CTT
ggttcaagggactctccatc

SEQ ID NO: 247467 - DNA, 20 bp, Artificial Sequence
  Description of Artificial Sequence: Synthetic oligonucleotide
  Target: LAMA2; (-) strand; PAM type: YTN; PAM sequence: TTC
cttggttcaagggactctcc

SEQ ID NO: 247468 - DNA, 20 bp, Artificial Sequence
  Description of Artificial Sequence: Synthetic oligonucleotide
  Target: LAMA2; (-) strand; PAM type: YTN; PAM sequence: TTC
acattccttggttcaaggga

SEQ ID NO: 247469 - DNA, 20 bp, Artificial Sequence
  Description of Artificial Sequence: Synthetic oligonucleotide
  Target: LAMA2; (-) strand; PAM type: YTN; PAM sequence: CTA
gaggtcattcacattccttg

SEQ ID NO: 247470 - DNA, 20 bp, Artificial Sequence
  Description of Artificial Sequence: Synthetic oligonucleotide
  Target: LAMA2; (-) strand; PAM type: YTN; PAM sequence: TTC
tagaggtcattcacattcct

SEQ ID NO: 247471 - DNA, 20 bp, Artificial Sequence
  Description of Artificial Sequence: Synthetic oligonucleotide
  Target: LAMA2; (-) strand; PAM type: YTN; PAM sequence: TTC
caggttctagaggtcattca

SEQ ID NO: 247472 - DNA, 20 bp, Artificial Sequence
  Description of Artificial Sequence: Synthetic oligonucleotide
  Target: LAMA2; (-) strand; PAM type: YTN; PAM sequence: TTT
ccaggttctagaggtcattc

SEQ ID NO: 247473 - DNA, 20 bp, Artificial Sequence
  Description of Artificial Sequence: Synthetic oligonucleotide
  Target: LAMA2; (-) strand; PAM type: YTN; PAM sequence: TTT
tccaggttctagaggtcatt

SEQ ID NO: 247474 - DNA, 20 bp, Artificial Sequence
  Description of Artificial Sequence: Synthetic oligonucleotide
  Target: LAMA2; (-) strand; PAM type: YTN; PAM sequence: CTT
ttccaggttctagaggtcat

SEQ ID NO: 247475 - DNA, 20 bp, Artificial Sequence
  Description of Artificial Sequence: Synthetic oligonucleotide
  Target: LAMA2; (-) strand; PAM type: YTN; PAM sequence: CTC
ttttccaggttctagaggtc

SEQ ID NO: 247476 - DNA, 20 bp, Artificial Sequence
  Description of Artificial Sequence: Synthetic oligonucleotide
  Target: LAMA2; (-) strand; PAM type: YTN; PAM sequence: TTG
tcagccaatgctcttttcca

SEQ ID NO: 247477 - DNA, 20 bp, Artificial Sequence
  Description of Artificial Sequence: Synthetic oligonucleotide
  Target: LAMA2; (-) strand; PAM type: YTN; PAM sequence: TTT
gtcagccaatgctcttttcc

SEQ ID NO: 247478 - DNA, 20 bp, Artificial Sequence
  Description of Artificial Sequence: Synthetic oligonucleotide
  Target: LAMA2; (-) strand; PAM type: YTN; PAM sequence: CTG
tttgtcagccaatgctcttt

SEQ ID NO: 247479 - DNA, 20 bp, Artificial Sequence
  Description of Artificial Sequence: Synthetic oligonucleotide
  Target: LAMA2; (-) strand; PAM type: YTN; PAM sequence: TTG
ctgtttgtcagccaatgctc

SEQ ID NO: 247480 - DNA, 20 bp, Artificial Sequence
  Description of Artificial Sequence: Synthetic oligonucleotide
  Target: LAMA2; (-) strand; PAM type: YTN; PAM sequence: CTT
gctgtttgtcagccaatgct

SEQ ID NO: 247481 - DNA, 20 bp, Artificial Sequence
  Description of Artificial Sequence: Synthetic oligonucleotide
  Target: LAMA2; (-) strand; PAM type: YTN; PAM sequence: TTC
cttgctgtttgtcagccaat

SEQ ID NO: 247482 - DNA, 20 bp, Artificial Sequence
  Description of Artificial Sequence: Synthetic oligonucleotide
  Target: LAMA2; (-) strand; PAM type: YTN; PAM sequence: TTT
ccttgctgtttgtcagccaa

SEQ ID NO: 247483 - DNA, 20 bp, Artificial Sequence
  Description of Artificial Sequence: Synthetic oligonucleotide
  Target: LAMA2; (-) strand; PAM type: YTN; PAM sequence: TTC
ccatttccttgctgtttgtc

SEQ ID NO: 247484 - DNA, 20 bp, Artificial Sequence
  Description of Artificial Sequence: Synthetic oligonucleotide
  Target: LAMA2; (-) strand; PAM type: YTN; PAM sequence: CTG
aggttcccatttccttgctg

SEQ ID NO: 247485 - DNA, 20 bp, Artificial Sequence
  Description of Artificial Sequence: Synthetic oligonucleotide
  Target: LAMA2; (-) strand; PAM type: YTN; PAM sequence: TTG
tggaactgaggttcccattt

SEQ ID NO: 247486 - DNA, 20 bp, Artificial Sequence
  Description of Artificial Sequence: Synthetic oligonucleotide
  Target: LAMA2; (-) strand; PAM type: YTN; PAM sequence: TTG
tggttgtggaactgaggttc

SEQ ID NO: 247487 - DNA, 20 bp, Artificial Sequence
  Description of Artificial Sequence: Synthetic oligonucleotide
  Target: LAMA2; (-) strand; PAM type: YTN; PAM sequence: CTT
gtggttgtggaactgaggtt

SEQ ID NO: 247488 - DNA, 20 bp, Artificial Sequence
  Description of Artificial Sequence: Synthetic oligonucleotide
  Target: LAMA2; (-) strand; PAM type: YTN; PAM sequence: TTC
ttgtggttgtggaactgagg

SEQ ID NO: 247489 - DNA, 20 bp, Artificial Sequence
  Description of Artificial Sequence: Synthetic oligonucleotide
  Target: LAMA2; (-) strand; PAM type: YTN; PAM sequence: TTT
cttgtggttgtggaactgag

SEQ ID NO: 247490 - DNA, 20 bp, Artificial Sequence
  Description of Artificial Sequence: Synthetic oligonucleotide
  Target: LAMA2; (-) strand; PAM type: YTN; PAM sequence: TTC
atttcttgtggttgtggaac

SEQ ID NO: 247491 - DNA, 20 bp, Artificial Sequence
  Description of Artificial Sequence: Synthetic oligonucleotide
  Target: LAMA2; (-) strand; PAM type: YTN; PAM sequence: TTG
gcagaattcatttcttgtgg

SEQ ID NO: 247492 - DNA, 20 bp, Artificial Sequence
  Description of Artificial Sequence: Synthetic oligonucleotide
  Target: LAMA2; (-) strand; PAM type: YTN; PAM sequence: TTG
ttggcagaattcatttcttg

SEQ ID NO: 247493 - DNA, 20 bp, Artificial Sequence
  Description of Artificial Sequence: Synthetic oligonucleotide
  Target: LAMA2; (-) strand; PAM type: YTN; PAM sequence: TTC
aggttgttggcagaattcat

SEQ ID NO: 247494 - DNA, 20 bp, Artificial Sequence
  Description of Artificial Sequence: Synthetic oligonucleotide
  Target: LAMA2; (-) strand; PAM type: YTN; PAM sequence: TTC
attcaggttgttggcagaat

SEQ ID NO: 247495 - DNA, 20 bp, Artificial Sequence
  Description of Artificial Sequence: Synthetic oligonucleotide
  Target: LAMA2; (-) strand; PAM type: YTN; PAM sequence: TTG
ttcattcaggttgttggcag

SEQ ID NO: 247496 - DNA, 20 bp, Artificial Sequence
  Description of Artificial Sequence: Synthetic oligonucleotide
  Target: LAMA2; (-) strand; PAM type: YTN; PAM sequence: CTT
gttcattcaggttgttggca

SEQ ID NO: 247497 - DNA, 20 bp, Artificial Sequence
  Description of Artificial Sequence: Synthetic oligonucleotide
  Target: LAMA2; (-) strand; PAM type: YTN; PAM sequence: CTC
cttgttcattcaggttgttg

SEQ ID NO: 247498 - DNA, 20 bp, Artificial Sequence
  Description of Artificial Sequence: Synthetic oligonucleotide
  Target: LAMA2; (-) strand; PAM type: YTN; PAM sequence: CTA
tctccttgttcattcaggtt

SEQ ID NO: 247499 - DNA, 20 bp, Artificial Sequence
  Description of Artificial Sequence: Synthetic oligonucleotide
  Target: LAMA2; (-) strand; PAM type: YTN; PAM sequence: CTA
gaggagaatctatctccttg

SEQ ID NO: 247500 - DNA, 20 bp, Artificial Sequence
  Description of Artificial Sequence: Synthetic oligonucleotide
  Target: LAMA2; (-) strand; PAM type: YTN; PAM sequence: CTC
tagaggagaatctatctcct

SEQ ID NO: 247501 - DNA, 20 bp, Artificial Sequence
  Description of Artificial Sequence: Synthetic oligonucleotide
  Target: LAMA2; (-) strand; PAM type: YTN; PAM sequence: CTG
gtggctctagaggagaatct

SEQ ID NO: 247502 - DNA, 20 bp, Artificial Sequence
  Description of Artificial Sequence: Synthetic oligonucleotide
  Target: LAMA2; (-) strand; PAM type: YTN; PAM sequence: TTC
tggtggctctagaggagaat

SEQ ID NO: 247503 - DNA, 20 bp, Artificial Sequence
  Description of Artificial Sequence: Synthetic oligonucleotide
  Target: LAMA2; (-) strand; PAM type: YTN; PAM sequence: TTT
ctggtggctctagaggagaa

SEQ ID NO: 247504 - DNA, 20 bp, Artificial Sequence
  Description of Artificial Sequence: Synthetic oligonucleotide
  Target: LAMA2; (-) strand; PAM type: YTN; PAM sequence: CTT
tctggtggctctagaggaga

SEQ ID NO: 247505 - DNA, 20 bp, Artificial Sequence
  Description of Artificial Sequence: Synthetic oligonucleotide
  Target: LAMA2; (-) strand; PAM type: YTN; PAM sequence: TTC
ctttctggtggctctagagg

SEQ ID NO: 247506 - DNA, 20 bp, Artificial Sequence
  Description of Artificial Sequence: Synthetic oligonucleotide
  Target: LAMA2; (-) strand; PAM type: YTN; PAM sequence: CTA
aaatgatggtgtcggcatgg

SEQ ID NO: 247507 - DNA, 20 bp, Artificial Sequence
  Description of Artificial Sequence: Synthetic oligonucleotide
  Target: LAMA2; (-) strand; PAM type: YTN; PAM sequence: CTA
aaatgactaaaatgatggtg

SEQ ID NO: 247508 - DNA, 20 bp, Artificial Sequence
  Description of Artificial Sequence: Synthetic oligonucleotide
  Target: LAMA2; (-) strand; PAM type: YTN; PAM sequence: TTA
gctaaaatgactaaaatgat

SEQ ID NO: 247509 - DNA, 20 bp, Artificial Sequence
  Description of Artificial Sequence: Synthetic oligonucleotide
  Target: LAMA2; (-) strand; PAM type: YTN; PAM sequence: TTT
agctaaaatgactaaaatga

SEQ ID NO: 247510 - DNA, 20 bp, Artificial Sequence
  Description of Artificial Sequence: Synthetic oligonucleotide
  Target: LAMA2; (-) strand; PAM type: YTN; PAM sequence: CTT
tagctaaaatgactaaaatg

SEQ ID NO: 247511 - DNA, 20 bp, Artificial Sequence
  Description of Artificial Sequence: Synthetic oligonucleotide
  Target: LAMA2; (-) strand; PAM type: YTN; PAM sequence: CTC
ctttagctaaaatgactaaa

SEQ ID NO: 247512 - DNA, 20 bp, Artificial Sequence
  Description of Artificial Sequence: Synthetic oligonucleotide
  Target: LAMA2; (-) strand; PAM type: YTN; PAM sequence: TTC
caatatgggtctcctttagc

SEQ ID NO: 247513 - DNA, 20 bp, Artificial Sequence
  Description of Artificial Sequence: Synthetic oligonucleotide
  Target: LAMA2; (-) strand; PAM type: YTN; PAM sequence: CTG
taggcgaatattccaatatg

SEQ ID NO: 247514 - DNA, 20 bp, Artificial Sequence
  Description of Artificial Sequence: Synthetic oligonucleotide
  Target: LAMA2; (-) strand; PAM type: YTN; PAM sequence: TTC
tgtaggcgaatattccaata

SEQ ID NO: 247515 - DNA, 20 bp, Artificial Sequence
  Description of Artificial Sequence: Synthetic oligonucleotide
  Target: LAMA2; (-) strand; PAM type: YTN; PAM sequence: TTG
gaatacagttctgtaggcga

SEQ ID NO: 247516 - DNA, 20 bp, Artificial Sequence
  Description of Artificial Sequence: Synthetic oligonucleotide
  Target: LAMA2; (-) strand; PAM type: YTN; PAM sequence: TTG
ttggaatacagttctgtagg

SEQ ID NO: 247517 - DNA, 20 bp, Artificial Sequence
  Description of Artificial Sequence: Synthetic oligonucleotide
  Target: LAMA2; (-) strand; PAM type: YTN; PAM sequence: CTT
gttggaatacagttctgtag

SEQ ID NO: 247518 - DNA, 20 bp, Artificial Sequence
  Description of Artificial Sequence: Synthetic oligonucleotide
  Target: LAMA2; (-) strand; PAM type: YTN; PAM sequence: TTC
caacatatgcatccttgttg

SEQ ID NO: 247519 - DNA, 20 bp, Artificial Sequence
  Description of Artificial Sequence: Synthetic oligonucleotide
  Target: LAMA2; (-) strand; PAM type: YTN; PAM sequence: CTG
taggtgaatattccaacata

SEQ ID NO: 247520 - DNA, 20 bp, Artificial Sequence
  Description of Artificial Sequence: Synthetic oligonucleotide
  Target: LAMA2; (-) strand; PAM type: YTN; PAM sequence: TTC
tgtaggtgaatattccaaca

SEQ ID NO: 247521 - DNA, 20 bp, Artificial Sequence
  Description of Artificial Sequence: Synthetic oligonucleotide
  Target: LAMA2; (-) strand; PAM type: YTN; PAM sequence: CTC
atggttctgtaggtgaatat

SEQ ID NO: 247522 - DNA, 20 bp, Artificial Sequence
  Description of Artificial Sequence: Synthetic oligonucleotide
  Target: LAMA2; (-) strand; PAM type: YTN; PAM sequence: TTA
tctcatggttctgtaggtga

SEQ ID NO: 247523 - DNA, 20 bp, Artificial Sequence
  Description of Artificial Sequence: Synthetic oligonucleotide
  Target: LAMA2; (-) strand; PAM type: YTN; PAM sequence: TTG
aaagcaacacaaatatatta

SEQ ID NO: 247524 - DNA, 20 bp, Artificial Sequence
  Description of Artificial Sequence: Synthetic oligonucleotide
  Target: LAMA2; (-) strand; PAM type: YTN; PAM sequence: TTA
gcaattgaaagcaacacaaa

SEQ ID NO: 247525 - DNA, 20 bp, Artificial Sequence
  Description of Artificial Sequence: Synthetic oligonucleotide
  Target: LAMA2; (-) strand; PAM type: YTN; PAM sequence: CTT
agcaattgaaagcaacacaa

SEQ ID NO: 247526 - DNA, 20 bp, Artificial Sequence
  Description of Artificial Sequence: Synthetic oligonucleotide
  Target: LAMA2; (-) strand; PAM type: YTN; PAM sequence: CTA
ccgtaacaaacttagcaatt

SEQ ID NO: 247527 - DNA, 20 bp, Artificial Sequence
  Description of Artificial Sequence: Synthetic oligonucleotide
  Target: LAMA2; (-) strand; PAM type: YTN; PAM sequence: TTG
ctaccgtaacaaacttagca

SEQ ID NO: 247528 - DNA, 20 bp, Artificial Sequence
  Description of Artificial Sequence: Synthetic oligonucleotide
  Target: LAMA2; (-) strand; PAM type: YTN; PAM sequence: CTA
ttgctaccgtaacaaactta

SEQ ID NO: 247529 - DNA, 20 bp, Artificial Sequence
  Description of Artificial Sequence: Synthetic oligonucleotide
  Target: LAMA2; (-) strand; PAM type: YTN; PAM sequence: TTC
ctattgctaccgtaacaaac

SEQ ID NO: 247530 - DNA, 20 bp, Artificial Sequence
  Description of Artificial Sequence: Synthetic oligonucleotide
  Target: LAMA2; (-) strand; PAM type: YTN; PAM sequence: TTT
cctattgctaccgtaacaaa

SEQ ID NO: 247531 - DNA, 20 bp, Artificial Sequence
  Description of Artificial Sequence: Synthetic oligonucleotide
  Target: LAMA2; (-) strand; PAM type: YTN; PAM sequence: TTA
gtttcctattgctaccgtaa

SEQ ID NO: 247532 - DNA, 20 bp, Artificial Sequence
  Description of Artificial Sequence: Synthetic oligonucleotide
  Target: LAMA2; (-) strand; PAM type: YTN; PAM sequence: TTG
cattagtttcctattgctac

SEQ ID NO: 247533 - DNA, 20 bp, Artificial Sequence
  Description of Artificial Sequence: Synthetic oligonucleotide
  Target: LAMA2; (-) strand; PAM type: YTN; PAM sequence: CTG
tacattgcattagtttccta

SEQ ID NO: 247534 - DNA, 20 bp, Artificial Sequence
  Description of Artificial Sequence: Synthetic oligonucleotide
  Target: LAMA2; (-) strand; PAM type: YTN; PAM sequence: TTG
tgcaagggtcaactgtacat

SEQ ID NO: 247535 - DNA, 20 bp, Artificial Sequence
  Description of Artificial Sequence: Synthetic oligonucleotide
  Target: LAMA2; (-) strand; PAM type: YTN; PAM sequence: CTG
cattgtgcaagggtcaactg

SEQ ID NO: 247536 - DNA, 20 bp, Artificial Sequence
  Description of Artificial Sequence: Synthetic oligonucleotide
  Target: LAMA2; (-) strand; PAM type: YTN; PAM sequence: CTA
atccctgcattgtgcaaggg

SEQ ID NO: 247537 - DNA, 20 bp, Artificial Sequence
  Description of Artificial Sequence: Synthetic oligonucleotide
  Target: LAMA2; (-) strand; PAM type: YTN; PAM sequence: CTG
tgtagaggtcagcatcccta

SEQ ID NO: 247538 - DNA, 20 bp, Artificial Sequence
  Description of Artificial Sequence: Synthetic oligonucleotide
  Target: LAMA2; (-) strand; PAM type: YTN; PAM sequence: TTC
aactgtgtagaggtcagcat

SEQ ID NO: 247539 - DNA, 20 bp, Artificial Sequence
  Description of Artificial Sequence: Synthetic oligonucleotide
  Target: LAMA2; (-) strand; PAM type: YTN; PAM sequence: TTT
caactgtgtagaggtcagca

SEQ ID NO: 247540 - DNA, 20 bp, Artificial Sequence
  Description of Artificial Sequence: Synthetic oligonucleotide
  Target: LAMA2; (-) strand; PAM type: YTN; PAM sequence: TTT
tcaactgtgtagaggtcagc

SEQ ID NO: 247541 - DNA, 20 bp, Artificial Sequence
  Description of Artificial Sequence: Synthetic oligonucleotide
  Target: LAMA2; (-) strand; PAM type: YTN; PAM sequence: TTA
taaacaaattttcaactgtg

SEQ ID NO: 247542 - DNA, 20 bp, Artificial Sequence
  Description of Artificial Sequence: Synthetic oligonucleotide
  Target: LAMA2; (-) strand; PAM type: YTN; PAM sequence: CTA
aaaattataaacaaattttc

SEQ ID NO: 247543 - DNA, 20 bp, Artificial Sequence
  Description of Artificial Sequence: Synthetic oligonucleotide
  Target: LAMA2; (-) strand; PAM type: YTN; PAM sequence: TTA
gggagctaaaaattataaac

SEQ ID NO: 247544 - DNA, 20 bp, Artificial Sequence
  Description of Artificial Sequence: Synthetic oligonucleotide
  Target: LAMA2; (-) strand; PAM type: YTN; PAM sequence: TTT
agggagctaaaaattataaa

SEQ ID NO: 247545 - DNA, 20 bp, Artificial Sequence
  Description of Artificial Sequence: Synthetic oligonucleotide
  Target: LAMA2; (-) strand; PAM type: YTN; PAM sequence: TTT
tagggagctaaaaattataa

SEQ ID NO: 247546 - DNA, 20 bp, Artificial Sequence
  Description of Artificial Sequence: Synthetic oligonucleotide
  Target: LAMA2; (-) strand; PAM type: YTN; PAM sequence: TTT
ttagggagctaaaaattata

SEQ ID NO: 247547 - DNA, 20 bp, Artificial Sequence
  Description of Artificial Sequence: Synthetic oligonucleotide
  Target: LAMA2; (-) strand; PAM type: YTN; PAM sequence: TTA
tgtttttagggagctaaaaa

SEQ ID NO: 247548 - DNA, 20 bp, Artificial Sequence
  Description of Artificial Sequence: Synthetic oligonucleotide
  Target: LAMA2; (-) strand; PAM type: YTN; PAM sequence: TTA
gtagttatgtttttagggag

SEQ ID NO: 247549 - DNA, 20 bp, Artificial Sequence
  Description of Artificial Sequence: Synthetic oligonucleotide
  Target: LAMA2; (-) strand; PAM type: YTN; PAM sequence: CTT
agtagttatgtttttaggga

SEQ ID NO: 247550 - DNA, 20 bp, Artificial Sequence
  Description of Artificial Sequence: Synthetic oligonucleotide
  Target: LAMA2; (-) strand; PAM type: YTN; PAM sequence: CTC
ttagtagttatgtttttagg

SEQ ID NO: 247551 - DNA, 20 bp, Artificial Sequence
  Description of Artificial Sequence: Synthetic oligonucleotide
  Target: LAMA2; (-) strand; PAM type: YTN; PAM sequence: TTC
aacagtagactcttagtagt

SEQ ID NO: 247552 - DNA, 20 bp, Artificial Sequence
  Description of Artificial Sequence: Synthetic oligonucleotide
  Target: LAMA2; (-) strand; PAM type: YTN; PAM sequence: CTG
ttcaacagtagactcttagt

SEQ ID NO: 247553 - DNA, 20 bp, Artificial Sequence
  Description of Artificial Sequence: Synthetic oligonucleotide
  Target: LAMA2; (-) strand; PAM type: YTN; PAM sequence: TTC
tgttcaacagtagactctta

SEQ ID NO: 247554 - DNA, 20 bp, Artificial Sequence
  Description of Artificial Sequence: Synthetic oligonucleotide
  Target: LAMA2; (-) strand; PAM type: YTN; PAM sequence: CTT
ctgttcaacagtagactctt

SEQ ID NO: 247555 - DNA, 20 bp, Artificial Sequence
  Description of Artificial Sequence: Synthetic oligonucleotide
  Target: LAMA2; (-) strand; PAM type: YTN; PAM sequence: TTA
tcagtaaggcttctgttcaa

SEQ ID NO: 247556 - DNA, 20 bp, Artificial Sequence
  Description of Artificial Sequence: Synthetic oligonucleotide
  Target: LAMA2; (-) strand; PAM type: YTN; PAM sequence: TTA
tgttatcagtaaggcttctg

SEQ ID NO: 247557 - DNA, 20 bp, Artificial Sequence
  Description of Artificial Sequence: Synthetic oligonucleotide
  Target: LAMA2; (-) strand; PAM type: YTN; PAM sequence: CTT
atgttatcagtaaggcttct

SEQ ID NO: 247558 - DNA, 20 bp, Artificial Sequence
  Description of Artificial Sequence: Synthetic oligonucleotide
  Target: LAMA2; (-) strand; PAM type: YTN; PAM sequence: TTG
cttatgttatcagtaaggct

SEQ ID NO: 247559 - DNA, 20 bp, Artificial Sequence
  Description of Artificial Sequence: Synthetic oligonucleotide
  Target: LAMA2; (-) strand; PAM type: YTN; PAM sequence: TTA
ataaattgcttatgttatca

SEQ ID NO: 247560 - DNA, 20 bp, Artificial Sequence
  Description of Artificial Sequence: Synthetic oligonucleotide
  Target: LAMA2; (-) strand; PAM type: YTN; PAM sequence: TTA
taagaatacagcatatatac

SEQ ID NO: 247561 - DNA, 20 bp, Artificial Sequence
  Description of Artificial Sequence: Synthetic oligonucleotide
  Target: LAMA2; (-) strand; PAM type: YTN; PAM sequence: TTA
ttataagaatacagcatata

SEQ ID NO: 247562 - DNA, 20 bp, Artificial Sequence
  Description of Artificial Sequence: Synthetic oligonucleotide
  Target: LAMA2; (-) strand; PAM type: YTN; PAM sequence: TTT
attataagaatacagcatat

SEQ ID NO: 247563 - DNA, 20 bp, Artificial Sequence
  Description of Artificial Sequence: Synthetic oligonucleotide
  Target: LAMA2; (-) strand; PAM type: YTN; PAM sequence: CTT
tattataagaatacagcata

SEQ ID NO: 247564 - DNA, 20 bp, Artificial Sequence
  Description of Artificial Sequence: Synthetic oligonucleotide
  Target: LAMA2; (-) strand; PAM type: YTN; PAM sequence: CTA
acacactttattataagaat

SEQ ID NO: 247565 - DNA, 20 bp, Artificial Sequence
  Description of Artificial Sequence: Synthetic oligonucleotide
  Target: LAMA2; (-) strand; PAM type: YTN; PAM sequence: CTC
taacacactttattataaga

SEQ ID NO: 247566 - DNA, 20 bp, Artificial Sequence
  Description of Artificial Sequence: Synthetic oligonucleotide
  Target: LAMA2; (-) strand; PAM type: YTN; PAM sequence: CTC
tctaacacactttattataa

SEQ ID NO: 247567 - DNA, 20 bp, Artificial Sequence
  Description of Artificial Sequence: Synthetic oligonucleotide
  Target: LAMA2; (-) strand; PAM type: YTN; PAM sequence: TTC
tctctaacacactttattat

SEQ ID NO: 247568 - DNA, 20 bp, Artificial Sequence
  Description of Artificial Sequence: Synthetic oligonucleotide
  Target: LAMA2; (-) strand; PAM type: YTN; PAM sequence: TTT
ctctctaacacactttatta

SEQ ID NO: 247569 - DNA, 20 bp, Artificial Sequence
  Description of Artificial Sequence: Synthetic oligonucleotide
  Target: LAMA2; (-) strand; PAM type: YTN; PAM sequence: TTT
tctctctaacacactttatt

SEQ ID NO: 247570 - DNA, 20 bp, Artificial Sequence
  Description of Artificial Sequence: Synthetic oligonucleotide
  Target: LAMA2; (-) strand; PAM type: YTN; PAM sequence: CTT
ttctctctaacacactttat

SEQ ID NO: 247571 - DNA, 20 bp, Artificial Sequence
  Description of Artificial Sequence: Synthetic oligonucleotide
  Target: LAMA2; (-) strand; PAM type: YTN; PAM sequence: TTC
ttttctctctaacacacttt

SEQ ID NO: 247572 - DNA, 20 bp, Artificial Sequence
  Description of Artificial Sequence: Synthetic oligonucleotide
  Target: LAMA2; (-) strand; PAM type: YTN; PAM sequence: TTT
cttttctctctaacacactt

SEQ ID NO: 247573 - DNA, 20 bp, Artificial Sequence
  Description of Artificial Sequence: Synthetic oligonucleotide
  Target: LAMA2; (-) strand; PAM type: YTN; PAM sequence: TTT
tcttttctctctaacacact

SEQ ID NO: 247574 - DNA, 20 bp, Artificial Sequence
  Description of Artificial Sequence: Synthetic oligonucleotide
  Target: LAMA2; (-) strand; PAM type: YTN; PAM sequence: TTA
gtattttcttttctctctaa

SEQ ID NO: 247575 - DNA, 20 bp, Artificial Sequence
  Description of Artificial Sequence: Synthetic oligonucleotide
  Target: LAMA2; (-) strand; PAM type: YTN; PAM sequence: CTT
agtattttcttttctctcta

SEQ ID NO: 247576 - DNA, 20 bp, Artificial Sequence
  Description of Artificial Sequence: Synthetic oligonucleotide
  Target: LAMA2; (-) strand; PAM type: YTN; PAM sequence: TTC
ttagtattttcttttctctc

SEQ ID NO: 247577 - DNA, 20 bp, Artificial Sequence
  Description of Artificial Sequence: Synthetic oligonucleotide
  Target: LAMA2; (-) strand; PAM type: YTN; PAM sequence: TTT
cttagtattttcttttctct

SEQ ID NO: 247578 - DNA, 20 bp, Artificial Sequence
  Description of Artificial Sequence: Synthetic oligonucleotide
  Target: LAMA2; (-) strand; PAM type: YTN; PAM sequence: TTT
tcttagtattttcttttctc

SEQ ID NO: 247579 - DNA, 20 bp, Artificial Sequence
  Description of Artificial Sequence: Synthetic oligonucleotide
  Target: LAMA2; (-) strand; PAM type: YTN; PAM sequence: TTA
tgattttcttagtattttct

SEQ ID NO: 247580 - DNA, 20 bp, Artificial Sequence
  Description of Artificial Sequence: Synthetic oligonucleotide
  Target: LAMA2; (-) strand; PAM type: YTN; PAM sequence: CTT
atgattttcttagtattttc

SEQ ID NO: 247581 - DNA, 20 bp, Artificial Sequence
  Description of Artificial Sequence: Synthetic oligonucleotide
  Target: LAMA2; (-) strand; PAM type: YTN; PAM sequence: TTC
cttatgattttcttagtatt

SEQ ID NO: 247582 - DNA, 20 bp, Artificial Sequence
  Description of Artificial Sequence: Synthetic oligonucleotide
  Target: LAMA2; (-) strand; PAM type: YTN; PAM sequence: CTT
ccttatgattttcttagtat

SEQ ID NO: 247583 - DNA, 20 bp, Artificial Sequence
  Description of Artificial Sequence: Synthetic oligonucleotide
  Target: LAMA2; (-) strand; PAM type: YTN; PAM sequence: TTA
tcttccttatgattttctta

SEQ ID NO: 247584 - DNA, 20 bp, Artificial Sequence
  Description of Artificial Sequence: Synthetic oligonucleotide
  Target: LAMA2; (-) strand; PAM type: YTN; PAM sequence: TTT
atcttccttatgattttctt

SEQ ID NO: 247585 - DNA, 20 bp, Artificial Sequence
  Description of Artificial Sequence: Synthetic oligonucleotide
  Target: LAMA2; (-) strand; PAM type: YTN; PAM sequence: TTT
tatcttccttatgattttct

SEQ ID NO: 247586 - DNA, 20 bp, Artificial Sequence
  Description of Artificial Sequence: Synthetic oligonucleotide
  Target: LAMA2; (-) strand; PAM type: YTN; PAM sequence: TTA
acacaaatatattttatctt

SEQ ID NO: 247587 - DNA, 20 bp, Artificial Sequence
  Description of Artificial Sequence: Synthetic oligonucleotide
  Target: LAMA2; (-) strand; PAM type: YTN; PAM sequence: TTG
attaacacaaatatatttta

SEQ ID NO: 247588 - DNA, 20 bp, Artificial Sequence
  Description of Artificial Sequence: Synthetic oligonucleotide
  Target: LAMA2; (-) strand; PAM type: YTN; PAM sequence: CTT
gattaacacaaatatatttt

SEQ ID NO: 247589 - DNA, 20 bp, Artificial Sequence
  Description of Artificial Sequence: Synthetic oligonucleotide
  Target: LAMA2; (-) strand; PAM type: YTN; PAM sequence: TTC
acttgattaacacaaatata

SEQ ID NO: 247590 - DNA, 20 bp, Artificial Sequence
  Description of Artificial Sequence: Synthetic oligonucleotide
  Target: LAMA2; (-) strand; PAM type: YTN; PAM sequence: TTT
cacttgattaacacaaatat

SEQ ID NO: 247591 - DNA, 20 bp, Artificial Sequence
  Description of Artificial Sequence: Synthetic oligonucleotide
  Target: LAMA2; (-) strand; PAM type: YTN; PAM sequence: CTT
tcacttgattaacacaaata

SEQ ID NO: 247592 - DNA, 20 bp, Artificial Sequence
  Description of Artificial Sequence: Synthetic oligonucleotide
  Target: LAMA2; (-) strand; PAM type: YTN; PAM sequence: TTA
agatgatcaactttcacttg

SEQ ID NO: 247593 - DNA, 20 bp, Artificial Sequence
  Description of Artificial Sequence: Synthetic oligonucleotide
  Target: LAMA2; (-) strand; PAM type: YTN; PAM sequence: TTT
aagatgatcaactttcactt

SEQ ID NO: 247594 - DNA, 20 bp, Artificial Sequence
  Description of Artificial Sequence: Synthetic oligonucleotide
  Target: LAMA2; (-) strand; PAM type: YTN; PAM sequence: CTT
taagatgatcaactttcact

SEQ ID NO: 247595 - DNA, 20 bp, Artificial Sequence
  Description of Artificial Sequence: Synthetic oligonucleotide
  Target: LAMA2; (-) strand; PAM type: YTN; PAM sequence: TTC
aacatgaagatgatgcagat

SEQ ID NO: 247596 - DNA, 20 bp, Artificial Sequence
  Description of Artificial Sequence: Synthetic oligonucleotide
  Target: LAMA2; (-) strand; PAM type: YTN; PAM sequence: TTT
caacatgaagatgatgcaga

SEQ ID NO: 247597 - DNA, 20 bp, Artificial Sequence
  Description of Artificial Sequence: Synthetic oligonucleotide
  Target: LAMA2; (-) strand; PAM type: YTN; PAM sequence: TTT
tcaacatgaagatgatgcag

SEQ ID NO: 247598 - DNA, 20 bp, Artificial Sequence
  Description of Artificial Sequence: Synthetic oligonucleotide
  Target: LAMA2; (-) strand; PAM type: YTN; PAM sequence: CTT
ttcaacatgaagatgatgca

SEQ ID NO: 247599 - DNA, 20 bp, Artificial Sequence
  Description of Artificial Sequence: Synthetic oligonucleotide
  Target: LAMA2; (-) strand; PAM type: YTN; PAM sequence: TTA
gccttttcaacatgaagatg

SEQ ID NO: 247600 - DNA, 20 bp, Artificial Sequence
  Description of Artificial Sequence: Synthetic oligonucleotide
  Target: LAMA2; (-) strand; PAM type: YTN; PAM sequence: CTT
agccttttcaacatgaagat

SEQ ID NO: 247601 - DNA, 20 bp, Artificial Sequence
  Description of Artificial Sequence: Synthetic oligonucleotide
  Target: LAMA2; (-) strand; PAM type: YTN; PAM sequence: CTC
cttagccttttcaacatgaa

SEQ ID NO: 247602 - DNA, 20 bp, Artificial Sequence
  Description of Artificial Sequence: Synthetic oligonucleotide
  Target: LAMA2; (-) strand; PAM type: YTN; PAM sequence: CTC
ctccttagccttttcaacat

SEQ ID NO: 247603 - DNA, 20 bp, Artificial Sequence
  Description of Artificial Sequence: Synthetic oligonucleotide
  Target: LAMA2; (-) strand; PAM type: YTN; PAM sequence: TTC
ctcctccttagccttttcaa

SEQ ID NO: 247604 - DNA, 20 bp, Artificial Sequence
  Description of Artificial Sequence: Synthetic oligonucleotide
  Target: LAMA2; (-) strand; PAM type: YTN; PAM sequence: CTT
cctcctccttagccttttca

SEQ ID NO: 247605 - DNA, 20 bp, Artificial Sequence
  Description of Artificial Sequence: Synthetic oligonucleotide
  Target: LAMA2; (-) strand; PAM type: YTN; PAM sequence: TTC
ttcctcctccttagcctttt

SEQ ID NO: 247606 - DNA, 20 bp, Artificial Sequence
  Description of Artificial Sequence: Synthetic oligonucleotide
  Target: LAMA2; (-) strand; PAM type: YTN; PAM sequence: CTT
cttcctcctccttagccttt

SEQ ID NO: 247607 - DNA, 20 bp, Artificial Sequence
  Description of Artificial Sequence: Synthetic oligonucleotide
  Target: LAMA2; (-) strand; PAM type: YTN; PAM sequence: CTC
ttcttcctcctccttagcct

SEQ ID NO: 247608 - DNA, 20 bp, Artificial Sequence
  Description of Artificial Sequence: Synthetic oligonucleotide
  Target: LAMA2; (-) strand; PAM type: YTN; PAM sequence: CTC
ctcttcttcctcctccttag

SEQ ID NO: 247609 - DNA, 20 bp, Artificial Sequence
  Description of Artificial Sequence: Synthetic oligonucleotide
  Target: LAMA2; (-) strand; PAM type: YTN; PAM sequence: CTG
agacagcaagaccaacccct

SEQ ID NO: 247610 - DNA, 20 bp, Artificial Sequence
  Description of Artificial Sequence: Synthetic oligonucleotide
  Target: LAMA2; (-) strand; PAM type: YTN; PAM sequence: CTC
ccctgagacagcaagaccaa

SEQ ID NO: 247611 - DNA, 20 bp, Artificial Sequence
  Description of Artificial Sequence: Synthetic oligonucleotide
  Target: LAMA2; (-) strand; PAM type: YTN; PAM sequence: CTG
cctcccctgagacagcaaga

SEQ ID NO: 247612 - DNA, 20 bp, Artificial Sequence
  Description of Artificial Sequence: Synthetic oligonucleotide
  Target: LAMA2; (-) strand; PAM type: YTN; PAM sequence: CTC
tgcctcccctgagacagcaa

SEQ ID NO: 247613 - DNA, 20 bp, Artificial Sequence
  Description of Artificial Sequence: Synthetic oligonucleotide
  Target: LAMA2; (-) strand; PAM type: YTN; PAM sequence: CTG
tctctgcctcccctgagaca

SEQ ID NO: 247614 - DNA, 20 bp, Artificial Sequence
  Description of Artificial Sequence: Synthetic oligonucleotide
  Target: LAMA2; (-) strand; PAM type: YTN; PAM sequence: TTC
tgtctctgcctcccctgaga

SEQ ID NO: 247615 - DNA, 20 bp, Artificial Sequence
  Description of Artificial Sequence: Synthetic oligonucleotide
  Target: LAMA2; (-) strand; PAM type: YTN; PAM sequence: CTT
ctgtctctgcctcccctgag

SEQ ID NO: 247616 - DNA, 20 bp, Artificial Sequence
  Description of Artificial Sequence: Synthetic oligonucleotide
  Target: LAMA2; (-) strand; PAM type: YTN; PAM sequence: TTC
ttctgtctctgcctcccctg

SEQ ID NO: 247617 - DNA, 20 bp, Artificial Sequence
  Description of Artificial Sequence: Synthetic oligonucleotide
  Target: LAMA2; (-) strand; PAM type: YTN; PAM sequence: TTT
cttctgtctctgcctcccct

SEQ ID NO: 247618 - DNA, 20 bp, Artificial Sequence
  Description of Artificial Sequence: Synthetic oligonucleotide
  Target: LAMA2; (-) strand; PAM type: YTN; PAM sequence: TTT
tcttctgtctctgcctcccc

SEQ ID NO: 247619 - DNA, 20 bp, Artificial Sequence
  Description of Artificial Sequence: Synthetic oligonucleotide
  Target: LAMA2; (-) strand; PAM type: YTN; PAM sequence: TTA
tacgcggattttcttctgtc

SEQ ID NO: 247620 - DNA, 20 bp, Artificial Sequence
  Description of Artificial Sequence: Synthetic oligonucleotide
  Target: LAMA2; (-) strand; PAM type: YTN; PAM sequence: TTT
atacgcggattttcttctgt

SEQ ID NO: 247621 - DNA, 20 bp, Artificial Sequence
  Description of Artificial Sequence: Synthetic oligonucleotide
  Target: LAMA2; (-) strand; PAM type: YTN; PAM sequence: CTG
tgcaagtccggtccatttat

SEQ ID NO: 247622 - DNA, 20 bp, Artificial Sequence
  Description of Artificial Sequence: Synthetic oligonucleotide
  Target: LAMA2; (-) strand; PAM type: YTN; PAM sequence: TTG
aactgtgcaagtccggtcca

SEQ ID NO: 247623 - DNA, 20 bp, Artificial Sequence
  Description of Artificial Sequence: Synthetic oligonucleotide
  Target: LAMA2; (-) strand; PAM type: YTN; PAM sequence: TTT
gaactgtgcaagtccggtcc

SEQ ID NO: 247624 - DNA, 20 bp, Artificial Sequence
  Description of Artificial Sequence: Synthetic oligonucleotide
  Target: LAMA2; (-) strand; PAM type: YTN; PAM sequence: CTG
aacaacacaggtttgaactg

SEQ ID NO: 247625 - DNA, 20 bp, Artificial Sequence
  Description of Artificial Sequence: Synthetic oligonucleotide
  Target: LAMA2; (-) strand; PAM type: YTN; PAM sequence: TTG
acacctgaacaacacaggtt

SEQ ID NO: 247626 - DNA, 20 bp, Artificial Sequence
  Description of Artificial Sequence: Synthetic oligonucleotide
  Target: LAMA2; (-) strand; PAM type: YTN; PAM sequence: TTC
atatacagttgacacctgaa

SEQ ID NO: 247627 - DNA, 20 bp, Artificial Sequence
  Description of Artificial Sequence: Synthetic oligonucleotide
  Target: LAMA2; (-) strand; PAM type: YTN; PAM sequence: CTT
catatacagttgacacctga

SEQ ID NO: 247628 - DNA, 20 bp, Artificial Sequence
  Description of Artificial Sequence: Synthetic oligonucleotide
  Target: LAMA2; (-) strand; PAM type: YTN; PAM sequence: TTA
aagaagaaagccttcatata

SEQ ID NO: 247629 - DNA, 20 bp, Artificial Sequence
  Description of Artificial Sequence: Synthetic oligonucleotide
  Target: LAMA2; (-) strand; PAM type: YTN; PAM sequence: TTT
aaagaagaaagccttcatat

SEQ ID NO: 247630 - DNA, 20 bp, Artificial Sequence
  Description of Artificial Sequence: Synthetic oligonucleotide
  Target: LAMA2; (-) strand; PAM type: YTN; PAM sequence: CTG
tttaaagaagaaagccttca

SEQ ID NO: 247631 - DNA, 20 bp, Artificial Sequence
  Description of Artificial Sequence: Synthetic oligonucleotide
  Target: LAMA2; (-) strand; PAM type: YTN; PAM sequence: TTC
tgtttaaagaagaaagcctt

SEQ ID NO: 247632 - DNA, 20 bp, Artificial Sequence
  Description of Artificial Sequence: Synthetic oligonucleotide
  Target: LAMA2; (-) strand; PAM type: YTN; PAM sequence: TTT
ctgtttaaagaagaaagcct

SEQ ID NO: 247633 - DNA, 20 bp, Artificial Sequence
  Description of Artificial Sequence: Synthetic oligonucleotide
  Target: LAMA2; (-) strand; PAM type: YTN; PAM sequence: CTT
tctgtttaaagaagaaagcc

SEQ ID NO: 247634 - DNA, 20 bp, Artificial Sequence
  Description of Artificial Sequence: Synthetic oligonucleotide
  Target: LAMA2; (-) strand; PAM type: YTN; PAM sequence: TTC
ctttctgtttaaagaagaaa

SEQ ID NO: 247635 - DNA, 20 bp, Artificial Sequence
  Description of Artificial Sequence: Synthetic oligonucleotide
  Target: LAMA2; (-) strand; PAM type: YTN; PAM sequence: CTT
cctttctgtttaaagaagaa

SEQ ID NO: 247636 - DNA, 20 bp, Artificial Sequence
  Description of Artificial Sequence: Synthetic oligonucleotide
  Target: LAMA2; (-) strand; PAM type: YTN; PAM sequence: TTG
ggcacaaaatacttcctttc

SEQ ID NO: 247637 - DNA, 20 bp, Artificial Sequence
  Description of Artificial Sequence: Synthetic oligonucleotide
  Target: LAMA2; (-) strand; PAM type: YTN; PAM sequence: CTT
gggcacaaaatacttccttt

SEQ ID NO: 247638 - DNA, 20 bp, Artificial Sequence
  Description of Artificial Sequence: Synthetic oligonucleotide
  Target: LAMA2; (-) strand; PAM type: YTN; PAM sequence: CTC
caaatcttgggcacaaaata

SEQ ID NO: 247639 - DNA, 20 bp, Artificial Sequence
  Description of Artificial Sequence: Synthetic oligonucleotide
  Target: LAMA2; (-) strand; PAM type: YTN; PAM sequence: TTC
tccaaatcttgggcacaaaa

SEQ ID NO: 247640 - DNA, 20 bp, Artificial Sequence
  Description of Artificial Sequence: Synthetic oligonucleotide
  Target: LAMA2; (-) strand; PAM type: YTN; PAM sequence: TTT
ctccaaatcttgggcacaaa

SEQ ID NO: 247641 - DNA, 20 bp, Artificial Sequence
  Description of Artificial Sequence: Synthetic oligonucleotide
  Target: LAMA2; (-) strand; PAM type: YTN; PAM sequence: CTT
tctccaaatcttgggcacaa

SEQ ID NO: 247642 - DNA, 20 bp, Artificial Sequence
  Description of Artificial Sequence: Synthetic oligonucleotide
  Target: LAMA2; (-) strand; PAM type: YTN; PAM sequence: TTG
ctttctccaaatcttgggca

SEQ ID NO: 247643 - DNA, 20 bp, Artificial Sequence
  Description of Artificial Sequence: Synthetic oligonucleotide
  Target: LAMA2; (-) strand; PAM type: YTN; PAM sequence: TTA
tcccattgctttctccaaat

SEQ ID NO: 247644 - DNA, 20 bp, Artificial Sequence
  Description of Artificial Sequence: Synthetic oligonucleotide
  Target: LAMA2; (-) strand; PAM type: YTN; PAM sequence: TTT
atcccattgctttctccaaa

SEQ ID NO: 247645 - DNA, 20 bp, Artificial Sequence
  Description of Artificial Sequence: Synthetic oligonucleotide
  Target: LAMA2; (-) strand; PAM type: YTN; PAM sequence: TTT
tatcccattgctttctccaa

SEQ ID NO: 247646 - DNA, 20 bp, Artificial Sequence
  Description of Artificial Sequence: Synthetic oligonucleotide
  Target: LAMA2; (-) strand; PAM type: YTN; PAM sequence: TTT
ttatcccattgctttctcca

SEQ ID NO: 247647 - DNA, 20 bp, Artificial Sequence
  Description of Artificial Sequence: Synthetic oligonucleotide
  Target: LAMA2; (-) strand; PAM type: YTN; PAM sequence: CTA
tgatatttttatcccattgc

SEQ ID NO: 247648 - DNA, 20 bp, Artificial Sequence
  Description of Artificial Sequence: Synthetic oligonucleotide
  Target: LAMA2; (-) strand; PAM type: YTN; PAM sequence: CTC
tatgatatttttatcccatt

SEQ ID NO: 247649 - DNA, 20 bp, Artificial Sequence
  Description of Artificial Sequence: Synthetic oligonucleotide
  Target: LAMA2; (-) strand; PAM type: YTN; PAM sequence: TTA
gtgaaggggaaaaggaaaaa

SEQ ID NO: 247650 - DNA, 20 bp, Artificial Sequence
  Description of Artificial Sequence: Synthetic oligonucleotide
  Target: LAMA2; (-) strand; PAM type: YTN; PAM sequence: CTT
agtgaaggggaaaaggaaaa

SEQ ID NO: 247651 - DNA, 20 bp, Artificial Sequence
  Description of Artificial Sequence: Synthetic oligonucleotide
  Target: LAMA2; (-) strand; PAM type: YTN; PAM sequence: TTC
aagacccttagtgaagggga

SEQ ID NO: 247652 - DNA, 20 bp, Artificial Sequence
  Description of Artificial Sequence: Synthetic oligonucleotide
  Target: LAMA2; (-) strand; PAM type: YTN; PAM sequence: TTT
caagacccttagtgaagggg

SEQ ID NO: 247653 - DNA, 20 bp, Artificial Sequence
  Description of Artificial Sequence: Synthetic oligonucleotide
  Target: LAMA2; (-) strand; PAM type: YTN; PAM sequence: TTT
tcaagacccttagtgaaggg

SEQ ID NO: 247654 - DNA, 20 bp, Artificial Sequence
  Description of Artificial Sequence: Synthetic oligonucleotide
  Target: LAMA2; (-) strand; PAM type: YTN; PAM sequence: TTT
ttcaagacccttagtgaagg

SEQ ID NO: 247655 - DNA, 20 bp, Artificial Sequence
  Description of Artificial Sequence: Synthetic oligonucleotide
  Target: LAMA2; (-) strand; PAM type: YTN; PAM sequence: TTC
agaccagtttttcaagaccc

SEQ ID NO: 247656 - DNA, 20 bp, Artificial Sequence
  Description of Artificial Sequence: Synthetic oligonucleotide
  Target: LAMA2; (-) strand; PAM type: YTN; PAM sequence: TTT
cagaccagtttttcaagacc

SEQ ID NO: 247657 - DNA, 20 bp, Artificial Sequence
  Description of Artificial Sequence: Synthetic oligonucleotide
  Target: LAMA2; (-) strand; PAM type: YTN; PAM sequence: CTG
gagcggagtttcagaccagt

SEQ ID NO: 247658 - DNA, 20 bp, Artificial Sequence
  Description of Artificial Sequence: Synthetic oligonucleotide
  Target: LAMA2; (-) strand; PAM type: YTN; PAM sequence: CTA
ctggagcggagtttcagacc

SEQ ID NO: 247659 - DNA, 20 bp, Artificial Sequence
  Description of Artificial Sequence: Synthetic oligonucleotide
  Target: LAMA2; (-) strand; PAM type: YTN; PAM sequence: CTC
tactggagcggagtttcaga

SEQ ID NO: 247660 - DNA, 20 bp, Artificial Sequence
  Description of Artificial Sequence: Synthetic oligonucleotide
  Target: LAMA2; (-) strand; PAM type: YTN; PAM sequence: TTG
ctctactggagcggagtttc

SEQ ID NO: 247661 - DNA, 20 bp, Artificial Sequence
  Description of Artificial Sequence: Synthetic oligonucleotide
  Target: LAMA2; (-) strand; PAM type: YTN; PAM sequence: TTT
gctctactggagcggagttt

SEQ ID NO: 247662 - DNA, 20 bp, Artificial Sequence
  Description of Artificial Sequence: Synthetic oligonucleotide
  Target: LAMA2; (-) strand; PAM type: YTN; PAM sequence: TTT
tgctctactggagcggagtt

SEQ ID NO: 247663 - DNA, 20 bp, Artificial Sequence
  Description of Artificial Sequence: Synthetic oligonucleotide
  Target: LAMA2; (-) strand; PAM type: YTN; PAM sequence: TTT
ttgctctactggagcggagt

SEQ ID NO: 247664 - DNA, 20 bp, Artificial Sequence
  Description of Artificial Sequence: Synthetic oligonucleotide
  Target: LAMA2; (-) strand; PAM type: YTN; PAM sequence: CTT
tttgctctactggagcggag

SEQ ID NO: 247665 - DNA, 20 bp, Artificial Sequence
  Description of Artificial Sequence: Synthetic oligonucleotide
  Target: LAMA2; (-) strand; PAM type: YTN; PAM sequence: TTC
tttttgctctactggagcgg

SEQ ID NO: 247666 - DNA, 20 bp, Artificial Sequence
  Description of Artificial Sequence: Synthetic oligonucleotide
  Target: LAMA2; (-) strand; PAM type: YTN; PAM sequence: CTT
ctttttgctctactggagcg

SEQ ID NO: 247667 - DNA, 20 bp, Artificial Sequence
  Description of Artificial Sequence: Synthetic oligonucleotide
  Target: LAMA2; (-) strand; PAM type: YTN; PAM sequence: TTC
ttctttttgctctactggag

SEQ ID NO: 247668 - DNA, 20 bp, Artificial Sequence
  Description of Artificial Sequence: Synthetic oligonucleotide
  Target: LAMA2; (-) strand; PAM type: YTN; PAM sequence: TTC
agttcttctttttgctctac

SEQ ID NO: 247669 - DNA, 20 bp, Artificial Sequence
  Description of Artificial Sequence: Synthetic oligonucleotide
  Target: LAMA2; (-) strand; PAM type: YTN; PAM sequence: TTT
cagttcttctttttgctcta

SEQ ID NO: 247670 - DNA, 20 bp, Artificial Sequence
  Description of Artificial Sequence: Synthetic oligonucleotide
  Target: LAMA2; (-) strand; PAM type: YTN; PAM sequence: CTT
tcagttcttctttttgctct

SEQ ID NO: 247671 - DNA, 20 bp, Artificial Sequence
  Description of Artificial Sequence: Synthetic oligonucleotide
  Target: LAMA2; (-) strand; PAM type: YTN; PAM sequence: TTA
actttcagttcttctttttg

SEQ ID NO: 247672 - DNA, 20 bp, Artificial Sequence
  Description of Artificial Sequence: Synthetic oligonucleotide
  Target: LAMA2; (-) strand; PAM type: YTN; PAM sequence: CTT
aactttcagttcttcttttt

SEQ ID NO: 247673 - DNA, 20 bp, Artificial Sequence
  Description of Artificial Sequence: Synthetic oligonucleotide
  Target: LAMA2; (-) strand; PAM type: YTN; PAM sequence: TTC
ttaactttcagttcttcttt

SEQ ID NO: 247674 - DNA, 20 bp, Artificial Sequence
  Description of Artificial Sequence: Synthetic oligonucleotide
  Target: LAMA2; (-) strand; PAM type: YTN; PAM sequence: CTT
cttaactttcagttcttctt

SEQ ID NO: 247675 - DNA, 20 bp, Artificial Sequence
  Description of Artificial Sequence: Synthetic oligonucleotide
  Target: LAMA2; (-) strand; PAM type: YTN; PAM sequence: TTC
acaaaaatatcttcttaact

SEQ ID NO: 247676 - DNA, 20 bp, Artificial Sequence
  Description of Artificial Sequence: Synthetic oligonucleotide
  Target: LAMA2; (-) strand; PAM type: YTN; PAM sequence: TTT
cacaaaaatatcttcttaac

SEQ ID NO: 247677 - DNA, 20 bp, Artificial Sequence
  Description of Artificial Sequence: Synthetic oligonucleotide
  Target: LAMA2; (-) strand; PAM type: YTN; PAM sequence: TTT
tcacaaaaatatcttcttaa

SEQ ID NO: 247678 - DNA, 20 bp, Artificial Sequence
  Description of Artificial Sequence: Synthetic oligonucleotide
  Target: LAMA2; (-) strand; PAM type: YTN; PAM sequence: TTT
ttcacaaaaatatcttctta

SEQ ID NO: 247679 - DNA, 20 bp, Artificial Sequence
  Description of Artificial Sequence: Synthetic oligonucleotide
  Target: LAMA2; (-) strand; PAM type: YTN; PAM sequence: CTC
acaacatttttcacaaaaat

SEQ ID NO: 247680 - DNA, 20 bp, Artificial Sequence
  Description of Artificial Sequence: Synthetic oligonucleotide
  Target: LAMA2; (-) strand; PAM type: YTN; PAM sequence: TTG
tctcacaacatttttcacaa

SEQ ID NO: 247681 - DNA, 20 bp, Artificial Sequence
  Description of Artificial Sequence: Synthetic oligonucleotide
  Target: LAMA2; (-) strand; PAM type: YTN; PAM sequence: TTT
gtctcacaacatttttcaca

SEQ ID NO: 247682 - DNA, 20 bp, Artificial Sequence
  Description of Artificial Sequence: Synthetic oligonucleotide
  Target: LAMA2; (-) strand; PAM type: YTN; PAM sequence: CTG
tgtcaaaatttgtctcacaa

SEQ ID NO: 247683 - DNA, 20 bp, Artificial Sequence
  Description of Artificial Sequence: Synthetic oligonucleotide
  Target: LAMA2; (-) strand; PAM type: YTN; PAM sequence: CTC
aaccctgtgtcaaaatttgt

SEQ ID NO: 247684 - DNA, 20 bp, Artificial Sequence
  Description of Artificial Sequence: Synthetic oligonucleotide
  Target: LAMA2; (-) strand; PAM type: YTN; PAM sequence: TTC
ctcaaccctgtgtcaaaatt

SEQ ID NO: 247685 - DNA, 20 bp, Artificial Sequence
  Description of Artificial Sequence: Synthetic oligonucleotide
  Target: LAMA2; (-) strand; PAM type: YTN; PAM sequence: TTG
gtcagatgcggaaaaaaaga

SEQ ID NO: 247686 - DNA, 20 bp, Artificial Sequence
  Description of Artificial Sequence: Synthetic oligonucleotide
  Target: LAMA2; (-) strand; PAM type: YTN; PAM sequence: CTT
ggtcagatgcggaaaaaaag

SEQ ID NO: 247687 - DNA, 20 bp, Artificial Sequence
  Description of Artificial Sequence: Synthetic oligonucleotide
  Target: LAMA2; (-) strand; PAM type: YTN; PAM sequence: CTG
cccttggtcagatgcggaaa

SEQ ID NO: 247688 - DNA, 20 bp, Artificial Sequence
  Description of Artificial Sequence: Synthetic oligonucleotide
  Target: LAMA2; (-) strand; PAM type: YTN; PAM sequence: TTC
aggatatcaagcctgccctt

SEQ ID NO: 247689 - DNA, 20 bp, Artificial Sequence
  Description of Artificial Sequence: Synthetic oligonucleotide
  Target: LAMA2; (-) strand; PAM type: YTN; PAM sequence: CTT
caggatatcaagcctgccct

SEQ ID NO: 247690 - DNA, 20 bp, Artificial Sequence
  Description of Artificial Sequence: Synthetic oligonucleotide
  Target: LAMA2; (-) strand; PAM type: YTN; PAM sequence: TTA
accttcaggatatcaagcct

SEQ ID NO: 247691 - DNA, 20 bp, Artificial Sequence
  Description of Artificial Sequence: Synthetic oligonucleotide
  Target: LAMA2; (-) strand; PAM type: YTN; PAM sequence: CTT
aaccttcaggatatcaagcc

SEQ ID NO: 247692 - DNA, 20 bp, Artificial Sequence
  Description of Artificial Sequence: Synthetic oligonucleotide
  Target: LAMA2; (-) strand; PAM type: YTN; PAM sequence: CTC
ttaaccttcaggatatcaag

SEQ ID NO: 247693 - DNA, 20 bp, Artificial Sequence
  Description of Artificial Sequence: Synthetic oligonucleotide
  Target: LAMA2; (-) strand; PAM type: YTN; PAM sequence: TTC
aggcaaagccgctcttaacc

SEQ ID NO: 247694 - DNA, 20 bp, Artificial Sequence
  Description of Artificial Sequence: Synthetic oligonucleotide
  Target: LAMA2; (-) strand; PAM type: YTN; PAM sequence: CTT
caggcaaagccgctcttaac

SEQ ID NO: 247695 - DNA, 20 bp, Artificial Sequence
  Description of Artificial Sequence: Synthetic oligonucleotide
  Target: LAMA2; (-) strand; PAM type: YTN; PAM sequence: TTG
cttcaggcaaagccgctctt

SEQ ID NO: 247696 - DNA, 20 bp, Artificial Sequence
  Description of Artificial Sequence: Synthetic oligonucleotide
  Target: LAMA2; (-) strand; PAM type: YTN; PAM sequence: TTT
gcttcaggcaaagccgctct

SEQ ID NO: 247697 - DNA, 20 bp, Artificial Sequence
  Description of Artificial Sequence: Synthetic oligonucleotide
  Target: LAMA2; (-) strand; PAM type: YTN; PAM sequence: CTT
tgcttcaggcaaagccgctc

SEQ ID NO: 247698 - DNA, 20 bp, Artificial Sequence
  Description of Artificial Sequence: Synthetic oligonucleotide
  Target: LAMA2; (-) strand; PAM type: YTN; PAM sequence: TTC
ccatagtgagaactttgctt

SEQ ID NO: 247699 - DNA, 20 bp, Artificial Sequence
  Description of Artificial Sequence: Synthetic oligonucleotide
  Target: LAMA2; (-) strand; PAM type: YTN; PAM sequence: CTT
cccatagtgagaactttgct

SEQ ID NO: 247700 - DNA, 20 bp, Artificial Sequence
  Description of Artificial Sequence: Synthetic oligonucleotide
  Target: LAMA2; (-) strand; PAM type: YTN; PAM sequence: CTG
caacttcccatagtgagaac

SEQ ID NO: 247701 - DNA, 20 bp, Artificial Sequence
  Description of Artificial Sequence: Synthetic oligonucleotide
  Target: LAMA2; (-) strand; PAM type: YTN; PAM sequence: CTC
ggctgcaacttcccatagtg

SEQ ID NO: 247702 - DNA, 20 bp, Artificial Sequence
  Description of Artificial Sequence: Synthetic oligonucleotide
  Target: LAMA2; (-) strand; PAM type: YTN; PAM sequence: CTA
ctcggctgcaacttcccata

SEQ ID NO: 247703 - DNA, 20 bp, Artificial Sequence
  Description of Artificial Sequence: Synthetic oligonucleotide
  Target: LAMA2; (-) strand; PAM type: YTN; PAM sequence: TTC
actactcggctgcaacttcc

SEQ ID NO: 247704 - DNA, 20 bp, Artificial Sequence
  Description of Artificial Sequence: Synthetic oligonucleotide
  Target: LAMA2; (-) strand; PAM type: YTN; PAM sequence: CTT
cactactcggctgcaacttc

SEQ ID NO: 247705 - DNA, 20 bp, Artificial Sequence
  Description of Artificial Sequence: Synthetic oligonucleotide
  Target: LAMA2; (-) strand; PAM type: YTN; PAM sequence: CTC
ttcactactcggctgcaact

SEQ ID NO: 247706 - DNA, 20 bp, Artificial Sequence
  Description of Artificial Sequence: Synthetic oligonucleotide
  Target: LAMA2; (-) strand; PAM type: YTN; PAM sequence: CTC
ccatcaagataactcttcac

SEQ ID NO: 247707 - DNA, 20 bp, Artificial Sequence
  Description of Artificial Sequence: Synthetic oligonucleotide
  Target: LAMA2; (-) strand; PAM type: YTN; PAM sequence: TTC
cggcctcccatcaagataac

SEQ ID NO: 247708 - DNA, 20 bp, Artificial Sequence
  Description of Artificial Sequence: Synthetic oligonucleotide
  Target: LAMA2; (-) strand; PAM type: YTN; PAM sequence: TTG
ttccggcctcccatcaagat

SEQ ID NO: 247709 - DNA, 20 bp, Artificial Sequence
  Description of Artificial Sequence: Synthetic oligonucleotide
  Target: LAMA2; (-) strand; PAM type: YTN; PAM sequence: TTT
gttccggcctcccatcaaga

SEQ ID NO: 247710 - DNA, 20 bp, Artificial Sequence
  Description of Artificial Sequence: Synthetic oligonucleotide
  Target: LAMA2; (-) strand; PAM type: YTN; PAM sequence: CTC
caaagcaaatttgttccggc

SEQ ID NO: 247711 - DNA, 20 bp, Artificial Sequence
  Description of Artificial Sequence: Synthetic oligonucleotide
  Target: LAMA2; (-) strand; PAM type: YTN; PAM sequence: TTA
cgtctccaaagcaaatttgt

SEQ ID NO: 247712 - DNA, 20 bp, Artificial Sequence
  Description of Artificial Sequence: Synthetic oligonucleotide
  Target: LAMA2; (-) strand; PAM type: YTN; PAM sequence: TTT
acgtctccaaagcaaatttg

SEQ ID NO: 247713 - DNA, 20 bp, Artificial Sequence
  Description of Artificial Sequence: Synthetic oligonucleotide
  Target: LAMA2; (-) strand; PAM type: YTN; PAM sequence: CTT
tacgtctccaaagcaaattt

SEQ ID NO: 247714 - DNA, 20 bp, Artificial Sequence
  Description of Artificial Sequence: Synthetic oligonucleotide
  Target: LAMA2; (-) strand; PAM type: YTN; PAM sequence: TTC
cctttacgtctccaaagcaa

SEQ ID NO: 247715 - DNA, 20 bp, Artificial Sequence
  Description of Artificial Sequence: Synthetic oligonucleotide
  Target: LAMA2; (-) strand; PAM type: YTN; PAM sequence: TTA
gttccctttacgtctccaaa

SEQ ID NO: 247716 - DNA, 20 bp, Artificial Sequence
  Description of Artificial Sequence: Synthetic oligonucleotide
  Target: LAMA2; (-) strand; PAM type: YTN; PAM sequence: CTT
agttccctttacgtctccaa

SEQ ID NO: 247717 - DNA, 20 bp, Artificial Sequence
  Description of Artificial Sequence: Synthetic oligonucleotide
  Target: LAMA2; (-) strand; PAM type: YTN; PAM sequence: TTC
ttagttccctttacgtctcc

SEQ ID NO: 247718 - DNA, 20 bp, Artificial Sequence
  Description of Artificial Sequence: Synthetic oligonucleotide
  Target: LAMA2; (-) strand; PAM type: YTN; PAM sequence: TTG
gagtccagtaagaatagttc

SEQ ID NO: 247719 - DNA, 20 bp, Artificial Sequence
  Description of Artificial Sequence: Synthetic oligonucleotide
  Target: LAMA2; (-) strand; PAM type: YTN; PAM sequence: CTC
atattggagtccagtaagaa

SEQ ID NO: 247720 - DNA, 20 bp, Artificial Sequence
  Description of Artificial Sequence: Synthetic oligonucleotide
  Target: LAMA2; (-) strand; PAM type: YTN; PAM sequence: TTG
caaaccaatggatagaaata

SEQ ID NO: 247721 - DNA, 20 bp, Artificial Sequence
  Description of Artificial Sequence: Synthetic oligonucleotide
  Target: LAMA2; (-) strand; PAM type: YTN; PAM sequence: CTT
gcaaaccaatggatagaaat

SEQ ID NO: 247722 - DNA, 20 bp, Artificial Sequence
  Description of Artificial Sequence: Synthetic oligonucleotide
  Target: LAMA2; (-) strand; PAM type: YTN; PAM sequence: CTC
caggccttgcaaaccaatgg

SEQ ID NO: 247723 - DNA, 20 bp, Artificial Sequence
  Description of Artificial Sequence: Synthetic oligonucleotide
  Target: LAMA2; (-) strand; PAM type: YTN; PAM sequence: CTA
atgcatatatctccaggcct

SEQ ID NO: 247724 - DNA, 20 bp, Artificial Sequence
  Description of Artificial Sequence: Synthetic oligonucleotide
  Target: LAMA2; (-) strand; PAM type: YTN; PAM sequence: TTA
tctaatgcatatatctccag

SEQ ID NO: 247725 - DNA, 20 bp, Artificial Sequence
  Description of Artificial Sequence: Synthetic oligonucleotide
  Target: LAMA2; (-) strand; PAM type: YTN; PAM sequence: TTT
atctaatgcatatatctcca

SEQ ID NO: 247726 - DNA, 20 bp, Artificial Sequence
  Description of Artificial Sequence: Synthetic oligonucleotide
  Target: LAMA2; (-) strand; PAM type: YTN; PAM sequence: TTT
tatctaatgcatatatctcc

SEQ ID NO: 247727 - DNA, 20 bp, Artificial Sequence
  Description of Artificial Sequence: Synthetic oligonucleotide
  Target: LAMA2; (-) strand; PAM type: YTN; PAM sequence: TTT
ttatctaatgcatatatctc

SEQ ID NO: 247728 - DNA, 20 bp, Artificial Sequence
  Description of Artificial Sequence: Synthetic oligonucleotide
  Target: LAMA2; (-) strand; PAM type: YTN; PAM sequence: CTT
tttatctaatgcatatatct

SEQ ID NO: 247729 - DNA, 20 bp, Artificial Sequence
  Description of Artificial Sequence: Synthetic oligonucleotide
  Target: LAMA2; (-) strand; PAM type: YTN; PAM sequence: TTA
caaatacagtctttttatct

SEQ ID NO: 247730 - DNA, 20 bp, Artificial Sequence
  Description of Artificial Sequence: Synthetic oligonucleotide
  Target: LAMA2; (-) strand; PAM type: YTN; PAM sequence: CTA
attacaaatacagtcttttt

SEQ ID NO: 247731 - DNA, 20 bp, Artificial Sequence
  Description of Artificial Sequence: Synthetic oligonucleotide
  Target: LAMA2; (-) strand; PAM type: YTN; PAM sequence: TTC
taattacaaatacagtcttt

SEQ ID NO: 247732 - DNA, 20 bp, Artificial Sequence
  Description of Artificial Sequence: Synthetic oligonucleotide
  Target: LAMA2; (-) strand; PAM type: YTN; PAM sequence: TTT
ctaattacaaatacagtctt

SEQ ID NO: 247733 - DNA, 20 bp, Artificial Sequence
  Description of Artificial Sequence: Synthetic oligonucleotide
  Target: LAMA2; (-) strand; PAM type: YTN; PAM sequence: TTT
tctaattacaaatacagtct

SEQ ID NO: 247734 - DNA, 20 bp, Artificial Sequence
  Description of Artificial Sequence: Synthetic oligonucleotide
  Target: LAMA2; (-) strand; PAM type: YTN; PAM sequence: CTT
ttctaattacaaatacagtc

SEQ ID NO: 247735 - DNA, 20 bp, Artificial Sequence
  Description of Artificial Sequence: Synthetic oligonucleotide
  Target: LAMA2; (-) strand; PAM type: YTN; PAM sequence: CTG
gaggcttttctaattacaaa

SEQ ID NO: 247736 - DNA, 20 bp, Artificial Sequence
  Description of Artificial Sequence: Synthetic oligonucleotide
  Target: LAMA2; (-) strand; PAM type: YTN; PAM sequence: TTA
ctggaggcttttctaattac

SEQ ID NO: 247737 - DNA, 20 bp, Artificial Sequence
  Description of Artificial Sequence: Synthetic oligonucleotide
  Target: LAMA2; (-) strand; PAM type: YTN; PAM sequence: TTA
attactggaggcttttctaa

SEQ ID NO: 247738 - DNA, 20 bp, Artificial Sequence
  Description of Artificial Sequence: Synthetic oligonucleotide
  Target: LAMA2; (-) strand; PAM type: YTN; PAM sequence: TTG
gacattaattactggaggct

SEQ ID NO: 247739 - DNA, 20 bp, Artificial Sequence
  Description of Artificial Sequence: Synthetic oligonucleotide
  Target: LAMA2; (-) strand; PAM type: YTN; PAM sequence: TTT
ggacattaattactggaggc

SEQ ID NO: 247740 - DNA, 20 bp, Artificial Sequence
  Description of Artificial Sequence: Synthetic oligonucleotide
  Target: LAMA2; (-) strand; PAM type: YTN; PAM sequence: TTG
catatttggacattaattac

SEQ ID NO: 247741 - DNA, 20 bp, Artificial Sequence
  Description of Artificial Sequence: Synthetic oligonucleotide
  Target: LAMA2; (-) strand; PAM type: YTN; PAM sequence: TTG
gttgcatatttggacattaa

SEQ ID NO: 247742 - DNA, 20 bp, Artificial Sequence
  Description of Artificial Sequence: Synthetic oligonucleotide
  Target: LAMA2; (-) strand; PAM type: YTN; PAM sequence: TTA
aattggttgcatatttggac

SEQ ID NO: 247743 - DNA, 20 bp, Artificial Sequence
  Description of Artificial Sequence: Synthetic oligonucleotide
  Target: LAMA2; (-) strand; PAM type: YTN; PAM sequence: TTT
aaattggttgcatatttgga

SEQ ID NO: 247744 - DNA, 20 bp, Artificial Sequence
  Description of Artificial Sequence: Synthetic oligonucleotide
  Target: LAMA2; (-) strand; PAM type: YTN; PAM sequence: TTA
tgtagacatcatttaaattg

SEQ ID NO: 247745 - DNA, 20 bp, Artificial Sequence
  Description of Artificial Sequence: Synthetic oligonucleotide
  Target: LAMA2; (-) strand; PAM type: YTN; PAM sequence: CTA
tgtgtggtattatgtagaca

SEQ ID NO: 247746 - DNA, 20 bp, Artificial Sequence
  Description of Artificial Sequence: Synthetic oligonucleotide
  Target: LAMA2; (-) strand; PAM type: YTN; PAM sequence: TTC
atctatgtgtggtattatgt

SEQ ID NO: 247747 - DNA, 20 bp, Artificial Sequence
  Description of Artificial Sequence: Synthetic oligonucleotide
  Target: LAMA2; (-) strand; PAM type: YTN; PAM sequence: TTT
catctatgtgtggtattatg

SEQ ID NO: 247748 - DNA, 20 bp, Artificial Sequence
  Description of Artificial Sequence: Synthetic oligonucleotide
  Target: LAMA2; (-) strand; PAM type: YTN; PAM sequence: TTT
tcatctatgtgtggtattat

SEQ ID NO: 247749 - DNA, 20 bp, Artificial Sequence
  Description of Artificial Sequence: Synthetic oligonucleotide
  Target: LAMA2; (-) strand; PAM type: YTN; PAM sequence: TTG
gattttcatctatgtgtggt

SEQ ID NO: 247750 - DNA, 20 bp, Artificial Sequence
  Description of Artificial Sequence: Synthetic oligonucleotide
  Target: LAMA2; (-) strand; PAM type: YTN; PAM sequence: TTT
ggattttcatctatgtgtgg

SEQ ID NO: 247751 - DNA, 20 bp, Artificial Sequence
  Description of Artificial Sequence: Synthetic oligonucleotide
  Target: LAMA2; (-) strand; PAM type: YTN; PAM sequence: TTT
tggattttcatctatgtgtg

SEQ ID NO: 247752 - DNA, 20 bp, Artificial Sequence
  Description of Artificial Sequence: Synthetic oligonucleotide
  Target: LAMA2; (-) strand; PAM type: YTN; PAM sequence: TTT
ttggattttcatctatgtgt

SEQ ID NO: 247753 - DNA, 20 bp, Artificial Sequence
  Description of Artificial Sequence: Synthetic oligonucleotide
  Target: LAMA2; (-) strand; PAM type: YTN; PAM sequence: CTT
tttggattttcatctatgtg

SEQ ID NO: 247754 - DNA, 20 bp, Artificial Sequence
  Description of Artificial Sequence: Synthetic oligonucleotide
  Target: LAMA2; (-) strand; PAM type: YTN; PAM sequence: TTG
actttttggattttcatcta

SEQ ID NO: 247755 - DNA, 20 bp, Artificial Sequence
  Description of Artificial Sequence: Synthetic oligonucleotide
  Target: LAMA2; (-) strand; PAM type: YTN; PAM sequence: TTT
gactttttggattttcatct

SEQ ID NO: 247756 - DNA, 20 bp, Artificial Sequence
  Description of Artificial Sequence: Synthetic oligonucleotide
  Target: LAMA2; (-) strand; PAM type: YTN; PAM sequence: TTA
taatgaatgtttgacttttt

SEQ ID NO: 247757 - DNA, 20 bp, Artificial Sequence
  Description of Artificial Sequence: Synthetic oligonucleotide
  Target: LAMA2; (-) strand; PAM type: YTN; PAM sequence: TTA
ttataatgaatgtttgactt

SEQ ID NO: 247758 - DNA, 20 bp, Artificial Sequence
  Description of Artificial Sequence: Synthetic oligonucleotide
  Target: LAMA2; (-) strand; PAM type: YTN; PAM sequence: TTG
gaagaattattataatgaat

SEQ ID NO: 247759 - DNA, 20 bp, Artificial Sequence
  Description of Artificial Sequence: Synthetic oligonucleotide
  Target: LAMA2; (-) strand; PAM type: YTN; PAM sequence: CTA
gattggaagaattattataa

SEQ ID NO: 247760 - DNA, 20 bp, Artificial Sequence
  Description of Artificial Sequence: Synthetic oligonucleotide
  Target: LAMA2; (-) strand; PAM type: YTN; PAM sequence: CTA
tataacaacaactagattgg

SEQ ID NO: 247761 - DNA, 20 bp, Artificial Sequence
  Description of Artificial Sequence: Synthetic oligonucleotide
  Target: LAMA2; (-) strand; PAM type: YTN; PAM sequence: TTC
tatataacaacaactagatt

SEQ ID NO: 247762 - DNA, 20 bp, Artificial Sequence
  Description of Artificial Sequence: Synthetic oligonucleotide
  Target: LAMA2; (-) strand; PAM type: YTN; PAM sequence: CTT
ctatataacaacaactagat

SEQ ID NO: 247763 - DNA, 20 bp, Artificial Sequence
  Description of Artificial Sequence: Synthetic oligonucleotide
  Target: LAMA2; (-) strand; PAM type: YTN; PAM sequence: CTG
aggggcttctatataacaac

SEQ ID NO: 247764 - DNA, 20 bp, Artificial Sequence
  Description of Artificial Sequence: Synthetic oligonucleotide
  Target: LAMA2; (-) strand; PAM type: YTN; PAM sequence: CTC
tgaggggcttctatataaca

SEQ ID NO: 247765 - DNA, 20 bp, Artificial Sequence
  Description of Artificial Sequence: Synthetic oligonucleotide
  Target: LAMA2; (-) strand; PAM type: YTN; PAM sequence: TTC
agcaaaatggggtgccctct

SEQ ID NO: 247766 - DNA, 20 bp, Artificial Sequence
  Description of Artificial Sequence: Synthetic oligonucleotide
  Target: LAMA2; (-) strand; PAM type: YTN; PAM sequence: CTC
aagaaattcagcaaaatggg

SEQ ID NO: 247767 - DNA, 20 bp, Artificial Sequence
  Description of Artificial Sequence: Synthetic oligonucleotide
  Target: LAMA2; (-) strand; PAM type: YTN; PAM sequence: CTG
tgatataagtaaaaaactca

SEQ ID NO: 247768 - DNA, 20 bp, Artificial Sequence
  Description of Artificial Sequence: Synthetic oligonucleotide
  Target: LAMA2; (-) strand; PAM type: YTN; PAM sequence: TTC
tgtgatataagtaaaaaact

SEQ ID NO: 247769 - DNA, 20 bp, Artificial Sequence
  Description of Artificial Sequence: Synthetic oligonucleotide
  Target: LAMA2; (-) strand; PAM type: YTN; PAM sequence: CTG
attctgtgatataagtaaaa

SEQ ID NO: 247770 - DNA, 20 bp, Artificial Sequence
  Description of Artificial Sequence: Synthetic oligonucleotide
  Target: LAMA2; (-) strand; PAM type: YTN; PAM sequence: TTG
aacatcctgattctgtgata

SEQ ID NO: 247771 - DNA, 20 bp, Artificial Sequence
  Description of Artificial Sequence: Synthetic oligonucleotide
  Target: LAMA2; (-) strand; PAM type: YTN; PAM sequence: TTT
gaacatcctgattctgtgat

SEQ ID NO: 247772 - DNA, 20 bp, Artificial Sequence
  Description of Artificial Sequence: Synthetic oligonucleotide
  Target: LAMA2; (-) strand; PAM type: YTN; PAM sequence: CTT
tgaacatcctgattctgtga

SEQ ID NO: 247773 - DNA, 20 bp, Artificial Sequence
  Description of Artificial Sequence: Synthetic oligonucleotide
  Target: LAMA2; (-) strand; PAM type: YTN; PAM sequence: TTA
tactttgaacatcctgattc

SEQ ID NO: 247774 - DNA, 20 bp, Artificial Sequence
  Description of Artificial Sequence: Synthetic oligonucleotide
  Target: LAMA2; (-) strand; PAM type: YTN; PAM sequence: TTG
ttatactttgaacatcctga

SEQ ID NO: 247775 - DNA, 20 bp, Artificial Sequence
  Description of Artificial Sequence: Synthetic oligonucleotide
  Target: LAMA2; (-) strand; PAM type: YTN; PAM sequence: TTT
gttatactttgaacatcctg

SEQ ID NO: 247776 - DNA, 20 bp, Artificial Sequence
  Description of Artificial Sequence: Synthetic oligonucleotide
  Target: LAMA2; (-) strand; PAM type: YTN; PAM sequence: CTT
tgttatactttgaacatcct

SEQ ID NO: 247777 - DNA, 20 bp, Artificial Sequence
  Description of Artificial Sequence: Synthetic oligonucleotide
  Target: LAMA2; (-) strand; PAM type: YTN; PAM sequence: CTC
atctttgttatactttgaac

SEQ ID NO: 247778 - DNA, 20 bp, Artificial Sequence
  Description of Artificial Sequence: Synthetic oligonucleotide
  Target: LAMA2; (-) strand; PAM type: YTN; PAM sequence: TTC
tcatctttgttatactttga

SEQ ID NO: 247779 - DNA, 20 bp, Artificial Sequence
  Description of Artificial Sequence: Synthetic oligonucleotide
  Target: LAMA2; (-) strand; PAM type: YTN; PAM sequence: CTT
ctcatctttgttatactttg

SEQ ID NO: 247780 - DNA, 20 bp, Artificial Sequence
  Description of Artificial Sequence: Synthetic oligonucleotide
  Target: LAMA2; (-) strand; PAM type: YTN; PAM sequence: TTA
cttctcatctttgttatact

SEQ ID NO: 247781 - DNA, 20 bp, Artificial Sequence
  Description of Artificial Sequence: Synthetic oligonucleotide
  Target: LAMA2; (-) strand; PAM type: YTN; PAM sequence: CTT
acttctcatctttgttatac

SEQ ID NO: 247782 - DNA, 20 bp, Artificial Sequence
  Description of Artificial Sequence: Synthetic oligonucleotide
  Target: LAMA2; (-) strand; PAM type: YTN; PAM sequence: TTC
aacttacttctcatctttgt

SEQ ID NO: 247783 - DNA, 20 bp, Artificial Sequence
  Description of Artificial Sequence: Synthetic oligonucleotide
  Target: LAMA2; (-) strand; PAM type: YTN; PAM sequence: TTT
caacttacttctcatctttg

SEQ ID NO: 247784 - DNA, 20 bp, Artificial Sequence
  Description of Artificial Sequence: Synthetic oligonucleotide
  Target: LAMA2; (-) strand; PAM type: YTN; PAM sequence: TTT
tcaacttacttctcatcttt

SEQ ID NO: 247785 - DNA, 20 bp, Artificial Sequence
  Description of Artificial Sequence: Synthetic oligonucleotide
  Target: LAMA2; (-) strand; PAM type: YTN; PAM sequence: TTT
ttcaacttacttctcatctt

SEQ ID NO: 247786 - DNA, 20 bp, Artificial Sequence
  Description of Artificial Sequence: Synthetic oligonucleotide
  Target: LAMA2; (-) strand; PAM type: YTN; PAM sequence: TTT
tttcaacttacttctcatct

SEQ ID NO: 247787 - DNA, 20 bp, Artificial Sequence
  Description of Artificial Sequence: Synthetic oligonucleotide
  Target: LAMA2; (-) strand; PAM type: YTN; PAM sequence: CTT
ttttcaacttacttctcatc

SEQ ID NO: 247788 - DNA, 20 bp, Artificial Sequence
  Description of Artificial Sequence: Synthetic oligonucleotide
  Target: LAMA2; (-) strand; PAM type: YTN; PAM sequence: TTC
ttttttcaacttacttctca

SEQ ID NO: 247789 - DNA, 20 bp, Artificial Sequence
  Description of Artificial Sequence: Synthetic oligonucleotide
  Target: LAMA2; (-) strand; PAM type: YTN; PAM sequence: CTA
ataattcttttttcaactta

SEQ ID NO: 247790 - DNA, 20 bp, Artificial Sequence
  Description of Artificial Sequence: Synthetic oligonucleotide
  Target: LAMA2; (-) strand; PAM type: YTN; PAM sequence: TTC
caagataacatgtatatggt

SEQ ID NO: 247791 - DNA, 20 bp, Artificial Sequence
  Description of Artificial Sequence: Synthetic oligonucleotide
  Target: LAMA2; (-) strand; PAM type: YTN; PAM sequence: TTC
caattccaagataacatgta

SEQ ID NO: 247792 - DNA, 20 bp, Artificial Sequence
  Description of Artificial Sequence: Synthetic oligonucleotide
  Target: LAMA2; (-) strand; PAM type: YTN; PAM sequence: TTA
tgaaaaaattccaattccaa

SEQ ID NO: 247793 - DNA, 20 bp, Artificial Sequence
  Description of Artificial Sequence: Synthetic oligonucleotide
  Target: LAMA2; (-) strand; PAM type: YTN; PAM sequence: TTA
ttatgaaaaaattccaattc

SEQ ID NO: 247794 - DNA, 20 bp, Artificial Sequence
  Description of Artificial Sequence: Synthetic oligonucleotide
  Target: LAMA2; (-) strand; PAM type: YTN; PAM sequence: CTT
attatgaaaaaattccaatt

SEQ ID NO: 247795 - DNA, 20 bp, Artificial Sequence
  Description of Artificial Sequence: Synthetic oligonucleotide
  Target: LAMA2; (-) strand; PAM type: YTN; PAM sequence: TTC
ttattatgaaaaaattccaa

SEQ ID NO: 247796 - DNA, 20 bp, Artificial Sequence
  Description of Artificial Sequence: Synthetic oligonucleotide
  Target: LAMA2; (-) strand; PAM type: YTN; PAM sequence: TTT
cttattatgaaaaaattcca

SEQ ID NO: 247797 - DNA, 20 bp, Artificial Sequence
  Description of Artificial Sequence: Synthetic oligonucleotide
  Target: LAMA2; (-) strand; PAM type: YTN; PAM sequence: CTA
atggatttcttattatgaaa

SEQ ID NO: 247798 - DNA, 20 bp, Artificial Sequence
  Description of Artificial Sequence: Synthetic oligonucleotide
  Target: LAMA2; (-) strand; PAM type: YTN; PAM sequence: TTA
tgctaatggatttcttatta

SEQ ID NO: 247799 - DNA, 20 bp, Artificial Sequence
  Description of Artificial Sequence: Synthetic oligonucleotide
  Target: LAMA2; (-) strand; PAM type: YTN; PAM sequence: TTT
atgctaatggatttcttatt

SEQ ID NO: 247800 - DNA, 20 bp, Artificial Sequence
  Description of Artificial Sequence: Synthetic oligonucleotide
  Target: LAMA2; (-) strand; PAM type: YTN; PAM sequence: CTG
tatttatgctaatggatttc

SEQ ID NO: 247801 - DNA, 20 bp, Artificial Sequence
  Description of Artificial Sequence: Synthetic oligonucleotide
  Target: LAMA2; (-) strand; PAM type: YTN; PAM sequence: TTA
aactgtatttatgctaatgg

SEQ ID NO: 247802 - DNA, 20 bp, Artificial Sequence
  Description of Artificial Sequence: Synthetic oligonucleotide
  Target: LAMA2; (-) strand; PAM type: YTN; PAM sequence: TTT
aaactgtatttatgctaatg

SEQ ID NO: 247803 - DNA, 20 bp, Artificial Sequence
  Description of Artificial Sequence: Synthetic oligonucleotide
  Target: LAMA2; (-) strand; PAM type: YTN; PAM sequence: TTC
aatttaaactgtatttatgc

SEQ ID NO: 247804 - DNA, 20 bp, Artificial Sequence
  Description of Artificial Sequence: Synthetic oligonucleotide
  Target: LAMA2; (-) strand; PAM type: YTN; PAM sequence: TTA
ttcaatttaaactgtattta

SEQ ID NO: 247805 - DNA, 20 bp, Artificial Sequence
  Description of Artificial Sequence: Synthetic oligonucleotide
  Target: LAMA2; (-) strand; PAM type: YTN; PAM sequence: CTT
attcaatttaaactgtattt

SEQ ID NO: 247806 - DNA, 20 bp, Artificial Sequence
  Description of Artificial Sequence: Synthetic oligonucleotide
  Target: LAMA2; (-) strand; PAM type: YTN; PAM sequence: TTA
cttattcaatttaaactgta

SEQ ID NO: 247807 - DNA, 20 bp, Artificial Sequence
  Description of Artificial Sequence: Synthetic oligonucleotide
  Target: LAMA2; (-) strand; PAM type: YTN; PAM sequence: TTT
acttattcaatttaaactgt

SEQ ID NO: 247808 - DNA, 20 bp, Artificial Sequence
  Description of Artificial Sequence: Synthetic oligonucleotide
  Target: LAMA2; (-) strand; PAM type: YTN; PAM sequence: TTA
atgaaatttacttattcaat

SEQ ID NO: 247809 - DNA, 20 bp, Artificial Sequence
  Description of Artificial Sequence: Synthetic oligonucleotide
  Target: LAMA2; (-) strand; PAM type: YTN; PAM sequence: TTT
aatgaaatttacttattcaa

SEQ ID NO: 247810 - DNA, 20 bp, Artificial Sequence
  Description of Artificial Sequence: Synthetic oligonucleotide
  Target: LAMA2; (-) strand; PAM type: YTN; PAM sequence: TTT
taatgaaatttacttattca

SEQ ID NO: 247811 - DNA, 20 bp, Artificial Sequence
  Description of Artificial Sequence: Synthetic oligonucleotide
  Target: LAMA2; (-) strand; PAM type: YTN; PAM sequence: TTT
ttaatgaaatttacttattc

SEQ ID NO: 247812 - DNA, 20 bp, Artificial Sequence
  Description of Artificial Sequence: Synthetic oligonucleotide
  Target: LAMA2; (-) strand; PAM type: YTN; PAM sequence: TTG
tttttaatgaaatttactta

SEQ ID NO: 247813 - DNA, 20 bp, Artificial Sequence
  Description of Artificial Sequence: Synthetic oligonucleotide
  Target: LAMA2; (-) strand; PAM type: YTN; PAM sequence: TTT
gtttttaatgaaatttactt

SEQ ID NO: 247814 - DNA, 20 bp, Artificial Sequence
  Description of Artificial Sequence: Synthetic oligonucleotide
  Target: LAMA2; (-) strand; PAM type: YTN; PAM sequence: TTT
tgtttttaatgaaatttact

SEQ ID NO: 247815 - DNA, 20 bp, Artificial Sequence
  Description of Artificial Sequence: Synthetic oligonucleotide
  Target: LAMA2; (-) strand; PAM type: YTN; PAM sequence: TTA
taaaatgtacccccaaataa

SEQ ID NO: 247816 - DNA, 20 bp, Artificial Sequence
  Description of Artificial Sequence: Synthetic oligonucleotide
  Target: LAMA2; (-) strand; PAM type: YTN; PAM sequence: TTT
ataaaatgtacccccaaata

SEQ ID NO: 247817 - DNA, 20 bp, Artificial Sequence
  Description of Artificial Sequence: Synthetic oligonucleotide
  Target: LAMA2; (-) strand; PAM type: YTN; PAM sequence: CTA
tttataaaatgtacccccaa

SEQ ID NO: 247818 - DNA, 20 bp, Artificial Sequence
  Description of Artificial Sequence: Synthetic oligonucleotide
  Target: LAMA2; (-) strand; PAM type: YTN; PAM sequence: TTG
cagctatttataaaatgtac

SEQ ID NO: 247819 - DNA, 20 bp, Artificial Sequence
  Description of Artificial Sequence: Synthetic oligonucleotide
  Target: LAMA2; (-) strand; PAM type: YTN; PAM sequence: TTT
gcagctatttataaaatgta

SEQ ID NO: 247820 - DNA, 20 bp, Artificial Sequence
  Description of Artificial Sequence: Synthetic oligonucleotide
  Target: LAMA2; (-) strand; PAM type: YTN; PAM sequence: TTT
tgcagctatttataaaatgt

SEQ ID NO: 247821 - DNA, 20 bp, Artificial Sequence
  Description of Artificial Sequence: Synthetic oligonucleotide
  Target: LAMA2; (-) strand; PAM type: YTN; PAM sequence: TTG
attttgcagctatttataaa

SEQ ID NO: 247822 - DNA, 20 bp, Artificial Sequence
  Description of Artificial Sequence: Synthetic oligonucleotide
  Target: LAMA2; (-) strand; PAM type: YTN; PAM sequence: TTT
gattttgcagctatttataa

SEQ ID NO: 247823 - DNA, 20 bp, Artificial Sequence
  Description of Artificial Sequence: Synthetic oligonucleotide
  Target: LAMA2; (-) strand; PAM type: YTN; PAM sequence: TTT
tgattttgcagctatttata

SEQ ID NO: 247824 - DNA, 20 bp, Artificial Sequence
  Description of Artificial Sequence: Synthetic oligonucleotide
  Target: LAMA2; (-) strand; PAM type: YTN; PAM sequence: TTC
aaaaatgcagttttgatttt

SEQ ID NO: 247825 - DNA, 20 bp, Artificial Sequence
  Description of Artificial Sequence: Synthetic oligonucleotide
  Target: LAMA2; (-) strand; PAM type: YTN; PAM sequence: TTT
caaaaatgcagttttgattt

SEQ ID NO: 247826 - DNA, 20 bp, Artificial Sequence
  Description of Artificial Sequence: Synthetic oligonucleotide
  Target: LAMA2; (-) strand; PAM type: YTN; PAM sequence: TTA
catttcaaaaatgcagtttt

SEQ ID NO: 247827 - DNA, 20 bp, Artificial Sequence
  Description of Artificial Sequence: Synthetic oligonucleotide
  Target: LAMA2; (-) strand; PAM type: YTN; PAM sequence: CTT
acatttcaaaaatgcagttt

SEQ ID NO: 247828 - DNA, 20 bp, Artificial Sequence
  Description of Artificial Sequence: Synthetic oligonucleotide
  Target: LAMA2; (-) strand; PAM type: YTN; PAM sequence: CTA
gcatcaatatggcttacatt

SEQ ID NO: 247829 - DNA, 20 bp, Artificial Sequence
  Description of Artificial Sequence: Synthetic oligonucleotide
  Target: LAMA2; (-) strand; PAM type: YTN; PAM sequence: TTA
ctagcatcaatatggcttac

SEQ ID NO: 247830 - DNA, 20 bp, Artificial Sequence
  Description of Artificial Sequence: Synthetic oligonucleotide
  Target: LAMA2; (-) strand; PAM type: YTN; PAM sequence: CTT
actagcatcaatatggctta

SEQ ID NO: 247831 - DNA, 20 bp, Artificial Sequence
  Description of Artificial Sequence: Synthetic oligonucleotide
  Target: LAMA2; (-) strand; PAM type: YTN; PAM sequence: TTG
acttactagcatcaatatgg

SEQ ID NO: 247832 - DNA, 20 bp, Artificial Sequence
  Description of Artificial Sequence: Synthetic oligonucleotide
  Target: LAMA2; (-) strand; PAM type: YTN; PAM sequence: TTG
ataatgagcatattgactta

SEQ ID NO: 247833 - DNA, 20 bp, Artificial Sequence
  Description of Artificial Sequence: Synthetic oligonucleotide
  Target: LAMA2; (-) strand; PAM type: YTN; PAM sequence: CTA
aataacataaaagtacatac

SEQ ID NO: 247834 - DNA, 20 bp, Artificial Sequence
  Description of Artificial Sequence: Synthetic oligonucleotide
  Target: LAMA2; (-) strand; PAM type: YTN; PAM sequence: TTC
taaataacataaaagtacat

SEQ ID NO: 247835 - DNA, 20 bp, Artificial Sequence
  Description of Artificial Sequence: Synthetic oligonucleotide
  Target: LAMA2; (-) strand; PAM type: YTN; PAM sequence: TTT
ctaaataacataaaagtaca

SEQ ID NO: 247836 - DNA, 20 bp, Artificial Sequence
  Description of Artificial Sequence: Synthetic oligonucleotide
  Target: LAMA2; (-) strand; PAM type: YTN; PAM sequence: TTT
tctaaataacataaaagtac

SEQ ID NO: 247837 - DNA, 20 bp, Artificial Sequence
  Description of Artificial Sequence: Synthetic oligonucleotide
  Target: LAMA2; (-) strand; PAM type: YTN; PAM sequence: TTA
aattttctaaataacataaa

SEQ ID NO: 247838 - DNA, 20 bp, Artificial Sequence
  Description of Artificial Sequence: Synthetic oligonucleotide
  Target: LAMA2; (-) strand; PAM type: YTN; PAM sequence: TTG
aaacaccgtacgtgtaatta

SEQ ID NO: 247839 - DNA, 20 bp, Artificial Sequence
  Description of Artificial Sequence: Synthetic oligonucleotide
  Target: LAMA2; (-) strand; PAM type: YTN; PAM sequence: CTT
gaaacaccgtacgtgtaatt

SEQ ID NO: 247840 - DNA, 20 bp, Artificial Sequence
  Description of Artificial Sequence: Synthetic oligonucleotide
  Target: LAMA2; (-) strand; PAM type: YTN; PAM sequence: TTG
aatacttgaaacaccgtacg

SEQ ID NO: 247841 - DNA, 20 bp, Artificial Sequence
  Description of Artificial Sequence: Synthetic oligonucleotide
  Target: LAMA2; (-) strand; PAM type: YTN; PAM sequence: CTA
ttgaatacttgaaacaccgt

SEQ ID NO: 247842 - DNA, 20 bp, Artificial Sequence
  Description of Artificial Sequence: Synthetic oligonucleotide
  Target: LAMA2; (-) strand; PAM type: YTN; PAM sequence: TTA
tctattgaatacttgaaaca

SEQ ID NO: 247843 - DNA, 20 bp, Artificial Sequence
  Description of Artificial Sequence: Synthetic oligonucleotide
  Target: LAMA2; (-) strand; PAM type: YTN; PAM sequence: TTT
atctattgaatacttgaaac

SEQ ID NO: 247844 - DNA, 20 bp, Artificial Sequence
  Description of Artificial Sequence: Synthetic oligonucleotide
  Target: LAMA2; (-) strand; PAM type: YTN; PAM sequence: CTA
ggtggtttatctattgaata

SEQ ID NO: 247845 - DNA, 20 bp, Artificial Sequence
  Description of Artificial Sequence: Synthetic oligonucleotide
  Target: LAMA2; (-) strand; PAM type: YTN; PAM sequence: TTC
ctaggtggtttatctattga

SEQ ID NO: 247846 - DNA, 20 bp, Artificial Sequence
  Description of Artificial Sequence: Synthetic oligonucleotide
  Target: LAMA2; (-) strand; PAM type: YTN; PAM sequence: TTA
tattcctaggtggtttatct

SEQ ID NO: 247847 - DNA, 20 bp, Artificial Sequence
  Description of Artificial Sequence: Synthetic oligonucleotide
  Target: LAMA2; (-) strand; PAM type: YTN; PAM sequence: CTG
ttatattcctaggtggttta

SEQ ID NO: 247848 - DNA, 20 bp, Artificial Sequence
  Description of Artificial Sequence: Synthetic oligonucleotide
  Target: LAMA2; (-) strand; PAM type: YTN; PAM sequence: TTA
tgccccctgttatattccta

SEQ ID NO: 247849 - DNA, 20 bp, Artificial Sequence
  Description of Artificial Sequence: Synthetic oligonucleotide
  Target: LAMA2; (-) strand; PAM type: YTN; PAM sequence: TTT
atgccccctgttatattcct

SEQ ID NO: 247850 - DNA, 20 bp, Artificial Sequence
  Description of Artificial Sequence: Synthetic oligonucleotide
  Target: LAMA2; (-) strand; PAM type: YTN; PAM sequence: TTT
tatgccccctgttatattcc

SEQ ID NO: 247851 - DNA, 20 bp, Artificial Sequence
  Description of Artificial Sequence: Synthetic oligonucleotide
  Target: LAMA2; (-) strand; PAM type: YTN; PAM sequence: TTC
ataaagacacagagtcgata

SEQ ID NO: 247852 - DNA, 20 bp, Artificial Sequence
  Description of Artificial Sequence: Synthetic oligonucleotide
  Target: LAMA2; (-) strand; PAM type: YTN; PAM sequence: TTT
cataaagacacagagtcgat

SEQ ID NO: 247853 - DNA, 20 bp, Artificial Sequence
  Description of Artificial Sequence: Synthetic oligonucleotide
  Target: LAMA2; (-) strand; PAM type: YTN; PAM sequence: CTA
gtttcataaagacacagagt

SEQ ID NO: 247854 - DNA, 20 bp, Artificial Sequence
  Description of Artificial Sequence: Synthetic oligonucleotide
  Target: LAMA2; (-) strand; PAM type: YTN; PAM sequence: TTA
tctagtttcataaagacaca

SEQ ID NO: 247855 - DNA, 20 bp, Artificial Sequence
  Description of Artificial Sequence: Synthetic oligonucleotide
  Target: LAMA2; (-) strand; PAM type: YTN; PAM sequence: TTT
atctagtttcataaagacac

SEQ ID NO: 247856 - DNA, 20 bp, Artificial Sequence
  Description of Artificial Sequence: Synthetic oligonucleotide
  Target: LAMA2; (-) strand; PAM type: YTN; PAM sequence: CTT
tatctagtttcataaagaca

SEQ ID NO: 247857 - DNA, 20 bp, Artificial Sequence
  Description of Artificial Sequence: Synthetic oligonucleotide
  Target: LAMA2; (-) strand; PAM type: YTN; PAM sequence: TTG
ctttatctagtttcataaag

SEQ ID NO: 247858 - DNA, 20 bp, Artificial Sequence
  Description of Artificial Sequence: Synthetic oligonucleotide
  Target: LAMA2; (-) strand; PAM type: YTN; PAM sequence: TTT
gctttatctagtttcataaa

SEQ ID NO: 247859 - DNA, 20 bp, Artificial Sequence
  Description of Artificial Sequence: Synthetic oligonucleotide
  Target: LAMA2; (-) strand; PAM type: YTN; PAM sequence: CTT
tgctttatctagtttcataa

SEQ ID NO: 247860 - DNA, 20 bp, Artificial Sequence
  Description of Artificial Sequence: Synthetic oligonucleotide
  Target: LAMA2; (-) strand; PAM type: YTN; PAM sequence: TTC
tttgctttatctagtttcat

SEQ ID NO: 247861 - DNA, 20 bp, Artificial Sequence
  Description of Artificial Sequence: Synthetic oligonucleotide
  Target: LAMA2; (-) strand; PAM type: YTN; PAM sequence: TTT
ctttgctttatctagtttca

SEQ ID NO: 247862 - DNA, 20 bp, Artificial Sequence
  Description of Artificial Sequence: Synthetic oligonucleotide
  Target: LAMA2; (-) strand; PAM type: YTN; PAM sequence: TTT
tctttgctttatctagtttc

SEQ ID NO: 247863 - DNA, 20 bp, Artificial Sequence
  Description of Artificial Sequence: Synthetic oligonucleotide
  Target: LAMA2; (-) strand; PAM type: YTN; PAM sequence: TTT
ttctttgctttatctagttt

SEQ ID NO: 247864 - DNA, 20 bp, Artificial Sequence
  Description of Artificial Sequence: Synthetic oligonucleotide
  Target: LAMA2; (-) strand; PAM type: YTN; PAM sequence: TTG
acagatttttctttgcttta

SEQ ID NO: 247865 - DNA, 20 bp, Artificial Sequence
  Description of Artificial Sequence: Synthetic oligonucleotide
  Target: LAMA2; (-) strand; PAM type: YTN; PAM sequence: CTG
agtaattgacagatttttct

SEQ ID NO: 247866 - DNA, 20 bp, Artificial Sequence
  Description of Artificial Sequence: Synthetic oligonucleotide
  Target: LAMA2; (-) strand; PAM type: YTN; PAM sequence: CTG
gctgagtaattgacagattt

SEQ ID NO: 247867 - DNA, 20 bp, Artificial Sequence
  Description of Artificial Sequence: Synthetic oligonucleotide
  Target: LAMA2; (-) strand; PAM type: YTN; PAM sequence: CTA
agatgaaactggctgagtaa

SEQ ID NO: 247868 - DNA, 20 bp, Artificial Sequence
  Description of Artificial Sequence: Synthetic oligonucleotide
  Target: LAMA2; (-) strand; PAM type: YTN; PAM sequence: CTA
ctaagatgaaactggctgag

SEQ ID NO: 247869 - DNA, 20 bp, Artificial Sequence
  Description of Artificial Sequence: Synthetic oligonucleotide
  Target: LAMA2; (-) strand; PAM type: YTN; PAM sequence: TTA
cagtaggctactaagatgaa

SEQ ID NO: 247870 - DNA, 20 bp, Artificial Sequence
  Description of Artificial Sequence: Synthetic oligonucleotide
  Target: LAMA2; (-) strand; PAM type: YTN; PAM sequence: TTT
acagtaggctactaagatga

SEQ ID NO: 247871 - DNA, 20 bp, Artificial Sequence
  Description of Artificial Sequence: Synthetic oligonucleotide
  Target: LAMA2; (-) strand; PAM type: YTN; PAM sequence: CTC
aatttacagtaggctactaa

SEQ ID NO: 247872 - DNA, 20 bp, Artificial Sequence
  Description of Artificial Sequence: Synthetic oligonucleotide
  Target: LAMA2; (-) strand; PAM type: YTN; PAM sequence: CTC
aaaaacatagacctcaattt

SEQ ID NO: 247873 - DNA, 20 bp, Artificial Sequence
  Description of Artificial Sequence: Synthetic oligonucleotide
  Target: LAMA2; (-) strand; PAM type: YTN; PAM sequence: TTC
actcaaaaacatagacctca

SEQ ID NO: 247874 - DNA, 20 bp, Artificial Sequence
  Description of Artificial Sequence: Synthetic oligonucleotide
  Target: LAMA2; (-) strand; PAM type: YTN; PAM sequence: TTC
attcactcaaaaacatagac

SEQ ID NO: 247875 - DNA, 20 bp, Artificial Sequence
  Description of Artificial Sequence: Synthetic oligonucleotide
  Target: LAMA2; (-) strand; PAM type: YTN; PAM sequence: TTT
cattcactcaaaaacataga

SEQ ID NO: 247876 - DNA, 20 bp, Artificial Sequence
  Description of Artificial Sequence: Synthetic oligonucleotide
  Target: LAMA2; (-) strand; PAM type: YTN; PAM sequence: CTA
gatttcattcactcaaaaac

SEQ ID NO: 247877 - DNA, 20 bp, Artificial Sequence
  Description of Artificial Sequence: Synthetic oligonucleotide
  Target: LAMA2; (-) strand; PAM type: YTN; PAM sequence: TTA
ctagatttcattcactcaaa

SEQ ID NO: 247878 - DNA, 20 bp, Artificial Sequence
  Description of Artificial Sequence: Synthetic oligonucleotide
  Target: LAMA2; (-) strand; PAM type: YTN; PAM sequence: TTT
actagatttcattcactcaa

SEQ ID NO: 247879 - DNA, 20 bp, Artificial Sequence
  Description of Artificial Sequence: Synthetic oligonucleotide
  Target: LAMA2; (-) strand; PAM type: YTN; PAM sequence: TTA
atttactagatttcattcac

SEQ ID NO: 247880 - DNA, 20 bp, Artificial Sequence
  Description of Artificial Sequence: Synthetic oligonucleotide
  Target: LAMA2; (-) strand; PAM type: YTN; PAM sequence: CTT
aatttactagatttcattca

SEQ ID NO: 247881 - DNA, 20 bp, Artificial Sequence
  Description of Artificial Sequence: Synthetic oligonucleotide
  Target: LAMA2; (-) strand; PAM type: YTN; PAM sequence: CTG
gtgaacttaatttactagat

SEQ ID NO: 247882 - DNA, 20 bp, Artificial Sequence
  Description of Artificial Sequence: Synthetic oligonucleotide
  Target: LAMA2; (-) strand; PAM type: YTN; PAM sequence: CTA
gaataagacctggtgaactt

SEQ ID NO: 247883 - DNA, 20 bp, Artificial Sequence
  Description of Artificial Sequence: Synthetic oligonucleotide
  Target: LAMA2; (-) strand; PAM type: YTN; PAM sequence: CTA
aaataaactagaataagacc

SEQ ID NO: 247884 - DNA, 20 bp, Artificial Sequence
  Description of Artificial Sequence: Synthetic oligonucleotide
  Target: LAMA2; (-) strand; PAM type: YTN; PAM sequence: TTC
catctaaaataaactagaat

SEQ ID NO: 247885 - DNA, 20 bp, Artificial Sequence
  Description of Artificial Sequence: Synthetic oligonucleotide
  Target: LAMA2; (-) strand; PAM type: YTN; PAM sequence: TTT
ccatctaaaataaactagaa

SEQ ID NO: 247886 - DNA, 20 bp, Artificial Sequence
  Description of Artificial Sequence: Synthetic oligonucleotide
  Target: LAMA2; (-) strand; PAM type: YTN; PAM sequence: TTA
aaaatcatacatttccatct

SEQ ID NO: 247887 - DNA, 20 bp, Artificial Sequence
  Description of Artificial Sequence: Synthetic oligonucleotide
  Target: LAMA2; (-) strand; PAM type: YTN; PAM sequence: TTT
aaaaatcatacatttccatc

SEQ ID NO: 247888 - DNA, 20 bp, Artificial Sequence
  Description of Artificial Sequence: Synthetic oligonucleotide
  Target: LAMA2; (-) strand; PAM type: YTN; PAM sequence: TTT
taaaaatcatacatttccat

SEQ ID NO: 247889 - DNA, 20 bp, Artificial Sequence
  Description of Artificial Sequence: Synthetic oligonucleotide
  Target: LAMA2; (-) strand; PAM type: YTN; PAM sequence: CTT
ttaaaaatcatacatttcca

SEQ ID NO: 247890 - DNA, 20 bp, Artificial Sequence
  Description of Artificial Sequence: Synthetic oligonucleotide
  Target: LAMA2; (-) strand; PAM type: YTN; PAM sequence: CTC
ccacttttaaaaatcataca

SEQ ID NO: 247891 - DNA, 20 bp, Artificial Sequence
  Description of Artificial Sequence: Synthetic oligonucleotide
  Target: LAMA2; (-) strand; PAM type: YTN; PAM sequence: TTA
ctcccacttttaaaaatcat

SEQ ID NO: 247892 - DNA, 20 bp, Artificial Sequence
  Description of Artificial Sequence: Synthetic oligonucleotide
  Target: LAMA2; (-) strand; PAM type: YTN; PAM sequence: TTT
actcccacttttaaaaatca

SEQ ID NO: 247893 - DNA, 20 bp, Artificial Sequence
  Description of Artificial Sequence: Synthetic oligonucleotide
  Target: LAMA2; (-) strand; PAM type: YTN; PAM sequence: TTT
tactcccacttttaaaaatc

SEQ ID NO: 247894 - DNA, 20 bp, Artificial Sequence
  Description of Artificial Sequence: Synthetic oligonucleotide
  Target: LAMA2; (-) strand; PAM type: YTN; PAM sequence: TTC
agaaatatgtgtaagatttt

SEQ ID NO: 247895 - DNA, 20 bp, Artificial Sequence
  Description of Artificial Sequence: Synthetic oligonucleotide
  Target: LAMA2; (-) strand; PAM type: YTN; PAM sequence: TTT
cagaaatatgtgtaagattt

SEQ ID NO: 247896 - DNA, 20 bp, Artificial Sequence
  Description of Artificial Sequence: Synthetic oligonucleotide
  Target: LAMA2; (-) strand; PAM type: YTN; PAM sequence: TTA
acatttcagaaatatgtgta

SEQ ID NO: 247897 - DNA, 20 bp, Artificial Sequence
  Description of Artificial Sequence: Synthetic oligonucleotide
  Target: LAMA2; (-) strand; PAM type: YTN; PAM sequence: CTT
aacatttcagaaatatgtgt

SEQ ID NO: 247898 - DNA, 20 bp, Artificial Sequence
  Description of Artificial Sequence: Synthetic oligonucleotide
  Target: LAMA2; (-) strand; PAM type: YTN; PAM sequence: TTC
ttaacatttcagaaatatgt

SEQ ID NO: 247899 - DNA, 20 bp, Artificial Sequence
  Description of Artificial Sequence: Synthetic oligonucleotide
  Target: LAMA2; (-) strand; PAM type: YTN; PAM sequence: CTT
cttaacatttcagaaatatg

SEQ ID NO: 247900 - DNA, 20 bp, Artificial Sequence
  Description of Artificial Sequence: Synthetic oligonucleotide
  Target: LAMA2; (-) strand; PAM type: YTN; PAM sequence: TTA
tcttcttaacatttcagaaa

SEQ ID NO: 247901 - DNA, 20 bp, Artificial Sequence
  Description of Artificial Sequence: Synthetic oligonucleotide
  Target: LAMA2; (-) strand; PAM type: YTN; PAM sequence: TTA
taaaattatcttcttaacat

SEQ ID NO: 247902 - DNA, 20 bp, Artificial Sequence
  Description of Artificial Sequence: Synthetic oligonucleotide
  Target: LAMA2; (-) strand; PAM type: YTN; PAM sequence: TTG
aattataaaattatcttctt

SEQ ID NO: 247903 - DNA, 20 bp, Artificial Sequence
  Description of Artificial Sequence: Synthetic oligonucleotide
  Target: LAMA2; (-) strand; PAM type: YTN; PAM sequence: TTT
gaattataaaattatcttct

SEQ ID NO: 247904 - DNA, 20 bp, Artificial Sequence
  Description of Artificial Sequence: Synthetic oligonucleotide
  Target: LAMA2; (-) strand; PAM type: YTN; PAM sequence: TTG
tacaggtttgaattataaaa

SEQ ID NO: 247905 - DNA, 20 bp, Artificial Sequence
  Description of Artificial Sequence: Synthetic oligonucleotide
  Target: LAMA2; (-) strand; PAM type: YTN; PAM sequence: CTT
gtacaggtttgaattataaa

SEQ ID NO: 247906 - DNA, 20 bp, Artificial Sequence
  Description of Artificial Sequence: Synthetic oligonucleotide
  Target: LAMA2; (-) strand; PAM type: YTN; PAM sequence: TTC
ttgtacaggtttgaattata

SEQ ID NO: 247907 - DNA, 20 bp, Artificial Sequence
  Description of Artificial Sequence: Synthetic oligonucleotide
  Target: LAMA2; (-) strand; PAM type: YTN; PAM sequence: CTA
agttcttgtacaggtttgaa

SEQ ID NO: 247908 - DNA, 20 bp, Artificial Sequence
  Description of Artificial Sequence: Synthetic oligonucleotide
  Target: LAMA2; (-) strand; PAM type: YTN; PAM sequence: CTC
agataggcaaactaagttct

SEQ ID NO: 247909 - DNA, 20 bp, Artificial Sequence
  Description of Artificial Sequence: Synthetic oligonucleotide
  Target: LAMA2; (-) strand; PAM type: YTN; PAM sequence: TTG
ctcagataggcaaactaagt

SEQ ID NO: 247910 - DNA, 20 bp, Artificial Sequence
  Description of Artificial Sequence: Synthetic oligonucleotide
  Target: LAMA2; (-) strand; PAM type: YTN; PAM sequence: TTT
gctcagataggcaaactaag

SEQ ID NO: 247911 - DNA, 20 bp, Artificial Sequence
  Description of Artificial Sequence: Synthetic oligonucleotide
  Target: LAMA2; (-) strand; PAM type: YTN; PAM sequence: CTA
gtgaatgtaaaatttgctca

SEQ ID NO: 247912 - DNA, 20 bp, Artificial Sequence
  Description of Artificial Sequence: Synthetic oligonucleotide
  Target: LAMA2; (-) strand; PAM type: YTN; PAM sequence: TTC
actagtgaatgtaaaatttg

SEQ ID NO: 247913 - DNA, 20 bp, Artificial Sequence
  Description of Artificial Sequence: Synthetic oligonucleotide
  Target: LAMA2; (-) strand; PAM type: YTN; PAM sequence: TTC
acatgggcattcactagtga

SEQ ID NO: 247914 - DNA, 20 bp, Artificial Sequence
  Description of Artificial Sequence: Synthetic oligonucleotide
  Target: LAMA2; (-) strand; PAM type: YTN; PAM sequence: TTT
cacatgggcattcactagtg

SEQ ID NO: 247915 - DNA, 20 bp, Artificial Sequence
  Description of Artificial Sequence: Synthetic oligonucleotide
  Target: LAMA2; (-) strand; PAM type: YTN; PAM sequence: CTT
tcacatgggcattcactagt

SEQ ID NO: 247916 - DNA, 20 bp, Artificial Sequence
  Description of Artificial Sequence: Synthetic oligonucleotide
  Target: LAMA2; (-) strand; PAM type: YTN; PAM sequence: TTG
tctttcacatgggcattcac

SEQ ID NO: 247917 - DNA, 20 bp, Artificial Sequence
  Description of Artificial Sequence: Synthetic oligonucleotide
  Target: LAMA2; (-) strand; PAM type: YTN; PAM sequence: CTT
gtctttcacatgggcattca

SEQ ID NO: 247918 - DNA, 20 bp, Artificial Sequence
  Description of Artificial Sequence: Synthetic oligonucleotide
  Target: LAMA2; (-) strand; PAM type: YTN; PAM sequence: CTG
cttgtctttcacatgggcat

SEQ ID NO: 247919 - DNA, 20 bp, Artificial Sequence
  Description of Artificial Sequence: Synthetic oligonucleotide
  Target: LAMA2; (-) strand; PAM type: YTN; PAM sequence: TTC
ctgcttgtctttcacatggg

SEQ ID NO: 247920 - DNA, 20 bp, Artificial Sequence
  Description of Artificial Sequence: Synthetic oligonucleotide
  Target: LAMA2; (-) strand; PAM type: YTN; PAM sequence: TTT
cctgcttgtctttcacatgg

SEQ ID NO: 247921 - DNA, 20 bp, Artificial Sequence
  Description of Artificial Sequence: Synthetic oligonucleotide
  Target: LAMA2; (-) strand; PAM type: YTN; PAM sequence: CTG
gaagtttcctgcttgtcttt

SEQ ID NO: 247922 - DNA, 20 bp, Artificial Sequence
  Description of Artificial Sequence: Synthetic oligonucleotide
  Target: LAMA2; (-) strand; PAM type: YTN; PAM sequence: TTG
gcccctggaagtttcctgct

SEQ ID NO: 247923 - DNA, 20 bp, Artificial Sequence
  Description of Artificial Sequence: Synthetic oligonucleotide
  Target: LAMA2; (-) strand; PAM type: YTN; PAM sequence: CTT
ggcccctggaagtttcctgc

SEQ ID NO: 247924 - DNA, 20 bp, Artificial Sequence
  Description of Artificial Sequence: Synthetic oligonucleotide
  Target: LAMA2; (-) strand; PAM type: YTN; PAM sequence: CTA
agccccttggcccctggaag

SEQ ID NO: 247925 - DNA, 20 bp, Artificial Sequence
  Description of Artificial Sequence: Synthetic oligonucleotide
  Target: LAMA2; (-) strand; PAM type: YTN; PAM sequence: TTC
taagccccttggcccctgga

SEQ ID NO: 247926 - DNA, 20 bp, Artificial Sequence
  Description of Artificial Sequence: Synthetic oligonucleotide
  Target: LAMA2; (-) strand; PAM type: YTN; PAM sequence: TTG
gttctaagccccttggcccc

SEQ ID NO: 247927 - DNA, 20 bp, Artificial Sequence
  Description of Artificial Sequence: Synthetic oligonucleotide
  Target: LAMA2; (-) strand; PAM type: YTN; PAM sequence: TTC
agttggttctaagccccttg

SEQ ID NO: 247928 - DNA, 20 bp, Artificial Sequence
  Description of Artificial Sequence: Synthetic oligonucleotide
  Target: LAMA2; (-) strand; PAM type: YTN; PAM sequence: TTG
taccagttcagttggttcta

SEQ ID NO: 247929 - DNA, 20 bp, Artificial Sequence
  Description of Artificial Sequence: Synthetic oligonucleotide
  Target: LAMA2; (-) strand; PAM type: YTN; PAM sequence: TTT
gtaccagttcagttggttct

SEQ ID NO: 247930 - DNA, 20 bp, Artificial Sequence
  Description of Artificial Sequence: Synthetic oligonucleotide
  Target: LAMA2; (-) strand; PAM type: YTN; PAM sequence: TTT
tgtaccagttcagttggttc

SEQ ID NO: 247931 - DNA, 20 bp, Artificial Sequence
  Description of Artificial Sequence: Synthetic oligonucleotide
  Target: LAMA2; (-) strand; PAM type: YTN; PAM sequence: TTA
ttttgtaccagttcagttgg

SEQ ID NO: 247932 - DNA, 20 bp, Artificial Sequence
  Description of Artificial Sequence: Synthetic oligonucleotide
  Target: LAMA2; (-) strand; PAM type: YTN; PAM sequence: TTT
attttgtaccagttcagttg

SEQ ID NO: 247933 - DNA, 20 bp, Artificial Sequence
  Description of Artificial Sequence: Synthetic oligonucleotide
  Target: LAMA2; (-) strand; PAM type: YTN; PAM sequence: CTA
atgtttattttgtaccagtt

SEQ ID NO: 247934 - DNA, 20 bp, Artificial Sequence
  Description of Artificial Sequence: Synthetic oligonucleotide
  Target: LAMA2; (-) strand; PAM type: YTN; PAM sequence: CTG
aaatacctaatgtttatttt

SEQ ID NO: 247935 - DNA, 20 bp, Artificial Sequence
  Description of Artificial Sequence: Synthetic oligonucleotide
  Target: LAMA2; (-) strand; PAM type: YTN; PAM sequence: CTA
cgtactgaaatacctaatgt

SEQ ID NO: 247936 - DNA, 20 bp, Artificial Sequence
  Description of Artificial Sequence: Synthetic oligonucleotide
  Target: LAMA2; (-) strand; PAM type: YTN; PAM sequence: CTC
tacgtactgaaatacctaat

SEQ ID NO: 247937 - DNA, 20 bp, Artificial Sequence
  Description of Artificial Sequence: Synthetic oligonucleotide
  Target: LAMA2; (-) strand; PAM type: YTN; PAM sequence: TTG
tccacaaactctacgtactg

SEQ ID NO: 247938 - DNA, 20 bp, Artificial Sequence
  Description of Artificial Sequence: Synthetic oligonucleotide
  Target: LAMA2; (-) strand; PAM type: YTN; PAM sequence: TTT
gtccacaaactctacgtact

SEQ ID NO: 247939 - DNA, 20 bp, Artificial Sequence
  Description of Artificial Sequence: Synthetic oligonucleotide
  Target: LAMA2; (-) strand; PAM type: YTN; PAM sequence: TTT
tgtccacaaactctacgtac

SEQ ID NO: 247940 - DNA, 20 bp, Artificial Sequence
  Description of Artificial Sequence: Synthetic oligonucleotide
  Target: LAMA2; (-) strand; PAM type: YTN; PAM sequence: TTT
ttgtccacaaactctacgta

SEQ ID NO: 247941 - DNA, 20 bp, Artificial Sequence
  Description of Artificial Sequence: Synthetic oligonucleotide
  Target: LAMA2; (-) strand; PAM type: YTN; PAM sequence: CTT
tttgtccacaaactctacgt

SEQ ID NO: 247942 - DNA, 20 bp, Artificial Sequence
  Description of Artificial Sequence: Synthetic oligonucleotide
  Target: LAMA2; (-) strand; PAM type: YTN; PAM sequence: TTC
tttttgtccacaaactctac

SEQ ID NO: 247943 - DNA, 20 bp, Artificial Sequence
  Description of Artificial Sequence: Synthetic oligonucleotide
  Target: LAMA2; (-) strand; PAM type: YTN; PAM sequence: CTA
ttctttttgtccacaaactc

SEQ ID NO: 247944 - DNA, 20 bp, Artificial Sequence
  Description of Artificial Sequence: Synthetic oligonucleotide
  Target: LAMA2; (-) strand; PAM type: YTN; PAM sequence: TTG
gtaagagcctattctttttg

SEQ ID NO: 247945 - DNA, 20 bp, Artificial Sequence
  Description of Artificial Sequence: Synthetic oligonucleotide
  Target: LAMA2; (-) strand; PAM type: YTN; PAM sequence: CTA
gtagcatagtaattggtaag

SEQ ID NO: 247946 - DNA, 20 bp, Artificial Sequence
  Description of Artificial Sequence: Synthetic oligonucleotide
  Target: LAMA2; (-) strand; PAM type: YTN; PAM sequence: TTC
tagtagcatagtaattggta

SEQ ID NO: 247947 - DNA, 20 bp, Artificial Sequence
  Description of Artificial Sequence: Synthetic oligonucleotide
  Target: LAMA2; (-) strand; PAM type: YTN; PAM sequence: TTG
gatattctagtagcatagta

SEQ ID NO: 247948 - DNA, 20 bp, Artificial Sequence
  Description of Artificial Sequence: Synthetic oligonucleotide
  Target: LAMA2; (-) strand; PAM type: YTN; PAM sequence: TTG
gtaaaagcaaaattggatat

SEQ ID NO: 247949 - DNA, 20 bp, Artificial Sequence
  Description of Artificial Sequence: Synthetic oligonucleotide
  Target: LAMA2; (-) strand; PAM type: YTN; PAM sequence: CTT
ggtaaaagcaaaattggata

SEQ ID NO: 247950 - DNA, 20 bp, Artificial Sequence
  Description of Artificial Sequence: Synthetic oligonucleotide
  Target: LAMA2; (-) strand; PAM type: YTN; PAM sequence: CTA
aggcttggtaaaagcaaaat

SEQ ID NO: 247951 - DNA, 20 bp, Artificial Sequence
  Description of Artificial Sequence: Synthetic oligonucleotide
  Target: LAMA2; (-) strand; PAM type: YTN; PAM sequence: TTC
actaaggcttggtaaaagca

SEQ ID NO: 247952 - DNA, 20 bp, Artificial Sequence
  Description of Artificial Sequence: Synthetic oligonucleotide
  Target: LAMA2; (-) strand; PAM type: YTN; PAM sequence: TTT
cactaaggcttggtaaaagc

SEQ ID NO: 247953 - DNA, 20 bp, Artificial Sequence
  Description of Artificial Sequence: Synthetic oligonucleotide
  Target: LAMA2; (-) strand; PAM type: YTN; PAM sequence: TTT
tcactaaggcttggtaaaag

SEQ ID NO: 247954 - DNA, 20 bp, Artificial Sequence
  Description of Artificial Sequence: Synthetic oligonucleotide
  Target: LAMA2; (-) strand; PAM type: YTN; PAM sequence: CTT
ttcactaaggcttggtaaaa

SEQ ID NO: 247955 - DNA, 20 bp, Artificial Sequence
  Description of Artificial Sequence: Synthetic oligonucleotide
  Target: LAMA2; (-) strand; PAM type: YTN; PAM sequence: TTC
acttttcactaaggcttggt

SEQ ID NO: 247956 - DNA, 20 bp, Artificial Sequence
  Description of Artificial Sequence: Synthetic oligonucleotide
  Target: LAMA2; (-) strand; PAM type: YTN; PAM sequence: TTC
attcacttttcactaaggct

SEQ ID NO: 247957 - DNA, 20 bp, Artificial Sequence
  Description of Artificial Sequence: Synthetic oligonucleotide
  Target: LAMA2; (-) strand; PAM type: YTN; PAM sequence: TTA
gaattcattcacttttcact

SEQ ID NO: 247958 - DNA, 20 bp, Artificial Sequence
  Description of Artificial Sequence: Synthetic oligonucleotide
  Target: LAMA2; (-) strand; PAM type: YTN; PAM sequence: TTG
ttagaattcattcacttttc

SEQ ID NO: 247959 - DNA, 20 bp, Artificial Sequence
  Description of Artificial Sequence: Synthetic oligonucleotide
  Target: LAMA2; (-) strand; PAM type: YTN; PAM sequence: CTT
gttagaattcattcactttt

SEQ ID NO: 247960 - DNA, 20 bp, Artificial Sequence
  Description of Artificial Sequence: Synthetic oligonucleotide
  Target: LAMA2; (-) strand; PAM type: YTN; PAM sequence: TTC
ttgttagaattcattcactt

SEQ ID NO: 247961 - DNA, 20 bp, Artificial Sequence
  Description of Artificial Sequence: Synthetic oligonucleotide
  Target: LAMA2; (-) strand; PAM type: YTN; PAM sequence: CTT
cttgttagaattcattcact

SEQ ID NO: 247962 - DNA, 20 bp, Artificial Sequence
  Description of Artificial Sequence: Synthetic oligonucleotide
  Target: LAMA2; (-) strand; PAM type: YTN; PAM sequence: TTG
agtcttcttgttagaattca

SEQ ID NO: 247963 - DNA, 20 bp, Artificial Sequence
  Description of Artificial Sequence: Synthetic oligonucleotide
  Target: LAMA2; (-) strand; PAM type: YTN; PAM sequence: TTT
gagtcttcttgttagaattc

SEQ ID NO: 247964 - DNA, 20 bp, Artificial Sequence
  Description of Artificial Sequence: Synthetic oligonucleotide
  Target: LAMA2; (-) strand; PAM type: YTN; PAM sequence: CTT
tgagtcttcttgttagaatt

SEQ ID NO: 247965 - DNA, 20 bp, Artificial Sequence
  Description of Artificial Sequence: Synthetic oligonucleotide
  Target: LAMA2; (-) strand; PAM type: YTN; PAM sequence: CTG
accatgcagaataagtgaag

SEQ ID NO: 247966 - DNA, 20 bp, Artificial Sequence
  Description of Artificial Sequence: Synthetic oligonucleotide
  Target: LAMA2; (-) strand; PAM type: YTN; PAM sequence: TTG
aagaggtgctgaccatgcag

SEQ ID NO: 247967 - DNA, 20 bp, Artificial Sequence
  Description of Artificial Sequence: Synthetic oligonucleotide
  Target: LAMA2; (-) strand; PAM type: YTN; PAM sequence: TTT
gaagaggtgctgaccatgca

SEQ ID NO: 247968 - DNA, 20 bp, Artificial Sequence
  Description of Artificial Sequence: Synthetic oligonucleotide
  Target: LAMA2; (-) strand; PAM type: YTN; PAM sequence: TTT
tgaagaggtgctgaccatgc

SEQ ID NO: 247969 - DNA, 20 bp, Artificial Sequence
  Description of Artificial Sequence: Synthetic oligonucleotide
  Target: LAMA2; (-) strand; PAM type: YTN; PAM sequence: CTT
ttgaagaggtgctgaccatg

SEQ ID NO: 247970 - DNA, 20 bp, Artificial Sequence
  Description of Artificial Sequence: Synthetic oligonucleotide
  Target: LAMA2; (-) strand; PAM type: YTN; PAM sequence: TTG
gtcttttgaagaggtgctga

SEQ ID NO: 247971 - DNA, 20 bp, Artificial Sequence
  Description of Artificial Sequence: Synthetic oligonucleotide
  Target: LAMA2; (-) strand; PAM type: YTN; PAM sequence: TTA
ttggtcttttgaagaggtgc

SEQ ID NO: 247972 - DNA, 20 bp, Artificial Sequence
  Description of Artificial Sequence: Synthetic oligonucleotide
  Target: LAMA2; (-) strand; PAM type: YTN; PAM sequence: TTA
ttattggtcttttgaagagg

SEQ ID NO: 247973 - DNA, 20 bp, Artificial Sequence
  Description of Artificial Sequence: Synthetic oligonucleotide
  Target: LAMA2; (-) strand; PAM type: YTN; PAM sequence: TTG
taggggaccattattattgg

SEQ ID NO: 247974 - DNA, 20 bp, Artificial Sequence
  Description of Artificial Sequence: Synthetic oligonucleotide
  Target: LAMA2; (-) strand; PAM type: YTN; PAM sequence: CTT
gtaggggaccattattattg

SEQ ID NO: 247975 - DNA, 20 bp, Artificial Sequence
  Description of Artificial Sequence: Synthetic oligonucleotide
  Target: LAMA2; (-) strand; PAM type: YTN; PAM sequence: TTC
ttgtaggggaccattattat

SEQ ID NO: 247976 - DNA, 20 bp, Artificial Sequence
  Description of Artificial Sequence: Synthetic oligonucleotide
  Target: LAMA2; (-) strand; PAM type: YTN; PAM sequence: CTT
cttgtaggggaccattatta

SEQ ID NO: 247977 - DNA, 20 bp, Artificial Sequence
  Description of Artificial Sequence: Synthetic oligonucleotide
  Target: LAMA2; (-) strand; PAM type: YTN; PAM sequence: TTG
tatacttcttgtaggggacc

SEQ ID NO: 247978 - DNA, 20 bp, Artificial Sequence
  Description of Artificial Sequence: Synthetic oligonucleotide
  Target: LAMA2; (-) strand; PAM type: YTN; PAM sequence: TTC
acatcagaggagcaattgta

SEQ ID NO: 247979 - DNA, 20 bp, Artificial Sequence
  Description of Artificial Sequence: Synthetic oligonucleotide
  Target: LAMA2; (-) strand; PAM type: YTN; PAM sequence: TTT
cacatcagaggagcaattgt

SEQ ID NO: 247980 - DNA, 20 bp, Artificial Sequence
  Description of Artificial Sequence: Synthetic oligonucleotide
  Target: LAMA2; (-) strand; PAM type: YTN; PAM sequence: CTT
tcacatcagaggagcaattg

SEQ ID NO: 247981 - DNA, 20 bp, Artificial Sequence
  Description of Artificial Sequence: Synthetic oligonucleotide
  Target: LAMA2; (-) strand; PAM type: YTN; PAM sequence: TTC
atatgctttcacatcagagg

SEQ ID NO: 247982 - DNA, 20 bp, Artificial Sequence
  Description of Artificial Sequence: Synthetic oligonucleotide
  Target: LAMA2; (-) strand; PAM type: YTN; PAM sequence: CTT
catatgctttcacatcagag

SEQ ID NO: 247983 - DNA, 20 bp, Artificial Sequence
  Description of Artificial Sequence: Synthetic oligonucleotide
  Target: LAMA2; (-) strand; PAM type: YTN; PAM sequence: TTC
ttcatatgctttcacatcag

SEQ ID NO: 247984 - DNA, 20 bp, Artificial Sequence
  Description of Artificial Sequence: Synthetic oligonucleotide
  Target: LAMA2; (-) strand; PAM type: YTN; PAM sequence: TTT
cttcatatgctttcacatca

SEQ ID NO: 247985 - DNA, 20 bp, Artificial Sequence
  Description of Artificial Sequence: Synthetic oligonucleotide
  Target: LAMA2; (-) strand; PAM type: YTN; PAM sequence: TTT
tcttcatatgctttcacatc

SEQ ID NO: 247986 - DNA, 20 bp, Artificial Sequence
  Description of Artificial Sequence: Synthetic oligonucleotide
  Target: LAMA2; (-) strand; PAM type: YTN; PAM sequence: TTA
ttttcttcatatgctttcac

SEQ ID NO: 247987 - DNA, 20 bp, Artificial Sequence
  Description of Artificial Sequence: Synthetic oligonucleotide
  Target: LAMA2; (-) strand; PAM type: YTN; PAM sequence: CTT
attttcttcatatgctttca

SEQ ID NO: 247988 - DNA, 20 bp, Artificial Sequence
  Description of Artificial Sequence: Synthetic oligonucleotide
  Target: LAMA2; (-) strand; PAM type: YTN; PAM sequence: TTG
gacacttattttcttcatat

SEQ ID NO: 247989 - DNA, 20 bp, Artificial Sequence
  Description of Artificial Sequence: Synthetic oligonucleotide
  Target: LAMA2; (-) strand; PAM type: YTN; PAM sequence: TTT
ggacacttattttcttcata

SEQ ID NO: 247990 - DNA, 20 bp, Artificial Sequence
  Description of Artificial Sequence: Synthetic oligonucleotide
  Target: LAMA2; (-) strand; PAM type: YTN; PAM sequence: CTT
tggacacttattttcttcat

SEQ ID NO: 247991 - DNA, 20 bp, Artificial Sequence
  Description of Artificial Sequence: Synthetic oligonucleotide
  Target: LAMA2; (-) strand; PAM type: YTN; PAM sequence: TTA
tgcagctttggacacttatt

SEQ ID NO: 247992 - DNA, 20 bp, Artificial Sequence
  Description of Artificial Sequence: Synthetic oligonucleotide
  Target: LAMA2; (-) strand; PAM type: YTN; PAM sequence: TTT
atgcagctttggacacttat

SEQ ID NO: 247993 - DNA, 20 bp, Artificial Sequence
  Description of Artificial Sequence: Synthetic oligonucleotide
  Target: LAMA2; (-) strand; PAM type: YTN; PAM sequence: CTC
aaaggggtgcaaatatttat

SEQ ID NO: 247994 - DNA, 20 bp, Artificial Sequence
  Description of Artificial Sequence: Synthetic oligonucleotide
  Target: LAMA2; (-) strand; PAM type: YTN; PAM sequence: CTC
tcaaaggggtgcaaatattt

SEQ ID NO: 247995 - DNA, 20 bp, Artificial Sequence
  Description of Artificial Sequence: Synthetic oligonucleotide
  Target: LAMA2; (-) strand; PAM type: YTN; PAM sequence: CTC
atactctcaaaggggtgcaa

SEQ ID NO: 247996 - DNA, 20 bp, Artificial Sequence
  Description of Artificial Sequence: Synthetic oligonucleotide
  Target: LAMA2; (-) strand; PAM type: YTN; PAM sequence: TTC
tcatactctcaaaggggtgc

SEQ ID NO: 247997 - DNA, 20 bp, Artificial Sequence
  Description of Artificial Sequence: Synthetic oligonucleotide
  Target: LAMA2; (-) strand; PAM type: YTN; PAM sequence: TTT
ctcatactctcaaaggggtg

SEQ ID NO: 247998 - DNA, 20 bp, Artificial Sequence
  Description of Artificial Sequence: Synthetic oligonucleotide
  Target: LAMA2; (-) strand; PAM type: YTN; PAM sequence: CTT
tctcatactctcaaaggggt

SEQ ID NO: 247999 - DNA, 20 bp, Artificial Sequence
  Description of Artificial Sequence: Synthetic oligonucleotide
  Target: LAMA2; (-) strand; PAM type: YTN; PAM sequence: CTA
tcaatcacaacataaaacac

SEQ ID NO: 248000 - DNA, 20 bp, Artificial Sequence
  Description of Artificial Sequence: Synthetic oligonucleotide
  Target: LAMA2; (-) strand; PAM type: YTN; PAM sequence: TTG
tcctatcaatcacaacataa

SEQ ID NO: 248001 - DNA, 20 bp, Artificial Sequence
  Description of Artificial Sequence: Synthetic oligonucleotide
  Target: LAMA2; (-) strand; PAM type: YTN; PAM sequence: TTC
aaagtgggccatgaaagttg

SEQ ID NO: 248002 - DNA, 20 bp, Artificial Sequence
  Description of Artificial Sequence: Synthetic oligonucleotide
  Target: LAMA2; (-) strand; PAM type: YTN; PAM sequence: CTA
agagttcaaagtgggccatg

SEQ ID NO: 248003 - DNA, 20 bp, Artificial Sequence
  Description of Artificial Sequence: Synthetic oligonucleotide
  Target: LAMA2; (-) strand; PAM type: YTN; PAM sequence: CTG
ctaagagttcaaagtgggcc

SEQ ID NO: 248004 - DNA, 20 bp, Artificial Sequence
  Description of Artificial Sequence: Synthetic oligonucleotide
  Target: LAMA2; (-) strand; PAM type: YTN; PAM sequence: TTC
ctgctaagagttcaaagtgg

SEQ ID NO: 248005 - DNA, 20 bp, Artificial Sequence
  Description of Artificial Sequence: Synthetic oligonucleotide
  Target: LAMA2; (-) strand; PAM type: YTN; PAM sequence: TTC
caaagttcctgctaagagtt

SEQ ID NO: 248006 - DNA, 20 bp, Artificial Sequence
  Description of Artificial Sequence: Synthetic oligonucleotide
  Target: LAMA2; (-) strand; PAM type: YTN; PAM sequence: CTC
aggacattccaaagttcctg

SEQ ID NO: 248007 - DNA, 20 bp, Artificial Sequence
  Description of Artificial Sequence: Synthetic oligonucleotide
  Target: LAMA2; (-) strand; PAM type: YTN; PAM sequence: CTG
ccatacaaaggcagacagac

SEQ ID NO: 248008 - DNA, 20 bp, Artificial Sequence
  Description of Artificial Sequence: Synthetic oligonucleotide
  Target: LAMA2; (-) strand; PAM type: YTN; PAM sequence: TTC
ctgccatacaaaggcagaca

SEQ ID NO: 248009 - DNA, 20 bp, Artificial Sequence
  Description of Artificial Sequence: Synthetic oligonucleotide
  Target: LAMA2; (-) strand; PAM type: YTN; PAM sequence: CTA
agaaaacagagttcctgcca

SEQ ID NO: 248010 - DNA, 20 bp, Artificial Sequence
  Description of Artificial Sequence: Synthetic oligonucleotide
  Target: LAMA2; (-) strand; PAM type: YTN; PAM sequence: TTC
taagaaaacagagttcctgc

SEQ ID NO: 248011 - DNA, 20 bp, Artificial Sequence
  Description of Artificial Sequence: Synthetic oligonucleotide
  Target: LAMA2; (-) strand; PAM type: YTN; PAM sequence: TTT
ctaagaaaacagagttcctg

SEQ ID NO: 248012 - DNA, 20 bp, Artificial Sequence
  Description of Artificial Sequence: Synthetic oligonucleotide
  Target: LAMA2; (-) strand; PAM type: YTN; PAM sequence: TTT
tctaagaaaacagagttcct

SEQ ID NO: 248013 - DNA, 20 bp, Artificial Sequence
  Description of Artificial Sequence: Synthetic oligonucleotide
  Target: LAMA2; (-) strand; PAM type: YTN; PAM sequence: CTA
ttttctaagaaaacagagtt

SEQ ID NO: 248014 - DNA, 20 bp, Artificial Sequence
  Description of Artificial Sequence: Synthetic oligonucleotide
  Target: LAMA2; (-) strand; PAM type: YTN; PAM sequence: TTA
ctattttctaagaaaacaga

SEQ ID NO: 248015 - DNA, 20 bp, Artificial Sequence
  Description of Artificial Sequence: Synthetic oligonucleotide
  Target: LAMA2; (-) strand; PAM type: YTN; PAM sequence: TTT
actattttctaagaaaacag

SEQ ID NO: 248016 - DNA, 20 bp, Artificial Sequence
  Description of Artificial Sequence: Synthetic oligonucleotide
  Target: LAMA2; (-) strand; PAM type: YTN; PAM sequence: CTT
tactattttctaagaaaaca

SEQ ID NO: 248017 - DNA, 20 bp, Artificial Sequence
  Description of Artificial Sequence: Synthetic oligonucleotide
  Target: LAMA2; (-) strand; PAM type: YTN; PAM sequence: TTC
tttactattttctaagaaaa

SEQ ID NO: 248018 - DNA, 20 bp, Artificial Sequence
  Description of Artificial Sequence: Synthetic oligonucleotide
  Target: LAMA2; (-) strand; PAM type: YTN; PAM sequence: CTG
ttctttactattttctaaga

SEQ ID NO: 248019 - DNA, 20 bp, Artificial Sequence
  Description of Artificial Sequence: Synthetic oligonucleotide
  Target: LAMA2; (-) strand; PAM type: YTN; PAM sequence: TTA
gaacaaaggagtacaaactg

SEQ ID NO: 248020 - DNA, 20 bp, Artificial Sequence
  Description of Artificial Sequence: Synthetic oligonucleotide
  Target: LAMA2; (-) strand; PAM type: YTN; PAM sequence: TTT
agaacaaaggagtacaaact

SEQ ID NO: 248021 - DNA, 20 bp, Artificial Sequence
  Description of Artificial Sequence: Synthetic oligonucleotide
  Target: LAMA2; (-) strand; PAM type: YTN; PAM sequence: CTT
tagaacaaaggagtacaaac

SEQ ID NO: 248022 - DNA, 20 bp, Artificial Sequence
  Description of Artificial Sequence: Synthetic oligonucleotide
  Target: LAMA2; (-) strand; PAM type: YTN; PAM sequence: CTA
taggtaccctttagaacaaa

SEQ ID NO: 248023 - DNA, 20 bp, Artificial Sequence
  Description of Artificial Sequence: Synthetic oligonucleotide
  Target: LAMA2; (-) strand; PAM type: YTN; PAM sequence: TTC
ccataaactataggtaccct

SEQ ID NO: 248024 - DNA, 20 bp, Artificial Sequence
  Description of Artificial Sequence: Synthetic oligonucleotide
  Target: LAMA2; (-) strand; PAM type: YTN; PAM sequence: TTC
cccaattcccataaactata

SEQ ID NO: 248025 - DNA, 20 bp, Artificial Sequence
  Description of Artificial Sequence: Synthetic oligonucleotide
  Target: LAMA2; (-) strand; PAM type: YTN; PAM sequence: CTA
agttccccaattcccataaa

SEQ ID NO: 248026 - DNA, 20 bp, Artificial Sequence
  Description of Artificial Sequence: Synthetic oligonucleotide
  Target: LAMA2; (-) strand; PAM type: YTN; PAM sequence: CTA
ctaagttccccaattcccat

SEQ ID NO: 248027 - DNA, 20 bp, Artificial Sequence
  Description of Artificial Sequence: Synthetic oligonucleotide
  Target: LAMA2; (-) strand; PAM type: YTN; PAM sequence: TTC
tactaagttccccaattccc

SEQ ID NO: 248028 - DNA, 20 bp, Artificial Sequence
  Description of Artificial Sequence: Synthetic oligonucleotide
  Target: LAMA2; (-) strand; PAM type: YTN; PAM sequence: TTT
ctactaagttccccaattcc

SEQ ID NO: 248029 - DNA, 20 bp, Artificial Sequence
  Description of Artificial Sequence: Synthetic oligonucleotide
  Target: LAMA2; (-) strand; PAM type: YTN; PAM sequence: TTT
tctactaagttccccaattc

SEQ ID NO: 248030 - DNA, 20 bp, Artificial Sequence
  Description of Artificial Sequence: Synthetic oligonucleotide
  Target: LAMA2; (-) strand; PAM type: YTN; PAM sequence: TTT
ttctactaagttccccaatt

SEQ ID NO: 248031 - DNA, 20 bp, Artificial Sequence
  Description of Artificial Sequence: Synthetic oligonucleotide
  Target: LAMA2; (-) strand; PAM type: YTN; PAM sequence: TTG
gtgatttttctactaagttc

SEQ ID NO: 248032 - DNA, 20 bp, Artificial Sequence
  Description of Artificial Sequence: Synthetic oligonucleotide
  Target: LAMA2; (-) strand; PAM type: YTN; PAM sequence: TTA
tgagaaacatgagagcgttg

SEQ ID NO: 248033 - DNA, 20 bp, Artificial Sequence
  Description of Artificial Sequence: Synthetic oligonucleotide
  Target: LAMA2; (-) strand; PAM type: YTN; PAM sequence: TTT
atgagaaacatgagagcgtt

SEQ ID NO: 248034 - DNA, 20 bp, Artificial Sequence
  Description of Artificial Sequence: Synthetic oligonucleotide
  Target: LAMA2; (-) strand; PAM type: YTN; PAM sequence: TTT
tatgagaaacatgagagcgt

SEQ ID NO: 248035 - DNA, 20 bp, Artificial Sequence
  Description of Artificial Sequence: Synthetic oligonucleotide
  Target: LAMA2; (-) strand; PAM type: YTN; PAM sequence: TTT
ttatgagaaacatgagagcg

SEQ ID NO: 248036 - DNA, 20 bp, Artificial Sequence
  Description of Artificial Sequence: Synthetic oligonucleotide
  Target: LAMA2; (-) strand; PAM type: YTN; PAM sequence: TTT
tttatgagaaacatgagagc

SEQ ID NO: 248037 - DNA, 20 bp, Artificial Sequence
  Description of Artificial Sequence: Synthetic oligonucleotide
  Target: LAMA2; (-) strand; PAM type: YTN; PAM sequence: CTG
agcattttttatgagaaaca

SEQ ID NO: 248038 - DNA, 20 bp, Artificial Sequence
  Description of Artificial Sequence: Synthetic oligonucleotide
  Target: LAMA2; (-) strand; PAM type: YTN; PAM sequence: TTC
caaataaagctgagcatttt

SEQ ID NO: 248039 - DNA, 20 bp, Artificial Sequence
  Description of Artificial Sequence: Synthetic oligonucleotide
  Target: LAMA2; (-) strand; PAM type: YTN; PAM sequence: TTT
ccaaataaagctgagcattt

SEQ ID NO: 248040 - DNA, 20 bp, Artificial Sequence
  Description of Artificial Sequence: Synthetic oligonucleotide
  Target: LAMA2; (-) strand; PAM type: YTN; PAM sequence: TTA
acccaaaagaggaaggagaa

SEQ ID NO: 248041 - DNA, 20 bp, Artificial Sequence
  Description of Artificial Sequence: Synthetic oligonucleotide
  Target: LAMA2; (-) strand; PAM type: YTN; PAM sequence: TTT
aacccaaaagaggaaggaga

SEQ ID NO: 248042 - DNA, 20 bp, Artificial Sequence
  Description of Artificial Sequence: Synthetic oligonucleotide
  Target: LAMA2; (-) strand; PAM type: YTN; PAM sequence: TTT
taacccaaaagaggaaggag

SEQ ID NO: 248043 - DNA, 20 bp, Artificial Sequence
  Description of Artificial Sequence: Synthetic oligonucleotide
  Target: LAMA2; (-) strand; PAM type: YTN; PAM sequence: TTT
ttaacccaaaagaggaagga

SEQ ID NO: 248044 - DNA, 20 bp, Artificial Sequence
  Description of Artificial Sequence: Synthetic oligonucleotide
  Target: LAMA2; (-) strand; PAM type: YTN; PAM sequence: CTT
tttaacccaaaagaggaagg

SEQ ID NO: 248045 - DNA, 20 bp, Artificial Sequence
  Description of Artificial Sequence: Synthetic oligonucleotide
  Target: LAMA2; (-) strand; PAM type: YTN; PAM sequence: CTG
tggcctttttaacccaaaag

SEQ ID NO: 248046 - DNA, 20 bp, Artificial Sequence
  Description of Artificial Sequence: Synthetic oligonucleotide
  Target: LAMA2; (-) strand; PAM type: YTN; PAM sequence: TTC
atcacacatataagtaggtc

SEQ ID NO: 248047 - DNA, 20 bp, Artificial Sequence
  Description of Artificial Sequence: Synthetic oligonucleotide
  Target: LAMA2; (-) strand; PAM type: YTN; PAM sequence: TTT
catcacacatataagtaggt

SEQ ID NO: 248048 - DNA, 20 bp, Artificial Sequence
  Description of Artificial Sequence: Synthetic oligonucleotide
  Target: LAMA2; (-) strand; PAM type: YTN; PAM sequence: CTG
cacatttcatcacacatata

SEQ ID NO: 248049 - DNA, 20 bp, Artificial Sequence
  Description of Artificial Sequence: Synthetic oligonucleotide
  Target: LAMA2; (-) strand; PAM type: YTN; PAM sequence: TTG
gcagagtctgcacatttcat

SEQ ID NO: 248050 - DNA, 20 bp, Artificial Sequence
  Description of Artificial Sequence: Synthetic oligonucleotide
  Target: LAMA2; (-) strand; PAM type: YTN; PAM sequence: CTT
ggcagagtctgcacatttca

SEQ ID NO: 248051 - DNA, 20 bp, Artificial Sequence
  Description of Artificial Sequence: Synthetic oligonucleotide
  Target: LAMA2; (-) strand; PAM type: YTN; PAM sequence: TTA
gaataaatagccttggcaga

SEQ ID NO: 248052 - DNA, 20 bp, Artificial Sequence
  Description of Artificial Sequence: Synthetic oligonucleotide
  Target: LAMA2; (-) strand; PAM type: YTN; PAM sequence: TTG
agtagataaatcattagaat

SEQ ID NO: 248053 - DNA, 20 bp, Artificial Sequence
  Description of Artificial Sequence: Synthetic oligonucleotide
  Target: LAMA2; (-) strand; PAM type: YTN; PAM sequence: CTT
gagtagataaatcattagaa

SEQ ID NO: 248054 - DNA, 20 bp, Artificial Sequence
  Description of Artificial Sequence: Synthetic oligonucleotide
  Target: LAMA2; (-) strand; PAM type: YTN; PAM sequence: TTA
tcttgagtagataaatcatt

SEQ ID NO: 248055 - DNA, 20 bp, Artificial Sequence
  Description of Artificial Sequence: Synthetic oligonucleotide
  Target: LAMA2; (-) strand; PAM type: YTN; PAM sequence: TTT
atcttgagtagataaatcat

SEQ ID NO: 248056 - DNA, 20 bp, Artificial Sequence
  Description of Artificial Sequence: Synthetic oligonucleotide
  Target: LAMA2; (-) strand; PAM type: YTN; PAM sequence: TTT
tatcttgagtagataaatca

SEQ ID NO: 248057 - DNA, 20 bp, Artificial Sequence
  Description of Artificial Sequence: Synthetic oligonucleotide
  Target: LAMA2; (-) strand; PAM type: YTN; PAM sequence: TTT
ttatcttgagtagataaatc

SEQ ID NO: 248058 - DNA, 20 bp, Artificial Sequence
  Description of Artificial Sequence: Synthetic oligonucleotide
  Target: LAMA2; (-) strand; PAM type: YTN; PAM sequence: CTT
tttatcttgagtagataaat

SEQ ID NO: 248059 - DNA, 20 bp, Artificial Sequence
  Description of Artificial Sequence: Synthetic oligonucleotide
  Target: LAMA2; (-) strand; PAM type: YTN; PAM sequence: TTC
tttttatcttgagtagataa

SEQ ID NO: 248060 - DNA, 20 bp, Artificial Sequence
  Description of Artificial Sequence: Synthetic oligonucleotide
  Target: LAMA2; (-) strand; PAM type: YTN; PAM sequence: TTT
ctttttatcttgagtagata

SEQ ID NO: 248061 - DNA, 20 bp, Artificial Sequence
  Description of Artificial Sequence: Synthetic oligonucleotide
  Target: LAMA2; (-) strand; PAM type: YTN; PAM sequence: TTA
tttctttttatcttgagtag

SEQ ID NO: 248062 - DNA, 20 bp, Artificial Sequence
  Description of Artificial Sequence: Synthetic oligonucleotide
  Target: LAMA2; (-) strand; PAM type: YTN; PAM sequence: TTT
atttctttttatcttgagta

SEQ ID NO: 248063 - DNA, 20 bp, Artificial Sequence
  Description of Artificial Sequence: Synthetic oligonucleotide
  Target: LAMA2; (-) strand; PAM type: YTN; PAM sequence: CTT
tatttctttttatcttgagt

SEQ ID NO: 248064 - DNA, 20 bp, Artificial Sequence
  Description of Artificial Sequence: Synthetic oligonucleotide
  Target: LAMA2; (-) strand; PAM type: YTN; PAM sequence: TTC
actttatttctttttatctt

SEQ ID NO: 248065 - DNA, 20 bp, Artificial Sequence
  Description of Artificial Sequence: Synthetic oligonucleotide
  Target: LAMA2; (-) strand; PAM type: YTN; PAM sequence: CTT
cactttatttctttttatct

SEQ ID NO: 248066 - DNA, 20 bp, Artificial Sequence
  Description of Artificial Sequence: Synthetic oligonucleotide
  Target: LAMA2; (-) strand; PAM type: YTN; PAM sequence: TTG
tcttcactttatttcttttt

SEQ ID NO: 248067 - DNA, 20 bp, Artificial Sequence
  Description of Artificial Sequence: Synthetic oligonucleotide
  Target: LAMA2; (-) strand; PAM type: YTN; PAM sequence: TTT
gtcttcactttatttctttt

SEQ ID NO: 248068 - DNA, 20 bp, Artificial Sequence
  Description of Artificial Sequence: Synthetic oligonucleotide
  Target: LAMA2; (-) strand; PAM type: YTN; PAM sequence: TTC
agatttgtcttcactttatt

SEQ ID NO: 248069 - DNA, 20 bp, Artificial Sequence
  Description of Artificial Sequence: Synthetic oligonucleotide
  Target: LAMA2; (-) strand; PAM type: YTN; PAM sequence: TTT
cagatttgtcttcactttat

SEQ ID NO: 248070 - DNA, 20 bp, Artificial Sequence
  Description of Artificial Sequence: Synthetic oligonucleotide
  Target: LAMA2; (-) strand; PAM type: YTN; PAM sequence: TTG
cacagtatttcagatttgtc

SEQ ID NO: 248071 - DNA, 20 bp, Artificial Sequence
  Description of Artificial Sequence: Synthetic oligonucleotide
  Target: LAMA2; (-) strand; PAM type: YTN; PAM sequence: TTC
aagtaagtacattgcacagt

SEQ ID NO: 248072 - DNA, 20 bp, Artificial Sequence
  Description of Artificial Sequence: Synthetic oligonucleotide
  Target: LAMA2; (-) strand; PAM type: YTN; PAM sequence: TTT
caagtaagtacattgcacag

SEQ ID NO: 248073 - DNA, 20 bp, Artificial Sequence
  Description of Artificial Sequence: Synthetic oligonucleotide
  Target: LAMA2; (-) strand; PAM type: YTN; PAM sequence: CTT
tcaagtaagtacattgcaca

SEQ ID NO: 248074 - DNA, 20 bp, Artificial Sequence
  Description of Artificial Sequence: Synthetic oligonucleotide
  Target: LAMA2; (-) strand; PAM type: YTN; PAM sequence: CTG
ctttcaagtaagtacattgc

SEQ ID NO: 248075 - DNA, 20 bp, Artificial Sequence
  Description of Artificial Sequence: Synthetic oligonucleotide
  Target: LAMA2; (-) strand; PAM type: YTN; PAM sequence: TTA
ctgctttcaagtaagtacat

SEQ ID NO: 248076 - DNA, 20 bp, Artificial Sequence
  Description of Artificial Sequence: Synthetic oligonucleotide
  Target: LAMA2; (-) strand; PAM type: YTN; PAM sequence: CTT
actgctttcaagtaagtaca

SEQ ID NO: 248077 - DNA, 20 bp, Artificial Sequence
  Description of Artificial Sequence: Synthetic oligonucleotide
  Target: LAMA2; (-) strand; PAM type: YTN; PAM sequence: CTA
acatgagaacttactgcttt

SEQ ID NO: 248078 - DNA, 20 bp, Artificial Sequence
  Description of Artificial Sequence: Synthetic oligonucleotide
  Target: LAMA2; (-) strand; PAM type: YTN; PAM sequence: TTC
taacatgagaacttactgct

SEQ ID NO: 248079 - DNA, 20 bp, Artificial Sequence
  Description of Artificial Sequence: Synthetic oligonucleotide
  Target: LAMA2; (-) strand; PAM type: YTN; PAM sequence: TTT
ctaacatgagaacttactgc

SEQ ID NO: 248080 - DNA, 20 bp, Artificial Sequence
  Description of Artificial Sequence: Synthetic oligonucleotide
  Target: LAMA2; (-) strand; PAM type: YTN; PAM sequence: TTT
tctaacatgagaacttactg

SEQ ID NO: 248081 - DNA, 20 bp, Artificial Sequence
  Description of Artificial Sequence: Synthetic oligonucleotide
  Target: LAMA2; (-) strand; PAM type: YTN; PAM sequence: TTA
atagggaaattttctaacat

SEQ ID NO: 248082 - DNA, 20 bp, Artificial Sequence
  Description of Artificial Sequence: Synthetic oligonucleotide
  Target: LAMA2; (-) strand; PAM type: YTN; PAM sequence: CTT
aatagggaaattttctaaca

SEQ ID NO: 248083 - DNA, 20 bp, Artificial Sequence
  Description of Artificial Sequence: Synthetic oligonucleotide
  Target: LAMA2; (-) strand; PAM type: YTN; PAM sequence: TTG
cttaatagggaaattttcta

SEQ ID NO: 248084 - DNA, 20 bp, Artificial Sequence
  Description of Artificial Sequence: Synthetic oligonucleotide
  Target: LAMA2; (-) strand; PAM type: YTN; PAM sequence: CTT
gcttaatagggaaattttct

SEQ ID NO: 248085 - DNA, 20 bp, Artificial Sequence
  Description of Artificial Sequence: Synthetic oligonucleotide
  Target: LAMA2; (-) strand; PAM type: YTN; PAM sequence: TTC
ttgcttaatagggaaatttt

SEQ ID NO: 248086 - DNA, 20 bp, Artificial Sequence
  Description of Artificial Sequence: Synthetic oligonucleotide
  Target: LAMA2; (-) strand; PAM type: YTN; PAM sequence: TTT
cttgcttaatagggaaattt

SEQ ID NO: 248087 - DNA, 20 bp, Artificial Sequence
  Description of Artificial Sequence: Synthetic oligonucleotide
  Target: LAMA2; (-) strand; PAM type: YTN; PAM sequence: TTC
aagatttcttgcttaatagg

SEQ ID NO: 248088 - DNA, 20 bp, Artificial Sequence
  Description of Artificial Sequence: Synthetic oligonucleotide
  Target: LAMA2; (-) strand; PAM type: YTN; PAM sequence: TTA
atgaagtgttcaagatttct

SEQ ID NO: 248089 - DNA, 20 bp, Artificial Sequence
  Description of Artificial Sequence: Synthetic oligonucleotide
  Target: LAMA2; (-) strand; PAM type: YTN; PAM sequence: TTT
aatgaagtgttcaagatttc

SEQ ID NO: 248090 - DNA, 20 bp, Artificial Sequence
  Description of Artificial Sequence: Synthetic oligonucleotide
  Target: LAMA2; (-) strand; PAM type: YTN; PAM sequence: CTT
taatgaagtgttcaagattt

SEQ ID NO: 248091 - DNA, 20 bp, Artificial Sequence
  Description of Artificial Sequence: Synthetic oligonucleotide
  Target: LAMA2; (-) strand; PAM type: YTN; PAM sequence: TTA
aatgataataaaaatcagat

SEQ ID NO: 248092 - DNA, 20 bp, Artificial Sequence
  Description of Artificial Sequence: Synthetic oligonucleotide
  Target: LAMA2; (-) strand; PAM type: YTN; PAM sequence: CTT
aaatgataataaaaatcaga

SEQ ID NO: 248093 - DNA, 20 bp, Artificial Sequence
  Description of Artificial Sequence: Synthetic oligonucleotide
  Target: LAMA2; (-) strand; PAM type: YTN; PAM sequence: CTG
acttaaatgataataaaaat

SEQ ID NO: 248094 - DNA, 20 bp, Artificial Sequence
  Description of Artificial Sequence: Synthetic oligonucleotide
  Target: LAMA2; (-) strand; PAM type: YTN; PAM sequence: TTC
cctgacttaaatgataataa

SEQ ID NO: 248095 - DNA, 20 bp, Artificial Sequence
  Description of Artificial Sequence: Synthetic oligonucleotide
  Target: LAMA2; (-) strand; PAM type: YTN; PAM sequence: CTA
aaattccctgacttaaatga

SEQ ID NO: 248096 - DNA, 20 bp, Artificial Sequence
  Description of Artificial Sequence: Synthetic oligonucleotide
  Target: LAMA2; (-) strand; PAM type: YTN; PAM sequence: TTC
taaaattccctgacttaaat

SEQ ID NO: 248097 - DNA, 20 bp, Artificial Sequence
  Description of Artificial Sequence: Synthetic oligonucleotide
  Target: LAMA2; (-) strand; PAM type: YTN; PAM sequence: TTA
gttctaaaattccctgactt

SEQ ID NO: 248098 - DNA, 20 bp, Artificial Sequence
  Description of Artificial Sequence: Synthetic oligonucleotide
  Target: LAMA2; (-) strand; PAM type: YTN; PAM sequence: TTT
agttctaaaattccctgact

SEQ ID NO: 248099 - DNA, 20 bp, Artificial Sequence
  Description of Artificial Sequence: Synthetic oligonucleotide
  Target: LAMA2; (-) strand; PAM type: YTN; PAM sequence: TTG
acacatttagttctaaaatt

SEQ ID NO: 248100 - DNA, 20 bp, Artificial Sequence
  Description of Artificial Sequence: Synthetic oligonucleotide
  Target: LAMA2; (-) strand; PAM type: YTN; PAM sequence: TTA
taattgacacatttagttct

SEQ ID NO: 248101 - DNA, 20 bp, Artificial Sequence
  Description of Artificial Sequence: Synthetic oligonucleotide
  Target: LAMA2; (-) strand; PAM type: YTN; PAM sequence: TTT
ataattgacacatttagttc

SEQ ID NO: 248102 - DNA, 20 bp, Artificial Sequence
  Description of Artificial Sequence: Synthetic oligonucleotide
  Target: LAMA2; (-) strand; PAM type: YTN; PAM sequence: TTT
tataattgacacatttagtt

SEQ ID NO: 248103 - DNA, 20 bp, Artificial Sequence
  Description of Artificial Sequence: Synthetic oligonucleotide
  Target: LAMA2; (-) strand; PAM type: YTN; PAM sequence: CTA
tacatatgtacagttttata

SEQ ID NO: 248104 - DNA, 20 bp, Artificial Sequence
  Description of Artificial Sequence: Synthetic oligonucleotide
  Target: LAMA2; (-) strand; PAM type: YTN; PAM sequence: TTG
gaggctatacatatgtacag

SEQ ID NO: 248105 - DNA, 20 bp, Artificial Sequence
  Description of Artificial Sequence: Synthetic oligonucleotide
  Target: LAMA2; (-) strand; PAM type: YTN; PAM sequence: TTT
ggaggctatacatatgtaca

SEQ ID NO: 248106 - DNA, 20 bp, Artificial Sequence
  Description of Artificial Sequence: Synthetic oligonucleotide
  Target: LAMA2; (-) strand; PAM type: YTN; PAM sequence: TTT
tggaggctatacatatgtac

SEQ ID NO: 248107 - DNA, 20 bp, Artificial Sequence
  Description of Artificial Sequence: Synthetic oligonucleotide
  Target: LAMA2; (-) strand; PAM type: YTN; PAM sequence: TTA
acacattttggaggctatac

SEQ ID NO: 248108 - DNA, 20 bp, Artificial Sequence
  Description of Artificial Sequence: Synthetic oligonucleotide
  Target: LAMA2; (-) strand; PAM type: YTN; PAM sequence: TTT
aacacattttggaggctata

SEQ ID NO: 248109 - DNA, 20 bp, Artificial Sequence
  Description of Artificial Sequence: Synthetic oligonucleotide
  Target: LAMA2; (-) strand; PAM type: YTN; PAM sequence: CTA
atgtttaacacattttggag

SEQ ID NO: 248110 - DNA, 20 bp, Artificial Sequence
  Description of Artificial Sequence: Synthetic oligonucleotide
  Target: LAMA2; (-) strand; PAM type: YTN; PAM sequence: TTC
atatgaactaatgtttaaca

SEQ ID NO: 248111 - DNA, 20 bp, Artificial Sequence
  Description of Artificial Sequence: Synthetic oligonucleotide
  Target: LAMA2; (-) strand; PAM type: YTN; PAM sequence: TTG
agattcatatgaactaatgt

SEQ ID NO: 248112 - DNA, 20 bp, Artificial Sequence
  Description of Artificial Sequence: Synthetic oligonucleotide
  Target: LAMA2; (-) strand; PAM type: YTN; PAM sequence: TTT
gagattcatatgaactaatg

SEQ ID NO: 248113 - DNA, 20 bp, Artificial Sequence
  Description of Artificial Sequence: Synthetic oligonucleotide
  Target: LAMA2; (-) strand; PAM type: YTN; PAM sequence: TTT
tgagattcatatgaactaat

SEQ ID NO: 248114 - DNA, 20 bp, Artificial Sequence
  Description of Artificial Sequence: Synthetic oligonucleotide
  Target: LAMA2; (-) strand; PAM type: YTN; PAM sequence: TTA
cagtattttgagattcatat

SEQ ID NO: 248115 - DNA, 20 bp, Artificial Sequence
  Description of Artificial Sequence: Synthetic oligonucleotide
  Target: LAMA2; (-) strand; PAM type: YTN; PAM sequence: CTG
tgttacagtattttgagatt

SEQ ID NO: 248116 - DNA, 20 bp, Artificial Sequence
  Description of Artificial Sequence: Synthetic oligonucleotide
  Target: LAMA2; (-) strand; PAM type: YTN; PAM sequence: TTA
ctgtgttacagtattttgag

SEQ ID NO: 248117 - DNA, 20 bp, Artificial Sequence
  Description of Artificial Sequence: Synthetic oligonucleotide
  Target: LAMA2; (-) strand; PAM type: YTN; PAM sequence: TTT
actgtgttacagtattttga

SEQ ID NO: 248118 - DNA, 20 bp, Artificial Sequence
  Description of Artificial Sequence: Synthetic oligonucleotide
  Target: LAMA2; (-) strand; PAM type: YTN; PAM sequence: TTT
tactgtgttacagtattttg

SEQ ID NO: 248119 - DNA, 20 bp, Artificial Sequence
  Description of Artificial Sequence: Synthetic oligonucleotide
  Target: LAMA2; (-) strand; PAM type: YTN; PAM sequence: CTC
attttactgtgttacagtat

SEQ ID NO: 248120 - DNA, 20 bp, Artificial Sequence
  Description of Artificial Sequence: Synthetic oligonucleotide
  Target: LAMA2; (-) strand; PAM type: YTN; PAM sequence: TTG
ctcattttactgtgttacag

SEQ ID NO: 248121 - DNA, 20 bp, Artificial Sequence
  Description of Artificial Sequence: Synthetic oligonucleotide
  Target: LAMA2; (-) strand; PAM type: YTN; PAM sequence: CTT
gctcattttactgtgttaca

SEQ ID NO: 248122 - DNA, 20 bp, Artificial Sequence
  Description of Artificial Sequence: Synthetic oligonucleotide
  Target: LAMA2; (-) strand; PAM type: YTN; PAM sequence: TTC
ttgctcattttactgtgtta

SEQ ID NO: 248123 - DNA, 20 bp, Artificial Sequence
  Description of Artificial Sequence: Synthetic oligonucleotide
  Target: LAMA2; (-) strand; PAM type: YTN; PAM sequence: TTT
cttgctcattttactgtgtt

SEQ ID NO: 248124 - DNA, 20 bp, Artificial Sequence
  Description of Artificial Sequence: Synthetic oligonucleotide
  Target: LAMA2; (-) strand; PAM type: YTN; PAM sequence: TTT
tcttgctcattttactgtgt

SEQ ID NO: 248125 - DNA, 20 bp, Artificial Sequence
  Description of Artificial Sequence: Synthetic oligonucleotide
  Target: LAMA2; (-) strand; PAM type: YTN; PAM sequence: TTC
aaaaattttcttgctcattt

SEQ ID NO: 248126 - DNA, 20 bp, Artificial Sequence
  Description of Artificial Sequence: Synthetic oligonucleotide
  Target: LAMA2; (-) strand; PAM type: YTN; PAM sequence: TTT
caaaaattttcttgctcatt

SEQ ID NO: 248127 - DNA, 20 bp, Artificial Sequence
  Description of Artificial Sequence: Synthetic oligonucleotide
  Target: LAMA2; (-) strand; PAM type: YTN; PAM sequence: CTG
tgcaaatttcaaaaattttc

SEQ ID NO: 248128 - DNA, 20 bp, Artificial Sequence
  Description of Artificial Sequence: Synthetic oligonucleotide
  Target: LAMA2; (-) strand; PAM type: YTN; PAM sequence: CTA
ctgtgcaaatttcaaaaatt

SEQ ID NO: 248129 - DNA, 20 bp, Artificial Sequence
  Description of Artificial Sequence: Synthetic oligonucleotide
  Target: LAMA2; (-) strand; PAM type: YTN; PAM sequence: CTC
tactgtgcaaatttcaaaaa

SEQ ID NO: 248130 - DNA, 20 bp, Artificial Sequence
  Description of Artificial Sequence: Synthetic oligonucleotide
  Target: LAMA2; (-) strand; PAM type: YTN; PAM sequence: TTA
acagcatcgtctctactgtg

SEQ ID NO: 248131 - DNA, 20 bp, Artificial Sequence
  Description of Artificial Sequence: Synthetic oligonucleotide
  Target: LAMA2; (-) strand; PAM type: YTN; PAM sequence: CTC
ggtgaacattaacagcatcg

SEQ ID NO: 248132 - DNA, 20 bp, Artificial Sequence
  Description of Artificial Sequence: Synthetic oligonucleotide
  Target: LAMA2; (-) strand; PAM type: YTN; PAM sequence: TTA
cctcggtgaacattaacagc

SEQ ID NO: 248133 - DNA, 20 bp, Artificial Sequence
  Description of Artificial Sequence: Synthetic oligonucleotide
  Target: LAMA2; (-) strand; PAM type: YTN; PAM sequence: TTT
acctcggtgaacattaacag

SEQ ID NO: 248134 - DNA, 20 bp, Artificial Sequence
  Description of Artificial Sequence: Synthetic oligonucleotide
  Target: LAMA2; (-) strand; PAM type: YTN; PAM sequence: TTA
tttacctcggtgaacattaa

SEQ ID NO: 248135 - DNA, 20 bp, Artificial Sequence
  Description of Artificial Sequence: Synthetic oligonucleotide
  Target: LAMA2; (-) strand; PAM type: YTN; PAM sequence: TTG
gacaaattatttacctcggt

SEQ ID NO: 248136 - DNA, 20 bp, Artificial Sequence
  Description of Artificial Sequence: Synthetic oligonucleotide
  Target: LAMA2; (-) strand; PAM type: YTN; PAM sequence: TTT
ggacaaattatttacctcgg

SEQ ID NO: 248137 - DNA, 20 bp, Artificial Sequence
  Description of Artificial Sequence: Synthetic oligonucleotide
  Target: LAMA2; (-) strand; PAM type: YTN; PAM sequence: CTT
tggacaaattatttacctcg

SEQ ID NO: 248138 - DNA, 20 bp, Artificial Sequence
  Description of Artificial Sequence: Synthetic oligonucleotide
  Target: LAMA2; (-) strand; PAM type: YTN; PAM sequence: CTC
acagaaatagaactttggac

SEQ ID NO: 248139 - DNA, 20 bp, Artificial Sequence
  Description of Artificial Sequence: Synthetic oligonucleotide
  Target: LAMA2; (-) strand; PAM type: YTN; PAM sequence: TTG
agtatctcacagaaatagaa

SEQ ID NO: 248140 - DNA, 20 bp, Artificial Sequence
  Description of Artificial Sequence: Synthetic oligonucleotide
  Target: LAMA2; (-) strand; PAM type: YTN; PAM sequence: CTC
agttgagtatctcacagaaa

SEQ ID NO: 248141 - DNA, 20 bp, Artificial Sequence
  Description of Artificial Sequence: Synthetic oligonucleotide
  Target: LAMA2; (-) strand; PAM type: YTN; PAM sequence: TTA
tgtctcagttgagtatctca

SEQ ID NO: 248142 - DNA, 20 bp, Artificial Sequence
  Description of Artificial Sequence: Synthetic oligonucleotide
  Target: LAMA2; (-) strand; PAM type: YTN; PAM sequence: CTG
agattatgtctcagttgagt

SEQ ID NO: 248143 - DNA, 20 bp, Artificial Sequence
  Description of Artificial Sequence: Synthetic oligonucleotide
  Target: LAMA2; (-) strand; PAM type: YTN; PAM sequence: TTA
agaacaaaatgaaaaccaaa

SEQ ID NO: 248144 - DNA, 20 bp, Artificial Sequence
  Description of Artificial Sequence: Synthetic oligonucleotide
  Target: LAMA2; (-) strand; PAM type: YTN; PAM sequence: CTT
aagaacaaaatgaaaaccaa

SEQ ID NO: 248145 - DNA, 20 bp, Artificial Sequence
  Description of Artificial Sequence: Synthetic oligonucleotide
  Target: LAMA2; (-) strand; PAM type: YTN; PAM sequence: TTC
ttaagaacaaaatgaaaacc

SEQ ID NO: 248146 - DNA, 20 bp, Artificial Sequence
  Description of Artificial Sequence: Synthetic oligonucleotide
  Target: LAMA2; (-) strand; PAM type: YTN; PAM sequence: TTT
cttaagaacaaaatgaaaac

SEQ ID NO: 248147 - DNA, 20 bp, Artificial Sequence
  Description of Artificial Sequence: Synthetic oligonucleotide
  Target: LAMA2; (-) strand; PAM type: YTN; PAM sequence: TTG
tttcttaagaacaaaatgaa

SEQ ID NO: 248148 - DNA, 20 bp, Artificial Sequence
  Description of Artificial Sequence: Synthetic oligonucleotide
  Target: LAMA2; (-) strand; PAM type: YTN; PAM sequence: CTT
gtttcttaagaacaaaatga

SEQ ID NO: 248149 - DNA, 20 bp, Artificial Sequence
  Description of Artificial Sequence: Synthetic oligonucleotide
  Target: LAMA2; (-) strand; PAM type: YTN; PAM sequence: TTA
aaaatacttgtttcttaaga

SEQ ID NO: 248150 - DNA, 20 bp, Artificial Sequence
  Description of Artificial Sequence: Synthetic oligonucleotide
  Target: LAMA2; (-) strand; PAM type: YTN; PAM sequence: TTT
aaaaatacttgtttcttaag

SEQ ID NO: 248151 - DNA, 20 bp, Artificial Sequence
  Description of Artificial Sequence: Synthetic oligonucleotide
  Target: LAMA2; (-) strand; PAM type: YTN; PAM sequence: TTT
taaaaatacttgtttcttaa

SEQ ID NO: 248152 - DNA, 20 bp, Artificial Sequence
  Description of Artificial Sequence: Synthetic oligonucleotide
  Target: LAMA2; (-) strand; PAM type: YTN; PAM sequence: TTC
attttaaaaatacttgtttc

SEQ ID NO: 248153 - DNA, 20 bp, Artificial Sequence
  Description of Artificial Sequence: Synthetic oligonucleotide
  Target: LAMA2; (-) strand; PAM type: YTN; PAM sequence: TTT
cattttaaaaatacttgttt

SEQ ID NO: 248154 - DNA, 20 bp, Artificial Sequence
  Description of Artificial Sequence: Synthetic oligonucleotide
  Target: LAMA2; (-) strand; PAM type: YTN; PAM sequence: CTG
ccgaaaccagatgtttcatt

SEQ ID NO: 248155 - DNA, 20 bp, Artificial Sequence
  Description of Artificial Sequence: Synthetic oligonucleotide
  Target: LAMA2; (-) strand; PAM type: YTN; PAM sequence: TTA
gccagcactgccgaaaccag

SEQ ID NO: 248156 - DNA, 20 bp, Artificial Sequence
  Description of Artificial Sequence: Synthetic oligonucleotide
  Target: LAMA2; (-) strand; PAM type: YTN; PAM sequence: CTG
agcattagccagcactgccg

SEQ ID NO: 248157 - DNA, 20 bp, Artificial Sequence
  Description of Artificial Sequence: Synthetic oligonucleotide
  Target: LAMA2; (-) strand; PAM type: YTN; PAM sequence: TTC
tgagcattagccagcactgc

SEQ ID NO: 248158 - DNA, 20 bp, Artificial Sequence
  Description of Artificial Sequence: Synthetic oligonucleotide
  Target: LAMA2; (-) strand; PAM type: YTN; PAM sequence: TTG
aagaaaacaagggaagggag

SEQ ID NO: 248159 - DNA, 20 bp, Artificial Sequence
  Description of Artificial Sequence: Synthetic oligonucleotide
  Target: LAMA2; (-) strand; PAM type: YTN; PAM sequence: TTA
tagaagggtgacattgaaga

SEQ ID NO: 248160 - DNA, 20 bp, Artificial Sequence
  Description of Artificial Sequence: Synthetic oligonucleotide
  Target: LAMA2; (-) strand; PAM type: YTN; PAM sequence: TTT
atagaagggtgacattgaag

SEQ ID NO: 248161 - DNA, 20 bp, Artificial Sequence
  Description of Artificial Sequence: Synthetic oligonucleotide
  Target: LAMA2; (-) strand; PAM type: YTN; PAM sequence: TTT
tatagaagggtgacattgaa

SEQ ID NO: 248162 - DNA, 20 bp, Artificial Sequence
  Description of Artificial Sequence: Synthetic oligonucleotide
  Target: LAMA2; (-) strand; PAM type: YTN; PAM sequence: TTT
ttatagaagggtgacattga

SEQ ID NO: 248163 - DNA, 20 bp, Artificial Sequence
  Description of Artificial Sequence: Synthetic oligonucleotide
  Target: LAMA2; (-) strand; PAM type: YTN; PAM sequence: TTC
agaggtttttatagaagggt

SEQ ID NO: 248164 - DNA, 20 bp, Artificial Sequence
  Description of Artificial Sequence: Synthetic oligonucleotide
  Target: LAMA2; (-) strand; PAM type: YTN; PAM sequence: TTC
agatattcagaggtttttat

SEQ ID NO: 248165 - DNA, 20 bp, Artificial Sequence
  Description of Artificial Sequence: Synthetic oligonucleotide
  Target: LAMA2; (-) strand; PAM type: YTN; PAM sequence: TTA
aaacgtattcagatattcag

SEQ ID NO: 248166 - DNA, 20 bp, Artificial Sequence
  Description of Artificial Sequence: Synthetic oligonucleotide
  Target: LAMA2; (-) strand; PAM type: YTN; PAM sequence: CTT
aaaacgtattcagatattca

SEQ ID NO: 248167 - DNA, 20 bp, Artificial Sequence
  Description of Artificial Sequence: Synthetic oligonucleotide
  Target: LAMA2; (-) strand; PAM type: YTN; PAM sequence: CTC
ttaaaacgtattcagatatt

SEQ ID NO: 248168 - DNA, 20 bp, Artificial Sequence
  Description of Artificial Sequence: Synthetic oligonucleotide
  Target: LAMA2; (-) strand; PAM type: YTN; PAM sequence: TTA
taaggggtgctcttaaaacg

SEQ ID NO: 248169 - DNA, 20 bp, Artificial Sequence
  Description of Artificial Sequence: Synthetic oligonucleotide
  Target: LAMA2; (-) strand; PAM type: YTN; PAM sequence: TTT
ataaggggtgctcttaaaac

SEQ ID NO: 248170 - DNA, 20 bp, Artificial Sequence
  Description of Artificial Sequence: Synthetic oligonucleotide
  Target: LAMA2; (-) strand; PAM type: YTN; PAM sequence: TTT
tataaggggtgctcttaaaa

SEQ ID NO: 248171 - DNA, 20 bp, Artificial Sequence
  Description of Artificial Sequence: Synthetic oligonucleotide
  Target: LAMA2; (-) strand; PAM type: YTN; PAM sequence: CTG
caaaatgaaacataacaaag

SEQ ID NO: 248172 - DNA, 20 bp, Artificial Sequence
  Description of Artificial Sequence: Synthetic oligonucleotide
  Target: LAMA2; (-) strand; PAM type: YTN; PAM sequence: TTG
gcacctgcaaaatgaaacat

SEQ ID NO: 248173 - DNA, 20 bp, Artificial Sequence
  Description of Artificial Sequence: Synthetic oligonucleotide
  Target: LAMA2; (-) strand; PAM type: YTN; PAM sequence: TTT
ggcacctgcaaaatgaaaca

SEQ ID NO: 248174 - DNA, 20 bp, Artificial Sequence
  Description of Artificial Sequence: Synthetic oligonucleotide
  Target: LAMA2; (-) strand; PAM type: YTN; PAM sequence: CTT
tggcacctgcaaaatgaaac

SEQ ID NO: 248175 - DNA, 20 bp, Artificial Sequence
  Description of Artificial Sequence: Synthetic oligonucleotide
  Target: LAMA2; (-) strand; PAM type: YTN; PAM sequence: TTG
tgactttggcacctgcaaaa

SEQ ID NO: 248176 - DNA, 20 bp, Artificial Sequence
  Description of Artificial Sequence: Synthetic oligonucleotide
  Target: LAMA2; (-) strand; PAM type: YTN; PAM sequence: TTT
gtgactttggcacctgcaaa

SEQ ID NO: 248177 - DNA, 20 bp, Artificial Sequence
  Description of Artificial Sequence: Synthetic oligonucleotide
  Target: LAMA2; (-) strand; PAM type: YTN; PAM sequence: CTG
aatgaggtgaaatatttgtg

SEQ ID NO: 248178 - DNA, 20 bp, Artificial Sequence
  Description of Artificial Sequence: Synthetic oligonucleotide
  Target: LAMA2; (-) strand; PAM type: YTN; PAM sequence: CTG
gaatatctgaatgaggtgaa

SEQ ID NO: 248179 - DNA, 20 bp, Artificial Sequence
  Description of Artificial Sequence: Synthetic oligonucleotide
  Target: LAMA2; (-) strand; PAM type: YTN; PAM sequence: CTA
cctggaatatctgaatgagg

SEQ ID NO: 248180 - DNA, 20 bp, Artificial Sequence
  Description of Artificial Sequence: Synthetic oligonucleotide
  Target: LAMA2; (-) strand; PAM type: YTN; PAM sequence: TTA
ctacctggaatatctgaatg

SEQ ID NO: 248181 - DNA, 20 bp, Artificial Sequence
  Description of Artificial Sequence: Synthetic oligonucleotide
  Target: LAMA2; (-) strand; PAM type: YTN; PAM sequence: CTT
actacctggaatatctgaat

SEQ ID NO: 248182 - DNA, 20 bp, Artificial Sequence
  Description of Artificial Sequence: Synthetic oligonucleotide
  Target: LAMA2; (-) strand; PAM type: YTN; PAM sequence: CTC
ataaaaatatcagccttact

SEQ ID NO: 248183 - DNA, 20 bp, Artificial Sequence
  Description of Artificial Sequence: Synthetic oligonucleotide
  Target: LAMA2; (-) strand; PAM type: YTN; PAM sequence: TTG
tcagatgaaatgactcataa

SEQ ID NO: 248184 - DNA, 20 bp, Artificial Sequence
  Description of Artificial Sequence: Synthetic oligonucleotide
  Target: LAMA2; (-) strand; PAM type: YTN; PAM sequence: TTT
gtcagatgaaatgactcata

SEQ ID NO: 248185 - DNA, 20 bp, Artificial Sequence
  Description of Artificial Sequence: Synthetic oligonucleotide
  Target: LAMA2; (-) strand; PAM type: YTN; PAM sequence: TTT
tgtcagatgaaatgactcat

SEQ ID NO: 248186 - DNA, 20 bp, Artificial Sequence
  Description of Artificial Sequence: Synthetic oligonucleotide
  Target: LAMA2; (-) strand; PAM type: YTN; PAM sequence: TTA
attttgtcagatgaaatgac

SEQ ID NO: 248187 - DNA, 20 bp, Artificial Sequence
  Description of Artificial Sequence: Synthetic oligonucleotide
  Target: LAMA2; (-) strand; PAM type: YTN; PAM sequence: TTA
aattaattttgtcagatgaa

SEQ ID NO: 248188 - DNA, 20 bp, Artificial Sequence
  Description of Artificial Sequence: Synthetic oligonucleotide
  Target: LAMA2; (-) strand; PAM type: YTN; PAM sequence: CTT
aaattaattttgtcagatga

SEQ ID NO: 248189 - DNA, 20 bp, Artificial Sequence
  Description of Artificial Sequence: Synthetic oligonucleotide
  Target: LAMA2; (-) strand; PAM type: YTN; PAM sequence: TTC
ttaaattaattttgtcagat

SEQ ID NO: 248190 - DNA, 20 bp, Artificial Sequence
  Description of Artificial Sequence: Synthetic oligonucleotide
  Target: LAMA2; (-) strand; PAM type: YTN; PAM sequence: TTA
ttcttaaattaattttgtca

SEQ ID NO: 248191 - DNA, 20 bp, Artificial Sequence
  Description of Artificial Sequence: Synthetic oligonucleotide
  Target: LAMA2; (-) strand; PAM type: YTN; PAM sequence: TTT
attcttaaattaattttgtc

SEQ ID NO: 248192 - DNA, 20 bp, Artificial Sequence
  Description of Artificial Sequence: Synthetic oligonucleotide
  Target: LAMA2; (-) strand; PAM type: YTN; PAM sequence: TTA
tttattcttaaattaatttt

SEQ ID NO: 248193 - DNA, 20 bp, Artificial Sequence
  Description of Artificial Sequence: Synthetic oligonucleotide
  Target: LAMA2; (-) strand; PAM type: YTN; PAM sequence: TTC
aatgttatttattcttaaat

SEQ ID NO: 248194 - DNA, 20 bp, Artificial Sequence
  Description of Artificial Sequence: Synthetic oligonucleotide
  Target: LAMA2; (-) strand; PAM type: YTN; PAM sequence: TTT
caatgttatttattcttaaa

SEQ ID NO: 248195 - DNA, 20 bp, Artificial Sequence
  Description of Artificial Sequence: Synthetic oligonucleotide
  Target: LAMA2; (-) strand; PAM type: YTN; PAM sequence: CTA
tttcaatgttatttattctt

SEQ ID NO: 248196 - DNA, 20 bp, Artificial Sequence
  Description of Artificial Sequence: Synthetic oligonucleotide
  Target: LAMA2; (-) strand; PAM type: YTN; PAM sequence: TTA
ctatttcaatgttatttatt

SEQ ID NO: 248197 - DNA, 20 bp, Artificial Sequence
  Description of Artificial Sequence: Synthetic oligonucleotide
  Target: LAMA2; (-) strand; PAM type: YTN; PAM sequence: CTT
actatttcaatgttatttat

SEQ ID NO: 248198 - DNA, 20 bp, Artificial Sequence
  Description of Artificial Sequence: Synthetic oligonucleotide
  Target: LAMA2; (-) strand; PAM type: YTN; PAM sequence: CTA
cttactatttcaatgttatt

SEQ ID NO: 248199 - DNA, 20 bp, Artificial Sequence
  Description of Artificial Sequence: Synthetic oligonucleotide
  Target: LAMA2; (-) strand; PAM type: YTN; PAM sequence: TTA
agtccaaaatacatgctact

SEQ ID NO: 248200 - DNA, 20 bp, Artificial Sequence
  Description of Artificial Sequence: Synthetic oligonucleotide
  Target: LAMA2; (-) strand; PAM type: YTN; PAM sequence: TTA
aaacatggaagaatagaaat

SEQ ID NO: 248201 - DNA, 20 bp, Artificial Sequence
  Description of Artificial Sequence: Synthetic oligonucleotide
  Target: LAMA2; (-) strand; PAM type: YTN; PAM sequence: CTA
ttaaaacatggaagaataga

SEQ ID NO: 248202 - DNA, 20 bp, Artificial Sequence
  Description of Artificial Sequence: Synthetic oligonucleotide
  Target: LAMA2; (-) strand; PAM type: YTN; PAM sequence: TTA
atctattaaaacatggaaga

SEQ ID NO: 248203 - DNA, 20 bp, Artificial Sequence
  Description of Artificial Sequence: Synthetic oligonucleotide
  Target: LAMA2; (-) strand; PAM type: YTN; PAM sequence: TTA
tatgtgtgtgagtgtgcatg

SEQ ID NO: 248204 - DNA, 20 bp, Artificial Sequence
  Description of Artificial Sequence: Synthetic oligonucleotide
  Target: LAMA2; (-) strand; PAM type: YTN; PAM sequence: CTT
atatgtgtgtgagtgtgcat

SEQ ID NO: 248205 - DNA, 20 bp, Artificial Sequence
  Description of Artificial Sequence: Synthetic oligonucleotide
  Target: LAMA2; (-) strand; PAM type: YTN; PAM sequence: TTG
tataagatgaggaaaaataa

SEQ ID NO: 248206 - DNA, 20 bp, Artificial Sequence
  Description of Artificial Sequence: Synthetic oligonucleotide
  Target: LAMA2; (-) strand; PAM type: YTN; PAM sequence: CTT
gtataagatgaggaaaaata

SEQ ID NO: 248207 - DNA, 20 bp, Artificial Sequence
  Description of Artificial Sequence: Synthetic oligonucleotide
  Target: LAMA2; (-) strand; PAM type: YTN; PAM sequence: TTC
cacttgtataagatgaggaa

SEQ ID NO: 248208 - DNA, 20 bp, Artificial Sequence
  Description of Artificial Sequence: Synthetic oligonucleotide
  Target: LAMA2; (-) strand; PAM type: YTN; PAM sequence: TTT
ccacttgtataagatgagga

SEQ ID NO: 248209 - DNA, 20 bp, Artificial Sequence
  Description of Artificial Sequence: Synthetic oligonucleotide
  Target: LAMA2; (-) strand; PAM type: YTN; PAM sequence: TTA
taatgtgtatagtatgtttc

SEQ ID NO: 248210 - DNA, 20 bp, Artificial Sequence
  Description of Artificial Sequence: Synthetic oligonucleotide
  Target: LAMA2; (-) strand; PAM type: YTN; PAM sequence: CTT
ataatgtgtatagtatgttt

SEQ ID NO: 248211 - DNA, 20 bp, Artificial Sequence
  Description of Artificial Sequence: Synthetic oligonucleotide
  Target: LAMA2; (-) strand; PAM type: YTN; PAM sequence: CTC
ttataatgtgtatagtatgt

SEQ ID NO: 248212 - DNA, 20 bp, Artificial Sequence
  Description of Artificial Sequence: Synthetic oligonucleotide
  Target: LAMA2; (-) strand; PAM type: YTN; PAM sequence: CTG
tgctcttataatgtgtatag

SEQ ID NO: 248213 - DNA, 20 bp, Artificial Sequence
  Description of Artificial Sequence: Synthetic oligonucleotide
  Target: LAMA2; (-) strand; PAM type: YTN; PAM sequence: TTA
tactgtgctcttataatgtg

SEQ ID NO: 248214 - DNA, 20 bp, Artificial Sequence
  Description of Artificial Sequence: Synthetic oligonucleotide
  Target: LAMA2; (-) strand; PAM type: YTN; PAM sequence: TTA
cataaaaattatactgtgct

SEQ ID NO: 248215 - DNA, 20 bp, Artificial Sequence
  Description of Artificial Sequence: Synthetic oligonucleotide
  Target: LAMA2; (-) strand; PAM type: YTN; PAM sequence: TTA
tattacataaaaattatact

SEQ ID NO: 248216 - DNA, 20 bp, Artificial Sequence
  Description of Artificial Sequence: Synthetic oligonucleotide
  Target: LAMA2; (-) strand; PAM type: YTN; PAM sequence: TTC
aaattatattacataaaaat

SEQ ID NO: 248217 - DNA, 20 bp, Artificial Sequence
  Description of Artificial Sequence: Synthetic oligonucleotide
  Target: LAMA2; (-) strand; PAM type: YTN; PAM sequence: CTT
caaattatattacataaaaa

SEQ ID NO: 248218 - DNA, 20 bp, Artificial Sequence
  Description of Artificial Sequence: Synthetic oligonucleotide
  Target: LAMA2; (-) strand; PAM type: YTN; PAM sequence: TTA
acttcaaattatattacata

SEQ ID NO: 248219 - DNA, 20 bp, Artificial Sequence
  Description of Artificial Sequence: Synthetic oligonucleotide
  Target: LAMA2; (-) strand; PAM type: YTN; PAM sequence: CTA
tccaatatggaattaacttc

SEQ ID NO: 248220 - DNA, 20 bp, Artificial Sequence
  Description of Artificial Sequence: Synthetic oligonucleotide
  Target: LAMA2; (-) strand; PAM type: YTN; PAM sequence: TTA
cacatataatgaagaaacta

SEQ ID NO: 248221 - DNA, 20 bp, Artificial Sequence
  Description of Artificial Sequence: Synthetic oligonucleotide
  Target: LAMA2; (-) strand; PAM type: YTN; PAM sequence: CTT
acacatataatgaagaaact

SEQ ID NO: 248222 - DNA, 20 bp, Artificial Sequence
  Description of Artificial Sequence: Synthetic oligonucleotide
  Target: LAMA2; (-) strand; PAM type: YTN; PAM sequence: TTA
catatacttacacatataat

SEQ ID NO: 248223 - DNA, 20 bp, Artificial Sequence
  Description of Artificial Sequence: Synthetic oligonucleotide
  Target: LAMA2; (-) strand; PAM type: YTN; PAM sequence: TTC
aatgaaatacacaatcatag

SEQ ID NO: 248224 - DNA, 20 bp, Artificial Sequence
  Description of Artificial Sequence: Synthetic oligonucleotide
  Target: LAMA2; (-) strand; PAM type: YTN; PAM sequence: TTC
attcaatgaaatacacaatc

SEQ ID NO: 248225 - DNA, 20 bp, Artificial Sequence
  Description of Artificial Sequence: Synthetic oligonucleotide
  Target: LAMA2; (-) strand; PAM type: YTN; PAM sequence: TTG
agtgcattcattcaatgaaa

SEQ ID NO: 248226 - DNA, 20 bp, Artificial Sequence
  Description of Artificial Sequence: Synthetic oligonucleotide
  Target: LAMA2; (-) strand; PAM type: YTN; PAM sequence: TTT
gagtgcattcattcaatgaa

SEQ ID NO: 248227 - DNA, 20 bp, Artificial Sequence
  Description of Artificial Sequence: Synthetic oligonucleotide
  Target: LAMA2; (-) strand; PAM type: YTN; PAM sequence: CTG
aacacgtttgagtgcattca

SEQ ID NO: 248228 - DNA, 20 bp, Artificial Sequence
  Description of Artificial Sequence: Synthetic oligonucleotide
  Target: LAMA2; (-) strand; PAM type: YTN; PAM sequence: TTG
ctgaacacgtttgagtgcat

SEQ ID NO: 248229 - DNA, 20 bp, Artificial Sequence
  Description of Artificial Sequence: Synthetic oligonucleotide
  Target: LAMA2; (-) strand; PAM type: YTN; PAM sequence: CTG
attgctgaacacgtttgagt

SEQ ID NO: 248230 - DNA, 20 bp, Artificial Sequence
  Description of Artificial Sequence: Synthetic oligonucleotide
  Target: LAMA2; (-) strand; PAM type: YTN; PAM sequence: CTG
tgctgattgctgaacacgtt

SEQ ID NO: 248231 - DNA, 20 bp, Artificial Sequence
  Description of Artificial Sequence: Synthetic oligonucleotide
  Target: LAMA2; (-) strand; PAM type: YTN; PAM sequence: CTC
tgtgctgattgctgaacacg

SEQ ID NO: 248232 - DNA, 20 bp, Artificial Sequence
  Description of Artificial Sequence: Synthetic oligonucleotide
  Target: LAMA2; (-) strand; PAM type: YTN; PAM sequence: TTA
acctctgtgctgattgctga

SEQ ID NO: 248233 - DNA, 20 bp, Artificial Sequence
  Description of Artificial Sequence: Synthetic oligonucleotide
  Target: LAMA2; (-) strand; PAM type: YTN; PAM sequence: TTT
aacctctgtgctgattgctg

SEQ ID NO: 248234 - DNA, 20 bp, Artificial Sequence
  Description of Artificial Sequence: Synthetic oligonucleotide
  Target: LAMA2; (-) strand; PAM type: YTN; PAM sequence: CTA
gagtcaatgtttaacctctg

SEQ ID NO: 248235 - DNA, 20 bp, Artificial Sequence
  Description of Artificial Sequence: Synthetic oligonucleotide
  Target: LAMA2; (-) strand; PAM type: YTN; PAM sequence: CTA
gtactagagtcaatgtttaa

SEQ ID NO: 248236 - DNA, 20 bp, Artificial Sequence
  Description of Artificial Sequence: Synthetic oligonucleotide
  Target: LAMA2; (-) strand; PAM type: YTN; PAM sequence: TTC
acagtctagtactagagtca

SEQ ID NO: 248237 - DNA, 20 bp, Artificial Sequence
  Description of Artificial Sequence: Synthetic oligonucleotide
  Target: LAMA2; (-) strand; PAM type: YTN; PAM sequence: CTT
cacagtctagtactagagtc

SEQ ID NO: 248238 - DNA, 20 bp, Artificial Sequence
  Description of Artificial Sequence: Synthetic oligonucleotide
  Target: LAMA2; (-) strand; PAM type: YTN; PAM sequence: TTG
aaccttcacagtctagtact

SEQ ID NO: 248239 - DNA, 20 bp, Artificial Sequence
  Description of Artificial Sequence: Synthetic oligonucleotide
  Target: LAMA2; (-) strand; PAM type: YTN; PAM sequence: TTT
gaaccttcacagtctagtac

SEQ ID NO: 248240 - DNA, 20 bp, Artificial Sequence
  Description of Artificial Sequence: Synthetic oligonucleotide
  Target: LAMA2; (-) strand; PAM type: YTN; PAM sequence: TTA
caaagatggcaggtggtgaa

SEQ ID NO: 248241 - DNA, 20 bp, Artificial Sequence
  Description of Artificial Sequence: Synthetic oligonucleotide
  Target: LAMA2; (-) strand; PAM type: YTN; PAM sequence: TTC
aaggttacaaagatggcagg

SEQ ID NO: 248242 - DNA, 20 bp, Artificial Sequence
  Description of Artificial Sequence: Synthetic oligonucleotide
  Target: LAMA2; (-) strand; PAM type: YTN; PAM sequence: TTG
ttcaaggttacaaagatggc

SEQ ID NO: 248243 - DNA, 20 bp, Artificial Sequence
  Description of Artificial Sequence: Synthetic oligonucleotide
  Target: LAMA2; (-) strand; PAM type: YTN; PAM sequence: CTT
gttcaaggttacaaagatgg

SEQ ID NO: 248244 - DNA, 20 bp, Artificial Sequence
  Description of Artificial Sequence: Synthetic oligonucleotide
  Target: LAMA2; (-) strand; PAM type: YTN; PAM sequence: TTA
cataacttgttcaaggttac

SEQ ID NO: 248245 - DNA, 20 bp, Artificial Sequence
  Description of Artificial Sequence: Synthetic oligonucleotide
  Target: LAMA2; (-) strand; PAM type: YTN; PAM sequence: CTT
acataacttgttcaaggtta

SEQ ID NO: 248246 - DNA, 20 bp, Artificial Sequence
  Description of Artificial Sequence: Synthetic oligonucleotide
  Target: LAMA2; (-) strand; PAM type: YTN; PAM sequence: TTG
agtacttacataacttgttc

SEQ ID NO: 248247 - DNA, 20 bp, Artificial Sequence
  Description of Artificial Sequence: Synthetic oligonucleotide
  Target: LAMA2; (-) strand; PAM type: YTN; PAM sequence: TTG
aagcattgagtacttacata

SEQ ID NO: 248248 - DNA, 20 bp, Artificial Sequence
  Description of Artificial Sequence: Synthetic oligonucleotide
  Target: LAMA2; (-) strand; PAM type: YTN; PAM sequence: TTA
aagatgagggaattgaagca

SEQ ID NO: 248249 - DNA, 20 bp, Artificial Sequence
  Description of Artificial Sequence: Synthetic oligonucleotide
  Target: LAMA2; (-) strand; PAM type: YTN; PAM sequence: TTT
aaagatgagggaattgaagc

SEQ ID NO: 248250 - DNA, 20 bp, Artificial Sequence
  Description of Artificial Sequence: Synthetic oligonucleotide
  Target: LAMA2; (-) strand; PAM type: YTN; PAM sequence: TTT
taaagatgagggaattgaag

SEQ ID NO: 248251 - DNA, 20 bp, Artificial Sequence
  Description of Artificial Sequence: Synthetic oligonucleotide
  Target: LAMA2; (-) strand; PAM type: YTN; PAM sequence: TTG
attttaaagatgagggaatt

SEQ ID NO: 248252 - DNA, 20 bp, Artificial Sequence
  Description of Artificial Sequence: Synthetic oligonucleotide
  Target: LAMA2; (-) strand; PAM type: YTN; PAM sequence: TTA
cattgattttaaagatgagg

SEQ ID NO: 248253 - DNA, 20 bp, Artificial Sequence
  Description of Artificial Sequence: Synthetic oligonucleotide
  Target: LAMA2; (-) strand; PAM type: YTN; PAM sequence: CTG
ttacattgattttaaagatg

SEQ ID NO: 248254 - DNA, 20 bp, Artificial Sequence
  Description of Artificial Sequence: Synthetic oligonucleotide
  Target: LAMA2; (-) strand; PAM type: YTN; PAM sequence: TTA
taactgttacattgatttta

SEQ ID NO: 248255 - DNA, 20 bp, Artificial Sequence
  Description of Artificial Sequence: Synthetic oligonucleotide
  Target: LAMA2; (-) strand; PAM type: YTN; PAM sequence: CTT
ataactgttacattgatttt

SEQ ID NO: 248256 - DNA, 20 bp, Artificial Sequence
  Description of Artificial Sequence: Synthetic oligonucleotide
  Target: LAMA2; (-) strand; PAM type: YTN; PAM sequence: TTA
tgtggtaagaatcttataac

SEQ ID NO: 248257 - DNA, 20 bp, Artificial Sequence
  Description of Artificial Sequence: Synthetic oligonucleotide
  Target: LAMA2; (-) strand; PAM type: YTN; PAM sequence: CTT
atgtggtaagaatcttataa

SEQ ID NO: 248258 - DNA, 20 bp, Artificial Sequence
  Description of Artificial Sequence: Synthetic oligonucleotide
  Target: LAMA2; (-) strand; PAM type: YTN; PAM sequence: CTC
aaaacaccacacacaacctt

SEQ ID NO: 248259 - DNA, 20 bp, Artificial Sequence
  Description of Artificial Sequence: Synthetic oligonucleotide
  Target: LAMA2; (-) strand; PAM type: YTN; PAM sequence: TTC
tcaaaacaccacacacaacc

SEQ ID NO: 248260 - DNA, 20 bp, Artificial Sequence
  Description of Artificial Sequence: Synthetic oligonucleotide
  Target: LAMA2; (-) strand; PAM type: YTN; PAM sequence: TTA
cattctcaaaacaccacaca

SEQ ID NO: 248261 - DNA, 20 bp, Artificial Sequence
  Description of Artificial Sequence: Synthetic oligonucleotide
  Target: LAMA2; (-) strand; PAM type: YTN; PAM sequence: TTC
attacattctcaaaacacca

SEQ ID NO: 248262 - DNA, 20 bp, Artificial Sequence
  Description of Artificial Sequence: Synthetic oligonucleotide
  Target: LAMA2; (-) strand; PAM type: YTN; PAM sequence: TTC
attcattacattctcaaaac

SEQ ID NO: 248263 - DNA, 20 bp, Artificial Sequence
  Description of Artificial Sequence: Synthetic oligonucleotide
  Target: LAMA2; (-) strand; PAM type: YTN; PAM sequence: TTG
gatatgttcattcattacat

SEQ ID NO: 248264 - DNA, 20 bp, Artificial Sequence
  Description of Artificial Sequence: Synthetic oligonucleotide
  Target: LAMA2; (-) strand; PAM type: YTN; PAM sequence: TTT
ggatatgttcattcattaca

SEQ ID NO: 248265 - DNA, 20 bp, Artificial Sequence
  Description of Artificial Sequence: Synthetic oligonucleotide
  Target: LAMA2; (-) strand; PAM type: YTN; PAM sequence: CTT
tggatatgttcattcattac

SEQ ID NO: 248266 - DNA, 20 bp, Artificial Sequence
  Description of Artificial Sequence: Synthetic oligonucleotide
  Target: LAMA2; (-) strand; PAM type: YTN; PAM sequence: CTA
caatgtggctttggatatgt

SEQ ID NO: 248267 - DNA, 20 bp, Artificial Sequence
  Description of Artificial Sequence: Synthetic oligonucleotide
  Target: LAMA2; (-) strand; PAM type: YTN; PAM sequence: CTC
tacaatgtggctttggatat

SEQ ID NO: 248268 - DNA, 20 bp, Artificial Sequence
  Description of Artificial Sequence: Synthetic oligonucleotide
  Target: LAMA2; (-) strand; PAM type: YTN; PAM sequence: CTA
agcactctacaatgtggctt

SEQ ID NO: 248269 - DNA, 20 bp, Artificial Sequence
  Description of Artificial Sequence: Synthetic oligonucleotide
  Target: LAMA2; (-) strand; PAM type: YTN; PAM sequence: TTG
caagtgctaagcactctaca

SEQ ID NO: 248270 - DNA, 20 bp, Artificial Sequence
  Description of Artificial Sequence: Synthetic oligonucleotide
  Target: LAMA2; (-) strand; PAM type: YTN; PAM sequence: TTT
gcaagtgctaagcactctac

SEQ ID NO: 248271 - DNA, 20 bp, Artificial Sequence
  Description of Artificial Sequence: Synthetic oligonucleotide
  Target: LAMA2; (-) strand; PAM type: YTN; PAM sequence: CTT
tgcaagtgctaagcactcta

SEQ ID NO: 248272 - DNA, 20 bp, Artificial Sequence
  Description of Artificial Sequence: Synthetic oligonucleotide
  Target: LAMA2; (-) strand; PAM type: YTN; PAM sequence: TTA
tgctttgcaagtgctaagca

SEQ ID NO: 248273 - DNA, 20 bp, Artificial Sequence
  Description of Artificial Sequence: Synthetic oligonucleotide
  Target: LAMA2; (-) strand; PAM type: YTN; PAM sequence: CTG
acattatgctttgcaagtgc

SEQ ID NO: 248274 - DNA, 20 bp, Artificial Sequence
  Description of Artificial Sequence: Synthetic oligonucleotide
  Target: LAMA2; (-) strand; PAM type: YTN; PAM sequence: CTC
acactgacattatgctttgc

SEQ ID NO: 248275 - DNA, 20 bp, Artificial Sequence
  Description of Artificial Sequence: Synthetic oligonucleotide
  Target: LAMA2; (-) strand; PAM type: YTN; PAM sequence: TTA
aaaatgatgatggaaatgac

SEQ ID NO: 248276 - DNA, 20 bp, Artificial Sequence
  Description of Artificial Sequence: Synthetic oligonucleotide
  Target: LAMA2; (-) strand; PAM type: YTN; PAM sequence: TTA
aacatgttaaaaatgatgat

SEQ ID NO: 248277 - DNA, 20 bp, Artificial Sequence
  Description of Artificial Sequence: Synthetic oligonucleotide
  Target: LAMA2; (-) strand; PAM type: YTN; PAM sequence: TTG
caattaaacatgttaaaaat

SEQ ID NO: 248278 - DNA, 20 bp, Artificial Sequence
  Description of Artificial Sequence: Synthetic oligonucleotide
  Target: LAMA2; (-) strand; PAM type: YTN; PAM sequence: TTG
aaaatgtccgtacgtccatc

SEQ ID NO: 248279 - DNA, 20 bp, Artificial Sequence
  Description of Artificial Sequence: Synthetic oligonucleotide
  Target: LAMA2; (-) strand; PAM type: YTN; PAM sequence: TTG
tagtaaaaaatattgaaaat

SEQ ID NO: 248280 - DNA, 20 bp, Artificial Sequence
  Description of Artificial Sequence: Synthetic oligonucleotide
  Target: LAMA2; (-) strand; PAM type: YTN; PAM sequence: TTT
gtagtaaaaaatattgaaaa

SEQ ID NO: 248281 - DNA, 20 bp, Artificial Sequence
  Description of Artificial Sequence: Synthetic oligonucleotide
  Target: LAMA2; (-) strand; PAM type: YTN; PAM sequence: CTC
caacaacaacaacaacaaca

SEQ ID NO: 248282 - DNA, 20 bp, Artificial Sequence
  Description of Artificial Sequence: Synthetic oligonucleotide
  Target: LAMA2; (-) strand; PAM type: YTN; PAM sequence: CTC
catctccaacaacaacaaca

SEQ ID NO: 248283 - DNA, 20 bp, Artificial Sequence
  Description of Artificial Sequence: Synthetic oligonucleotide
  Target: LAMA2; (-) strand; PAM type: YTN; PAM sequence: CTG
ggtgatagagcaagactcca

SEQ ID NO: 248284 - DNA, 20 bp, Artificial Sequence
  Description of Artificial Sequence: Synthetic oligonucleotide
  Target: LAMA2; (-) strand; PAM type: YTN; PAM sequence: CTC
cagcctgggtgatagagcaa

SEQ ID NO: 248285 - DNA, 20 bp, Artificial Sequence
  Description of Artificial Sequence: Synthetic oligonucleotide
  Target: LAMA2; (-) strand; PAM type: YTN; PAM sequence: CTG
cactccagcctgggtgatag

SEQ ID NO: 248286 - DNA, 20 bp, Artificial Sequence
  Description of Artificial Sequence: Synthetic oligonucleotide
  Target: LAMA2; (-) strand; PAM type: YTN; PAM sequence: TTG
cagtgagccgagatcacacc

SEQ ID NO: 248287 - DNA, 20 bp, Artificial Sequence
  Description of Artificial Sequence: Synthetic oligonucleotide
  Target: LAMA2; (-) strand; PAM type: YTN; PAM sequence: TTG
aacccgggaggtggaggttg

SEQ ID NO: 248288 - DNA, 20 bp, Artificial Sequence
  Description of Artificial Sequence: Synthetic oligonucleotide
  Target: LAMA2; (-) strand; PAM type: YTN; PAM sequence: CTT
gaacccgggaggtggaggtt

SEQ ID NO: 248289 - DNA, 20 bp, Artificial Sequence
  Description of Artificial Sequence: Synthetic oligonucleotide
  Target: LAMA2; (-) strand; PAM type: YTN; PAM sequence: CTG
aggcagagaatcacttgaac

SEQ ID NO: 248290 - DNA, 20 bp, Artificial Sequence
  Description of Artificial Sequence: Synthetic oligonucleotide
  Target: LAMA2; (-) strand; PAM type: YTN; PAM sequence: CTC
gggaggctgaggcagagaat

SEQ ID NO: 248291 - DNA, 20 bp, Artificial Sequence
  Description of Artificial Sequence: Synthetic oligonucleotide
  Target: LAMA2; (-) strand; PAM type: YTN; PAM sequence: CTA
ctcgggaggctgaggcagag

SEQ ID NO: 248292 - DNA, 20 bp, Artificial Sequence
  Description of Artificial Sequence: Synthetic oligonucleotide
  Target: LAMA2; (-) strand; PAM type: YTN; PAM sequence: CTG
taatcccagctactcgggag

SEQ ID NO: 248293 - DNA, 20 bp, Artificial Sequence
  Description of Artificial Sequence: Synthetic oligonucleotide
  Target: LAMA2; (-) strand; PAM type: YTN; PAM sequence: CTG
ggcatggtggcaagcacctg

SEQ ID NO: 248294 - DNA, 20 bp, Artificial Sequence
  Description of Artificial Sequence: Synthetic oligonucleotide
  Target: LAMA2; (-) strand; PAM type: YTN; PAM sequence: TTA
gctgggcatggtggcaagca

SEQ ID NO: 248295 - DNA, 20 bp, Artificial Sequence
  Description of Artificial Sequence: Synthetic oligonucleotide
  Target: LAMA2; (-) strand; PAM type: YTN; PAM sequence: CTA
aaaatacaaaaattagctgg

SEQ ID NO: 248296 - DNA, 20 bp, Artificial Sequence
  Description of Artificial Sequence: Synthetic oligonucleotide
  Target: LAMA2; (-) strand; PAM type: YTN; PAM sequence: CTA
ctaaaaatacaaaaattagc

SEQ ID NO: 248297 - DNA, 20 bp, Artificial Sequence
  Description of Artificial Sequence: Synthetic oligonucleotide
  Target: LAMA2; (-) strand; PAM type: YTN; PAM sequence: CTC
tactaaaaatacaaaaatta

SEQ ID NO: 248298 - DNA, 20 bp, Artificial Sequence
  Description of Artificial Sequence: Synthetic oligonucleotide
  Target: LAMA2; (-) strand; PAM type: YTN; PAM sequence: CTG
tctctactaaaaatacaaaa

SEQ ID NO: 248299 - DNA, 20 bp, Artificial Sequence
  Description of Artificial Sequence: Synthetic oligonucleotide
  Target: LAMA2; (-) strand; PAM type: YTN; PAM sequence: CTG
gccaagatggtgaaaccctg

SEQ ID NO: 248300 - DNA, 20 bp, Artificial Sequence
  Description of Artificial Sequence: Synthetic oligonucleotide
  Target: LAMA2; (-) strand; PAM type: YTN; PAM sequence: TTC
aagaccagcctggccaagat

SEQ ID NO: 248301 - DNA, 20 bp, Artificial Sequence
  Description of Artificial Sequence: Synthetic oligonucleotide
  Target: LAMA2; (-) strand; PAM type: YTN; PAM sequence: TTC
aggagttcaagaccagcctg

SEQ ID NO: 248302 - DNA, 20 bp, Artificial Sequence
  Description of Artificial Sequence: Synthetic oligonucleotide
  Target: LAMA2; (-) strand; PAM type: YTN; PAM sequence: CTC
atgagttcaggagttcaaga

SEQ ID NO: 248303 - DNA, 20 bp, Artificial Sequence
  Description of Artificial Sequence: Synthetic oligonucleotide
  Target: LAMA2; (-) strand; PAM type: YTN; PAM sequence: CTG
agaagggtgactcatgagtt

SEQ ID NO: 248304 - DNA, 20 bp, Artificial Sequence
  Description of Artificial Sequence: Synthetic oligonucleotide
  Target: LAMA2; (-) strand; PAM type: YTN; PAM sequence: TTG
ggaggctgagaagggtgact

SEQ ID NO: 248305 - DNA, 20 bp, Artificial Sequence
  Description of Artificial Sequence: Synthetic oligonucleotide
  Target: LAMA2; (-) strand; PAM type: YTN; PAM sequence: TTT
gggaggctgagaagggtgac

SEQ ID NO: 248306 - DNA, 20 bp, Artificial Sequence
  Description of Artificial Sequence: Synthetic oligonucleotide
  Target: LAMA2; (-) strand; PAM type: YTN; PAM sequence: CTT
tgggaggctgagaagggtga

SEQ ID NO: 248307 - DNA, 20 bp, Artificial Sequence
  Description of Artificial Sequence: Synthetic oligonucleotide
  Target: LAMA2; (-) strand; PAM type: YTN; PAM sequence: TTG
caatcccagcactttgggag

SEQ ID NO: 248308 - DNA, 20 bp, Artificial Sequence
  Description of Artificial Sequence: Synthetic oligonucleotide
  Target: LAMA2; (-) strand; PAM type: YTN; PAM sequence: CTT
gcaatcccagcactttggga

SEQ ID NO: 248309 - DNA, 20 bp, Artificial Sequence
  Description of Artificial Sequence: Synthetic oligonucleotide
  Target: LAMA2; (-) strand; PAM type: YTN; PAM sequence: CTG
aaacacgcttgcaatcccag

SEQ ID NO: 248310 - DNA, 20 bp, Artificial Sequence
  Description of Artificial Sequence: Synthetic oligonucleotide
  Target: LAMA2; (-) strand; PAM type: YTN; PAM sequence: TTC
actgaaacacgcttgcaatc

SEQ ID NO: 248311 - DNA, 20 bp, Artificial Sequence
  Description of Artificial Sequence: Synthetic oligonucleotide
  Target: LAMA2; (-) strand; PAM type: YTN; PAM sequence: CTA
ttcactgaaacacgcttgca

SEQ ID NO: 248312 - DNA, 20 bp, Artificial Sequence
  Description of Artificial Sequence: Synthetic oligonucleotide
  Target: LAMA2; (-) strand; PAM type: YTN; PAM sequence: CTG
ggcacatggctattcactga

SEQ ID NO: 248313 - DNA, 20 bp, Artificial Sequence
  Description of Artificial Sequence: Synthetic oligonucleotide
  Target: LAMA2; (-) strand; PAM type: YTN; PAM sequence: TTA
taagggtgcatgtgagaaac

SEQ ID NO: 248314 - DNA, 20 bp, Artificial Sequence
  Description of Artificial Sequence: Synthetic oligonucleotide
  Target: LAMA2; (-) strand; PAM type: YTN; PAM sequence: TTA
tcccacagttataagggtgc

SEQ ID NO: 248315 - DNA, 20 bp, Artificial Sequence
  Description of Artificial Sequence: Synthetic oligonucleotide
  Target: LAMA2; (-) strand; PAM type: YTN; PAM sequence: TTT
atcccacagttataagggtg

SEQ ID NO: 248316 - DNA, 20 bp, Artificial Sequence
  Description of Artificial Sequence: Synthetic oligonucleotide
  Target: LAMA2; (-) strand; PAM type: YTN; PAM sequence: TTC
agagatttatcccacagtta

SEQ ID NO: 248317 - DNA, 20 bp, Artificial Sequence
  Description of Artificial Sequence: Synthetic oligonucleotide
  Target: LAMA2; (-) strand; PAM type: YTN; PAM sequence: CTT
cagagatttatcccacagtt

SEQ ID NO: 248318 - DNA, 20 bp, Artificial Sequence
  Description of Artificial Sequence: Synthetic oligonucleotide
  Target: LAMA2; (-) strand; PAM type: YTN; PAM sequence: TTC
accttcagagatttatccca

SEQ ID NO: 248319 - DNA, 20 bp, Artificial Sequence
  Description of Artificial Sequence: Synthetic oligonucleotide
  Target: LAMA2; (-) strand; PAM type: YTN; PAM sequence: TTT
caccttcagagatttatccc

SEQ ID NO: 248320 - DNA, 20 bp, Artificial Sequence
  Description of Artificial Sequence: Synthetic oligonucleotide
  Target: LAMA2; (-) strand; PAM type: YTN; PAM sequence: TTG
acatagcagtttcaccttca

SEQ ID NO: 248321 - DNA, 20 bp, Artificial Sequence
  Description of Artificial Sequence: Synthetic oligonucleotide
  Target: LAMA2; (-) strand; PAM type: YTN; PAM sequence: TTT
gacatagcagtttcaccttc

SEQ ID NO: 248322 - DNA, 20 bp, Artificial Sequence
  Description of Artificial Sequence: Synthetic oligonucleotide
  Target: LAMA2; (-) strand; PAM type: YTN; PAM sequence: CTT
tgacatagcagtttcacctt

SEQ ID NO: 248323 - DNA, 20 bp, Artificial Sequence
  Description of Artificial Sequence: Synthetic oligonucleotide
  Target: LAMA2; (-) strand; PAM type: YTN; PAM sequence: TTA
taaatgcatatatactttga

SEQ ID NO: 248324 - DNA, 20 bp, Artificial Sequence
  Description of Artificial Sequence: Synthetic oligonucleotide
  Target: LAMA2; (-) strand; PAM type: YTN; PAM sequence: TTA
aaattataaatgcatatata

SEQ ID NO: 248325 - DNA, 20 bp, Artificial Sequence
  Description of Artificial Sequence: Synthetic oligonucleotide
  Target: LAMA2; (-) strand; PAM type: YTN; PAM sequence: CTG
ttaaaattataaatgcatat

SEQ ID NO: 248326 - DNA, 20 bp, Artificial Sequence
  Description of Artificial Sequence: Synthetic oligonucleotide
  Target: LAMA2; (-) strand; PAM type: YTN; PAM sequence: TTG
gcaatatctgttaaaattat

SEQ ID NO: 248327 - DNA, 20 bp, Artificial Sequence
  Description of Artificial Sequence: Synthetic oligonucleotide
  Target: LAMA2; (-) strand; PAM type: YTN; PAM sequence: TTT
ggcaatatctgttaaaatta

SEQ ID NO: 248328 - DNA, 20 bp, Artificial Sequence
  Description of Artificial Sequence: Synthetic oligonucleotide
  Target: LAMA2; (-) strand; PAM type: YTN; PAM sequence: TTC
aatttggcaatatctgttaa

SEQ ID NO: 248329 - DNA, 20 bp, Artificial Sequence
  Description of Artificial Sequence: Synthetic oligonucleotide
  Target: LAMA2; (-) strand; PAM type: YTN; PAM sequence: CTA
aaatatatgggttcaatttg

SEQ ID NO: 248330 - DNA, 20 bp, Artificial Sequence
  Description of Artificial Sequence: Synthetic oligonucleotide
  Target: LAMA2; (-) strand; PAM type: YTN; PAM sequence: TTG
gtggtagcatgtctaaaata

SEQ ID NO: 248331 - DNA, 20 bp, Artificial Sequence
  Description of Artificial Sequence: Synthetic oligonucleotide
  Target: LAMA2; (-) strand; PAM type: YTN; PAM sequence: CTC
atgcattggtggtagcatgt

SEQ ID NO: 248332 - DNA, 20 bp, Artificial Sequence
  Description of Artificial Sequence: Synthetic oligonucleotide
  Target: LAMA2; (-) strand; PAM type: YTN; PAM sequence: CTC
tcatgcattggtggtagcat

SEQ ID NO: 248333 - DNA, 20 bp, Artificial Sequence
  Description of Artificial Sequence: Synthetic oligonucleotide
  Target: LAMA2; (-) strand; PAM type: YTN; PAM sequence: TTA
gggaaacaagtactctcatg

SEQ ID NO: 248334 - DNA, 20 bp, Artificial Sequence
  Description of Artificial Sequence: Synthetic oligonucleotide
  Target: LAMA2; (-) strand; PAM type: YTN; PAM sequence: TTT
agggaaacaagtactctcat

SEQ ID NO: 248335 - DNA, 20 bp, Artificial Sequence
  Description of Artificial Sequence: Synthetic oligonucleotide
  Target: LAMA2; (-) strand; PAM type: YTN; PAM sequence: TTA
gagaggggtttagggaaaca

SEQ ID NO: 248336 - DNA, 20 bp, Artificial Sequence
  Description of Artificial Sequence: Synthetic oligonucleotide
  Target: LAMA2; (-) strand; PAM type: YTN; PAM sequence: CTA
ttagagaggggtttagggaa

SEQ ID NO: 248337 - DNA, 20 bp, Artificial Sequence
  Description of Artificial Sequence: Synthetic oligonucleotide
  Target: LAMA2; (-) strand; PAM type: YTN; PAM sequence: CTC
tattagagaggggtttaggg

SEQ ID NO: 248338 - DNA, 20 bp, Artificial Sequence
  Description of Artificial Sequence: Synthetic oligonucleotide
  Target: LAMA2; (-) strand; PAM type: YTN; PAM sequence: TTG
ataatatactctattagaga

SEQ ID NO: 248339 - DNA, 20 bp, Artificial Sequence
  Description of Artificial Sequence: Synthetic oligonucleotide
  Target: LAMA2; (-) strand; PAM type: YTN; PAM sequence: TTT
gataatatactctattagag

SEQ ID NO: 248340 - DNA, 20 bp, Artificial Sequence
  Description of Artificial Sequence: Synthetic oligonucleotide
  Target: LAMA2; (-) strand; PAM type: YTN; PAM sequence: TTG
ccaaagacccaaaagtttga

SEQ ID NO: 248341 - DNA, 20 bp, Artificial Sequence
  Description of Artificial Sequence: Synthetic oligonucleotide
  Target: LAMA2; (-) strand; PAM type: YTN; PAM sequence: TTG
gattgccaaagacccaaaag

SEQ ID NO: 248342 - DNA, 20 bp, Artificial Sequence
  Description of Artificial Sequence: Synthetic oligonucleotide
  Target: LAMA2; (-) strand; PAM type: YTN; PAM sequence: TTC
acccattggattgccaaaga

SEQ ID NO: 248343 - DNA, 20 bp, Artificial Sequence
  Description of Artificial Sequence: Synthetic oligonucleotide
  Target: LAMA2; (-) strand; PAM type: YTN; PAM sequence: TTT
cacccattggattgccaaag

SEQ ID NO: 248344 - DNA, 20 bp, Artificial Sequence
  Description of Artificial Sequence: Synthetic oligonucleotide
  Target: LAMA2; (-) strand; PAM type: YTN; PAM sequence: TTT
tcacccattggattgccaaa

SEQ ID NO: 248345 - DNA, 20 bp, Artificial Sequence
  Description of Artificial Sequence: Synthetic oligonucleotide
  Target: LAMA2; (-) strand; PAM type: YTN; PAM sequence: TTT
ttcacccattggattgccaa

SEQ ID NO: 248346 - DNA, 20 bp, Artificial Sequence
  Description of Artificial Sequence: Synthetic oligonucleotide
  Target: LAMA2; (-) strand; PAM type: YTN; PAM sequence: TTA
caggcgtgagccaccacacc

SEQ ID NO: 248347 - DNA, 20 bp, Artificial Sequence
  Description of Artificial Sequence: Synthetic oligonucleotide
  Target: LAMA2; (-) strand; PAM type: YTN; PAM sequence: CTC
ccaaagtggtgagattacag

SEQ ID NO: 248348 - DNA, 20 bp, Artificial Sequence
  Description of Artificial Sequence: Synthetic oligonucleotide
  Target: LAMA2; (-) strand; PAM type: YTN; PAM sequence: CTC
agcctcccaaagtggtgaga

SEQ ID NO: 248349 - DNA, 20 bp, Artificial Sequence
  Description of Artificial Sequence: Synthetic oligonucleotide
  Target: LAMA2; (-) strand; PAM type: YTN; PAM sequence: CTG
cctcagcctcccaaagtggt

SEQ ID NO: 248350 - DNA, 20 bp, Artificial Sequence
  Description of Artificial Sequence: Synthetic oligonucleotide
  Target: LAMA2; (-) strand; PAM type: YTN; PAM sequence: TTC
gcctgcctcagcctcccaaa

SEQ ID NO: 248351 - DNA, 20 bp, Artificial Sequence
  Description of Artificial Sequence: Synthetic oligonucleotide
  Target: LAMA2; (-) strand; PAM type: YTN; PAM sequence: CTC
agggattcgcctgcctcagc

SEQ ID NO: 248352 - DNA, 20 bp, Artificial Sequence
  Description of Artificial Sequence: Synthetic oligonucleotide
  Target: LAMA2; (-) strand; PAM type: YTN; PAM sequence: CTC
atggcctcagggattcgcct

SEQ ID NO: 248353 - DNA, 20 bp, Artificial Sequence
  Description of Artificial Sequence: Synthetic oligonucleotide
  Target: LAMA2; (-) strand; PAM type: YTN; PAM sequence: CTC
gaactcatggcctcagggat

SEQ ID NO: 248354 - DNA, 20 bp, Artificial Sequence
  Description of Artificial Sequence: Synthetic oligonucleotide
  Target: LAMA2; (-) strand; PAM type: YTN; PAM sequence: TTG
gccaggcaggtctcgaactc

SEQ ID NO: 248355 - DNA, 20 bp, Artificial Sequence
  Description of Artificial Sequence: Synthetic oligonucleotide
  Target: LAMA2; (-) strand; PAM type: YTN; PAM sequence: TTC
accatgttggccaggcaggt

SEQ ID NO: 248356 - DNA, 20 bp, Artificial Sequence
  Description of Artificial Sequence: Synthetic oligonucleotide
  Target: LAMA2; (-) strand; PAM type: YTN; PAM sequence: TTT
caccatgttggccaggcagg

SEQ ID NO: 248357 - DNA, 20 bp, Artificial Sequence
  Description of Artificial Sequence: Synthetic oligonucleotide
  Target: LAMA2; (-) strand; PAM type: YTN; PAM sequence: TTA
gtaaacacagggtttcacca

SEQ ID NO: 248358 - DNA, 20 bp, Artificial Sequence
  Description of Artificial Sequence: Synthetic oligonucleotide
  Target: LAMA2; (-) strand; PAM type: YTN; PAM sequence: TTT
agtaaacacagggtttcacc

SEQ ID NO: 248359 - DNA, 20 bp, Artificial Sequence
  Description of Artificial Sequence: Synthetic oligonucleotide
  Target: LAMA2; (-) strand; PAM type: YTN; PAM sequence: TTT
tagtaaacacagggtttcac

SEQ ID NO: 248360 - DNA, 20 bp, Artificial Sequence
  Description of Artificial Sequence: Synthetic oligonucleotide
  Target: LAMA2; (-) strand; PAM type: YTN; PAM sequence: TTT
ttagtaaacacagggtttca

SEQ ID NO: 248361 - DNA, 20 bp, Artificial Sequence
  Description of Artificial Sequence: Synthetic oligonucleotide
  Target: LAMA2; (-) strand; PAM type: YTN; PAM sequence: TTG
tatttttagtaaacacaggg

SEQ ID NO: 248362 - DNA, 20 bp, Artificial Sequence
  Description of Artificial Sequence: Synthetic oligonucleotide
  Target: LAMA2; (-) strand; PAM type: YTN; PAM sequence: TTT
gtatttttagtaaacacagg

SEQ ID NO: 248363 - DNA, 20 bp, Artificial Sequence
  Description of Artificial Sequence: Synthetic oligonucleotide
  Target: LAMA2; (-) strand; PAM type: YTN; PAM sequence: TTT
tgtatttttagtaaacacag

SEQ ID NO: 248364 - DNA, 20 bp, Artificial Sequence
  Description of Artificial Sequence: Synthetic oligonucleotide
  Target: LAMA2; (-) strand; PAM type: YTN; PAM sequence: TTT
ttgtatttttagtaaacaca

SEQ ID NO: 248365 - DNA, 20 bp, Artificial Sequence
  Description of Artificial Sequence: Synthetic oligonucleotide
  Target: LAMA2; (-) strand; PAM type: YTN; PAM sequence: TTT
tttgtatttttagtaaacac

SEQ ID NO: 248366 - DNA, 20 bp, Artificial Sequence
  Description of Artificial Sequence: Synthetic oligonucleotide
  Target: LAMA2; (-) strand; PAM type: YTN; PAM sequence: TTT
ttttgtatttttagtaaaca

SEQ ID NO: 248367 - DNA, 20 bp, Artificial Sequence
  Description of Artificial Sequence: Synthetic oligonucleotide
  Target: LAMA2; (-) strand; PAM type: YTN; PAM sequence: TTT
tttttgtatttttagtaaac

SEQ ID NO: 248368 - DNA, 20 bp, Artificial Sequence
  Description of Artificial Sequence: Synthetic oligonucleotide
  Target: LAMA2; (-) strand; PAM type: YTN; PAM sequence: TTT
ttttttgtatttttagtaaa

SEQ ID NO: 248369 - DNA, 20 bp, Artificial Sequence
  Description of Artificial Sequence: Synthetic oligonucleotide
  Target: LAMA2; (-) strand; PAM type: YTN; PAM sequence: TTT
tttttttgtatttttagtaa

SEQ ID NO: 248370 - DNA, 20 bp, Artificial Sequence
  Description of Artificial Sequence: Synthetic oligonucleotide
  Target: LAMA2; (-) strand; PAM type: YTN; PAM sequence: TTT
ttttttttgtatttttagta

SEQ ID NO: 248371 - DNA, 20 bp, Artificial Sequence
  Description of Artificial Sequence: Synthetic oligonucleotide
  Target: LAMA2; (-) strand; PAM type: YTN; PAM sequence: TTT
tttttttttgtatttttagt

SEQ ID NO: 248372 - DNA, 20 bp, Artificial Sequence
  Description of Artificial Sequence: Synthetic oligonucleotide
  Target: LAMA2; (-) strand; PAM type: YTN; PAM sequence: TTT
ttttttttttgtatttttag

SEQ ID NO: 248373 - DNA, 20 bp, Artificial Sequence
  Description of Artificial Sequence: Synthetic oligonucleotide
  Target: LAMA2; (-) strand; PAM type: YTN; PAM sequence: TTT
tttttttttttgtattttta

SEQ ID NO: 248374 - DNA, 20 bp, Artificial Sequence
  Description of Artificial Sequence: Synthetic oligonucleotide
  Target: LAMA2; (-) strand; PAM type: YTN; PAM sequence: TTT
ttttttttttttgtattttt

SEQ ID NO: 248375 - DNA, 20 bp, Artificial Sequence
  Description of Artificial Sequence: Synthetic oligonucleotide
  Target: LAMA2; (-) strand; PAM type: YTN; PAM sequence: CTT
tttttttttttttgtatttt

SEQ ID NO: 248376 - DNA, 20 bp, Artificial Sequence
  Description of Artificial Sequence: Synthetic oligonucleotide
  Target: LAMA2; (-) strand; PAM type: YTN; PAM sequence: CTG
gctttttttttttttttgta

SEQ ID NO: 248377 - DNA, 20 bp, Artificial Sequence
  Description of Artificial Sequence: Synthetic oligonucleotide
  Target: LAMA2; (-) strand; PAM type: YTN; PAM sequence: TTA
taggtgtgcaccaccatgcc

SEQ ID NO: 248378 - DNA, 20 bp, Artificial Sequence
  Description of Artificial Sequence: Synthetic oligonucleotide
  Target: LAMA2; (-) strand; PAM type: YTN; PAM sequence: CTG
gaattataggtgtgcaccac

SEQ ID NO: 248379 - DNA, 20 bp, Artificial Sequence
  Description of Artificial Sequence: Synthetic oligonucleotide
  Target: LAMA2; (-) strand; PAM type: YTN; PAM sequence: CTC
ccaagtagctggaattatag

SEQ ID NO: 248380 - DNA, 20 bp, Artificial Sequence
  Description of Artificial Sequence: Synthetic oligonucleotide
  Target: LAMA2; (-) strand; PAM type: YTN; PAM sequence: CTC
agcctcccaagtagctggaa

SEQ ID NO: 248381 - DNA, 20 bp, Artificial Sequence
  Description of Artificial Sequence: Synthetic oligonucleotide
  Target: LAMA2; (-) strand; PAM type: YTN; PAM sequence: CTC
atgcctcagcctcccaagta

SEQ ID NO: 248382 - DNA, 20 bp, Artificial Sequence
  Description of Artificial Sequence: Synthetic oligonucleotide
  Target: LAMA2; (-) strand; PAM type: YTN; PAM sequence: TTC
tcatgcctcagcctcccaag

SEQ ID NO: 248383 - DNA, 20 bp, Artificial Sequence
  Description of Artificial Sequence: Synthetic oligonucleotide
  Target: LAMA2; (-) strand; PAM type: YTN; PAM sequence: TTA
agtgattctcatgcctcagc

SEQ ID NO: 248384 - DNA, 20 bp, Artificial Sequence
  Description of Artificial Sequence: Synthetic oligonucleotide
  Target: LAMA2; (-) strand; PAM type: YTN; PAM sequence: TTC
aagcaattaagtgattctca

SEQ ID NO: 248385 - DNA, 20 bp, Artificial Sequence
  Description of Artificial Sequence: Synthetic oligonucleotide
  Target: LAMA2; (-) strand; PAM type: YTN; PAM sequence: CTC
ccaggttcaagcaattaagt

SEQ ID NO: 248386 - DNA, 20 bp, Artificial Sequence
  Description of Artificial Sequence: Synthetic oligonucleotide
  Target: LAMA2; (-) strand; PAM type: YTN; PAM sequence: CTG
tctcccaggttcaagcaatt

SEQ ID NO: 248387 - DNA, 20 bp, Artificial Sequence
  Description of Artificial Sequence: Synthetic oligonucleotide
  Target: LAMA2; (-) strand; PAM type: YTN; PAM sequence: CTC
tgtctcccaggttcaagcaa

SEQ ID NO: 248388 - DNA, 20 bp, Artificial Sequence
  Description of Artificial Sequence: Synthetic oligonucleotide
  Target: LAMA2; (-) strand; PAM type: YTN; PAM sequence: CTG
caacctctgtctcccaggtt

SEQ ID NO: 248389 - DNA, 20 bp, Artificial Sequence
  Description of Artificial Sequence: Synthetic oligonucleotide
  Target: LAMA2; (-) strand; PAM type: YTN; PAM sequence: CTC
actgcaacctctgtctccca

SEQ ID NO: 248390 - DNA, 20 bp, Artificial Sequence
  Description of Artificial Sequence: Synthetic oligonucleotide
  Target: LAMA2; (-) strand; PAM type: YTN; PAM sequence: TTG
gctcactgcaacctctgtct

SEQ ID NO: 248391 - DNA, 20 bp, Artificial Sequence
  Description of Artificial Sequence: Synthetic oligonucleotide
  Target: LAMA2; (-) strand; PAM type: YTN; PAM sequence: CTT
ggctcactgcaacctctgtc

SEQ ID NO: 248392 - DNA, 20 bp, Artificial Sequence
  Description of Artificial Sequence: Synthetic oligonucleotide
  Target: LAMA2; (-) strand; PAM type: YTN; PAM sequence: CTA
tcttggctcactgcaacctc

SEQ ID NO: 248393 - DNA, 20 bp, Artificial Sequence
  Description of Artificial Sequence: Synthetic oligonucleotide
  Target: LAMA2; (-) strand; PAM type: YTN; PAM sequence: CTG
gagtgcaatggcactatctt

SEQ ID NO: 248394 - DNA, 20 bp, Artificial Sequence
  Description of Artificial Sequence: Synthetic oligonucleotide
  Target: LAMA2; (-) strand; PAM type: YTN; PAM sequence: TTG
cccagtctggagtgcaatgg

SEQ ID NO: 248395 - DNA, 20 bp, Artificial Sequence
  Description of Artificial Sequence: Synthetic oligonucleotide
  Target: LAMA2; (-) strand; PAM type: YTN; PAM sequence: CTG
ttgcccagtctggagtgcaa

SEQ ID NO: 248396 - DNA, 20 bp, Artificial Sequence
  Description of Artificial Sequence: Synthetic oligonucleotide
  Target: LAMA2; (-) strand; PAM type: YTN; PAM sequence: CTC
tgttgcccagtctggagtgc

SEQ ID NO: 248397 - DNA, 20 bp, Artificial Sequence
  Description of Artificial Sequence: Synthetic oligonucleotide
  Target: LAMA2; (-) strand; PAM type: YTN; PAM sequence: TTG
ctctgttgcccagtctggag

SEQ ID NO: 248398 - DNA, 20 bp, Artificial Sequence
  Description of Artificial Sequence: Synthetic oligonucleotide
  Target: LAMA2; (-) strand; PAM type: YTN; PAM sequence: CTT
gctctgttgcccagtctgga

SEQ ID NO: 248399 - DNA, 20 bp, Artificial Sequence
  Description of Artificial Sequence: Synthetic oligonucleotide
  Target: LAMA2; (-) strand; PAM type: YTN; PAM sequence: TTG
agatggagtcttgctctgtt

SEQ ID NO: 248400 - DNA, 20 bp, Artificial Sequence
  Description of Artificial Sequence: Synthetic oligonucleotide
  Target: LAMA2; (-) strand; PAM type: YTN; PAM sequence: TTT
gagatggagtcttgctctgt

SEQ ID NO: 248401 - DNA, 20 bp, Artificial Sequence
  Description of Artificial Sequence: Synthetic oligonucleotide
  Target: LAMA2; (-) strand; PAM type: YTN; PAM sequence: TTT
tgagatggagtcttgctctg

SEQ ID NO: 248402 - DNA, 20 bp, Artificial Sequence
  Description of Artificial Sequence: Synthetic oligonucleotide
  Target: LAMA2; (-) strand; PAM type: YTN; PAM sequence: TTT
ttgagatggagtcttgctct

SEQ ID NO: 248403 - DNA, 20 bp, Artificial Sequence
  Description of Artificial Sequence: Synthetic oligonucleotide
  Target: LAMA2; (-) strand; PAM type: YTN; PAM sequence: TTT
tttgagatggagtcttgctc

SEQ ID NO: 248404 - DNA, 20 bp, Artificial Sequence
  Description of Artificial Sequence: Synthetic oligonucleotide
  Target: LAMA2; (-) strand; PAM type: YTN; PAM sequence: TTT
ttttgagatggagtcttgct

SEQ ID NO: 248405 - DNA, 20 bp, Artificial Sequence
  Description of Artificial Sequence: Synthetic oligonucleotide
  Target: LAMA2; (-) strand; PAM type: YTN; PAM sequence: TTT
tttttgagatggagtcttgc

SEQ ID NO: 248406 - DNA, 20 bp, Artificial Sequence
  Description of Artificial Sequence: Synthetic oligonucleotide
  Target: LAMA2; (-) strand; PAM type: YTN; PAM sequence: TTT
ttttttgagatggagtcttg

SEQ ID NO: 248407 - DNA, 20 bp, Artificial Sequence
  Description of Artificial Sequence: Synthetic oligonucleotide
  Target: LAMA2; (-) strand; PAM type: YTN; PAM sequence: TTT
tttttttgagatggagtctt

SEQ ID NO: 248408 - DNA, 20 bp, Artificial Sequence
  Description of Artificial Sequence: Synthetic oligonucleotide
  Target: LAMA2; (-) strand; PAM type: YTN; PAM sequence: TTT
ttttttttgagatggagtct

SEQ ID NO: 248409 - DNA, 20 bp, Artificial Sequence
  Description of Artificial Sequence: Synthetic oligonucleotide
  Target: LAMA2; (-) strand; PAM type: YTN; PAM sequence: TTT
tttttttttgagatggagtc

SEQ ID NO: 248410 - DNA, 20 bp, Artificial Sequence
  Description of Artificial Sequence: Synthetic oligonucleotide
  Target: LAMA2; (-) strand; PAM type: YTN; PAM sequence: TTT
ttttttttttgagatggagt

SEQ ID NO: 248411 - DNA, 20 bp, Artificial Sequence
  Description of Artificial Sequence: Synthetic oligonucleotide
  Target: LAMA2; (-) strand; PAM type: YTN; PAM sequence: CTT
tttttttttttgagatggag

SEQ ID NO: 248412 - DNA, 20 bp, Artificial Sequence
  Description of Artificial Sequence: Synthetic oligonucleotide
  Target: LAMA2; (-) strand; PAM type: YTN; PAM sequence: TTC
ctttttttttttttgagatg

SEQ ID NO: 248413 - DNA, 20 bp, Artificial Sequence
  Description of Artificial Sequence: Synthetic oligonucleotide
  Target: LAMA2; (-) strand; PAM type: YTN; PAM sequence: CTT
cctttttttttttttgagat

SEQ ID NO: 248414 - DNA, 20 bp, Artificial Sequence
  Description of Artificial Sequence: Synthetic oligonucleotide
  Target: LAMA2; (-) strand; PAM type: YTN; PAM sequence: CTC
ttcctttttttttttttgag

SEQ ID NO: 248415 - DNA, 20 bp, Artificial Sequence
  Description of Artificial Sequence: Synthetic oligonucleotide
  Target: LAMA2; (-) strand; PAM type: YTN; PAM sequence: CTC
tcttcctttttttttttttg

SEQ ID NO: 248416 - DNA, 20 bp, Artificial Sequence
  Description of Artificial Sequence: Synthetic oligonucleotide
  Target: LAMA2; (-) strand; PAM type: YTN; PAM sequence: TTG
tctctcttcctttttttttt

SEQ ID NO: 248417 - DNA, 20 bp, Artificial Sequence
  Description of Artificial Sequence: Synthetic oligonucleotide
  Target: LAMA2; (-) strand; PAM type: YTN; PAM sequence: TTG
tgtggaaaaaaatataattg

SEQ ID NO: 248418 - DNA, 20 bp, Artificial Sequence
  Description of Artificial Sequence: Synthetic oligonucleotide
  Target: LAMA2; (-) strand; PAM type: YTN; PAM sequence: CTT
gtgtggaaaaaaatataatt

SEQ ID NO: 248419 - DNA, 20 bp, Artificial Sequence
  Description of Artificial Sequence: Synthetic oligonucleotide
  Target: LAMA2; (-) strand; PAM type: YTN; PAM sequence: TTA
aatgcttgtgtggaaaaaaa

SEQ ID NO: 248420 - DNA, 20 bp, Artificial Sequence
  Description of Artificial Sequence: Synthetic oligonucleotide
  Target: LAMA2; (-) strand; PAM type: YTN; PAM sequence: TTT
aaatgcttgtgtggaaaaaa

SEQ ID NO: 248421 - DNA, 20 bp, Artificial Sequence
  Description of Artificial Sequence: Synthetic oligonucleotide
  Target: LAMA2; (-) strand; PAM type: YTN; PAM sequence: TTT
taaatgcttgtgtggaaaaa

SEQ ID NO: 248422 - DNA, 20 bp, Artificial Sequence
  Description of Artificial Sequence: Synthetic oligonucleotide
  Target: LAMA2; (-) strand; PAM type: YTN; PAM sequence: TTA
gattttaaatgcttgtgtgg

SEQ ID NO: 248423 - DNA, 20 bp, Artificial Sequence
  Description of Artificial Sequence: Synthetic oligonucleotide
  Target: LAMA2; (-) strand; PAM type: YTN; PAM sequence: TTG
aattagattttaaatgcttg

SEQ ID NO: 248424 - DNA, 20 bp, Artificial Sequence
  Description of Artificial Sequence: Synthetic oligonucleotide
  Target: LAMA2; (-) strand; PAM type: YTN; PAM sequence: TTT
gaattagattttaaatgctt

SEQ ID NO: 248425 - DNA, 20 bp, Artificial Sequence
  Description of Artificial Sequence: Synthetic oligonucleotide
  Target: LAMA2; (-) strand; PAM type: YTN; PAM sequence: TTT
tgaattagattttaaatgct

SEQ ID NO: 248426 - DNA, 20 bp, Artificial Sequence
  Description of Artificial Sequence: Synthetic oligonucleotide
  Target: LAMA2; (-) strand; PAM type: YTN; PAM sequence: TTT
ttgaattagattttaaatgc

SEQ ID NO: 248427 - DNA, 20 bp, Artificial Sequence
  Description of Artificial Sequence: Synthetic oligonucleotide
  Target: LAMA2; (-) strand; PAM type: YTN; PAM sequence: TTC
agaatagatttttgaattag

SEQ ID NO: 248428 - DNA, 20 bp, Artificial Sequence
  Description of Artificial Sequence: Synthetic oligonucleotide
  Target: LAMA2; (-) strand; PAM type: YTN; PAM sequence: TTC
agtaagttcagaatagattt

SEQ ID NO: 248429 - DNA, 20 bp, Artificial Sequence
  Description of Artificial Sequence: Synthetic oligonucleotide
  Target: LAMA2; (-) strand; PAM type: YTN; PAM sequence: TTG
ggattcagtaagttcagaat

SEQ ID NO: 248430 - DNA, 20 bp, Artificial Sequence
  Description of Artificial Sequence: Synthetic oligonucleotide
  Target: LAMA2; (-) strand; PAM type: YTN; PAM sequence: CTT
gggattcagtaagttcagaa

SEQ ID NO: 248431 - DNA, 20 bp, Artificial Sequence
  Description of Artificial Sequence: Synthetic oligonucleotide
  Target: LAMA2; (-) strand; PAM type: YTN; PAM sequence: TTC
ttgggattcagtaagttcag

SEQ ID NO: 248432 - DNA, 20 bp, Artificial Sequence
  Description of Artificial Sequence: Synthetic oligonucleotide
  Target: LAMA2; (-) strand; PAM type: YTN; PAM sequence: TTA
ttcttgggattcagtaagtt

SEQ ID NO: 248433 - DNA, 20 bp, Artificial Sequence
  Description of Artificial Sequence: Synthetic oligonucleotide
  Target: LAMA2; (-) strand; PAM type: YTN; PAM sequence: CTA
attattcttgggattcagta

SEQ ID NO: 248434 - DNA, 20 bp, Artificial Sequence
  Description of Artificial Sequence: Synthetic oligonucleotide
  Target: LAMA2; (-) strand; PAM type: YTN; PAM sequence: CTC
ctaattattcttgggattca

SEQ ID NO: 248435 - DNA, 20 bp, Artificial Sequence
  Description of Artificial Sequence: Synthetic oligonucleotide
  Target: LAMA2; (-) strand; PAM type: YTN; PAM sequence: CTC
tcctaattattcttgggatt

SEQ ID NO: 248436 - DNA, 20 bp, Artificial Sequence
  Description of Artificial Sequence: Synthetic oligonucleotide
  Target: LAMA2; (-) strand; PAM type: YTN; PAM sequence: TTC
ctctcctaattattcttggg

SEQ ID NO: 248437 - DNA, 20 bp, Artificial Sequence
  Description of Artificial Sequence: Synthetic oligonucleotide
  Target: LAMA2; (-) strand; PAM type: YTN; PAM sequence: TTT
cctctcctaattattcttgg

SEQ ID NO: 248438 - DNA, 20 bp, Artificial Sequence
  Description of Artificial Sequence: Synthetic oligonucleotide
  Target: LAMA2; (-) strand; PAM type: YTN; PAM sequence: TTT
tcctctcctaattattcttg

SEQ ID NO: 248439 - DNA, 20 bp, Artificial Sequence
  Description of Artificial Sequence: Synthetic oligonucleotide
  Target: LAMA2; (-) strand; PAM type: YTN; PAM sequence: CTT
ttcctctcctaattattctt

SEQ ID NO: 248440 - DNA, 20 bp, Artificial Sequence
  Description of Artificial Sequence: Synthetic oligonucleotide
  Target: LAMA2; (-) strand; PAM type: YTN; PAM sequence: TTC
ttttcctctcctaattattc

SEQ ID NO: 248441 - DNA, 20 bp, Artificial Sequence
  Description of Artificial Sequence: Synthetic oligonucleotide
  Target: LAMA2; (-) strand; PAM type: YTN; PAM sequence: TTT
cttttcctctcctaattatt

SEQ ID NO: 248442 - DNA, 20 bp, Artificial Sequence
  Description of Artificial Sequence: Synthetic oligonucleotide
  Target: LAMA2; (-) strand; PAM type: YTN; PAM sequence: TTA
tttcttttcctctcctaatt

SEQ ID NO: 248443 - DNA, 20 bp, Artificial Sequence
  Description of Artificial Sequence: Synthetic oligonucleotide
  Target: LAMA2; (-) strand; PAM type: YTN; PAM sequence: TTA
aacattatttcttttcctct

SEQ ID NO: 248444 - DNA, 20 bp, Artificial Sequence
  Description of Artificial Sequence: Synthetic oligonucleotide
  Target: LAMA2; (-) strand; PAM type: YTN; PAM sequence: TTT
aaacattatttcttttcctc

SEQ ID NO: 248445 - DNA, 20 bp, Artificial Sequence
  Description of Artificial Sequence: Synthetic oligonucleotide
  Target: LAMA2; (-) strand; PAM type: YTN; PAM sequence: TTA
tttaaacattatttcttttc

SEQ ID NO: 248446 - DNA, 20 bp, Artificial Sequence
  Description of Artificial Sequence: Synthetic oligonucleotide
  Target: LAMA2; (-) strand; PAM type: YTN; PAM sequence: TTT
atttaaacattatttctttt

SEQ ID NO: 248447 - DNA, 20 bp, Artificial Sequence
  Description of Artificial Sequence: Synthetic oligonucleotide
  Target: LAMA2; (-) strand; PAM type: YTN; PAM sequence: CTA
tagtaacaggcagatagaat

SEQ ID NO: 248448 - DNA, 20 bp, Artificial Sequence
  Description of Artificial Sequence: Synthetic oligonucleotide
  Target: LAMA2; (-) strand; PAM type: YTN; PAM sequence: TTC
tatagtaacaggcagataga

SEQ ID NO: 248449 - DNA, 20 bp, Artificial Sequence
  Description of Artificial Sequence: Synthetic oligonucleotide
  Target: LAMA2; (-) strand; PAM type: YTN; PAM sequence: TTC
atgttctatagtaacaggca

SEQ ID NO: 248450 - DNA, 20 bp, Artificial Sequence
  Description of Artificial Sequence: Synthetic oligonucleotide
  Target: LAMA2; (-) strand; PAM type: YTN; PAM sequence: CTT
catgttctatagtaacaggc

SEQ ID NO: 248451 - DNA, 20 bp, Artificial Sequence
  Description of Artificial Sequence: Synthetic oligonucleotide
  Target: LAMA2; (-) strand; PAM type: YTN; PAM sequence: TTC
ttcatgttctatagtaacag

SEQ ID NO: 248452 - DNA, 20 bp, Artificial Sequence
  Description of Artificial Sequence: Synthetic oligonucleotide
  Target: LAMA2; (-) strand; PAM type: YTN; PAM sequence: TTC
ataagaggaacacagaaccc

SEQ ID NO: 248453 - DNA, 20 bp, Artificial Sequence
  Description of Artificial Sequence: Synthetic oligonucleotide
  Target: LAMA2; (-) strand; PAM type: YTN; PAM sequence: TTA
aaaagaaattcataagagga

SEQ ID NO: 248454 - DNA, 20 bp, Artificial Sequence
  Description of Artificial Sequence: Synthetic oligonucleotide
  Target: LAMA2; (-) strand; PAM type: YTN; PAM sequence: TTT
aaaaagaaattcataagagg

SEQ ID NO: 248455 - DNA, 20 bp, Artificial Sequence
  Description of Artificial Sequence: Synthetic oligonucleotide
  Target: LAMA2; (-) strand; PAM type: YTN; PAM sequence: TTT
taaaaagaaattcataagag

SEQ ID NO: 248456 - DNA, 20 bp, Artificial Sequence
  Description of Artificial Sequence: Synthetic oligonucleotide
  Target: LAMA2; (-) strand; PAM type: YTN; PAM sequence: TTG
aagggttttaaaaagaaatt

SEQ ID NO: 248457 - DNA, 20 bp, Artificial Sequence
  Description of Artificial Sequence: Synthetic oligonucleotide
  Target: LAMA2; (-) strand; PAM type: YTN; PAM sequence: TTT
gaagggttttaaaaagaaat

SEQ ID NO: 248458 - DNA, 20 bp, Artificial Sequence
  Description of Artificial Sequence: Synthetic oligonucleotide
  Target: LAMA2; (-) strand; PAM type: YTN; PAM sequence: CTT
tgaagggttttaaaaagaaa

SEQ ID NO: 248459 - DNA, 20 bp, Artificial Sequence
  Description of Artificial Sequence: Synthetic oligonucleotide
  Target: LAMA2; (-) strand; PAM type: YTN; PAM sequence: CTA
ctttgaagggttttaaaaag

SEQ ID NO: 248460 - DNA, 20 bp, Artificial Sequence
  Description of Artificial Sequence: Synthetic oligonucleotide
  Target: LAMA2; (-) strand; PAM type: YTN; PAM sequence: CTA
aaagggcatgaaaataccta

SEQ ID NO: 248461 - DNA, 20 bp, Artificial Sequence
  Description of Artificial Sequence: Synthetic oligonucleotide
  Target: LAMA2; (-) strand; PAM type: YTN; PAM sequence: TTA
tgtctaaaagggcatgaaaa

SEQ ID NO: 248462 - DNA, 20 bp, Artificial Sequence
  Description of Artificial Sequence: Synthetic oligonucleotide
  Target: LAMA2; (-) strand; PAM type: YTN; PAM sequence: TTA
tgttatgtctaaaagggcat

SEQ ID NO: 248463 - DNA, 20 bp, Artificial Sequence
  Description of Artificial Sequence: Synthetic oligonucleotide
  Target: LAMA2; (-) strand; PAM type: YTN; PAM sequence: TTA
tacgttatgttatgtctaaa

SEQ ID NO: 248464 - DNA, 20 bp, Artificial Sequence
  Description of Artificial Sequence: Synthetic oligonucleotide
  Target: LAMA2; (-) strand; PAM type: YTN; PAM sequence: CTG
aattatacgttatgttatgt

SEQ ID NO: 248465 - DNA, 20 bp, Artificial Sequence
  Description of Artificial Sequence: Synthetic oligonucleotide
  Target: LAMA2; (-) strand; PAM type: YTN; PAM sequence: CTC
tgaattatacgttatgttat

SEQ ID NO: 248466 - DNA, 20 bp, Artificial Sequence
  Description of Artificial Sequence: Synthetic oligonucleotide
  Target: LAMA2; (-) strand; PAM type: YTN; PAM sequence: TTC
aactctgaattatacgttat

SEQ ID NO: 248467 - DNA, 20 bp, Artificial Sequence
  Description of Artificial Sequence: Synthetic oligonucleotide
  Target: LAMA2; (-) strand; PAM type: YTN; PAM sequence: TTA
attcaactctgaattatacg

SEQ ID NO: 248468 - DNA, 20 bp, Artificial Sequence
  Description of Artificial Sequence: Synthetic oligonucleotide
  Target: LAMA2; (-) strand; PAM type: YTN; PAM sequence: TTG
ggaaaattaattcaactctg

SEQ ID NO: 248469 - DNA, 20 bp, Artificial Sequence
  Description of Artificial Sequence: Synthetic oligonucleotide
  Target: LAMA2; (-) strand; PAM type: YTN; PAM sequence: TTT
gggaaaattaattcaactct

SEQ ID NO: 248470 - DNA, 20 bp, Artificial Sequence
  Description of Artificial Sequence: Synthetic oligonucleotide
  Target: LAMA2; (-) strand; PAM type: YTN; PAM sequence: TTT
tgggaaaattaattcaactc

SEQ ID NO: 248471 - DNA, 20 bp, Artificial Sequence
  Description of Artificial Sequence: Synthetic oligonucleotide
  Target: LAMA2; (-) strand; PAM type: YTN; PAM sequence: CTG
tgtgattttgggaaaattaa

SEQ ID NO: 248472 - DNA, 20 bp, Artificial Sequence
  Description of Artificial Sequence: Synthetic oligonucleotide
  Target: LAMA2; (-) strand; PAM type: YTN; PAM sequence: TTG
ctgtgtgattttgggaaaat

SEQ ID NO: 248473 - DNA, 20 bp, Artificial Sequence
  Description of Artificial Sequence: Synthetic oligonucleotide
  Target: LAMA2; (-) strand; PAM type: YTN; PAM sequence: TTT
gctgtgtgattttgggaaaa

SEQ ID NO: 248474 - DNA, 20 bp, Artificial Sequence
  Description of Artificial Sequence: Synthetic oligonucleotide
  Target: LAMA2; (-) strand; PAM type: YTN; PAM sequence: CTA
tatatttgctgtgtgatttt

SEQ ID NO: 248475 - DNA, 20 bp, Artificial Sequence
  Description of Artificial Sequence: Synthetic oligonucleotide
  Target: LAMA2; (-) strand; PAM type: YTN; PAM sequence: TTG
tagtctatatatttgctgtg

SEQ ID NO: 248476 - DNA, 20 bp, Artificial Sequence
  Description of Artificial Sequence: Synthetic oligonucleotide
  Target: LAMA2; (-) strand; PAM type: YTN; PAM sequence: CTA
attgtagtctatatatttgc

SEQ ID NO: 248477 - DNA, 20 bp, Artificial Sequence
  Description of Artificial Sequence: Synthetic oligonucleotide
  Target: LAMA2; (-) strand; PAM type: YTN; PAM sequence: TTC
taattgtagtctatatattt

SEQ ID NO: 248478 - DNA, 20 bp, Artificial Sequence
  Description of Artificial Sequence: Synthetic oligonucleotide
  Target: LAMA2; (-) strand; PAM type: YTN; PAM sequence: TTT
ctaattgtagtctatatatt

SEQ ID NO: 248479 - DNA, 20 bp, Artificial Sequence
  Description of Artificial Sequence: Synthetic oligonucleotide
  Target: LAMA2; (-) strand; PAM type: YTN; PAM sequence: CTT
tctaattgtagtctatatat

SEQ ID NO: 248480 - DNA, 20 bp, Artificial Sequence
  Description of Artificial Sequence: Synthetic oligonucleotide
  Target: LAMA2; (-) strand; PAM type: YTN; PAM sequence: TTA
cccactttctaattgtagtc

SEQ ID NO: 248481 - DNA, 20 bp, Artificial Sequence
  Description of Artificial Sequence: Synthetic oligonucleotide
  Target: LAMA2; (-) strand; PAM type: YTN; PAM sequence: CTT
acccactttctaattgtagt

SEQ ID NO: 248482 - DNA, 20 bp, Artificial Sequence
  Description of Artificial Sequence: Synthetic oligonucleotide
  Target: LAMA2; (-) strand; PAM type: YTN; PAM sequence: TTA
agaatgagacttacccactt

SEQ ID NO: 248483 - DNA, 20 bp, Artificial Sequence
  Description of Artificial Sequence: Synthetic oligonucleotide
  Target: LAMA2; (-) strand; PAM type: YTN; PAM sequence: TTT
aagaatgagacttacccact

SEQ ID NO: 248484 - DNA, 20 bp, Artificial Sequence
  Description of Artificial Sequence: Synthetic oligonucleotide
  Target: LAMA2; (-) strand; PAM type: YTN; PAM sequence: CTA
taatgcaaaagtatatgttt

SEQ ID NO: 248485 - DNA, 20 bp, Artificial Sequence
  Description of Artificial Sequence: Synthetic oligonucleotide
  Target: LAMA2; (-) strand; PAM type: YTN; PAM sequence: TTC
atgtgactataatgcaaaag

SEQ ID NO: 248486 - DNA, 20 bp, Artificial Sequence
  Description of Artificial Sequence: Synthetic oligonucleotide
  Target: LAMA2; (-) strand; PAM type: YTN; PAM sequence: TTT
catgtgactataatgcaaaa

SEQ ID NO: 248487 - DNA, 20 bp, Artificial Sequence
  Description of Artificial Sequence: Synthetic oligonucleotide
  Target: LAMA2; (-) strand; PAM type: YTN; PAM sequence: CTC
agtggtttcatgtgactata

SEQ ID NO: 248488 - DNA, 20 bp, Artificial Sequence
  Description of Artificial Sequence: Synthetic oligonucleotide
  Target: LAMA2; (-) strand; PAM type: YTN; PAM sequence: CTC
acacacacacacacacacac

SEQ ID NO: 248489 - DNA, 20 bp, Artificial Sequence
  Description of Artificial Sequence: Synthetic oligonucleotide
  Target: LAMA2; (-) strand; PAM type: YTN; PAM sequence: CTC
tcacacacacacacacacac

SEQ ID NO: 248490 - DNA, 20 bp, Artificial Sequence
  Description of Artificial Sequence: Synthetic oligonucleotide
  Target: LAMA2; (-) strand; PAM type: YTN; PAM sequence: CTC
tctcacacacacacacacac

SEQ ID NO: 248491 - DNA, 20 bp, Artificial Sequence
  Description of Artificial Sequence: Synthetic oligonucleotide
  Target: LAMA2; (-) strand; PAM type: YTN; PAM sequence: CTC
tctctcacacacacacacac

SEQ ID NO: 248492 - DNA, 20 bp, Artificial Sequence
  Description of Artificial Sequence: Synthetic oligonucleotide
  Target: LAMA2; (-) strand; PAM type: YTN; PAM sequence: CTC
tctctctcacacacacacac

SEQ ID NO: 248493 - DNA, 20 bp, Artificial Sequence
  Description of Artificial Sequence: Synthetic oligonucleotide
  Target: LAMA2; (-) strand; PAM type: YTN; PAM sequence: CTC
tctctctctcacacacacac

SEQ ID NO: 248494 - DNA, 20 bp, Artificial Sequence
  Description of Artificial Sequence: Synthetic oligonucleotide
  Target: LAMA2; (-) strand; PAM type: YTN; PAM sequence: CTC
tctctctctctcacacacac

SEQ ID NO: 248495 - DNA, 20 bp, Artificial Sequence
  Description of Artificial Sequence: Synthetic oligonucleotide
  Target: LAMA2; (-) strand; PAM type: YTN; PAM sequence: CTC
tctctctctctctcacacac

SEQ ID NO: 248496 - DNA, 20 bp, Artificial Sequence
  Description of Artificial Sequence: Synthetic oligonucleotide
  Target: LAMA2; (-) strand; PAM type: YTN; PAM sequence: CTC
tctctctctctctctcacac

SEQ ID NO: 248497 - DNA, 20 bp, Artificial Sequence
  Description of Artificial Sequence: Synthetic oligonucleotide
  Target: LAMA2; (-) strand; PAM type: YTN; PAM sequence: CTC
tctctctctctctctctcac

SEQ ID NO: 248498 - DNA, 20 bp, Artificial Sequence
  Description of Artificial Sequence: Synthetic oligonucleotide
  Target: LAMA2; (-) strand; PAM type: YTN; PAM sequence: CTC
tctctctctctctctctctc

SEQ ID NO: 248499 - DNA, 20 bp, Artificial Sequence
  Description of Artificial Sequence: Synthetic oligonucleotide
  Target: LAMA2; (-) strand; PAM type: YTN; PAM sequence: CTC
tctctctctctctctctctc

SEQ ID NO: 248500 - DNA, 20 bp, Artificial Sequence
  Description of Artificial Sequence: Synthetic oligonucleotide
  Target: LAMA2; (-) strand; PAM type: YTN; PAM sequence: CTC
tctctctctctctctctctc

SEQ ID NO: 248501 - DNA, 20 bp, Artificial Sequence
  Description of Artificial Sequence: Synthetic oligonucleotide
  Target: LAMA2; (-) strand; PAM type: YTN; PAM sequence: TTC
tctctctctctctctctctc

SEQ ID NO: 248502 - DNA, 20 bp, Artificial Sequence
  Description of Artificial Sequence: Synthetic oligonucleotide
  Target: LAMA2; (-) strand; PAM type: YTN; PAM sequence: TTT
ctctctctctctctctctct

SEQ ID NO: 248503 - DNA, 20 bp, Artificial Sequence
  Description of Artificial Sequence: Synthetic oligonucleotide
  Target: LAMA2; (-) strand; PAM type: YTN; PAM sequence: CTT
tctctctctctctctctctc

SEQ ID NO: 248504 - DNA, 20 bp, Artificial Sequence
  Description of Artificial Sequence: Synthetic oligonucleotide
  Target: LAMA2; (-) strand; PAM type: YTN; PAM sequence: TTG
ggctttctctctctctctct

SEQ ID NO: 248505 - DNA, 20 bp, Artificial Sequence
  Description of Artificial Sequence: Synthetic oligonucleotide
  Target: LAMA2; (-) strand; PAM type: YTN; PAM sequence: CTT
gggctttctctctctctctc

SEQ ID NO: 248506 - DNA, 20 bp, Artificial Sequence
  Description of Artificial Sequence: Synthetic oligonucleotide
  Target: LAMA2; (-) strand; PAM type: YTN; PAM sequence: CTC
ttgggctttctctctctctc

SEQ ID NO: 248507 - DNA, 20 bp, Artificial Sequence
  Description of Artificial Sequence: Synthetic oligonucleotide
  Target: LAMA2; (-) strand; PAM type: YTN; PAM sequence: CTC
actcttgggctttctctctc

SEQ ID NO: 248508 - DNA, 20 bp, Artificial Sequence
  Description of Artificial Sequence: Synthetic oligonucleotide
  Target: LAMA2; (-) strand; PAM type: YTN; PAM sequence: CTC
tcactcttgggctttctctc

SEQ ID NO: 248509 - DNA, 20 bp, Artificial Sequence
  Description of Artificial Sequence: Synthetic oligonucleotide
  Target: LAMA2; (-) strand; PAM type: YTN; PAM sequence: CTC
aagacaaactctcactcttg

SEQ ID NO: 248510 - DNA, 20 bp, Artificial Sequence
  Description of Artificial Sequence: Synthetic oligonucleotide
  Target: LAMA2; (-) strand; PAM type: YTN; PAM sequence: CTC
ctcaagacaaactctcactc

SEQ ID NO: 248511 - DNA, 20 bp, Artificial Sequence
  Description of Artificial Sequence: Synthetic oligonucleotide
  Target: LAMA2; (-) strand; PAM type: YTN; PAM sequence: TTC
tcctcaagacaaactctcac

SEQ ID NO: 248512 - DNA, 20 bp, Artificial Sequence
  Description of Artificial Sequence: Synthetic oligonucleotide
  Target: LAMA2; (-) strand; PAM type: YTN; PAM sequence: CTT
ctcctcaagacaaactctca

SEQ ID NO: 248513 - DNA, 20 bp, Artificial Sequence
  Description of Artificial Sequence: Synthetic oligonucleotide
  Target: LAMA2; (-) strand; PAM type: YTN; PAM sequence: TTA
aacacttctcctcaagacaa

SEQ ID NO: 248514 - DNA, 20 bp, Artificial Sequence
  Description of Artificial Sequence: Synthetic oligonucleotide
  Target: LAMA2; (-) strand; PAM type: YTN; PAM sequence: TTT
aaacacttctcctcaagaca

SEQ ID NO: 248515 - DNA, 20 bp, Artificial Sequence
  Description of Artificial Sequence: Synthetic oligonucleotide
  Target: LAMA2; (-) strand; PAM type: YTN; PAM sequence: TTT
taaacacttctcctcaagac

SEQ ID NO: 248516 - DNA, 20 bp, Artificial Sequence
  Description of Artificial Sequence: Synthetic oligonucleotide
  Target: LAMA2; (-) strand; PAM type: YTN; PAM sequence: CTT
ttaaacacttctcctcaaga

SEQ ID NO: 248517 - DNA, 20 bp, Artificial Sequence
  Description of Artificial Sequence: Synthetic oligonucleotide
  Target: LAMA2; (-) strand; PAM type: YTN; PAM sequence: TTC
cttttaaacacttctcctca

SEQ ID NO: 248518 - DNA, 20 bp, Artificial Sequence
  Description of Artificial Sequence: Synthetic oligonucleotide
  Target: LAMA2; (-) strand; PAM type: YTN; PAM sequence: TTA
tatattccttttaaacactt

SEQ ID NO: 248519 - DNA, 20 bp, Artificial Sequence
  Description of Artificial Sequence: Synthetic oligonucleotide
  Target: LAMA2; (-) strand; PAM type: YTN; PAM sequence: TTT
atatattccttttaaacact

SEQ ID NO: 248520 - DNA, 20 bp, Artificial Sequence
  Description of Artificial Sequence: Synthetic oligonucleotide
  Target: LAMA2; (-) strand; PAM type: YTN; PAM sequence: TTG
atttatatattccttttaaa

SEQ ID NO: 248521 - DNA, 20 bp, Artificial Sequence
  Description of Artificial Sequence: Synthetic oligonucleotide
  Target: LAMA2; (-) strand; PAM type: YTN; PAM sequence: CTT
gatttatatattccttttaa

SEQ ID NO: 248522 - DNA, 20 bp, Artificial Sequence
  Description of Artificial Sequence: Synthetic oligonucleotide
  Target: LAMA2; (-) strand; PAM type: YTN; PAM sequence: CTA
tagtgcatccttgatttata

SEQ ID NO: 248523 - DNA, 20 bp, Artificial Sequence
  Description of Artificial Sequence: Synthetic oligonucleotide
  Target: LAMA2; (-) strand; PAM type: YTN; PAM sequence: TTG
gtgatactatagtgcatcct

SEQ ID NO: 248524 - DNA, 20 bp, Artificial Sequence
  Description of Artificial Sequence: Synthetic oligonucleotide
  Target: LAMA2; (-) strand; PAM type: YTN; PAM sequence: TTT
ggtgatactatagtgcatcc

SEQ ID NO: 248525 - DNA, 20 bp, Artificial Sequence
  Description of Artificial Sequence: Synthetic oligonucleotide
  Target: LAMA2; (-) strand; PAM type: YTN; PAM sequence: CTT
tggtgatactatagtgcatc

SEQ ID NO: 248526 - DNA, 20 bp, Artificial Sequence
  Description of Artificial Sequence: Synthetic oligonucleotide
  Target: LAMA2; (-) strand; PAM type: YTN; PAM sequence: TTA
ctttggtgatactatagtgc

SEQ ID NO: 248527 - DNA, 20 bp, Artificial Sequence
  Description of Artificial Sequence: Synthetic oligonucleotide
  Target: LAMA2; (-) strand; PAM type: YTN; PAM sequence: CTG
ttactttggtgatactatag

SEQ ID NO: 248528 - DNA, 20 bp, Artificial Sequence
  Description of Artificial Sequence: Synthetic oligonucleotide
  Target: LAMA2; (-) strand; PAM type: YTN; PAM sequence: TTC
acactgttactttggtgata

SEQ ID NO: 248529 - DNA, 20 bp, Artificial Sequence
  Description of Artificial Sequence: Synthetic oligonucleotide
  Target: LAMA2; (-) strand; PAM type: YTN; PAM sequence: TTC
aagttcacactgttactttg

SEQ ID NO: 248530 - DNA, 20 bp, Artificial Sequence
  Description of Artificial Sequence: Synthetic oligonucleotide
  Target: LAMA2; (-) strand; PAM type: YTN; PAM sequence: TTG
ttcaagttcacactgttact

SEQ ID NO: 248531 - DNA, 20 bp, Artificial Sequence
  Description of Artificial Sequence: Synthetic oligonucleotide
  Target: LAMA2; (-) strand; PAM type: YTN; PAM sequence: TTA
aattgttcaagttcacactg

SEQ ID NO: 248532 - DNA, 20 bp, Artificial Sequence
  Description of Artificial Sequence: Synthetic oligonucleotide
  Target: LAMA2; (-) strand; PAM type: YTN; PAM sequence: CTA
agaggttaaattgttcaagt

SEQ ID NO: 248533 - DNA, 20 bp, Artificial Sequence
  Description of Artificial Sequence: Synthetic oligonucleotide
  Target: LAMA2; (-) strand; PAM type: YTN; PAM sequence: CTC
taagaggttaaattgttcaa

SEQ ID NO: 248534 - DNA, 20 bp, Artificial Sequence
  Description of Artificial Sequence: Synthetic oligonucleotide
  Target: LAMA2; (-) strand; PAM type: YTN; PAM sequence: TTG
tatagatggagcaatcgtgg

SEQ ID NO: 248535 - DNA, 20 bp, Artificial Sequence
  Description of Artificial Sequence: Synthetic oligonucleotide
  Target: LAMA2; (-) strand; PAM type: YTN; PAM sequence: CTA
ttgtatagatggagcaatcg

SEQ ID NO: 248536 - DNA, 20 bp, Artificial Sequence
  Description of Artificial Sequence: Synthetic oligonucleotide
  Target: LAMA2; (-) strand; PAM type: YTN; PAM sequence: TTC
tattgtatagatggagcaat

SEQ ID NO: 248537 - DNA, 20 bp, Artificial Sequence
  Description of Artificial Sequence: Synthetic oligonucleotide
  Target: LAMA2; (-) strand; PAM type: YTN; PAM sequence: TTA
ttctattgtatagatggagc

SEQ ID NO: 248538 - DNA, 20 bp, Artificial Sequence
  Description of Artificial Sequence: Synthetic oligonucleotide
  Target: LAMA2; (-) strand; PAM type: YTN; PAM sequence: TTA
ttattctattgtatagatgg

SEQ ID NO: 248539 - DNA, 20 bp, Artificial Sequence
  Description of Artificial Sequence: Synthetic oligonucleotide
  Target: LAMA2; (-) strand; PAM type: YTN; PAM sequence: TTA
ttattattctattgtataga

SEQ ID NO: 248540 - DNA, 20 bp, Artificial Sequence
  Description of Artificial Sequence: Synthetic oligonucleotide
  Target: LAMA2; (-) strand; PAM type: YTN; PAM sequence: TTA
ttattattattctattgtat

SEQ ID NO: 248541 - DNA, 20 bp, Artificial Sequence
  Description of Artificial Sequence: Synthetic oligonucleotide
  Target: LAMA2; (-) strand; PAM type: YTN; PAM sequence: TTT
attattattattctattgta

SEQ ID NO: 248542 - DNA, 20 bp, Artificial Sequence
  Description of Artificial Sequence: Synthetic oligonucleotide
  Target: LAMA2; (-) strand; PAM type: YTN; PAM sequence: TTG
tataatgtaggtttattatt

SEQ ID NO: 248543 - DNA, 20 bp, Artificial Sequence
  Description of Artificial Sequence: Synthetic oligonucleotide
  Target: LAMA2; (-) strand; PAM type: YTN; PAM sequence: CTC
cggaaattgtataatgtagg

SEQ ID NO: 248544 - DNA, 20 bp, Artificial Sequence
  Description of Artificial Sequence: Synthetic oligonucleotide
  Target: LAMA2; (-) strand; PAM type: YTN; PAM sequence: TTA
atctccggaaattgtataat

SEQ ID NO: 248545 - DNA, 20 bp, Artificial Sequence
  Description of Artificial Sequence: Synthetic oligonucleotide
  Target: LAMA2; (-) strand; PAM type: YTN; PAM sequence: TTT
aatctccggaaattgtataa

SEQ ID NO: 248546 - DNA, 20 bp, Artificial Sequence
  Description of Artificial Sequence: Synthetic oligonucleotide
  Target: LAMA2; (-) strand; PAM type: YTN; PAM sequence: CTC
atttaatctccggaaattgt

SEQ ID NO: 248547 - DNA, 20 bp, Artificial Sequence
  Description of Artificial Sequence: Synthetic oligonucleotide
  Target: LAMA2; (-) strand; PAM type: YTN; PAM sequence: TTA
tcctcatttaatctccggaa

SEQ ID NO: 248548 - DNA, 20 bp, Artificial Sequence
  Description of Artificial Sequence: Synthetic oligonucleotide
  Target: LAMA2; (-) strand; PAM type: YTN; PAM sequence: TTT
atcctcatttaatctccgga

SEQ ID NO: 248549 - DNA, 20 bp, Artificial Sequence
  Description of Artificial Sequence: Synthetic oligonucleotide
  Target: LAMA2; (-) strand; PAM type: YTN; PAM sequence: CTT
tatcctcatttaatctccgg

SEQ ID NO: 248550 - DNA, 20 bp, Artificial Sequence
  Description of Artificial Sequence: Synthetic oligonucleotide
  Target: LAMA2; (-) strand; PAM type: YTN; PAM sequence: CTC
tttatcctcatttaatctcc

SEQ ID NO: 248551 - DNA, 20 bp, Artificial Sequence
  Description of Artificial Sequence: Synthetic oligonucleotide
  Target: LAMA2; (-) strand; PAM type: YTN; PAM sequence: TTC
aaaagtactctttatcctca

SEQ ID NO: 248552 - DNA, 20 bp, Artificial Sequence
  Description of Artificial Sequence: Synthetic oligonucleotide
  Target: LAMA2; (-) strand; PAM type: YTN; PAM sequence: TTT
caaaagtactctttatcctc

SEQ ID NO: 248553 - DNA, 20 bp, Artificial Sequence
  Description of Artificial Sequence: Synthetic oligonucleotide
  Target: LAMA2; (-) strand; PAM type: YTN; PAM sequence: TTA
gaatttcaaaagtactcttt

SEQ ID NO: 248554 - DNA, 20 bp, Artificial Sequence
  Description of Artificial Sequence: Synthetic oligonucleotide
  Target: LAMA2; (-) strand; PAM type: YTN; PAM sequence: TTT
agaatttcaaaagtactctt

SEQ ID NO: 248555 - DNA, 20 bp, Artificial Sequence
  Description of Artificial Sequence: Synthetic oligonucleotide
  Target: LAMA2; (-) strand; PAM type: YTN; PAM sequence: CTT
tagaatttcaaaagtactct

SEQ ID NO: 248556 - DNA, 20 bp, Artificial Sequence
  Description of Artificial Sequence: Synthetic oligonucleotide
  Target: LAMA2; (-) strand; PAM type: YTN; PAM sequence: TTC
atggaactttagaatttcaa

SEQ ID NO: 248557 - DNA, 20 bp, Artificial Sequence
  Description of Artificial Sequence: Synthetic oligonucleotide
  Target: LAMA2; (-) strand; PAM type: YTN; PAM sequence: TTT
catggaactttagaatttca

SEQ ID NO: 248558 - DNA, 20 bp, Artificial Sequence
  Description of Artificial Sequence: Synthetic oligonucleotide
  Target: LAMA2; (-) strand; PAM type: YTN; PAM sequence: TTT
tcatggaactttagaatttc

SEQ ID NO: 248559 - DNA, 20 bp, Artificial Sequence
  Description of Artificial Sequence: Synthetic oligonucleotide
  Target: LAMA2; (-) strand; PAM type: YTN; PAM sequence: CTA
acattttcatggaactttag

SEQ ID NO: 248560 - DNA, 20 bp, Artificial Sequence
  Description of Artificial Sequence: Synthetic oligonucleotide
  Target: LAMA2; (-) strand; PAM type: YTN; PAM sequence: CTG
aaccatatgtaatcaaagct

SEQ ID NO: 248561 - DNA, 20 bp, Artificial Sequence
  Description of Artificial Sequence: Synthetic oligonucleotide
  Target: LAMA2; (-) strand; PAM type: YTN; PAM sequence: TTG
ctgaaccatatgtaatcaaa

SEQ ID NO: 248562 - DNA, 20 bp, Artificial Sequence
  Description of Artificial Sequence: Synthetic oligonucleotide
  Target: LAMA2; (-) strand; PAM type: YTN; PAM sequence: CTC
aaaaaataaggagacccaat

SEQ ID NO: 248563 - DNA, 20 bp, Artificial Sequence
  Description of Artificial Sequence: Synthetic oligonucleotide
  Target: LAMA2; (-) strand; PAM type: YTN; PAM sequence: CTA
cagataatacaaaaaaaaaa

SEQ ID NO: 248564 - DNA, 20 bp, Artificial Sequence
  Description of Artificial Sequence: Synthetic oligonucleotide
  Target: LAMA2; (-) strand; PAM type: YTN; PAM sequence: TTA
gcaagctacagataatacaa

SEQ ID NO: 248565 - DNA, 20 bp, Artificial Sequence
  Description of Artificial Sequence: Synthetic oligonucleotide
  Target: LAMA2; (-) strand; PAM type: YTN; PAM sequence: TTT
agcaagctacagataataca

SEQ ID NO: 248566 - DNA, 20 bp, Artificial Sequence
  Description of Artificial Sequence: Synthetic oligonucleotide
  Target: LAMA2; (-) strand; PAM type: YTN; PAM sequence: TTT
tagcaagctacagataatac

SEQ ID NO: 248567 - DNA, 20 bp, Artificial Sequence
  Description of Artificial Sequence: Synthetic oligonucleotide
  Target: LAMA2; (-) strand; PAM type: YTN; PAM sequence: TTA
ttttagcaagctacagataa

SEQ ID NO: 248568 - DNA, 20 bp, Artificial Sequence
  Description of Artificial Sequence: Synthetic oligonucleotide
  Target: LAMA2; (-) strand; PAM type: YTN; PAM sequence: CTG
gtatgttattttagcaagct

SEQ ID NO: 248569 - DNA, 20 bp, Artificial Sequence
  Description of Artificial Sequence: Synthetic oligonucleotide
  Target: LAMA2; (-) strand; PAM type: YTN; PAM sequence: TTG
aaaacaaaaacatctggtat

SEQ ID NO: 248570 - DNA, 20 bp, Artificial Sequence
  Description of Artificial Sequence: Synthetic oligonucleotide
  Target: LAMA2; (-) strand; PAM type: YTN; PAM sequence: TTT
gaaaacaaaaacatctggta

SEQ ID NO: 248571 - DNA, 20 bp, Artificial Sequence
  Description of Artificial Sequence: Synthetic oligonucleotide
  Target: LAMA2; (-) strand; PAM type: YTN; PAM sequence: TTA
aaatttgaaaacaaaaacat

SEQ ID NO: 248572 - DNA, 20 bp, Artificial Sequence
  Description of Artificial Sequence: Synthetic oligonucleotide
  Target: LAMA2; (-) strand; PAM type: YTN; PAM sequence: TTT
aaaatttgaaaacaaaaaca

SEQ ID NO: 248573 - DNA, 20 bp, Artificial Sequence
  Description of Artificial Sequence: Synthetic oligonucleotide
  Target: LAMA2; (-) strand; PAM type: YTN; PAM sequence: TTT
taaaatttgaaaacaaaaac

SEQ ID NO: 248574 - DNA, 20 bp, Artificial Sequence
  Description of Artificial Sequence: Synthetic oligonucleotide
  Target: LAMA2; (-) strand; PAM type: YTN; PAM sequence: TTT
ttaaaatttgaaaacaaaaa

SEQ ID NO: 248575 - DNA, 20 bp, Artificial Sequence
  Description of Artificial Sequence: Synthetic oligonucleotide
  Target: LAMA2; (-) strand; PAM type: YTN; PAM sequence: CTG
gatttttaaaatttgaaaac

SEQ ID NO: 248576 - DNA, 20 bp, Artificial Sequence
  Description of Artificial Sequence: Synthetic oligonucleotide
  Target: LAMA2; (-) strand; PAM type: YTN; PAM sequence: CTA
taccatggcaacaaatcagt

SEQ ID NO: 248577 - DNA, 20 bp, Artificial Sequence
  Description of Artificial Sequence: Synthetic oligonucleotide
  Target: LAMA2; (-) strand; PAM type: YTN; PAM sequence: CTA
ctataccatggcaacaaatc

SEQ ID NO: 248578 - DNA, 20 bp, Artificial Sequence
  Description of Artificial Sequence: Synthetic oligonucleotide
  Target: LAMA2; (-) strand; PAM type: YTN; PAM sequence: CTG
actactataccatggcaaca

SEQ ID NO: 248579 - DNA, 20 bp, Artificial Sequence
  Description of Artificial Sequence: Synthetic oligonucleotide
  Target: LAMA2; (-) strand; PAM type: YTN; PAM sequence: CTC
tgactactataccatggcaa

SEQ ID NO: 248580 - DNA, 20 bp, Artificial Sequence
  Description of Artificial Sequence: Synthetic oligonucleotide
  Target: LAMA2; (-) strand; PAM type: YTN; PAM sequence: TTC
tctgactactataccatggc

SEQ ID NO: 248581 - DNA, 20 bp, Artificial Sequence
  Description of Artificial Sequence: Synthetic oligonucleotide
  Target: LAMA2; (-) strand; PAM type: YTN; PAM sequence: CTG
cccagagcaagattctctga

SEQ ID NO: 248582 - DNA, 20 bp, Artificial Sequence
  Description of Artificial Sequence: Synthetic oligonucleotide
  Target: LAMA2; (-) strand; PAM type: YTN; PAM sequence: TTG
taactgcccagagcaagatt

SEQ ID NO: 248583 - DNA, 20 bp, Artificial Sequence
  Description of Artificial Sequence: Synthetic oligonucleotide
  Target: LAMA2; (-) strand; PAM type: YTN; PAM sequence: CTC
caaaatattgtaactgccca

SEQ ID NO: 248584 - DNA, 20 bp, Artificial Sequence
  Description of Artificial Sequence: Synthetic oligonucleotide
  Target: LAMA2; (-) strand; PAM type: YTN; PAM sequence: TTA
tgtaaaacaatctccaaaat

SEQ ID NO: 248585 - DNA, 20 bp, Artificial Sequence
  Description of Artificial Sequence: Synthetic oligonucleotide
  Target: LAMA2; (-) strand; PAM type: YTN; PAM sequence: CTA
ttatgtaaaacaatctccaa

SEQ ID NO: 248586 - DNA, 20 bp, Artificial Sequence
  Description of Artificial Sequence: Synthetic oligonucleotide
  Target: LAMA2; (-) strand; PAM type: YTN; PAM sequence: TTG
ctattatgtaaaacaatctc

SEQ ID NO: 248587 - DNA, 20 bp, Artificial Sequence
  Description of Artificial Sequence: Synthetic oligonucleotide
  Target: LAMA2; (-) strand; PAM type: YTN; PAM sequence: TTG
ttgctattatgtaaaacaat

SEQ ID NO: 248588 - DNA, 20 bp, Artificial Sequence
  Description of Artificial Sequence: Synthetic oligonucleotide
  Target: LAMA2; (-) strand; PAM type: YTN; PAM sequence: TTA
ttgttgctattatgtaaaac

SEQ ID NO: 248589 - DNA, 20 bp, Artificial Sequence
  Description of Artificial Sequence: Synthetic oligonucleotide
  Target: LAMA2; (-) strand; PAM type: YTN; PAM sequence: CTG
ttattgttgctattatgtaa

SEQ ID NO: 248590 - DNA, 20 bp, Artificial Sequence
  Description of Artificial Sequence: Synthetic oligonucleotide
  Target: LAMA2; (-) strand; PAM type: YTN; PAM sequence: TTC
ctgttattgttgctattatg

SEQ ID NO: 248591 - DNA, 20 bp, Artificial Sequence
  Description of Artificial Sequence: Synthetic oligonucleotide
  Target: LAMA2; (-) strand; PAM type: YTN; PAM sequence: TTG
ttcctgttattgttgctatt

SEQ ID NO: 248592 - DNA, 20 bp, Artificial Sequence
  Description of Artificial Sequence: Synthetic oligonucleotide
  Target: LAMA2; (-) strand; PAM type: YTN; PAM sequence: TTA
tcattgttcctgttattgtt

SEQ ID NO: 248593 - DNA, 20 bp, Artificial Sequence
  Description of Artificial Sequence: Synthetic oligonucleotide
  Target: LAMA2; (-) strand; PAM type: YTN; PAM sequence: TTA
gcagttatcattgttcctgt

SEQ ID NO: 248594 - DNA, 20 bp, Artificial Sequence
  Description of Artificial Sequence: Synthetic oligonucleotide
  Target: LAMA2; (-) strand; PAM type: YTN; PAM sequence: TTG
taaatgtaaacaagttagca

SEQ ID NO: 248595 - DNA, 20 bp, Artificial Sequence
  Description of Artificial Sequence: Synthetic oligonucleotide
  Target: LAMA2; (-) strand; PAM type: YTN; PAM sequence: TTT
gtaaatgtaaacaagttagc

SEQ ID NO: 248596 - DNA, 20 bp, Artificial Sequence
  Description of Artificial Sequence: Synthetic oligonucleotide
  Target: LAMA2; (-) strand; PAM type: YTN; PAM sequence: TTT
tgtaaatgtaaacaagttag

SEQ ID NO: 248597 - DNA, 20 bp, Artificial Sequence
  Description of Artificial Sequence: Synthetic oligonucleotide
  Target: LAMA2; (-) strand; PAM type: YTN; PAM sequence: TTG
acattttgtaaatgtaaaca

SEQ ID NO: 248598 - DNA, 20 bp, Artificial Sequence
  Description of Artificial Sequence: Synthetic oligonucleotide
  Target: LAMA2; (-) strand; PAM type: YTN; PAM sequence: TTT
gacattttgtaaatgtaaac

SEQ ID NO: 248599 - DNA, 20 bp, Artificial Sequence
  Description of Artificial Sequence: Synthetic oligonucleotide
  Target: LAMA2; (-) strand; PAM type: YTN; PAM sequence: CTA
gaatagtatttgacattttg

SEQ ID NO: 248600 - DNA, 20 bp, Artificial Sequence
  Description of Artificial Sequence: Synthetic oligonucleotide
  Target: LAMA2; (-) strand; PAM type: YTN; PAM sequence: TTG
aataatctagaatagtattt

SEQ ID NO: 248601 - DNA, 20 bp, Artificial Sequence
  Description of Artificial Sequence: Synthetic oligonucleotide
  Target: LAMA2; (-) strand; PAM type: YTN; PAM sequence: TTC
aattgaataatctagaatag

SEQ ID NO: 248602 - DNA, 20 bp, Artificial Sequence
  Description of Artificial Sequence: Synthetic oligonucleotide
  Target: LAMA2; (-) strand; PAM type: YTN; PAM sequence: TTG
tgatgattcaattgaataat

SEQ ID NO: 248603 - DNA, 20 bp, Artificial Sequence
  Description of Artificial Sequence: Synthetic oligonucleotide
  Target: LAMA2; (-) strand; PAM type: YTN; PAM sequence: TTG
ttgtgatgattcaattgaat

SEQ ID NO: 248604 - DNA, 20 bp, Artificial Sequence
  Description of Artificial Sequence: Synthetic oligonucleotide
  Target: LAMA2; (-) strand; PAM type: YTN; PAM sequence: CTC
atagcgttgttgtgatgatt

SEQ ID NO: 248605 - DNA, 20 bp, Artificial Sequence
  Description of Artificial Sequence: Synthetic oligonucleotide
  Target: LAMA2; (-) strand; PAM type: YTN; PAM sequence: CTA
cctcatagcgttgttgtgat

SEQ ID NO: 248606 - DNA, 20 bp, Artificial Sequence
  Description of Artificial Sequence: Synthetic oligonucleotide
  Target: LAMA2; (-) strand; PAM type: YTN; PAM sequence: CTC
catcagggaaatcaaaacaa

SEQ ID NO: 248607 - DNA, 20 bp, Artificial Sequence
  Description of Artificial Sequence: Synthetic oligonucleotide
  Target: LAMA2; (-) strand; PAM type: YTN; PAM sequence: TTG
tgtcaagtctccatcaggga

SEQ ID NO: 248608 - DNA, 20 bp, Artificial Sequence
  Description of Artificial Sequence: Synthetic oligonucleotide
  Target: LAMA2; (-) strand; PAM type: YTN; PAM sequence: TTT
gtgtcaagtctccatcaggg

SEQ ID NO: 248609 - DNA, 20 bp, Artificial Sequence
  Description of Artificial Sequence: Synthetic oligonucleotide
  Target: LAMA2; (-) strand; PAM type: YTN; PAM sequence: CTT
tgtgtcaagtctccatcagg

SEQ ID NO: 248610 - DNA, 20 bp, Artificial Sequence
  Description of Artificial Sequence: Synthetic oligonucleotide
  Target: LAMA2; (-) strand; PAM type: YTN; PAM sequence: CTC
tttgtgtcaagtctccatca

SEQ ID NO: 248611 - DNA, 20 bp, Artificial Sequence
  Description of Artificial Sequence: Synthetic oligonucleotide
  Target: LAMA2; (-) strand; PAM type: YTN; PAM sequence: CTC
tctttgtgtcaagtctccat

SEQ ID NO: 248612 - DNA, 20 bp, Artificial Sequence
  Description of Artificial Sequence: Synthetic oligonucleotide
  Target: LAMA2; (-) strand; PAM type: YTN; PAM sequence: TTA
gtctctctttgtgtcaagtc

SEQ ID NO: 248613 - DNA, 20 bp, Artificial Sequence
  Description of Artificial Sequence: Synthetic oligonucleotide
  Target: LAMA2; (-) strand; PAM type: YTN; PAM sequence: CTT
agtctctctttgtgtcaagt

SEQ ID NO: 248614 - DNA, 20 bp, Artificial Sequence
  Description of Artificial Sequence: Synthetic oligonucleotide
  Target: LAMA2; (-) strand; PAM type: YTN; PAM sequence: TTA
cttagtctctctttgtgtca

SEQ ID NO: 248615 - DNA, 20 bp, Artificial Sequence
  Description of Artificial Sequence: Synthetic oligonucleotide
  Target: LAMA2; (-) strand; PAM type: YTN; PAM sequence: CTG
tgtgtgacaggagtgaatta

SEQ ID NO: 248616 - DNA, 20 bp, Artificial Sequence
  Description of Artificial Sequence: Synthetic oligonucleotide
  Target: LAMA2; (-) strand; PAM type: YTN; PAM sequence: TTA
gctgtgtgtgacaggagtga

SEQ ID NO: 248617 - DNA, 20 bp, Artificial Sequence
  Description of Artificial Sequence: Synthetic oligonucleotide
  Target: LAMA2; (-) strand; PAM type: YTN; PAM sequence: TTT
agctgtgtgtgacaggagtg

SEQ ID NO: 248618 - DNA, 20 bp, Artificial Sequence
  Description of Artificial Sequence: Synthetic oligonucleotide
  Target: LAMA2; (-) strand; PAM type: YTN; PAM sequence: TTT
tagctgtgtgtgacaggagt

SEQ ID NO: 248619 - DNA, 20 bp, Artificial Sequence
  Description of Artificial Sequence: Synthetic oligonucleotide
  Target: LAMA2; (-) strand; PAM type: YTN; PAM sequence: TTT
ttagctgtgtgtgacaggag

SEQ ID NO: 248620 - DNA, 20 bp, Artificial Sequence
  Description of Artificial Sequence: Synthetic oligonucleotide
  Target: LAMA2; (-) strand; PAM type: YTN; PAM sequence: CTT
tttagctgtgtgtgacagga

SEQ ID NO: 248621 - DNA, 20 bp, Artificial Sequence
  Description of Artificial Sequence: Synthetic oligonucleotide
  Target: LAMA2; (-) strand; PAM type: YTN; PAM sequence: CTG
ccactttttagctgtgtgtg

SEQ ID NO: 248622 - DNA, 20 bp, Artificial Sequence
  Description of Artificial Sequence: Synthetic oligonucleotide
  Target: LAMA2; (-) strand; PAM type: YTN; PAM sequence: CTC
tgccactttttagctgtgtg

SEQ ID NO: 248623 - DNA, 20 bp, Artificial Sequence
  Description of Artificial Sequence: Synthetic oligonucleotide
  Target: LAMA2; (-) strand; PAM type: YTN; PAM sequence: CTC
agctctgccactttttagct

SEQ ID NO: 248624 - DNA, 20 bp, Artificial Sequence
  Description of Artificial Sequence: Synthetic oligonucleotide
  Target: LAMA2; (-) strand; PAM type: YTN; PAM sequence: CTG
gggcaaaacactcagctctg

SEQ ID NO: 248625 - DNA, 20 bp, Artificial Sequence
  Description of Artificial Sequence: Synthetic oligonucleotide
  Target: LAMA2; (-) strand; PAM type: YTN; PAM sequence: CTA
cctggggcaaaacactcagc

SEQ ID NO: 248626 - DNA, 20 bp, Artificial Sequence
  Description of Artificial Sequence: Synthetic oligonucleotide
  Target: LAMA2; (-) strand; PAM type: YTN; PAM sequence: CTG
gactacctggggcaaaacac

SEQ ID NO: 248627 - DNA, 20 bp, Artificial Sequence
  Description of Artificial Sequence: Synthetic oligonucleotide
  Target: LAMA2; (-) strand; PAM type: YTN; PAM sequence: CTA
gaactggactacctggggca

SEQ ID NO: 248628 - DNA, 20 bp, Artificial Sequence
  Description of Artificial Sequence: Synthetic oligonucleotide
  Target: LAMA2; (-) strand; PAM type: YTN; PAM sequence: TTC
tagaactggactacctgggg

SEQ ID NO: 248629 - DNA, 20 bp, Artificial Sequence
  Description of Artificial Sequence: Synthetic oligonucleotide
  Target: LAMA2; (-) strand; PAM type: YTN; PAM sequence: TTA
ggaagatggtatagcatagt

SEQ ID NO: 248630 - DNA, 20 bp, Artificial Sequence
  Description of Artificial Sequence: Synthetic oligonucleotide
  Target: LAMA2; (-) strand; PAM type: YTN; PAM sequence: TTG
tacagatagtattaggaaga

SEQ ID NO: 248631 - DNA, 20 bp, Artificial Sequence
  Description of Artificial Sequence: Synthetic oligonucleotide
  Target: LAMA2; (-) strand; PAM type: YTN; PAM sequence: CTT
gtacagatagtattaggaag

SEQ ID NO: 248632 - DNA, 20 bp, Artificial Sequence
  Description of Artificial Sequence: Synthetic oligonucleotide
  Target: LAMA2; (-) strand; PAM type: YTN; PAM sequence: TTC
ttgtacagatagtattagga

SEQ ID NO: 248633 - DNA, 20 bp, Artificial Sequence
  Description of Artificial Sequence: Synthetic oligonucleotide
  Target: LAMA2; (-) strand; PAM type: YTN; PAM sequence: TTT
cttgtacagatagtattagg

SEQ ID NO: 248634 - DNA, 20 bp, Artificial Sequence
  Description of Artificial Sequence: Synthetic oligonucleotide
  Target: LAMA2; (-) strand; PAM type: YTN; PAM sequence: TTA
ggagaaaatttcttgtacag

SEQ ID NO: 248635 - DNA, 20 bp, Artificial Sequence
  Description of Artificial Sequence: Synthetic oligonucleotide
  Target: LAMA2; (-) strand; PAM type: YTN; PAM sequence: TTC
attaggagaaaatttcttgt

SEQ ID NO: 248636 - DNA, 20 bp, Artificial Sequence
  Description of Artificial Sequence: Synthetic oligonucleotide
  Target: LAMA2; (-) strand; PAM type: YTN; PAM sequence: TTT
cattaggagaaaatttcttg

SEQ ID NO: 248637 - DNA, 20 bp, Artificial Sequence
  Description of Artificial Sequence: Synthetic oligonucleotide
  Target: LAMA2; (-) strand; PAM type: YTN; PAM sequence: TTA
tatagggtacagcaatacat

SEQ ID NO: 248638 - DNA, 20 bp, Artificial Sequence
  Description of Artificial Sequence: Synthetic oligonucleotide
  Target: LAMA2; (-) strand; PAM type: YTN; PAM sequence: CTT
atatagggtacagcaataca

SEQ ID NO: 248639 - DNA, 20 bp, Artificial Sequence
  Description of Artificial Sequence: Synthetic oligonucleotide
  Target: LAMA2; (-) strand; PAM type: YTN; PAM sequence: CTA
aagcttatatagggtacagc

SEQ ID NO: 248640 - DNA, 20 bp, Artificial Sequence
  Description of Artificial Sequence: Synthetic oligonucleotide
  Target: LAMA2; (-) strand; PAM type: YTN; PAM sequence: TTA
gagctaaagcttatataggg

SEQ ID NO: 248641 - DNA, 20 bp, Artificial Sequence
  Description of Artificial Sequence: Synthetic oligonucleotide
  Target: LAMA2; (-) strand; PAM type: YTN; PAM sequence: TTT
agagctaaagcttatatagg

SEQ ID NO: 248642 - DNA, 20 bp, Artificial Sequence
  Description of Artificial Sequence: Synthetic oligonucleotide
  Target: LAMA2; (-) strand; PAM type: YTN; PAM sequence: TTT
tagagctaaagcttatatag

SEQ ID NO: 248643 - DNA, 20 bp, Artificial Sequence
  Description of Artificial Sequence: Synthetic oligonucleotide
  Target: LAMA2; (-) strand; PAM type: YTN; PAM sequence: CTG
caattttagagctaaagctt

SEQ ID NO: 248644 - DNA, 20 bp, Artificial Sequence
  Description of Artificial Sequence: Synthetic oligonucleotide
  Target: LAMA2; (-) strand; PAM type: YTN; PAM sequence: CTC
tgcaattttagagctaaagc

SEQ ID NO: 248645 - DNA, 20 bp, Artificial Sequence
  Description of Artificial Sequence: Synthetic oligonucleotide
  Target: LAMA2; (-) strand; PAM type: YTN; PAM sequence: CTG
ctctgcaattttagagctaa

SEQ ID NO: 248646 - DNA, 20 bp, Artificial Sequence
  Description of Artificial Sequence: Synthetic oligonucleotide
  Target: LAMA2; (-) strand; PAM type: YTN; PAM sequence: TTC
ctgctctgcaattttagagc

SEQ ID NO: 248647 - DNA, 20 bp, Artificial Sequence
  Description of Artificial Sequence: Synthetic oligonucleotide
  Target: LAMA2; (-) strand; PAM type: YTN; PAM sequence: CTT
cctgctctgcaattttagag

SEQ ID NO: 248648 - DNA, 20 bp, Artificial Sequence
  Description of Artificial Sequence: Synthetic oligonucleotide
  Target: LAMA2; (-) strand; PAM type: YTN; PAM sequence: CTG
cttcctgctctgcaatttta

SEQ ID NO: 248649 - DNA, 20 bp, Artificial Sequence
  Description of Artificial Sequence: Synthetic oligonucleotide
  Target: LAMA2; (-) strand; PAM type: YTN; PAM sequence: TTA
tccacctgcttcctgctctg

SEQ ID NO: 248650 - DNA, 20 bp, Artificial Sequence
  Description of Artificial Sequence: Synthetic oligonucleotide
  Target: LAMA2; (-) strand; PAM type: YTN; PAM sequence: TTT
atccacctgcttcctgctct

SEQ ID NO: 248651 - DNA, 20 bp, Artificial Sequence
  Description of Artificial Sequence: Synthetic oligonucleotide
  Target: LAMA2; (-) strand; PAM type: YTN; PAM sequence: CTT
tatccacctgcttcctgctc

SEQ ID NO: 248652 - DNA, 20 bp, Artificial Sequence
  Description of Artificial Sequence: Synthetic oligonucleotide
  Target: LAMA2; (-) strand; PAM type: YTN; PAM sequence: TTA
gctttatccacctgcttcct

SEQ ID NO: 248653 - DNA, 20 bp, Artificial Sequence
  Description of Artificial Sequence: Synthetic oligonucleotide
  Target: LAMA2; (-) strand; PAM type: YTN; PAM sequence: TTG
tagggtaatagaatagcaat

SEQ ID NO: 248654 - DNA, 20 bp, Artificial Sequence
  Description of Artificial Sequence: Synthetic oligonucleotide
  Target: LAMA2; (-) strand; PAM type: YTN; PAM sequence: CTA
ttgtagggtaatagaatagc

SEQ ID NO: 248655 - DNA, 20 bp, Artificial Sequence
  Description of Artificial Sequence: Synthetic oligonucleotide
  Target: LAMA2; (-) strand; PAM type: YTN; PAM sequence: TTC
tattgtagggtaatagaata

SEQ ID NO: 248656 - DNA, 20 bp, Artificial Sequence
  Description of Artificial Sequence: Synthetic oligonucleotide
  Target: LAMA2; (-) strand; PAM type: YTN; PAM sequence: TTT
ctattgtagggtaatagaat

SEQ ID NO: 248657 - DNA, 20 bp, Artificial Sequence
  Description of Artificial Sequence: Synthetic oligonucleotide
  Target: LAMA2; (-) strand; PAM type: YTN; PAM sequence: CTG
aaatttctattgtagggtaa

SEQ ID NO: 248658 - DNA, 20 bp, Artificial Sequence
  Description of Artificial Sequence: Synthetic oligonucleotide
  Target: LAMA2; (-) strand; PAM type: YTN; PAM sequence: TTA
gtccactgaaatttctattg

SEQ ID NO: 248659 - DNA, 20 bp, Artificial Sequence
  Description of Artificial Sequence: Synthetic oligonucleotide
  Target: LAMA2; (-) strand; PAM type: YTN; PAM sequence: TTA
gagttagtccactgaaattt

SEQ ID NO: 248660 - DNA, 20 bp, Artificial Sequence
  Description of Artificial Sequence: Synthetic oligonucleotide
  Target: LAMA2; (-) strand; PAM type: YTN; PAM sequence: TTA
aatattagagttagtccact

SEQ ID NO: 248661 - DNA, 20 bp, Artificial Sequence
  Description of Artificial Sequence: Synthetic oligonucleotide
  Target: LAMA2; (-) strand; PAM type: YTN; PAM sequence: TTT
aaatattagagttagtccac

SEQ ID NO: 248662 - DNA, 20 bp, Artificial Sequence
  Description of Artificial Sequence: Synthetic oligonucleotide
  Target: LAMA2; (-) strand; PAM type: YTN; PAM sequence: TTA
tttaaatattagagttagtc

SEQ ID NO: 248663 - DNA, 20 bp, Artificial Sequence
  Description of Artificial Sequence: Synthetic oligonucleotide
  Target: LAMA2; (-) strand; PAM type: YTN; PAM sequence: TTA
acagtgggttatttaaatat

SEQ ID NO: 248664 - DNA, 20 bp, Artificial Sequence
  Description of Artificial Sequence: Synthetic oligonucleotide
  Target: LAMA2; (-) strand; PAM type: YTN; PAM sequence: TTA
ttaacagtgggttatttaaa

SEQ ID NO: 248665 - DNA, 20 bp, Artificial Sequence
  Description of Artificial Sequence: Synthetic oligonucleotide
  Target: LAMA2; (-) strand; PAM type: YTN; PAM sequence: TTT
attaacagtgggttatttaa

SEQ ID NO: 248666 - DNA, 20 bp, Artificial Sequence
  Description of Artificial Sequence: Synthetic oligonucleotide
  Target: LAMA2; (-) strand; PAM type: YTN; PAM sequence: TTG
caccatgccagtttattaac

SEQ ID NO: 248667 - DNA, 20 bp, Artificial Sequence
  Description of Artificial Sequence: Synthetic oligonucleotide
  Target: LAMA2; (-) strand; PAM type: YTN; PAM sequence: CTG
ggaaacatgcaattgcacca

SEQ ID NO: 248668 - DNA, 20 bp, Artificial Sequence
  Description of Artificial Sequence: Synthetic oligonucleotide
  Target: LAMA2; (-) strand; PAM type: YTN; PAM sequence: CTC
actgggaaacatgcaattgc

SEQ ID NO: 248669 - DNA, 20 bp, Artificial Sequence
  Description of Artificial Sequence: Synthetic oligonucleotide
  Target: LAMA2; (-) strand; PAM type: YTN; PAM sequence: CTG
atctcactgggaaacatgca

SEQ ID NO: 248670 - DNA, 20 bp, Artificial Sequence
  Description of Artificial Sequence: Synthetic oligonucleotide
  Target: LAMA2; (-) strand; PAM type: YTN; PAM sequence: CTA
gatctgatctcactgggaaa

SEQ ID NO: 248671 - DNA, 20 bp, Artificial Sequence
  Description of Artificial Sequence: Synthetic oligonucleotide
  Target: LAMA2; (-) strand; PAM type: YTN; PAM sequence: TTG
gactagatctgatctcactg

SEQ ID NO: 248672 - DNA, 20 bp, Artificial Sequence
  Description of Artificial Sequence: Synthetic oligonucleotide
  Target: LAMA2; (-) strand; PAM type: YTN; PAM sequence: CTG
agacattggactagatctga

SEQ ID NO: 248673 - DNA, 20 bp, Artificial Sequence
  Description of Artificial Sequence: Synthetic oligonucleotide
  Target: LAMA2; (-) strand; PAM type: YTN; PAM sequence: CTG
ctgagacattggactagatc

SEQ ID NO: 248674 - DNA, 20 bp, Artificial Sequence
  Description of Artificial Sequence: Synthetic oligonucleotide
  Target: LAMA2; (-) strand; PAM type: YTN; PAM sequence: CTA
tatctgctgagacattggac

SEQ ID NO: 248675 - DNA, 20 bp, Artificial Sequence
  Description of Artificial Sequence: Synthetic oligonucleotide
  Target: LAMA2; (-) strand; PAM type: YTN; PAM sequence: TTC
ctatatctgctgagacattg

SEQ ID NO: 248676 - DNA, 20 bp, Artificial Sequence
  Description of Artificial Sequence: Synthetic oligonucleotide
  Target: LAMA2; (-) strand; PAM type: YTN; PAM sequence: CTG
gggtgatagaaaaggaattc

SEQ ID NO: 248677 - DNA, 20 bp, Artificial Sequence
  Description of Artificial Sequence: Synthetic oligonucleotide
  Target: LAMA2; (-) strand; PAM type: YTN; PAM sequence: CTG
tctggggtgatagaaaagga

SEQ ID NO: 248678 - DNA, 20 bp, Artificial Sequence
  Description of Artificial Sequence: Synthetic oligonucleotide
  Target: LAMA2; (-) strand; PAM type: YTN; PAM sequence: CTG
aagatacatgagtagagatc

SEQ ID NO: 248679 - DNA, 20 bp, Artificial Sequence
  Description of Artificial Sequence: Synthetic oligonucleotide
  Target: LAMA2; (-) strand; PAM type: YTN; PAM sequence: CTC
tgaagatacatgagtagaga

SEQ ID NO: 248680 - DNA, 20 bp, Artificial Sequence
  Description of Artificial Sequence: Synthetic oligonucleotide
  Target: LAMA2; (-) strand; PAM type: YTN; PAM sequence: TTC
tctgaagatacatgagtaga

SEQ ID NO: 248681 - DNA, 20 bp, Artificial Sequence
  Description of Artificial Sequence: Synthetic oligonucleotide
  Target: LAMA2; (-) strand; PAM type: YTN; PAM sequence: TTT
ctctgaagatacatgagtag

SEQ ID NO: 248682 - DNA, 20 bp, Artificial Sequence
  Description of Artificial Sequence: Synthetic oligonucleotide
  Target: LAMA2; (-) strand; PAM type: YTN; PAM sequence: TTG
tagggtatccatttctctga

SEQ ID NO: 248683 - DNA, 20 bp, Artificial Sequence
  Description of Artificial Sequence: Synthetic oligonucleotide
  Target: LAMA2; (-) strand; PAM type: YTN; PAM sequence: TTT
gtagggtatccatttctctg

SEQ ID NO: 248684 - DNA, 20 bp, Artificial Sequence
  Description of Artificial Sequence: Synthetic oligonucleotide
  Target: LAMA2; (-) strand; PAM type: YTN; PAM sequence: CTT
tgtagggtatccatttctct

SEQ ID NO: 248685 - DNA, 20 bp, Artificial Sequence
  Description of Artificial Sequence: Synthetic oligonucleotide
  Target: LAMA2; (-) strand; PAM type: YTN; PAM sequence: CTG
ctttgtagggtatccatttc

SEQ ID NO: 248686 - DNA, 20 bp, Artificial Sequence
  Description of Artificial Sequence: Synthetic oligonucleotide
  Target: LAMA2; (-) strand; PAM type: YTN; PAM sequence: TTG
aaaatggaatgtgctgcttt

SEQ ID NO: 248687 - DNA, 20 bp, Artificial Sequence
  Description of Artificial Sequence: Synthetic oligonucleotide
  Target: LAMA2; (-) strand; PAM type: YTN; PAM sequence: CTG
ttgaaaatggaatgtgctgc

SEQ ID NO: 248688 - DNA, 20 bp, Artificial Sequence
  Description of Artificial Sequence: Synthetic oligonucleotide
  Target: LAMA2; (-) strand; PAM type: YTN; PAM sequence: CTA
gagctgttgaaaatggaatg

SEQ ID NO: 248689 - DNA, 20 bp, Artificial Sequence
  Description of Artificial Sequence: Synthetic oligonucleotide
  Target: LAMA2; (-) strand; PAM type: YTN; PAM sequence: CTA
aaataaataaataaaataat

SEQ ID NO: 248690 - DNA, 20 bp, Artificial Sequence
  Description of Artificial Sequence: Synthetic oligonucleotide
  Target: LAMA2; (-) strand; PAM type: YTN; PAM sequence: TTC
atctaaaataaataaataaa

SEQ ID NO: 248691 - DNA, 20 bp, Artificial Sequence
  Description of Artificial Sequence: Synthetic oligonucleotide
  Target: LAMA2; (-) strand; PAM type: YTN; PAM sequence: CTT
catctaaaataaataaataa

SEQ ID NO: 248692 - DNA, 20 bp, Artificial Sequence
  Description of Artificial Sequence: Synthetic oligonucleotide
  Target: LAMA2; (-) strand; PAM type: YTN; PAM sequence: TTG
gacaacacagcagaacttca

SEQ ID NO: 248693 - DNA, 20 bp, Artificial Sequence
  Description of Artificial Sequence: Synthetic oligonucleotide
  Target: LAMA2; (-) strand; PAM type: YTN; PAM sequence: CTT
ggacaacacagcagaacttc

SEQ ID NO: 248694 - DNA, 20 bp, Artificial Sequence
  Description of Artificial Sequence: Synthetic oligonucleotide
  Target: LAMA2; (-) strand; PAM type: YTN; PAM sequence: TTG
agaccagcttggacaacaca

SEQ ID NO: 248695 - DNA, 20 bp, Artificial Sequence
  Description of Artificial Sequence: Synthetic oligonucleotide
  Target: LAMA2; (-) strand; PAM type: YTN; PAM sequence: TTT
gagaccagcttggacaacac

SEQ ID NO: 248696 - DNA, 20 bp, Artificial Sequence
  Description of Artificial Sequence: Synthetic oligonucleotide
  Target: LAMA2; (-) strand; PAM type: YTN; PAM sequence: TTG
agcccaggggtttgagacca

SEQ ID NO: 248697 - DNA, 20 bp, Artificial Sequence
  Description of Artificial Sequence: Synthetic oligonucleotide
  Target: LAMA2; (-) strand; PAM type: YTN; PAM sequence: CTT
gagcccaggggtttgagacc

SEQ ID NO: 248698 - DNA, 20 bp, Artificial Sequence
  Description of Artificial Sequence: Synthetic oligonucleotide
  Target: LAMA2; (-) strand; PAM type: YTN; PAM sequence: TTG
cttgagcccaggggtttgag

SEQ ID NO: 248699 - DNA, 20 bp, Artificial Sequence
  Description of Artificial Sequence: Synthetic oligonucleotide
  Target: LAMA2; (-) strand; PAM type: YTN; PAM sequence: CTG
aggcaggaggattgcttgag

SEQ ID NO: 248700 - DNA, 20 bp, Artificial Sequence
  Description of Artificial Sequence: Synthetic oligonucleotide
  Target: LAMA2; (-) strand; PAM type: YTN; PAM sequence: TTG
ggaggctgaggcaggaggat

SEQ ID NO: 248701 - DNA, 20 bp, Artificial Sequence
  Description of Artificial Sequence: Synthetic oligonucleotide
  Target: LAMA2; (-) strand; PAM type: YTN; PAM sequence: CTT
gggaggctgaggcaggagga

SEQ ID NO: 248702 - DNA, 20 bp, Artificial Sequence
  Description of Artificial Sequence: Synthetic oligonucleotide
  Target: LAMA2; (-) strand; PAM type: YTN; PAM sequence: CTA
cttgggaggctgaggcagga

SEQ ID NO: 248703 - DNA, 20 bp, Artificial Sequence
  Description of Artificial Sequence: Synthetic oligonucleotide
  Target: LAMA2; (-) strand; PAM type: YTN; PAM sequence: TTC
cagctacttgggaggctgag

SEQ ID NO: 248704 - DNA, 20 bp, Artificial Sequence
  Description of Artificial Sequence: Synthetic oligonucleotide
  Target: LAMA2; (-) strand; PAM type: YTN; PAM sequence: CTA
taattccagctacttgggag

SEQ ID NO: 248705 - DNA, 20 bp, Artificial Sequence
  Description of Artificial Sequence: Synthetic oligonucleotide
  Target: LAMA2; (-) strand; PAM type: YTN; PAM sequence: CTA
gatgcagtggcacacaacta

SEQ ID NO: 248706 - DNA, 20 bp, Artificial Sequence
  Description of Artificial Sequence: Synthetic oligonucleotide
  Target: LAMA2; (-) strand; PAM type: YTN; PAM sequence: CTG
gagctagatgcagtggcaca

SEQ ID NO: 248707 - DNA, 20 bp, Artificial Sequence
  Description of Artificial Sequence: Synthetic oligonucleotide
  Target: LAMA2; (-) strand; PAM type: YTN; PAM sequence: CTA
aaatctggagctagatgcag

SEQ ID NO: 248708 - DNA, 20 bp, Artificial Sequence
  Description of Artificial Sequence: Synthetic oligonucleotide
  Target: LAMA2; (-) strand; PAM type: YTN; PAM sequence: TTC
taaaatctggagctagatgc

SEQ ID NO: 248709 - DNA, 20 bp, Artificial Sequence
  Description of Artificial Sequence: Synthetic oligonucleotide
  Target: LAMA2; (-) strand; PAM type: YTN; PAM sequence: CTT
ctaaaatctggagctagatg

SEQ ID NO: 248710 - DNA, 20 bp, Artificial Sequence
  Description of Artificial Sequence: Synthetic oligonucleotide
  Target: LAMA2; (-) strand; PAM type: YTN; PAM sequence: TTA
acttctaaaatctggagcta

SEQ ID NO: 248711 - DNA, 20 bp, Artificial Sequence
  Description of Artificial Sequence: Synthetic oligonucleotide
  Target: LAMA2; (-) strand; PAM type: YTN; PAM sequence: CTG
tgtaagaattaacttctaaa

SEQ ID NO: 248712 - DNA, 20 bp, Artificial Sequence
  Description of Artificial Sequence: Synthetic oligonucleotide
  Target: LAMA2; (-) strand; PAM type: YTN; PAM sequence: CTC
cagaaaaccctgtgtaagaa

SEQ ID NO: 248713 - DNA, 20 bp, Artificial Sequence
  Description of Artificial Sequence: Synthetic oligonucleotide
  Target: LAMA2; (-) strand; PAM type: YTN; PAM sequence: CTG
tccctccagaaaaccctgtg

SEQ ID NO: 248714 - DNA, 20 bp, Artificial Sequence
  Description of Artificial Sequence: Synthetic oligonucleotide
  Target: LAMA2; (-) strand; PAM type: YTN; PAM sequence: TTC
tgtccctccagaaaaccctg

SEQ ID NO: 248715 - DNA, 20 bp, Artificial Sequence
  Description of Artificial Sequence: Synthetic oligonucleotide
  Target: LAMA2; (-) strand; PAM type: YTN; PAM sequence: TTA
gttctgtccctccagaaaac

SEQ ID NO: 248716 - DNA, 20 bp, Artificial Sequence
  Description of Artificial Sequence: Synthetic oligonucleotide
  Target: LAMA2; (-) strand; PAM type: YTN; PAM sequence: CTA
ttagttctgtccctccagaa

SEQ ID NO: 248717 - DNA, 20 bp, Artificial Sequence
  Description of Artificial Sequence: Synthetic oligonucleotide
  Target: LAMA2; (-) strand; PAM type: YTN; PAM sequence: TTC
atatatacatcaatcctatt

SEQ ID NO: 248718 - DNA, 20 bp, Artificial Sequence
  Description of Artificial Sequence: Synthetic oligonucleotide
  Target: LAMA2; (-) strand; PAM type: YTN; PAM sequence: CTT
catatatacatcaatcctat

SEQ ID NO: 248719 - DNA, 20 bp, Artificial Sequence
  Description of Artificial Sequence: Synthetic oligonucleotide
  Target: LAMA2; (-) strand; PAM type: YTN; PAM sequence: CTC
cccttcatatatacatcaat

SEQ ID NO: 248720 - DNA, 20 bp, Artificial Sequence
  Description of Artificial Sequence: Synthetic oligonucleotide
  Target: LAMA2; (-) strand; PAM type: YTN; PAM sequence: CTA
acaaactccccttcatatat

SEQ ID NO: 248721 - DNA, 20 bp, Artificial Sequence
  Description of Artificial Sequence: Synthetic oligonucleotide
  Target: LAMA2; (-) strand; PAM type: YTN; PAM sequence: CTC
ctaacaaactccccttcata

SEQ ID NO: 248722 - DNA, 20 bp, Artificial Sequence
  Description of Artificial Sequence: Synthetic oligonucleotide
  Target: LAMA2; (-) strand; PAM type: YTN; PAM sequence: TTC
tcctaacaaactccccttca

SEQ ID NO: 248723 - DNA, 20 bp, Artificial Sequence
  Description of Artificial Sequence: Synthetic oligonucleotide
  Target: LAMA2; (-) strand; PAM type: YTN; PAM sequence: TTG
tgatcatgtgagccaattct

SEQ ID NO: 248724 - DNA, 20 bp, Artificial Sequence
  Description of Artificial Sequence: Synthetic oligonucleotide
  Target: LAMA2; (-) strand; PAM type: YTN; PAM sequence: CTT
gtgatcatgtgagccaattc

SEQ ID NO: 248725 - DNA, 20 bp, Artificial Sequence
  Description of Artificial Sequence: Synthetic oligonucleotide
  Target: LAMA2; (-) strand; PAM type: YTN; PAM sequence: TTC
accttgtgatcatgtgagcc

SEQ ID NO: 248726 - DNA, 20 bp, Artificial Sequence
  Description of Artificial Sequence: Synthetic oligonucleotide
  Target: LAMA2; (-) strand; PAM type: YTN; PAM sequence: CTT
caccttgtgatcatgtgagc

SEQ ID NO: 248727 - DNA, 20 bp, Artificial Sequence
  Description of Artificial Sequence: Synthetic oligonucleotide
  Target: LAMA2; (-) strand; PAM type: YTN; PAM sequence: TTG
tgggacttcaccttgtgatc

SEQ ID NO: 248728 - DNA, 20 bp, Artificial Sequence
  Description of Artificial Sequence: Synthetic oligonucleotide
  Target: LAMA2; (-) strand; PAM type: YTN; PAM sequence: CTA
ttgtgggacttcaccttgtg

SEQ ID NO: 248729 - DNA, 20 bp, Artificial Sequence
  Description of Artificial Sequence: Synthetic oligonucleotide
  Target: LAMA2; (-) strand; PAM type: YTN; PAM sequence: TTG
cagatggcctattgtgggac

SEQ ID NO: 248730 - DNA, 20 bp, Artificial Sequence
  Description of Artificial Sequence: Synthetic oligonucleotide
  Target: LAMA2; (-) strand; PAM type: YTN; PAM sequence: CTT
gcagatggcctattgtggga

SEQ ID NO: 248731 - DNA, 20 bp, Artificial Sequence
  Description of Artificial Sequence: Synthetic oligonucleotide
  Target: LAMA2; (-) strand; PAM type: YTN; PAM sequence: CTC
agcttgcagatggcctattg

SEQ ID NO: 248732 - DNA, 20 bp, Artificial Sequence
  Description of Artificial Sequence: Synthetic oligonucleotide
  Target: LAMA2; (-) strand; PAM type: YTN; PAM sequence: CTA
ctcagcttgcagatggccta

SEQ ID NO: 248733 - DNA, 20 bp, Artificial Sequence
  Description of Artificial Sequence: Synthetic oligonucleotide
  Target: LAMA2; (-) strand; PAM type: YTN; PAM sequence: TTG
ctactcagcttgcagatggc

SEQ ID NO: 248734 - DNA, 20 bp, Artificial Sequence
  Description of Artificial Sequence: Synthetic oligonucleotide
  Target: LAMA2; (-) strand; PAM type: YTN; PAM sequence: CTT
gctactcagcttgcagatgg

SEQ ID NO: 248735 - DNA, 20 bp, Artificial Sequence
  Description of Artificial Sequence: Synthetic oligonucleotide
  Target: LAMA2; (-) strand; PAM type: YTN; PAM sequence: TTC
ttgctactcagcttgcagat

SEQ ID NO: 248736 - DNA, 20 bp, Artificial Sequence
  Description of Artificial Sequence: Synthetic oligonucleotide
  Target: LAMA2; (-) strand; PAM type: YTN; PAM sequence: TTT
cttgctactcagcttgcaga

SEQ ID NO: 248737 - DNA, 20 bp, Artificial Sequence
  Description of Artificial Sequence: Synthetic oligonucleotide
  Target: LAMA2; (-) strand; PAM type: YTN; PAM sequence: CTT
tcttgctactcagcttgcag

SEQ ID NO: 248738 - DNA, 20 bp, Artificial Sequence
  Description of Artificial Sequence: Synthetic oligonucleotide
  Target: LAMA2; (-) strand; PAM type: YTN; PAM sequence: CTG
gctttcttgctactcagctt

SEQ ID NO: 248739 - DNA, 20 bp, Artificial Sequence
  Description of Artificial Sequence: Synthetic oligonucleotide
  Target: LAMA2; (-) strand; PAM type: YTN; PAM sequence: CTG
ggaatcgaactggctttctt

SEQ ID NO: 248740 - DNA, 20 bp, Artificial Sequence
  Description of Artificial Sequence: Synthetic oligonucleotide
  Target: LAMA2; (-) strand; PAM type: YTN; PAM sequence: TTC
tgggaatcgaactggctttc

SEQ ID NO: 248741 - DNA, 20 bp, Artificial Sequence
  Description of Artificial Sequence: Synthetic oligonucleotide
  Target: LAMA2; (-) strand; PAM type: YTN; PAM sequence: TTG
aggttctgggaatcgaactg

SEQ ID NO: 248742 - DNA, 20 bp, Artificial Sequence
  Description of Artificial Sequence: Synthetic oligonucleotide
  Target: LAMA2; (-) strand; PAM type: YTN; PAM sequence: TTT
gaggttctgggaatcgaact

SEQ ID NO: 248743 - DNA, 20 bp, Artificial Sequence
  Description of Artificial Sequence: Synthetic oligonucleotide
  Target: LAMA2; (-) strand; PAM type: YTN; PAM sequence: TTT
tgaggttctgggaatcgaac

SEQ ID NO: 248744 - DNA, 20 bp, Artificial Sequence
  Description of Artificial Sequence: Synthetic oligonucleotide
  Target: LAMA2; (-) strand; PAM type: YTN; PAM sequence: CTA
attttgaggttctgggaatc

SEQ ID NO: 248745 - DNA, 20 bp, Artificial Sequence
  Description of Artificial Sequence: Synthetic oligonucleotide
  Target: LAMA2; (-) strand; PAM type: YTN; PAM sequence: TTC
cctaattttgaggttctggg

SEQ ID NO: 248746 - DNA, 20 bp, Artificial Sequence
  Description of Artificial Sequence: Synthetic oligonucleotide
  Target: LAMA2; (-) strand; PAM type: YTN; PAM sequence: CTT
ccctaattttgaggttctgg

SEQ ID NO: 248747 - DNA, 20 bp, Artificial Sequence
  Description of Artificial Sequence: Synthetic oligonucleotide
  Target: LAMA2; (-) strand; PAM type: YTN; PAM sequence: CTG
gcttccctaattttgaggtt

SEQ ID NO: 248748 - DNA, 20 bp, Artificial Sequence
  Description of Artificial Sequence: Synthetic oligonucleotide
  Target: LAMA2; (-) strand; PAM type: YTN; PAM sequence: CTG
caccgctggcttccctaatt

SEQ ID NO: 248749 - DNA, 20 bp, Artificial Sequence
  Description of Artificial Sequence: Synthetic oligonucleotide
  Target: LAMA2; (-) strand; PAM type: YTN; PAM sequence: CTG
aaggctgcaccgctggcttc

SEQ ID NO: 248750 - DNA, 20 bp, Artificial Sequence
  Description of Artificial Sequence: Synthetic oligonucleotide
  Target: LAMA2; (-) strand; PAM type: YTN; PAM sequence: TTC
ggccacagactgaaggctgc

SEQ ID NO: 248751 - DNA, 20 bp, Artificial Sequence
  Description of Artificial Sequence: Synthetic oligonucleotide
  Target: LAMA2; (-) strand; PAM type: YTN; PAM sequence: CTT
cggccacagactgaaggctg

SEQ ID NO: 248752 - DNA, 20 bp, Artificial Sequence
  Description of Artificial Sequence: Synthetic oligonucleotide
  Target: LAMA2; (-) strand; PAM type: YTN; PAM sequence: CTC
gggccttcggccacagactg

SEQ ID NO: 248753 - DNA, 20 bp, Artificial Sequence
  Description of Artificial Sequence: Synthetic oligonucleotide
  Target: LAMA2; (-) strand; PAM type: YTN; PAM sequence: CTC
tcgggccttcggccacagac

SEQ ID NO: 248754 - DNA, 20 bp, Artificial Sequence
  Description of Artificial Sequence: Synthetic oligonucleotide
  Target: LAMA2; (-) strand; PAM type: YTN; PAM sequence: TTG
ccacgggctctcgggccttc

SEQ ID NO: 248755 - DNA, 20 bp, Artificial Sequence
  Description of Artificial Sequence: Synthetic oligonucleotide
  Target: LAMA2; (-) strand; PAM type: YTN; PAM sequence: TTT
gccacgggctctcgggcctt

SEQ ID NO: 248756 - DNA, 20 bp, Artificial Sequence
  Description of Artificial Sequence: Synthetic oligonucleotide
  Target: LAMA2; (-) strand; PAM type: YTN; PAM sequence: TTA
caccagtaatttgccacggg

SEQ ID NO: 248757 - DNA, 20 bp, Artificial Sequence
  Description of Artificial Sequence: Synthetic oligonucleotide
  Target: LAMA2; (-) strand; PAM type: YTN; PAM sequence: CTT
acaccagtaatttgccacgg

SEQ ID NO: 248758 - DNA, 20 bp, Artificial Sequence
  Description of Artificial Sequence: Synthetic oligonucleotide
  Target: LAMA2; (-) strand; PAM type: YTN; PAM sequence: TTG
cacttacaccagtaatttgc

SEQ ID NO: 248759 - DNA, 20 bp, Artificial Sequence
  Description of Artificial Sequence: Synthetic oligonucleotide
  Target: LAMA2; (-) strand; PAM type: YTN; PAM sequence: CTT
gcacttacaccagtaatttg

SEQ ID NO: 248760 - DNA, 20 bp, Artificial Sequence
  Description of Artificial Sequence: Synthetic oligonucleotide
  Target: LAMA2; (-) strand; PAM type: YTN; PAM sequence: TTG
gacccttgcacttacaccag

SEQ ID NO: 248761 - DNA, 20 bp, Artificial Sequence
  Description of Artificial Sequence: Synthetic oligonucleotide
  Target: LAMA2; (-) strand; PAM type: YTN; PAM sequence: TTT
ggacccttgcacttacacca

SEQ ID NO: 248762 - DNA, 20 bp, Artificial Sequence
  Description of Artificial Sequence: Synthetic oligonucleotide
  Target: LAMA2; (-) strand; PAM type: YTN; PAM sequence: TTT
tggacccttgcacttacacc

SEQ ID NO: 248763 - DNA, 20 bp, Artificial Sequence
  Description of Artificial Sequence: Synthetic oligonucleotide
  Target: LAMA2; (-) strand; PAM type: YTN; PAM sequence: CTT
ttggacccttgcacttacac

SEQ ID NO: 248764 - DNA, 20 bp, Artificial Sequence
  Description of Artificial Sequence: Synthetic oligonucleotide
  Target: LAMA2; (-) strand; PAM type: YTN; PAM sequence: TTC
agcttttggacccttgcact

SEQ ID NO: 248765 - DNA, 20 bp, Artificial Sequence
  Description of Artificial Sequence: Synthetic oligonucleotide
  Target: LAMA2; (-) strand; PAM type: YTN; PAM sequence: TTT
cagcttttggacccttgcac

SEQ ID NO: 248766 - DNA, 20 bp, Artificial Sequence
  Description of Artificial Sequence: Synthetic oligonucleotide
  Target: LAMA2; (-) strand; PAM type: YTN; PAM sequence: TTT
tcagcttttggacccttgca

SEQ ID NO: 248767 - DNA, 20 bp, Artificial Sequence
  Description of Artificial Sequence: Synthetic oligonucleotide
  Target: LAMA2; (-) strand; PAM type: YTN; PAM sequence: TTT
ttcagcttttggacccttgc

SEQ ID NO: 248768 - DNA, 20 bp, Artificial Sequence
  Description of Artificial Sequence: Synthetic oligonucleotide
  Target: LAMA2; (-) strand; PAM type: YTN; PAM sequence: TTC
caagtttttcagcttttgga

SEQ ID NO: 248769 - DNA, 20 bp, Artificial Sequence
  Description of Artificial Sequence: Synthetic oligonucleotide
  Target: LAMA2; (-) strand; PAM type: YTN; PAM sequence: TTG
aacatcagattccaagtttt

SEQ ID NO: 248770 - DNA, 20 bp, Artificial Sequence
  Description of Artificial Sequence: Synthetic oligonucleotide
  Target: LAMA2; (-) strand; PAM type: YTN; PAM sequence: CTT
gaacatcagattccaagttt

SEQ ID NO: 248771 - DNA, 20 bp, Artificial Sequence
  Description of Artificial Sequence: Synthetic oligonucleotide
  Target: LAMA2; (-) strand; PAM type: YTN; PAM sequence: CTG
cccttgaacatcagattcca

SEQ ID NO: 248772 - DNA, 20 bp, Artificial Sequence
  Description of Artificial Sequence: Synthetic oligonucleotide
  Target: LAMA2; (-) strand; PAM type: YTN; PAM sequence: TTC
ctgcccttgaacatcagatt

SEQ ID NO: 248773 - DNA, 20 bp, Artificial Sequence
  Description of Artificial Sequence: Synthetic oligonucleotide
  Target: LAMA2; (-) strand; PAM type: YTN; PAM sequence: CTT
cctgcccttgaacatcagat

SEQ ID NO: 248774 - DNA, 20 bp, Artificial Sequence
  Description of Artificial Sequence: Synthetic oligonucleotide
  Target: LAMA2; (-) strand; PAM type: YTN; PAM sequence: CTA
tgccggatgcttcctgccct

SEQ ID NO: 248775 - DNA, 20 bp, Artificial Sequence
  Description of Artificial Sequence: Synthetic oligonucleotide
  Target: LAMA2; (-) strand; PAM type: YTN; PAM sequence: CTC
ctatgccggatgcttcctgc

SEQ ID NO: 248776 - DNA, 20 bp, Artificial Sequence
  Description of Artificial Sequence: Synthetic oligonucleotide
  Target: LAMA2; (-) strand; PAM type: YTN; PAM sequence: TTC
tcctatgccggatgcttcct

SEQ ID NO: 248777 - DNA, 20 bp, Artificial Sequence
  Description of Artificial Sequence: Synthetic oligonucleotide
  Target: LAMA2; (-) strand; PAM type: YTN; PAM sequence: TTT
ctcctatgccggatgcttcc

SEQ ID NO: 248778 - DNA, 20 bp, Artificial Sequence
  Description of Artificial Sequence: Synthetic oligonucleotide
  Target: LAMA2; (-) strand; PAM type: YTN; PAM sequence: CTT
tctcctatgccggatgcttc

SEQ ID NO: 248779 - DNA, 20 bp, Artificial Sequence
  Description of Artificial Sequence: Synthetic oligonucleotide
  Target: LAMA2; (-) strand; PAM type: YTN; PAM sequence: TTC
atctttctcctatgccggat

SEQ ID NO: 248780 - DNA, 20 bp, Artificial Sequence
  Description of Artificial Sequence: Synthetic oligonucleotide
  Target: LAMA2; (-) strand; PAM type: YTN; PAM sequence: CTT
catctttctcctatgccgga

SEQ ID NO: 248781 - DNA, 20 bp, Artificial Sequence
  Description of Artificial Sequence: Synthetic oligonucleotide
  Target: LAMA2; (-) strand; PAM type: YTN; PAM sequence: CTA
gtcttcatctttctcctatg

SEQ ID NO: 248782 - DNA, 20 bp, Artificial Sequence
  Description of Artificial Sequence: Synthetic oligonucleotide
  Target: LAMA2; (-) strand; PAM type: YTN; PAM sequence: TTC
tagtcttcatctttctccta

SEQ ID NO: 248783 - DNA, 20 bp, Artificial Sequence
  Description of Artificial Sequence: Synthetic oligonucleotide
  Target: LAMA2; (-) strand; PAM type: YTN; PAM sequence: CTT
ctagtcttcatctttctcct

SEQ ID NO: 248784 - DNA, 20 bp, Artificial Sequence
  Description of Artificial Sequence: Synthetic oligonucleotide
  Target: LAMA2; (-) strand; PAM type: YTN; PAM sequence: TTG
cgcagtcttctagtcttcat

SEQ ID NO: 248785 - DNA, 20 bp, Artificial Sequence
  Description of Artificial Sequence: Synthetic oligonucleotide
  Target: LAMA2; (-) strand; PAM type: YTN; PAM sequence: CTA
gaattgcgcagtcttctagt

SEQ ID NO: 248786 - DNA, 20 bp, Artificial Sequence
  Description of Artificial Sequence: Synthetic oligonucleotide
  Target: LAMA2; (-) strand; PAM type: YTN; PAM sequence: CTA
ggataaagcaggcaggagaa

SEQ ID NO: 248787 - DNA, 20 bp, Artificial Sequence
  Description of Artificial Sequence: Synthetic oligonucleotide
  Target: LAMA2; (-) strand; PAM type: YTN; PAM sequence: CTG
ccagcgtggctaggataaag

SEQ ID NO: 248788 - DNA, 20 bp, Artificial Sequence
  Description of Artificial Sequence: Synthetic oligonucleotide
  Target: LAMA2; (-) strand; PAM type: YTN; PAM sequence: TTA
atcagctgccagcgtggcta

SEQ ID NO: 248789 - DNA, 20 bp, Artificial Sequence
  Description of Artificial Sequence: Synthetic oligonucleotide
  Target: LAMA2; (-) strand; PAM type: YTN; PAM sequence: TTT
aatcagctgccagcgtggct

SEQ ID NO: 248790 - DNA, 20 bp, Artificial Sequence
  Description of Artificial Sequence: Synthetic oligonucleotide
  Target: LAMA2; (-) strand; PAM type: YTN; PAM sequence: CTG
ggtaggcaccatttaatcag

SEQ ID NO: 248791 - DNA, 20 bp, Artificial Sequence
  Description of Artificial Sequence: Synthetic oligonucleotide
  Target: LAMA2; (-) strand; PAM type: YTN; PAM sequence: TTC
tgggtaggcaccatttaatc

SEQ ID NO: 248792 - DNA, 20 bp, Artificial Sequence
  Description of Artificial Sequence: Synthetic oligonucleotide
  Target: LAMA2; (-) strand; PAM type: YTN; PAM sequence: CTC
attctgggtaggcaccattt

SEQ ID NO: 248793 - DNA, 20 bp, Artificial Sequence
  Description of Artificial Sequence: Synthetic oligonucleotide
  Target: LAMA2; (-) strand; PAM type: YTN; PAM sequence: CTG
ggaaagacagaaccaccctc

SEQ ID NO: 248794 - DNA, 20 bp, Artificial Sequence
  Description of Artificial Sequence: Synthetic oligonucleotide
  Target: LAMA2; (-) strand; PAM type: YTN; PAM sequence: TTG
agtcagagggctgggaaaga

SEQ ID NO: 248795 - DNA, 20 bp, Artificial Sequence
  Description of Artificial Sequence: Synthetic oligonucleotide
  Target: LAMA2; (-) strand; PAM type: YTN; PAM sequence: TTT
gagtcagagggctgggaaag

SEQ ID NO: 248796 - DNA, 20 bp, Artificial Sequence
  Description of Artificial Sequence: Synthetic oligonucleotide
  Target: LAMA2; (-) strand; PAM type: YTN; PAM sequence: TTA
acatttgagtcagagggctg

SEQ ID NO: 248797 - DNA, 20 bp, Artificial Sequence
  Description of Artificial Sequence: Synthetic oligonucleotide
  Target: LAMA2; (-) strand; PAM type: YTN; PAM sequence: TTG
ccaaaggagattaacatttg

SEQ ID NO: 248798 - DNA, 20 bp, Artificial Sequence
  Description of Artificial Sequence: Synthetic oligonucleotide
  Target: LAMA2; (-) strand; PAM type: YTN; PAM sequence: CTG
tgagggtgttgccaaaggag

SEQ ID NO: 248799 - DNA, 20 bp, Artificial Sequence
  Description of Artificial Sequence: Synthetic oligonucleotide
  Target: LAMA2; (-) strand; PAM type: YTN; PAM sequence: CTG
agtgtgtctgtgagggtgtt

SEQ ID NO: 248800 - DNA, 20 bp, Artificial Sequence
  Description of Artificial Sequence: Synthetic oligonucleotide
  Target: LAMA2; (-) strand; PAM type: YTN; PAM sequence: TTG
tacctgagtgtgtctgtgag

SEQ ID NO: 248801 - DNA, 20 bp, Artificial Sequence
  Description of Artificial Sequence: Synthetic oligonucleotide
  Target: LAMA2; (-) strand; PAM type: YTN; PAM sequence: CTG
aagtatgcaaagtattgtac

SEQ ID NO: 248802 - DNA, 20 bp, Artificial Sequence
  Description of Artificial Sequence: Synthetic oligonucleotide
  Target: LAMA2; (-) strand; PAM type: YTN; PAM sequence: TTG
actgaagtatgcaaagtatt

SEQ ID NO: 248803 - DNA, 20 bp, Artificial Sequence
  Description of Artificial Sequence: Synthetic oligonucleotide
  Target: LAMA2; (-) strand; PAM type: YTN; PAM sequence: CTT
gactgaagtatgcaaagtat

SEQ ID NO: 248804 - DNA, 20 bp, Artificial Sequence
  Description of Artificial Sequence: Synthetic oligonucleotide
  Target: LAMA2; (-) strand; PAM type: YTN; PAM sequence: CTA
cttgactgaagtatgcaaag

SEQ ID NO: 248805 - DNA, 20 bp, Artificial Sequence
  Description of Artificial Sequence: Synthetic oligonucleotide
  Target: LAMA2; (-) strand; PAM type: YTN; PAM sequence: CTG
tctacttgactgaagtatgc

SEQ ID NO: 248806 - DNA, 20 bp, Artificial Sequence
  Description of Artificial Sequence: Synthetic oligonucleotide
  Target: LAMA2; (-) strand; PAM type: YTN; PAM sequence: TTG
actgtctacttgactgaagt

SEQ ID NO: 248807 - DNA, 20 bp, Artificial Sequence
  Description of Artificial Sequence: Synthetic oligonucleotide
  Target: LAMA2; (-) strand; PAM type: YTN; PAM sequence: TTA
atattgactgtctacttgac

SEQ ID NO: 248808 - DNA, 20 bp, Artificial Sequence
  Description of Artificial Sequence: Synthetic oligonucleotide
  Target: LAMA2; (-) strand; PAM type: YTN; PAM sequence: TTG
gagaatgtggtgattaatat

SEQ ID NO: 248809 - DNA, 20 bp, Artificial Sequence
  Description of Artificial Sequence: Synthetic oligonucleotide
  Target: LAMA2; (-) strand; PAM type: YTN; PAM sequence: CTG
tatgagaaagcgttggagaa

SEQ ID NO: 248810 - DNA, 20 bp, Artificial Sequence
  Description of Artificial Sequence: Synthetic oligonucleotide
  Target: LAMA2; (-) strand; PAM type: YTN; PAM sequence: TTC
atagtggagaaatagaacct

SEQ ID NO: 248811 - DNA, 20 bp, Artificial Sequence
  Description of Artificial Sequence: Synthetic oligonucleotide
  Target: LAMA2; (-) strand; PAM type: YTN; PAM sequence: CTG
ttcatagtggagaaatagaa

SEQ ID NO: 248812 - DNA, 20 bp, Artificial Sequence
  Description of Artificial Sequence: Synthetic oligonucleotide
  Target: LAMA2; (-) strand; PAM type: YTN; PAM sequence: CTC
actgttcatagtggagaaat

SEQ ID NO: 248813 - DNA, 20 bp, Artificial Sequence
  Description of Artificial Sequence: Synthetic oligonucleotide
  Target: LAMA2; (-) strand; PAM type: YTN; PAM sequence: CTA
tcaagtataccagaaaaaaa

SEQ ID NO: 248814 - DNA, 20 bp, Artificial Sequence
  Description of Artificial Sequence: Synthetic oligonucleotide
  Target: LAMA2; (-) strand; PAM type: YTN; PAM sequence: TTG
aaggcctatcaagtatacca

SEQ ID NO: 248815 - DNA, 20 bp, Artificial Sequence
  Description of Artificial Sequence: Synthetic oligonucleotide
  Target: LAMA2; (-) strand; PAM type: YTN; PAM sequence: TTT
gaaggcctatcaagtatacc

SEQ ID NO: 248816 - DNA, 20 bp, Artificial Sequence
  Description of Artificial Sequence: Synthetic oligonucleotide
  Target: LAMA2; (-) strand; PAM type: YTN; PAM sequence: TTG
gaacatttgaaggcctatca

SEQ ID NO: 248817 - DNA, 20 bp, Artificial Sequence
  Description of Artificial Sequence: Synthetic oligonucleotide
  Target: LAMA2; (-) strand; PAM type: YTN; PAM sequence: CTT
ggaacatttgaaggcctatc

SEQ ID NO: 248818 - DNA, 20 bp, Artificial Sequence
  Description of Artificial Sequence: Synthetic oligonucleotide
  Target: LAMA2; (-) strand; PAM type: YTN; PAM sequence: TTC
ttggaacatttgaaggccta

SEQ ID NO: 248819 - DNA, 20 bp, Artificial Sequence
  Description of Artificial Sequence: Synthetic oligonucleotide
  Target: LAMA2; (-) strand; PAM type: YTN; PAM sequence: TTT
cttggaacatttgaaggcct

SEQ ID NO: 248820 - DNA, 20 bp, Artificial Sequence
  Description of Artificial Sequence: Synthetic oligonucleotide
  Target: LAMA2; (-) strand; PAM type: YTN; PAM sequence: TTT
tcttggaacatttgaaggcc

SEQ ID NO: 248821 - DNA, 20 bp, Artificial Sequence
  Description of Artificial Sequence: Synthetic oligonucleotide
  Target: LAMA2; (-) strand; PAM type: YTN; PAM sequence: TTG
ttttcttggaacatttgaag

SEQ ID NO: 248822 - DNA, 20 bp, Artificial Sequence
  Description of Artificial Sequence: Synthetic oligonucleotide
  Target: LAMA2; (-) strand; PAM type: YTN; PAM sequence: TTA
ggaaaagcatgattgttttc

SEQ ID NO: 248823 - DNA, 20 bp, Artificial Sequence
  Description of Artificial Sequence: Synthetic oligonucleotide
  Target: LAMA2; (-) strand; PAM type: YTN; PAM sequence: CTT
aggaaaagcatgattgtttt

SEQ ID NO: 248824 - DNA, 20 bp, Artificial Sequence
  Description of Artificial Sequence: Synthetic oligonucleotide
  Target: LAMA2; (-) strand; PAM type: YTN; PAM sequence: TTA
aaaagagaagacttaggaaa

SEQ ID NO: 248825 - DNA, 20 bp, Artificial Sequence
  Description of Artificial Sequence: Synthetic oligonucleotide
  Target: LAMA2; (-) strand; PAM type: YTN; PAM sequence: TTT
aaaaagagaagacttaggaa

SEQ ID NO: 248826 - DNA, 20 bp, Artificial Sequence
  Description of Artificial Sequence: Synthetic oligonucleotide
  Target: LAMA2; (-) strand; PAM type: YTN; PAM sequence: TTG
gaaaggtaatgggagtattt

SEQ ID NO: 248827 - DNA, 20 bp, Artificial Sequence
  Description of Artificial Sequence: Synthetic oligonucleotide
  Target: LAMA2; (-) strand; PAM type: YTN; PAM sequence: TTT
ggaaaggtaatgggagtatt

SEQ ID NO: 248828 - DNA, 20 bp, Artificial Sequence
  Description of Artificial Sequence: Synthetic oligonucleotide
  Target: LAMA2; (-) strand; PAM type: YTN; PAM sequence: CTG
aacaaaaggtttggaaaggt

SEQ ID NO: 248829 - DNA, 20 bp, Artificial Sequence
  Description of Artificial Sequence: Synthetic oligonucleotide
  Target: LAMA2; (-) strand; PAM type: YTN; PAM sequence: TTG
atggtcccaacagctgaaca

SEQ ID NO: 248830 - DNA, 20 bp, Artificial Sequence
  Description of Artificial Sequence: Synthetic oligonucleotide
  Target: LAMA2; (-) strand; PAM type: YTN; PAM sequence: TTC
atccatagaggtgtgaccag

SEQ ID NO: 248831 - DNA, 20 bp, Artificial Sequence
  Description of Artificial Sequence: Synthetic oligonucleotide
  Target: LAMA2; (-) strand; PAM type: YTN; PAM sequence: CTT
catccatagaggtgtgacca

SEQ ID NO: 248832 - DNA, 20 bp, Artificial Sequence
  Description of Artificial Sequence: Synthetic oligonucleotide
  Target: LAMA2; (-) strand; PAM type: YTN; PAM sequence: TTA
gacttcatccatagaggtgt

SEQ ID NO: 248833 - DNA, 20 bp, Artificial Sequence
  Description of Artificial Sequence: Synthetic oligonucleotide
  Target: LAMA2; (-) strand; PAM type: YTN; PAM sequence: TTG
acaaattagacttcatccat

SEQ ID NO: 248834 - DNA, 20 bp, Artificial Sequence
  Description of Artificial Sequence: Synthetic oligonucleotide
  Target: LAMA2; (-) strand; PAM type: YTN; PAM sequence: TTA
agagagtagttgacaaatta

SEQ ID NO: 248835 - DNA, 20 bp, Artificial Sequence
  Description of Artificial Sequence: Synthetic oligonucleotide
  Target: LAMA2; (-) strand; PAM type: YTN; PAM sequence: TTT
aagagagtagttgacaaatt

SEQ ID NO: 248836 - DNA, 20 bp, Artificial Sequence
  Description of Artificial Sequence: Synthetic oligonucleotide
  Target: LAMA2; (-) strand; PAM type: YTN; PAM sequence: TTC
atgacaccaccatttaagag

SEQ ID NO: 248837 - DNA, 20 bp, Artificial Sequence
  Description of Artificial Sequence: Synthetic oligonucleotide
  Target: LAMA2; (-) strand; PAM type: YTN; PAM sequence: CTG
tgatcaattcatgacaccac

SEQ ID NO: 248838 - DNA, 20 bp, Artificial Sequence
  Description of Artificial Sequence: Synthetic oligonucleotide
  Target: LAMA2; (-) strand; PAM type: YTN; PAM sequence: CTA
gtcagagcacatccagagca

SEQ ID NO: 248839 - DNA, 20 bp, Artificial Sequence
  Description of Artificial Sequence: Synthetic oligonucleotide
  Target: LAMA2; (-) strand; PAM type: YTN; PAM sequence: TTA
aaggaaacggcgatccagga

SEQ ID NO: 248840 - DNA, 20 bp, Artificial Sequence
  Description of Artificial Sequence: Synthetic oligonucleotide
  Target: LAMA2; (-) strand; PAM type: YTN; PAM sequence: TTA
ggaagacacatagtgtatag

SEQ ID NO: 248841 - DNA, 20 bp, Artificial Sequence
  Description of Artificial Sequence: Synthetic oligonucleotide
  Target: LAMA2; (-) strand; PAM type: YTN; PAM sequence: CTG
tattaggaagacacatagtg

SEQ ID NO: 248842 - DNA, 20 bp, Artificial Sequence
  Description of Artificial Sequence: Synthetic oligonucleotide
  Target: LAMA2; (-) strand; PAM type: YTN; PAM sequence: CTC
tgtattaggaagacacatag

SEQ ID NO: 248843 - DNA, 20 bp, Artificial Sequence
  Description of Artificial Sequence: Synthetic oligonucleotide
  Target: LAMA2; (-) strand; PAM type: YTN; PAM sequence: CTC
tctgtattaggaagacacat

SEQ ID NO: 248844 - DNA, 20 bp, Artificial Sequence
  Description of Artificial Sequence: Synthetic oligonucleotide
  Target: LAMA2; (-) strand; PAM type: YTN; PAM sequence: TTA
tgatatataggcaaacaaca

SEQ ID NO: 248845 - DNA, 20 bp, Artificial Sequence
  Description of Artificial Sequence: Synthetic oligonucleotide
  Target: LAMA2; (-) strand; PAM type: YTN; PAM sequence: TTG
ttatgatatataggcaaaca

SEQ ID NO: 248846 - DNA, 20 bp, Artificial Sequence
  Description of Artificial Sequence: Synthetic oligonucleotide
  Target: LAMA2; (-) strand; PAM type: YTN; PAM sequence: TTT
gttatgatatataggcaaac

SEQ ID NO: 248847 - DNA, 20 bp, Artificial Sequence
  Description of Artificial Sequence: Synthetic oligonucleotide
  Target: LAMA2; (-) strand; PAM type: YTN; PAM sequence: TTC
aatttgttatgatatatagg

SEQ ID NO: 248848 - DNA, 20 bp, Artificial Sequence
  Description of Artificial Sequence: Synthetic oligonucleotide
  Target: LAMA2; (-) strand; PAM type: YTN; PAM sequence: TTT
caatttgttatgatatatag

SEQ ID NO: 248849 - DNA, 20 bp, Artificial Sequence
  Description of Artificial Sequence: Synthetic oligonucleotide
  Target: LAMA2; (-) strand; PAM type: YTN; PAM sequence: TTT
tcaatttgttatgatatata

SEQ ID NO: 248850 - DNA, 20 bp, Artificial Sequence
  Description of Artificial Sequence: Synthetic oligonucleotide
  Target: LAMA2; (-) strand; PAM type: YTN; PAM sequence: TTA
taaatgcattttcaatttgt

SEQ ID NO: 248851 - DNA, 20 bp, Artificial Sequence
  Description of Artificial Sequence: Synthetic oligonucleotide
  Target: LAMA2; (-) strand; PAM type: YTN; PAM sequence: TTA
taagttataaatgcattttc

SEQ ID NO: 248852 - DNA, 20 bp, Artificial Sequence
  Description of Artificial Sequence: Synthetic oligonucleotide
  Target: LAMA2; (-) strand; PAM type: YTN; PAM sequence: TTT
ataagttataaatgcatttt

SEQ ID NO: 248853 - DNA, 20 bp, Artificial Sequence
  Description of Artificial Sequence: Synthetic oligonucleotide
  Target: LAMA2; (-) strand; PAM type: YTN; PAM sequence: CTT
tataagttataaatgcattt

SEQ ID NO: 248854 - DNA, 20 bp, Artificial Sequence
  Description of Artificial Sequence: Synthetic oligonucleotide
  Target: LAMA2; (-) strand; PAM type: YTN; PAM sequence: CTA
gtaatatatactttataagt

SEQ ID NO: 248855 - DNA, 20 bp, Artificial Sequence
  Description of Artificial Sequence: Synthetic oligonucleotide
  Target: LAMA2; (-) strand; PAM type: YTN; PAM sequence: CTA
gcacctagtaatatatactt

SEQ ID NO: 248856 - DNA, 20 bp, Artificial Sequence
  Description of Artificial Sequence: Synthetic oligonucleotide
  Target: LAMA2; (-) strand; PAM type: YTN; PAM sequence: TTC
tagcacctagtaatatatac

SEQ ID NO: 248857 - DNA, 20 bp, Artificial Sequence
  Description of Artificial Sequence: Synthetic oligonucleotide
  Target: LAMA2; (-) strand; PAM type: YTN; PAM sequence: TTA
ggataatagtgtaaattcta

SEQ ID NO: 248858 - DNA, 20 bp, Artificial Sequence
  Description of Artificial Sequence: Synthetic oligonucleotide
  Target: LAMA2; (-) strand; PAM type: YTN; PAM sequence: CTG
tatattaggataatagtgta

SEQ ID NO: 248859 - DNA, 20 bp, Artificial Sequence
  Description of Artificial Sequence: Synthetic oligonucleotide
  Target: LAMA2; (-) strand; PAM type: YTN; PAM sequence: TTC
tgtatattaggataatagtg

SEQ ID NO: 248860 - DNA, 20 bp, Artificial Sequence
  Description of Artificial Sequence: Synthetic oligonucleotide
  Target: LAMA2; (-) strand; PAM type: YTN; PAM sequence: CTT
ctgtatattaggataatagt

SEQ ID NO: 248861 - DNA, 20 bp, Artificial Sequence
  Description of Artificial Sequence: Synthetic oligonucleotide
  Target: LAMA2; (-) strand; PAM type: YTN; PAM sequence: TTC
ccagcttctgtatattagga

SEQ ID NO: 248862 - DNA, 20 bp, Artificial Sequence
  Description of Artificial Sequence: Synthetic oligonucleotide
  Target: LAMA2; (-) strand; PAM type: YTN; PAM sequence: TTT
cccagcttctgtatattagg

SEQ ID NO: 248863 - DNA, 20 bp, Artificial Sequence
  Description of Artificial Sequence: Synthetic oligonucleotide
  Target: LAMA2; (-) strand; PAM type: YTN; PAM sequence: TTT
tcccagcttctgtatattag

SEQ ID NO: 248864 - DNA, 20 bp, Artificial Sequence
  Description of Artificial Sequence: Synthetic oligonucleotide
  Target: LAMA2; (-) strand; PAM type: YTN; PAM sequence: CTT
ttcccagcttctgtatatta

SEQ ID NO: 248865 - DNA, 20 bp, Artificial Sequence
  Description of Artificial Sequence: Synthetic oligonucleotide
  Target: LAMA2; (-) strand; PAM type: YTN; PAM sequence: TTA
cttttcccagcttctgtata

SEQ ID NO: 248866 - DNA, 20 bp, Artificial Sequence
  Description of Artificial Sequence: Synthetic oligonucleotide
  Target: LAMA2; (-) strand; PAM type: YTN; PAM sequence: CTA
tggcattacttttcccagct

SEQ ID NO: 248867 - DNA, 20 bp, Artificial Sequence
  Description of Artificial Sequence: Synthetic oligonucleotide
  Target: LAMA2; (-) strand; PAM type: YTN; PAM sequence: CTC
tatggcattacttttcccag

SEQ ID NO: 248868 - DNA, 20 bp, Artificial Sequence
  Description of Artificial Sequence: Synthetic oligonucleotide
  Target: LAMA2; (-) strand; PAM type: YTN; PAM sequence: TTA
cacacataaatcaactctat

SEQ ID NO: 248869 - DNA, 20 bp, Artificial Sequence
  Description of Artificial Sequence: Synthetic oligonucleotide
  Target: LAMA2; (-) strand; PAM type: YTN; PAM sequence: TTT
acacacataaatcaactcta

SEQ ID NO: 248870 - DNA, 20 bp, Artificial Sequence
  Description of Artificial Sequence: Synthetic oligonucleotide
  Target: LAMA2; (-) strand; PAM type: YTN; PAM sequence: TTA
gacatttacacacataaatc

SEQ ID NO: 248871 - DNA, 20 bp, Artificial Sequence
  Description of Artificial Sequence: Synthetic oligonucleotide
  Target: LAMA2; (-) strand; PAM type: YTN; PAM sequence: CTT
agacatttacacacataaat

SEQ ID NO: 248872 - DNA, 20 bp, Artificial Sequence
  Description of Artificial Sequence: Synthetic oligonucleotide
  Target: LAMA2; (-) strand; PAM type: YTN; PAM sequence: TTA
agtcacttagacatttacac

SEQ ID NO: 248873 - DNA, 20 bp, Artificial Sequence
  Description of Artificial Sequence: Synthetic oligonucleotide
  Target: LAMA2; (-) strand; PAM type: YTN; PAM sequence: TTT
aagtcacttagacatttaca

SEQ ID NO: 248874 - DNA, 20 bp, Artificial Sequence
  Description of Artificial Sequence: Synthetic oligonucleotide
  Target: LAMA2; (-) strand; PAM type: YTN; PAM sequence: TTG
aaggagaaaaatcaatattt

SEQ ID NO: 248875 - DNA, 20 bp, Artificial Sequence
  Description of Artificial Sequence: Synthetic oligonucleotide
  Target: LAMA2; (-) strand; PAM type: YTN; PAM sequence: CTG
cagttgaaggagaaaaatca

SEQ ID NO: 248876 - DNA, 20 bp, Artificial Sequence
  Description of Artificial Sequence: Synthetic oligonucleotide
  Target: LAMA2; (-) strand; PAM type: YTN; PAM sequence: TTG
atctgcagttgaaggagaaa

SEQ ID NO: 248877 - DNA, 20 bp, Artificial Sequence
  Description of Artificial Sequence: Synthetic oligonucleotide
  Target: LAMA2; (-) strand; PAM type: YTN; PAM sequence: TTT
gatctgcagttgaaggagaa

SEQ ID NO: 248878 - DNA, 20 bp, Artificial Sequence
  Description of Artificial Sequence: Synthetic oligonucleotide
  Target: LAMA2; (-) strand; PAM type: YTN; PAM sequence: TTG
ggaagtttgatctgcagttg

SEQ ID NO: 248879 - DNA, 20 bp, Artificial Sequence
  Description of Artificial Sequence: Synthetic oligonucleotide
  Target: LAMA2; (-) strand; PAM type: YTN; PAM sequence: TTT
gggaagtttgatctgcagtt

SEQ ID NO: 248880 - DNA, 20 bp, Artificial Sequence
  Description of Artificial Sequence: Synthetic oligonucleotide
  Target: LAMA2; (-) strand; PAM type: YTN; PAM sequence: TTA
gtgtttgggaagtttgatct

SEQ ID NO: 248881 - DNA, 20 bp, Artificial Sequence
  Description of Artificial Sequence: Synthetic oligonucleotide
  Target: LAMA2; (-) strand; PAM type: YTN; PAM sequence: TTT
agtgtttgggaagtttgatc

SEQ ID NO: 248882 - DNA, 20 bp, Artificial Sequence
  Description of Artificial Sequence: Synthetic oligonucleotide
  Target: LAMA2; (-) strand; PAM type: YTN; PAM sequence: CTT
tagtgtttgggaagtttgat

SEQ ID NO: 248883 - DNA, 20 bp, Artificial Sequence
  Description of Artificial Sequence: Synthetic oligonucleotide
  Target: LAMA2; (-) strand; PAM type: YTN; PAM sequence: TTA
aaataaggaagctttagtgt

SEQ ID NO: 248884 - DNA, 20 bp, Artificial Sequence
  Description of Artificial Sequence: Synthetic oligonucleotide
  Target: LAMA2; (-) strand; PAM type: YTN; PAM sequence: TTT
aaaataaggaagctttagtg

SEQ ID NO: 248885 - DNA, 20 bp, Artificial Sequence
  Description of Artificial Sequence: Synthetic oligonucleotide
  Target: LAMA2; (-) strand; PAM type: YTN; PAM sequence: TTT
taaaataaggaagctttagt

SEQ ID NO: 248886 - DNA, 20 bp, Artificial Sequence
  Description of Artificial Sequence: Synthetic oligonucleotide
  Target: LAMA2; (-) strand; PAM type: YTN; PAM sequence: TTG
ttttaaaataaggaagcttt

SEQ ID NO: 248887 - DNA, 20 bp, Artificial Sequence
  Description of Artificial Sequence: Synthetic oligonucleotide
  Target: LAMA2; (-) strand; PAM type: YTN; PAM sequence: TTT
gttttaaaataaggaagctt

SEQ ID NO: 248888 - DNA, 20 bp, Artificial Sequence
  Description of Artificial Sequence: Synthetic oligonucleotide
  Target: LAMA2; (-) strand; PAM type: YTN; PAM sequence: CTG
gtgaaccacaaatgcatttg

SEQ ID NO: 248889 - DNA, 20 bp, Artificial Sequence
  Description of Artificial Sequence: Synthetic oligonucleotide
  Target: LAMA2; (-) strand; PAM type: YTN; PAM sequence: CTG
cagactggtgaaccacaaat

SEQ ID NO: 248890 - DNA, 20 bp, Artificial Sequence
  Description of Artificial Sequence: Synthetic oligonucleotide
  Target: LAMA2; (-) strand; PAM type: YTN; PAM sequence: CTG
tactgcagactggtgaacca

SEQ ID NO: 248891 - DNA, 20 bp, Artificial Sequence
  Description of Artificial Sequence: Synthetic oligonucleotide
  Target: LAMA2; (-) strand; PAM type: YTN; PAM sequence: TTA
ctgtactgcagactggtgaa

SEQ ID NO: 248892 - DNA, 20 bp, Artificial Sequence
  Description of Artificial Sequence: Synthetic oligonucleotide
  Target: LAMA2; (-) strand; PAM type: YTN; PAM sequence: CTT
actgtactgcagactggtga

SEQ ID NO: 248893 - DNA, 20 bp, Artificial Sequence
  Description of Artificial Sequence: Synthetic oligonucleotide
  Target: LAMA2; (-) strand; PAM type: YTN; PAM sequence: CTA
taaaaagcttactgtactgc

SEQ ID NO: 248894 - DNA, 20 bp, Artificial Sequence
  Description of Artificial Sequence: Synthetic oligonucleotide
  Target: LAMA2; (-) strand; PAM type: YTN; PAM sequence: TTA
cctataaaaagcttactgta

SEQ ID NO: 248895 - DNA, 20 bp, Artificial Sequence
  Description of Artificial Sequence: Synthetic oligonucleotide
  Target: LAMA2; (-) strand; PAM type: YTN; PAM sequence: CTT
acctataaaaagcttactgt

SEQ ID NO: 248896 - DNA, 20 bp, Artificial Sequence
  Description of Artificial Sequence: Synthetic oligonucleotide
  Target: LAMA2; (-) strand; PAM type: YTN; PAM sequence: TTG
agcttacctataaaaagctt

SEQ ID NO: 248897 - DNA, 20 bp, Artificial Sequence
  Description of Artificial Sequence: Synthetic oligonucleotide
  Target: LAMA2; (-) strand; PAM type: YTN; PAM sequence: TTT
gagcttacctataaaaagct

SEQ ID NO: 248898 - DNA, 20 bp, Artificial Sequence
  Description of Artificial Sequence: Synthetic oligonucleotide
  Target: LAMA2; (-) strand; PAM type: YTN; PAM sequence: CTG
tgatttgagcttacctataa

SEQ ID NO: 248899 - DNA, 20 bp, Artificial Sequence
  Description of Artificial Sequence: Synthetic oligonucleotide
  Target: LAMA2; (-) strand; PAM type: YTN; PAM sequence: TTC
tgtgatttgagcttacctat

SEQ ID NO: 248900 - DNA, 20 bp, Artificial Sequence
  Description of Artificial Sequence: Synthetic oligonucleotide
  Target: LAMA2; (-) strand; PAM type: YTN; PAM sequence: TTT
ctgtgatttgagcttaccta

SEQ ID NO: 248901 - DNA, 20 bp, Artificial Sequence
  Description of Artificial Sequence: Synthetic oligonucleotide
  Target: LAMA2; (-) strand; PAM type: YTN; PAM sequence: TTT
tctgtgatttgagcttacct

SEQ ID NO: 248902 - DNA, 20 bp, Artificial Sequence
  Description of Artificial Sequence: Synthetic oligonucleotide
  Target: LAMA2; (-) strand; PAM type: YTN; PAM sequence: CTT
ttctgtgatttgagcttacc

SEQ ID NO: 248903 - DNA, 20 bp, Artificial Sequence
  Description of Artificial Sequence: Synthetic oligonucleotide
  Target: LAMA2; (-) strand; PAM type: YTN; PAM sequence: TTG
agcttttctgtgatttgagc

SEQ ID NO: 248904 - DNA, 20 bp, Artificial Sequence
  Description of Artificial Sequence: Synthetic oligonucleotide
  Target: LAMA2; (-) strand; PAM type: YTN; PAM sequence: TTT
gagcttttctgtgatttgag

SEQ ID NO: 248905 - DNA, 20 bp, Artificial Sequence
  Description of Artificial Sequence: Synthetic oligonucleotide
  Target: LAMA2; (-) strand; PAM type: YTN; PAM sequence: CTA
tttgagcttttctgtgattt

SEQ ID NO: 248906 - DNA, 20 bp, Artificial Sequence
  Description of Artificial Sequence: Synthetic oligonucleotide
  Target: LAMA2; (-) strand; PAM type: YTN; PAM sequence: CTA
aaggagatgtatctatttga

SEQ ID NO: 248907 - DNA, 20 bp, Artificial Sequence
  Description of Artificial Sequence: Synthetic oligonucleotide
  Target: LAMA2; (-) strand; PAM type: YTN; PAM sequence: CTA
aaaataggctaaaggagatg

SEQ ID NO: 248908 - DNA, 20 bp, Artificial Sequence
  Description of Artificial Sequence: Synthetic oligonucleotide
  Target: LAMA2; (-) strand; PAM type: YTN; PAM sequence: TTA
tcagtcctaaaaataggcta

SEQ ID NO: 248909 - DNA, 20 bp, Artificial Sequence
  Description of Artificial Sequence: Synthetic oligonucleotide
  Target: LAMA2; (-) strand; PAM type: YTN; PAM sequence: TTT
atcagtcctaaaaataggct

SEQ ID NO: 248910 - DNA, 20 bp, Artificial Sequence
  Description of Artificial Sequence: Synthetic oligonucleotide
  Target: LAMA2; (-) strand; PAM type: YTN; PAM sequence: CTT
tatcagtcctaaaaataggc

SEQ ID NO: 248911 - DNA, 20 bp, Artificial Sequence
  Description of Artificial Sequence: Synthetic oligonucleotide
  Target: LAMA2; (-) strand; PAM type: YTN; PAM sequence: TTA
gctttatcagtcctaaaaat

SEQ ID NO: 248912 - DNA, 20 bp, Artificial Sequence
  Description of Artificial Sequence: Synthetic oligonucleotide
  Target: LAMA2; (-) strand; PAM type: YTN; PAM sequence: CTT
agctttatcagtcctaaaaa

SEQ ID NO: 248913 - DNA, 20 bp, Artificial Sequence
  Description of Artificial Sequence: Synthetic oligonucleotide
  Target: LAMA2; (-) strand; PAM type: YTN; PAM sequence: TTC
ttagctttatcagtcctaaa

SEQ ID NO: 248914 - DNA, 20 bp, Artificial Sequence
  Description of Artificial Sequence: Synthetic oligonucleotide
  Target: LAMA2; (-) strand; PAM type: YTN; PAM sequence: CTG
ttcttagctttatcagtcct

SEQ ID NO: 248915 - DNA, 20 bp, Artificial Sequence
  Description of Artificial Sequence: Synthetic oligonucleotide
  Target: LAMA2; (-) strand; PAM type: YTN; PAM sequence: CTC
tgttcttagctttatcagtc

SEQ ID NO: 248916 - DNA, 20 bp, Artificial Sequence
  Description of Artificial Sequence: Synthetic oligonucleotide
  Target: LAMA2; (-) strand; PAM type: YTN; PAM sequence: TTC
tctgttcttagctttatcag

SEQ ID NO: 248917 - DNA, 20 bp, Artificial Sequence
  Description of Artificial Sequence: Synthetic oligonucleotide
  Target: LAMA2; (-) strand; PAM type: YTN; PAM sequence: TTT
ctctgttcttagctttatca

SEQ ID NO: 248918 - DNA, 20 bp, Artificial Sequence
  Description of Artificial Sequence: Synthetic oligonucleotide
  Target: LAMA2; (-) strand; PAM type: YTN; PAM sequence: TTG
gtttctctgttcttagcttt

SEQ ID NO: 248919 - DNA, 20 bp, Artificial Sequence
  Description of Artificial Sequence: Synthetic oligonucleotide
  Target: LAMA2; (-) strand; PAM type: YTN; PAM sequence: TTA
ttggtttctctgttcttagc

SEQ ID NO: 248920 - DNA, 20 bp, Artificial Sequence
  Description of Artificial Sequence: Synthetic oligonucleotide
  Target: LAMA2; (-) strand; PAM type: YTN; PAM sequence: TTT
attggtttctctgttcttag

SEQ ID NO: 248921 - DNA, 20 bp, Artificial Sequence
  Description of Artificial Sequence: Synthetic oligonucleotide
  Target: LAMA2; (-) strand; PAM type: YTN; PAM sequence: CTT
tattggtttctctgttctta

SEQ ID NO: 248922 - DNA, 20 bp, Artificial Sequence
  Description of Artificial Sequence: Synthetic oligonucleotide
  Target: LAMA2; (-) strand; PAM type: YTN; PAM sequence: TTA
aaatatgtctttattggttt

SEQ ID NO: 248923 - DNA, 20 bp, Artificial Sequence
  Description of Artificial Sequence: Synthetic oligonucleotide
  Target: LAMA2; (-) strand; PAM type: YTN; PAM sequence: CTG
ccatcattaaaatatgtctt

SEQ ID NO: 248924 - DNA, 20 bp, Artificial Sequence
  Description of Artificial Sequence: Synthetic oligonucleotide
  Target: LAMA2; (-) strand; PAM type: YTN; PAM sequence: CTA
ccccatgagataccctgcca

SEQ ID NO: 248925 - DNA, 20 bp, Artificial Sequence
  Description of Artificial Sequence: Synthetic oligonucleotide
  Target: LAMA2; (-) strand; PAM type: YTN; PAM sequence: TTG
tactaccccatgagataccc

SEQ ID NO: 248926 - DNA, 20 bp, Artificial Sequence
  Description of Artificial Sequence: Synthetic oligonucleotide
  Target: LAMA2; (-) strand; PAM type: YTN; PAM sequence: TTT
gtactaccccatgagatacc

SEQ ID NO: 248927 - DNA, 20 bp, Artificial Sequence
  Description of Artificial Sequence: Synthetic oligonucleotide
  Target: LAMA2; (-) strand; PAM type: YTN; PAM sequence: CTG
ggataaatttgtactacccc

SEQ ID NO: 248928 - DNA, 20 bp, Artificial Sequence
  Description of Artificial Sequence: Synthetic oligonucleotide
  Target: LAMA2; (-) strand; PAM type: YTN; PAM sequence: TTA
cacatagagaaggcataaaa

SEQ ID NO: 248929 - DNA, 20 bp, Artificial Sequence
  Description of Artificial Sequence: Synthetic oligonucleotide
  Target: LAMA2; (-) strand; PAM type: YTN; PAM sequence: TTC
aatgtattacacatagagaa

SEQ ID NO: 248930 - DNA, 20 bp, Artificial Sequence
  Description of Artificial Sequence: Synthetic oligonucleotide
  Target: LAMA2; (-) strand; PAM type: YTN; PAM sequence: CTT
caatgtattacacatagaga

SEQ ID NO: 248931 - DNA, 20 bp, Artificial Sequence
  Description of Artificial Sequence: Synthetic oligonucleotide
  Target: LAMA2; (-) strand; PAM type: YTN; PAM sequence: TTC
aacaccatatatcacttcaa

SEQ ID NO: 248932 - DNA, 20 bp, Artificial Sequence
  Description of Artificial Sequence: Synthetic oligonucleotide
  Target: LAMA2; (-) strand; PAM type: YTN; PAM sequence: TTA
atcacattcaacaccatata

SEQ ID NO: 248933 - DNA, 20 bp, Artificial Sequence
  Description of Artificial Sequence: Synthetic oligonucleotide
  Target: LAMA2; (-) strand; PAM type: YTN; PAM sequence: TTT
aatcacattcaacaccatat

SEQ ID NO: 248934 - DNA, 20 bp, Artificial Sequence
  Description of Artificial Sequence: Synthetic oligonucleotide
  Target: LAMA2; (-) strand; PAM type: YTN; PAM sequence: TTT
taatcacattcaacaccata

SEQ ID NO: 248935 - DNA, 20 bp, Artificial Sequence
  Description of Artificial Sequence: Synthetic oligonucleotide
  Target: LAMA2; (-) strand; PAM type: YTN; PAM sequence: CTG
aattttaatcacattcaaca

SEQ ID NO: 248936 - DNA, 20 bp, Artificial Sequence
  Description of Artificial Sequence: Synthetic oligonucleotide
  Target: LAMA2; (-) strand; PAM type: YTN; PAM sequence: CTG
ctgaattttaatcacattca

SEQ ID NO: 248937 - DNA, 20 bp, Artificial Sequence
  Description of Artificial Sequence: Synthetic oligonucleotide
  Target: LAMA2; (-) strand; PAM type: YTN; PAM sequence: TTG
cataagtatctgctgaattt

SEQ ID NO: 248938 - DNA, 20 bp, Artificial Sequence
  Description of Artificial Sequence: Synthetic oligonucleotide
  Target: LAMA2; (-) strand; PAM type: YTN; PAM sequence: CTT
gcataagtatctgctgaatt

SEQ ID NO: 248939 - DNA, 20 bp, Artificial Sequence
  Description of Artificial Sequence: Synthetic oligonucleotide
  Target: LAMA2; (-) strand; PAM type: YTN; PAM sequence: TTA
tagatagtagatcttgcata

SEQ ID NO: 248940 - DNA, 20 bp, Artificial Sequence
  Description of Artificial Sequence: Synthetic oligonucleotide
  Target: LAMA2; (-) strand; PAM type: YTN; PAM sequence: CTT
atagatagtagatcttgcat

SEQ ID NO: 248941 - DNA, 20 bp, Artificial Sequence
  Description of Artificial Sequence: Synthetic oligonucleotide
  Target: LAMA2; (-) strand; PAM type: YTN; PAM sequence: TTG
cataagcatcttatagatag

SEQ ID NO: 248942 - DNA, 20 bp, Artificial Sequence
  Description of Artificial Sequence: Synthetic oligonucleotide
  Target: LAMA2; (-) strand; PAM type: YTN; PAM sequence: TTT
gcataagcatcttatagata

SEQ ID NO: 248943 - DNA, 20 bp, Artificial Sequence
  Description of Artificial Sequence: Synthetic oligonucleotide
  Target: LAMA2; (-) strand; PAM type: YTN; PAM sequence: TTT
tgcataagcatcttatagat

SEQ ID NO: 248944 - DNA, 20 bp, Artificial Sequence
  Description of Artificial Sequence: Synthetic oligonucleotide
  Target: LAMA2; (-) strand; PAM type: YTN; PAM sequence: CTA
tggaattttgcataagcatc

SEQ ID NO: 248945 - DNA, 20 bp, Artificial Sequence
  Description of Artificial Sequence: Synthetic oligonucleotide
  Target: LAMA2; (-) strand; PAM type: YTN; PAM sequence: TTC
cctatggaattttgcataag

SEQ ID NO: 248946 - DNA, 20 bp, Artificial Sequence
  Description of Artificial Sequence: Synthetic oligonucleotide
  Target: LAMA2; (-) strand; PAM type: YTN; PAM sequence: TTT
ccctatggaattttgcataa

SEQ ID NO: 248947 - DNA, 20 bp, Artificial Sequence
  Description of Artificial Sequence: Synthetic oligonucleotide
  Target: LAMA2; (-) strand; PAM type: YTN; PAM sequence: TTA
atgtttccctatggaatttt

SEQ ID NO: 248948 - DNA, 20 bp, Artificial Sequence
  Description of Artificial Sequence: Synthetic oligonucleotide
  Target: LAMA2; (-) strand; PAM type: YTN; PAM sequence: CTT
aatgtttccctatggaattt

SEQ ID NO: 248949 - DNA, 20 bp, Artificial Sequence
  Description of Artificial Sequence: Synthetic oligonucleotide
  Target: LAMA2; (-) strand; PAM type: YTN; PAM sequence: TTC
acgtcttaatgtttccctat

SEQ ID NO: 248950 - DNA, 20 bp, Artificial Sequence
  Description of Artificial Sequence: Synthetic oligonucleotide
  Target: LAMA2; (-) strand; PAM type: YTN; PAM sequence: TTA
ttcacgtcttaatgtttccc

SEQ ID NO: 248951 - DNA, 20 bp, Artificial Sequence
  Description of Artificial Sequence: Synthetic oligonucleotide
  Target: LAMA2; (-) strand; PAM type: YTN; PAM sequence: TTT
attcacgtcttaatgtttcc

SEQ ID NO: 248952 - DNA, 20 bp, Artificial Sequence
  Description of Artificial Sequence: Synthetic oligonucleotide
  Target: LAMA2; (-) strand; PAM type: YTN; PAM sequence: TTT
tattcacgtcttaatgtttc

SEQ ID NO: 248953 - DNA, 20 bp, Artificial Sequence
  Description of Artificial Sequence: Synthetic oligonucleotide
  Target: LAMA2; (-) strand; PAM type: YTN; PAM sequence: TTC
agattttattcacgtcttaa

SEQ ID NO: 248954 - DNA, 20 bp, Artificial Sequence
  Description of Artificial Sequence: Synthetic oligonucleotide
  Target: LAMA2; (-) strand; PAM type: YTN; PAM sequence: TTG
gggagagatcatagtgatgg

SEQ ID NO: 248955 - DNA, 20 bp, Artificial Sequence
  Description of Artificial Sequence: Synthetic oligonucleotide
  Target: LAMA2; (-) strand; PAM type: YTN; PAM sequence: TTT
ggggagagatcatagtgatg

SEQ ID NO: 248956 - DNA, 20 bp, Artificial Sequence
  Description of Artificial Sequence: Synthetic oligonucleotide
  Target: LAMA2; (-) strand; PAM type: YTN; PAM sequence: TTT
tggggagagatcatagtgat

SEQ ID NO: 248957 - DNA, 20 bp, Artificial Sequence
  Description of Artificial Sequence: Synthetic oligonucleotide
  Target: LAMA2; (-) strand; PAM type: YTN; PAM sequence: TTG
aaaatcccacgttttgggga

SEQ ID NO: 248958 - DNA, 20 bp, Artificial Sequence
  Description of Artificial Sequence: Synthetic oligonucleotide
  Target: LAMA2; (-) strand; PAM type: YTN; PAM sequence: CTT
gaaaatcccacgttttgggg

SEQ ID NO: 248959 - DNA, 20 bp, Artificial Sequence
  Description of Artificial Sequence: Synthetic oligonucleotide
  Target: LAMA2; (-) strand; PAM type: YTN; PAM sequence: CTA
aatgcacttgaaaatcccac

SEQ ID NO: 248960 - DNA, 20 bp, Artificial Sequence
  Description of Artificial Sequence: Synthetic oligonucleotide
  Target: LAMA2; (-) strand; PAM type: YTN; PAM sequence: TTC
taaatgcacttgaaaatccc

SEQ ID NO: 248961 - DNA, 20 bp, Artificial Sequence
  Description of Artificial Sequence: Synthetic oligonucleotide
  Target: LAMA2; (-) strand; PAM type: YTN; PAM sequence: TTC
ataattctaaatgcacttga

SEQ ID NO: 248962 - DNA, 20 bp, Artificial Sequence
  Description of Artificial Sequence: Synthetic oligonucleotide
  Target: LAMA2; (-) strand; PAM type: YTN; PAM sequence: TTT
cataattctaaatgcacttg

SEQ ID NO: 248963 - DNA, 20 bp, Artificial Sequence
  Description of Artificial Sequence: Synthetic oligonucleotide
  Target: LAMA2; (-) strand; PAM type: YTN; PAM sequence: TTA
tttcataattctaaatgcac

SEQ ID NO: 248964 - DNA, 20 bp, Artificial Sequence
  Description of Artificial Sequence: Synthetic oligonucleotide
  Target: LAMA2; (-) strand; PAM type: YTN; PAM sequence: TTT
atttcataattctaaatgca

SEQ ID NO: 248965 - DNA, 20 bp, Artificial Sequence
  Description of Artificial Sequence: Synthetic oligonucleotide
  Target: LAMA2; (-) strand; PAM type: YTN; PAM sequence: CTA
gtggtttatttcataattct

SEQ ID NO: 248966 - DNA, 20 bp, Artificial Sequence
  Description of Artificial Sequence: Synthetic oligonucleotide
  Target: LAMA2; (-) strand; PAM type: YTN; PAM sequence: CTA
aaaacctagtggtttatttc

SEQ ID NO: 248967 - DNA, 20 bp, Artificial Sequence
  Description of Artificial Sequence: Synthetic oligonucleotide
  Target: LAMA2; (-) strand; PAM type: YTN; PAM sequence: TTC
acactaaaaacctagtggtt

SEQ ID NO: 248968 - DNA, 20 bp, Artificial Sequence
  Description of Artificial Sequence: Synthetic oligonucleotide
  Target: LAMA2; (-) strand; PAM type: YTN; PAM sequence: TTT
cacactaaaaacctagtggt

SEQ ID NO: 248969 - DNA, 20 bp, Artificial Sequence
  Description of Artificial Sequence: Synthetic oligonucleotide
  Target: LAMA2; (-) strand; PAM type: YTN; PAM sequence: CTG
taaacatttcacactaaaaa

SEQ ID NO: 248970 - DNA, 20 bp, Artificial Sequence
  Description of Artificial Sequence: Synthetic oligonucleotide
  Target: LAMA2; (-) strand; PAM type: YTN; PAM sequence: TTA
aaatactgtaaacatttcac

SEQ ID NO: 248971 - DNA, 20 bp, Artificial Sequence
  Description of Artificial Sequence: Synthetic oligonucleotide
  Target: LAMA2; (-) strand; PAM type: YTN; PAM sequence: TTC
aaaattaaaatactgtaaac

SEQ ID NO: 248972 - DNA, 20 bp, Artificial Sequence
  Description of Artificial Sequence: Synthetic oligonucleotide
  Target: LAMA2; (-) strand; PAM type: YTN; PAM sequence: TTT
caaaattaaaatactgtaaa

SEQ ID NO: 248973 - DNA, 20 bp, Artificial Sequence
  Description of Artificial Sequence: Synthetic oligonucleotide
  Target: LAMA2; (-) strand; PAM type: YTN; PAM sequence: TTT
tcaaaattaaaatactgtaa

SEQ ID NO: 248974 - DNA, 20 bp, Artificial Sequence
  Description of Artificial Sequence: Synthetic oligonucleotide
  Target: LAMA2; (-) strand; PAM type: YTN; PAM sequence: TTA
ataagtatagttttcaaaat

SEQ ID NO: 248975 - DNA, 20 bp, Artificial Sequence
  Description of Artificial Sequence: Synthetic oligonucleotide
  Target: LAMA2; (-) strand; PAM type: YTN; PAM sequence: TTT
aataagtatagttttcaaaa

SEQ ID NO: 248976 - DNA, 20 bp, Artificial Sequence
  Description of Artificial Sequence: Synthetic oligonucleotide
  Target: LAMA2; (-) strand; PAM type: YTN; PAM sequence: TTT
taataagtatagttttcaaa

SEQ ID NO: 248977 - DNA, 20 bp, Artificial Sequence
  Description of Artificial Sequence: Synthetic oligonucleotide
  Target: LAMA2; (-) strand; PAM type: YTN; PAM sequence: CTG
ttttaataagtatagttttc

SEQ ID NO: 248978 - DNA, 20 bp, Artificial Sequence
  Description of Artificial Sequence: Synthetic oligonucleotide
  Target: LAMA2; (-) strand; PAM type: YTN; PAM sequence: TTG
tcatactgttttaataagta

SEQ ID NO: 248979 - DNA, 20 bp, Artificial Sequence
  Description of Artificial Sequence: Synthetic oligonucleotide
  Target: LAMA2; (-) strand; PAM type: YTN; PAM sequence: TTC
aataaatgttgtcatactgt

SEQ ID NO: 248980 - DNA, 20 bp, Artificial Sequence
  Description of Artificial Sequence: Synthetic oligonucleotide
  Target: LAMA2; (-) strand; PAM type: YTN; PAM sequence: CTA
gcacataacatgtattcaat

SEQ ID NO: 248981 - DNA, 20 bp, Artificial Sequence
  Description of Artificial Sequence: Synthetic oligonucleotide
  Target: LAMA2; (-) strand; PAM type: YTN; PAM sequence: TTG
gtacctagcacataacatgt

SEQ ID NO: 248982 - DNA, 20 bp, Artificial Sequence
  Description of Artificial Sequence: Synthetic oligonucleotide
  Target: LAMA2; (-) strand; PAM type: YTN; PAM sequence: CTT
ggtacctagcacataacatg

SEQ ID NO: 248983 - DNA, 20 bp, Artificial Sequence
  Description of Artificial Sequence: Synthetic oligonucleotide
  Target: LAMA2; (-) strand; PAM type: YTN; PAM sequence: CTC
cccacttggtacctagcaca

SEQ ID NO: 248984 - DNA, 20 bp, Artificial Sequence
  Description of Artificial Sequence: Synthetic oligonucleotide
  Target: LAMA2; (-) strand; PAM type: YTN; PAM sequence: TTA
ggatgaaatgagaaaataaa

SEQ ID NO: 248985 - DNA, 20 bp, Artificial Sequence
  Description of Artificial Sequence: Synthetic oligonucleotide
  Target: LAMA2; (-) strand; PAM type: YTN; PAM sequence: CTT
aggatgaaatgagaaaataa

SEQ ID NO: 248986 - DNA, 20 bp, Artificial Sequence
  Description of Artificial Sequence: Synthetic oligonucleotide
  Target: LAMA2; (-) strand; PAM type: YTN; PAM sequence: CTC
ttaggatgaaatgagaaaat

SEQ ID NO: 248987 - DNA, 20 bp, Artificial Sequence
  Description of Artificial Sequence: Synthetic oligonucleotide
  Target: LAMA2; (-) strand; PAM type: YTN; PAM sequence: TTG
ctcttaggatgaaatgagaa

SEQ ID NO: 248988 - DNA, 20 bp, Artificial Sequence
  Description of Artificial Sequence: Synthetic oligonucleotide
  Target: LAMA2; (-) strand; PAM type: YTN; PAM sequence: TTT
gctcttaggatgaaatgaga

SEQ ID NO: 248989 - DNA, 20 bp, Artificial Sequence
  Description of Artificial Sequence: Synthetic oligonucleotide
  Target: LAMA2; (-) strand; PAM type: YTN; PAM sequence: CTC
cgaagtttgctcttaggatg

SEQ ID NO: 248990 - DNA, 20 bp, Artificial Sequence
  Description of Artificial Sequence: Synthetic oligonucleotide
  Target: LAMA2; (-) strand; PAM type: YTN; PAM sequence: CTA
cctccgaagtttgctcttag

SEQ ID NO: 248991 - DNA, 20 bp, Artificial Sequence
  Description of Artificial Sequence: Synthetic oligonucleotide
  Target: LAMA2; (-) strand; PAM type: YTN; PAM sequence: CTA
aaatgagacgaatcacacct

SEQ ID NO: 248992 - DNA, 20 bp, Artificial Sequence
  Description of Artificial Sequence: Synthetic oligonucleotide
  Target: LAMA2; (-) strand; PAM type: YTN; PAM sequence: TTC
actaaaatgagacgaatcac

SEQ ID NO: 248993 - DNA, 20 bp, Artificial Sequence
  Description of Artificial Sequence: Synthetic oligonucleotide
  Target: LAMA2; (-) strand; PAM type: YTN; PAM sequence: TTT
cactaaaatgagacgaatca

SEQ ID NO: 248994 - DNA, 20 bp, Artificial Sequence
  Description of Artificial Sequence: Synthetic oligonucleotide
  Target: LAMA2; (-) strand; PAM type: YTN; PAM sequence: TTT
tcactaaaatgagacgaatc

SEQ ID NO: 248995 - DNA, 20 bp, Artificial Sequence
  Description of Artificial Sequence: Synthetic oligonucleotide
  Target: LAMA2; (-) strand; PAM type: YTN; PAM sequence: TTC
agagcatcagtgaattttca

SEQ ID NO: 248996 - DNA, 20 bp, Artificial Sequence
  Description of Artificial Sequence: Synthetic oligonucleotide
  Target: LAMA2; (-) strand; PAM type: YTN; PAM sequence: TTT
cagagcatcagtgaattttc

SEQ ID NO: 248997 - DNA, 20 bp, Artificial Sequence
  Description of Artificial Sequence: Synthetic oligonucleotide
  Target: LAMA2; (-) strand; PAM type: YTN; PAM sequence: CTT
tcagagcatcagtgaatttt

SEQ ID NO: 248998 - DNA, 20 bp, Artificial Sequence
  Description of Artificial Sequence: Synthetic oligonucleotide
  Target: LAMA2; (-) strand; PAM type: YTN; PAM sequence: TTG
ctttcagagcatcagtgaat

SEQ ID NO: 248999 - DNA, 20 bp, Artificial Sequence
  Description of Artificial Sequence: Synthetic oligonucleotide
  Target: LAMA2; (-) strand; PAM type: YTN; PAM sequence: TTT
gctttcagagcatcagtgaa

SEQ ID NO: 249000 - DNA, 20 bp, Artificial Sequence
  Description of Artificial Sequence: Synthetic oligonucleotide
  Target: LAMA2; (-) strand; PAM type: YTN; PAM sequence: TTT
tgctttcagagcatcagtga

SEQ ID NO: 249001 - DNA, 20 bp, Artificial Sequence
  Description of Artificial Sequence: Synthetic oligonucleotide
  Target: LAMA2; (-) strand; PAM type: YTN; PAM sequence: TTA
attttgctttcagagcatca

SEQ ID NO: 249002 - DNA, 20 bp, Artificial Sequence
  Description of Artificial Sequence: Synthetic oligonucleotide
  Target: LAMA2; (-) strand; PAM type: YTN; PAM sequence: TTG
ggaaagttaattttgctttc

SEQ ID NO: 249003 - DNA, 20 bp, Artificial Sequence
  Description of Artificial Sequence: Synthetic oligonucleotide
  Target: LAMA2; (-) strand; PAM type: YTN; PAM sequence: CTT
gggaaagttaattttgcttt

SEQ ID NO: 249004 - DNA, 20 bp, Artificial Sequence
  Description of Artificial Sequence: Synthetic oligonucleotide
  Target: LAMA2; (-) strand; PAM type: YTN; PAM sequence: CTA
caaggcccttgggaaagtta

SEQ ID NO: 249005 - DNA, 20 bp, Artificial Sequence
  Description of Artificial Sequence: Synthetic oligonucleotide
  Target: LAMA2; (-) strand; PAM type: YTN; PAM sequence: TTA
agcactacaaggcccttggg

SEQ ID NO: 249006 - DNA, 20 bp, Artificial Sequence
  Description of Artificial Sequence: Synthetic oligonucleotide
  Target: LAMA2; (-) strand; PAM type: YTN; PAM sequence: TTT
aagcactacaaggcccttgg

SEQ ID NO: 249007 - DNA, 20 bp, Artificial Sequence
  Description of Artificial Sequence: Synthetic oligonucleotide
  Target: LAMA2; (-) strand; PAM type: YTN; PAM sequence: CTT
taagcactacaaggcccttg

SEQ ID NO: 249008 - DNA, 20 bp, Artificial Sequence
  Description of Artificial Sequence: Synthetic oligonucleotide
  Target: LAMA2; (-) strand; PAM type: YTN; PAM sequence: CTG
cctttaagcactacaaggcc

SEQ ID NO: 249009 - DNA, 20 bp, Artificial Sequence
  Description of Artificial Sequence: Synthetic oligonucleotide
  Target: LAMA2; (-) strand; PAM type: YTN; PAM sequence: TTC
tgcctttaagcactacaagg

SEQ ID NO: 249010 - DNA, 20 bp, Artificial Sequence
  Description of Artificial Sequence: Synthetic oligonucleotide
  Target: LAMA2; (-) strand; PAM type: YTN; PAM sequence: TTG
attctgcctttaagcactac

SEQ ID NO: 249011 - DNA, 20 bp, Artificial Sequence
  Description of Artificial Sequence: Synthetic oligonucleotide
  Target: LAMA2; (-) strand; PAM type: YTN; PAM sequence: TTT
gattctgcctttaagcacta

SEQ ID NO: 249012 - DNA, 20 bp, Artificial Sequence
  Description of Artificial Sequence: Synthetic oligonucleotide
  Target: LAMA2; (-) strand; PAM type: YTN; PAM sequence: TTT
tgattctgcctttaagcact

SEQ ID NO: 249013 - DNA, 20 bp, Artificial Sequence
  Description of Artificial Sequence: Synthetic oligonucleotide
  Target: LAMA2; (-) strand; PAM type: YTN; PAM sequence: TTG
tggattttgattctgccttt

SEQ ID NO: 249014 - DNA, 20 bp, Artificial Sequence
  Description of Artificial Sequence: Synthetic oligonucleotide
  Target: LAMA2; (-) strand; PAM type: YTN; PAM sequence: CTG
gttgtggattttgattctgc

SEQ ID NO: 249015 - DNA, 20 bp, Artificial Sequence
  Description of Artificial Sequence: Synthetic oligonucleotide
  Target: LAMA2; (-) strand; PAM type: YTN; PAM sequence: TTC
cagagctggttgtggatttt

SEQ ID NO: 249016 - DNA, 20 bp, Artificial Sequence
  Description of Artificial Sequence: Synthetic oligonucleotide
  Target: LAMA2; (-) strand; PAM type: YTN; PAM sequence: TTT
ccagagctggttgtggattt

SEQ ID NO: 249017 - DNA, 20 bp, Artificial Sequence
  Description of Artificial Sequence: Synthetic oligonucleotide
  Target: LAMA2; (-) strand; PAM type: YTN; PAM sequence: TTT
tccagagctggttgtggatt

SEQ ID NO: 249018 - DNA, 20 bp, Artificial Sequence
  Description of Artificial Sequence: Synthetic oligonucleotide
  Target: LAMA2; (-) strand; PAM type: YTN; PAM sequence: CTG
gagattttccagagctggtt

SEQ ID NO: 249019 - DNA, 20 bp, Artificial Sequence
  Description of Artificial Sequence: Synthetic oligonucleotide
  Target: LAMA2; (-) strand; PAM type: YTN; PAM sequence: TTC
tggagattttccagagctgg

SEQ ID NO: 249020 - DNA, 20 bp, Artificial Sequence
  Description of Artificial Sequence: Synthetic oligonucleotide
  Target: LAMA2; (-) strand; PAM type: YTN; PAM sequence: TTT
ctggagattttccagagctg

SEQ ID NO: 249021 - DNA, 20 bp, Artificial Sequence
  Description of Artificial Sequence: Synthetic oligonucleotide
  Target: LAMA2; (-) strand; PAM type: YTN; PAM sequence: CTC
atttctggagattttccaga

SEQ ID NO: 249022 - DNA, 20 bp, Artificial Sequence
  Description of Artificial Sequence: Synthetic oligonucleotide
  Target: LAMA2; (-) strand; PAM type: YTN; PAM sequence: TTA
agctcatttctggagatttt

SEQ ID NO: 249023 - DNA, 20 bp, Artificial Sequence
  Description of Artificial Sequence: Synthetic oligonucleotide
  Target: LAMA2; (-) strand; PAM type: YTN; PAM sequence: TTG
gagtcatatataaatcacac

SEQ ID NO: 249024 - DNA, 20 bp, Artificial Sequence
  Description of Artificial Sequence: Synthetic oligonucleotide
  Target: LAMA2; (-) strand; PAM type: YTN; PAM sequence: TTA
atattggagtcatatataaa

SEQ ID NO: 249025 - DNA, 20 bp, Artificial Sequence
  Description of Artificial Sequence: Synthetic oligonucleotide
  Target: LAMA2; (-) strand; PAM type: YTN; PAM sequence: CTG
ttaatattggagtcatatat

SEQ ID NO: 249026 - DNA, 20 bp, Artificial Sequence
  Description of Artificial Sequence: Synthetic oligonucleotide
  Target: LAMA2; (-) strand; PAM type: YTN; PAM sequence: TTG
acatgtctgttaatattgga

SEQ ID NO: 249027 - DNA, 20 bp, Artificial Sequence
  Description of Artificial Sequence: Synthetic oligonucleotide
  Target: LAMA2; (-) strand; PAM type: YTN; PAM sequence: TTT
gacatgtctgttaatattgg

SEQ ID NO: 249028 - DNA, 20 bp, Artificial Sequence
  Description of Artificial Sequence: Synthetic oligonucleotide
  Target: LAMA2; (-) strand; PAM type: YTN; PAM sequence: TTG
tttgacatgtctgttaatat

SEQ ID NO: 249029 - DNA, 20 bp, Artificial Sequence
  Description of Artificial Sequence: Synthetic oligonucleotide
  Target: LAMA2; (-) strand; PAM type: YTN; PAM sequence: TTA
gttgtttgacatgtctgtta

SEQ ID NO: 249030 - DNA, 20 bp, Artificial Sequence
  Description of Artificial Sequence: Synthetic oligonucleotide
  Target: LAMA2; (-) strand; PAM type: YTN; PAM sequence: TTG
tgttagttgtttgacatgtc

SEQ ID NO: 249031 - DNA, 20 bp, Artificial Sequence
  Description of Artificial Sequence: Synthetic oligonucleotide
  Target: LAMA2; (-) strand; PAM type: YTN; PAM sequence: TTC
caaaataaacaggtaaaggg

SEQ ID NO: 249032 - DNA, 20 bp, Artificial Sequence
  Description of Artificial Sequence: Synthetic oligonucleotide
  Target: LAMA2; (-) strand; PAM type: YTN; PAM sequence: CTT
ccaaaataaacaggtaaagg

SEQ ID NO: 249033 - DNA, 20 bp, Artificial Sequence
  Description of Artificial Sequence: Synthetic oligonucleotide
  Target: LAMA2; (-) strand; PAM type: YTN; PAM sequence: TTC
ttccaaaataaacaggtaaa

SEQ ID NO: 249034 - DNA, 20 bp, Artificial Sequence
  Description of Artificial Sequence: Synthetic oligonucleotide
  Target: LAMA2; (-) strand; PAM type: YTN; PAM sequence: CTT
cttccaaaataaacaggtaa

SEQ ID NO: 249035 - DNA, 20 bp, Artificial Sequence
  Description of Artificial Sequence: Synthetic oligonucleotide
  Target: LAMA2; (-) strand; PAM type: YTN; PAM sequence: TTA
agtgtcttcttccaaaataa

SEQ ID NO: 249036 - DNA, 20 bp, Artificial Sequence
  Description of Artificial Sequence: Synthetic oligonucleotide
  Target: LAMA2; (-) strand; PAM type: YTN; PAM sequence: TTT
aagtgtcttcttccaaaata

SEQ ID NO: 249037 - DNA, 20 bp, Artificial Sequence
  Description of Artificial Sequence: Synthetic oligonucleotide
  Target: LAMA2; (-) strand; PAM type: YTN; PAM sequence: TTT
taagtgtcttcttccaaaat

SEQ ID NO: 249038 - DNA, 20 bp, Artificial Sequence
  Description of Artificial Sequence: Synthetic oligonucleotide
  Target: LAMA2; (-) strand; PAM type: YTN; PAM sequence: CTC
cagaggagaatcaacagggt

SEQ ID NO: 249039 - DNA, 20 bp, Artificial Sequence
  Description of Artificial Sequence: Synthetic oligonucleotide
  Target: LAMA2; (-) strand; PAM type: YTN; PAM sequence: CTA
agtcacactccagaggagaa

SEQ ID NO: 249040 - DNA, 20 bp, Artificial Sequence
  Description of Artificial Sequence: Synthetic oligonucleotide
  Target: LAMA2; (-) strand; PAM type: YTN; PAM sequence: TTA
gaagataagaatcccaaagg

SEQ ID NO: 249041 - DNA, 20 bp, Artificial Sequence
  Description of Artificial Sequence: Synthetic oligonucleotide
  Target: LAMA2; (-) strand; PAM type: YTN; PAM sequence: TTT
agaagataagaatcccaaag

SEQ ID NO: 249042 - DNA, 20 bp, Artificial Sequence
  Description of Artificial Sequence: Synthetic oligonucleotide
  Target: LAMA2; (-) strand; PAM type: YTN; PAM sequence: TTT
tagaagataagaatcccaaa

SEQ ID NO: 249043 - DNA, 20 bp, Artificial Sequence
  Description of Artificial Sequence: Synthetic oligonucleotide
  Target: LAMA2; (-) strand; PAM type: YTN; PAM sequence: TTG
tgaattttagaagataagaa

SEQ ID NO: 249044 - DNA, 20 bp, Artificial Sequence
  Description of Artificial Sequence: Synthetic oligonucleotide
  Target: LAMA2; (-) strand; PAM type: YTN; PAM sequence: TTA
cagcagtagaaagtggttgt

SEQ ID NO: 249045 - DNA, 20 bp, Artificial Sequence
  Description of Artificial Sequence: Synthetic oligonucleotide
  Target: LAMA2; (-) strand; PAM type: YTN; PAM sequence: CTT
acagcagtagaaagtggttg

SEQ ID NO: 249046 - DNA, 20 bp, Artificial Sequence
  Description of Artificial Sequence: Synthetic oligonucleotide
  Target: LAMA2; (-) strand; PAM type: YTN; PAM sequence: TTC
ttacagcagtagaaagtggt

SEQ ID NO: 249047 - DNA, 20 bp, Artificial Sequence
  Description of Artificial Sequence: Synthetic oligonucleotide
  Target: LAMA2; (-) strand; PAM type: YTN; PAM sequence: TTT
cttacagcagtagaaagtgg

SEQ ID NO: 249048 - DNA, 20 bp, Artificial Sequence
  Description of Artificial Sequence: Synthetic oligonucleotide
  Target: LAMA2; (-) strand; PAM type: YTN; PAM sequence: CTT
tcttacagcagtagaaagtg

SEQ ID NO: 249049 - DNA, 20 bp, Artificial Sequence
  Description of Artificial Sequence: Synthetic oligonucleotide
  Target: LAMA2; (-) strand; PAM type: YTN; PAM sequence: TTC
tttcttacagcagtagaaag

SEQ ID NO: 249050 - DNA, 20 bp, Artificial Sequence
  Description of Artificial Sequence: Synthetic oligonucleotide
  Target: LAMA2; (-) strand; PAM type: YTN; PAM sequence: CTG
caggtgattctttcttacag

SEQ ID NO: 249051 - DNA, 20 bp, Artificial Sequence
  Description of Artificial Sequence: Synthetic oligonucleotide
  Target: LAMA2; (-) strand; PAM type: YTN; PAM sequence: CTC
tgcaggtgattctttcttac

SEQ ID NO: 249052 - DNA, 20 bp, Artificial Sequence
  Description of Artificial Sequence: Synthetic oligonucleotide
  Target: LAMA2; (-) strand; PAM type: YTN; PAM sequence: TTC
gtgaactctgcaggtgattc

SEQ ID NO: 249053 - DNA, 20 bp, Artificial Sequence
  Description of Artificial Sequence: Synthetic oligonucleotide
  Target: LAMA2; (-) strand; PAM type: YTN; PAM sequence: CTC
attcgtgaactctgcaggtg

SEQ ID NO: 249054 - DNA, 20 bp, Artificial Sequence
  Description of Artificial Sequence: Synthetic oligonucleotide
  Target: LAMA2; (-) strand; PAM type: YTN; PAM sequence: TTC
cctcattcgtgaactctgca

SEQ ID NO: 249055 - DNA, 20 bp, Artificial Sequence
  Description of Artificial Sequence: Synthetic oligonucleotide
  Target: LAMA2; (-) strand; PAM type: YTN; PAM sequence: CTT
ccctcattcgtgaactctgc

SEQ ID NO: 249056 - DNA, 20 bp, Artificial Sequence
  Description of Artificial Sequence: Synthetic oligonucleotide
  Target: LAMA2; (-) strand; PAM type: YTN; PAM sequence: CTC
ttccctcattcgtgaactct

SEQ ID NO: 249057 - DNA, 20 bp, Artificial Sequence
  Description of Artificial Sequence: Synthetic oligonucleotide
  Target: LAMA2; (-) strand; PAM type: YTN; PAM sequence: TTC
actcttccctcattcgtgaa

SEQ ID NO: 249058 - DNA, 20 bp, Artificial Sequence
  Description of Artificial Sequence: Synthetic oligonucleotide
  Target: LAMA2; (-) strand; PAM type: YTN; PAM sequence: TTT
cactcttccctcattcgtga

SEQ ID NO: 249059 - DNA, 20 bp, Artificial Sequence
  Description of Artificial Sequence: Synthetic oligonucleotide
  Target: LAMA2; (-) strand; PAM type: YTN; PAM sequence: TTT
tcactcttccctcattcgtg

SEQ ID NO: 249060 - DNA, 20 bp, Artificial Sequence
  Description of Artificial Sequence: Synthetic oligonucleotide
  Target: LAMA2; (-) strand; PAM type: YTN; PAM sequence: CTT
ttcactcttccctcattcgt

SEQ ID NO: 249061 - DNA, 20 bp, Artificial Sequence
  Description of Artificial Sequence: Synthetic oligonucleotide
  Target: LAMA2; (-) strand; PAM type: YTN; PAM sequence: TTC
ccttttcactcttccctcat

SEQ ID NO: 249062 - DNA, 20 bp, Artificial Sequence
  Description of Artificial Sequence: Synthetic oligonucleotide
  Target: LAMA2; (-) strand; PAM type: YTN; PAM sequence: CTA
ttcccttttcactcttccct

SEQ ID NO: 249063 - DNA, 20 bp, Artificial Sequence
  Description of Artificial Sequence: Synthetic oligonucleotide
  Target: LAMA2; (-) strand; PAM type: YTN; PAM sequence: CTG
ccactattcccttttcactc

SEQ ID NO: 249064 - DNA, 20 bp, Artificial Sequence
  Description of Artificial Sequence: Synthetic oligonucleotide
  Target: LAMA2; (-) strand; PAM type: YTN; PAM sequence: TTG
atctgccactattccctttt

SEQ ID NO: 249065 - DNA, 20 bp, Artificial Sequence
  Description of Artificial Sequence: Synthetic oligonucleotide
  Target: LAMA2; (-) strand; PAM type: YTN; PAM sequence: TTG
atgtgatgccaagtggtatt

SEQ ID NO: 249066 - DNA, 20 bp, Artificial Sequence
  Description of Artificial Sequence: Synthetic oligonucleotide
  Target: LAMA2; (-) strand; PAM type: YTN; PAM sequence: TTT
gatgtgatgccaagtggtat

SEQ ID NO: 249067 - DNA, 20 bp, Artificial Sequence
  Description of Artificial Sequence: Synthetic oligonucleotide
  Target: LAMA2; (-) strand; PAM type: YTN; PAM sequence: TTT
tgatgtgatgccaagtggta

SEQ ID NO: 249068 - DNA, 20 bp, Artificial Sequence
  Description of Artificial Sequence: Synthetic oligonucleotide
  Target: LAMA2; (-) strand; PAM type: YTN; PAM sequence: CTA
ttttgatgtgatgccaagtg

SEQ ID NO: 249069 - DNA, 20 bp, Artificial Sequence
  Description of Artificial Sequence: Synthetic oligonucleotide
  Target: LAMA2; (-) strand; PAM type: YTN; PAM sequence: TTG
gaatactattttgatgtgat

SEQ ID NO: 249070 - DNA, 20 bp, Artificial Sequence
  Description of Artificial Sequence: Synthetic oligonucleotide
  Target: LAMA2; (-) strand; PAM type: YTN; PAM sequence: CTT
ggaatactattttgatgtga

SEQ ID NO: 249071 - DNA, 20 bp, Artificial Sequence
  Description of Artificial Sequence: Synthetic oligonucleotide
  Target: LAMA2; (-) strand; PAM type: YTN; PAM sequence: TTC
ccagaaaagcagaagccaga

SEQ ID NO: 249072 - DNA, 20 bp, Artificial Sequence
  Description of Artificial Sequence: Synthetic oligonucleotide
  Target: LAMA2; (-) strand; PAM type: YTN; PAM sequence: TTT
cccagaaaagcagaagccag

SEQ ID NO: 249073 - DNA, 20 bp, Artificial Sequence
  Description of Artificial Sequence: Synthetic oligonucleotide
  Target: LAMA2; (-) strand; PAM type: YTN; PAM sequence: TTG
aaatagcagacaacgtattt

SEQ ID NO: 249074 - DNA, 20 bp, Artificial Sequence
  Description of Artificial Sequence: Synthetic oligonucleotide
  Target: LAMA2; (-) strand; PAM type: YTN; PAM sequence: TTT
gaaatagcagacaacgtatt

SEQ ID NO: 249075 - DNA, 20 bp, Artificial Sequence
  Description of Artificial Sequence: Synthetic oligonucleotide
  Target: LAMA2; (-) strand; PAM type: YTN; PAM sequence: TTT
tgaaatagcagacaacgtat

SEQ ID NO: 249076 - DNA, 20 bp, Artificial Sequence
  Description of Artificial Sequence: Synthetic oligonucleotide
  Target: LAMA2; (-) strand; PAM type: YTN; PAM sequence: TTC
agatggagggcattttgaaa

SEQ ID NO: 249077 - DNA, 20 bp, Artificial Sequence
  Description of Artificial Sequence: Synthetic oligonucleotide
  Target: LAMA2; (-) strand; PAM type: YTN; PAM sequence: TTA
ttcagatggagggcattttg

SEQ ID NO: 249078 - DNA, 20 bp, Artificial Sequence
  Description of Artificial Sequence: Synthetic oligonucleotide
  Target: LAMA2; (-) strand; PAM type: YTN; PAM sequence: TTA
cattattcagatggagggca

SEQ ID NO: 249079 - DNA, 20 bp, Artificial Sequence
  Description of Artificial Sequence: Synthetic oligonucleotide
  Target: LAMA2; (-) strand; PAM type: YTN; PAM sequence: TTC
aggttacattattcagatgg

SEQ ID NO: 249080 - DNA, 20 bp, Artificial Sequence
  Description of Artificial Sequence: Synthetic oligonucleotide
  Target: LAMA2; (-) strand; PAM type: YTN; PAM sequence: TTT
caggttacattattcagatg

SEQ ID NO: 249081 - DNA, 20 bp, Artificial Sequence
  Description of Artificial Sequence: Synthetic oligonucleotide
  Target: LAMA2; (-) strand; PAM type: YTN; PAM sequence: TTG
aatgaatttcaggttacatt

SEQ ID NO: 249082 - DNA, 20 bp, Artificial Sequence
  Description of Artificial Sequence: Synthetic oligonucleotide
  Target: LAMA2; (-) strand; PAM type: YTN; PAM sequence: CTA
aatatgagttgaatgaattt

SEQ ID NO: 249083 - DNA, 20 bp, Artificial Sequence
  Description of Artificial Sequence: Synthetic oligonucleotide
  Target: LAMA2; (-) strand; PAM type: YTN; PAM sequence: CTA
aagtgctaaatatgagttga

SEQ ID NO: 249084 - DNA, 20 bp, Artificial Sequence
  Description of Artificial Sequence: Synthetic oligonucleotide
  Target: LAMA2; (-) strand; PAM type: YTN; PAM sequence: CTG
gatatggcctaaagtgctaa

SEQ ID NO: 249085 - DNA, 20 bp, Artificial Sequence
  Description of Artificial Sequence: Synthetic oligonucleotide
  Target: LAMA2; (-) strand; PAM type: YTN; PAM sequence: TTC
cacaaccctggatatggcct

SEQ ID NO: 249086 - DNA, 20 bp, Artificial Sequence
  Description of Artificial Sequence: Synthetic oligonucleotide
  Target: LAMA2; (-) strand; PAM type: YTN; PAM sequence: CTT
ccacaaccctggatatggcc

SEQ ID NO: 249087 - DNA, 20 bp, Artificial Sequence
  Description of Artificial Sequence: Synthetic oligonucleotide
  Target: LAMA2; (-) strand; PAM type: YTN; PAM sequence: TTA
cgtacaccttccacaaccct

SEQ ID NO: 249088 - DNA, 20 bp, Artificial Sequence
  Description of Artificial Sequence: Synthetic oligonucleotide
  Target: LAMA2; (-) strand; PAM type: YTN; PAM sequence: CTT
acgtacaccttccacaaccc

SEQ ID NO: 249089 - DNA, 20 bp, Artificial Sequence
  Description of Artificial Sequence: Synthetic oligonucleotide
  Target: LAMA2; (-) strand; PAM type: YTN; PAM sequence: TTG
cttacgtacaccttccacaa

SEQ ID NO: 249090 - DNA, 20 bp, Artificial Sequence
  Description of Artificial Sequence: Synthetic oligonucleotide
  Target: LAMA2; (-) strand; PAM type: YTN; PAM sequence: CTC
attgcttacgtacaccttcc

SEQ ID NO: 249091 - DNA, 20 bp, Artificial Sequence
  Description of Artificial Sequence: Synthetic oligonucleotide
  Target: LAMA2; (-) strand; PAM type: YTN; PAM sequence: TTG
taggcaatcctcattgctta

SEQ ID NO: 249092 - DNA, 20 bp, Artificial Sequence
  Description of Artificial Sequence: Synthetic oligonucleotide
  Target: LAMA2; (-) strand; PAM type: YTN; PAM sequence: CTT
gtaggcaatcctcattgctt

SEQ ID NO: 249093 - DNA, 20 bp, Artificial Sequence
  Description of Artificial Sequence: Synthetic oligonucleotide
  Target: LAMA2; (-) strand; PAM type: YTN; PAM sequence: TTG
ccttgtaggcaatcctcatt

SEQ ID NO: 249094 - DNA, 20 bp, Artificial Sequence
  Description of Artificial Sequence: Synthetic oligonucleotide
  Target: LAMA2; (-) strand; PAM type: YTN; PAM sequence: CTT
gccttgtaggcaatcctcat

SEQ ID NO: 249095 - DNA, 20 bp, Artificial Sequence
  Description of Artificial Sequence: Synthetic oligonucleotide
  Target: LAMA2; (-) strand; PAM type: YTN; PAM sequence: CTC
atcttgccttgtaggcaatc

SEQ ID NO: 249096 - DNA, 20 bp, Artificial Sequence
  Description of Artificial Sequence: Synthetic oligonucleotide
  Target: LAMA2; (-) strand; PAM type: YTN; PAM sequence: TTC
tcatcttgccttgtaggcaa

SEQ ID NO: 249097 - DNA, 20 bp, Artificial Sequence
  Description of Artificial Sequence: Synthetic oligonucleotide
  Target: LAMA2; (-) strand; PAM type: YTN; PAM sequence: TTG
caaagggaggaacaatagaa

SEQ ID NO: 249098 - DNA, 20 bp, Artificial Sequence
  Description of Artificial Sequence: Synthetic oligonucleotide
  Target: LAMA2; (-) strand; PAM type: YTN; PAM sequence: CTG
ttgcaaagggaggaacaata

SEQ ID NO: 249099 - DNA, 20 bp, Artificial Sequence
  Description of Artificial Sequence: Synthetic oligonucleotide
  Target: LAMA2; (-) strand; PAM type: YTN; PAM sequence: TTC
tgttgcaaagggaggaacaa

SEQ ID NO: 249100 - DNA, 20 bp, Artificial Sequence
  Description of Artificial Sequence: Synthetic oligonucleotide
  Target: LAMA2; (-) strand; PAM type: YTN; PAM sequence: CTT
ctgttgcaaagggaggaaca

SEQ ID NO: 249101 - DNA, 20 bp, Artificial Sequence
  Description of Artificial Sequence: Synthetic oligonucleotide
  Target: LAMA2; (-) strand; PAM type: YTN; PAM sequence: CTA
cttctgttgcaaagggagga

SEQ ID NO: 249102 - DNA, 20 bp, Artificial Sequence
  Description of Artificial Sequence: Synthetic oligonucleotide
  Target: LAMA2; (-) strand; PAM type: YTN; PAM sequence: TTC
tacttctgttgcaaagggag

SEQ ID NO: 249103 - DNA, 20 bp, Artificial Sequence
  Description of Artificial Sequence: Synthetic oligonucleotide
  Target: LAMA2; (-) strand; PAM type: YTN; PAM sequence: TTT
ctacttctgttgcaaaggga

SEQ ID NO: 249104 - DNA, 20 bp, Artificial Sequence
  Description of Artificial Sequence: Synthetic oligonucleotide
  Target: LAMA2; (-) strand; PAM type: YTN; PAM sequence: CTT
tctacttctgttgcaaaggg

SEQ ID NO: 249105 - DNA, 20 bp, Artificial Sequence
  Description of Artificial Sequence: Synthetic oligonucleotide
  Target: LAMA2; (-) strand; PAM type: YTN; PAM sequence: CTA
tggtatggccctttctactt

SEQ ID NO: 249106 - DNA, 20 bp, Artificial Sequence
  Description of Artificial Sequence: Synthetic oligonucleotide
  Target: LAMA2; (-) strand; PAM type: YTN; PAM sequence: TTG
gacagtagatggctatggta

SEQ ID NO: 249107 - DNA, 20 bp, Artificial Sequence
  Description of Artificial Sequence: Synthetic oligonucleotide
  Target: LAMA2; (-) strand; PAM type: YTN; PAM sequence: TTC
atcatgttggacagtagatg

SEQ ID NO: 249108 - DNA, 20 bp, Artificial Sequence
  Description of Artificial Sequence: Synthetic oligonucleotide
  Target: LAMA2; (-) strand; PAM type: YTN; PAM sequence: TTA
aggatattcatcatgttgga

SEQ ID NO: 249109 - DNA, 20 bp, Artificial Sequence
  Description of Artificial Sequence: Synthetic oligonucleotide
  Target: LAMA2; (-) strand; PAM type: YTN; PAM sequence: TTT
aaggatattcatcatgttgg

SEQ ID NO: 249110 - DNA, 20 bp, Artificial Sequence
  Description of Artificial Sequence: Synthetic oligonucleotide
  Target: LAMA2; (-) strand; PAM type: YTN; PAM sequence: CTT
taaggatattcatcatgttg

SEQ ID NO: 249111 - DNA, 20 bp, Artificial Sequence
  Description of Artificial Sequence: Synthetic oligonucleotide
  Target: LAMA2; (-) strand; PAM type: YTN; PAM sequence: TTG
tctttaaggatattcatcat

SEQ ID NO: 249112 - DNA, 20 bp, Artificial Sequence
  Description of Artificial Sequence: Synthetic oligonucleotide
  Target: LAMA2; (-) strand; PAM type: YTN; PAM sequence: TTT
gtctttaaggatattcatca

SEQ ID NO: 249113 - DNA, 20 bp, Artificial Sequence
  Description of Artificial Sequence: Synthetic oligonucleotide
  Target: LAMA2; (-) strand; PAM type: YTN; PAM sequence: TTT
tgtctttaaggatattcatc

SEQ ID NO: 249114 - DNA, 20 bp, Artificial Sequence
  Description of Artificial Sequence: Synthetic oligonucleotide
  Target: LAMA2; (-) strand; PAM type: YTN; PAM sequence: TTA
aagattttgtctttaaggat

SEQ ID NO: 249115 - DNA, 20 bp, Artificial Sequence
  Description of Artificial Sequence: Synthetic oligonucleotide
  Target: LAMA2; (-) strand; PAM type: YTN; PAM sequence: CTT
aaagattttgtctttaagga

SEQ ID NO: 249116 - DNA, 20 bp, Artificial Sequence
  Description of Artificial Sequence: Synthetic oligonucleotide
  Target: LAMA2; (-) strand; PAM type: YTN; PAM sequence: CTG
cttaaagattttgtctttaa

SEQ ID NO: 249117 - DNA, 20 bp, Artificial Sequence
  Description of Artificial Sequence: Synthetic oligonucleotide
  Target: LAMA2; (-) strand; PAM type: YTN; PAM sequence: TTA
ctgcttaaagattttgtctt

SEQ ID NO: 249118 - DNA, 20 bp, Artificial Sequence
  Description of Artificial Sequence: Synthetic oligonucleotide
  Target: LAMA2; (-) strand; PAM type: YTN; PAM sequence: CTT
actgcttaaagattttgtct

SEQ ID NO: 249119 - DNA, 20 bp, Artificial Sequence
  Description of Artificial Sequence: Synthetic oligonucleotide
  Target: LAMA2; (-) strand; PAM type: YTN; PAM sequence: TTC
acttactgcttaaagatttt

SEQ ID NO: 249120 - DNA, 20 bp, Artificial Sequence
  Description of Artificial Sequence: Synthetic oligonucleotide
  Target: LAMA2; (-) strand; PAM type: YTN; PAM sequence: TTT
cacttactgcttaaagattt

SEQ ID NO: 249121 - DNA, 20 bp, Artificial Sequence
  Description of Artificial Sequence: Synthetic oligonucleotide
  Target: LAMA2; (-) strand; PAM type: YTN; PAM sequence: CTT
tcacttactgcttaaagatt

SEQ ID NO: 249122 - DNA, 20 bp, Artificial Sequence
  Description of Artificial Sequence: Synthetic oligonucleotide
  Target: LAMA2; (-) strand; PAM type: YTN; PAM sequence: TTA
acctttcacttactgcttaa

SEQ ID NO: 249123 - DNA, 20 bp, Artificial Sequence
  Description of Artificial Sequence: Synthetic oligonucleotide
  Target: LAMA2; (-) strand; PAM type: YTN; PAM sequence: TTG
tagttaacctttcacttact

SEQ ID NO: 249124 - DNA, 20 bp, Artificial Sequence
  Description of Artificial Sequence: Synthetic oligonucleotide
  Target: LAMA2; (-) strand; PAM type: YTN; PAM sequence: TTA
aatgagaattgtagttaacc

SEQ ID NO: 249125 - DNA, 20 bp, Artificial Sequence
  Description of Artificial Sequence: Synthetic oligonucleotide
  Target: LAMA2; (-) strand; PAM type: YTN; PAM sequence: TTT
aaatgagaattgtagttaac

SEQ ID NO: 249126 - DNA, 20 bp, Artificial Sequence
  Description of Artificial Sequence: Synthetic oligonucleotide
  Target: LAMA2; (-) strand; PAM type: YTN; PAM sequence: TTT
taaatgagaattgtagttaa

SEQ ID NO: 249127 - DNA, 20 bp, Artificial Sequence
  Description of Artificial Sequence: Synthetic oligonucleotide
  Target: LAMA2; (-) strand; PAM type: YTN; PAM sequence: TTT
ttaaatgagaattgtagtta

SEQ ID NO: 249128 - DNA, 20 bp, Artificial Sequence
  Description of Artificial Sequence: Synthetic oligonucleotide
  Target: LAMA2; (-) strand; PAM type: YTN; PAM sequence: CTT
tttaaatgagaattgtagtt

SEQ ID NO: 249129 - DNA, 20 bp, Artificial Sequence
  Description of Artificial Sequence: Synthetic oligonucleotide
  Target: LAMA2; (-) strand; PAM type: YTN; PAM sequence: TTC
tttttaaatgagaattgtag

SEQ ID NO: 249130 - DNA, 20 bp, Artificial Sequence
  Description of Artificial Sequence: Synthetic oligonucleotide
  Target: LAMA2; (-) strand; PAM type: YTN; PAM sequence: TTT
ctttttaaatgagaattgta

SEQ ID NO: 249131 - DNA, 20 bp, Artificial Sequence
  Description of Artificial Sequence: Synthetic oligonucleotide
  Target: LAMA2; (-) strand; PAM type: YTN; PAM sequence: TTT
tctttttaaatgagaattgt

SEQ ID NO: 249132 - DNA, 20 bp, Artificial Sequence
  Description of Artificial Sequence: Synthetic oligonucleotide
  Target: LAMA2; (-) strand; PAM type: YTN; PAM sequence: TTA
tgtaacaaagagatatcagc

SEQ ID NO: 249133 - DNA, 20 bp, Artificial Sequence
  Description of Artificial Sequence: Synthetic oligonucleotide
  Target: LAMA2; (-) strand; PAM type: YTN; PAM sequence: TTT
atgtaacaaagagatatcag

SEQ ID NO: 249134 - DNA, 20 bp, Artificial Sequence
  Description of Artificial Sequence: Synthetic oligonucleotide
  Target: LAMA2; (-) strand; PAM type: YTN; PAM sequence: TTG
tggaaaatttatgtaacaaa

SEQ ID NO: 249135 - DNA, 20 bp, Artificial Sequence
  Description of Artificial Sequence: Synthetic oligonucleotide
  Target: LAMA2; (-) strand; PAM type: YTN; PAM sequence: CTT
gtggaaaatttatgtaacaa

SEQ ID NO: 249136 - DNA, 20 bp, Artificial Sequence
  Description of Artificial Sequence: Synthetic oligonucleotide
  Target: LAMA2; (-) strand; PAM type: YTN; PAM sequence: TTG
tcaaatagataacaaatgaa

SEQ ID NO: 249137 - DNA, 20 bp, Artificial Sequence
  Description of Artificial Sequence: Synthetic oligonucleotide
  Target: LAMA2; (-) strand; PAM type: YTN; PAM sequence: CTA
ttgtcaaatagataacaaat

SEQ ID NO: 249138 - DNA, 20 bp, Artificial Sequence
  Description of Artificial Sequence: Synthetic oligonucleotide
  Target: LAMA2; (-) strand; PAM type: YTN; PAM sequence: TTG
ctattgtcaaatagataaca

SEQ ID NO: 249139 - DNA, 20 bp, Artificial Sequence
  Description of Artificial Sequence: Synthetic oligonucleotide
  Target: LAMA2; (-) strand; PAM type: YTN; PAM sequence: CTT
gctattgtcaaatagataac

SEQ ID NO: 249140 - DNA, 20 bp, Artificial Sequence
  Description of Artificial Sequence: Synthetic oligonucleotide
  Target: LAMA2; (-) strand; PAM type: YTN; PAM sequence: CTA
aagagaaacaggcttgctat

SEQ ID NO: 249141 - DNA, 20 bp, Artificial Sequence
  Description of Artificial Sequence: Synthetic oligonucleotide
  Target: LAMA2; (-) strand; PAM type: YTN; PAM sequence: TTA
agctaaagagaaacaggctt

SEQ ID NO: 249142 - DNA, 20 bp, Artificial Sequence
  Description of Artificial Sequence: Synthetic oligonucleotide
  Target: LAMA2; (-) strand; PAM type: YTN; PAM sequence: TTT
aagctaaagagaaacaggct

SEQ ID NO: 249143 - DNA, 20 bp, Artificial Sequence
  Description of Artificial Sequence: Synthetic oligonucleotide
  Target: LAMA2; (-) strand; PAM type: YTN; PAM sequence: CTT
taagctaaagagaaacaggc

SEQ ID NO: 249144 - DNA, 20 bp, Artificial Sequence
  Description of Artificial Sequence: Synthetic oligonucleotide
  Target: LAMA2; (-) strand; PAM type: YTN; PAM sequence: TTC
ctttaagctaaagagaaaca

SEQ ID NO: 249145 - DNA, 20 bp, Artificial Sequence
  Description of Artificial Sequence: Synthetic oligonucleotide
  Target: LAMA2; (-) strand; PAM type: YTN; PAM sequence: TTA
atccaagttcctttaagcta

SEQ ID NO: 249146 - DNA, 20 bp, Artificial Sequence
  Description of Artificial Sequence: Synthetic oligonucleotide
  Target: LAMA2; (-) strand; PAM type: YTN; PAM sequence: TTT
aatccaagttcctttaagct

SEQ ID NO: 249147 - DNA, 20 bp, Artificial Sequence
  Description of Artificial Sequence: Synthetic oligonucleotide
  Target: LAMA2; (-) strand; PAM type: YTN; PAM sequence: TTT
taatccaagttcctttaagc

SEQ ID NO: 249148 - DNA, 20 bp, Artificial Sequence
  Description of Artificial Sequence: Synthetic oligonucleotide
  Target: LAMA2; (-) strand; PAM type: YTN; PAM sequence: TTA
aaataacagaaaaaatttta

SEQ ID NO: 249149 - DNA, 20 bp, Artificial Sequence
  Description of Artificial Sequence: Synthetic oligonucleotide
  Target: LAMA2; (-) strand; PAM type: YTN; PAM sequence: CTG
attaaaataacagaaaaaat

SEQ ID NO: 249150 - DNA, 20 bp, Artificial Sequence
  Description of Artificial Sequence: Synthetic oligonucleotide
  Target: LAMA2; (-) strand; PAM type: YTN; PAM sequence: CTC
ataatatacaacatcaatgc

SEQ ID NO: 249151 - DNA, 20 bp, Artificial Sequence
  Description of Artificial Sequence: Synthetic oligonucleotide
  Target: LAMA2; (-) strand; PAM type: YTN; PAM sequence: CTG
ccaagaaaacaaaaagccac

SEQ ID NO: 249152 - DNA, 20 bp, Artificial Sequence
  Description of Artificial Sequence: Synthetic oligonucleotide
  Target: LAMA2; (-) strand; PAM type: YTN; PAM sequence: CTC
tgccaagaaaacaaaaagcc

SEQ ID NO: 249153 - DNA, 20 bp, Artificial Sequence
  Description of Artificial Sequence: Synthetic oligonucleotide
  Target: LAMA2; (-) strand; PAM type: YTN; PAM sequence: TTC
aaggtctctgccaagaaaac

SEQ ID NO: 249154 - DNA, 20 bp, Artificial Sequence
  Description of Artificial Sequence: Synthetic oligonucleotide
  Target: LAMA2; (-) strand; PAM type: YTN; PAM sequence: TTT
caaggtctctgccaagaaaa

SEQ ID NO: 249155 - DNA, 20 bp, Artificial Sequence
  Description of Artificial Sequence: Synthetic oligonucleotide
  Target: LAMA2; (-) strand; PAM type: YTN; PAM sequence: TTT
tcaaggtctctgccaagaaa

SEQ ID NO: 249156 - DNA, 20 bp, Artificial Sequence
  Description of Artificial Sequence: Synthetic oligonucleotide
  Target: LAMA2; (-) strand; PAM type: YTN; PAM sequence: TTT
ttcaaggtctctgccaagaa

SEQ ID NO: 249157 - DNA, 20 bp, Artificial Sequence
  Description of Artificial Sequence: Synthetic oligonucleotide
  Target: LAMA2; (-) strand; PAM type: YTN; PAM sequence: TTT
tttcaaggtctctgccaaga

SEQ ID NO: 249158 - DNA, 20 bp, Artificial Sequence
  Description of Artificial Sequence: Synthetic oligonucleotide
  Target: LAMA2; (-) strand; PAM type: YTN; PAM sequence: TTC
aaaattttttcaaggtctct

SEQ ID NO: 249159 - DNA, 20 bp, Artificial Sequence
  Description of Artificial Sequence: Synthetic oligonucleotide
  Target: LAMA2; (-) strand; PAM type: YTN; PAM sequence: CTA
gggttcaaaattttttcaag

SEQ ID NO: 249160 - DNA, 20 bp, Artificial Sequence
  Description of Artificial Sequence: Synthetic oligonucleotide
  Target: LAMA2; (-) strand; PAM type: YTN; PAM sequence: TTG
actagggttcaaaatttttt

SEQ ID NO: 249161 - DNA, 20 bp, Artificial Sequence
  Description of Artificial Sequence: Synthetic oligonucleotide
  Target: LAMA2; (-) strand; PAM type: YTN; PAM sequence: TTA
ttgactagggttcaaaattt

SEQ ID NO: 249162 - DNA, 20 bp, Artificial Sequence
  Description of Artificial Sequence: Synthetic oligonucleotide
  Target: LAMA2; (-) strand; PAM type: YTN; PAM sequence: CTT
attgactagggttcaaaatt

SEQ ID NO: 249163 - DNA, 20 bp, Artificial Sequence
  Description of Artificial Sequence: Synthetic oligonucleotide
  Target: LAMA2; (-) strand; PAM type: YTN; PAM sequence: TTC
ttattgactagggttcaaaa

SEQ ID NO: 249164 - DNA, 20 bp, Artificial Sequence
  Description of Artificial Sequence: Synthetic oligonucleotide
  Target: LAMA2; (-) strand; PAM type: YTN; PAM sequence: TTT
cttattgactagggttcaaa

SEQ ID NO: 249165 - DNA, 20 bp, Artificial Sequence
  Description of Artificial Sequence: Synthetic oligonucleotide
  Target: LAMA2; (-) strand; PAM type: YTN; PAM sequence: TTA
atacagagatttcttattga

SEQ ID NO: 249166 - DNA, 20 bp, Artificial Sequence
  Description of Artificial Sequence: Synthetic oligonucleotide
  Target: LAMA2; (-) strand; PAM type: YTN; PAM sequence: TTA
tattaatacagagatttctt

SEQ ID NO: 249167 - DNA, 20 bp, Artificial Sequence
  Description of Artificial Sequence: Synthetic oligonucleotide
  Target: LAMA2; (-) strand; PAM type: YTN; PAM sequence: TTT
atattaatacagagatttct

SEQ ID NO: 249168 - DNA, 20 bp, Artificial Sequence
  Description of Artificial Sequence: Synthetic oligonucleotide
  Target: LAMA2; (-) strand; PAM type: YTN; PAM sequence: TTT
tatattaatacagagatttc

SEQ ID NO: 249169 - DNA, 20 bp, Artificial Sequence
  Description of Artificial Sequence: Synthetic oligonucleotide
  Target: LAMA2; (-) strand; PAM type: YTN; PAM sequence: TTA
tagttttatattaatacaga

SEQ ID NO: 249170 - DNA, 20 bp, Artificial Sequence
  Description of Artificial Sequence: Synthetic oligonucleotide
  Target: LAMA2; (-) strand; PAM type: YTN; PAM sequence: CTA
atcaaataaaccataagtta

SEQ ID NO: 249171 - DNA, 20 bp, Artificial Sequence
  Description of Artificial Sequence: Synthetic oligonucleotide
  Target: LAMA2; (-) strand; PAM type: YTN; PAM sequence: TTG
atctaatcaaataaaccata

SEQ ID NO: 249172 - DNA, 20 bp, Artificial Sequence
  Description of Artificial Sequence: Synthetic oligonucleotide
  Target: LAMA2; (-) strand; PAM type: YTN; PAM sequence: TTA
aacattgatctaatcaaata

SEQ ID NO: 249173 - DNA, 20 bp, Artificial Sequence
  Description of Artificial Sequence: Synthetic oligonucleotide
  Target: LAMA2; (-) strand; PAM type: YTN; PAM sequence: TTA
tccataattaaacattgatc

SEQ ID NO: 249174 - DNA, 20 bp, Artificial Sequence
  Description of Artificial Sequence: Synthetic oligonucleotide
  Target: LAMA2; (-) strand; PAM type: YTN; PAM sequence: TTC
agtgcaaaaaatacatgtta

SEQ ID NO: 249175 - DNA, 20 bp, Artificial Sequence
  Description of Artificial Sequence: Synthetic oligonucleotide
  Target: LAMA2; (-) strand; PAM type: YTN; PAM sequence: TTG
tgtgtaaatattcagtgcaa

SEQ ID NO: 249176 - DNA, 20 bp, Artificial Sequence
  Description of Artificial Sequence: Synthetic oligonucleotide
  Target: LAMA2; (-) strand; PAM type: YTN; PAM sequence: TTT
gtgtgtaaatattcagtgca

SEQ ID NO: 249177 - DNA, 20 bp, Artificial Sequence
  Description of Artificial Sequence: Synthetic oligonucleotide
  Target: LAMA2; (-) strand; PAM type: YTN; PAM sequence: TTA
atttgtgtgtaaatattcag

SEQ ID NO: 249178 - DNA, 20 bp, Artificial Sequence
  Description of Artificial Sequence: Synthetic oligonucleotide
  Target: LAMA2; (-) strand; PAM type: YTN; PAM sequence: CTA
gattaatttgtgtgtaaata

SEQ ID NO: 249179 - DNA, 20 bp, Artificial Sequence
  Description of Artificial Sequence: Synthetic oligonucleotide
  Target: LAMA2; (-) strand; PAM type: YTN; PAM sequence: CTA
tgggctagattaatttgtgt

SEQ ID NO: 249180 - DNA, 20 bp, Artificial Sequence
  Description of Artificial Sequence: Synthetic oligonucleotide
  Target: LAMA2; (-) strand; PAM type: YTN; PAM sequence: TTA
ctatgggctagattaatttg

SEQ ID NO: 249181 - DNA, 20 bp, Artificial Sequence
  Description of Artificial Sequence: Synthetic oligonucleotide
  Target: LAMA2; (-) strand; PAM type: YTN; PAM sequence: TTT
actatgggctagattaattt

SEQ ID NO: 249182 - DNA, 20 bp, Artificial Sequence
  Description of Artificial Sequence: Synthetic oligonucleotide
  Target: LAMA2; (-) strand; PAM type: YTN; PAM sequence: TTT
tactatgggctagattaatt

SEQ ID NO: 249183 - DNA, 20 bp, Artificial Sequence
  Description of Artificial Sequence: Synthetic oligonucleotide
  Target: LAMA2; (-) strand; PAM type: YTN; PAM sequence: CTT
ttactatgggctagattaat

SEQ ID NO: 249184 - DNA, 20 bp, Artificial Sequence
  Description of Artificial Sequence: Synthetic oligonucleotide
  Target: LAMA2; (-) strand; PAM type: YTN; PAM sequence: TTA
gcacttttactatgggctag

SEQ ID NO: 249185 - DNA, 20 bp, Artificial Sequence
  Description of Artificial Sequence: Synthetic oligonucleotide
  Target: LAMA2; (-) strand; PAM type: YTN; PAM sequence: TTC
cattagcacttttactatgg

SEQ ID NO: 249186 - DNA, 20 bp, Artificial Sequence
  Description of Artificial Sequence: Synthetic oligonucleotide
  Target: LAMA2; (-) strand; PAM type: YTN; PAM sequence: TTG
gatgaaacattccattagca

SEQ ID NO: 249187 - DNA, 20 bp, Artificial Sequence
  Description of Artificial Sequence: Synthetic oligonucleotide
  Target: LAMA2; (-) strand; PAM type: YTN; PAM sequence: TTT
ggatgaaacattccattagc

SEQ ID NO: 249188 - DNA, 20 bp, Artificial Sequence
  Description of Artificial Sequence: Synthetic oligonucleotide
  Target: LAMA2; (-) strand; PAM type: YTN; PAM sequence: TTA
tgtttggatgaaacattcca

SEQ ID NO: 249189 - DNA, 20 bp, Artificial Sequence
  Description of Artificial Sequence: Synthetic oligonucleotide
  Target: LAMA2; (-) strand; PAM type: YTN; PAM sequence: CTT
atgtttggatgaaacattcc

SEQ ID NO: 249190 - DNA, 20 bp, Artificial Sequence
  Description of Artificial Sequence: Synthetic oligonucleotide
  Target: LAMA2; (-) strand; PAM type: YTN; PAM sequence: CTA
acttatgtttggatgaaaca

SEQ ID NO: 249191 - DNA, 20 bp, Artificial Sequence
  Description of Artificial Sequence: Synthetic oligonucleotide
  Target: LAMA2; (-) strand; PAM type: YTN; PAM sequence: TTA
ctaacttatgtttggatgaa

SEQ ID NO: 249192 - DNA, 20 bp, Artificial Sequence
  Description of Artificial Sequence: Synthetic oligonucleotide
  Target: LAMA2; (-) strand; PAM type: YTN; PAM sequence: TTT
actaacttatgtttggatga

SEQ ID NO: 249193 - DNA, 20 bp, Artificial Sequence
  Description of Artificial Sequence: Synthetic oligonucleotide
  Target: LAMA2; (-) strand; PAM type: YTN; PAM sequence: TTC
catttactaacttatgtttg

SEQ ID NO: 249194 - DNA, 20 bp, Artificial Sequence
  Description of Artificial Sequence: Synthetic oligonucleotide
  Target: LAMA2; (-) strand; PAM type: YTN; PAM sequence: TTT
ccatttactaacttatgttt

SEQ ID NO: 249195 - DNA, 20 bp, Artificial Sequence
  Description of Artificial Sequence: Synthetic oligonucleotide
  Target: LAMA2; (-) strand; PAM type: YTN; PAM sequence: TTT
tccatttactaacttatgtt

SEQ ID NO: 249196 - DNA, 20 bp, Artificial Sequence
  Description of Artificial Sequence: Synthetic oligonucleotide
  Target: LAMA2; (-) strand; PAM type: YTN; PAM sequence: TTG
ttttccatttactaacttat

SEQ ID NO: 249197 - DNA, 20 bp, Artificial Sequence
  Description of Artificial Sequence: Synthetic oligonucleotide
  Target: LAMA2; (-) strand; PAM type: YTN; PAM sequence: TTT
gttttccatttactaactta

SEQ ID NO: 249198 - DNA, 20 bp, Artificial Sequence
  Description of Artificial Sequence: Synthetic oligonucleotide
  Target: LAMA2; (-) strand; PAM type: YTN; PAM sequence: CTG
tttgttttccatttactaac

SEQ ID NO: 249199 - DNA, 20 bp, Artificial Sequence
  Description of Artificial Sequence: Synthetic oligonucleotide
  Target: LAMA2; (-) strand; PAM type: YTN; PAM sequence: TTG
caacagctgtttgttttcca

SEQ ID NO: 249200 - DNA, 20 bp, Artificial Sequence
  Description of Artificial Sequence: Synthetic oligonucleotide
  Target: LAMA2; (-) strand; PAM type: YTN; PAM sequence: TTT
gcaacagctgtttgttttcc

SEQ ID NO: 249201 - DNA, 20 bp, Artificial Sequence
  Description of Artificial Sequence: Synthetic oligonucleotide
  Target: LAMA2; (-) strand; PAM type: YTN; PAM sequence: CTT
tgcaacagctgtttgttttc

SEQ ID NO: 249202 - DNA, 20 bp, Artificial Sequence
  Description of Artificial Sequence: Synthetic oligonucleotide
  Target: LAMA2; (-) strand; PAM type: YTN; PAM sequence: TTA
ggcccagacccaaaaacagg

SEQ ID NO: 249203 - DNA, 20 bp, Artificial Sequence
  Description of Artificial Sequence: Synthetic oligonucleotide
  Target: LAMA2; (-) strand; PAM type: YTN; PAM sequence: CTG
ttaggcccagacccaaaaac

SEQ ID NO: 249204 - DNA, 20 bp, Artificial Sequence
  Description of Artificial Sequence: Synthetic oligonucleotide
  Target: LAMA2; (-) strand; PAM type: YTN; PAM sequence: TTC
gtgctgttaggcccagaccc

SEQ ID NO: 249205 - DNA, 20 bp, Artificial Sequence
  Description of Artificial Sequence: Synthetic oligonucleotide
  Target: LAMA2; (-) strand; PAM type: YTN; PAM sequence: CTT
cgtgctgttaggcccagacc

SEQ ID NO: 249206 - DNA, 20 bp, Artificial Sequence
  Description of Artificial Sequence: Synthetic oligonucleotide
  Target: LAMA2; (-) strand; PAM type: YTN; PAM sequence: CTG
aagtgcttcgtgctgttagg

SEQ ID NO: 249207 - DNA, 20 bp, Artificial Sequence
  Description of Artificial Sequence: Synthetic oligonucleotide
  Target: LAMA2; (-) strand; PAM type: YTN; PAM sequence: CTC
tgaagtgcttcgtgctgtta

SEQ ID NO: 249208 - DNA, 20 bp, Artificial Sequence
  Description of Artificial Sequence: Synthetic oligonucleotide
  Target: LAMA2; (-) strand; PAM type: YTN; PAM sequence: TTC
tctgaagtgcttcgtgctgt

SEQ ID NO: 249209 - DNA, 20 bp, Artificial Sequence
  Description of Artificial Sequence: Synthetic oligonucleotide
  Target: LAMA2; (-) strand; PAM type: YTN; PAM sequence: CTC
aacagatgtgagtaaatggt

SEQ ID NO: 249210 - DNA, 20 bp, Artificial Sequence
  Description of Artificial Sequence: Synthetic oligonucleotide
  Target: LAMA2; (-) strand; PAM type: YTN; PAM sequence: TTG
aaatagtacaatctcaacag

SEQ ID NO: 249211 - DNA, 20 bp, Artificial Sequence
  Description of Artificial Sequence: Synthetic oligonucleotide
  Target: LAMA2; (-) strand; PAM type: YTN; PAM sequence: TTG
agttgaaatagtacaatctc

SEQ ID NO: 249212 - DNA, 20 bp, Artificial Sequence
  Description of Artificial Sequence: Synthetic oligonucleotide
  Target: LAMA2; (-) strand; PAM type: YTN; PAM sequence: CTT
gagttgaaatagtacaatct

SEQ ID NO: 249213 - DNA, 20 bp, Artificial Sequence
  Description of Artificial Sequence: Synthetic oligonucleotide
  Target: LAMA2; (-) strand; PAM type: YTN; PAM sequence: CTG
atcaaatcttgagttgaaat

SEQ ID NO: 249214 - DNA, 20 bp, Artificial Sequence
  Description of Artificial Sequence: Synthetic oligonucleotide
  Target: LAMA2; (-) strand; PAM type: YTN; PAM sequence: TTA
tgacatacactgatcaaatc

SEQ ID NO: 249215 - DNA, 20 bp, Artificial Sequence
  Description of Artificial Sequence: Synthetic oligonucleotide
  Target: LAMA2; (-) strand; PAM type: YTN; PAM sequence: TTT
atgacatacactgatcaaat

SEQ ID NO: 249216 - DNA, 20 bp, Artificial Sequence
  Description of Artificial Sequence: Synthetic oligonucleotide
  Target: LAMA2; (-) strand; PAM type: YTN; PAM sequence: CTT
tatgacatacactgatcaaa

SEQ ID NO: 249217 - DNA, 20 bp, Artificial Sequence
  Description of Artificial Sequence: Synthetic oligonucleotide
  Target: LAMA2; (-) strand; PAM type: YTN; PAM sequence: TTA
ctttatgacatacactgatc

SEQ ID NO: 249218 - DNA, 20 bp, Artificial Sequence
  Description of Artificial Sequence: Synthetic oligonucleotide
  Target: LAMA2; (-) strand; PAM type: YTN; PAM sequence: TTG
ttactttatgacatacactg

SEQ ID NO: 249219 - DNA, 20 bp, Artificial Sequence
  Description of Artificial Sequence: Synthetic oligonucleotide
  Target: LAMA2; (-) strand; PAM type: YTN; PAM sequence: CTT
gttactttatgacatacact

SEQ ID NO: 249220 - DNA, 20 bp, Artificial Sequence
  Description of Artificial Sequence: Synthetic oligonucleotide
  Target: LAMA2; (-) strand; PAM type: YTN; PAM sequence: CTA
cttgttactttatgacatac

SEQ ID NO: 249221 - DNA, 20 bp, Artificial Sequence
  Description of Artificial Sequence: Synthetic oligonucleotide
  Target: LAMA2; (-) strand; PAM type: YTN; PAM sequence: TTA
gcgtactacttgttacttta

SEQ ID NO: 249222 - DNA, 20 bp, Artificial Sequence
  Description of Artificial Sequence: Synthetic oligonucleotide
  Target: LAMA2; (-) strand; PAM type: YTN; PAM sequence: CTT
agcgtactacttgttacttt

SEQ ID NO: 249223 - DNA, 20 bp, Artificial Sequence
  Description of Artificial Sequence: Synthetic oligonucleotide
  Target: LAMA2; (-) strand; PAM type: YTN; PAM sequence: CTG
acttagcgtactacttgtta

SEQ ID NO: 249224 - DNA, 20 bp, Artificial Sequence
  Description of Artificial Sequence: Synthetic oligonucleotide
  Target: LAMA2; (-) strand; PAM type: YTN; PAM sequence: TTC
tgacttagcgtactacttgt

SEQ ID NO: 249225 - DNA, 20 bp, Artificial Sequence
  Description of Artificial Sequence: Synthetic oligonucleotide
  Target: LAMA2; (-) strand; PAM type: YTN; PAM sequence: TTT
ctgacttagcgtactacttg

SEQ ID NO: 249226 - DNA, 20 bp, Artificial Sequence
  Description of Artificial Sequence: Synthetic oligonucleotide
  Target: LAMA2; (-) strand; PAM type: YTN; PAM sequence: TTT
tctgacttagcgtactactt

SEQ ID NO: 249227 - DNA, 20 bp, Artificial Sequence
  Description of Artificial Sequence: Synthetic oligonucleotide
  Target: LAMA2; (-) strand; PAM type: YTN; PAM sequence: TTA
agttttctgacttagcgtac

SEQ ID NO: 249228 - DNA, 20 bp, Artificial Sequence
  Description of Artificial Sequence: Synthetic oligonucleotide
  Target: LAMA2; (-) strand; PAM type: YTN; PAM sequence: TTT
aagttttctgacttagcgta

SEQ ID NO: 249229 - DNA, 20 bp, Artificial Sequence
  Description of Artificial Sequence: Synthetic oligonucleotide
  Target: LAMA2; (-) strand; PAM type: YTN; PAM sequence: CTT
taagttttctgacttagcgt

SEQ ID NO: 249230 - DNA, 20 bp, Artificial Sequence
  Description of Artificial Sequence: Synthetic oligonucleotide
  Target: LAMA2; (-) strand; PAM type: YTN; PAM sequence: TTC
ctttaagttttctgacttag

SEQ ID NO: 249231 - DNA, 20 bp, Artificial Sequence
  Description of Artificial Sequence: Synthetic oligonucleotide
  Target: LAMA2; (-) strand; PAM type: YTN; PAM sequence: TTT
cctttaagttttctgactta

SEQ ID NO: 249232 - DNA, 20 bp, Artificial Sequence
  Description of Artificial Sequence: Synthetic oligonucleotide
  Target: LAMA2; (-) strand; PAM type: YTN; PAM sequence: TTA
atgtttcctttaagttttct

SEQ ID NO: 249233 - DNA, 20 bp, Artificial Sequence
  Description of Artificial Sequence: Synthetic oligonucleotide
  Target: LAMA2; (-) strand; PAM type: YTN; PAM sequence: TTT
aatgtttcctttaagttttc

SEQ ID NO: 249234 - DNA, 20 bp, Artificial Sequence
  Description of Artificial Sequence: Synthetic oligonucleotide
  Target: LAMA2; (-) strand; PAM type: YTN; PAM sequence: TTC
catataggaaatgagtattt

SEQ ID NO: 249235 - DNA, 20 bp, Artificial Sequence
  Description of Artificial Sequence: Synthetic oligonucleotide
  Target: LAMA2; (-) strand; PAM type: YTN; PAM sequence: TTA
gaaaggcaacattccatata

SEQ ID NO: 249236 - DNA, 20 bp, Artificial Sequence
  Description of Artificial Sequence: Synthetic oligonucleotide
  Target: LAMA2; (-) strand; PAM type: YTN; PAM sequence: CTT
agaaaggcaacattccatat

SEQ ID NO: 249237 - DNA, 20 bp, Artificial Sequence
  Description of Artificial Sequence: Synthetic oligonucleotide
  Target: LAMA2; (-) strand; PAM type: YTN; PAM sequence: TTG
caaaacatcacatagaagaa

SEQ ID NO: 249238 - DNA, 20 bp, Artificial Sequence
  Description of Artificial Sequence: Synthetic oligonucleotide
  Target: LAMA2; (-) strand; PAM type: YTN; PAM sequence: TTT
gcaaaacatcacatagaaga

SEQ ID NO: 249239 - DNA, 20 bp, Artificial Sequence
  Description of Artificial Sequence: Synthetic oligonucleotide
  Target: LAMA2; (-) strand; PAM type: YTN; PAM sequence: CTA
tgaatagatttgcaaaacat

SEQ ID NO: 249240 - DNA, 20 bp, Artificial Sequence
  Description of Artificial Sequence: Synthetic oligonucleotide
  Target: LAMA2; (-) strand; PAM type: YTN; PAM sequence: CTC
ctatgaatagatttgcaaaa

SEQ ID NO: 249241 - DNA, 20 bp, Artificial Sequence
  Description of Artificial Sequence: Synthetic oligonucleotide
  Target: LAMA2; (-) strand; PAM type: YTN; PAM sequence: TTG
aaaatataaatctcctatga

SEQ ID NO: 249242 - DNA, 20 bp, Artificial Sequence
  Description of Artificial Sequence: Synthetic oligonucleotide
  Target: LAMA2; (-) strand; PAM type: YTN; PAM sequence: CTT
gaaaatataaatctcctatg

SEQ ID NO: 249243 - DNA, 20 bp, Artificial Sequence
  Description of Artificial Sequence: Synthetic oligonucleotide
  Target: LAMA2; (-) strand; PAM type: YTN; PAM sequence: TTG
agcacacttgaaaatataaa

SEQ ID NO: 249244 - DNA, 20 bp, Artificial Sequence
  Description of Artificial Sequence: Synthetic oligonucleotide
  Target: LAMA2; (-) strand; PAM type: YTN; PAM sequence: TTT
gagcacacttgaaaatataa

SEQ ID NO: 249245 - DNA, 20 bp, Artificial Sequence
  Description of Artificial Sequence: Synthetic oligonucleotide
  Target: LAMA2; (-) strand; PAM type: YTN; PAM sequence: TTC
cccaacacagatccatttga

SEQ ID NO: 249246 - DNA, 20 bp, Artificial Sequence
  Description of Artificial Sequence: Synthetic oligonucleotide
  Target: LAMA2; (-) strand; PAM type: YTN; PAM sequence: TTT
ccccaacacagatccatttg

SEQ ID NO: 249247 - DNA, 20 bp, Artificial Sequence
  Description of Artificial Sequence: Synthetic oligonucleotide
  Target: LAMA2; (-) strand; PAM type: YTN; PAM sequence: CTT
tccccaacacagatccattt

SEQ ID NO: 249248 - DNA, 20 bp, Artificial Sequence
  Description of Artificial Sequence: Synthetic oligonucleotide
  Target: LAMA2; (-) strand; PAM type: YTN; PAM sequence: TTC
acgtatctttccccaacaca

SEQ ID NO: 249249 - DNA, 20 bp, Artificial Sequence
  Description of Artificial Sequence: Synthetic oligonucleotide
  Target: LAMA2; (-) strand; PAM type: YTN; PAM sequence: TTT
cacgtatctttccccaacac

SEQ ID NO: 249250 - DNA, 20 bp, Artificial Sequence
  Description of Artificial Sequence: Synthetic oligonucleotide
  Target: LAMA2; (-) strand; PAM type: YTN; PAM sequence: TTA
tttcacgtatctttccccaa

SEQ ID NO: 249251 - DNA, 20 bp, Artificial Sequence
  Description of Artificial Sequence: Synthetic oligonucleotide
  Target: LAMA2; (-) strand; PAM type: YTN; PAM sequence: CTT
atttcacgtatctttcccca

SEQ ID NO: 249252 - DNA, 20 bp, Artificial Sequence
  Description of Artificial Sequence: Synthetic oligonucleotide
  Target: LAMA2; (-) strand; PAM type: YTN; PAM sequence: TTC
ttatttcacgtatctttccc

SEQ ID NO: 249253 - DNA, 20 bp, Artificial Sequence
  Description of Artificial Sequence: Synthetic oligonucleotide
  Target: LAMA2; (-) strand; PAM type: YTN; PAM sequence: TTT
cttatttcacgtatctttcc

SEQ ID NO: 249254 - DNA, 20 bp, Artificial Sequence
  Description of Artificial Sequence: Synthetic oligonucleotide
  Target: LAMA2; (-) strand; PAM type: YTN; PAM sequence: TTT
tcttatttcacgtatctttc

SEQ ID NO: 249255 - DNA, 20 bp, Artificial Sequence
  Description of Artificial Sequence: Synthetic oligonucleotide
  Target: LAMA2; (-) strand; PAM type: YTN; PAM sequence: TTA
ttttcttatttcacgtatct

SEQ ID NO: 249256 - DNA, 20 bp, Artificial Sequence
  Description of Artificial Sequence: Synthetic oligonucleotide
  Target: LAMA2; (-) strand; PAM type: YTN; PAM sequence: TTT
attttcttatttcacgtatc

SEQ ID NO: 249257 - DNA, 20 bp, Artificial Sequence
  Description of Artificial Sequence: Synthetic oligonucleotide
  Target: LAMA2; (-) strand; PAM type: YTN; PAM sequence: TTT
tattttcttatttcacgtat

SEQ ID NO: 249258 - DNA, 20 bp, Artificial Sequence
  Description of Artificial Sequence: Synthetic oligonucleotide
  Target: LAMA2; (-) strand; PAM type: YTN; PAM sequence: CTT
ttattttcttatttcacgta

SEQ ID NO: 249259 - DNA, 20 bp, Artificial Sequence
  Description of Artificial Sequence: Synthetic oligonucleotide
  Target: LAMA2; (-) strand; PAM type: YTN; PAM sequence: TTA
gcttttattttcttatttca

SEQ ID NO: 249260 - DNA, 20 bp, Artificial Sequence
  Description of Artificial Sequence: Synthetic oligonucleotide
  Target: LAMA2; (-) strand; PAM type: YTN; PAM sequence: TTA
aaacaaatggattagctttt

SEQ ID NO: 249261 - DNA, 20 bp, Artificial Sequence
  Description of Artificial Sequence: Synthetic oligonucleotide
  Target: LAMA2; (-) strand; PAM type: YTN; PAM sequence: TTT
aaaacaaatggattagcttt

SEQ ID NO: 249262 - DNA, 20 bp, Artificial Sequence
  Description of Artificial Sequence: Synthetic oligonucleotide
  Target: LAMA2; (-) strand; PAM type: YTN; PAM sequence: TTT
taaaacaaatggattagctt

SEQ ID NO: 249263 - DNA, 20 bp, Artificial Sequence
  Description of Artificial Sequence: Synthetic oligonucleotide
  Target: LAMA2; (-) strand; PAM type: YTN; PAM sequence: CTC
atataacaagaagtccaaca

SEQ ID NO: 249264 - DNA, 20 bp, Artificial Sequence
  Description of Artificial Sequence: Synthetic oligonucleotide
  Target: LAMA2; (-) strand; PAM type: YTN; PAM sequence: TTC
tcatataacaagaagtccaa

SEQ ID NO: 249265 - DNA, 20 bp, Artificial Sequence
  Description of Artificial Sequence: Synthetic oligonucleotide
  Target: LAMA2; (-) strand; PAM type: YTN; PAM sequence: TTA
ggagttctcatataacaaga

SEQ ID NO: 249266 - DNA, 20 bp, Artificial Sequence
  Description of Artificial Sequence: Synthetic oligonucleotide
  Target: LAMA2; (-) strand; PAM type: YTN; PAM sequence: TTG
aaaaccagacaattaggagt

SEQ ID NO: 249267 - DNA, 20 bp, Artificial Sequence
  Description of Artificial Sequence: Synthetic oligonucleotide
  Target: LAMA2; (-) strand; PAM type: YTN; PAM sequence: CTG
caattgaaaaccagacaatt

SEQ ID NO: 249268 - DNA, 20 bp, Artificial Sequence
  Description of Artificial Sequence: Synthetic oligonucleotide
  Target: LAMA2; (-) strand; PAM type: YTN; PAM sequence: TTG
gctgcaattgaaaaccagac

SEQ ID NO: 249269 - DNA, 20 bp, Artificial Sequence
  Description of Artificial Sequence: Synthetic oligonucleotide
  Target: LAMA2; (-) strand; PAM type: YTN; PAM sequence: TTT
ggctgcaattgaaaaccaga

SEQ ID NO: 249270 - DNA, 20 bp, Artificial Sequence
  Description of Artificial Sequence: Synthetic oligonucleotide
  Target: LAMA2; (-) strand; PAM type: YTN; PAM sequence: TTT
tggctgcaattgaaaaccag

SEQ ID NO: 249271 - DNA, 20 bp, Artificial Sequence
  Description of Artificial Sequence: Synthetic oligonucleotide
  Target: LAMA2; (-) strand; PAM type: YTN; PAM sequence: CTT
ttggctgcaattgaaaacca

SEQ ID NO: 249272 - DNA, 20 bp, Artificial Sequence
  Description of Artificial Sequence: Synthetic oligonucleotide
  Target: LAMA2; (-) strand; PAM type: YTN; PAM sequence: TTG
atcaggtaagaatgcttttg

SEQ ID NO: 249273 - DNA, 20 bp, Artificial Sequence
  Description of Artificial Sequence: Synthetic oligonucleotide
  Target: LAMA2; (-) strand; PAM type: YTN; PAM sequence: TTT
gatcaggtaagaatgctttt

SEQ ID NO: 249274 - DNA, 20 bp, Artificial Sequence
  Description of Artificial Sequence: Synthetic oligonucleotide
  Target: LAMA2; (-) strand; PAM type: YTN; PAM sequence: TTG
aagagtttgatcaggtaaga

SEQ ID NO: 249275 - DNA, 20 bp, Artificial Sequence
  Description of Artificial Sequence: Synthetic oligonucleotide
  Target: LAMA2; (-) strand; PAM type: YTN; PAM sequence: TTT
gaagagtttgatcaggtaag

SEQ ID NO: 249276 - DNA, 20 bp, Artificial Sequence
  Description of Artificial Sequence: Synthetic oligonucleotide
  Target: LAMA2; (-) strand; PAM type: YTN; PAM sequence: TTC
aaagtaaatagaatttgaag

SEQ ID NO: 249277 - DNA, 20 bp, Artificial Sequence
  Description of Artificial Sequence: Synthetic oligonucleotide
  Target: LAMA2; (-) strand; PAM type: YTN; PAM sequence: CTA
taattcaaagtaaatagaat

SEQ ID NO: 249278 - DNA, 20 bp, Artificial Sequence
  Description of Artificial Sequence: Synthetic oligonucleotide
  Target: LAMA2; (-) strand; PAM type: YTN; PAM sequence: CTC
agctataattcaaagtaaat

SEQ ID NO: 249279 - DNA, 20 bp, Artificial Sequence
  Description of Artificial Sequence: Synthetic oligonucleotide
  Target: LAMA2; (-) strand; PAM type: YTN; PAM sequence: TTC
catgtactcagctataattc

SEQ ID NO: 249280 - DNA, 20 bp, Artificial Sequence
  Description of Artificial Sequence: Synthetic oligonucleotide
  Target: LAMA2; (-) strand; PAM type: YTN; PAM sequence: TTT
ccatgtactcagctataatt

SEQ ID NO: 249281 - DNA, 20 bp, Artificial Sequence
  Description of Artificial Sequence: Synthetic oligonucleotide
  Target: LAMA2; (-) strand; PAM type: YTN; PAM sequence: CTT
tccatgtactcagctataat

SEQ ID NO: 249282 - DNA, 20 bp, Artificial Sequence
  Description of Artificial Sequence: Synthetic oligonucleotide
  Target: LAMA2; (-) strand; PAM type: YTN; PAM sequence: TTA
tactttccatgtactcagct

SEQ ID NO: 249283 - DNA, 20 bp, Artificial Sequence
  Description of Artificial Sequence: Synthetic oligonucleotide
  Target: LAMA2; (-) strand; PAM type: YTN; PAM sequence: CTG
tgtaacaaagtaaggcccaa

SEQ ID NO: 249284 - DNA, 20 bp, Artificial Sequence
  Description of Artificial Sequence: Synthetic oligonucleotide
  Target: LAMA2; (-) strand; PAM type: YTN; PAM sequence: CTG
ctgtgtaacaaagtaaggcc

SEQ ID NO: 249285 - DNA, 20 bp, Artificial Sequence
  Description of Artificial Sequence: Synthetic oligonucleotide
  Target: LAMA2; (-) strand; PAM type: YTN; PAM sequence: TTG
tctgctgtgtaacaaagtaa

SEQ ID NO: 249286 - DNA, 20 bp, Artificial Sequence
  Description of Artificial Sequence: Synthetic oligonucleotide
  Target: LAMA2; (-) strand; PAM type: YTN; PAM sequence: TTT
gtctgctgtgtaacaaagta

SEQ ID NO: 249287 - DNA, 20 bp, Artificial Sequence
  Description of Artificial Sequence: Synthetic oligonucleotide
  Target: LAMA2; (-) strand; PAM type: YTN; PAM sequence: TTT
tgtctgctgtgtaacaaagt

SEQ ID NO: 249288 - DNA, 20 bp, Artificial Sequence
  Description of Artificial Sequence: Synthetic oligonucleotide
  Target: LAMA2; (-) strand; PAM type: YTN; PAM sequence: TTG
agcatatgttttgtctgctg

SEQ ID NO: 249289 - DNA, 20 bp, Artificial Sequence
  Description of Artificial Sequence: Synthetic oligonucleotide
  Target: LAMA2; (-) strand; PAM type: YTN; PAM sequence: CTT
gagcatatgttttgtctgct

SEQ ID NO: 249290 - DNA, 20 bp, Artificial Sequence
  Description of Artificial Sequence: Synthetic oligonucleotide
  Target: LAMA2; (-) strand; PAM type: YTN; PAM sequence: CTA
tcttgagcatatgttttgtc

SEQ ID NO: 249291 - DNA, 20 bp, Artificial Sequence
  Description of Artificial Sequence: Synthetic oligonucleotide
  Target: LAMA2; (-) strand; PAM type: YTN; PAM sequence: CTG
acctatcttgagcatatgtt

SEQ ID NO: 249292 - DNA, 20 bp, Artificial Sequence
  Description of Artificial Sequence: Synthetic oligonucleotide
  Target: LAMA2; (-) strand; PAM type: YTN; PAM sequence: CTG
gaatagcactgacctatctt

SEQ ID NO: 249293 - DNA, 20 bp, Artificial Sequence
  Description of Artificial Sequence: Synthetic oligonucleotide
  Target: LAMA2; (-) strand; PAM type: YTN; PAM sequence: TTC
actggaatagcactgaccta

SEQ ID NO: 249294 - DNA, 20 bp, Artificial Sequence
  Description of Artificial Sequence: Synthetic oligonucleotide
  Target: LAMA2; (-) strand; PAM type: YTN; PAM sequence: TTA
ttcactggaatagcactgac

SEQ ID NO: 249295 - DNA, 20 bp, Artificial Sequence
  Description of Artificial Sequence: Synthetic oligonucleotide
  Target: LAMA2; (-) strand; PAM type: YTN; PAM sequence: TTT
attcactggaatagcactga

SEQ ID NO: 249296 - DNA, 20 bp, Artificial Sequence
  Description of Artificial Sequence: Synthetic oligonucleotide
  Target: LAMA2; (-) strand; PAM type: YTN; PAM sequence: TTA
aaatgtttattcactggaat

SEQ ID NO: 249297 - DNA, 20 bp, Artificial Sequence
  Description of Artificial Sequence: Synthetic oligonucleotide
  Target: LAMA2; (-) strand; PAM type: YTN; PAM sequence: TTG
ttaaaatgtttattcactgg

SEQ ID NO: 249298 - DNA, 20 bp, Artificial Sequence
  Description of Artificial Sequence: Synthetic oligonucleotide
  Target: LAMA2; (-) strand; PAM type: YTN; PAM sequence: TTT
gttaaaatgtttattcactg

SEQ ID NO: 249299 - DNA, 20 bp, Artificial Sequence
  Description of Artificial Sequence: Synthetic oligonucleotide
  Target: LAMA2; (-) strand; PAM type: YTN; PAM sequence: TTT
tgttaaaatgtttattcact

SEQ ID NO: 249300 - DNA, 20 bp, Artificial Sequence
  Description of Artificial Sequence: Synthetic oligonucleotide
  Target: LAMA2; (-) strand; PAM type: YTN; PAM sequence: TTT
ttgttaaaatgtttattcac

SEQ ID NO: 249301 - DNA, 20 bp, Artificial Sequence
  Description of Artificial Sequence: Synthetic oligonucleotide
  Target: LAMA2; (-) strand; PAM type: YTN; PAM sequence: CTC
atacaaatttttgttaaaat

SEQ ID NO: 249302 - DNA, 20 bp, Artificial Sequence
  Description of Artificial Sequence: Synthetic oligonucleotide
  Target: LAMA2; (-) strand; PAM type: YTN; PAM sequence: TTC
tcatacaaatttttgttaaa

SEQ ID NO: 249303 - DNA, 20 bp, Artificial Sequence
  Description of Artificial Sequence: Synthetic oligonucleotide
  Target: LAMA2; (-) strand; PAM type: YTN; PAM sequence: TTT
ctcatacaaatttttgttaa

SEQ ID NO: 249304 - DNA, 20 bp, Artificial Sequence
  Description of Artificial Sequence: Synthetic oligonucleotide
  Target: LAMA2; (-) strand; PAM type: YTN; PAM sequence: CTG
tgaaaggcatatagagagga

SEQ ID NO: 249305 - DNA, 20 bp, Artificial Sequence
  Description of Artificial Sequence: Synthetic oligonucleotide
  Target: LAMA2; (-) strand; PAM type: YTN; PAM sequence: TTG
gcaaggggaaaaagagtaac

SEQ ID NO: 249306 - DNA, 20 bp, Artificial Sequence
  Description of Artificial Sequence: Synthetic oligonucleotide
  Target: LAMA2; (-) strand; PAM type: YTN; PAM sequence: TTG
attggcaaggggaaaaagag

SEQ ID NO: 249307 - DNA, 20 bp, Artificial Sequence
  Description of Artificial Sequence: Synthetic oligonucleotide
  Target: LAMA2; (-) strand; PAM type: YTN; PAM sequence: TTT
gattggcaaggggaaaaaga

SEQ ID NO: 249308 - DNA, 20 bp, Artificial Sequence
  Description of Artificial Sequence: Synthetic oligonucleotide
  Target: LAMA2; (-) strand; PAM type: YTN; PAM sequence: TTT
tgattggcaaggggaaaaag

SEQ ID NO: 249309 - DNA, 20 bp, Artificial Sequence
  Description of Artificial Sequence: Synthetic oligonucleotide
  Target: LAMA2; (-) strand; PAM type: YTN; PAM sequence: TTA
tagtgttttgattggcaagg

SEQ ID NO: 249310 - DNA, 20 bp, Artificial Sequence
  Description of Artificial Sequence: Synthetic oligonucleotide
  Target: LAMA2; (-) strand; PAM type: YTN; PAM sequence: TTC
attatagtgttttgattggc

SEQ ID NO: 249311 - DNA, 20 bp, Artificial Sequence
  Description of Artificial Sequence: Synthetic oligonucleotide
  Target: LAMA2; (-) strand; PAM type: YTN; PAM sequence: TTA
aggccaagagatattcatta

SEQ ID NO: 249312 - DNA, 20 bp, Artificial Sequence
  Description of Artificial Sequence: Synthetic oligonucleotide
  Target: LAMA2; (-) strand; PAM type: YTN; PAM sequence: TTA
tcgttaaggccaagagatat

SEQ ID NO: 249313 - DNA, 20 bp, Artificial Sequence
  Description of Artificial Sequence: Synthetic oligonucleotide
  Target: LAMA2; (-) strand; PAM type: YTN; PAM sequence: CTT
atcgttaaggccaagagata

SEQ ID NO: 249314 - DNA, 20 bp, Artificial Sequence
  Description of Artificial Sequence: Synthetic oligonucleotide
  Target: LAMA2; (-) strand; PAM type: YTN; PAM sequence: TTC
ttatcgttaaggccaagaga

SEQ ID NO: 249315 - DNA, 20 bp, Artificial Sequence
  Description of Artificial Sequence: Synthetic oligonucleotide
  Target: LAMA2; (-) strand; PAM type: YTN; PAM sequence: TTT
cttatcgttaaggccaagag

SEQ ID NO: 249316 - DNA, 20 bp, Artificial Sequence
  Description of Artificial Sequence: Synthetic oligonucleotide
  Target: LAMA2; (-) strand; PAM type: YTN; PAM sequence: TTA
tatacagtgtttcttatcgt

SEQ ID NO: 249317 - DNA, 20 bp, Artificial Sequence
  Description of Artificial Sequence: Synthetic oligonucleotide
  Target: LAMA2; (-) strand; PAM type: YTN; PAM sequence: TTT
atatacagtgtttcttatcg

SEQ ID NO: 249318 - DNA, 20 bp, Artificial Sequence
  Description of Artificial Sequence: Synthetic oligonucleotide
  Target: LAMA2; (-) strand; PAM type: YTN; PAM sequence: CTA
gacaatatttatatacagtg

SEQ ID NO: 249319 - DNA, 20 bp, Artificial Sequence
  Description of Artificial Sequence: Synthetic oligonucleotide
  Target: LAMA2; (-) strand; PAM type: YTN; PAM sequence: CTC
ataaaatacagcctagacaa

SEQ ID NO: 249320 - DNA, 20 bp, Artificial Sequence
  Description of Artificial Sequence: Synthetic oligonucleotide
  Target: LAMA2; (-) strand; PAM type: YTN; PAM sequence: TTC
tcataaaatacagcctagac

SEQ ID NO: 249321 - DNA, 20 bp, Artificial Sequence
  Description of Artificial Sequence: Synthetic oligonucleotide
  Target: LAMA2; (-) strand; PAM type: YTN; PAM sequence: CTC
cacattctcataaaatacag

SEQ ID NO: 249322 - DNA, 20 bp, Artificial Sequence
  Description of Artificial Sequence: Synthetic oligonucleotide
  Target: LAMA2; (-) strand; PAM type: YTN; PAM sequence: TTC
atataactccacattctcat

SEQ ID NO: 249323 - DNA, 20 bp, Artificial Sequence
  Description of Artificial Sequence: Synthetic oligonucleotide
  Target: LAMA2; (-) strand; PAM type: YTN; PAM sequence: TTT
catataactccacattctca

SEQ ID NO: 249324 - DNA, 20 bp, Artificial Sequence
  Description of Artificial Sequence: Synthetic oligonucleotide
  Target: LAMA2; (-) strand; PAM type: YTN; PAM sequence: CTA
catttcatataactccacat

SEQ ID NO: 249325 - DNA, 20 bp, Artificial Sequence
  Description of Artificial Sequence: Synthetic oligonucleotide
  Target: LAMA2; (-) strand; PAM type: YTN; PAM sequence: TTC
ctacatttcatataactcca

SEQ ID NO: 249326 - DNA, 20 bp, Artificial Sequence
  Description of Artificial Sequence: Synthetic oligonucleotide
  Target: LAMA2; (-) strand; PAM type: YTN; PAM sequence: CTT
cctacatttcatataactcc

SEQ ID NO: 249327 - DNA, 20 bp, Artificial Sequence
  Description of Artificial Sequence: Synthetic oligonucleotide
  Target: LAMA2; (-) strand; PAM type: YTN; PAM sequence: TTC
ttcctacatttcatataact

SEQ ID NO: 249328 - DNA, 20 bp, Artificial Sequence
  Description of Artificial Sequence: Synthetic oligonucleotide
  Target: LAMA2; (-) strand; PAM type: YTN; PAM sequence: TTT
cttcctacatttcatataac

SEQ ID NO: 249329 - DNA, 20 bp, Artificial Sequence
  Description of Artificial Sequence: Synthetic oligonucleotide
  Target: LAMA2; (-) strand; PAM type: YTN; PAM sequence: TTT
tcttcctacatttcatataa

SEQ ID NO: 249330 - DNA, 20 bp, Artificial Sequence
  Description of Artificial Sequence: Synthetic oligonucleotide
  Target: LAMA2; (-) strand; PAM type: YTN; PAM sequence: TTT
ttcttcctacatttcatata

SEQ ID NO: 249331 - DNA, 20 bp, Artificial Sequence
  Description of Artificial Sequence: Synthetic oligonucleotide
  Target: LAMA2; (-) strand; PAM type: YTN; PAM sequence: TTT
tttcttcctacatttcatat

SEQ ID NO: 249332 - DNA, 20 bp, Artificial Sequence
  Description of Artificial Sequence: Synthetic oligonucleotide
  Target: LAMA2; (-) strand; PAM type: YTN; PAM sequence: CTC
atattttttcttcctacatt

SEQ ID NO: 249333 - DNA, 20 bp, Artificial Sequence
  Description of Artificial Sequence: Synthetic oligonucleotide
  Target: LAMA2; (-) strand; PAM type: YTN; PAM sequence: CTC
actcatattttttcttccta

SEQ ID NO: 249334 - DNA, 20 bp, Artificial Sequence
  Description of Artificial Sequence: Synthetic oligonucleotide
  Target: LAMA2; (-) strand; PAM type: YTN; PAM sequence: TTA
ctcactcatattttttcttc

SEQ ID NO: 249335 - DNA, 20 bp, Artificial Sequence
  Description of Artificial Sequence: Synthetic oligonucleotide
  Target: LAMA2; (-) strand; PAM type: YTN; PAM sequence: CTC
acaggattactcactcatat

SEQ ID NO: 249336 - DNA, 20 bp, Artificial Sequence
  Description of Artificial Sequence: Synthetic oligonucleotide
  Target: LAMA2; (-) strand; PAM type: YTN; PAM sequence: CTG
ctcacaggattactcactca

SEQ ID NO: 249337 - DNA, 20 bp, Artificial Sequence
  Description of Artificial Sequence: Synthetic oligonucleotide
  Target: LAMA2; (-) strand; PAM type: YTN; PAM sequence: CTC
agcccgtccactgctcacag

SEQ ID NO: 249338 - DNA, 20 bp, Artificial Sequence
  Description of Artificial Sequence: Synthetic oligonucleotide
  Target: LAMA2; (-) strand; PAM type: YTN; PAM sequence: CTA
gaagctcagcccgtccactg

SEQ ID NO: 249339 - DNA, 20 bp, Artificial Sequence
  Description of Artificial Sequence: Synthetic oligonucleotide
  Target: LAMA2; (-) strand; PAM type: YTN; PAM sequence: TTA
tcagtgtcctagaagctcag

SEQ ID NO: 249340 - DNA, 20 bp, Artificial Sequence
  Description of Artificial Sequence: Synthetic oligonucleotide
  Target: LAMA2; (-) strand; PAM type: YTN; PAM sequence: CTT
atcagtgtcctagaagctca

SEQ ID NO: 249341 - DNA, 20 bp, Artificial Sequence
  Description of Artificial Sequence: Synthetic oligonucleotide
  Target: LAMA2; (-) strand; PAM type: YTN; PAM sequence: TTG
cttatcagtgtcctagaagc

SEQ ID NO: 249342 - DNA, 20 bp, Artificial Sequence
  Description of Artificial Sequence: Synthetic oligonucleotide
  Target: LAMA2; (-) strand; PAM type: YTN; PAM sequence: CTG
attgcttatcagtgtcctag

SEQ ID NO: 249343 - DNA, 20 bp, Artificial Sequence
  Description of Artificial Sequence: Synthetic oligonucleotide
  Target: LAMA2; (-) strand; PAM type: YTN; PAM sequence: CTA
acactgattgcttatcagtg

SEQ ID NO: 249344 - DNA, 20 bp, Artificial Sequence
  Description of Artificial Sequence: Synthetic oligonucleotide
  Target: LAMA2; (-) strand; PAM type: YTN; PAM sequence: CTC
aagtgtaactaacactgatt

SEQ ID NO: 249345 - DNA, 20 bp, Artificial Sequence
  Description of Artificial Sequence: Synthetic oligonucleotide
  Target: LAMA2; (-) strand; PAM type: YTN; PAM sequence: CTG
cctcaagtgtaactaacact

SEQ ID NO: 249346 - DNA, 20 bp, Artificial Sequence
  Description of Artificial Sequence: Synthetic oligonucleotide
  Target: LAMA2; (-) strand; PAM type: YTN; PAM sequence: CTG
gaacagaccaccagagatac

SEQ ID NO: 249347 - DNA, 20 bp, Artificial Sequence
  Description of Artificial Sequence: Synthetic oligonucleotide
  Target: LAMA2; (-) strand; PAM type: YTN; PAM sequence: TTC
tggaacagaccaccagagat

SEQ ID NO: 249348 - DNA, 20 bp, Artificial Sequence
  Description of Artificial Sequence: Synthetic oligonucleotide
  Target: LAMA2; (-) strand; PAM type: YTN; PAM sequence: TTG
cagaagtataaaaagtagtg

SEQ ID NO: 249349 - DNA, 20 bp, Artificial Sequence
  Description of Artificial Sequence: Synthetic oligonucleotide
  Target: LAMA2; (-) strand; PAM type: YTN; PAM sequence: CTA
aattgcagaagtataaaaag

SEQ ID NO: 249350 - DNA, 20 bp, Artificial Sequence
  Description of Artificial Sequence: Synthetic oligonucleotide
  Target: LAMA2; (-) strand; PAM type: YTN; PAM sequence: TTG
ggtgacctaaattgcagaag

SEQ ID NO: 249351 - DNA, 20 bp, Artificial Sequence
  Description of Artificial Sequence: Synthetic oligonucleotide
  Target: LAMA2; (-) strand; PAM type: YTN; PAM sequence: CTG
tattgggtgacctaaattgc

SEQ ID NO: 249352 - DNA, 20 bp, Artificial Sequence
  Description of Artificial Sequence: Synthetic oligonucleotide
  Target: LAMA2; (-) strand; PAM type: YTN; PAM sequence: CTG
ataagataacctgtattggg

SEQ ID NO: 249353 - DNA, 20 bp, Artificial Sequence
  Description of Artificial Sequence: Synthetic oligonucleotide
  Target: LAMA2; (-) strand; PAM type: YTN; PAM sequence: TTA
acctgataagataacctgta

SEQ ID NO: 249354 - DNA, 20 bp, Artificial Sequence
  Description of Artificial Sequence: Synthetic oligonucleotide
  Target: LAMA2; (-) strand; PAM type: YTN; PAM sequence: TTT
aacctgataagataacctgt

SEQ ID NO: 249355 - DNA, 20 bp, Artificial Sequence
  Description of Artificial Sequence: Synthetic oligonucleotide
  Target: LAMA2; (-) strand; PAM type: YTN; PAM sequence: CTA
caatcagtttaacctgataa

SEQ ID NO: 249356 - DNA, 20 bp, Artificial Sequence
  Description of Artificial Sequence: Synthetic oligonucleotide
  Target: LAMA2; (-) strand; PAM type: YTN; PAM sequence: TTC
aatgtgaccactacaatcag

SEQ ID NO: 249357 - DNA, 20 bp, Artificial Sequence
  Description of Artificial Sequence: Synthetic oligonucleotide
  Target: LAMA2; (-) strand; PAM type: YTN; PAM sequence: TTT
caatgtgaccactacaatca

SEQ ID NO: 249358 - DNA, 20 bp, Artificial Sequence
  Description of Artificial Sequence: Synthetic oligonucleotide
  Target: LAMA2; (-) strand; PAM type: YTN; PAM sequence: TTT
tcaatgtgaccactacaatc

SEQ ID NO: 249359 - DNA, 20 bp, Artificial Sequence
  Description of Artificial Sequence: Synthetic oligonucleotide
  Target: LAMA2; (-) strand; PAM type: YTN; PAM sequence: TTT
ttcaatgtgaccactacaat

SEQ ID NO: 249360 - DNA, 20 bp, Artificial Sequence
  Description of Artificial Sequence: Synthetic oligonucleotide
  Target: LAMA2; (-) strand; PAM type: YTN; PAM sequence: CTT
tttcaatgtgaccactacaa

SEQ ID NO: 249361 - DNA, 20 bp, Artificial Sequence
  Description of Artificial Sequence: Synthetic oligonucleotide
  Target: LAMA2; (-) strand; PAM type: YTN; PAM sequence: TTC
tttttcaatgtgaccactac

SEQ ID NO: 249362 - DNA, 20 bp, Artificial Sequence
  Description of Artificial Sequence: Synthetic oligonucleotide
  Target: LAMA2; (-) strand; PAM type: YTN; PAM sequence: TTT
ctttttcaatgtgaccacta

SEQ ID NO: 249363 - DNA, 20 bp, Artificial Sequence
  Description of Artificial Sequence: Synthetic oligonucleotide
  Target: LAMA2; (-) strand; PAM type: YTN; PAM sequence: TTT
tctttttcaatgtgaccact

SEQ ID NO: 249364 - DNA, 20 bp, Artificial Sequence
  Description of Artificial Sequence: Synthetic oligonucleotide
  Target: LAMA2; (-) strand; PAM type: YTN; PAM sequence: TTT
ttctttttcaatgtgaccac

SEQ ID NO: 249365 - DNA, 20 bp, Artificial Sequence
  Description of Artificial Sequence: Synthetic oligonucleotide
  Target: LAMA2; (-) strand; PAM type: YTN; PAM sequence: TTT
tttctttttcaatgtgacca

SEQ ID NO: 249366 - DNA, 20 bp, Artificial Sequence
  Description of Artificial Sequence: Synthetic oligonucleotide
  Target: LAMA2; (-) strand; PAM type: YTN; PAM sequence: TTT
ttttctttttcaatgtgacc

SEQ ID NO: 249367 - DNA, 20 bp, Artificial Sequence
  Description of Artificial Sequence: Synthetic oligonucleotide
  Target: LAMA2; (-) strand; PAM type: YTN; PAM sequence: TTT
tttttctttttcaatgtgac

SEQ ID NO: 249368 - DNA, 20 bp, Artificial Sequence
  Description of Artificial Sequence: Synthetic oligonucleotide
  Target: LAMA2; (-) strand; PAM type: YTN; PAM sequence: TTT
ttttttctttttcaatgtga

SEQ ID NO: 249369 - DNA, 20 bp, Artificial Sequence
  Description of Artificial Sequence: Synthetic oligonucleotide
  Target: LAMA2; (-) strand; PAM type: YTN; PAM sequence: TTT
tttttttctttttcaatgtg

SEQ ID NO: 249370 - DNA, 20 bp, Artificial Sequence
  Description of Artificial Sequence: Synthetic oligonucleotide
  Target: LAMA2; (-) strand; PAM type: YTN; PAM sequence: TTG
ggattttttttttctttttc

SEQ ID NO: 249371 - DNA, 20 bp, Artificial Sequence
  Description of Artificial Sequence: Synthetic oligonucleotide
  Target: LAMA2; (-) strand; PAM type: YTN; PAM sequence: TTT
gggattttttttttcttttt

SEQ ID NO: 249372 - DNA, 20 bp, Artificial Sequence
  Description of Artificial Sequence: Synthetic oligonucleotide
  Target: LAMA2; (-) strand; PAM type: YTN; PAM sequence: CTG
aatttgggattttttttttc

SEQ ID NO: 249373 - DNA, 20 bp, Artificial Sequence
  Description of Artificial Sequence: Synthetic oligonucleotide
  Target: LAMA2; (-) strand; PAM type: YTN; PAM sequence: TTG
ggaaaagtcctgaatttggg

SEQ ID NO: 249374 - DNA, 20 bp, Artificial Sequence
  Description of Artificial Sequence: Synthetic oligonucleotide
  Target: LAMA2; (-) strand; PAM type: YTN; PAM sequence: CTG
gttgggaaaagtcctgaatt

SEQ ID NO: 249375 - DNA, 20 bp, Artificial Sequence
  Description of Artificial Sequence: Synthetic oligonucleotide
  Target: LAMA2; (-) strand; PAM type: YTN; PAM sequence: TTA
gaactggttgggaaaagtcc

SEQ ID NO: 249376 - DNA, 20 bp, Artificial Sequence
  Description of Artificial Sequence: Synthetic oligonucleotide
  Target: LAMA2; (-) strand; PAM type: YTN; PAM sequence: TTA
attagaactggttgggaaaa

SEQ ID NO: 249377 - DNA, 20 bp, Artificial Sequence
  Description of Artificial Sequence: Synthetic oligonucleotide
  Target: LAMA2; (-) strand; PAM type: YTN; PAM sequence: TTC
acacgtgcattaattagaac

SEQ ID NO: 249378 - DNA, 20 bp, Artificial Sequence
  Description of Artificial Sequence: Synthetic oligonucleotide
  Target: LAMA2; (-) strand; PAM type: YTN; PAM sequence: TTT
cacacgtgcattaattagaa

SEQ ID NO: 249379 - DNA, 20 bp, Artificial Sequence
  Description of Artificial Sequence: Synthetic oligonucleotide
  Target: LAMA2; (-) strand; PAM type: YTN; PAM sequence: CTT
tcacacgtgcattaattaga

SEQ ID NO: 249380 - DNA, 20 bp, Artificial Sequence
  Description of Artificial Sequence: Synthetic oligonucleotide
  Target: LAMA2; (-) strand; PAM type: YTN; PAM sequence: CTA
tgtcctttcacacgtgcatt

SEQ ID NO: 249381 - DNA, 20 bp, Artificial Sequence
  Description of Artificial Sequence: Synthetic oligonucleotide
  Target: LAMA2; (-) strand; PAM type: YTN; PAM sequence: TTC
acaataactatgtcctttca

SEQ ID NO: 249382 - DNA, 20 bp, Artificial Sequence
  Description of Artificial Sequence: Synthetic oligonucleotide
  Target: LAMA2; (-) strand; PAM type: YTN; PAM sequence: TTT
cacaataactatgtcctttc

SEQ ID NO: 249383 - DNA, 20 bp, Artificial Sequence
  Description of Artificial Sequence: Synthetic oligonucleotide
  Target: LAMA2; (-) strand; PAM type: YTN; PAM sequence: TTT
tcacaataactatgtccttt

SEQ ID NO: 249384 - DNA, 20 bp, Artificial Sequence
  Description of Artificial Sequence: Synthetic oligonucleotide
  Target: LAMA2; (-) strand; PAM type: YTN; PAM sequence: CTT
ttcacaataactatgtcctt

SEQ ID NO: 249385 - DNA, 20 bp, Artificial Sequence
  Description of Artificial Sequence: Synthetic oligonucleotide
  Target: LAMA2; (-) strand; PAM type: YTN; PAM sequence: TTC
ttttcacaataactatgtcc

SEQ ID NO: 249386 - DNA, 20 bp, Artificial Sequence
  Description of Artificial Sequence: Synthetic oligonucleotide
  Target: LAMA2; (-) strand; PAM type: YTN; PAM sequence: TTT
cttttcacaataactatgtc

SEQ ID NO: 249387 - DNA, 20 bp, Artificial Sequence
  Description of Artificial Sequence: Synthetic oligonucleotide
  Target: LAMA2; (-) strand; PAM type: YTN; PAM sequence: TTG
atagcatttcttttcacaat

SEQ ID NO: 249388 - DNA, 20 bp, Artificial Sequence
  Description of Artificial Sequence: Synthetic oligonucleotide
  Target: LAMA2; (-) strand; PAM type: YTN; PAM sequence: TTT
gatagcatttcttttcacaa

SEQ ID NO: 249389 - DNA, 20 bp, Artificial Sequence
  Description of Artificial Sequence: Synthetic oligonucleotide
  Target: LAMA2; (-) strand; PAM type: YTN; PAM sequence: TTT
tgatagcatttcttttcaca

SEQ ID NO: 249390 - DNA, 20 bp, Artificial Sequence
  Description of Artificial Sequence: Synthetic oligonucleotide
  Target: LAMA2; (-) strand; PAM type: YTN; PAM sequence: CTG
ttttgatagcatttcttttc

SEQ ID NO: 249391 - DNA, 20 bp, Artificial Sequence
  Description of Artificial Sequence: Synthetic oligonucleotide
  Target: LAMA2; (-) strand; PAM type: YTN; PAM sequence: TTA
gactgttttgatagcatttc

SEQ ID NO: 249392 - DNA, 20 bp, Artificial Sequence
  Description of Artificial Sequence: Synthetic oligonucleotide
  Target: LAMA2; (-) strand; PAM type: YTN; PAM sequence: TTG
tagccattagactgttttga

SEQ ID NO: 249393 - DNA, 20 bp, Artificial Sequence
  Description of Artificial Sequence: Synthetic oligonucleotide
  Target: LAMA2; (-) strand; PAM type: YTN; PAM sequence: CTT
gtagccattagactgttttg

SEQ ID NO: 249394 - DNA, 20 bp, Artificial Sequence
  Description of Artificial Sequence: Synthetic oligonucleotide
  Target: LAMA2; (-) strand; PAM type: YTN; PAM sequence: TTC
ttgtagccattagactgttt

SEQ ID NO: 249395 - DNA, 20 bp, Artificial Sequence
  Description of Artificial Sequence: Synthetic oligonucleotide
  Target: LAMA2; (-) strand; PAM type: YTN; PAM sequence: CTT
cttgtagccattagactgtt

SEQ ID NO: 249396 - DNA, 20 bp, Artificial Sequence
  Description of Artificial Sequence: Synthetic oligonucleotide
  Target: LAMA2; (-) strand; PAM type: YTN; PAM sequence: TTC
ttcttgtagccattagactg

SEQ ID NO: 249397 - DNA, 20 bp, Artificial Sequence
  Description of Artificial Sequence: Synthetic oligonucleotide
  Target: LAMA2; (-) strand; PAM type: YTN; PAM sequence: TTT
cttcttgtagccattagact

SEQ ID NO: 249398 - DNA, 20 bp, Artificial Sequence
  Description of Artificial Sequence: Synthetic oligonucleotide
  Target: LAMA2; (-) strand; PAM type: YTN; PAM sequence: TTT
tcttcttgtagccattagac

SEQ ID NO: 249399 - DNA, 20 bp, Artificial Sequence
  Description of Artificial Sequence: Synthetic oligonucleotide
  Target: LAMA2; (-) strand; PAM type: YTN; PAM sequence: TTT
ttcttcttgtagccattaga

SEQ ID NO: 249400 - DNA, 20 bp, Artificial Sequence
  Description of Artificial Sequence: Synthetic oligonucleotide
  Target: LAMA2; (-) strand; PAM type: YTN; PAM sequence: CTT
tttcttcttgtagccattag

SEQ ID NO: 249401 - DNA, 20 bp, Artificial Sequence
  Description of Artificial Sequence: Synthetic oligonucleotide
  Target: LAMA2; (-) strand; PAM type: YTN; PAM sequence: TTC
tttttcttcttgtagccatt

SEQ ID NO: 249402 - DNA, 20 bp, Artificial Sequence
  Description of Artificial Sequence: Synthetic oligonucleotide
  Target: LAMA2; (-) strand; PAM type: YTN; PAM sequence: TTT
ctttttcttcttgtagccat

SEQ ID NO: 249403 - DNA, 20 bp, Artificial Sequence
  Description of Artificial Sequence: Synthetic oligonucleotide
  Target: LAMA2; (-) strand; PAM type: YTN; PAM sequence: TTT
tctttttcttcttgtagcca

SEQ ID NO: 249404 - DNA, 20 bp, Artificial Sequence
  Description of Artificial Sequence: Synthetic oligonucleotide
  Target: LAMA2; (-) strand; PAM type: YTN; PAM sequence: CTT
ttctttttcttcttgtagcc

SEQ ID NO: 249405 - DNA, 20 bp, Artificial Sequence
  Description of Artificial Sequence: Synthetic oligonucleotide
  Target: LAMA2; (-) strand; PAM type: YTN; PAM sequence: TTC
ttttctttttcttcttgtag

SEQ ID NO: 249406 - DNA, 20 bp, Artificial Sequence
  Description of Artificial Sequence: Synthetic oligonucleotide
  Target: LAMA2; (-) strand; PAM type: YTN; PAM sequence: CTT
cttttctttttcttcttgta

SEQ ID NO: 249407 - DNA, 20 bp, Artificial Sequence
  Description of Artificial Sequence: Synthetic oligonucleotide
  Target: LAMA2; (-) strand; PAM type: YTN; PAM sequence: TTC
ttcttttctttttcttcttg

SEQ ID NO: 249408 - DNA, 20 bp, Artificial Sequence
  Description of Artificial Sequence: Synthetic oligonucleotide
  Target: LAMA2; (-) strand; PAM type: YTN; PAM sequence: CTT
cttcttttctttttcttctt

SEQ ID NO: 249409 - DNA, 20 bp, Artificial Sequence
  Description of Artificial Sequence: Synthetic oligonucleotide
  Target: LAMA2; (-) strand; PAM type: YTN; PAM sequence: TTC
ttcttcttttctttttcttc

SEQ ID NO: 249410 - DNA, 20 bp, Artificial Sequence
  Description of Artificial Sequence: Synthetic oligonucleotide
  Target: LAMA2; (-) strand; PAM type: YTN; PAM sequence: CTT
cttcttcttttctttttctt

SEQ ID NO: 249411 - DNA, 20 bp, Artificial Sequence
  Description of Artificial Sequence: Synthetic oligonucleotide
  Target: LAMA2; (-) strand; PAM type: YTN; PAM sequence: TTC
ttcttcttcttttctttttc

SEQ ID NO: 249412 - DNA, 20 bp, Artificial Sequence
  Description of Artificial Sequence: Synthetic oligonucleotide
  Target: LAMA2; (-) strand; PAM type: YTN; PAM sequence: CTT
cttcttcttcttttcttttt

SEQ ID NO: 249413 - DNA, 20 bp, Artificial Sequence
  Description of Artificial Sequence: Synthetic oligonucleotide
  Target: LAMA2; (-) strand; PAM type: YTN; PAM sequence: CTC
cttcttcttcttcttttctt

SEQ ID NO: 249414 - DNA, 20 bp, Artificial Sequence
  Description of Artificial Sequence: Synthetic oligonucleotide
  Target: LAMA2; (-) strand; PAM type: YTN; PAM sequence: CTC
ctccttcttcttcttctttt

SEQ ID NO: 249415 - DNA, 20 bp, Artificial Sequence
  Description of Artificial Sequence: Synthetic oligonucleotide
  Target: LAMA2; (-) strand; PAM type: YTN; PAM sequence: TTC
ctcctccttcttcttcttct

SEQ ID NO: 249416 - DNA, 20 bp, Artificial Sequence
  Description of Artificial Sequence: Synthetic oligonucleotide
  Target: LAMA2; (-) strand; PAM type: YTN; PAM sequence: CTT
cctcctccttcttcttcttc

SEQ ID NO: 249417 - DNA, 20 bp, Artificial Sequence
  Description of Artificial Sequence: Synthetic oligonucleotide
  Target: LAMA2; (-) strand; PAM type: YTN; PAM sequence: CTC
ttcctcctccttcttcttct

SEQ ID NO: 249418 - DNA, 20 bp, Artificial Sequence
  Description of Artificial Sequence: Synthetic oligonucleotide
  Target: LAMA2; (-) strand; PAM type: YTN; PAM sequence: CTC
ctcttcctcctccttcttct

SEQ ID NO: 249419 - DNA, 20 bp, Artificial Sequence
  Description of Artificial Sequence: Synthetic oligonucleotide
  Target: LAMA2; (-) strand; PAM type: YTN; PAM sequence: TTC
tcctcttcctcctccttctt

SEQ ID NO: 249420 - DNA, 20 bp, Artificial Sequence
  Description of Artificial Sequence: Synthetic oligonucleotide
  Target: LAMA2; (-) strand; PAM type: YTN; PAM sequence: CTT
ctcctcttcctcctccttct

SEQ ID NO: 249421 - DNA, 20 bp, Artificial Sequence
  Description of Artificial Sequence: Synthetic oligonucleotide
  Target: LAMA2; (-) strand; PAM type: YTN; PAM sequence: CTC
cttctcctcttcctcctcct

SEQ ID NO: 249422 - DNA, 20 bp, Artificial Sequence
  Description of Artificial Sequence: Synthetic oligonucleotide
  Target: LAMA2; (-) strand; PAM type: YTN; PAM sequence: TTC
atctccttctcctcttcctc

SEQ ID NO: 249423 - DNA, 20 bp, Artificial Sequence
  Description of Artificial Sequence: Synthetic oligonucleotide
  Target: LAMA2; (-) strand; PAM type: YTN; PAM sequence: CTT
catctccttctcctcttcct

SEQ ID NO: 249424 - DNA, 20 bp, Artificial Sequence
  Description of Artificial Sequence: Synthetic oligonucleotide
  Target: LAMA2; (-) strand; PAM type: YTN; PAM sequence: TTC
ttcatctccttctcctcttc

SEQ ID NO: 249425 - DNA, 20 bp, Artificial Sequence
  Description of Artificial Sequence: Synthetic oligonucleotide
  Target: LAMA2; (-) strand; PAM type: YTN; PAM sequence: CTT
cttcatctccttctcctctt

SEQ ID NO: 249426 - DNA, 20 bp, Artificial Sequence
  Description of Artificial Sequence: Synthetic oligonucleotide
  Target: LAMA2; (-) strand; PAM type: YTN; PAM sequence: TTC
ttcttcatctccttctcctc

SEQ ID NO: 249427 - DNA, 20 bp, Artificial Sequence
  Description of Artificial Sequence: Synthetic oligonucleotide
  Target: LAMA2; (-) strand; PAM type: YTN; PAM sequence: TTT
cttcttcatctccttctcct

SEQ ID NO: 249428 - DNA, 20 bp, Artificial Sequence
  Description of Artificial Sequence: Synthetic oligonucleotide
  Target: LAMA2; (-) strand; PAM type: YTN; PAM sequence: CTT
tcttcttcatctccttctcc

SEQ ID NO: 249429 - DNA, 20 bp, Artificial Sequence
  Description of Artificial Sequence: Synthetic oligonucleotide
  Target: LAMA2; (-) strand; PAM type: YTN; PAM sequence: TTA
gctttcttcttcatctcctt

SEQ ID NO: 249430 - DNA, 20 bp, Artificial Sequence
  Description of Artificial Sequence: Synthetic oligonucleotide
  Target: LAMA2; (-) strand; PAM type: YTN; PAM sequence: CTT
agctttcttcttcatctcct

SEQ ID NO: 249431 - DNA, 20 bp, Artificial Sequence
  Description of Artificial Sequence: Synthetic oligonucleotide
  Target: LAMA2; (-) strand; PAM type: YTN; PAM sequence: CTC
cttagctttcttcttcatct

SEQ ID NO: 249432 - DNA, 20 bp, Artificial Sequence
  Description of Artificial Sequence: Synthetic oligonucleotide
  Target: LAMA2; (-) strand; PAM type: YTN; PAM sequence: TTC
tccttagctttcttcttcat

SEQ ID NO: 249433 - DNA, 20 bp, Artificial Sequence
  Description of Artificial Sequence: Synthetic oligonucleotide
  Target: LAMA2; (-) strand; PAM type: YTN; PAM sequence: CTT
ctccttagctttcttcttca

SEQ ID NO: 249434 - DNA, 20 bp, Artificial Sequence
  Description of Artificial Sequence: Synthetic oligonucleotide
  Target: LAMA2; (-) strand; PAM type: YTN; PAM sequence: TTA
cccatcttctccttagcttt

SEQ ID NO: 249435 - DNA, 20 bp, Artificial Sequence
  Description of Artificial Sequence: Synthetic oligonucleotide
  Target: LAMA2; (-) strand; PAM type: YTN; PAM sequence: CTG
ttacccatcttctccttagc

SEQ ID NO: 249436 - DNA, 20 bp, Artificial Sequence
  Description of Artificial Sequence: Synthetic oligonucleotide
  Target: LAMA2; (-) strand; PAM type: YTN; PAM sequence: TTC
ctgttacccatcttctcctt

SEQ ID NO: 249437 - DNA, 20 bp, Artificial Sequence
  Description of Artificial Sequence: Synthetic oligonucleotide
  Target: LAMA2; (-) strand; PAM type: YTN; PAM sequence: TTT
cctgttacccatcttctcct

SEQ ID NO: 249438 - DNA, 20 bp, Artificial Sequence
  Description of Artificial Sequence: Synthetic oligonucleotide
  Target: LAMA2; (-) strand; PAM type: YTN; PAM sequence: TTT
tcctgttacccatcttctcc

SEQ ID NO: 249439 - DNA, 20 bp, Artificial Sequence
  Description of Artificial Sequence: Synthetic oligonucleotide
  Target: LAMA2; (-) strand; PAM type: YTN; PAM sequence: TTT
ttcctgttacccatcttctc

SEQ ID NO: 249440 - DNA, 20 bp, Artificial Sequence
  Description of Artificial Sequence: Synthetic oligonucleotide
  Target: LAMA2; (-) strand; PAM type: YTN; PAM sequence: TTT
tttcctgttacccatcttct

SEQ ID NO: 249441 - DNA, 20 bp, Artificial Sequence
  Description of Artificial Sequence: Synthetic oligonucleotide
  Target: LAMA2; (-) strand; PAM type: YTN; PAM sequence: TTT
ttttcctgttacccatcttc

SEQ ID NO: 249442 - DNA, 20 bp, Artificial Sequence
  Description of Artificial Sequence: Synthetic oligonucleotide
  Target: LAMA2; (-) strand; PAM type: YTN; PAM sequence: CTT
tttttcctgttacccatctt

SEQ ID NO: 249443 - DNA, 20 bp, Artificial Sequence
  Description of Artificial Sequence: Synthetic oligonucleotide
  Target: LAMA2; (-) strand; PAM type: YTN; PAM sequence: CTC
tttttttcctgttacccatc

SEQ ID NO: 249444 - DNA, 20 bp, Artificial Sequence
  Description of Artificial Sequence: Synthetic oligonucleotide
  Target: LAMA2; (-) strand; PAM type: YTN; PAM sequence: CTG
ccctctttttttcctgttac

SEQ ID NO: 249445 - DNA, 20 bp, Artificial Sequence
  Description of Artificial Sequence: Synthetic oligonucleotide
  Target: LAMA2; (-) strand; PAM type: YTN; PAM sequence: TTC
ctgccctctttttttcctgt

SEQ ID NO: 249446 - DNA, 20 bp, Artificial Sequence
  Description of Artificial Sequence: Synthetic oligonucleotide
  Target: LAMA2; (-) strand; PAM type: YTN; PAM sequence: TTT
cctgccctctttttttcctg

SEQ ID NO: 249447 - DNA, 20 bp, Artificial Sequence
  Description of Artificial Sequence: Synthetic oligonucleotide
  Target: LAMA2; (-) strand; PAM type: YTN; PAM sequence: TTT
tcctgccctctttttttcct

SEQ ID NO: 249448 - DNA, 20 bp, Artificial Sequence
  Description of Artificial Sequence: Synthetic oligonucleotide
  Target: LAMA2; (-) strand; PAM type: YTN; PAM sequence: CTT
ttcctgccctctttttttcc

SEQ ID NO: 249449 - DNA, 20 bp, Artificial Sequence
  Description of Artificial Sequence: Synthetic oligonucleotide
  Target: LAMA2; (-) strand; PAM type: YTN; PAM sequence: CTG
cttttcctgccctctttttt

SEQ ID NO: 249450 - DNA, 20 bp, Artificial Sequence
  Description of Artificial Sequence: Synthetic oligonucleotide
  Target: LAMA2; (-) strand; PAM type: YTN; PAM sequence: CTA
tctgcttttcctgccctctt

SEQ ID NO: 249451 - DNA, 20 bp, Artificial Sequence
  Description of Artificial Sequence: Synthetic oligonucleotide
  Target: LAMA2; (-) strand; PAM type: YTN; PAM sequence: TTC
ctatctgcttttcctgccct

SEQ ID NO: 249452 - DNA, 20 bp, Artificial Sequence
  Description of Artificial Sequence: Synthetic oligonucleotide
  Target: LAMA2; (-) strand; PAM type: YTN; PAM sequence: CTT
cctatctgcttttcctgccc

SEQ ID NO: 249453 - DNA, 20 bp, Artificial Sequence
  Description of Artificial Sequence: Synthetic oligonucleotide
  Target: LAMA2; (-) strand; PAM type: YTN; PAM sequence: TTC
cttcctatctgcttttcctg

SEQ ID NO: 249454 - DNA, 20 bp, Artificial Sequence
  Description of Artificial Sequence: Synthetic oligonucleotide
  Target: LAMA2; (-) strand; PAM type: YTN; PAM sequence: TTT
ccttcctatctgcttttcct

SEQ ID NO: 249455 - DNA, 20 bp, Artificial Sequence
  Description of Artificial Sequence: Synthetic oligonucleotide
  Target: LAMA2; (-) strand; PAM type: YTN; PAM sequence: TTT
tccttcctatctgcttttcc

SEQ ID NO: 249456 - DNA, 20 bp, Artificial Sequence
  Description of Artificial Sequence: Synthetic oligonucleotide
  Target: LAMA2; (-) strand; PAM type: YTN; PAM sequence: TTT
ttccttcctatctgcttttc

SEQ ID NO: 249457 - DNA, 20 bp, Artificial Sequence
  Description of Artificial Sequence: Synthetic oligonucleotide
  Target: LAMA2; (-) strand; PAM type: YTN; PAM sequence: TTT
tttccttcctatctgctttt

SEQ ID NO: 249458 - DNA, 20 bp, Artificial Sequence
  Description of Artificial Sequence: Synthetic oligonucleotide
  Target: LAMA2; (-) strand; PAM type: YTN; PAM sequence: TTT
ttttccttcctatctgcttt

SEQ ID NO: 249459 - DNA, 20 bp, Artificial Sequence
  Description of Artificial Sequence: Synthetic oligonucleotide
  Target: LAMA2; (-) strand; PAM type: YTN; PAM sequence: TTT
tttttccttcctatctgctt

SEQ ID NO: 249460 - DNA, 20 bp, Artificial Sequence
  Description of Artificial Sequence: Synthetic oligonucleotide
  Target: LAMA2; (-) strand; PAM type: YTN; PAM sequence: CTT
ttttttccttcctatctgct

SEQ ID NO: 249461 - DNA, 20 bp, Artificial Sequence
  Description of Artificial Sequence: Synthetic oligonucleotide
  Target: LAMA2; (-) strand; PAM type: YTN; PAM sequence: TTC
caccttttttttccttccta

SEQ ID NO: 249462 - DNA, 20 bp, Artificial Sequence
  Description of Artificial Sequence: Synthetic oligonucleotide
  Target: LAMA2; (-) strand; PAM type: YTN; PAM sequence: CTT
ccaccttttttttccttcct

SEQ ID NO: 249463 - DNA, 20 bp, Artificial Sequence
  Description of Artificial Sequence: Synthetic oligonucleotide
  Target: LAMA2; (-) strand; PAM type: YTN; PAM sequence: CTC
ttccaccttttttttccttc

SEQ ID NO: 249464 - DNA, 20 bp, Artificial Sequence
  Description of Artificial Sequence: Synthetic oligonucleotide
  Target: LAMA2; (-) strand; PAM type: YTN; PAM sequence: CTC
tcttccaccttttttttcct

SEQ ID NO: 249465 - DNA, 20 bp, Artificial Sequence
  Description of Artificial Sequence: Synthetic oligonucleotide
  Target: LAMA2; (-) strand; PAM type: YTN; PAM sequence: TTC
tctcttccaccttttttttc

SEQ ID NO: 249466 - DNA, 20 bp, Artificial Sequence
  Description of Artificial Sequence: Synthetic oligonucleotide
  Target: LAMA2; (-) strand; PAM type: YTN; PAM sequence: TTT
ctctcttccacctttttttt

SEQ ID NO: 249467 - DNA, 20 bp, Artificial Sequence
  Description of Artificial Sequence: Synthetic oligonucleotide
  Target: LAMA2; (-) strand; PAM type: YTN; PAM sequence: TTC
atttctctcttccacctttt

SEQ ID NO: 249468 - DNA, 20 bp, Artificial Sequence
  Description of Artificial Sequence: Synthetic oligonucleotide
  Target: LAMA2; (-) strand; PAM type: YTN; PAM sequence: CTG
cattcatttctctcttccac

SEQ ID NO: 249469 - DNA, 20 bp, Artificial Sequence
  Description of Artificial Sequence: Synthetic oligonucleotide
  Target: LAMA2; (-) strand; PAM type: YTN; PAM sequence: CTG
cctgcattcatttctctctt

SEQ ID NO: 249470 - DNA, 20 bp, Artificial Sequence
  Description of Artificial Sequence: Synthetic oligonucleotide
  Target: LAMA2; (-) strand; PAM type: YTN; PAM sequence: CTG
cctgcctgcattcatttctc

SEQ ID NO: 249471 - DNA, 20 bp, Artificial Sequence
  Description of Artificial Sequence: Synthetic oligonucleotide
  Target: LAMA2; (-) strand; PAM type: YTN; PAM sequence: CTC
gaggaaaacatcctgcctgc

SEQ ID NO: 249472 - DNA, 20 bp, Artificial Sequence
  Description of Artificial Sequence: Synthetic oligonucleotide
  Target: LAMA2; (-) strand; PAM type: YTN; PAM sequence: TTA
tgcagtccaggggatataaa

SEQ ID NO: 249473 - DNA, 20 bp, Artificial Sequence
  Description of Artificial Sequence: Synthetic oligonucleotide
  Target: LAMA2; (-) strand; PAM type: YTN; PAM sequence: CTG
agttatgcagtccaggggat

SEQ ID NO: 249474 - DNA, 20 bp, Artificial Sequence
  Description of Artificial Sequence: Synthetic oligonucleotide
  Target: LAMA2; (-) strand; PAM type: YTN; PAM sequence: TTA
gaagggaataaactgagtta

SEQ ID NO: 249475 - DNA, 20 bp, Artificial Sequence
  Description of Artificial Sequence: Synthetic oligonucleotide
  Target: LAMA2; (-) strand; PAM type: YTN; PAM sequence: TTT
agaagggaataaactgagtt

SEQ ID NO: 249476 - DNA, 20 bp, Artificial Sequence
  Description of Artificial Sequence: Synthetic oligonucleotide
  Target: LAMA2; (-) strand; PAM type: YTN; PAM sequence: TTG
gtttagaagggaataaactg

SEQ ID NO: 249477 - DNA, 20 bp, Artificial Sequence
  Description of Artificial Sequence: Synthetic oligonucleotide
  Target: LAMA2; (-) strand; PAM type: YTN; PAM sequence: CTA
gaaaagttggtttagaaggg

SEQ ID NO: 249478 - DNA, 20 bp, Artificial Sequence
  Description of Artificial Sequence: Synthetic oligonucleotide
  Target: LAMA2; (-) strand; PAM type: YTN; PAM sequence: TTC
tagaaaagttggtttagaag

SEQ ID NO: 249479 - DNA, 20 bp, Artificial Sequence
  Description of Artificial Sequence: Synthetic oligonucleotide
  Target: LAMA2; (-) strand; PAM type: YTN; PAM sequence: TTG
taggtgtcgaacagagacaa

SEQ ID NO: 249480 - DNA, 20 bp, Artificial Sequence
  Description of Artificial Sequence: Synthetic oligonucleotide
  Target: LAMA2; (-) strand; PAM type: YTN; PAM sequence: TTA
atgcatagaaaatgaaccag

SEQ ID NO: 249481 - DNA, 20 bp, Artificial Sequence
  Description of Artificial Sequence: Synthetic oligonucleotide
  Target: LAMA2; (-) strand; PAM type: YTN; PAM sequence: CTT
aatgcatagaaaatgaacca

SEQ ID NO: 249482 - DNA, 20 bp, Artificial Sequence
  Description of Artificial Sequence: Synthetic oligonucleotide
  Target: LAMA2; (-) strand; PAM type: YTN; PAM sequence: TTA
catcatccttaatgcataga

SEQ ID NO: 249483 - DNA, 20 bp, Artificial Sequence
  Description of Artificial Sequence: Synthetic oligonucleotide
  Target: LAMA2; (-) strand; PAM type: YTN; PAM sequence: TTA
aagttacatcatccttaatg

SEQ ID NO: 249484 - DNA, 20 bp, Artificial Sequence
  Description of Artificial Sequence: Synthetic oligonucleotide
  Target: LAMA2; (-) strand; PAM type: YTN; PAM sequence: TTT
aaagttacatcatccttaat

SEQ ID NO: 249485 - DNA, 20 bp, Artificial Sequence
  Description of Artificial Sequence: Synthetic oligonucleotide
  Target: LAMA2; (-) strand; PAM type: YTN; PAM sequence: TTT
taaagttacatcatccttaa

SEQ ID NO: 249486 - DNA, 20 bp, Artificial Sequence
  Description of Artificial Sequence: Synthetic oligonucleotide
  Target: LAMA2; (-) strand; PAM type: YTN; PAM sequence: TTA
catgagaggttttaaagtta

SEQ ID NO: 249487 - DNA, 20 bp, Artificial Sequence
  Description of Artificial Sequence: Synthetic oligonucleotide
  Target: LAMA2; (-) strand; PAM type: YTN; PAM sequence: TTT
acatgagaggttttaaagtt

SEQ ID NO: 249488 - DNA, 20 bp, Artificial Sequence
  Description of Artificial Sequence: Synthetic oligonucleotide
  Target: LAMA2; (-) strand; PAM type: YTN; PAM sequence: TTA
gaaaacaggcagaatttaca

SEQ ID NO: 249489 - DNA, 20 bp, Artificial Sequence
  Description of Artificial Sequence: Synthetic oligonucleotide
  Target: LAMA2; (-) strand; PAM type: YTN; PAM sequence: TTG
tagaattagaaaacaggcag

SEQ ID NO: 249490 - DNA, 20 bp, Artificial Sequence
  Description of Artificial Sequence: Synthetic oligonucleotide
  Target: LAMA2; (-) strand; PAM type: YTN; PAM sequence: TTA
gaatagaacataaacaagag

SEQ ID NO: 249491 - DNA, 20 bp, Artificial Sequence
  Description of Artificial Sequence: Synthetic oligonucleotide
  Target: LAMA2; (-) strand; PAM type: YTN; PAM sequence: TTA
ttagaatagaacataaacaa

SEQ ID NO: 249492 - DNA, 20 bp, Artificial Sequence
  Description of Artificial Sequence: Synthetic oligonucleotide
  Target: LAMA2; (-) strand; PAM type: YTN; PAM sequence: CTC
gataattattagaatagaac

SEQ ID NO: 249493 - DNA, 20 bp, Artificial Sequence
  Description of Artificial Sequence: Synthetic oligonucleotide
  Target: LAMA2; (-) strand; PAM type: YTN; PAM sequence: TTA
aaagctcgataattattaga

SEQ ID NO: 249494 - DNA, 20 bp, Artificial Sequence
  Description of Artificial Sequence: Synthetic oligonucleotide
  Target: LAMA2; (-) strand; PAM type: YTN; PAM sequence: TTT
aaaagctcgataattattag

SEQ ID NO: 249495 - DNA, 20 bp, Artificial Sequence
  Description of Artificial Sequence: Synthetic oligonucleotide
  Target: LAMA2; (-) strand; PAM type: YTN; PAM sequence: CTT
taaaagctcgataattatta

SEQ ID NO: 249496 - DNA, 20 bp, Artificial Sequence
  Description of Artificial Sequence: Synthetic oligonucleotide
  Target: LAMA2; (-) strand; PAM type: YTN; PAM sequence: TTC
tttaaaagctcgataattat

SEQ ID NO: 249497 - DNA, 20 bp, Artificial Sequence
  Description of Artificial Sequence: Synthetic oligonucleotide
  Target: LAMA2; (-) strand; PAM type: YTN; PAM sequence: CTT
ctttaaaagctcgataatta

SEQ ID NO: 249498 - DNA, 20 bp, Artificial Sequence
  Description of Artificial Sequence: Synthetic oligonucleotide
  Target: LAMA2; (-) strand; PAM type: YTN; PAM sequence: CTC
ttctttaaaagctcgataat

SEQ ID NO: 249499 - DNA, 20 bp, Artificial Sequence
  Description of Artificial Sequence: Synthetic oligonucleotide
  Target: LAMA2; (-) strand; PAM type: YTN; PAM sequence: TTC
tcttctttaaaagctcgata

SEQ ID NO: 249500 - DNA, 20 bp, Artificial Sequence
  Description of Artificial Sequence: Synthetic oligonucleotide
  Target: LAMA2; (-) strand; PAM type: YTN; PAM sequence: TTT
ctcttctttaaaagctcgat

SEQ ID NO: 249501 - DNA, 20 bp, Artificial Sequence
  Description of Artificial Sequence: Synthetic oligonucleotide
  Target: LAMA2; (-) strand; PAM type: YTN; PAM sequence: TTA
agaacagatttctcttcttt

SEQ ID NO: 249502 - DNA, 20 bp, Artificial Sequence
  Description of Artificial Sequence: Synthetic oligonucleotide
  Target: LAMA2; (-) strand; PAM type: YTN; PAM sequence: TTG
agttaagaacagatttctct

SEQ ID NO: 249503 - DNA, 20 bp, Artificial Sequence
  Description of Artificial Sequence: Synthetic oligonucleotide
  Target: LAMA2; (-) strand; PAM type: YTN; PAM sequence: TTT
gagttaagaacagatttctc

SEQ ID NO: 249504 - DNA, 20 bp, Artificial Sequence
  Description of Artificial Sequence: Synthetic oligonucleotide
  Target: LAMA2; (-) strand; PAM type: YTN; PAM sequence: TTC
agtgtatgtataaatttgag

SEQ ID NO: 249505 - DNA, 20 bp, Artificial Sequence
  Description of Artificial Sequence: Synthetic oligonucleotide
  Target: LAMA2; (-) strand; PAM type: YTN; PAM sequence: CTT
cagtgtatgtataaatttga

SEQ ID NO: 249506 - DNA, 20 bp, Artificial Sequence
  Description of Artificial Sequence: Synthetic oligonucleotide
  Target: LAMA2; (-) strand; PAM type: YTN; PAM sequence: TTC
cttcagtgtatgtataaatt

SEQ ID NO: 249507 - DNA, 20 bp, Artificial Sequence
  Description of Artificial Sequence: Synthetic oligonucleotide
  Target: LAMA2; (-) strand; PAM type: YTN; PAM sequence: TTT
ccttcagtgtatgtataaat

SEQ ID NO: 249508 - DNA, 20 bp, Artificial Sequence
  Description of Artificial Sequence: Synthetic oligonucleotide
  Target: LAMA2; (-) strand; PAM type: YTN; PAM sequence: TTA
tttccttcagtgtatgtata

SEQ ID NO: 249509 - DNA, 20 bp, Artificial Sequence
  Description of Artificial Sequence: Synthetic oligonucleotide
  Target: LAMA2; (-) strand; PAM type: YTN; PAM sequence: TTG
ttatttccttcagtgtatgt

SEQ ID NO: 249510 - DNA, 20 bp, Artificial Sequence
  Description of Artificial Sequence: Synthetic oligonucleotide
  Target: LAMA2; (-) strand; PAM type: YTN; PAM sequence: TTT
gttatttccttcagtgtatg

SEQ ID NO: 249511 - DNA, 20 bp, Artificial Sequence
  Description of Artificial Sequence: Synthetic oligonucleotide
  Target: LAMA2; (-) strand; PAM type: YTN; PAM sequence: TTT
tgttatttccttcagtgtat

SEQ ID NO: 249512 - DNA, 20 bp, Artificial Sequence
  Description of Artificial Sequence: Synthetic oligonucleotide
  Target: LAMA2; (-) strand; PAM type: YTN; PAM sequence: TTC
aaggttttgttatttccttc

SEQ ID NO: 249513 - DNA, 20 bp, Artificial Sequence
  Description of Artificial Sequence: Synthetic oligonucleotide
  Target: LAMA2; (-) strand; PAM type: YTN; PAM sequence: CTT
caaggttttgttatttcctt

SEQ ID NO: 249514 - DNA, 20 bp, Artificial Sequence
  Description of Artificial Sequence: Synthetic oligonucleotide
  Target: LAMA2; (-) strand; PAM type: YTN; PAM sequence: TTA
cttcaaggttttgttatttc

SEQ ID NO: 249515 - DNA, 20 bp, Artificial Sequence
  Description of Artificial Sequence: Synthetic oligonucleotide
  Target: LAMA2; (-) strand; PAM type: YTN; PAM sequence: TTT
acttcaaggttttgttattt

SEQ ID NO: 249516 - DNA, 20 bp, Artificial Sequence
  Description of Artificial Sequence: Synthetic oligonucleotide
  Target: LAMA2; (-) strand; PAM type: YTN; PAM sequence: TTT
tacttcaaggttttgttatt

SEQ ID NO: 249517 - DNA, 20 bp, Artificial Sequence
  Description of Artificial Sequence: Synthetic oligonucleotide
  Target: LAMA2; (-) strand; PAM type: YTN; PAM sequence: TTA
tcatagaaacagtgttttac

SEQ ID NO: 249518 - DNA, 20 bp, Artificial Sequence
  Description of Artificial Sequence: Synthetic oligonucleotide
  Target: LAMA2; (-) strand; PAM type: YTN; PAM sequence: TTT
atcatagaaacagtgtttta

SEQ ID NO: 249519 - DNA, 20 bp, Artificial Sequence
  Description of Artificial Sequence: Synthetic oligonucleotide
  Target: LAMA2; (-) strand; PAM type: YTN; PAM sequence: TTT
tatcatagaaacagtgtttt

SEQ ID NO: 249520 - DNA, 20 bp, Artificial Sequence
  Description of Artificial Sequence: Synthetic oligonucleotide
  Target: LAMA2; (-) strand; PAM type: YTN; PAM sequence: CTT
ttatcatagaaacagtgttt

SEQ ID NO: 249521 - DNA, 20 bp, Artificial Sequence
  Description of Artificial Sequence: Synthetic oligonucleotide
  Target: LAMA2; (-) strand; PAM type: YTN; PAM sequence: CTC
ttttatcatagaaacagtgt

SEQ ID NO: 249522 - DNA, 20 bp, Artificial Sequence
  Description of Artificial Sequence: Synthetic oligonucleotide
  Target: LAMA2; (-) strand; PAM type: YTN; PAM sequence: CTC
tcttttatcatagaaacagt

SEQ ID NO: 249523 - DNA, 20 bp, Artificial Sequence
  Description of Artificial Sequence: Synthetic oligonucleotide
  Target: LAMA2; (-) strand; PAM type: YTN; PAM sequence: TTG
tagagctctcttttatcata

SEQ ID NO: 249524 - DNA, 20 bp, Artificial Sequence
  Description of Artificial Sequence: Synthetic oligonucleotide
  Target: LAMA2; (-) strand; PAM type: YTN; PAM sequence: TTT
gtagagctctcttttatcat

SEQ ID NO: 249525 - DNA, 20 bp, Artificial Sequence
  Description of Artificial Sequence: Synthetic oligonucleotide
  Target: LAMA2; (-) strand; PAM type: YTN; PAM sequence: CTA
tttgtagagctctcttttat

SEQ ID NO: 249526 - DNA, 20 bp, Artificial Sequence
  Description of Artificial Sequence: Synthetic oligonucleotide
  Target: LAMA2; (-) strand; PAM type: YTN; PAM sequence: TTC
atgcatctatttgtagagct

SEQ ID NO: 249527 - DNA, 20 bp, Artificial Sequence
  Description of Artificial Sequence: Synthetic oligonucleotide
  Target: LAMA2; (-) strand; PAM type: YTN; PAM sequence: TTA
ttcatgcatctatttgtaga

SEQ ID NO: 249528 - DNA, 20 bp, Artificial Sequence
  Description of Artificial Sequence: Synthetic oligonucleotide
  Target: LAMA2; (-) strand; PAM type: YTN; PAM sequence: TTT
attcatgcatctatttgtag

SEQ ID NO: 249529 - DNA, 20 bp, Artificial Sequence
  Description of Artificial Sequence: Synthetic oligonucleotide
  Target: LAMA2; (-) strand; PAM type: YTN; PAM sequence: CTC
ccatagaagtgtttattcat

SEQ ID NO: 249530 - DNA, 20 bp, Artificial Sequence
  Description of Artificial Sequence: Synthetic oligonucleotide
  Target: LAMA2; (-) strand; PAM type: YTN; PAM sequence: CTG
aaaaggtatccctcccatag

SEQ ID NO: 249531 - DNA, 20 bp, Artificial Sequence
  Description of Artificial Sequence: Synthetic oligonucleotide
  Target: LAMA2; (-) strand; PAM type: YTN; PAM sequence: CTC
tgaaaaggtatccctcccat

SEQ ID NO: 249532 - DNA, 20 bp, Artificial Sequence
  Description of Artificial Sequence: Synthetic oligonucleotide
  Target: LAMA2; (-) strand; PAM type: YTN; PAM sequence: TTA
aactctgaaaaggtatccct

SEQ ID NO: 249533 - DNA, 20 bp, Artificial Sequence
  Description of Artificial Sequence: Synthetic oligonucleotide
  Target: LAMA2; (-) strand; PAM type: YTN; PAM sequence: CTT
aaactctgaaaaggtatccc

SEQ ID NO: 249534 - DNA, 20 bp, Artificial Sequence
  Description of Artificial Sequence: Synthetic oligonucleotide
  Target: LAMA2; (-) strand; PAM type: YTN; PAM sequence: TTA
gatcccaaagcccgcgagcc

SEQ ID NO: 249535 - DNA, 20 bp, Artificial Sequence
  Description of Artificial Sequence: Synthetic oligonucleotide
  Target: LAMA2; (-) strand; PAM type: YTN; PAM sequence: CTT
agatcccaaagcccgcgagc

SEQ ID NO: 249536 - DNA, 20 bp, Artificial Sequence
  Description of Artificial Sequence: Synthetic oligonucleotide
  Target: LAMA2; (-) strand; PAM type: YTN; PAM sequence: TTC
ttagatcccaaagcccgcga

SEQ ID NO: 249537 - DNA, 20 bp, Artificial Sequence
  Description of Artificial Sequence: Synthetic oligonucleotide
  Target: LAMA2; (-) strand; PAM type: YTN; PAM sequence: CTT
cttagatcccaaagcccgcg

SEQ ID NO: 249538 - DNA, 20 bp, Artificial Sequence
  Description of Artificial Sequence: Synthetic oligonucleotide
  Target: LAMA2; (-) strand; PAM type: YTN; PAM sequence: TTC
atcttcttagatcccaaagc

SEQ ID NO: 249539 - DNA, 20 bp, Artificial Sequence
  Description of Artificial Sequence: Synthetic oligonucleotide
  Target: LAMA2; (-) strand; PAM type: YTN; PAM sequence: TTA
ggatcacaaacagggcaagc

SEQ ID NO: 249540 - DNA, 20 bp, Artificial Sequence
  Description of Artificial Sequence: Synthetic oligonucleotide
  Target: LAMA2; (-) strand; PAM type: YTN; PAM sequence: TTT
aggatcacaaacagggcaag

SEQ ID NO: 249541 - DNA, 20 bp, Artificial Sequence
  Description of Artificial Sequence: Synthetic oligonucleotide
  Target: LAMA2; (-) strand; PAM type: YTN; PAM sequence: TTC
catttaggatcacaaacagg

SEQ ID NO: 249542 - DNA, 20 bp, Artificial Sequence
  Description of Artificial Sequence: Synthetic oligonucleotide
  Target: LAMA2; (-) strand; PAM type: YTN; PAM sequence: TTT
ccatttaggatcacaaacag

SEQ ID NO: 249543 - DNA, 20 bp, Artificial Sequence
  Description of Artificial Sequence: Synthetic oligonucleotide
  Target: LAMA2; (-) strand; PAM type: YTN; PAM sequence: CTG
tcaatttccatttaggatca

SEQ ID NO: 249544 - DNA, 20 bp, Artificial Sequence
  Description of Artificial Sequence: Synthetic oligonucleotide
  Target: LAMA2; (-) strand; PAM type: YTN; PAM sequence: TTA
aacatatctgtcaatttcca

SEQ ID NO: 249545 - DNA, 20 bp, Artificial Sequence
  Description of Artificial Sequence: Synthetic oligonucleotide
  Target: LAMA2; (-) strand; PAM type: YTN; PAM sequence: CTG
agcaggataaattaaacata

SEQ ID NO: 249546 - DNA, 20 bp, Artificial Sequence
  Description of Artificial Sequence: Synthetic oligonucleotide
  Target: LAMA2; (-) strand; PAM type: YTN; PAM sequence: TTA
taatactgagcaggataaat

SEQ ID NO: 249547 - DNA, 20 bp, Artificial Sequence
  Description of Artificial Sequence: Synthetic oligonucleotide
  Target: LAMA2; (-) strand; PAM type: YTN; PAM sequence: TTT
ataatactgagcaggataaa

SEQ ID NO: 249548 - DNA, 20 bp, Artificial Sequence
  Description of Artificial Sequence: Synthetic oligonucleotide
  Target: LAMA2; (-) strand; PAM type: YTN; PAM sequence: CTT
tataatactgagcaggataa

SEQ ID NO: 249549 - DNA, 20 bp, Artificial Sequence
  Description of Artificial Sequence: Synthetic oligonucleotide
  Target: LAMA2; (-) strand; PAM type: YTN; PAM sequence: TTC
aggagggatacacaaaaatc

SEQ ID NO: 249550 - DNA, 20 bp, Artificial Sequence
  Description of Artificial Sequence: Synthetic oligonucleotide
  Target: LAMA2; (-) strand; PAM type: YTN; PAM sequence: TTT
caggagggatacacaaaaat

SEQ ID NO: 249551 - DNA, 20 bp, Artificial Sequence
  Description of Artificial Sequence: Synthetic oligonucleotide
  Target: LAMA2; (-) strand; PAM type: YTN; PAM sequence: TTA
ccagagcaaatatttcagga

SEQ ID NO: 249552 - DNA, 20 bp, Artificial Sequence
  Description of Artificial Sequence: Synthetic oligonucleotide
  Target: LAMA2; (-) strand; PAM type: YTN; PAM sequence: CTT
accagagcaaatatttcagg

SEQ ID NO: 249553 - DNA, 20 bp, Artificial Sequence
  Description of Artificial Sequence: Synthetic oligonucleotide
  Target: LAMA2; (-) strand; PAM type: YTN; PAM sequence: TTG
cttaccagagcaaatatttc

SEQ ID NO: 249554 - DNA, 20 bp, Artificial Sequence
  Description of Artificial Sequence: Synthetic oligonucleotide
  Target: LAMA2; (-) strand; PAM type: YTN; PAM sequence: TTT
gcttaccagagcaaatattt

SEQ ID NO: 249555 - DNA, 20 bp, Artificial Sequence
  Description of Artificial Sequence: Synthetic oligonucleotide
  Target: LAMA2; (-) strand; PAM type: YTN; PAM sequence: TTT
tgcttaccagagcaaatatt

SEQ ID NO: 249556 - DNA, 20 bp, Artificial Sequence
  Description of Artificial Sequence: Synthetic oligonucleotide
  Target: LAMA2; (-) strand; PAM type: YTN; PAM sequence: CTT
ttgcttaccagagcaaatat

SEQ ID NO: 249557 - DNA, 20 bp, Artificial Sequence
  Description of Artificial Sequence: Synthetic oligonucleotide
  Target: LAMA2; (-) strand; PAM type: YTN; PAM sequence: TTG
cttttgcttaccagagcaaa

SEQ ID NO: 249558 - DNA, 20 bp, Artificial Sequence
  Description of Artificial Sequence: Synthetic oligonucleotide
  Target: LAMA2; (-) strand; PAM type: YTN; PAM sequence: TTT
gcttttgcttaccagagcaa

SEQ ID NO: 249559 - DNA, 20 bp, Artificial Sequence
  Description of Artificial Sequence: Synthetic oligonucleotide
  Target: LAMA2; (-) strand; PAM type: YTN; PAM sequence: CTA
atatttgcttttgcttacca

SEQ ID NO: 249560 - DNA, 20 bp, Artificial Sequence
  Description of Artificial Sequence: Synthetic oligonucleotide
  Target: LAMA2; (-) strand; PAM type: YTN; PAM sequence: CTA
aatggagtgtaaaacctaat

SEQ ID NO: 249561 - DNA, 20 bp, Artificial Sequence
  Description of Artificial Sequence: Synthetic oligonucleotide
  Target: LAMA2; (-) strand; PAM type: YTN; PAM sequence: TTC
actaaatggagtgtaaaacc

SEQ ID NO: 249562 - DNA, 20 bp, Artificial Sequence
  Description of Artificial Sequence: Synthetic oligonucleotide
  Target: LAMA2; (-) strand; PAM type: YTN; PAM sequence: TTT
cactaaatggagtgtaaaac

SEQ ID NO: 249563 - DNA, 20 bp, Artificial Sequence
  Description of Artificial Sequence: Synthetic oligonucleotide
  Target: LAMA2; (-) strand; PAM type: YTN; PAM sequence: TTA
tttcactaaatggagtgtaa

SEQ ID NO: 249564 - DNA, 20 bp, Artificial Sequence
  Description of Artificial Sequence: Synthetic oligonucleotide
  Target: LAMA2; (-) strand; PAM type: YTN; PAM sequence: CTG
ttatttcactaaatggagtg

SEQ ID NO: 249565 - DNA, 20 bp, Artificial Sequence
  Description of Artificial Sequence: Synthetic oligonucleotide
  Target: LAMA2; (-) strand; PAM type: YTN; PAM sequence: TTA
tcatcactgttatttcacta

SEQ ID NO: 249566 - DNA, 20 bp, Artificial Sequence
  Description of Artificial Sequence: Synthetic oligonucleotide
  Target: LAMA2; (-) strand; PAM type: YTN; PAM sequence: CTG
atgtcagattatcatcactg

SEQ ID NO: 249567 - DNA, 20 bp, Artificial Sequence
  Description of Artificial Sequence: Synthetic oligonucleotide
  Target: LAMA2; (-) strand; PAM type: YTN; PAM sequence: CTC
tgatgtcagattatcatcac

SEQ ID NO: 249568 - DNA, 20 bp, Artificial Sequence
  Description of Artificial Sequence: Synthetic oligonucleotide
  Target: LAMA2; (-) strand; PAM type: YTN; PAM sequence: TTC
tctgatgtcagattatcatc

SEQ ID NO: 249569 - DNA, 20 bp, Artificial Sequence
  Description of Artificial Sequence: Synthetic oligonucleotide
  Target: LAMA2; (-) strand; PAM type: YTN; PAM sequence: TTG
gttctctgatgtcagattat

SEQ ID NO: 249570 - DNA, 20 bp, Artificial Sequence
  Description of Artificial Sequence: Synthetic oligonucleotide
  Target: LAMA2; (-) strand; PAM type: YTN; PAM sequence: TTT
ggttctctgatgtcagatta

SEQ ID NO: 249571 - DNA, 20 bp, Artificial Sequence
  Description of Artificial Sequence: Synthetic oligonucleotide
  Target: LAMA2; (-) strand; PAM type: YTN; PAM sequence: CTG
gaacatttggttctctgatg

SEQ ID NO: 249572 - DNA, 20 bp, Artificial Sequence
  Description of Artificial Sequence: Synthetic oligonucleotide
  Target: LAMA2; (-) strand; PAM type: YTN; PAM sequence: TTC
atgaaataagcctggaacat

SEQ ID NO: 249573 - DNA, 20 bp, Artificial Sequence
  Description of Artificial Sequence: Synthetic oligonucleotide
  Target: LAMA2; (-) strand; PAM type: YTN; PAM sequence: TTT
catgaaataagcctggaaca

SEQ ID NO: 249574 - DNA, 20 bp, Artificial Sequence
  Description of Artificial Sequence: Synthetic oligonucleotide
  Target: LAMA2; (-) strand; PAM type: YTN; PAM sequence: TTT
tcatgaaataagcctggaac

SEQ ID NO: 249575 - DNA, 20 bp, Artificial Sequence
  Description of Artificial Sequence: Synthetic oligonucleotide
  Target: LAMA2; (-) strand; PAM type: YTN; PAM sequence: CTT
ttcatgaaataagcctggaa

SEQ ID NO: 249576 - DNA, 20 bp, Artificial Sequence
  Description of Artificial Sequence: Synthetic oligonucleotide
  Target: LAMA2; (-) strand; PAM type: YTN; PAM sequence: CTG
gagaggaaatccttttcatg

SEQ ID NO: 249577 - DNA, 20 bp, Artificial Sequence
  Description of Artificial Sequence: Synthetic oligonucleotide
  Target: LAMA2; (-) strand; PAM type: YTN; PAM sequence: TTC
tggagaggaaatccttttca

SEQ ID NO: 249578 - DNA, 20 bp, Artificial Sequence
  Description of Artificial Sequence: Synthetic oligonucleotide
  Target: LAMA2; (-) strand; PAM type: YTN; PAM sequence: TTT
ctggagaggaaatccttttc

SEQ ID NO: 249579 - DNA, 20 bp, Artificial Sequence
  Description of Artificial Sequence: Synthetic oligonucleotide
  Target: LAMA2; (-) strand; PAM type: YTN; PAM sequence: TTG
aggataatgtttctggagag

SEQ ID NO: 249580 - DNA, 20 bp, Artificial Sequence
  Description of Artificial Sequence: Synthetic oligonucleotide
  Target: LAMA2; (-) strand; PAM type: YTN; PAM sequence: CTA
ttgaggataatgtttctgga

SEQ ID NO: 249581 - DNA, 20 bp, Artificial Sequence
  Description of Artificial Sequence: Synthetic oligonucleotide
  Target: LAMA2; (-) strand; PAM type: YTN; PAM sequence: TTG
aggaatgaaggatgggataa

SEQ ID NO: 249582 - DNA, 20 bp, Artificial Sequence
  Description of Artificial Sequence: Synthetic oligonucleotide
  Target: LAMA2; (-) strand; PAM type: YTN; PAM sequence: CTC
aagaaatatgaattgaggaa

SEQ ID NO: 249583 - DNA, 20 bp, Artificial Sequence
  Description of Artificial Sequence: Synthetic oligonucleotide
  Target: LAMA2; (-) strand; PAM type: YTN; PAM sequence: CTC
aatctcaagaaatatgaatt

SEQ ID NO: 249584 - DNA, 20 bp, Artificial Sequence
  Description of Artificial Sequence: Synthetic oligonucleotide
  Target: LAMA2; (-) strand; PAM type: YTN; PAM sequence: CTC
tcaatctcaagaaatatgaa

SEQ ID NO: 249585 - DNA, 20 bp, Artificial Sequence
  Description of Artificial Sequence: Synthetic oligonucleotide
  Target: LAMA2; (-) strand; PAM type: YTN; PAM sequence: TTC
cctctcaatctcaagaaata

SEQ ID NO: 249586 - DNA, 20 bp, Artificial Sequence
  Description of Artificial Sequence: Synthetic oligonucleotide
  Target: LAMA2; (-) strand; PAM type: YTN; PAM sequence: TTT
ccctctcaatctcaagaaat

SEQ ID NO: 249587 - DNA, 20 bp, Artificial Sequence
  Description of Artificial Sequence: Synthetic oligonucleotide
  Target: LAMA2; (-) strand; PAM type: YTN; PAM sequence: TTT
tccctctcaatctcaagaaa

SEQ ID NO: 249588 - DNA, 20 bp, Artificial Sequence
  Description of Artificial Sequence: Synthetic oligonucleotide
  Target: LAMA2; (-) strand; PAM type: YTN; PAM sequence: TTT
ttccctctcaatctcaagaa

SEQ ID NO: 249589 - DNA, 20 bp, Artificial Sequence
  Description of Artificial Sequence: Synthetic oligonucleotide
  Target: LAMA2; (-) strand; PAM type: YTN; PAM sequence: TTT
tttccctctcaatctcaaga

SEQ ID NO: 249590 - DNA, 20 bp, Artificial Sequence
  Description of Artificial Sequence: Synthetic oligonucleotide
  Target: LAMA2; (-) strand; PAM type: YTN; PAM sequence: TTT
ttttccctctcaatctcaag

SEQ ID NO: 249591 - DNA, 20 bp, Artificial Sequence
  Description of Artificial Sequence: Synthetic oligonucleotide
  Target: LAMA2; (-) strand; PAM type: YTN; PAM sequence: TTT
tttttccctctcaatctcaa

SEQ ID NO: 249592 - DNA, 20 bp, Artificial Sequence
  Description of Artificial Sequence: Synthetic oligonucleotide
  Target: LAMA2; (-) strand; PAM type: YTN; PAM sequence: TTT
ttttttccctctcaatctca

SEQ ID NO: 249593 - DNA, 20 bp, Artificial Sequence
  Description of Artificial Sequence: Synthetic oligonucleotide
  Target: LAMA2; (-) strand; PAM type: YTN; PAM sequence: CTT
tttttttccctctcaatctc

SEQ ID NO: 249594 - DNA, 20 bp, Artificial Sequence
  Description of Artificial Sequence: Synthetic oligonucleotide
  Target: LAMA2; (-) strand; PAM type: YTN; PAM sequence: CTC
tttttttttccctctcaatc

SEQ ID NO: 249595 - DNA, 20 bp, Artificial Sequence
  Description of Artificial Sequence: Synthetic oligonucleotide
  Target: LAMA2; (-) strand; PAM type: YTN; PAM sequence: CTG
gcctctttttttttccctct

SEQ ID NO: 249596 - DNA, 20 bp, Artificial Sequence
  Description of Artificial Sequence: Synthetic oligonucleotide
  Target: LAMA2; (-) strand; PAM type: YTN; PAM sequence: TTG
tggtctggcctctttttttt

SEQ ID NO: 249597 - DNA, 20 bp, Artificial Sequence
  Description of Artificial Sequence: Synthetic oligonucleotide
  Target: LAMA2; (-) strand; PAM type: YTN; PAM sequence: CTT
gtggtctggcctcttttttt

SEQ ID NO: 249598 - DNA, 20 bp, Artificial Sequence
  Description of Artificial Sequence: Synthetic oligonucleotide
  Target: LAMA2; (-) strand; PAM type: YTN; PAM sequence: CTA
cttgtggtctggcctctttt

SEQ ID NO: 249599 - DNA, 20 bp, Artificial Sequence
  Description of Artificial Sequence: Synthetic oligonucleotide
  Target: LAMA2; (-) strand; PAM type: YTN; PAM sequence: TTA
gcagtaggctacttgtggtc

SEQ ID NO: 249600 - DNA, 20 bp, Artificial Sequence
  Description of Artificial Sequence: Synthetic oligonucleotide
  Target: LAMA2; (-) strand; PAM type: YTN; PAM sequence: TTT
agcagtaggctacttgtggt

SEQ ID NO: 249601 - DNA, 20 bp, Artificial Sequence
  Description of Artificial Sequence: Synthetic oligonucleotide
  Target: LAMA2; (-) strand; PAM type: YTN; PAM sequence: TTC
ataaaagaatttagcagtag

SEQ ID NO: 249602 - DNA, 20 bp, Artificial Sequence
  Description of Artificial Sequence: Synthetic oligonucleotide
  Target: LAMA2; (-) strand; PAM type: YTN; PAM sequence: CTT
cataaaagaatttagcagta

SEQ ID NO: 249603 - DNA, 20 bp, Artificial Sequence
  Description of Artificial Sequence: Synthetic oligonucleotide
  Target: LAMA2; (-) strand; PAM type: YTN; PAM sequence: CTA
agcttcataaaagaatttag

SEQ ID NO: 249604 - DNA, 20 bp, Artificial Sequence
  Description of Artificial Sequence: Synthetic oligonucleotide
  Target: LAMA2; (-) strand; PAM type: YTN; PAM sequence: TTC
ataaaactaagcttcataaa

SEQ ID NO: 249605 - DNA, 20 bp, Artificial Sequence
  Description of Artificial Sequence: Synthetic oligonucleotide
  Target: LAMA2; (-) strand; PAM type: YTN; PAM sequence: CTA
aaaggtaattcataaaacta

SEQ ID NO: 249606 - DNA, 20 bp, Artificial Sequence
  Description of Artificial Sequence: Synthetic oligonucleotide
  Target: LAMA2; (-) strand; PAM type: YTN; PAM sequence: CTG
gagaaggctaaaaggtaatt

SEQ ID NO: 249607 - DNA, 20 bp, Artificial Sequence
  Description of Artificial Sequence: Synthetic oligonucleotide
  Target: LAMA2; (-) strand; PAM type: YTN; PAM sequence: TTC
ccacatgactggagaaggct

SEQ ID NO: 249608 - DNA, 20 bp, Artificial Sequence
  Description of Artificial Sequence: Synthetic oligonucleotide
  Target: LAMA2; (-) strand; PAM type: YTN; PAM sequence: TTT
cccacatgactggagaaggc

SEQ ID NO: 249609 - DNA, 20 bp, Artificial Sequence
  Description of Artificial Sequence: Synthetic oligonucleotide
  Target: LAMA2; (-) strand; PAM type: YTN; PAM sequence: TTT
tcccacatgactggagaagg

SEQ ID NO: 249610 - DNA, 20 bp, Artificial Sequence
  Description of Artificial Sequence: Synthetic oligonucleotide
  Target: LAMA2; (-) strand; PAM type: YTN; PAM sequence: TTA
atgaggcaggaaagttttcc

SEQ ID NO: 249611 - DNA, 20 bp, Artificial Sequence
  Description of Artificial Sequence: Synthetic oligonucleotide
  Target: LAMA2; (-) strand; PAM type: YTN; PAM sequence: TTT
aatgaggcaggaaagttttc

SEQ ID NO: 249612 - DNA, 20 bp, Artificial Sequence
  Description of Artificial Sequence: Synthetic oligonucleotide
  Target: LAMA2; (-) strand; PAM type: YTN; PAM sequence: TTA
aagatttaatgaggcaggaa

SEQ ID NO: 249613 - DNA, 20 bp, Artificial Sequence
  Description of Artificial Sequence: Synthetic oligonucleotide
  Target: LAMA2; (-) strand; PAM type: YTN; PAM sequence: TTG
cattaaagatttaatgaggc

SEQ ID NO: 249614 - DNA, 20 bp, Artificial Sequence
  Description of Artificial Sequence: Synthetic oligonucleotide
  Target: LAMA2; (-) strand; PAM type: YTN; PAM sequence: CTA
atgtcacaaataacaataca

SEQ ID NO: 249615 - DNA, 20 bp, Artificial Sequence
  Description of Artificial Sequence: Synthetic oligonucleotide
  Target: LAMA2; (-) strand; PAM type: YTN; PAM sequence: CTA
tgcaatatataacctaatgt

SEQ ID NO: 249616 - DNA, 20 bp, Artificial Sequence
  Description of Artificial Sequence: Synthetic oligonucleotide
  Target: LAMA2; (-) strand; PAM type: YTN; PAM sequence: TTA
ctatgcaatatataacctaa

SEQ ID NO: 249617 - DNA, 20 bp, Artificial Sequence
  Description of Artificial Sequence: Synthetic oligonucleotide
  Target: LAMA2; (-) strand; PAM type: YTN; PAM sequence: TTA
tagttactatgcaatatata

SEQ ID NO: 249618 - DNA, 20 bp, Artificial Sequence
  Description of Artificial Sequence: Synthetic oligonucleotide
  Target: LAMA2; (-) strand; PAM type: YTN; PAM sequence: TTG
caagtaatattatagttact

SEQ ID NO: 249619 - DNA, 20 bp, Artificial Sequence
  Description of Artificial Sequence: Synthetic oligonucleotide
  Target: LAMA2; (-) strand; PAM type: YTN; PAM sequence: TTT
gcaagtaatattatagttac

SEQ ID NO: 249620 - DNA, 20 bp, Artificial Sequence
  Description of Artificial Sequence: Synthetic oligonucleotide
  Target: LAMA2; (-) strand; PAM type: YTN; PAM sequence: TTG
tttgcaagtaatattatagt

SEQ ID NO: 249621 - DNA, 20 bp, Artificial Sequence
  Description of Artificial Sequence: Synthetic oligonucleotide
  Target: LAMA2; (-) strand; PAM type: YTN; PAM sequence: CTT
gtttgcaagtaatattatag

SEQ ID NO: 249622 - DNA, 20 bp, Artificial Sequence
  Description of Artificial Sequence: Synthetic oligonucleotide
  Target: LAMA2; (-) strand; PAM type: YTN; PAM sequence: TTC
agggggaaaaaccagcttgt

SEQ ID NO: 249623 - DNA, 20 bp, Artificial Sequence
  Description of Artificial Sequence: Synthetic oligonucleotide
  Target: LAMA2; (-) strand; PAM type: YTN; PAM sequence: CTT
cagggggaaaaaccagcttg

SEQ ID NO: 249624 - DNA, 20 bp, Artificial Sequence
  Description of Artificial Sequence: Synthetic oligonucleotide
  Target: LAMA2; (-) strand; PAM type: YTN; PAM sequence: CTA
ccttcagggggaaaaaccag

SEQ ID NO: 249625 - DNA, 20 bp, Artificial Sequence
  Description of Artificial Sequence: Synthetic oligonucleotide
  Target: LAMA2; (-) strand; PAM type: YTN; PAM sequence: TTC
taccttcagggggaaaaacc

SEQ ID NO: 249626 - DNA, 20 bp, Artificial Sequence
  Description of Artificial Sequence: Synthetic oligonucleotide
  Target: LAMA2; (-) strand; PAM type: YTN; PAM sequence: TTA
attctaccttcagggggaaa

SEQ ID NO: 249627 - DNA, 20 bp, Artificial Sequence
  Description of Artificial Sequence: Synthetic oligonucleotide
  Target: LAMA2; (-) strand; PAM type: YTN; PAM sequence: TTT
aattctaccttcagggggaa

SEQ ID NO: 249628 - DNA, 20 bp, Artificial Sequence
  Description of Artificial Sequence: Synthetic oligonucleotide
  Target: LAMA2; (-) strand; PAM type: YTN; PAM sequence: TTT
taattctaccttcaggggga

SEQ ID NO: 249629 - DNA, 20 bp, Artificial Sequence
  Description of Artificial Sequence: Synthetic oligonucleotide
  Target: LAMA2; (-) strand; PAM type: YTN; PAM sequence: CTG
ttttaattctaccttcaggg

SEQ ID NO: 249630 - DNA, 20 bp, Artificial Sequence
  Description of Artificial Sequence: Synthetic oligonucleotide
  Target: LAMA2; (-) strand; PAM type: YTN; PAM sequence: TTC
ccatgagtacctgttttaat

SEQ ID NO: 249631 - DNA, 20 bp, Artificial Sequence
  Description of Artificial Sequence: Synthetic oligonucleotide
  Target: LAMA2; (-) strand; PAM type: YTN; PAM sequence: TTT
cccatgagtacctgttttaa

SEQ ID NO: 249632 - DNA, 20 bp, Artificial Sequence
  Description of Artificial Sequence: Synthetic oligonucleotide
  Target: LAMA2; (-) strand; PAM type: YTN; PAM sequence: CTG
tttcccatgagtacctgttt

SEQ ID NO: 249633 - DNA, 20 bp, Artificial Sequence
  Description of Artificial Sequence: Synthetic oligonucleotide
  Target: LAMA2; (-) strand; PAM type: YTN; PAM sequence: TTA
agaaaagaagaacacaagta

SEQ ID NO: 249634 - DNA, 20 bp, Artificial Sequence
  Description of Artificial Sequence: Synthetic oligonucleotide
  Target: LAMA2; (-) strand; PAM type: YTN; PAM sequence: TTC
accccattaagaaaagaaga

SEQ ID NO: 249635 - DNA, 20 bp, Artificial Sequence
  Description of Artificial Sequence: Synthetic oligonucleotide
  Target: LAMA2; (-) strand; PAM type: YTN; PAM sequence: CTT
caccccattaagaaaagaag

SEQ ID NO: 249636 - DNA, 20 bp, Artificial Sequence
  Description of Artificial Sequence: Synthetic oligonucleotide
  Target: LAMA2; (-) strand; PAM type: YTN; PAM sequence: TTC
agcttcaccccattaagaaa

SEQ ID NO: 249637 - DNA, 20 bp, Artificial Sequence
  Description of Artificial Sequence: Synthetic oligonucleotide
  Target: LAMA2; (-) strand; PAM type: YTN; PAM sequence: CTT
cagcttcaccccattaagaa

SEQ ID NO: 249638 - DNA, 20 bp, Artificial Sequence
  Description of Artificial Sequence: Synthetic oligonucleotide
  Target: LAMA2; (-) strand; PAM type: YTN; PAM sequence: TTC
ttcagcttcaccccattaag

SEQ ID NO: 249639 - DNA, 20 bp, Artificial Sequence
  Description of Artificial Sequence: Synthetic oligonucleotide
  Target: LAMA2; (-) strand; PAM type: YTN; PAM sequence: CTG
ttcttcagcttcaccccatt

SEQ ID NO: 249640 - DNA, 20 bp, Artificial Sequence
  Description of Artificial Sequence: Synthetic oligonucleotide
  Target: LAMA2; (-) strand; PAM type: YTN; PAM sequence: TTC
ctgttcttcagcttcacccc

SEQ ID NO: 249641 - DNA, 20 bp, Artificial Sequence
  Description of Artificial Sequence: Synthetic oligonucleotide
  Target: LAMA2; (-) strand; PAM type: YTN; PAM sequence: TTT
cctgttcttcagcttcaccc

SEQ ID NO: 249642 - DNA, 20 bp, Artificial Sequence
  Description of Artificial Sequence: Synthetic oligonucleotide
  Target: LAMA2; (-) strand; PAM type: YTN; PAM sequence: CTT
tcctgttcttcagcttcacc

SEQ ID NO: 249643 - DNA, 20 bp, Artificial Sequence
  Description of Artificial Sequence: Synthetic oligonucleotide
  Target: LAMA2; (-) strand; PAM type: YTN; PAM sequence: TTC
actttcctgttcttcagctt

SEQ ID NO: 249644 - DNA, 20 bp, Artificial Sequence
  Description of Artificial Sequence: Synthetic oligonucleotide
  Target: LAMA2; (-) strand; PAM type: YTN; PAM sequence: CTA
agccattcactttcctgttc

SEQ ID NO: 249645 - DNA, 20 bp, Artificial Sequence
  Description of Artificial Sequence: Synthetic oligonucleotide
  Target: LAMA2; (-) strand; PAM type: YTN; PAM sequence: CTA
ggctaagccattcactttcc

SEQ ID NO: 249646 - DNA, 20 bp, Artificial Sequence
  Description of Artificial Sequence: Synthetic oligonucleotide
  Target: LAMA2; (-) strand; PAM type: YTN; PAM sequence: TTC
taggctaagccattcacttt

SEQ ID NO: 249647 - DNA, 20 bp, Artificial Sequence
  Description of Artificial Sequence: Synthetic oligonucleotide
  Target: LAMA2; (-) strand; PAM type: YTN; PAM sequence: CTG
gagatggttctaggctaagc

SEQ ID NO: 249648 - DNA, 20 bp, Artificial Sequence
  Description of Artificial Sequence: Synthetic oligonucleotide
  Target: LAMA2; (-) strand; PAM type: YTN; PAM sequence: TTC
ctggagatggttctaggcta

SEQ ID NO: 249649 - DNA, 20 bp, Artificial Sequence
  Description of Artificial Sequence: Synthetic oligonucleotide
  Target: LAMA2; (-) strand; PAM type: YTN; PAM sequence: CTC
cattcctggagatggttcta

SEQ ID NO: 249650 - DNA, 20 bp, Artificial Sequence
  Description of Artificial Sequence: Synthetic oligonucleotide
  Target: LAMA2; (-) strand; PAM type: YTN; PAM sequence: TTA
cctccattcctggagatggt

SEQ ID NO: 249651 - DNA, 20 bp, Artificial Sequence
  Description of Artificial Sequence: Synthetic oligonucleotide
  Target: LAMA2; (-) strand; PAM type: YTN; PAM sequence: TTT
acctccattcctggagatgg

SEQ ID NO: 249652 - DNA, 20 bp, Artificial Sequence
  Description of Artificial Sequence: Synthetic oligonucleotide
  Target: LAMA2; (-) strand; PAM type: YTN; PAM sequence: CTG
caggaaaaaatttacctcca

SEQ ID NO: 249653 - DNA, 20 bp, Artificial Sequence
  Description of Artificial Sequence: Synthetic oligonucleotide
  Target: LAMA2; (-) strand; PAM type: YTN; PAM sequence: TTG
agaaggcactgcaggaaaaa

SEQ ID NO: 249654 - DNA, 20 bp, Artificial Sequence
  Description of Artificial Sequence: Synthetic oligonucleotide
  Target: LAMA2; (-) strand; PAM type: YTN; PAM sequence: TTC
agatatcaaattgagaaggc

SEQ ID NO: 249655 - DNA, 20 bp, Artificial Sequence
  Description of Artificial Sequence: Synthetic oligonucleotide
  Target: LAMA2; (-) strand; PAM type: YTN; PAM sequence: TTC
agggagattcagatatcaaa

SEQ ID NO: 249656 - DNA, 20 bp, Artificial Sequence
  Description of Artificial Sequence: Synthetic oligonucleotide
  Target: LAMA2; (-) strand; PAM type: YTN; PAM sequence: CTT
cagggagattcagatatcaa

SEQ ID NO: 249657 - DNA, 20 bp, Artificial Sequence
  Description of Artificial Sequence: Synthetic oligonucleotide
  Target: LAMA2; (-) strand; PAM type: YTN; PAM sequence: CTC
ttcagggagattcagatatc

SEQ ID NO: 249658 - DNA, 20 bp, Artificial Sequence
  Description of Artificial Sequence: Synthetic oligonucleotide
  Target: LAMA2; (-) strand; PAM type: YTN; PAM sequence: TTC
tcttcagggagattcagata

SEQ ID NO: 249659 - DNA, 20 bp, Artificial Sequence
  Description of Artificial Sequence: Synthetic oligonucleotide
  Target: LAMA2; (-) strand; PAM type: YTN; PAM sequence: CTA
aggcaaattctcttcaggga

SEQ ID NO: 249660 - DNA, 20 bp, Artificial Sequence
  Description of Artificial Sequence: Synthetic oligonucleotide
  Target: LAMA2; (-) strand; PAM type: YTN; PAM sequence: CTA
ctaaggcaaattctcttcag

SEQ ID NO: 249661 - DNA, 20 bp, Artificial Sequence
  Description of Artificial Sequence: Synthetic oligonucleotide
  Target: LAMA2; (-) strand; PAM type: YTN; PAM sequence: CTC
catatctactaaggcaaatt

SEQ ID NO: 249662 - DNA, 20 bp, Artificial Sequence
  Description of Artificial Sequence: Synthetic oligonucleotide
  Target: LAMA2; (-) strand; PAM type: YTN; PAM sequence: TTC
tccatatctactaaggcaaa

SEQ ID NO: 249663 - DNA, 20 bp, Artificial Sequence
  Description of Artificial Sequence: Synthetic oligonucleotide
  Target: LAMA2; (-) strand; PAM type: YTN; PAM sequence: TTT
ctccatatctactaaggcaa

SEQ ID NO: 249664 - DNA, 20 bp, Artificial Sequence
  Description of Artificial Sequence: Synthetic oligonucleotide
  Target: LAMA2; (-) strand; PAM type: YTN; PAM sequence: CTT
tctccatatctactaaggca

SEQ ID NO: 249665 - DNA, 20 bp, Artificial Sequence
  Description of Artificial Sequence: Synthetic oligonucleotide
  Target: LAMA2; (-) strand; PAM type: YTN; PAM sequence: CTC
tttctccatatctactaagg

SEQ ID NO: 249666 - DNA, 20 bp, Artificial Sequence
  Description of Artificial Sequence: Synthetic oligonucleotide
  Target: LAMA2; (-) strand; PAM type: YTN; PAM sequence: TTC
cctctttctccatatctact

SEQ ID NO: 249667 - DNA, 20 bp, Artificial Sequence
  Description of Artificial Sequence: Synthetic oligonucleotide
  Target: LAMA2; (-) strand; PAM type: YTN; PAM sequence: TTT
ccctctttctccatatctac

SEQ ID NO: 249668 - DNA, 20 bp, Artificial Sequence
  Description of Artificial Sequence: Synthetic oligonucleotide
  Target: LAMA2; (-) strand; PAM type: YTN; PAM sequence: TTT
tccctctttctccatatcta

SEQ ID NO: 249669 - DNA, 20 bp, Artificial Sequence
  Description of Artificial Sequence: Synthetic oligonucleotide
  Target: LAMA2; (-) strand; PAM type: YTN; PAM sequence: CTT
ttccctctttctccatatct

SEQ ID NO: 249670 - DNA, 20 bp, Artificial Sequence
  Description of Artificial Sequence: Synthetic oligonucleotide
  Target: LAMA2; (-) strand; PAM type: YTN; PAM sequence: TTG
gccttttccctctttctcca

SEQ ID NO: 249671 - DNA, 20 bp, Artificial Sequence
  Description of Artificial Sequence: Synthetic oligonucleotide
  Target: LAMA2; (-) strand; PAM type: YTN; PAM sequence: CTT
ggccttttccctctttctcc

SEQ ID NO: 249672 - DNA, 20 bp, Artificial Sequence
  Description of Artificial Sequence: Synthetic oligonucleotide
  Target: LAMA2; (-) strand; PAM type: YTN; PAM sequence: CTC
caaaggcttggccttttccc

SEQ ID NO: 249673 - DNA, 20 bp, Artificial Sequence
  Description of Artificial Sequence: Synthetic oligonucleotide
  Target: LAMA2; (-) strand; PAM type: YTN; PAM sequence: TTC
ataagggtctccaaaggctt

SEQ ID NO: 249674 - DNA, 20 bp, Artificial Sequence
  Description of Artificial Sequence: Synthetic oligonucleotide
  Target: LAMA2; (-) strand; PAM type: YTN; PAM sequence: TTT
cataagggtctccaaaggct

SEQ ID NO: 249675 - DNA, 20 bp, Artificial Sequence
  Description of Artificial Sequence: Synthetic oligonucleotide
  Target: LAMA2; (-) strand; PAM type: YTN; PAM sequence: TTC
catttcataagggtctccaa

SEQ ID NO: 249676 - DNA, 20 bp, Artificial Sequence
  Description of Artificial Sequence: Synthetic oligonucleotide
  Target: LAMA2; (-) strand; PAM type: YTN; PAM sequence: TTC
attccatttcataagggtct

SEQ ID NO: 249677 - DNA, 20 bp, Artificial Sequence
  Description of Artificial Sequence: Synthetic oligonucleotide
  Target: LAMA2; (-) strand; PAM type: YTN; PAM sequence: TTA
gtgagagcggttcattccat

SEQ ID NO: 249678 - DNA, 20 bp, Artificial Sequence
  Description of Artificial Sequence: Synthetic oligonucleotide
  Target: LAMA2; (-) strand; PAM type: YTN; PAM sequence: TTT
agtgagagcggttcattcca

SEQ ID NO: 249679 - DNA, 20 bp, Artificial Sequence
  Description of Artificial Sequence: Synthetic oligonucleotide
  Target: LAMA2; (-) strand; PAM type: YTN; PAM sequence: TTC
aatacaaagagaaagtgaat

SEQ ID NO: 249680 - DNA, 20 bp, Artificial Sequence
  Description of Artificial Sequence: Synthetic oligonucleotide
  Target: LAMA2; (-) strand; PAM type: YTN; PAM sequence: TTT
caatacaaagagaaagtgaa

SEQ ID NO: 249681 - DNA, 20 bp, Artificial Sequence
  Description of Artificial Sequence: Synthetic oligonucleotide
  Target: LAMA2; (-) strand; PAM type: YTN; PAM sequence: TTT
tcaatacaaagagaaagtga

SEQ ID NO: 249682 - DNA, 20 bp, Artificial Sequence
  Description of Artificial Sequence: Synthetic oligonucleotide
  Target: LAMA2; (-) strand; PAM type: YTN; PAM sequence: CTT
ttcaatacaaagagaaagtg

SEQ ID NO: 249683 - DNA, 20 bp, Artificial Sequence
  Description of Artificial Sequence: Synthetic oligonucleotide
  Target: LAMA2; (-) strand; PAM type: YTN; PAM sequence: CTC
ttttcaatacaaagagaaag

SEQ ID NO: 249684 - DNA, 20 bp, Artificial Sequence
  Description of Artificial Sequence: Synthetic oligonucleotide
  Target: LAMA2; (-) strand; PAM type: YTN; PAM sequence: TTA
tatctcttttcaatacaaag

SEQ ID NO: 249685 - DNA, 20 bp, Artificial Sequence
  Description of Artificial Sequence: Synthetic oligonucleotide
  Target: LAMA2; (-) strand; PAM type: YTN; PAM sequence: CTA
gggatgaaaattatatctct

SEQ ID NO: 249686 - DNA, 20 bp, Artificial Sequence
  Description of Artificial Sequence: Synthetic oligonucleotide
  Target: LAMA2; (-) strand; PAM type: YTN; PAM sequence: TTA
ctagggatgaaaattatatc

SEQ ID NO: 249687 - DNA, 20 bp, Artificial Sequence
  Description of Artificial Sequence: Synthetic oligonucleotide
  Target: LAMA2; (-) strand; PAM type: YTN; PAM sequence: TTT
actagggatgaaaattatat

SEQ ID NO: 249688 - DNA, 20 bp, Artificial Sequence
  Description of Artificial Sequence: Synthetic oligonucleotide
  Target: LAMA2; (-) strand; PAM type: YTN; PAM sequence: CTA
tatttactagggatgaaaat

SEQ ID NO: 249689 - DNA, 20 bp, Artificial Sequence
  Description of Artificial Sequence: Synthetic oligonucleotide
  Target: LAMA2; (-) strand; PAM type: YTN; PAM sequence: TTC
gactatatttactagggatg

SEQ ID NO: 249690 - DNA, 20 bp, Artificial Sequence
  Description of Artificial Sequence: Synthetic oligonucleotide
  Target: LAMA2; (-) strand; PAM type: YTN; PAM sequence: CTG
gatggattcgactatattta

SEQ ID NO: 249691 - DNA, 20 bp, Artificial Sequence
  Description of Artificial Sequence: Synthetic oligonucleotide
  Target: LAMA2; (-) strand; PAM type: YTN; PAM sequence: TTA
ctggatggattcgactatat

SEQ ID NO: 249692 - DNA, 20 bp, Artificial Sequence
  Description of Artificial Sequence: Synthetic oligonucleotide
  Target: LAMA2; (-) strand; PAM type: YTN; PAM sequence: TTA
tattactggatggattcgac

SEQ ID NO: 249693 - DNA, 20 bp, Artificial Sequence
  Description of Artificial Sequence: Synthetic oligonucleotide
  Target: LAMA2; (-) strand; PAM type: YTN; PAM sequence: CTT
atattactggatggattcga

SEQ ID NO: 249694 - DNA, 20 bp, Artificial Sequence
  Description of Artificial Sequence: Synthetic oligonucleotide
  Target: LAMA2; (-) strand; PAM type: YTN; PAM sequence: TTC
ttatattactggatggattc

SEQ ID NO: 249695 - DNA, 20 bp, Artificial Sequence
  Description of Artificial Sequence: Synthetic oligonucleotide
  Target: LAMA2; (-) strand; PAM type: YTN; PAM sequence: TTG
aggcaattcttatattactg

SEQ ID NO: 249696 - DNA, 20 bp, Artificial Sequence
  Description of Artificial Sequence: Synthetic oligonucleotide
  Target: LAMA2; (-) strand; PAM type: YTN; PAM sequence: TTT
gaggcaattcttatattact

SEQ ID NO: 249697 - DNA, 20 bp, Artificial Sequence
  Description of Artificial Sequence: Synthetic oligonucleotide
  Target: LAMA2; (-) strand; PAM type: YTN; PAM sequence: CTT
tgaggcaattcttatattac

SEQ ID NO: 249698 - DNA, 20 bp, Artificial Sequence
  Description of Artificial Sequence: Synthetic oligonucleotide
  Target: LAMA2; (-) strand; PAM type: YTN; PAM sequence: TTC
actttgaggcaattcttata

SEQ ID NO: 249699 - DNA, 20 bp, Artificial Sequence
  Description of Artificial Sequence: Synthetic oligonucleotide
  Target: LAMA2; (-) strand; PAM type: YTN; PAM sequence: TTA
gttcactttgaggcaattct

SEQ ID NO: 249700 - DNA, 20 bp, Artificial Sequence
  Description of Artificial Sequence: Synthetic oligonucleotide
  Target: LAMA2; (-) strand; PAM type: YTN; PAM sequence: TTT
agttcactttgaggcaattc

SEQ ID NO: 249701 - DNA, 20 bp, Artificial Sequence
  Description of Artificial Sequence: Synthetic oligonucleotide
  Target: LAMA2; (-) strand; PAM type: YTN; PAM sequence: TTT
tagttcactttgaggcaatt

SEQ ID NO: 249702 - DNA, 20 bp, Artificial Sequence
  Description of Artificial Sequence: Synthetic oligonucleotide
  Target: LAMA2; (-) strand; PAM type: YTN; PAM sequence: TTC
cacaggtaggagtaagtgca

SEQ ID NO: 249703 - DNA, 20 bp, Artificial Sequence
  Description of Artificial Sequence: Synthetic oligonucleotide
  Target: LAMA2; (-) strand; PAM type: YTN; PAM sequence: TTT
ccacaggtaggagtaagtgc

SEQ ID NO: 249704 - DNA, 20 bp, Artificial Sequence
  Description of Artificial Sequence: Synthetic oligonucleotide
  Target: LAMA2; (-) strand; PAM type: YTN; PAM sequence: TTT
tccacaggtaggagtaagtg

SEQ ID NO: 249705 - DNA, 20 bp, Artificial Sequence
  Description of Artificial Sequence: Synthetic oligonucleotide
  Target: LAMA2; (-) strand; PAM type: YTN; PAM sequence: CTA
gagaaatatggttttccaca

SEQ ID NO: 249706 - DNA, 20 bp, Artificial Sequence
  Description of Artificial Sequence: Synthetic oligonucleotide
  Target: LAMA2; (-) strand; PAM type: YTN; PAM sequence: TTG
gctagagaaatatggttttc

SEQ ID NO: 249707 - DNA, 20 bp, Artificial Sequence
  Description of Artificial Sequence: Synthetic oligonucleotide
  Target: LAMA2; (-) strand; PAM type: YTN; PAM sequence: CTT
ggctagagaaatatggtttt

SEQ ID NO: 249708 - DNA, 20 bp, Artificial Sequence
  Description of Artificial Sequence: Synthetic oligonucleotide
  Target: LAMA2; (-) strand; PAM type: YTN; PAM sequence: CTC
ttggctagagaaatatggtt

SEQ ID NO: 249709 - DNA, 20 bp, Artificial Sequence
  Description of Artificial Sequence: Synthetic oligonucleotide
  Target: LAMA2; (-) strand; PAM type: YTN; PAM sequence: TTC
tcttggctagagaaatatgg

SEQ ID NO: 249710 - DNA, 20 bp, Artificial Sequence
  Description of Artificial Sequence: Synthetic oligonucleotide
  Target: LAMA2; (-) strand; PAM type: YTN; PAM sequence: TTG
ttctcttggctagagaaata

SEQ ID NO: 249711 - DNA, 20 bp, Artificial Sequence
  Description of Artificial Sequence: Synthetic oligonucleotide
  Target: LAMA2; (-) strand; PAM type: YTN; PAM sequence: CTG
tcattgttctcttggctaga

SEQ ID NO: 249712 - DNA, 20 bp, Artificial Sequence
  Description of Artificial Sequence: Synthetic oligonucleotide
  Target: LAMA2; (-) strand; PAM type: YTN; PAM sequence: CTA
atctgtcattgttctcttgg

SEQ ID NO: 249713 - DNA, 20 bp, Artificial Sequence
  Description of Artificial Sequence: Synthetic oligonucleotide
  Target: LAMA2; (-) strand; PAM type: YTN; PAM sequence: TTA
ggaactaatctgtcattgtt

SEQ ID NO: 249714 - DNA, 20 bp, Artificial Sequence
  Description of Artificial Sequence: Synthetic oligonucleotide
  Target: LAMA2; (-) strand; PAM type: YTN; PAM sequence: TTT
aggaactaatctgtcattgt

SEQ ID NO: 249715 - DNA, 20 bp, Artificial Sequence
  Description of Artificial Sequence: Synthetic oligonucleotide
  Target: LAMA2; (-) strand; PAM type: YTN; PAM sequence: CTA
tttaggaactaatctgtcat

SEQ ID NO: 249716 - DNA, 20 bp, Artificial Sequence
  Description of Artificial Sequence: Synthetic oligonucleotide
  Target: LAMA2; (-) strand; PAM type: YTN; PAM sequence: CTG
ctatttaggaactaatctgt

SEQ ID NO: 249717 - DNA, 20 bp, Artificial Sequence
  Description of Artificial Sequence: Synthetic oligonucleotide
  Target: LAMA2; (-) strand; PAM type: YTN; PAM sequence: CTC
ctgctatttaggaactaatc

SEQ ID NO: 249718 - DNA, 20 bp, Artificial Sequence
  Description of Artificial Sequence: Synthetic oligonucleotide
  Target: LAMA2; (-) strand; PAM type: YTN; PAM sequence: TTC
tcctgctatttaggaactaa

SEQ ID NO: 249719 - DNA, 20 bp, Artificial Sequence
  Description of Artificial Sequence: Synthetic oligonucleotide
  Target: LAMA2; (-) strand; PAM type: YTN; PAM sequence: TTT
ctcctgctatttaggaacta

SEQ ID NO: 249720 - DNA, 20 bp, Artificial Sequence
  Description of Artificial Sequence: Synthetic oligonucleotide
  Target: LAMA2; (-) strand; PAM type: YTN; PAM sequence: TTT
tctcctgctatttaggaact

SEQ ID NO: 249721 - DNA, 20 bp, Artificial Sequence
  Description of Artificial Sequence: Synthetic oligonucleotide
  Target: LAMA2; (-) strand; PAM type: YTN; PAM sequence: TTC
attttctcctgctatttagg

SEQ ID NO: 249722 - DNA, 20 bp, Artificial Sequence
  Description of Artificial Sequence: Synthetic oligonucleotide
  Target: LAMA2; (-) strand; PAM type: YTN; PAM sequence: TTT
cattttctcctgctatttag

SEQ ID NO: 249723 - DNA, 20 bp, Artificial Sequence
  Description of Artificial Sequence: Synthetic oligonucleotide
  Target: LAMA2; (-) strand; PAM type: YTN; PAM sequence: TTC
agccaatagaacatttcatt

SEQ ID NO: 249724 - DNA, 20 bp, Artificial Sequence
  Description of Artificial Sequence: Synthetic oligonucleotide
  Target: LAMA2; (-) strand; PAM type: YTN; PAM sequence: CTG
tgtgttcagccaatagaaca

SEQ ID NO: 249725 - DNA, 20 bp, Artificial Sequence
  Description of Artificial Sequence: Synthetic oligonucleotide
  Target: LAMA2; (-) strand; PAM type: YTN; PAM sequence: TTA
cagagcactgtgtgttcagc

SEQ ID NO: 249726 - DNA, 20 bp, Artificial Sequence
  Description of Artificial Sequence: Synthetic oligonucleotide
  Target: LAMA2; (-) strand; PAM type: YTN; PAM sequence: TTT
acagagcactgtgtgttcag

SEQ ID NO: 249727 - DNA, 20 bp, Artificial Sequence
  Description of Artificial Sequence: Synthetic oligonucleotide
  Target: LAMA2; (-) strand; PAM type: YTN; PAM sequence: TTT
tacagagcactgtgtgttca

SEQ ID NO: 249728 - DNA, 20 bp, Artificial Sequence
  Description of Artificial Sequence: Synthetic oligonucleotide
  Target: LAMA2; (-) strand; PAM type: YTN; PAM sequence: CTG
attttacagagcactgtgtg

SEQ ID NO: 249729 - DNA, 20 bp, Artificial Sequence
  Description of Artificial Sequence: Synthetic oligonucleotide
  Target: LAMA2; (-) strand; PAM type: YTN; PAM sequence: CTC
tgattttacagagcactgtg

SEQ ID NO: 249730 - DNA, 20 bp, Artificial Sequence
  Description of Artificial Sequence: Synthetic oligonucleotide
  Target: LAMA2; (-) strand; PAM type: YTN; PAM sequence: TTC
tctgattttacagagcactg

SEQ ID NO: 249731 - DNA, 20 bp, Artificial Sequence
  Description of Artificial Sequence: Synthetic oligonucleotide
  Target: LAMA2; (-) strand; PAM type: YTN; PAM sequence: TTT
ctctgattttacagagcact

SEQ ID NO: 249732 - DNA, 20 bp, Artificial Sequence
  Description of Artificial Sequence: Synthetic oligonucleotide
  Target: LAMA2; (-) strand; PAM type: YTN; PAM sequence: TTG
atttctctgattttacagag

SEQ ID NO: 249733 - DNA, 20 bp, Artificial Sequence
  Description of Artificial Sequence: Synthetic oligonucleotide
  Target: LAMA2; (-) strand; PAM type: YTN; PAM sequence: TTG
gggacaatattgatttctct

SEQ ID NO: 249734 - DNA, 20 bp, Artificial Sequence
  Description of Artificial Sequence: Synthetic oligonucleotide
  Target: LAMA2; (-) strand; PAM type: YTN; PAM sequence: TTT
ggggacaatattgatttctc

SEQ ID NO: 249735 - DNA, 20 bp, Artificial Sequence
  Description of Artificial Sequence: Synthetic oligonucleotide
  Target: LAMA2; (-) strand; PAM type: YTN; PAM sequence: TTT
tggggacaatattgatttct

SEQ ID NO: 249736 - DNA, 20 bp, Artificial Sequence
  Description of Artificial Sequence: Synthetic oligonucleotide
  Target: LAMA2; (-) strand; PAM type: YTN; PAM sequence: TTC
attttggggacaatattgat

SEQ ID NO: 249737 - DNA, 20 bp, Artificial Sequence
  Description of Artificial Sequence: Synthetic oligonucleotide
  Target: LAMA2; (-) strand; PAM type: YTN; PAM sequence: TTA
gttcattttggggacaatat

SEQ ID NO: 249738 - DNA, 20 bp, Artificial Sequence
  Description of Artificial Sequence: Synthetic oligonucleotide
  Target: LAMA2; (-) strand; PAM type: YTN; PAM sequence: TTC
aaattagttcattttgggga

SEQ ID NO: 249739 - DNA, 20 bp, Artificial Sequence
  Description of Artificial Sequence: Synthetic oligonucleotide
  Target: LAMA2; (-) strand; PAM type: YTN; PAM sequence: TTT
caaattagttcattttgggg

SEQ ID NO: 249740 - DNA, 20 bp, Artificial Sequence
  Description of Artificial Sequence: Synthetic oligonucleotide
  Target: LAMA2; (-) strand; PAM type: YTN; PAM sequence: CTT
tcaaattagttcattttggg

SEQ ID NO: 249741 - DNA, 20 bp, Artificial Sequence
  Description of Artificial Sequence: Synthetic oligonucleotide
  Target: LAMA2; (-) strand; PAM type: YTN; PAM sequence: TTG
agactttcaaattagttcat

SEQ ID NO: 249742 - DNA, 20 bp, Artificial Sequence
  Description of Artificial Sequence: Synthetic oligonucleotide
  Target: LAMA2; (-) strand; PAM type: YTN; PAM sequence: TTT
gagactttcaaattagttca

SEQ ID NO: 249743 - DNA, 20 bp, Artificial Sequence
  Description of Artificial Sequence: Synthetic oligonucleotide
  Target: LAMA2; (-) strand; PAM type: YTN; PAM sequence: CTT
tgagactttcaaattagttc

SEQ ID NO: 249744 - DNA, 20 bp, Artificial Sequence
  Description of Artificial Sequence: Synthetic oligonucleotide
  Target: LAMA2; (-) strand; PAM type: YTN; PAM sequence: TTG
aacatctttgagactttcaa

SEQ ID NO: 249745 - DNA, 20 bp, Artificial Sequence
  Description of Artificial Sequence: Synthetic oligonucleotide
  Target: LAMA2; (-) strand; PAM type: YTN; PAM sequence: TTC
ataaaattgaacatctttga

SEQ ID NO: 249746 - DNA, 20 bp, Artificial Sequence
  Description of Artificial Sequence: Synthetic oligonucleotide
  Target: LAMA2; (-) strand; PAM type: YTN; PAM sequence: TTT
cataaaattgaacatctttg

SEQ ID NO: 249747 - DNA, 20 bp, Artificial Sequence
  Description of Artificial Sequence: Synthetic oligonucleotide
  Target: LAMA2; (-) strand; PAM type: YTN; PAM sequence: CTT
tcataaaattgaacatcttt

SEQ ID NO: 249748 - DNA, 20 bp, Artificial Sequence
  Description of Artificial Sequence: Synthetic oligonucleotide
  Target: LAMA2; (-) strand; PAM type: YTN; PAM sequence: TTA
cgagtctttcataaaattga

SEQ ID NO: 249749 - DNA, 20 bp, Artificial Sequence
  Description of Artificial Sequence: Synthetic oligonucleotide
  Target: LAMA2; (-) strand; PAM type: YTN; PAM sequence: TTT
acgagtctttcataaaattg

SEQ ID NO: 249750 - DNA, 20 bp, Artificial Sequence
  Description of Artificial Sequence: Synthetic oligonucleotide
  Target: LAMA2; (-) strand; PAM type: YTN; PAM sequence: TTT
tacgagtctttcataaaatt

SEQ ID NO: 249751 - DNA, 20 bp, Artificial Sequence
  Description of Artificial Sequence: Synthetic oligonucleotide
  Target: LAMA2; (-) strand; PAM type: YTN; PAM sequence: TTA
attttacgagtctttcataa

SEQ ID NO: 249752 - DNA, 20 bp, Artificial Sequence
  Description of Artificial Sequence: Synthetic oligonucleotide
  Target: LAMA2; (-) strand; PAM type: YTN; PAM sequence: TTA
ttaattttacgagtctttca

SEQ ID NO: 249753 - DNA, 20 bp, Artificial Sequence
  Description of Artificial Sequence: Synthetic oligonucleotide
  Target: LAMA2; (-) strand; PAM type: YTN; PAM sequence: TTT
attaattttacgagtctttc

SEQ ID NO: 249754 - DNA, 20 bp, Artificial Sequence
  Description of Artificial Sequence: Synthetic oligonucleotide
  Target: LAMA2; (-) strand; PAM type: YTN; PAM sequence: CTC
atttattaattttacgagtc

SEQ ID NO: 249755 - DNA, 20 bp, Artificial Sequence
  Description of Artificial Sequence: Synthetic oligonucleotide
  Target: LAMA2; (-) strand; PAM type: YTN; PAM sequence: TTG
cagactcatttattaatttt

SEQ ID NO: 249756 - DNA, 20 bp, Artificial Sequence
  Description of Artificial Sequence: Synthetic oligonucleotide
  Target: LAMA2; (-) strand; PAM type: YTN; PAM sequence: TTT
gcagactcatttattaattt

SEQ ID NO: 249757 - DNA, 20 bp, Artificial Sequence
  Description of Artificial Sequence: Synthetic oligonucleotide
  Target: LAMA2; (-) strand; PAM type: YTN; PAM sequence: CTT
tgcagactcatttattaatt

SEQ ID NO: 249758 - DNA, 20 bp, Artificial Sequence
  Description of Artificial Sequence: Synthetic oligonucleotide
  Target: LAMA2; (-) strand; PAM type: YTN; PAM sequence: TTG
gactttgcagactcatttat

SEQ ID NO: 249759 - DNA, 20 bp, Artificial Sequence
  Description of Artificial Sequence: Synthetic oligonucleotide
  Target: LAMA2; (-) strand; PAM type: YTN; PAM sequence: TTT
ggactttgcagactcattta

SEQ ID NO: 249760 - DNA, 20 bp, Artificial Sequence
  Description of Artificial Sequence: Synthetic oligonucleotide
  Target: LAMA2; (-) strand; PAM type: YTN; PAM sequence: TTT
tggactttgcagactcattt

SEQ ID NO: 249761 - DNA, 20 bp, Artificial Sequence
  Description of Artificial Sequence: Synthetic oligonucleotide
  Target: LAMA2; (-) strand; PAM type: YTN; PAM sequence: TTT
ttggactttgcagactcatt

SEQ ID NO: 249762 - DNA, 20 bp, Artificial Sequence
  Description of Artificial Sequence: Synthetic oligonucleotide
  Target: LAMA2; (-) strand; PAM type: YTN; PAM sequence: TTC
cacatttttggactttgcag

SEQ ID NO: 249763 - DNA, 20 bp, Artificial Sequence
  Description of Artificial Sequence: Synthetic oligonucleotide
  Target: LAMA2; (-) strand; PAM type: YTN; PAM sequence: TTT
ccacatttttggactttgca

SEQ ID NO: 249764 - DNA, 20 bp, Artificial Sequence
  Description of Artificial Sequence: Synthetic oligonucleotide
  Target: LAMA2; (-) strand; PAM type: YTN; PAM sequence: TTT
tccacatttttggactttgc

SEQ ID NO: 249765 - DNA, 20 bp, Artificial Sequence
  Description of Artificial Sequence: Synthetic oligonucleotide
  Target: LAMA2; (-) strand; PAM type: YTN; PAM sequence: CTG
taattttccacatttttgga

SEQ ID NO: 249766 - DNA, 20 bp, Artificial Sequence
  Description of Artificial Sequence: Synthetic oligonucleotide
  Target: LAMA2; (-) strand; PAM type: YTN; PAM sequence: CTG
caaataactgtaattttcca

SEQ ID NO: 249767 - DNA, 20 bp, Artificial Sequence
  Description of Artificial Sequence: Synthetic oligonucleotide
  Target: LAMA2; (-) strand; PAM type: YTN; PAM sequence: TTA
tacgtactgcaaataactgt

SEQ ID NO: 249768 - DNA, 20 bp, Artificial Sequence
  Description of Artificial Sequence: Synthetic oligonucleotide
  Target: LAMA2; (-) strand; PAM type: YTN; PAM sequence: TTG
gtaagttatacgtactgcaa

SEQ ID NO: 249769 - DNA, 20 bp, Artificial Sequence
  Description of Artificial Sequence: Synthetic oligonucleotide
  Target: LAMA2; (-) strand; PAM type: YTN; PAM sequence: CTT
ggtaagttatacgtactgca

SEQ ID NO: 249770 - DNA, 20 bp, Artificial Sequence
  Description of Artificial Sequence: Synthetic oligonucleotide
  Target: LAMA2; (-) strand; PAM type: YTN; PAM sequence: CTA
acaaaatataagtggtcttg

SEQ ID NO: 249771 - DNA, 20 bp, Artificial Sequence
  Description of Artificial Sequence: Synthetic oligonucleotide
  Target: LAMA2; (-) strand; PAM type: YTN; PAM sequence: TTC
taacaaaatataagtggtct

SEQ ID NO: 249772 - DNA, 20 bp, Artificial Sequence
  Description of Artificial Sequence: Synthetic oligonucleotide
  Target: LAMA2; (-) strand; PAM type: YTN; PAM sequence: TTG
aaaaattctaacaaaatata

SEQ ID NO: 249773 - DNA, 20 bp, Artificial Sequence
  Description of Artificial Sequence: Synthetic oligonucleotide
  Target: LAMA2; (-) strand; PAM type: YTN; PAM sequence: TTC
attgaaaaattctaacaaaa

SEQ ID NO: 249774 - DNA, 20 bp, Artificial Sequence
  Description of Artificial Sequence: Synthetic oligonucleotide
  Target: LAMA2; (-) strand; PAM type: YTN; PAM sequence: TTA
acattcattgaaaaattcta

SEQ ID NO: 249775 - DNA, 20 bp, Artificial Sequence
  Description of Artificial Sequence: Synthetic oligonucleotide
  Target: LAMA2; (-) strand; PAM type: YTN; PAM sequence: TTC
atccattaacattcattgaa

SEQ ID NO: 249776 - DNA, 20 bp, Artificial Sequence
  Description of Artificial Sequence: Synthetic oligonucleotide
  Target: LAMA2; (-) strand; PAM type: YTN; PAM sequence: CTA
tataaaaaaattcatccatt

SEQ ID NO: 249777 - DNA, 20 bp, Artificial Sequence
  Description of Artificial Sequence: Synthetic oligonucleotide
  Target: LAMA2; (-) strand; PAM type: YTN; PAM sequence: CTC
tatataaaaaaattcatcca

SEQ ID NO: 249778 - DNA, 20 bp, Artificial Sequence
  Description of Artificial Sequence: Synthetic oligonucleotide
  Target: LAMA2; (-) strand; PAM type: YTN; PAM sequence: TTC
caaacagggagaactctata

SEQ ID NO: 249779 - DNA, 20 bp, Artificial Sequence
  Description of Artificial Sequence: Synthetic oligonucleotide
  Target: LAMA2; (-) strand; PAM type: YTN; PAM sequence: CTA
aaagattccaaacagggaga

SEQ ID NO: 249780 - DNA, 20 bp, Artificial Sequence
  Description of Artificial Sequence: Synthetic oligonucleotide
  Target: LAMA2; (-) strand; PAM type: YTN; PAM sequence: CTG
atgcagagtcagtggcaacc

SEQ ID NO: 249781 - DNA, 20 bp, Artificial Sequence
  Description of Artificial Sequence: Synthetic oligonucleotide
  Target: LAMA2; (-) strand; PAM type: YTN; PAM sequence: TTC
caaagcctgatgcagagtca

SEQ ID NO: 249782 - DNA, 20 bp, Artificial Sequence
  Description of Artificial Sequence: Synthetic oligonucleotide
  Target: LAMA2; (-) strand; PAM type: YTN; PAM sequence: TTT
ccaaagcctgatgcagagtc

SEQ ID NO: 249783 - DNA, 20 bp, Artificial Sequence
  Description of Artificial Sequence: Synthetic oligonucleotide
  Target: LAMA2; (-) strand; PAM type: YTN; PAM sequence: TTA
gtgatatttccaaagcctga

SEQ ID NO: 249784 - DNA, 20 bp, Artificial Sequence
  Description of Artificial Sequence: Synthetic oligonucleotide
  Target: LAMA2; (-) strand; PAM type: YTN; PAM sequence: TTT
agtgatatttccaaagcctg

SEQ ID NO: 249785 - DNA, 20 bp, Artificial Sequence
  Description of Artificial Sequence: Synthetic oligonucleotide
  Target: LAMA2; (-) strand; PAM type: YTN; PAM sequence: TTT
tagtgatatttccaaagcct

SEQ ID NO: 249786 - DNA, 20 bp, Artificial Sequence
  Description of Artificial Sequence: Synthetic oligonucleotide
  Target: LAMA2; (-) strand; PAM type: YTN; PAM sequence: TTT
ttagtgatatttccaaagcc

SEQ ID NO: 249787 - DNA, 20 bp, Artificial Sequence
  Description of Artificial Sequence: Synthetic oligonucleotide
  Target: LAMA2; (-) strand; PAM type: YTN; PAM sequence: TTT
tttagtgatatttccaaagc

SEQ ID NO: 249788 - DNA, 20 bp, Artificial Sequence
  Description of Artificial Sequence: Synthetic oligonucleotide
  Target: LAMA2; (-) strand; PAM type: YTN; PAM sequence: CTA
aagaaaaaacagttttttag

SEQ ID NO: 249789 - DNA, 20 bp, Artificial Sequence
  Description of Artificial Sequence: Synthetic oligonucleotide
  Target: LAMA2; (-) strand; PAM type: YTN; PAM sequence: CTA
gtaagaagactaaagaaaaa

SEQ ID NO: 249790 - DNA, 20 bp, Artificial Sequence
  Description of Artificial Sequence: Synthetic oligonucleotide
  Target: LAMA2; (-) strand; PAM type: YTN; PAM sequence: TTG
actagtaagaagactaaaga

SEQ ID NO: 249791 - DNA, 20 bp, Artificial Sequence
  Description of Artificial Sequence: Synthetic oligonucleotide
  Target: LAMA2; (-) strand; PAM type: YTN; PAM sequence: TTT
gactagtaagaagactaaag

SEQ ID NO: 249792 - DNA, 20 bp, Artificial Sequence
  Description of Artificial Sequence: Synthetic oligonucleotide
  Target: LAMA2; (-) strand; PAM type: YTN; PAM sequence: CTG
atatttgactagtaagaaga

SEQ ID NO: 249793 - DNA, 20 bp, Artificial Sequence
  Description of Artificial Sequence: Synthetic oligonucleotide
  Target: LAMA2; (-) strand; PAM type: YTN; PAM sequence: TTA
gctgatatttgactagtaag

SEQ ID NO: 249794 - DNA, 20 bp, Artificial Sequence
  Description of Artificial Sequence: Synthetic oligonucleotide
  Target: LAMA2; (-) strand; PAM type: YTN; PAM sequence: TTT
agctgatatttgactagtaa

SEQ ID NO: 249795 - DNA, 20 bp, Artificial Sequence
  Description of Artificial Sequence: Synthetic oligonucleotide
  Target: LAMA2; (-) strand; PAM type: YTN; PAM sequence: TTG
tttagctgatatttgactag

SEQ ID NO: 249796 - DNA, 20 bp, Artificial Sequence
  Description of Artificial Sequence: Synthetic oligonucleotide
  Target: LAMA2; (-) strand; PAM type: YTN; PAM sequence: TTT
gtttagctgatatttgacta

SEQ ID NO: 249797 - DNA, 20 bp, Artificial Sequence
  Description of Artificial Sequence: Synthetic oligonucleotide
  Target: LAMA2; (-) strand; PAM type: YTN; PAM sequence: TTG
tttgtttagctgatatttga

SEQ ID NO: 249798 - DNA, 20 bp, Artificial Sequence
  Description of Artificial Sequence: Synthetic oligonucleotide
  Target: LAMA2; (-) strand; PAM type: YTN; PAM sequence: TTT
gtttgtttagctgatatttg

SEQ ID NO: 249799 - DNA, 20 bp, Artificial Sequence
  Description of Artificial Sequence: Synthetic oligonucleotide
  Target: LAMA2; (-) strand; PAM type: YTN; PAM sequence: CTT
tgtttgtttagctgatattt

SEQ ID NO: 249800 - DNA, 20 bp, Artificial Sequence
  Description of Artificial Sequence: Synthetic oligonucleotide
  Target: LAMA2; (-) strand; PAM type: YTN; PAM sequence: TTC
tttgtttgtttagctgatat

SEQ ID NO: 249801 - DNA, 20 bp, Artificial Sequence
  Description of Artificial Sequence: Synthetic oligonucleotide
  Target: LAMA2; (-) strand; PAM type: YTN; PAM sequence: TTT
ctttgtttgtttagctgata

SEQ ID NO: 249802 - DNA, 20 bp, Artificial Sequence
  Description of Artificial Sequence: Synthetic oligonucleotide
  Target: LAMA2; (-) strand; PAM type: YTN; PAM sequence: TTT
tctttgtttgtttagctgat

SEQ ID NO: 249803 - DNA, 20 bp, Artificial Sequence
  Description of Artificial Sequence: Synthetic oligonucleotide
  Target: LAMA2; (-) strand; PAM type: YTN; PAM sequence: TTA
ttttctttgtttgtttagct

SEQ ID NO: 249804 - DNA, 20 bp, Artificial Sequence
  Description of Artificial Sequence: Synthetic oligonucleotide
  Target: LAMA2; (-) strand; PAM type: YTN; PAM sequence: CTT
attttctttgtttgtttagc

SEQ ID NO: 249805 - DNA, 20 bp, Artificial Sequence
  Description of Artificial Sequence: Synthetic oligonucleotide
  Target: LAMA2; (-) strand; PAM type: YTN; PAM sequence: TTC
aaacacttattttctttgtt

SEQ ID NO: 249806 - DNA, 20 bp, Artificial Sequence
  Description of Artificial Sequence: Synthetic oligonucleotide
  Target: LAMA2; (-) strand; PAM type: YTN; PAM sequence: CTG
accattcaaacacttatttt

SEQ ID NO: 249807 - DNA, 20 bp, Artificial Sequence
  Description of Artificial Sequence: Synthetic oligonucleotide
  Target: LAMA2; (-) strand; PAM type: YTN; PAM sequence: CTC
tgaccattcaaacacttatt

SEQ ID NO: 249808 - DNA, 20 bp, Artificial Sequence
  Description of Artificial Sequence: Synthetic oligonucleotide
  Target: LAMA2; (-) strand; PAM type: YTN; PAM sequence: TTC
tctgaccattcaaacactta

SEQ ID NO: 249809 - DNA, 20 bp, Artificial Sequence
  Description of Artificial Sequence: Synthetic oligonucleotide
  Target: LAMA2; (-) strand; PAM type: YTN; PAM sequence: TTA
tagttctctgaccattcaaa

SEQ ID NO: 249810 - DNA, 20 bp, Artificial Sequence
  Description of Artificial Sequence: Synthetic oligonucleotide
  Target: LAMA2; (-) strand; PAM type: YTN; PAM sequence: CTT
atagttctctgaccattcaa

SEQ ID NO: 249811 - DNA, 20 bp, Artificial Sequence
  Description of Artificial Sequence: Synthetic oligonucleotide
  Target: LAMA2; (-) strand; PAM type: YTN; PAM sequence: TTC
ttatagttctctgaccattc

SEQ ID NO: 249812 - DNA, 20 bp, Artificial Sequence
  Description of Artificial Sequence: Synthetic oligonucleotide
  Target: LAMA2; (-) strand; PAM type: YTN; PAM sequence: CTC
attcttatagttctctgacc

SEQ ID NO: 249813 - DNA, 20 bp, Artificial Sequence
  Description of Artificial Sequence: Synthetic oligonucleotide
  Target: LAMA2; (-) strand; PAM type: YTN; PAM sequence: TTC
tcattcttatagttctctga

SEQ ID NO: 249814 - DNA, 20 bp, Artificial Sequence
  Description of Artificial Sequence: Synthetic oligonucleotide
  Target: LAMA2; (-) strand; PAM type: YTN; PAM sequence: CTG
ccagaattctcattcttata

SEQ ID NO: 249815 - DNA, 20 bp, Artificial Sequence
  Description of Artificial Sequence: Synthetic oligonucleotide
  Target: LAMA2; (-) strand; PAM type: YTN; PAM sequence: TTC
ctgccagaattctcattctt

SEQ ID NO: 249816 - DNA, 20 bp, Artificial Sequence
  Description of Artificial Sequence: Synthetic oligonucleotide
  Target: LAMA2; (-) strand; PAM type: YTN; PAM sequence: TTT
cctgccagaattctcattct

SEQ ID NO: 249817 - DNA, 20 bp, Artificial Sequence
  Description of Artificial Sequence: Synthetic oligonucleotide
  Target: LAMA2; (-) strand; PAM type: YTN; PAM sequence: TTT
tcctgccagaattctcattc

SEQ ID NO: 249818 - DNA, 20 bp, Artificial Sequence
  Description of Artificial Sequence: Synthetic oligonucleotide
  Target: LAMA2; (-) strand; PAM type: YTN; PAM sequence: TTA
aaaatgaattttcctgccag

SEQ ID NO: 249819 - DNA, 20 bp, Artificial Sequence
  Description of Artificial Sequence: Synthetic oligonucleotide
  Target: LAMA2; (-) strand; PAM type: YTN; PAM sequence: TTT
aaaaatgaattttcctgcca

SEQ ID NO: 249820 - DNA, 20 bp, Artificial Sequence
  Description of Artificial Sequence: Synthetic oligonucleotide
  Target: LAMA2; (-) strand; PAM type: YTN; PAM sequence: TTT
taaaaatgaattttcctgcc

SEQ ID NO: 249821 - DNA, 20 bp, Artificial Sequence
  Description of Artificial Sequence: Synthetic oligonucleotide
  Target: LAMA2; (-) strand; PAM type: YTN; PAM sequence: TTT
ttaaaaatgaattttcctgc

SEQ ID NO: 249822 - DNA, 20 bp, Artificial Sequence
  Description of Artificial Sequence: Synthetic oligonucleotide
  Target: LAMA2; (-) strand; PAM type: YTN; PAM sequence: TTG
gatttttaaaaatgaatttt

SEQ ID NO: 249823 - DNA, 20 bp, Artificial Sequence
  Description of Artificial Sequence: Synthetic oligonucleotide
  Target: LAMA2; (-) strand; PAM type: YTN; PAM sequence: CTT
ggatttttaaaaatgaattt

SEQ ID NO: 249824 - DNA, 20 bp, Artificial Sequence
  Description of Artificial Sequence: Synthetic oligonucleotide
  Target: LAMA2; (-) strand; PAM type: YTN; PAM sequence: TTA
cttggatttttaaaaatgaa

SEQ ID NO: 249825 - DNA, 20 bp, Artificial Sequence
  Description of Artificial Sequence: Synthetic oligonucleotide
  Target: LAMA2; (-) strand; PAM type: YTN; PAM sequence: CTG
ttacttggatttttaaaaat

SEQ ID NO: 249826 - DNA, 20 bp, Artificial Sequence
  Description of Artificial Sequence: Synthetic oligonucleotide
  Target: LAMA2; (-) strand; PAM type: YTN; PAM sequence: TTC
tgttacttggatttttaaaa

SEQ ID NO: 249827 - DNA, 20 bp, Artificial Sequence
  Description of Artificial Sequence: Synthetic oligonucleotide
  Target: LAMA2; (-) strand; PAM type: YTN; PAM sequence: TTA
tccattctgttacttggatt

SEQ ID NO: 249828 - DNA, 20 bp, Artificial Sequence
  Description of Artificial Sequence: Synthetic oligonucleotide
  Target: LAMA2; (-) strand; PAM type: YTN; PAM sequence: TTT
atccattctgttacttggat

SEQ ID NO: 249829 - DNA, 20 bp, Artificial Sequence
  Description of Artificial Sequence: Synthetic oligonucleotide
  Target: LAMA2; (-) strand; PAM type: YTN; PAM sequence: TTA
tatttatccattctgttact

SEQ ID NO: 249830 - DNA, 20 bp, Artificial Sequence
  Description of Artificial Sequence: Synthetic oligonucleotide
  Target: LAMA2; (-) strand; PAM type: YTN; PAM sequence: TTT
atatttatccattctgttac

SEQ ID NO: 249831 - DNA, 20 bp, Artificial Sequence
  Description of Artificial Sequence: Synthetic oligonucleotide
  Target: LAMA2; (-) strand; PAM type: YTN; PAM sequence: TTT
tatatttatccattctgtta

SEQ ID NO: 249832 - DNA, 20 bp, Artificial Sequence
  Description of Artificial Sequence: Synthetic oligonucleotide
  Target: LAMA2; (-) strand; PAM type: YTN; PAM sequence: TTT
ttatatttatccattctgtt

SEQ ID NO: 249833 - DNA, 20 bp, Artificial Sequence
  Description of Artificial Sequence: Synthetic oligonucleotide
  Target: LAMA2; (-) strand; PAM type: YTN; PAM sequence: CTT
tttatatttatccattctgt

SEQ ID NO: 249834 - DNA, 20 bp, Artificial Sequence
  Description of Artificial Sequence: Synthetic oligonucleotide
  Target: LAMA2; (-) strand; PAM type: YTN; PAM sequence: CTC
tttttatatttatccattct

SEQ ID NO: 249835 - DNA, 20 bp, Artificial Sequence
  Description of Artificial Sequence: Synthetic oligonucleotide
  Target: LAMA2; (-) strand; PAM type: YTN; PAM sequence: CTA
gcctctttttatatttatcc

SEQ ID NO: 249836 - DNA, 20 bp, Artificial Sequence
  Description of Artificial Sequence: Synthetic oligonucleotide
  Target: LAMA2; (-) strand; PAM type: YTN; PAM sequence: CTG
atctagcctctttttatatt

SEQ ID NO: 249837 - DNA, 20 bp, Artificial Sequence
  Description of Artificial Sequence: Synthetic oligonucleotide
  Target: LAMA2; (-) strand; PAM type: YTN; PAM sequence: CTG
ggtatgtctgatctagcctc

SEQ ID NO: 249838 - DNA, 20 bp, Artificial Sequence
  Description of Artificial Sequence: Synthetic oligonucleotide
  Target: LAMA2; (-) strand; PAM type: YTN; PAM sequence: CTG
agaatgtctgggtatgtctg

SEQ ID NO: 249839 - DNA, 20 bp, Artificial Sequence
  Description of Artificial Sequence: Synthetic oligonucleotide
  Target: LAMA2; (-) strand; PAM type: YTN; PAM sequence: CTG
aactgagaatgtctgggtat

SEQ ID NO: 249840 - DNA, 20 bp, Artificial Sequence
  Description of Artificial Sequence: Synthetic oligonucleotide
  Target: LAMA2; (-) strand; PAM type: YTN; PAM sequence: TTC
tgaactgagaatgtctgggt

SEQ ID NO: 249841 - DNA, 20 bp, Artificial Sequence
  Description of Artificial Sequence: Synthetic oligonucleotide
  Target: LAMA2; (-) strand; PAM type: YTN; PAM sequence: CTA
tgaacattctgaactgagaa

SEQ ID NO: 249842 - DNA, 20 bp, Artificial Sequence
  Description of Artificial Sequence: Synthetic oligonucleotide
  Target: LAMA2; (-) strand; PAM type: YTN; PAM sequence: TTA
tgaatacgctatgaacattc

SEQ ID NO: 249843 - DNA, 20 bp, Artificial Sequence
  Description of Artificial Sequence: Synthetic oligonucleotide
  Target: LAMA2; (-) strand; PAM type: YTN; PAM sequence: CTA
tgaaaaaattatgaatacgc

SEQ ID NO: 249844 - DNA, 20 bp, Artificial Sequence
  Description of Artificial Sequence: Synthetic oligonucleotide
  Target: LAMA2; (-) strand; PAM type: YTN; PAM sequence: TTG
gtcaaggaggcactatgaaa

SEQ ID NO: 249845 - DNA, 20 bp, Artificial Sequence
  Description of Artificial Sequence: Synthetic oligonucleotide
  Target: LAMA2; (-) strand; PAM type: YTN; PAM sequence: CTG
ttggtcaaggaggcactatg

SEQ ID NO: 249846 - DNA, 20 bp, Artificial Sequence
  Description of Artificial Sequence: Synthetic oligonucleotide
  Target: LAMA2; (-) strand; PAM type: YTN; PAM sequence: TTC
tgttggtcaaggaggcacta

SEQ ID NO: 249847 - DNA, 20 bp, Artificial Sequence
  Description of Artificial Sequence: Synthetic oligonucleotide
  Target: LAMA2; (-) strand; PAM type: YTN; PAM sequence: TTT
ctgttggtcaaggaggcact

SEQ ID NO: 249848 - DNA, 20 bp, Artificial Sequence
  Description of Artificial Sequence: Synthetic oligonucleotide
  Target: LAMA2; (-) strand; PAM type: YTN; PAM sequence: TTA
tttctgttggtcaaggaggc

SEQ ID NO: 249849 - DNA, 20 bp, Artificial Sequence
  Description of Artificial Sequence: Synthetic oligonucleotide
  Target: LAMA2; (-) strand; PAM type: YTN; PAM sequence: CTT
atttctgttggtcaaggagg

SEQ ID NO: 249850 - DNA, 20 bp, Artificial Sequence
  Description of Artificial Sequence: Synthetic oligonucleotide
  Target: LAMA2; (-) strand; PAM type: YTN; PAM sequence: CTG
tggcttatttctgttggtca

SEQ ID NO: 249851 - DNA, 20 bp, Artificial Sequence
  Description of Artificial Sequence: Synthetic oligonucleotide
  Target: LAMA2; (-) strand; PAM type: YTN; PAM sequence: TTA
agaaatagaactgtggctta

SEQ ID NO: 249852 - DNA, 20 bp, Artificial Sequence
  Description of Artificial Sequence: Synthetic oligonucleotide
  Target: LAMA2; (-) strand; PAM type: YTN; PAM sequence: CTT
aagaaatagaactgtggctt

SEQ ID NO: 249853 - DNA, 20 bp, Artificial Sequence
  Description of Artificial Sequence: Synthetic oligonucleotide
  Target: LAMA2; (-) strand; PAM type: YTN; PAM sequence: CTA
cttaagaaatagaactgtgg

SEQ ID NO: 249854 - DNA, 20 bp, Artificial Sequence
  Description of Artificial Sequence: Synthetic oligonucleotide
  Target: LAMA2; (-) strand; PAM type: YTN; PAM sequence: CTA
actacttaagaaatagaact

SEQ ID NO: 249855 - DNA, 20 bp, Artificial Sequence
  Description of Artificial Sequence: Synthetic oligonucleotide
  Target: LAMA2; (-) strand; PAM type: YTN; PAM sequence: TTG
gcactaactacttaagaaat

SEQ ID NO: 249856 - DNA, 20 bp, Artificial Sequence
  Description of Artificial Sequence: Synthetic oligonucleotide
  Target: LAMA2; (-) strand; PAM type: YTN; PAM sequence: TTT
ggcactaactacttaagaaa

SEQ ID NO: 249857 - DNA, 20 bp, Artificial Sequence
  Description of Artificial Sequence: Synthetic oligonucleotide
  Target: LAMA2; (-) strand; PAM type: YTN; PAM sequence: TTG
tttggcactaactacttaag

SEQ ID NO: 249858 - DNA, 20 bp, Artificial Sequence
  Description of Artificial Sequence: Synthetic oligonucleotide
  Target: LAMA2; (-) strand; PAM type: YTN; PAM sequence: TTA
agttgtttggcactaactac

SEQ ID NO: 249859 - DNA, 20 bp, Artificial Sequence
  Description of Artificial Sequence: Synthetic oligonucleotide
  Target: LAMA2; (-) strand; PAM type: YTN; PAM sequence: TTA
ttaagttgtttggcactaac

SEQ ID NO: 249860 - DNA, 20 bp, Artificial Sequence
  Description of Artificial Sequence: Synthetic oligonucleotide
  Target: LAMA2; (-) strand; PAM type: YTN; PAM sequence: TTT
attaagttgtttggcactaa

SEQ ID NO: 249861 - DNA, 20 bp, Artificial Sequence
  Description of Artificial Sequence: Synthetic oligonucleotide
  Target: LAMA2; (-) strand; PAM type: YTN; PAM sequence: TTA
aaacatgaatatttattaag

SEQ ID NO: 249862 - DNA, 20 bp, Artificial Sequence
  Description of Artificial Sequence: Synthetic oligonucleotide
  Target: LAMA2; (-) strand; PAM type: YTN; PAM sequence: TTG
ttaaaacatgaatatttatt

SEQ ID NO: 249863 - DNA, 20 bp, Artificial Sequence
  Description of Artificial Sequence: Synthetic oligonucleotide
  Target: LAMA2; (-) strand; PAM type: YTN; PAM sequence: CTA
ggttgttaaaacatgaatat

SEQ ID NO: 249864 - DNA, 20 bp, Artificial Sequence
  Description of Artificial Sequence: Synthetic oligonucleotide
  Target: LAMA2; (-) strand; PAM type: YTN; PAM sequence: TTG
ctaggttgttaaaacatgaa

SEQ ID NO: 249865 - DNA, 20 bp, Artificial Sequence
  Description of Artificial Sequence: Synthetic oligonucleotide
  Target: LAMA2; (-) strand; PAM type: YTN; PAM sequence: TTA
aacaattgctaggttgttaa

SEQ ID NO: 249866 - DNA, 20 bp, Artificial Sequence
  Description of Artificial Sequence: Synthetic oligonucleotide
  Target: LAMA2; (-) strand; PAM type: YTN; PAM sequence: TTT
aaacaattgctaggttgtta

SEQ ID NO: 249867 - DNA, 20 bp, Artificial Sequence
  Description of Artificial Sequence: Synthetic oligonucleotide
  Target: LAMA2; (-) strand; PAM type: YTN; PAM sequence: TTT
taaacaattgctaggttgtt

SEQ ID NO: 249868 - DNA, 20 bp, Artificial Sequence
  Description of Artificial Sequence: Synthetic oligonucleotide
  Target: LAMA2; (-) strand; PAM type: YTN; PAM sequence: TTT
ttaaacaattgctaggttgt

SEQ ID NO: 249869 - DNA, 20 bp, Artificial Sequence
  Description of Artificial Sequence: Synthetic oligonucleotide
  Target: LAMA2; (-) strand; PAM type: YTN; PAM sequence: CTT
tttaaacaattgctaggttg

SEQ ID NO: 249870 - DNA, 20 bp, Artificial Sequence
  Description of Artificial Sequence: Synthetic oligonucleotide
  Target: LAMA2; (-) strand; PAM type: YTN; PAM sequence: TTC
tttttaaacaattgctaggt

SEQ ID NO: 249871 - DNA, 20 bp, Artificial Sequence
  Description of Artificial Sequence: Synthetic oligonucleotide
  Target: LAMA2; (-) strand; PAM type: YTN; PAM sequence: TTT
ctttttaaacaattgctagg

SEQ ID NO: 249872 - DNA, 20 bp, Artificial Sequence
  Description of Artificial Sequence: Synthetic oligonucleotide
  Target: LAMA2; (-) strand; PAM type: YTN; PAM sequence: TTT
tctttttaaacaattgctag

SEQ ID NO: 249873 - DNA, 20 bp, Artificial Sequence
  Description of Artificial Sequence: Synthetic oligonucleotide
  Target: LAMA2; (-) strand; PAM type: YTN; PAM sequence: CTG
tccattttctttttaaacaa

SEQ ID NO: 249874 - DNA, 20 bp, Artificial Sequence
  Description of Artificial Sequence: Synthetic oligonucleotide
  Target: LAMA2; (-) strand; PAM type: YTN; PAM sequence: TTC
tgtccattttctttttaaac

SEQ ID NO: 249875 - DNA, 20 bp, Artificial Sequence
  Description of Artificial Sequence: Synthetic oligonucleotide
  Target: LAMA2; (-) strand; PAM type: YTN; PAM sequence: TTT
ctgtccattttctttttaaa

SEQ ID NO: 249876 - DNA, 20 bp, Artificial Sequence
  Description of Artificial Sequence: Synthetic oligonucleotide
  Target: LAMA2; (-) strand; PAM type: YTN; PAM sequence: TTT
tctgtccattttctttttaa

SEQ ID NO: 249877 - DNA, 20 bp, Artificial Sequence
  Description of Artificial Sequence: Synthetic oligonucleotide
  Target: LAMA2; (-) strand; PAM type: YTN; PAM sequence: TTA
ttttctgtccattttctttt

SEQ ID NO: 249878 - DNA, 20 bp, Artificial Sequence
  Description of Artificial Sequence: Synthetic oligonucleotide
  Target: LAMA2; (-) strand; PAM type: YTN; PAM sequence: TTA
ttattttctgtccattttct

SEQ ID NO: 249879 - DNA, 20 bp, Artificial Sequence
  Description of Artificial Sequence: Synthetic oligonucleotide
  Target: LAMA2; (-) strand; PAM type: YTN; PAM sequence: TTA
tgaaaaaaattattattttc

SEQ ID NO: 249880 - DNA, 20 bp, Artificial Sequence
  Description of Artificial Sequence: Synthetic oligonucleotide
  Target: LAMA2; (-) strand; PAM type: YTN; PAM sequence: TTT
atgaaaaaaattattatttt

SEQ ID NO: 249881 - DNA, 20 bp, Artificial Sequence
  Description of Artificial Sequence: Synthetic oligonucleotide
  Target: LAMA2; (-) strand; PAM type: YTN; PAM sequence: TTA
tttatgaaaaaaattattat

SEQ ID NO: 249882 - DNA, 20 bp, Artificial Sequence
  Description of Artificial Sequence: Synthetic oligonucleotide
  Target: LAMA2; (-) strand; PAM type: YTN; PAM sequence: CTG
gttatttatgaaaaaaatta

SEQ ID NO: 249883 - DNA, 20 bp, Artificial Sequence
  Description of Artificial Sequence: Synthetic oligonucleotide
  Target: LAMA2; (-) strand; PAM type: YTN; PAM sequence: TTC
tggttatttatgaaaaaaat

SEQ ID NO: 249884 - DNA, 20 bp, Artificial Sequence
  Description of Artificial Sequence: Synthetic oligonucleotide
  Target: LAMA2; (-) strand; PAM type: YTN; PAM sequence: CTA
ccccaaaggtaccacatccc

SEQ ID NO: 249885 - DNA, 20 bp, Artificial Sequence
  Description of Artificial Sequence: Synthetic oligonucleotide
  Target: LAMA2; (-) strand; PAM type: YTN; PAM sequence: TTG
agaaggtatatactacccca

SEQ ID NO: 249886 - DNA, 20 bp, Artificial Sequence
  Description of Artificial Sequence: Synthetic oligonucleotide
  Target: LAMA2; (-) strand; PAM type: YTN; PAM sequence: TTT
gagaaggtatatactacccc

SEQ ID NO: 249887 - DNA, 20 bp, Artificial Sequence
  Description of Artificial Sequence: Synthetic oligonucleotide
  Target: LAMA2; (-) strand; PAM type: YTN; PAM sequence: CTC
aagtttgagaaggtatatac

SEQ ID NO: 249888 - DNA, 20 bp, Artificial Sequence
  Description of Artificial Sequence: Synthetic oligonucleotide
  Target: LAMA2; (-) strand; PAM type: YTN; PAM sequence: CTG
atactcaagtttgagaaggt

SEQ ID NO: 249889 - DNA, 20 bp, Artificial Sequence
  Description of Artificial Sequence: Synthetic oligonucleotide
  Target: LAMA2; (-) strand; PAM type: YTN; PAM sequence: TTA
tccaatctgatactcaagtt

SEQ ID NO: 249890 - DNA, 20 bp, Artificial Sequence
  Description of Artificial Sequence: Synthetic oligonucleotide
  Target: LAMA2; (-) strand; PAM type: YTN; PAM sequence: CTG
cacaaaagtcaatgtggaaa

SEQ ID NO: 249891 - DNA, 20 bp, Artificial Sequence
  Description of Artificial Sequence: Synthetic oligonucleotide
  Target: LAMA2; (-) strand; PAM type: YTN; PAM sequence: TTA
aaagcaagaactgcacaaaa

SEQ ID NO: 249892 - DNA, 20 bp, Artificial Sequence
  Description of Artificial Sequence: Synthetic oligonucleotide
  Target: LAMA2; (-) strand; PAM type: YTN; PAM sequence: CTG
taattaaaagcaagaactgc

SEQ ID NO: 249893 - DNA, 20 bp, Artificial Sequence
  Description of Artificial Sequence: Synthetic oligonucleotide
  Target: LAMA2; (-) strand; PAM type: YTN; PAM sequence: TTC
agaagagactgtaattaaaa

SEQ ID NO: 249894 - DNA, 20 bp, Artificial Sequence
  Description of Artificial Sequence: Synthetic oligonucleotide
  Target: LAMA2; (-) strand; PAM type: YTN; PAM sequence: TTT
cagaagagactgtaattaaa

SEQ ID NO: 249895 - DNA, 20 bp, Artificial Sequence
  Description of Artificial Sequence: Synthetic oligonucleotide
  Target: LAMA2; (-) strand; PAM type: YTN; PAM sequence: TTT
tcagaagagactgtaattaa

SEQ ID NO: 249896 - DNA, 20 bp, Artificial Sequence
  Description of Artificial Sequence: Synthetic oligonucleotide
  Target: LAMA2; (-) strand; PAM type: YTN; PAM sequence: TTA
agaaaggttttcagaagaga

SEQ ID NO: 249897 - DNA, 20 bp, Artificial Sequence
  Description of Artificial Sequence: Synthetic oligonucleotide
  Target: LAMA2; (-) strand; PAM type: YTN; PAM sequence: TTA
ttaagaaaggttttcagaag

SEQ ID NO: 249898 - DNA, 20 bp, Artificial Sequence
  Description of Artificial Sequence: Synthetic oligonucleotide
  Target: LAMA2; (-) strand; PAM type: YTN; PAM sequence: TTT
attaagaaaggttttcagaa

SEQ ID NO: 249899 - DNA, 20 bp, Artificial Sequence
  Description of Artificial Sequence: Synthetic oligonucleotide
  Target: LAMA2; (-) strand; PAM type: YTN; PAM sequence: CTT
tattaagaaaggttttcaga

SEQ ID NO: 249900 - DNA, 20 bp, Artificial Sequence
  Description of Artificial Sequence: Synthetic oligonucleotide
  Target: LAMA2; (-) strand; PAM type: YTN; PAM sequence: TTA
tatctttattaagaaaggtt

SEQ ID NO: 249901 - DNA, 20 bp, Artificial Sequence
  Description of Artificial Sequence: Synthetic oligonucleotide
  Target: LAMA2; (-) strand; PAM type: YTN; PAM sequence: TTT
atatctttattaagaaaggt

SEQ ID NO: 249902 - DNA, 20 bp, Artificial Sequence
  Description of Artificial Sequence: Synthetic oligonucleotide
  Target: LAMA2; (-) strand; PAM type: YTN; PAM sequence: CTT
tatatctttattaagaaagg

SEQ ID NO: 249903 - DNA, 20 bp, Artificial Sequence
  Description of Artificial Sequence: Synthetic oligonucleotide
  Target: LAMA2; (-) strand; PAM type: YTN; PAM sequence: TTA
ggccactttatatctttatt

SEQ ID NO: 249904 - DNA, 20 bp, Artificial Sequence
  Description of Artificial Sequence: Synthetic oligonucleotide
  Target: LAMA2; (-) strand; PAM type: YTN; PAM sequence: TTT
aggccactttatatctttat

SEQ ID NO: 249905 - DNA, 20 bp, Artificial Sequence
  Description of Artificial Sequence: Synthetic oligonucleotide
  Target: LAMA2; (-) strand; PAM type: YTN; PAM sequence: CTT
taggccactttatatcttta

SEQ ID NO: 249906 - DNA, 20 bp, Artificial Sequence
  Description of Artificial Sequence: Synthetic oligonucleotide
  Target: LAMA2; (-) strand; PAM type: YTN; PAM sequence: TTG
tactttaggccactttatat

SEQ ID NO: 249907 - DNA, 20 bp, Artificial Sequence
  Description of Artificial Sequence: Synthetic oligonucleotide
  Target: LAMA2; (-) strand; PAM type: YTN; PAM sequence: CTT
gtactttaggccactttata

SEQ ID NO: 249908 - DNA, 20 bp, Artificial Sequence
  Description of Artificial Sequence: Synthetic oligonucleotide
  Target: LAMA2; (-) strand; PAM type: YTN; PAM sequence: TTA
cttgtactttaggccacttt

SEQ ID NO: 249909 - DNA, 20 bp, Artificial Sequence
  Description of Artificial Sequence: Synthetic oligonucleotide
  Target: LAMA2; (-) strand; PAM type: YTN; PAM sequence: CTT
acttgtactttaggccactt

SEQ ID NO: 249910 - DNA, 20 bp, Artificial Sequence
  Description of Artificial Sequence: Synthetic oligonucleotide
  Target: LAMA2; (-) strand; PAM type: YTN; PAM sequence: CTG
cttacttgtactttaggcca

SEQ ID NO: 249911 - DNA, 20 bp, Artificial Sequence
  Description of Artificial Sequence: Synthetic oligonucleotide
  Target: LAMA2; (-) strand; PAM type: YTN; PAM sequence: TTC
tgcttacttgtactttaggc

SEQ ID NO: 249912 - DNA, 20 bp, Artificial Sequence
  Description of Artificial Sequence: Synthetic oligonucleotide
  Target: LAMA2; (-) strand; PAM type: YTN; PAM sequence: TTT
ctgcttacttgtactttagg

SEQ ID NO: 249913 - DNA, 20 bp, Artificial Sequence
  Description of Artificial Sequence: Synthetic oligonucleotide
  Target: LAMA2; (-) strand; PAM type: YTN; PAM sequence: TTG
agccatgtttctgcttactt

SEQ ID NO: 249914 - DNA, 20 bp, Artificial Sequence
  Description of Artificial Sequence: Synthetic oligonucleotide
  Target: LAMA2; (-) strand; PAM type: YTN; PAM sequence: TTT
gagccatgtttctgcttact

SEQ ID NO: 249915 - DNA, 20 bp, Artificial Sequence
  Description of Artificial Sequence: Synthetic oligonucleotide
  Target: LAMA2; (-) strand; PAM type: YTN; PAM sequence: TTT
tgagccatgtttctgcttac

SEQ ID NO: 249916 - DNA, 20 bp, Artificial Sequence
  Description of Artificial Sequence: Synthetic oligonucleotide
  Target: LAMA2; (-) strand; PAM type: YTN; PAM sequence: CTC
aacattttgagccatgtttc

SEQ ID NO: 249917 - DNA, 20 bp, Artificial Sequence
  Description of Artificial Sequence: Synthetic oligonucleotide
  Target: LAMA2; (-) strand; PAM type: YTN; PAM sequence: TTC
tcaacattttgagccatgtt

SEQ ID NO: 249918 - DNA, 20 bp, Artificial Sequence
  Description of Artificial Sequence: Synthetic oligonucleotide
  Target: LAMA2; (-) strand; PAM type: YTN; PAM sequence: TTA
agaatgttctcaacattttg

SEQ ID NO: 249919 - DNA, 20 bp, Artificial Sequence
  Description of Artificial Sequence: Synthetic oligonucleotide
  Target: LAMA2; (-) strand; PAM type: YTN; PAM sequence: CTT
aagaatgttctcaacatttt

SEQ ID NO: 249920 - DNA, 20 bp, Artificial Sequence
  Description of Artificial Sequence: Synthetic oligonucleotide
  Target: LAMA2; (-) strand; PAM type: YTN; PAM sequence: TTC
cacttaagaatgttctcaac

SEQ ID NO: 249921 - DNA, 20 bp, Artificial Sequence
  Description of Artificial Sequence: Synthetic oligonucleotide
  Target: LAMA2; (-) strand; PAM type: YTN; PAM sequence: CTA
tattccacttaagaatgttc

SEQ ID NO: 249922 - DNA, 20 bp, Artificial Sequence
  Description of Artificial Sequence: Synthetic oligonucleotide
  Target: LAMA2; (-) strand; PAM type: YTN; PAM sequence: TTA
gaacatgctatattccactt

SEQ ID NO: 249923 - DNA, 20 bp, Artificial Sequence
  Description of Artificial Sequence: Synthetic oligonucleotide
  Target: LAMA2; (-) strand; PAM type: YTN; PAM sequence: CTT
agaacatgctatattccact

SEQ ID NO: 249924 - DNA, 20 bp, Artificial Sequence
  Description of Artificial Sequence: Synthetic oligonucleotide
  Target: LAMA2; (-) strand; PAM type: YTN; PAM sequence: TTG
aaaccttagaacatgctata

SEQ ID NO: 249925 - DNA, 20 bp, Artificial Sequence
  Description of Artificial Sequence: Synthetic oligonucleotide
  Target: LAMA2; (-) strand; PAM type: YTN; PAM sequence: TTC
acaagttgaaaccttagaac

SEQ ID NO: 249926 - DNA, 20 bp, Artificial Sequence
  Description of Artificial Sequence: Synthetic oligonucleotide
  Target: LAMA2; (-) strand; PAM type: YTN; PAM sequence: TTC
aaggtggttcacaagttgaa

SEQ ID NO: 249927 - DNA, 20 bp, Artificial Sequence
  Description of Artificial Sequence: Synthetic oligonucleotide
  Target: LAMA2; (-) strand; PAM type: YTN; PAM sequence: CTA
attcaaggtggttcacaagt

SEQ ID NO: 249928 - DNA, 20 bp, Artificial Sequence
  Description of Artificial Sequence: Synthetic oligonucleotide
  Target: LAMA2; (-) strand; PAM type: YTN; PAM sequence: CTG
caataactaattcaaggtgg

SEQ ID NO: 249929 - DNA, 20 bp, Artificial Sequence
  Description of Artificial Sequence: Synthetic oligonucleotide
  Target: LAMA2; (-) strand; PAM type: YTN; PAM sequence: TTG
ggcactgcaataactaattc

SEQ ID NO: 249930 - DNA, 20 bp, Artificial Sequence
  Description of Artificial Sequence: Synthetic oligonucleotide
  Target: LAMA2; (-) strand; PAM type: YTN; PAM sequence: CTG
ttgggcactgcaataactaa

SEQ ID NO: 249931 - DNA, 20 bp, Artificial Sequence
  Description of Artificial Sequence: Synthetic oligonucleotide
  Target: LAMA2; (-) strand; PAM type: YTN; PAM sequence: CTA
aatatctgttgggcactgca

SEQ ID NO: 249932 - DNA, 20 bp, Artificial Sequence
  Description of Artificial Sequence: Synthetic oligonucleotide
  Target: LAMA2; (-) strand; PAM type: YTN; PAM sequence: TTG
aaggacacacagcaatacta

SEQ ID NO: 249933 - DNA, 20 bp, Artificial Sequence
  Description of Artificial Sequence: Synthetic oligonucleotide
  Target: LAMA2; (-) strand; PAM type: YTN; PAM sequence: TTT
gaaggacacacagcaatact

SEQ ID NO: 249934 - DNA, 20 bp, Artificial Sequence
  Description of Artificial Sequence: Synthetic oligonucleotide
  Target: LAMA2; (-) strand; PAM type: YTN; PAM sequence: TTG
taaacatttgaaggacacac

SEQ ID NO: 249935 - DNA, 20 bp, Artificial Sequence
  Description of Artificial Sequence: Synthetic oligonucleotide
  Target: LAMA2; (-) strand; PAM type: YTN; PAM sequence: CTC
acaaaggcacagtggaatat

SEQ ID NO: 249936 - DNA, 20 bp, Artificial Sequence
  Description of Artificial Sequence: Synthetic oligonucleotide
  Target: LAMA2; (-) strand; PAM type: YTN; PAM sequence: CTG
cagtgaactcacaaaggcac

SEQ ID NO: 249937 - DNA, 20 bp, Artificial Sequence
  Description of Artificial Sequence: Synthetic oligonucleotide
  Target: LAMA2; (-) strand; PAM type: YTN; PAM sequence: CTG
tgtgtagaggtgccccaggg

SEQ ID NO: 249938 - DNA, 20 bp, Artificial Sequence
  Description of Artificial Sequence: Synthetic oligonucleotide
  Target: LAMA2; (-) strand; PAM type: YTN; PAM sequence: TTC
acaaactgtgtgtagaggtg

SEQ ID NO: 249939 - DNA, 20 bp, Artificial Sequence
  Description of Artificial Sequence: Synthetic oligonucleotide
  Target: LAMA2; (-) strand; PAM type: YTN; PAM sequence: CTG
tgttcacaaactgtgtgtag

SEQ ID NO: 249940 - DNA, 20 bp, Artificial Sequence
  Description of Artificial Sequence: Synthetic oligonucleotide
  Target: LAMA2; (-) strand; PAM type: YTN; PAM sequence: CTA
cccctgtgttcacaaactgt

SEQ ID NO: 249941 - DNA, 20 bp, Artificial Sequence
  Description of Artificial Sequence: Synthetic oligonucleotide
  Target: LAMA2; (-) strand; PAM type: YTN; PAM sequence: CTA
tctacccctgtgttcacaaa

SEQ ID NO: 249942 - DNA, 20 bp, Artificial Sequence
  Description of Artificial Sequence: Synthetic oligonucleotide
  Target: LAMA2; (-) strand; PAM type: YTN; PAM sequence: CTA
ggatctatctacccctgtgt

SEQ ID NO: 249943 - DNA, 20 bp, Artificial Sequence
  Description of Artificial Sequence: Synthetic oligonucleotide
  Target: LAMA2; (-) strand; PAM type: YTN; PAM sequence: CTC
taggatctatctacccctgt

SEQ ID NO: 249944 - DNA, 20 bp, Artificial Sequence
  Description of Artificial Sequence: Synthetic oligonucleotide
  Target: LAMA2; (-) strand; PAM type: YTN; PAM sequence: TTC
aatgcctctaggatctatct

SEQ ID NO: 249945 - DNA, 20 bp, Artificial Sequence
  Description of Artificial Sequence: Synthetic oligonucleotide
  Target: LAMA2; (-) strand; PAM type: YTN; PAM sequence: TTT
caatgcctctaggatctatc

SEQ ID NO: 249946 - DNA, 20 bp, Artificial Sequence
  Description of Artificial Sequence: Synthetic oligonucleotide
  Target: LAMA2; (-) strand; PAM type: YTN; PAM sequence: TTC
cgtgtagtttcaatgcctct

SEQ ID NO: 249947 - DNA, 20 bp, Artificial Sequence
  Description of Artificial Sequence: Synthetic oligonucleotide
  Target: LAMA2; (-) strand; PAM type: YTN; PAM sequence: TTT
ccgtgtagtttcaatgcctc

SEQ ID NO: 249948 - DNA, 20 bp, Artificial Sequence
  Description of Artificial Sequence: Synthetic oligonucleotide
  Target: LAMA2; (-) strand; PAM type: YTN; PAM sequence: TTC
aagtttccgtgtagtttcaa

SEQ ID NO: 249949 - DNA, 20 bp, Artificial Sequence
  Description of Artificial Sequence: Synthetic oligonucleotide
  Target: LAMA2; (-) strand; PAM type: YTN; PAM sequence: CTA
acgtcattcaagtttccgtg

SEQ ID NO: 249950 - DNA, 20 bp, Artificial Sequence
  Description of Artificial Sequence: Synthetic oligonucleotide
  Target: LAMA2; (-) strand; PAM type: YTN; PAM sequence: CTG
ggatccctaacgtcattcaa

SEQ ID NO: 249951 - DNA, 20 bp, Artificial Sequence
  Description of Artificial Sequence: Synthetic oligonucleotide
  Target: LAMA2; (-) strand; PAM type: YTN; PAM sequence: CTC
tgggatccctaacgtcattc

SEQ ID NO: 249952 - DNA, 20 bp, Artificial Sequence
  Description of Artificial Sequence: Synthetic oligonucleotide
  Target: LAMA2; (-) strand; PAM type: YTN; PAM sequence: TTC
cccagtggctctgggatccc

SEQ ID NO: 249953 - DNA, 20 bp, Artificial Sequence
  Description of Artificial Sequence: Synthetic oligonucleotide
  Target: LAMA2; (-) strand; PAM type: YTN; PAM sequence: CTA
atgaagattccccagtggct

SEQ ID NO: 249954 - DNA, 20 bp, Artificial Sequence
  Description of Artificial Sequence: Synthetic oligonucleotide
  Target: LAMA2; (-) strand; PAM type: YTN; PAM sequence: TTC
cctaatgaagattccccagt

SEQ ID NO: 249955 - DNA, 20 bp, Artificial Sequence
  Description of Artificial Sequence: Synthetic oligonucleotide
  Target: LAMA2; (-) strand; PAM type: YTN; PAM sequence: CTT
ccctaatgaagattccccag

SEQ ID NO: 249956 - DNA, 20 bp, Artificial Sequence
  Description of Artificial Sequence: Synthetic oligonucleotide
  Target: LAMA2; (-) strand; PAM type: YTN; PAM sequence: TTG
cacttccctaatgaagattc

SEQ ID NO: 249957 - DNA, 20 bp, Artificial Sequence
  Description of Artificial Sequence: Synthetic oligonucleotide
  Target: LAMA2; (-) strand; PAM type: YTN; PAM sequence: TTG
ttgcacttccctaatgaaga

SEQ ID NO: 249958 - DNA, 20 bp, Artificial Sequence
  Description of Artificial Sequence: Synthetic oligonucleotide
  Target: LAMA2; (-) strand; PAM type: YTN; PAM sequence: TTC
atatgttgttgcacttccct

SEQ ID NO: 249959 - DNA, 20 bp, Artificial Sequence
  Description of Artificial Sequence: Synthetic oligonucleotide
  Target: LAMA2; (-) strand; PAM type: YTN; PAM sequence: TTT
catatgttgttgcacttccc

SEQ ID NO: 249960 - DNA, 20 bp, Artificial Sequence
  Description of Artificial Sequence: Synthetic oligonucleotide
  Target: LAMA2; (-) strand; PAM type: YTN; PAM sequence: CTA
tttcatatgttgttgcactt

SEQ ID NO: 249961 - DNA, 20 bp, Artificial Sequence
  Description of Artificial Sequence: Synthetic oligonucleotide
  Target: LAMA2; (-) strand; PAM type: YTN; PAM sequence: TTA
atgagctatttcatatgttg

SEQ ID NO: 249962 - DNA, 20 bp, Artificial Sequence
  Description of Artificial Sequence: Synthetic oligonucleotide
  Target: LAMA2; (-) strand; PAM type: YTN; PAM sequence: TTT
aatgagctatttcatatgtt

SEQ ID NO: 249963 - DNA, 20 bp, Artificial Sequence
  Description of Artificial Sequence: Synthetic oligonucleotide
  Target: LAMA2; (-) strand; PAM type: YTN; PAM sequence: TTG
atagggaaagtttaatgagc

SEQ ID NO: 249964 - DNA, 20 bp, Artificial Sequence
  Description of Artificial Sequence: Synthetic oligonucleotide
  Target: LAMA2; (-) strand; PAM type: YTN; PAM sequence: TTT
gatagggaaagtttaatgag

SEQ ID NO: 249965 - DNA, 20 bp, Artificial Sequence
  Description of Artificial Sequence: Synthetic oligonucleotide
  Target: LAMA2; (-) strand; PAM type: YTN; PAM sequence: TTT
tgatagggaaagtttaatga

SEQ ID NO: 249966 - DNA, 20 bp, Artificial Sequence
  Description of Artificial Sequence: Synthetic oligonucleotide
  Target: LAMA2; (-) strand; PAM type: YTN; PAM sequence: TTT
ttgatagggaaagtttaatg

SEQ ID NO: 249967 - DNA, 20 bp, Artificial Sequence
  Description of Artificial Sequence: Synthetic oligonucleotide
  Target: LAMA2; (-) strand; PAM type: YTN; PAM sequence: TTT
tttgatagggaaagtttaat

SEQ ID NO: 249968 - DNA, 20 bp, Artificial Sequence
  Description of Artificial Sequence: Synthetic oligonucleotide
  Target: LAMA2; (-) strand; PAM type: YTN; PAM sequence: TTT
ttttgatagggaaagtttaa

SEQ ID NO: 249969 - DNA, 20 bp, Artificial Sequence
  Description of Artificial Sequence: Synthetic oligonucleotide
  Target: LAMA2; (-) strand; PAM type: YTN; PAM sequence: TTC
agtttttttgatagggaaag

SEQ ID NO: 249970 - DNA, 20 bp, Artificial Sequence
  Description of Artificial Sequence: Synthetic oligonucleotide
  Target: LAMA2; (-) strand; PAM type: YTN; PAM sequence: CTT
cagtttttttgatagggaaa

SEQ ID NO: 249971 - DNA, 20 bp, Artificial Sequence
  Description of Artificial Sequence: Synthetic oligonucleotide
  Target: LAMA2; (-) strand; PAM type: YTN; PAM sequence: CTG
acttcagtttttttgatagg

SEQ ID NO: 249972 - DNA, 20 bp, Artificial Sequence
  Description of Artificial Sequence: Synthetic oligonucleotide
  Target: LAMA2; (-) strand; PAM type: YTN; PAM sequence: CTC
tgacttcagtttttttgata

SEQ ID NO: 249973 - DNA, 20 bp, Artificial Sequence
  Description of Artificial Sequence: Synthetic oligonucleotide
  Target: LAMA2; (-) strand; PAM type: YTN; PAM sequence: CTC
tctgacttcagtttttttga

SEQ ID NO: 249974 - DNA, 20 bp, Artificial Sequence
  Description of Artificial Sequence: Synthetic oligonucleotide
  Target: LAMA2; (-) strand; PAM type: YTN; PAM sequence: TTC
atctctctgacttcagtttt

SEQ ID NO: 249975 - DNA, 20 bp, Artificial Sequence
  Description of Artificial Sequence: Synthetic oligonucleotide
  Target: LAMA2; (-) strand; PAM type: YTN; PAM sequence: CTG
aattcatctctctgacttca

SEQ ID NO: 249976 - DNA, 20 bp, Artificial Sequence
  Description of Artificial Sequence: Synthetic oligonucleotide
  Target: LAMA2; (-) strand; PAM type: YTN; PAM sequence: CTC
atcaagcatctgaattcatc

SEQ ID NO: 249977 - DNA, 20 bp, Artificial Sequence
  Description of Artificial Sequence: Synthetic oligonucleotide
  Target: LAMA2; (-) strand; PAM type: YTN; PAM sequence: TTC
tcatcaagcatctgaattca

SEQ ID NO: 249978 - DNA, 20 bp, Artificial Sequence
  Description of Artificial Sequence: Synthetic oligonucleotide
  Target: LAMA2; (-) strand; PAM type: YTN; PAM sequence: TTA
ccaagtaggttctcatcaag

SEQ ID NO: 249979 - DNA, 20 bp, Artificial Sequence
  Description of Artificial Sequence: Synthetic oligonucleotide
  Target: LAMA2; (-) strand; PAM type: YTN; PAM sequence: TTC
aaatccattaccaagtaggt

SEQ ID NO: 249980 - DNA, 20 bp, Artificial Sequence
  Description of Artificial Sequence: Synthetic oligonucleotide
  Target: LAMA2; (-) strand; PAM type: YTN; PAM sequence: CTT
caaatccattaccaagtagg

SEQ ID NO: 249981 - DNA, 20 bp, Artificial Sequence
  Description of Artificial Sequence: Synthetic oligonucleotide
  Target: LAMA2; (-) strand; PAM type: YTN; PAM sequence: CTC
cttcaaatccattaccaagt

SEQ ID NO: 249982 - DNA, 20 bp, Artificial Sequence
  Description of Artificial Sequence: Synthetic oligonucleotide
  Target: LAMA2; (-) strand; PAM type: YTN; PAM sequence: CTC
tccttcaaatccattaccaa

SEQ ID NO: 249983 - DNA, 20 bp, Artificial Sequence
  Description of Artificial Sequence: Synthetic oligonucleotide
  Target: LAMA2; (-) strand; PAM type: YTN; PAM sequence: CTC
tctccttcaaatccattacc

SEQ ID NO: 249984 - DNA, 20 bp, Artificial Sequence
  Description of Artificial Sequence: Synthetic oligonucleotide
  Target: LAMA2; (-) strand; PAM type: YTN; PAM sequence: TTA
ctctctccttcaaatccatt

SEQ ID NO: 249985 - DNA, 20 bp, Artificial Sequence
  Description of Artificial Sequence: Synthetic oligonucleotide
  Target: LAMA2; (-) strand; PAM type: YTN; PAM sequence: TTT
actctctccttcaaatccat

SEQ ID NO: 249986 - DNA, 20 bp, Artificial Sequence
  Description of Artificial Sequence: Synthetic oligonucleotide
  Target: LAMA2; (-) strand; PAM type: YTN; PAM sequence: CTA
acgtttactctctccttcaa

SEQ ID NO: 249987 - DNA, 20 bp, Artificial Sequence
  Description of Artificial Sequence: Synthetic oligonucleotide
  Target: LAMA2; (-) strand; PAM type: YTN; PAM sequence: TTC
agtatcctaacgtttactct

SEQ ID NO: 249988 - DNA, 20 bp, Artificial Sequence
  Description of Artificial Sequence: Synthetic oligonucleotide
  Target: LAMA2; (-) strand; PAM type: YTN; PAM sequence: CTT
cagtatcctaacgtttactc

SEQ ID NO: 249989 - DNA, 20 bp, Artificial Sequence
  Description of Artificial Sequence: Synthetic oligonucleotide
  Target: LAMA2; (-) strand; PAM type: YTN; PAM sequence: TTA
gaatcccttcagtatcctaa

SEQ ID NO: 249990 - DNA, 20 bp, Artificial Sequence
  Description of Artificial Sequence: Synthetic oligonucleotide
  Target: LAMA2; (-) strand; PAM type: YTN; PAM sequence: CTT
agaatcccttcagtatccta

SEQ ID NO: 249991 - DNA, 20 bp, Artificial Sequence
  Description of Artificial Sequence: Synthetic oligonucleotide
  Target: LAMA2; (-) strand; PAM type: YTN; PAM sequence: CTC
ttagaatcccttcagtatcc

SEQ ID NO: 249992 - DNA, 20 bp, Artificial Sequence
  Description of Artificial Sequence: Synthetic oligonucleotide
  Target: LAMA2; (-) strand; PAM type: YTN; PAM sequence: CTC
tcttagaatcccttcagtat

SEQ ID NO: 249993 - DNA, 20 bp, Artificial Sequence
  Description of Artificial Sequence: Synthetic oligonucleotide
  Target: LAMA2; (-) strand; PAM type: YTN; PAM sequence: CTG
cactctcttagaatcccttc

SEQ ID NO: 249994 - DNA, 20 bp, Artificial Sequence
  Description of Artificial Sequence: Synthetic oligonucleotide
  Target: LAMA2; (-) strand; PAM type: YTN; PAM sequence: TTC
tgcactctcttagaatccct

SEQ ID NO: 249995 - DNA, 20 bp, Artificial Sequence
  Description of Artificial Sequence: Synthetic oligonucleotide
  Target: LAMA2; (-) strand; PAM type: YTN; PAM sequence: CTT
ctgcactctcttagaatccc

SEQ ID NO: 249996 - DNA, 20 bp, Artificial Sequence
  Description of Artificial Sequence: Synthetic oligonucleotide
  Target: LAMA2; (-) strand; PAM type: YTN; PAM sequence: CTC
gcttctgcactctcttagaa

SEQ ID NO: 249997 - DNA, 20 bp, Artificial Sequence
  Description of Artificial Sequence: Synthetic oligonucleotide
  Target: LAMA2; (-) strand; PAM type: YTN; PAM sequence: TTG
ccctcgcttctgcactctct

SEQ ID NO: 249998 - DNA, 20 bp, Artificial Sequence
  Description of Artificial Sequence: Synthetic oligonucleotide
  Target: LAMA2; (-) strand; PAM type: YTN; PAM sequence: CTT
gccctcgcttctgcactctc

SEQ ID NO: 249999 - DNA, 20 bp, Artificial Sequence
  Description of Artificial Sequence: Synthetic oligonucleotide
  Target: LAMA2; (-) strand; PAM type: YTN; PAM sequence: CTC
cttgccctcgcttctgcact

SEQ ID NO: 250000 - DNA, 20 bp, Artificial Sequence
  Description of Artificial Sequence: Synthetic oligonucleotide
  Target: LAMA2; (-) strand; PAM type: YTN; PAM sequence: TTG
tgcctccttgccctcgcttc

SEQ ID NO: 250001 - DNA, 20 bp, Artificial Sequence
  Description of Artificial Sequence: Synthetic oligonucleotide
  Target: LAMA2; (-) strand; PAM type: YTN; PAM sequence: TTT
gtgcctccttgccctcgctt

SEQ ID NO: 250002 - DNA, 20 bp, Artificial Sequence
  Description of Artificial Sequence: Synthetic oligonucleotide
  Target: LAMA2; (-) strand; PAM type: YTN; PAM sequence: TTT
tgtgcctccttgccctcgct

SEQ ID NO: 250003 - DNA, 20 bp, Artificial Sequence
  Description of Artificial Sequence: Synthetic oligonucleotide
  Target: LAMA2; (-) strand; PAM type: YTN; PAM sequence: TTC
gttttgtgcctccttgccct

SEQ ID NO: 250004 - DNA, 20 bp, Artificial Sequence
  Description of Artificial Sequence: Synthetic oligonucleotide
  Target: LAMA2; (-) strand; PAM type: YTN; PAM sequence: CTT
cgttttgtgcctccttgccc

SEQ ID NO: 250005 - DNA, 20 bp, Artificial Sequence
  Description of Artificial Sequence: Synthetic oligonucleotide
  Target: LAMA2; (-) strand; PAM type: YTN; PAM sequence: TTC
caggtgccgccttcgttttg

SEQ ID NO: 250006 - DNA, 20 bp, Artificial Sequence
  Description of Artificial Sequence: Synthetic oligonucleotide
  Target: LAMA2; (-) strand; PAM type: YTN; PAM sequence: CTC
catgttccaggtgccgcctt

SEQ ID NO: 250007 - DNA, 20 bp, Artificial Sequence
  Description of Artificial Sequence: Synthetic oligonucleotide
  Target: LAMA2; (-) strand; PAM type: YTN; PAM sequence: CTC
ctccatgttccaggtgccgc

SEQ ID NO: 250008 - DNA, 20 bp, Artificial Sequence
  Description of Artificial Sequence: Synthetic oligonucleotide
  Target: LAMA2; (-) strand; PAM type: YTN; PAM sequence: CTG
tccactcctccatgttccag

SEQ ID NO: 250009 - DNA, 20 bp, Artificial Sequence
  Description of Artificial Sequence: Synthetic oligonucleotide
  Target: LAMA2; (-) strand; PAM type: YTN; PAM sequence: CTC
catctgtccactcctccatg

SEQ ID NO: 250010 - DNA, 20 bp, Artificial Sequence
  Description of Artificial Sequence: Synthetic oligonucleotide
  Target: LAMA2; (-) strand; PAM type: YTN; PAM sequence: TTC
tccatctgtccactcctcca

SEQ ID NO: 250011 - DNA, 20 bp, Artificial Sequence
  Description of Artificial Sequence: Synthetic oligonucleotide
  Target: LAMA2; (-) strand; PAM type: YTN; PAM sequence: CTT
ctccatctgtccactcctcc

SEQ ID NO: 250012 - DNA, 20 bp, Artificial Sequence
  Description of Artificial Sequence: Synthetic oligonucleotide
  Target: LAMA2; (-) strand; PAM type: YTN; PAM sequence: CTC
ttctccatctgtccactcct

SEQ ID NO: 250013 - DNA, 20 bp, Artificial Sequence
  Description of Artificial Sequence: Synthetic oligonucleotide
  Target: LAMA2; (-) strand; PAM type: YTN; PAM sequence: CTG
cctcttctccatctgtccac

SEQ ID NO: 250014 - DNA, 20 bp, Artificial Sequence
  Description of Artificial Sequence: Synthetic oligonucleotide
  Target: LAMA2; (-) strand; PAM type: YTN; PAM sequence: CTC
tgcctcttctccatctgtcc

SEQ ID NO: 250015 - DNA, 20 bp, Artificial Sequence
  Description of Artificial Sequence: Synthetic oligonucleotide
  Target: LAMA2; (-) strand; PAM type: YTN; PAM sequence: TTC
tctgcctcttctccatctgt

SEQ ID NO: 250016 - DNA, 20 bp, Artificial Sequence
  Description of Artificial Sequence: Synthetic oligonucleotide
  Target: LAMA2; (-) strand; PAM type: YTN; PAM sequence: TTA
gataaagaattctctgcctc

SEQ ID NO: 250017 - DNA, 20 bp, Artificial Sequence
  Description of Artificial Sequence: Synthetic oligonucleotide
  Target: LAMA2; (-) strand; PAM type: YTN; PAM sequence: TTT
agataaagaattctctgcct

SEQ ID NO: 250018 - DNA, 20 bp, Artificial Sequence
  Description of Artificial Sequence: Synthetic oligonucleotide
  Target: LAMA2; (-) strand; PAM type: YTN; PAM sequence: CTT
tagataaagaattctctgcc

SEQ ID NO: 250019 - DNA, 20 bp, Artificial Sequence
  Description of Artificial Sequence: Synthetic oligonucleotide
  Target: LAMA2; (-) strand; PAM type: YTN; PAM sequence: TTG
ctttagataaagaattctct

SEQ ID NO: 250020 - DNA, 20 bp, Artificial Sequence
  Description of Artificial Sequence: Synthetic oligonucleotide
  Target: LAMA2; (-) strand; PAM type: YTN; PAM sequence: CTT
gctttagataaagaattctc

SEQ ID NO: 250021 - DNA, 20 bp, Artificial Sequence
  Description of Artificial Sequence: Synthetic oligonucleotide
  Target: LAMA2; (-) strand; PAM type: YTN; PAM sequence: CTC
ttgctttagataaagaattc

SEQ ID NO: 250022 - DNA, 20 bp, Artificial Sequence
  Description of Artificial Sequence: Synthetic oligonucleotide
  Target: LAMA2; (-) strand; PAM type: YTN; PAM sequence: TTC
ctcttgctttagataaagaa

SEQ ID NO: 250023 - DNA, 20 bp, Artificial Sequence
  Description of Artificial Sequence: Synthetic oligonucleotide
  Target: LAMA2; (-) strand; PAM type: YTN; PAM sequence: TTT
cctcttgctttagataaaga

SEQ ID NO: 250024 - DNA, 20 bp, Artificial Sequence
  Description of Artificial Sequence: Synthetic oligonucleotide
  Target: LAMA2; (-) strand; PAM type: YTN; PAM sequence: CTT
tcctcttgctttagataaag

SEQ ID NO: 250025 - DNA, 20 bp, Artificial Sequence
  Description of Artificial Sequence: Synthetic oligonucleotide
  Target: LAMA2; (-) strand; PAM type: YTN; PAM sequence: TTG
ccctttcctcttgctttaga

SEQ ID NO: 250026 - DNA, 20 bp, Artificial Sequence
  Description of Artificial Sequence: Synthetic oligonucleotide
  Target: LAMA2; (-) strand; PAM type: YTN; PAM sequence: CTG
agtatacgttgccctttcct

SEQ ID NO: 250027 - DNA, 20 bp, Artificial Sequence
  Description of Artificial Sequence: Synthetic oligonucleotide
  Target: LAMA2; (-) strand; PAM type: YTN; PAM sequence: TTC
tgagtatacgttgccctttc

SEQ ID NO: 250028 - DNA, 20 bp, Artificial Sequence
  Description of Artificial Sequence: Synthetic oligonucleotide
  Target: LAMA2; (-) strand; PAM type: YTN; PAM sequence: TTG
agaatattctgagtatacgt

SEQ ID NO: 250029 - DNA, 20 bp, Artificial Sequence
  Description of Artificial Sequence: Synthetic oligonucleotide
  Target: LAMA2; (-) strand; PAM type: YTN; PAM sequence: TTT
gagaatattctgagtatacg

SEQ ID NO: 250030 - DNA, 20 bp, Artificial Sequence
  Description of Artificial Sequence: Synthetic oligonucleotide
  Target: LAMA2; (-) strand; PAM type: YTN; PAM sequence: CTT
tgagaatattctgagtatac

SEQ ID NO: 250031 - DNA, 20 bp, Artificial Sequence
  Description of Artificial Sequence: Synthetic oligonucleotide
  Target: LAMA2; (-) strand; PAM type: YTN; PAM sequence: TTC
agggaaaaagctttgagaat

SEQ ID NO: 250032 - DNA, 20 bp, Artificial Sequence
  Description of Artificial Sequence: Synthetic oligonucleotide
  Target: LAMA2; (-) strand; PAM type: YTN; PAM sequence: TTA
ttcagggaaaaagctttgag

SEQ ID NO: 250033 - DNA, 20 bp, Artificial Sequence
  Description of Artificial Sequence: Synthetic oligonucleotide
  Target: LAMA2; (-) strand; PAM type: YTN; PAM sequence: CTA
ttattcagggaaaaagcttt

SEQ ID NO: 250034 - DNA, 20 bp, Artificial Sequence
  Description of Artificial Sequence: Synthetic oligonucleotide
  Target: LAMA2; (-) strand; PAM type: YTN; PAM sequence: CTG
aaggatgctattattcaggg

SEQ ID NO: 250035 - DNA, 20 bp, Artificial Sequence
  Description of Artificial Sequence: Synthetic oligonucleotide
  Target: LAMA2; (-) strand; PAM type: YTN; PAM sequence: TTC
tgaaggatgctattattcag

SEQ ID NO: 250036 - DNA, 20 bp, Artificial Sequence
  Description of Artificial Sequence: Synthetic oligonucleotide
  Target: LAMA2; (-) strand; PAM type: YTN; PAM sequence: TTT
ctgaaggatgctattattca

SEQ ID NO: 250037 - DNA, 20 bp, Artificial Sequence
  Description of Artificial Sequence: Synthetic oligonucleotide
  Target: LAMA2; (-) strand; PAM type: YTN; PAM sequence: TTT
tctgaaggatgctattattc

SEQ ID NO: 250038 - DNA, 20 bp, Artificial Sequence
  Description of Artificial Sequence: Synthetic oligonucleotide
  Target: LAMA2; (-) strand; PAM type: YTN; PAM sequence: CTT
ttctgaaggatgctattatt

SEQ ID NO: 250039 - DNA, 20 bp, Artificial Sequence
  Description of Artificial Sequence: Synthetic oligonucleotide
  Target: LAMA2; (-) strand; PAM type: YTN; PAM sequence: TTC
ttttctgaaggatgctatta

SEQ ID NO: 250040 - DNA, 20 bp, Artificial Sequence
  Description of Artificial Sequence: Synthetic oligonucleotide
  Target: LAMA2; (-) strand; PAM type: YTN; PAM sequence: CTT
cttttctgaaggatgctatt

SEQ ID NO: 250041 - DNA, 20 bp, Artificial Sequence
  Description of Artificial Sequence: Synthetic oligonucleotide
  Target: LAMA2; (-) strand; PAM type: YTN; PAM sequence: TTA
caagacttcttttctgaagg

SEQ ID NO: 250042 - DNA, 20 bp, Artificial Sequence
  Description of Artificial Sequence: Synthetic oligonucleotide
  Target: LAMA2; (-) strand; PAM type: YTN; PAM sequence: TTG
caatgagtcagttacaagac

SEQ ID NO: 250043 - DNA, 20 bp, Artificial Sequence
  Description of Artificial Sequence: Synthetic oligonucleotide
  Target: LAMA2; (-) strand; PAM type: YTN; PAM sequence: TTT
gcaatgagtcagttacaaga

SEQ ID NO: 250044 - DNA, 20 bp, Artificial Sequence
  Description of Artificial Sequence: Synthetic oligonucleotide
  Target: LAMA2; (-) strand; PAM type: YTN; PAM sequence: CTT
tgcaatgagtcagttacaag

SEQ ID NO: 250045 - DNA, 20 bp, Artificial Sequence
  Description of Artificial Sequence: Synthetic oligonucleotide
  Target: LAMA2; (-) strand; PAM type: YTN; PAM sequence: TTG
tgtaagagactttgcaatga

SEQ ID NO: 250046 - DNA, 20 bp, Artificial Sequence
  Description of Artificial Sequence: Synthetic oligonucleotide
  Target: LAMA2; (-) strand; PAM type: YTN; PAM sequence: TTC
cccaaagagtacataccatt

SEQ ID NO: 250047 - DNA, 20 bp, Artificial Sequence
  Description of Artificial Sequence: Synthetic oligonucleotide
  Target: LAMA2; (-) strand; PAM type: YTN; PAM sequence: CTT
ccccaaagagtacataccat

SEQ ID NO: 250048 - DNA, 20 bp, Artificial Sequence
  Description of Artificial Sequence: Synthetic oligonucleotide
  Target: LAMA2; (-) strand; PAM type: YTN; PAM sequence: TTG
tgtcttccccaaagagtaca

SEQ ID NO: 250049 - DNA, 20 bp, Artificial Sequence
  Description of Artificial Sequence: Synthetic oligonucleotide
  Target: LAMA2; (-) strand; PAM type: YTN; PAM sequence: TTC
cagttgtgtcttccccaaag

SEQ ID NO: 250050 - DNA, 20 bp, Artificial Sequence
  Description of Artificial Sequence: Synthetic oligonucleotide
  Target: LAMA2; (-) strand; PAM type: YTN; PAM sequence: TTT
ccagttgtgtcttccccaaa

SEQ ID NO: 250051 - DNA, 20 bp, Artificial Sequence
  Description of Artificial Sequence: Synthetic oligonucleotide
  Target: LAMA2; (-) strand; PAM type: YTN; PAM sequence: TTG
tttccagttgtgtcttcccc

SEQ ID NO: 250052 - DNA, 20 bp, Artificial Sequence
  Description of Artificial Sequence: Synthetic oligonucleotide
  Target: LAMA2; (-) strand; PAM type: YTN; PAM sequence: CTG
gtgttgtttccagttgtgtc

SEQ ID NO: 250053 - DNA, 20 bp, Artificial Sequence
  Description of Artificial Sequence: Synthetic oligonucleotide
  Target: LAMA2; (-) strand; PAM type: YTN; PAM sequence: TTC
ctggtgttgtttccagttgt

SEQ ID NO: 250054 - DNA, 20 bp, Artificial Sequence
  Description of Artificial Sequence: Synthetic oligonucleotide
  Target: LAMA2; (-) strand; PAM type: YTN; PAM sequence: TTT
cctggtgttgtttccagttg

SEQ ID NO: 250055 - DNA, 20 bp, Artificial Sequence
  Description of Artificial Sequence: Synthetic oligonucleotide
  Target: LAMA2; (-) strand; PAM type: YTN; PAM sequence: TTT
tcctggtgttgtttccagtt

SEQ ID NO: 250056 - DNA, 20 bp, Artificial Sequence
  Description of Artificial Sequence: Synthetic oligonucleotide
  Target: LAMA2; (-) strand; PAM type: YTN; PAM sequence: CTT
ttcctggtgttgtttccagt

SEQ ID NO: 250057 - DNA, 20 bp, Artificial Sequence
  Description of Artificial Sequence: Synthetic oligonucleotide
  Target: LAMA2; (-) strand; PAM type: YTN; PAM sequence: CTG
taaaatcaagcttttcctgg

SEQ ID NO: 250058 - DNA, 20 bp, Artificial Sequence
  Description of Artificial Sequence: Synthetic oligonucleotide
  Target: LAMA2; (-) strand; PAM type: YTN; PAM sequence: TTC
cataagctgtaaaatcaagc

SEQ ID NO: 250059 - DNA, 20 bp, Artificial Sequence
  Description of Artificial Sequence: Synthetic oligonucleotide
  Target: LAMA2; (-) strand; PAM type: YTN; PAM sequence: TTT
ccataagctgtaaaatcaag

SEQ ID NO: 250060 - DNA, 20 bp, Artificial Sequence
  Description of Artificial Sequence: Synthetic oligonucleotide
  Target: LAMA2; (-) strand; PAM type: YTN; PAM sequence: CTT
tccataagctgtaaaatcaa

SEQ ID NO: 250061 - DNA, 20 bp, Artificial Sequence
  Description of Artificial Sequence: Synthetic oligonucleotide
  Target: LAMA2; (-) strand; PAM type: YTN; PAM sequence: CTC
cacaatctttccataagctg

SEQ ID NO: 250062 - DNA, 20 bp, Artificial Sequence
  Description of Artificial Sequence: Synthetic oligonucleotide
  Target: LAMA2; (-) strand; PAM type: YTN; PAM sequence: TTC
aactccacaatctttccata

SEQ ID NO: 250063 - DNA, 20 bp, Artificial Sequence
  Description of Artificial Sequence: Synthetic oligonucleotide
  Target: LAMA2; (-) strand; PAM type: YTN; PAM sequence: CTT
caactccacaatctttccat

SEQ ID NO: 250064 - DNA, 20 bp, Artificial Sequence
  Description of Artificial Sequence: Synthetic oligonucleotide
  Target: LAMA2; (-) strand; PAM type: YTN; PAM sequence: TTC
cttcaactccacaatctttc

SEQ ID NO: 250065 - DNA, 20 bp, Artificial Sequence
  Description of Artificial Sequence: Synthetic oligonucleotide
  Target: LAMA2; (-) strand; PAM type: YTN; PAM sequence: TTT
ccttcaactccacaatcttt

SEQ ID NO: 250066 - DNA, 20 bp, Artificial Sequence
  Description of Artificial Sequence: Synthetic oligonucleotide
  Target: LAMA2; (-) strand; PAM type: YTN; PAM sequence: TTT
tccttcaactccacaatctt

SEQ ID NO: 250067 - DNA, 20 bp, Artificial Sequence
  Description of Artificial Sequence: Synthetic oligonucleotide
  Target: LAMA2; (-) strand; PAM type: YTN; PAM sequence: TTT
ttccttcaactccacaatct

SEQ ID NO: 250068 - DNA, 20 bp, Artificial Sequence
  Description of Artificial Sequence: Synthetic oligonucleotide
  Target: LAMA2; (-) strand; PAM type: YTN; PAM sequence: CTA
tttttccttcaactccacaa

SEQ ID NO: 250069 - DNA, 20 bp, Artificial Sequence
  Description of Artificial Sequence: Synthetic oligonucleotide
  Target: LAMA2; (-) strand; PAM type: YTN; PAM sequence: TTC
tatttttccttcaactccac

SEQ ID NO: 250070 - DNA, 20 bp, Artificial Sequence
  Description of Artificial Sequence: Synthetic oligonucleotide
  Target: LAMA2; (-) strand; PAM type: YTN; PAM sequence: CTT
ctatttttccttcaactcca

SEQ ID NO: 250071 - DNA, 20 bp, Artificial Sequence
  Description of Artificial Sequence: Synthetic oligonucleotide
  Target: LAMA2; (-) strand; PAM type: YTN; PAM sequence: TTC
cttctatttttccttcaact

SEQ ID NO: 250072 - DNA, 20 bp, Artificial Sequence
  Description of Artificial Sequence: Synthetic oligonucleotide
  Target: LAMA2; (-) strand; PAM type: YTN; PAM sequence: TTT
ccttctatttttccttcaac

SEQ ID NO: 250073 - DNA, 20 bp, Artificial Sequence
  Description of Artificial Sequence: Synthetic oligonucleotide
  Target: LAMA2; (-) strand; PAM type: YTN; PAM sequence: CTT
tccttctatttttccttcaa

SEQ ID NO: 250074 - DNA, 20 bp, Artificial Sequence
  Description of Artificial Sequence: Synthetic oligonucleotide
  Target: LAMA2; (-) strand; PAM type: YTN; PAM sequence: TTC
tttccttctatttttccttc

SEQ ID NO: 250075 - DNA, 20 bp, Artificial Sequence
  Description of Artificial Sequence: Synthetic oligonucleotide
  Target: LAMA2; (-) strand; PAM type: YTN; PAM sequence: TTT
ctttccttctatttttcctt

SEQ ID NO: 250076 - DNA, 20 bp, Artificial Sequence
  Description of Artificial Sequence: Synthetic oligonucleotide
  Target: LAMA2; (-) strand; PAM type: YTN; PAM sequence: TTA
aaatttctttccttctattt

SEQ ID NO: 250077 - DNA, 20 bp, Artificial Sequence
  Description of Artificial Sequence: Synthetic oligonucleotide
  Target: LAMA2; (-) strand; PAM type: YTN; PAM sequence: TTT
aaaatttctttccttctatt

SEQ ID NO: 250078 - DNA, 20 bp, Artificial Sequence
  Description of Artificial Sequence: Synthetic oligonucleotide
  Target: LAMA2; (-) strand; PAM type: YTN; PAM sequence: TTT
taaaatttctttccttctat

SEQ ID NO: 250079 - DNA, 20 bp, Artificial Sequence
  Description of Artificial Sequence: Synthetic oligonucleotide
  Target: LAMA2; (-) strand; PAM type: YTN; PAM sequence: TTT
ttaaaatttctttccttcta

SEQ ID NO: 250080 - DNA, 20 bp, Artificial Sequence
  Description of Artificial Sequence: Synthetic oligonucleotide
  Target: LAMA2; (-) strand; PAM type: YTN; PAM sequence: CTT
tttaaaatttctttccttct

SEQ ID NO: 250081 - DNA, 20 bp, Artificial Sequence
  Description of Artificial Sequence: Synthetic oligonucleotide
  Target: LAMA2; (-) strand; PAM type: YTN; PAM sequence: TTC
tttttaaaatttctttcctt

SEQ ID NO: 250082 - DNA, 20 bp, Artificial Sequence
  Description of Artificial Sequence: Synthetic oligonucleotide
  Target: LAMA2; (-) strand; PAM type: YTN; PAM sequence: TTA
ttctttttaaaatttctttc

SEQ ID NO: 250083 - DNA, 20 bp, Artificial Sequence
  Description of Artificial Sequence: Synthetic oligonucleotide
  Target: LAMA2; (-) strand; PAM type: YTN; PAM sequence: CTT
attctttttaaaatttcttt

SEQ ID NO: 250084 - DNA, 20 bp, Artificial Sequence
  Description of Artificial Sequence: Synthetic oligonucleotide
  Target: LAMA2; (-) strand; PAM type: YTN; PAM sequence: TTA
acttattctttttaaaattt

SEQ ID NO: 250085 - DNA, 20 bp, Artificial Sequence
  Description of Artificial Sequence: Synthetic oligonucleotide
  Target: LAMA2; (-) strand; PAM type: YTN; PAM sequence: CTA
ggaatattaacttattcttt

SEQ ID NO: 250086 - DNA, 20 bp, Artificial Sequence
  Description of Artificial Sequence: Synthetic oligonucleotide
  Target: LAMA2; (-) strand; PAM type: YTN; PAM sequence: TTA
gaggatgcacccctaggaat

SEQ ID NO: 250087 - DNA, 20 bp, Artificial Sequence
  Description of Artificial Sequence: Synthetic oligonucleotide
  Target: LAMA2; (-) strand; PAM type: YTN; PAM sequence: TTT
agaggatgcacccctaggaa

SEQ ID NO: 250088 - DNA, 20 bp, Artificial Sequence
  Description of Artificial Sequence: Synthetic oligonucleotide
  Target: LAMA2; (-) strand; PAM type: YTN; PAM sequence: CTG
caatttagaggatgcacccc

SEQ ID NO: 250089 - DNA, 20 bp, Artificial Sequence
  Description of Artificial Sequence: Synthetic oligonucleotide
  Target: LAMA2; (-) strand; PAM type: YTN; PAM sequence: CTC
tgcaatttagaggatgcacc

SEQ ID NO: 250090 - DNA, 20 bp, Artificial Sequence
  Description of Artificial Sequence: Synthetic oligonucleotide
  Target: LAMA2; (-) strand; PAM type: YTN; PAM sequence: TTA
agatatcactctgcaattta

SEQ ID NO: 250091 - DNA, 20 bp, Artificial Sequence
  Description of Artificial Sequence: Synthetic oligonucleotide
  Target: LAMA2; (-) strand; PAM type: YTN; PAM sequence: CTT
aagatatcactctgcaattt

SEQ ID NO: 250092 - DNA, 20 bp, Artificial Sequence
  Description of Artificial Sequence: Synthetic oligonucleotide
  Target: LAMA2; (-) strand; PAM type: YTN; PAM sequence: TTG
cttaagatatcactctgcaa

SEQ ID NO: 250093 - DNA, 20 bp, Artificial Sequence
  Description of Artificial Sequence: Synthetic oligonucleotide
  Target: LAMA2; (-) strand; PAM type: YTN; PAM sequence: TTA
aaaggattgcttaagatatc

SEQ ID NO: 250094 - DNA, 20 bp, Artificial Sequence
  Description of Artificial Sequence: Synthetic oligonucleotide
  Target: LAMA2; (-) strand; PAM type: YTN; PAM sequence: CTT
aaaaggattgcttaagatat

SEQ ID NO: 250095 - DNA, 20 bp, Artificial Sequence
  Description of Artificial Sequence: Synthetic oligonucleotide
  Target: LAMA2; (-) strand; PAM type: YTN; PAM sequence: TTC
ttaaaaggattgcttaagat

SEQ ID NO: 250096 - DNA, 20 bp, Artificial Sequence
  Description of Artificial Sequence: Synthetic oligonucleotide
  Target: LAMA2; (-) strand; PAM type: YTN; PAM sequence: TTA
agtaattcttaaaaggattg

SEQ ID NO: 250097 - DNA, 20 bp, Artificial Sequence
  Description of Artificial Sequence: Synthetic oligonucleotide
  Target: LAMA2; (-) strand; PAM type: YTN; PAM sequence: CTT
aagtaattcttaaaaggatt

SEQ ID NO: 250098 - DNA, 20 bp, Artificial Sequence
  Description of Artificial Sequence: Synthetic oligonucleotide
  Target: LAMA2; (-) strand; PAM type: YTN; PAM sequence: CTC
ttaagtaattcttaaaagga

SEQ ID NO: 250099 - DNA, 20 bp, Artificial Sequence
  Description of Artificial Sequence: Synthetic oligonucleotide
  Target: LAMA2; (-) strand; PAM type: YTN; PAM sequence: CTC
aggctcttaagtaattctta

SEQ ID NO: 250100 - DNA, 20 bp, Artificial Sequence
  Description of Artificial Sequence: Synthetic oligonucleotide
  Target: LAMA2; (-) strand; PAM type: YTN; PAM sequence: TTA
caggtgtgagccaccacgct

SEQ ID NO: 250101 - DNA, 20 bp, Artificial Sequence
  Description of Artificial Sequence: Synthetic oligonucleotide
  Target: LAMA2; (-) strand; PAM type: YTN; PAM sequence: CTG
ggattacaggtgtgagccac

SEQ ID NO: 250102 - DNA, 20 bp, Artificial Sequence
  Description of Artificial Sequence: Synthetic oligonucleotide
  Target: LAMA2; (-) strand; PAM type: YTN; PAM sequence: CTC
ccaaagtgctgggattacag

SEQ ID NO: 250103 - DNA, 20 bp, Artificial Sequence
  Description of Artificial Sequence: Synthetic oligonucleotide
  Target: LAMA2; (-) strand; PAM type: YTN; PAM sequence: CTC
cgtctcccaaagtgctggga

SEQ ID NO: 250104 - DNA, 20 bp, Artificial Sequence
  Description of Artificial Sequence: Synthetic oligonucleotide
  Target: LAMA2; (-) strand; PAM type: YTN; PAM sequence: CTC
acctccgtctcccaaagtgc

SEQ ID NO: 250105 - DNA, 20 bp, Artificial Sequence
  Description of Artificial Sequence: Synthetic oligonucleotide
  Target: LAMA2; (-) strand; PAM type: YTN; PAM sequence: CTA
ctcacctccgtctcccaaag

SEQ ID NO: 250106 - DNA, 20 bp, Artificial Sequence
  Description of Artificial Sequence: Synthetic oligonucleotide
  Target: LAMA2; (-) strand; PAM type: YTN; PAM sequence: CTC
aagcaatctactcacctccg

SEQ ID NO: 250107 - DNA, 20 bp, Artificial Sequence
  Description of Artificial Sequence: Synthetic oligonucleotide
  Target: LAMA2; (-) strand; PAM type: YTN; PAM sequence: CTA
acctcaagcaatctactcac

SEQ ID NO: 250108 - DNA, 20 bp, Artificial Sequence
  Description of Artificial Sequence: Synthetic oligonucleotide
  Target: LAMA2; (-) strand; PAM type: YTN; PAM sequence: CTC
ctaacctcaagcaatctact

SEQ ID NO: 250109 - DNA, 20 bp, Artificial Sequence
  Description of Artificial Sequence: Synthetic oligonucleotide
  Target: LAMA2; (-) strand; PAM type: YTN; PAM sequence: TTG
aactcctaacctcaagcaat

SEQ ID NO: 250110 - DNA, 20 bp, Artificial Sequence
  Description of Artificial Sequence: Synthetic oligonucleotide
  Target: LAMA2; (-) strand; PAM type: YTN; PAM sequence: CTT
gaactcctaacctcaagcaa

SEQ ID NO: 250111 - DNA, 20 bp, Artificial Sequence
  Description of Artificial Sequence: Synthetic oligonucleotide
  Target: LAMA2; (-) strand; PAM type: YTN; PAM sequence: CTG
gtcttgaactcctaacctca

SEQ ID NO: 250112 - DNA, 20 bp, Artificial Sequence
  Description of Artificial Sequence: Synthetic oligonucleotide
  Target: LAMA2; (-) strand; PAM type: YTN; PAM sequence: TTG
gccaggctggtcttgaactc

SEQ ID NO: 250113 - DNA, 20 bp, Artificial Sequence
  Description of Artificial Sequence: Synthetic oligonucleotide
  Target: LAMA2; (-) strand; PAM type: YTN; PAM sequence: TTC
gccatgttggccaggctggt

SEQ ID NO: 250114 - DNA, 20 bp, Artificial Sequence
  Description of Artificial Sequence: Synthetic oligonucleotide
  Target: LAMA2; (-) strand; PAM type: YTN; PAM sequence: TTT
cgccatgttggccaggctgg

SEQ ID NO: 250115 - DNA, 20 bp, Artificial Sequence
  Description of Artificial Sequence: Synthetic oligonucleotide
  Target: LAMA2; (-) strand; PAM type: YTN; PAM sequence: TTG
tagagatgggatttcgccat

SEQ ID NO: 250116 - DNA, 20 bp, Artificial Sequence
  Description of Artificial Sequence: Synthetic oligonucleotide
  Target: LAMA2; (-) strand; PAM type: YTN; PAM sequence: TTT
gtagagatgggatttcgcca

SEQ ID NO: 250117 - DNA, 20 bp, Artificial Sequence
  Description of Artificial Sequence: Synthetic oligonucleotide
  Target: LAMA2; (-) strand; PAM type: YTN; PAM sequence: TTT
tgtagagatgggatttcgcc

SEQ ID NO: 250118 - DNA, 20 bp, Artificial Sequence
  Description of Artificial Sequence: Synthetic oligonucleotide
  Target: LAMA2; (-) strand; PAM type: YTN; PAM sequence: TTT
ttgtagagatgggatttcgc

SEQ ID NO: 250119 - DNA, 20 bp, Artificial Sequence
  Description of Artificial Sequence: Synthetic oligonucleotide
  Target: LAMA2; (-) strand; PAM type: YTN; PAM sequence: TTT
tttgtagagatgggatttcg

SEQ ID NO: 250120 - DNA, 20 bp, Artificial Sequence
  Description of Artificial Sequence: Synthetic oligonucleotide
  Target: LAMA2; (-) strand; PAM type: YTN; PAM sequence: TTG
tattttttgtagagatggga

SEQ ID NO: 250121 - DNA, 20 bp, Artificial Sequence
  Description of Artificial Sequence: Synthetic oligonucleotide
  Target: LAMA2; (-) strand; PAM type: YTN; PAM sequence: TTT
gtattttttgtagagatggg

SEQ ID NO: 250122 - DNA, 20 bp, Artificial Sequence
  Description of Artificial Sequence: Synthetic oligonucleotide
  Target: LAMA2; (-) strand; PAM type: YTN; PAM sequence: TTT
tgtattttttgtagagatgg

SEQ ID NO: 250123 - DNA, 20 bp, Artificial Sequence
  Description of Artificial Sequence: Synthetic oligonucleotide
  Target: LAMA2; (-) strand; PAM type: YTN; PAM sequence: TTT
ttgtattttttgtagagatg

SEQ ID NO: 250124 - DNA, 20 bp, Artificial Sequence
  Description of Artificial Sequence: Synthetic oligonucleotide
  Target: LAMA2; (-) strand; PAM type: YTN; PAM sequence: TTT
tttgtattttttgtagagat

SEQ ID NO: 250125 - DNA, 20 bp, Artificial Sequence
  Description of Artificial Sequence: Synthetic oligonucleotide
  Target: LAMA2; (-) strand; PAM type: YTN; PAM sequence: CTG
cataattttttgtatttttt

SEQ ID NO: 250126 - DNA, 20 bp, Artificial Sequence
  Description of Artificial Sequence: Synthetic oligonucleotide
  Target: LAMA2; (-) strand; PAM type: YTN; PAM sequence: CTA
caggtgtgtgccatcatgac

SEQ ID NO: 250127 - DNA, 20 bp, Artificial Sequence
  Description of Artificial Sequence: Synthetic oligonucleotide
  Target: LAMA2; (-) strand; PAM type: YTN; PAM sequence: CTG
ggactacaggtgtgtgccat

SEQ ID NO: 250128 - DNA, 20 bp, Artificial Sequence
  Description of Artificial Sequence: Synthetic oligonucleotide
  Target: LAMA2; (-) strand; PAM type: YTN; PAM sequence: CTC
ccgagtatctgggactacag

SEQ ID NO: 250129 - DNA, 20 bp, Artificial Sequence
  Description of Artificial Sequence: Synthetic oligonucleotide
  Target: LAMA2; (-) strand; PAM type: YTN; PAM sequence: CTC
agcctcccgagtatctggga

SEQ ID NO: 250130 - DNA, 20 bp, Artificial Sequence
  Description of Artificial Sequence: Synthetic oligonucleotide
  Target: LAMA2; (-) strand; PAM type: YTN; PAM sequence: TTG
tgcctcagcctcccgagtat

SEQ ID NO: 250131 - DNA, 20 bp, Artificial Sequence
  Description of Artificial Sequence: Synthetic oligonucleotide
  Target: LAMA2; (-) strand; PAM type: YTN; PAM sequence: CTT
gtgcctcagcctcccgagta

SEQ ID NO: 250132 - DNA, 20 bp, Artificial Sequence
  Description of Artificial Sequence: Synthetic oligonucleotide
  Target: LAMA2; (-) strand; PAM type: YTN; PAM sequence: TTC
ttgtgcctcagcctcccgag

SEQ ID NO: 250133 - DNA, 20 bp, Artificial Sequence
  Description of Artificial Sequence: Synthetic oligonucleotide
  Target: LAMA2; (-) strand; PAM type: YTN; PAM sequence: TTA
agcagttcttgtgcctcagc

SEQ ID NO: 250134 - DNA, 20 bp, Artificial Sequence
  Description of Artificial Sequence: Synthetic oligonucleotide
  Target: LAMA2; (-) strand; PAM type: YTN; PAM sequence: CTT
aagcagttcttgtgcctcag

SEQ ID NO: 250135 - DNA, 20 bp, Artificial Sequence
  Description of Artificial Sequence: Synthetic oligonucleotide
  Target: LAMA2; (-) strand; PAM type: YTN; PAM sequence: CTC
ccaggcttaagcagttcttg

SEQ ID NO: 250136 - DNA, 20 bp, Artificial Sequence
  Description of Artificial Sequence: Synthetic oligonucleotide
  Target: LAMA2; (-) strand; PAM type: YTN; PAM sequence: CTC
ctcccaggcttaagcagttc

SEQ ID NO: 250137 - DNA, 20 bp, Artificial Sequence
  Description of Artificial Sequence: Synthetic oligonucleotide
  Target: LAMA2; (-) strand; PAM type: YTN; PAM sequence: CTC
ctcctcccaggcttaagcag

SEQ ID NO: 250138 - DNA, 20 bp, Artificial Sequence
  Description of Artificial Sequence: Synthetic oligonucleotide
  Target: LAMA2; (-) strand; PAM type: YTN; PAM sequence: CTG
caacctcctcctcccaggct

SEQ ID NO: 250139 - DNA, 20 bp, Artificial Sequence
  Description of Artificial Sequence: Synthetic oligonucleotide
  Target: LAMA2; (-) strand; PAM type: YTN; PAM sequence: CTC
actgcaacctcctcctccca

SEQ ID NO: 250140 - DNA, 20 bp, Artificial Sequence
  Description of Artificial Sequence: Synthetic oligonucleotide
  Target: LAMA2; (-) strand; PAM type: YTN; PAM sequence: TTA
gctcactgcaacctcctcct

SEQ ID NO: 250141 - DNA, 20 bp, Artificial Sequence
  Description of Artificial Sequence: Synthetic oligonucleotide
  Target: LAMA2; (-) strand; PAM type: YTN; PAM sequence: CTT
agctcactgcaacctcctcc

SEQ ID NO: 250142 - DNA, 20 bp, Artificial Sequence
  Description of Artificial Sequence: Synthetic oligonucleotide
  Target: LAMA2; (-) strand; PAM type: YTN; PAM sequence: CTG
atgtggagtggcaccatctt

SEQ ID NO: 250143 - DNA, 20 bp, Artificial Sequence
  Description of Artificial Sequence: Synthetic oligonucleotide
  Target: LAMA2; (-) strand; PAM type: YTN; PAM sequence: TTC
aggctgatgtggagtggcac

SEQ ID NO: 250144 - DNA, 20 bp, Artificial Sequence
  Description of Artificial Sequence: Synthetic oligonucleotide
  Target: LAMA2; (-) strand; PAM type: YTN; PAM sequence: CTG
tcattcaggctgatgtggag

SEQ ID NO: 250145 - DNA, 20 bp, Artificial Sequence
  Description of Artificial Sequence: Synthetic oligonucleotide
  Target: LAMA2; (-) strand; PAM type: YTN; PAM sequence: CTC
tgtcattcaggctgatgtgg

SEQ ID NO: 250146 - DNA, 20 bp, Artificial Sequence
  Description of Artificial Sequence: Synthetic oligonucleotide
  Target: LAMA2; (-) strand; PAM type: YTN; PAM sequence: TTG
ctctgtcattcaggctgatg

SEQ ID NO: 250147 - DNA, 20 bp, Artificial Sequence
  Description of Artificial Sequence: Synthetic oligonucleotide
  Target: LAMA2; (-) strand; PAM type: YTN; PAM sequence: CTT
gctctgtcattcaggctgat

SEQ ID NO: 250148 - DNA, 20 bp, Artificial Sequence
  Description of Artificial Sequence: Synthetic oligonucleotide
  Target: LAMA2; (-) strand; PAM type: YTN; PAM sequence: CTA
gagtcttgctctgtcattca

SEQ ID NO: 250149 - DNA, 20 bp, Artificial Sequence
  Description of Artificial Sequence: Synthetic oligonucleotide
  Target: LAMA2; (-) strand; PAM type: YTN; PAM sequence: TTG
acctagagtcttgctctgtc

SEQ ID NO: 250150 - DNA, 20 bp, Artificial Sequence
  Description of Artificial Sequence: Synthetic oligonucleotide
  Target: LAMA2; (-) strand; PAM type: YTN; PAM sequence: TTT
gacctagagtcttgctctgt

SEQ ID NO: 250151 - DNA, 20 bp, Artificial Sequence
  Description of Artificial Sequence: Synthetic oligonucleotide
  Target: LAMA2; (-) strand; PAM type: YTN; PAM sequence: TTT
tgacctagagtcttgctctg

SEQ ID NO: 250152 - DNA, 20 bp, Artificial Sequence
  Description of Artificial Sequence: Synthetic oligonucleotide
  Target: LAMA2; (-) strand; PAM type: YTN; PAM sequence: TTT
ttgacctagagtcttgctct

SEQ ID NO: 250153 - DNA, 20 bp, Artificial Sequence
  Description of Artificial Sequence: Synthetic oligonucleotide
  Target: LAMA2; (-) strand; PAM type: YTN; PAM sequence: TTT
tttgacctagagtcttgctc

SEQ ID NO: 250154 - DNA, 20 bp, Artificial Sequence
  Description of Artificial Sequence: Synthetic oligonucleotide
  Target: LAMA2; (-) strand; PAM type: YTN; PAM sequence: TTA
ttttttgacctagagtcttg

SEQ ID NO: 250155 - DNA, 20 bp, Artificial Sequence
  Description of Artificial Sequence: Synthetic oligonucleotide
  Target: LAMA2; (-) strand; PAM type: YTN; PAM sequence: TTT
attttttgacctagagtctt

SEQ ID NO: 250156 - DNA, 20 bp, Artificial Sequence
  Description of Artificial Sequence: Synthetic oligonucleotide
  Target: LAMA2; (-) strand; PAM type: YTN; PAM sequence: CTT
tattttttgacctagagtct

SEQ ID NO: 250157 - DNA, 20 bp, Artificial Sequence
  Description of Artificial Sequence: Synthetic oligonucleotide
  Target: LAMA2; (-) strand; PAM type: YTN; PAM sequence: TTC
tttattttttgacctagagt

SEQ ID NO: 250158 - DNA, 20 bp, Artificial Sequence
  Description of Artificial Sequence: Synthetic oligonucleotide
  Target: LAMA2; (-) strand; PAM type: YTN; PAM sequence: TTT
ctttattttttgacctagag

SEQ ID NO: 250159 - DNA, 20 bp, Artificial Sequence
  Description of Artificial Sequence: Synthetic oligonucleotide
  Target: LAMA2; (-) strand; PAM type: YTN; PAM sequence: CTT
tctttattttttgacctaga

SEQ ID NO: 250160 - DNA, 20 bp, Artificial Sequence
  Description of Artificial Sequence: Synthetic oligonucleotide
  Target: LAMA2; (-) strand; PAM type: YTN; PAM sequence: CTG
tctttctttattttttgacc

SEQ ID NO: 250161 - DNA, 20 bp, Artificial Sequence
  Description of Artificial Sequence: Synthetic oligonucleotide
  Target: LAMA2; (-) strand; PAM type: YTN; PAM sequence: TTC
tgtctttctttattttttga

SEQ ID NO: 250162 - DNA, 20 bp, Artificial Sequence
  Description of Artificial Sequence: Synthetic oligonucleotide
  Target: LAMA2; (-) strand; PAM type: YTN; PAM sequence: TTA
agtaattctgtctttcttta

SEQ ID NO: 250163 - DNA, 20 bp, Artificial Sequence
  Description of Artificial Sequence: Synthetic oligonucleotide
  Target: LAMA2; (-) strand; PAM type: YTN; PAM sequence: CTT
aagtaattctgtctttcttt

SEQ ID NO: 250164 - DNA, 20 bp, Artificial Sequence
  Description of Artificial Sequence: Synthetic oligonucleotide
  Target: LAMA2; (-) strand; PAM type: YTN; PAM sequence: TTA
cttaagtaattctgtctttc

SEQ ID NO: 250165 - DNA, 20 bp, Artificial Sequence
  Description of Artificial Sequence: Synthetic oligonucleotide
  Target: LAMA2; (-) strand; PAM type: YTN; PAM sequence: CTT
acttaagtaattctgtcttt

SEQ ID NO: 250166 - DNA, 20 bp, Artificial Sequence
  Description of Artificial Sequence: Synthetic oligonucleotide
  Target: LAMA2; (-) strand; PAM type: YTN; PAM sequence: TTA
gtcaagtacttacttaagta

SEQ ID NO: 250167 - DNA, 20 bp, Artificial Sequence
  Description of Artificial Sequence: Synthetic oligonucleotide
  Target: LAMA2; (-) strand; PAM type: YTN; PAM sequence: TTA
tataaccagttagtcaagta

SEQ ID NO: 250168 - DNA, 20 bp, Artificial Sequence
  Description of Artificial Sequence: Synthetic oligonucleotide
  Target: LAMA2; (-) strand; PAM type: YTN; PAM sequence: TTT
atataaccagttagtcaagt

SEQ ID NO: 250169 - DNA, 20 bp, Artificial Sequence
  Description of Artificial Sequence: Synthetic oligonucleotide
  Target: LAMA2; (-) strand; PAM type: YTN; PAM sequence: TTA
tgatcacatttatataacca

SEQ ID NO: 250170 - DNA, 20 bp, Artificial Sequence
  Description of Artificial Sequence: Synthetic oligonucleotide
  Target: LAMA2; (-) strand; PAM type: YTN; PAM sequence: TTT
atgatcacatttatataacc

SEQ ID NO: 250171 - DNA, 20 bp, Artificial Sequence
  Description of Artificial Sequence: Synthetic oligonucleotide
  Target: LAMA2; (-) strand; PAM type: YTN; PAM sequence: CTA
aaggtatgcgtttatgatca

SEQ ID NO: 250172 - DNA, 20 bp, Artificial Sequence
  Description of Artificial Sequence: Synthetic oligonucleotide
  Target: LAMA2; (-) strand; PAM type: YTN; PAM sequence: TTA
ccctaaaggtatgcgtttat

SEQ ID NO: 250173 - DNA, 20 bp, Artificial Sequence
  Description of Artificial Sequence: Synthetic oligonucleotide
  Target: LAMA2; (-) strand; PAM type: YTN; PAM sequence: TTT
accctaaaggtatgcgttta

SEQ ID NO: 250174 - DNA, 20 bp, Artificial Sequence
  Description of Artificial Sequence: Synthetic oligonucleotide
  Target: LAMA2; (-) strand; PAM type: YTN; PAM sequence: TTC
atttaccctaaaggtatgcg

SEQ ID NO: 250175 - DNA, 20 bp, Artificial Sequence
  Description of Artificial Sequence: Synthetic oligonucleotide
  Target: LAMA2; (-) strand; PAM type: YTN; PAM sequence: TTT
catttaccctaaaggtatgc

SEQ ID NO: 250176 - DNA, 20 bp, Artificial Sequence
  Description of Artificial Sequence: Synthetic oligonucleotide
  Target: LAMA2; (-) strand; PAM type: YTN; PAM sequence: TTT
tcatttaccctaaaggtatg

SEQ ID NO: 250177 - DNA, 20 bp, Artificial Sequence
  Description of Artificial Sequence: Synthetic oligonucleotide
  Target: LAMA2; (-) strand; PAM type: YTN; PAM sequence: TTT
ttcatttaccctaaaggtat

SEQ ID NO: 250178 - DNA, 20 bp, Artificial Sequence
  Description of Artificial Sequence: Synthetic oligonucleotide
  Target: LAMA2; (-) strand; PAM type: YTN; PAM sequence: CTT
tttcatttaccctaaaggta

SEQ ID NO: 250179 - DNA, 20 bp, Artificial Sequence
  Description of Artificial Sequence: Synthetic oligonucleotide
  Target: LAMA2; (-) strand; PAM type: YTN; PAM sequence: TTA
gaatcaatgtctttttcatt

SEQ ID NO: 250180 - DNA, 20 bp, Artificial Sequence
  Description of Artificial Sequence: Synthetic oligonucleotide
  Target: LAMA2; (-) strand; PAM type: YTN; PAM sequence: TTA
cacaatattagaatcaatgt

SEQ ID NO: 250181 - DNA, 20 bp, Artificial Sequence
  Description of Artificial Sequence: Synthetic oligonucleotide
  Target: LAMA2; (-) strand; PAM type: YTN; PAM sequence: TTT
acacaatattagaatcaatg

SEQ ID NO: 250182 - DNA, 20 bp, Artificial Sequence
  Description of Artificial Sequence: Synthetic oligonucleotide
  Target: LAMA2; (-) strand; PAM type: YTN; PAM sequence: TTA
cccatttacacaatattaga

SEQ ID NO: 250183 - DNA, 20 bp, Artificial Sequence
  Description of Artificial Sequence: Synthetic oligonucleotide
  Target: LAMA2; (-) strand; PAM type: YTN; PAM sequence: TTC
ccaagccacagttacccatt

SEQ ID NO: 250184 - DNA, 20 bp, Artificial Sequence
  Description of Artificial Sequence: Synthetic oligonucleotide
  Target: LAMA2; (-) strand; PAM type: YTN; PAM sequence: TTT
cccaagccacagttacccat

SEQ ID NO: 250185 - DNA, 20 bp, Artificial Sequence
  Description of Artificial Sequence: Synthetic oligonucleotide
  Target: LAMA2; (-) strand; PAM type: YTN; PAM sequence: TTT
tcccaagccacagttaccca

SEQ ID NO: 250186 - DNA, 20 bp, Artificial Sequence
  Description of Artificial Sequence: Synthetic oligonucleotide
  Target: LAMA2; (-) strand; PAM type: YTN; PAM sequence: TTT
ttcccaagccacagttaccc

SEQ ID NO: 250187 - DNA, 20 bp, Artificial Sequence
  Description of Artificial Sequence: Synthetic oligonucleotide
  Target: LAMA2; (-) strand; PAM type: YTN; PAM sequence: TTT
tttcccaagccacagttacc

SEQ ID NO: 250188 - DNA, 20 bp, Artificial Sequence
  Description of Artificial Sequence: Synthetic oligonucleotide
  Target: LAMA2; (-) strand; PAM type: YTN; PAM sequence: TTT
ttttcccaagccacagttac

SEQ ID NO: 250189 - DNA, 20 bp, Artificial Sequence
  Description of Artificial Sequence: Synthetic oligonucleotide
  Target: LAMA2; (-) strand; PAM type: YTN; PAM sequence: CTA
gatgtttttttcccaagcca

SEQ ID NO: 250190 - DNA, 20 bp, Artificial Sequence
  Description of Artificial Sequence: Synthetic oligonucleotide
  Target: LAMA2; (-) strand; PAM type: YTN; PAM sequence: TTA
ctagatgtttttttcccaag

SEQ ID NO: 250191 - DNA, 20 bp, Artificial Sequence
  Description of Artificial Sequence: Synthetic oligonucleotide
  Target: LAMA2; (-) strand; PAM type: YTN; PAM sequence: CTG
ttactagatgtttttttccc

SEQ ID NO: 250192 - DNA, 20 bp, Artificial Sequence
  Description of Artificial Sequence: Synthetic oligonucleotide
  Target: LAMA2; (-) strand; PAM type: YTN; PAM sequence: TTC
aggatactgttactagatgt

SEQ ID NO: 250193 - DNA, 20 bp, Artificial Sequence
  Description of Artificial Sequence: Synthetic oligonucleotide
  Target: LAMA2; (-) strand; PAM type: YTN; PAM sequence: TTT
caggatactgttactagatg

SEQ ID NO: 250194 - DNA, 20 bp, Artificial Sequence
  Description of Artificial Sequence: Synthetic oligonucleotide
  Target: LAMA2; (-) strand; PAM type: YTN; PAM sequence: TTT
tcaggatactgttactagat

SEQ ID NO: 250195 - DNA, 20 bp, Artificial Sequence
  Description of Artificial Sequence: Synthetic oligonucleotide
  Target: LAMA2; (-) strand; PAM type: YTN; PAM sequence: TTA
aacaattttcaggatactgt

SEQ ID NO: 250196 - DNA, 20 bp, Artificial Sequence
  Description of Artificial Sequence: Synthetic oligonucleotide
  Target: LAMA2; (-) strand; PAM type: YTN; PAM sequence: TTT
aaacaattttcaggatactg

SEQ ID NO: 250197 - DNA, 20 bp, Artificial Sequence
  Description of Artificial Sequence: Synthetic oligonucleotide
  Target: LAMA2; (-) strand; PAM type: YTN; PAM sequence: TTG
tgtgaaacacggaccattta

SEQ ID NO: 250198 - DNA, 20 bp, Artificial Sequence
  Description of Artificial Sequence: Synthetic oligonucleotide
  Target: LAMA2; (-) strand; PAM type: YTN; PAM sequence: TTA
agttgtgtgaaacacggacc

SEQ ID NO: 250199 - DNA, 20 bp, Artificial Sequence
  Description of Artificial Sequence: Synthetic oligonucleotide
  Target: LAMA2; (-) strand; PAM type: YTN; PAM sequence: TTT
aagttgtgtgaaacacggac

SEQ ID NO: 250200 - DNA, 20 bp, Artificial Sequence
  Description of Artificial Sequence: Synthetic oligonucleotide
  Target: LAMA2; (-) strand; PAM type: YTN; PAM sequence: TTC
catttaagttgtgtgaaaca

SEQ ID NO: 250201 - DNA, 20 bp, Artificial Sequence
  Description of Artificial Sequence: Synthetic oligonucleotide
  Target: LAMA2; (-) strand; PAM type: YTN; PAM sequence: CTT
ccatttaagttgtgtgaaac

SEQ ID NO: 250202 - DNA, 20 bp, Artificial Sequence
  Description of Artificial Sequence: Synthetic oligonucleotide
  Target: LAMA2; (-) strand; PAM type: YTN; PAM sequence: TTA
cttccatttaagttgtgtga

SEQ ID NO: 250203 - DNA, 20 bp, Artificial Sequence
  Description of Artificial Sequence: Synthetic oligonucleotide
  Target: LAMA2; (-) strand; PAM type: YTN; PAM sequence: TTT
acttccatttaagttgtgtg

SEQ ID NO: 250204 - DNA, 20 bp, Artificial Sequence
  Description of Artificial Sequence: Synthetic oligonucleotide
  Target: LAMA2; (-) strand; PAM type: YTN; PAM sequence: TTT
tacttccatttaagttgtgt

SEQ ID NO: 250205 - DNA, 20 bp, Artificial Sequence
  Description of Artificial Sequence: Synthetic oligonucleotide
  Target: LAMA2; (-) strand; PAM type: YTN; PAM sequence: CTG
ttttacttccatttaagttg

SEQ ID NO: 250206 - DNA, 20 bp, Artificial Sequence
  Description of Artificial Sequence: Synthetic oligonucleotide
  Target: LAMA2; (-) strand; PAM type: YTN; PAM sequence: TTG
tcatgagcgaagctgtttta

SEQ ID NO: 250207 - DNA, 20 bp, Artificial Sequence
  Description of Artificial Sequence: Synthetic oligonucleotide
  Target: LAMA2; (-) strand; PAM type: YTN; PAM sequence: CTG
aaaattgtcatgagcgaagc

SEQ ID NO: 250208 - DNA, 20 bp, Artificial Sequence
  Description of Artificial Sequence: Synthetic oligonucleotide
  Target: LAMA2; (-) strand; PAM type: YTN; PAM sequence: TTG
cctgaaaattgtcatgagcg

SEQ ID NO: 250209 - DNA, 20 bp, Artificial Sequence
  Description of Artificial Sequence: Synthetic oligonucleotide
  Target: LAMA2; (-) strand; PAM type: YTN; PAM sequence: TTG
aattgcctgaaaattgtcat

SEQ ID NO: 250210 - DNA, 20 bp, Artificial Sequence
  Description of Artificial Sequence: Synthetic oligonucleotide
  Target: LAMA2; (-) strand; PAM type: YTN; PAM sequence: TTT
gaattgcctgaaaattgtca

SEQ ID NO: 250211 - DNA, 20 bp, Artificial Sequence
  Description of Artificial Sequence: Synthetic oligonucleotide
  Target: LAMA2; (-) strand; PAM type: YTN; PAM sequence: TTT
tgaattgcctgaaaattgtc

SEQ ID NO: 250212 - DNA, 20 bp, Artificial Sequence
  Description of Artificial Sequence: Synthetic oligonucleotide
  Target: LAMA2; (-) strand; PAM type: YTN; PAM sequence: TTA
caacgtattttgaattgcct

SEQ ID NO: 250213 - DNA, 20 bp, Artificial Sequence
  Description of Artificial Sequence: Synthetic oligonucleotide
  Target: LAMA2; (-) strand; PAM type: YTN; PAM sequence: TTA
ttacaacgtattttgaattg

SEQ ID NO: 250214 - DNA, 20 bp, Artificial Sequence
  Description of Artificial Sequence: Synthetic oligonucleotide
  Target: LAMA2; (-) strand; PAM type: YTN; PAM sequence: TTG
ccattattacaacgtatttt

SEQ ID NO: 250215 - DNA, 20 bp, Artificial Sequence
  Description of Artificial Sequence: Synthetic oligonucleotide
  Target: LAMA2; (-) strand; PAM type: YTN; PAM sequence: TTT
gccattattacaacgtattt

SEQ ID NO: 250216 - DNA, 20 bp, Artificial Sequence
  Description of Artificial Sequence: Synthetic oligonucleotide
  Target: LAMA2; (-) strand; PAM type: YTN; PAM sequence: CTC
atgtttgccattattacaac

SEQ ID NO: 250217 - DNA, 20 bp, Artificial Sequence
  Description of Artificial Sequence: Synthetic oligonucleotide
  Target: LAMA2; (-) strand; PAM type: YTN; PAM sequence: CTG
atactcatgtttgccattat

SEQ ID NO: 250218 - DNA, 20 bp, Artificial Sequence
  Description of Artificial Sequence: Synthetic oligonucleotide
  Target: LAMA2; (-) strand; PAM type: YTN; PAM sequence: CTC
tgatactcatgtttgccatt

SEQ ID NO: 250219 - DNA, 20 bp, Artificial Sequence
  Description of Artificial Sequence: Synthetic oligonucleotide
  Target: LAMA2; (-) strand; PAM type: YTN; PAM sequence: TTG
tgtatctctgatactcatgt

SEQ ID NO: 250220 - DNA, 20 bp, Artificial Sequence
  Description of Artificial Sequence: Synthetic oligonucleotide
  Target: LAMA2; (-) strand; PAM type: YTN; PAM sequence: TTT
gtgtatctctgatactcatg

SEQ ID NO: 250221 - DNA, 20 bp, Artificial Sequence
  Description of Artificial Sequence: Synthetic oligonucleotide
  Target: LAMA2; (-) strand; PAM type: YTN; PAM sequence: TTT
tgtgtatctctgatactcat

SEQ ID NO: 250222 - DNA, 20 bp, Artificial Sequence
  Description of Artificial Sequence: Synthetic oligonucleotide
  Target: LAMA2; (-) strand; PAM type: YTN; PAM sequence: CTT
ttgtgtatctctgatactca

SEQ ID NO: 250223 - DNA, 20 bp, Artificial Sequence
  Description of Artificial Sequence: Synthetic oligonucleotide
  Target: LAMA2; (-) strand; PAM type: YTN; PAM sequence: CTC
ttttgtgtatctctgatact

SEQ ID NO: 250224 - DNA, 20 bp, Artificial Sequence
  Description of Artificial Sequence: Synthetic oligonucleotide
  Target: LAMA2; (-) strand; PAM type: YTN; PAM sequence: CTA
aactcttttgtgtatctctg

SEQ ID NO: 250225 - DNA, 20 bp, Artificial Sequence
  Description of Artificial Sequence: Synthetic oligonucleotide
  Target: LAMA2; (-) strand; PAM type: YTN; PAM sequence: TTC
taaactcttttgtgtatctc

SEQ ID NO: 250226 - DNA, 20 bp, Artificial Sequence
  Description of Artificial Sequence: Synthetic oligonucleotide
  Target: LAMA2; (-) strand; PAM type: YTN; PAM sequence: TTT
ctaaactcttttgtgtatct

SEQ ID NO: 250227 - DNA, 20 bp, Artificial Sequence
  Description of Artificial Sequence: Synthetic oligonucleotide
  Target: LAMA2; (-) strand; PAM type: YTN; PAM sequence: TTT
tctaaactcttttgtgtatc

SEQ ID NO: 250228 - DNA, 20 bp, Artificial Sequence
  Description of Artificial Sequence: Synthetic oligonucleotide
  Target: LAMA2; (-) strand; PAM type: YTN; PAM sequence: TTT
ttctaaactcttttgtgtat

SEQ ID NO: 250229 - DNA, 20 bp, Artificial Sequence
  Description of Artificial Sequence: Synthetic oligonucleotide
  Target: LAMA2; (-) strand; PAM type: YTN; PAM sequence: TTT
tttctaaactcttttgtgta

SEQ ID NO: 250230 - DNA, 20 bp, Artificial Sequence
  Description of Artificial Sequence: Synthetic oligonucleotide
  Target: LAMA2; (-) strand; PAM type: YTN; PAM sequence: TTT
ttttctaaactcttttgtgt

SEQ ID NO: 250231 - DNA, 20 bp, Artificial Sequence
  Description of Artificial Sequence: Synthetic oligonucleotide
  Target: LAMA2; (-) strand; PAM type: YTN; PAM sequence: TTC
ataaaatgatttttttctaa

SEQ ID NO: 250232 - DNA, 20 bp, Artificial Sequence
  Description of Artificial Sequence: Synthetic oligonucleotide
  Target: LAMA2; (-) strand; PAM type: YTN; PAM sequence: TTT
cataaaatgatttttttcta

SEQ ID NO: 250233 - DNA, 20 bp, Artificial Sequence
  Description of Artificial Sequence: Synthetic oligonucleotide
  Target: LAMA2; (-) strand; PAM type: YTN; PAM sequence: CTC
atatttcataaaatgatttt

SEQ ID NO: 250234 - DNA, 20 bp, Artificial Sequence
  Description of Artificial Sequence: Synthetic oligonucleotide
  Target: LAMA2; (-) strand; PAM type: YTN; PAM sequence: TTA
gctcatatttcataaaatga

SEQ ID NO: 250235 - DNA, 20 bp, Artificial Sequence
  Description of Artificial Sequence: Synthetic oligonucleotide
  Target: LAMA2; (-) strand; PAM type: YTN; PAM sequence: TTT
agctcatatttcataaaatg

SEQ ID NO: 250236 - DNA, 20 bp, Artificial Sequence
  Description of Artificial Sequence: Synthetic oligonucleotide
  Target: LAMA2; (-) strand; PAM type: YTN; PAM sequence: TTT
tagctcatatttcataaaat

SEQ ID NO: 250237 - DNA, 20 bp, Artificial Sequence
  Description of Artificial Sequence: Synthetic oligonucleotide
  Target: LAMA2; (-) strand; PAM type: YTN; PAM sequence: TTG
ttttagctcatatttcataa

SEQ ID NO: 250238 - DNA, 20 bp, Artificial Sequence
  Description of Artificial Sequence: Synthetic oligonucleotide
  Target: LAMA2; (-) strand; PAM type: YTN; PAM sequence: CTA
ataataatagcgataatagt

SEQ ID NO: 250239 - DNA, 20 bp, Artificial Sequence
  Description of Artificial Sequence: Synthetic oligonucleotide
  Target: LAMA2; (-) strand; PAM type: YTN; PAM sequence: CTG
agggctaataataatagcga

SEQ ID NO: 250240 - DNA, 20 bp, Artificial Sequence
  Description of Artificial Sequence: Synthetic oligonucleotide
  Target: LAMA2; (-) strand; PAM type: YTN; PAM sequence: CTG
ctgagggctaataataatag

SEQ ID NO: 250241 - DNA, 20 bp, Artificial Sequence
  Description of Artificial Sequence: Synthetic oligonucleotide
  Target: LAMA2; (-) strand; PAM type: YTN; PAM sequence: TTC
tgctgagggctaataataat

SEQ ID NO: 250242 - DNA, 20 bp, Artificial Sequence
  Description of Artificial Sequence: Synthetic oligonucleotide
  Target: LAMA2; (-) strand; PAM type: YTN; PAM sequence: CTA
ttctgctgagggctaataat

SEQ ID NO: 250243 - DNA, 20 bp, Artificial Sequence
  Description of Artificial Sequence: Synthetic oligonucleotide
  Target: LAMA2; (-) strand; PAM type: YTN; PAM sequence: TTA
ccctattctgctgagggcta

SEQ ID NO: 250244 - DNA, 20 bp, Artificial Sequence
  Description of Artificial Sequence: Synthetic oligonucleotide
  Target: LAMA2; (-) strand; PAM type: YTN; PAM sequence: TTT
accctattctgctgagggct

SEQ ID NO: 250245 - DNA, 20 bp, Artificial Sequence
  Description of Artificial Sequence: Synthetic oligonucleotide
  Target: LAMA2; (-) strand; PAM type: YTN; PAM sequence: CTA
aggaatagaaataatttacc

SEQ ID NO: 250246 - DNA, 20 bp, Artificial Sequence
  Description of Artificial Sequence: Synthetic oligonucleotide
  Target: LAMA2; (-) strand; PAM type: YTN; PAM sequence: CTC
atgcaggtcagcgataatat

SEQ ID NO: 250247 - DNA, 20 bp, Artificial Sequence
  Description of Artificial Sequence: Synthetic oligonucleotide
  Target: LAMA2; (-) strand; PAM type: YTN; PAM sequence: CTC
ctcatgcaggtcagcgataa

SEQ ID NO: 250248 - DNA, 20 bp, Artificial Sequence
  Description of Artificial Sequence: Synthetic oligonucleotide
  Target: LAMA2; (-) strand; PAM type: YTN; PAM sequence: TTA
gaggtgggaagggggaaaag

SEQ ID NO: 250249 - DNA, 20 bp, Artificial Sequence
  Description of Artificial Sequence: Synthetic oligonucleotide
  Target: LAMA2; (-) strand; PAM type: YTN; PAM sequence: CTA
tgagagaggaattagaggtg

SEQ ID NO: 250250 - DNA, 20 bp, Artificial Sequence
  Description of Artificial Sequence: Synthetic oligonucleotide
  Target: LAMA2; (-) strand; PAM type: YTN; PAM sequence: CTA
aaatactatgagagaggaat

SEQ ID NO: 250251 - DNA, 20 bp, Artificial Sequence
  Description of Artificial Sequence: Synthetic oligonucleotide
  Target: LAMA2; (-) strand; PAM type: YTN; PAM sequence: CTG
acataaactaaaatactatg

SEQ ID NO: 250252 - DNA, 20 bp, Artificial Sequence
  Description of Artificial Sequence: Synthetic oligonucleotide
  Target: LAMA2; (-) strand; PAM type: YTN; PAM sequence: TTG
gggatccctgacataaacta

SEQ ID NO: 250253 - DNA, 20 bp, Artificial Sequence
  Description of Artificial Sequence: Synthetic oligonucleotide
  Target: LAMA2; (-) strand; PAM type: YTN; PAM sequence: CTG
tatagcccgggagttgggga

SEQ ID NO: 250254 - DNA, 20 bp, Artificial Sequence
  Description of Artificial Sequence: Synthetic oligonucleotide
  Target: LAMA2; (-) strand; PAM type: YTN; PAM sequence: TTA
acaggccacagacctgtata

SEQ ID NO: 250255 - DNA, 20 bp, Artificial Sequence
  Description of Artificial Sequence: Synthetic oligonucleotide
  Target: LAMA2; (-) strand; PAM type: YTN; PAM sequence: CTT
aacaggccacagacctgtat

SEQ ID NO: 250256 - DNA, 20 bp, Artificial Sequence
  Description of Artificial Sequence: Synthetic oligonucleotide
  Target: LAMA2; (-) strand; PAM type: YTN; PAM sequence: TTC
ttaacaggccacagacctgt

SEQ ID NO: 250257 - DNA, 20 bp, Artificial Sequence
  Description of Artificial Sequence: Synthetic oligonucleotide
  Target: LAMA2; (-) strand; PAM type: YTN; PAM sequence: TTG
tgccgcccaattcttaacag

SEQ ID NO: 250258 - DNA, 20 bp, Artificial Sequence
  Description of Artificial Sequence: Synthetic oligonucleotide
  Target: LAMA2; (-) strand; PAM type: YTN; PAM sequence: CTG
ttgtgccgcccaattcttaa

SEQ ID NO: 250259 - DNA, 20 bp, Artificial Sequence
  Description of Artificial Sequence: Synthetic oligonucleotide
  Target: LAMA2; (-) strand; PAM type: YTN; PAM sequence: CTC
ctgttgtgccgcccaattct

SEQ ID NO: 250260 - DNA, 20 bp, Artificial Sequence
  Description of Artificial Sequence: Synthetic oligonucleotide
  Target: LAMA2; (-) strand; PAM type: YTN; PAM sequence: TTA
cctcctgttgtgccgcccaa

SEQ ID NO: 250261 - DNA, 20 bp, Artificial Sequence
  Description of Artificial Sequence: Synthetic oligonucleotide
  Target: LAMA2; (-) strand; PAM type: YTN; PAM sequence: CTT
acctcctgttgtgccgccca

SEQ ID NO: 250262 - DNA, 20 bp, Artificial Sequence
  Description of Artificial Sequence: Synthetic oligonucleotide
  Target: LAMA2; (-) strand; PAM type: YTN; PAM sequence: CTG
atgcttacctcctgttgtgc

SEQ ID NO: 250263 - DNA, 20 bp, Artificial Sequence
  Description of Artificial Sequence: Synthetic oligonucleotide
  Target: LAMA2; (-) strand; PAM type: YTN; PAM sequence: TTG
cctgatgcttacctcctgtt

SEQ ID NO: 250264 - DNA, 20 bp, Artificial Sequence
  Description of Artificial Sequence: Synthetic oligonucleotide
  Target: LAMA2; (-) strand; PAM type: YTN; PAM sequence: CTT
gcctgatgcttacctcctgt

SEQ ID NO: 250265 - DNA, 20 bp, Artificial Sequence
  Description of Artificial Sequence: Synthetic oligonucleotide
  Target: LAMA2; (-) strand; PAM type: YTN; PAM sequence: CTC
acttgcctgatgcttacctc

SEQ ID NO: 250266 - DNA, 20 bp, Artificial Sequence
  Description of Artificial Sequence: Synthetic oligonucleotide
  Target: LAMA2; (-) strand; PAM type: YTN; PAM sequence: CTC
aggcagtgatgctcacttgc

SEQ ID NO: 250267 - DNA, 20 bp, Artificial Sequence
  Description of Artificial Sequence: Synthetic oligonucleotide
  Target: LAMA2; (-) strand; PAM type: YTN; PAM sequence: CTG
acaggcggtagagctcaggc

SEQ ID NO: 250268 - DNA, 20 bp, Artificial Sequence
  Description of Artificial Sequence: Synthetic oligonucleotide
  Target: LAMA2; (-) strand; PAM type: YTN; PAM sequence: CTG
atctgacaggcggtagagct

SEQ ID NO: 250269 - DNA, 20 bp, Artificial Sequence
  Description of Artificial Sequence: Synthetic oligonucleotide
  Target: LAMA2; (-) strand; PAM type: YTN; PAM sequence: CTA
ataccaccgctgatctgaca

SEQ ID NO: 250270 - DNA, 20 bp, Artificial Sequence
  Description of Artificial Sequence: Synthetic oligonucleotide
  Target: LAMA2; (-) strand; PAM type: YTN; PAM sequence: CTG
tgagaatctaataccaccgc

SEQ ID NO: 250271 - DNA, 20 bp, Artificial Sequence
  Description of Artificial Sequence: Synthetic oligonucleotide
  Target: LAMA2; (-) strand; PAM type: YTN; PAM sequence: CTC
ctgtgagaatctaataccac

SEQ ID NO: 250272 - DNA, 20 bp, Artificial Sequence
  Description of Artificial Sequence: Synthetic oligonucleotide
  Target: LAMA2; (-) strand; PAM type: YTN; PAM sequence: CTG
ctcctgtgagaatctaatac

SEQ ID NO: 250273 - DNA, 20 bp, Artificial Sequence
  Description of Artificial Sequence: Synthetic oligonucleotide
  Target: LAMA2; (-) strand; PAM type: YTN; PAM sequence: TTC
ctgctcctgtgagaatctaa

SEQ ID NO: 250274 - DNA, 20 bp, Artificial Sequence
  Description of Artificial Sequence: Synthetic oligonucleotide
  Target: LAMA2; (-) strand; PAM type: YTN; PAM sequence: TTC
acaataaggttcctgctcct

SEQ ID NO: 250275 - DNA, 20 bp, Artificial Sequence
  Description of Artificial Sequence: Synthetic oligonucleotide
  Target: LAMA2; (-) strand; PAM type: YTN; PAM sequence: CTC
gcatgcgcagttcacaataa

SEQ ID NO: 250276 - DNA, 20 bp, Artificial Sequence
  Description of Artificial Sequence: Synthetic oligonucleotide
  Target: LAMA2; (-) strand; PAM type: YTN; PAM sequence: CTA
gatccctcgcatgcgcagtt

SEQ ID NO: 250277 - DNA, 20 bp, Artificial Sequence
  Description of Artificial Sequence: Synthetic oligonucleotide
  Target: LAMA2; (-) strand; PAM type: YTN; PAM sequence: CTC
ataaggagcgtgcagcctag

SEQ ID NO: 250278 - DNA, 20 bp, Artificial Sequence
  Description of Artificial Sequence: Synthetic oligonucleotide
  Target: LAMA2; (-) strand; PAM type: YTN; PAM sequence: TTC
tcataaggagcgtgcagcct

SEQ ID NO: 250279 - DNA, 20 bp, Artificial Sequence
  Description of Artificial Sequence: Synthetic oligonucleotide
  Target: LAMA2; (-) strand; PAM type: YTN; PAM sequence: TTA
gattctcataaggagcgtgc

SEQ ID NO: 250280 - DNA, 20 bp, Artificial Sequence
  Description of Artificial Sequence: Synthetic oligonucleotide
  Target: LAMA2; (-) strand; PAM type: YTN; PAM sequence: TTC
cacatcagatcatcgggcat

SEQ ID NO: 250281 - DNA, 20 bp, Artificial Sequence
  Description of Artificial Sequence: Synthetic oligonucleotide
  Target: LAMA2; (-) strand; PAM type: YTN; PAM sequence: CTG
ttccacatcagatcatcggg

SEQ ID NO: 250282 - DNA, 20 bp, Artificial Sequence
  Description of Artificial Sequence: Synthetic oligonucleotide
  Target: LAMA2; (-) strand; PAM type: YTN; PAM sequence: TTG
ggataaaactgttccacatc

SEQ ID NO: 250283 - DNA, 20 bp, Artificial Sequence
  Description of Artificial Sequence: Synthetic oligonucleotide
  Target: LAMA2; (-) strand; PAM type: YTN; PAM sequence: TTT
gggataaaactgttccacat

SEQ ID NO: 250284 - DNA, 20 bp, Artificial Sequence
  Description of Artificial Sequence: Synthetic oligonucleotide
  Target: LAMA2; (-) strand; PAM type: YTN; PAM sequence: TTT
tgggataaaactgttccaca

SEQ ID NO: 250285 - DNA, 20 bp, Artificial Sequence
  Description of Artificial Sequence: Synthetic oligonucleotide
  Target: LAMA2; (-) strand; PAM type: YTN; PAM sequence: TTC
catggacacagaggaggggt

SEQ ID NO: 250286 - DNA, 20 bp, Artificial Sequence
  Description of Artificial Sequence: Synthetic oligonucleotide
  Target: LAMA2; (-) strand; PAM type: YTN; PAM sequence: TTT
ccatggacacagaggagggg

SEQ ID NO: 250287 - DNA, 20 bp, Artificial Sequence
  Description of Artificial Sequence: Synthetic oligonucleotide
  Target: LAMA2; (-) strand; PAM type: YTN; PAM sequence: TTT
tccatggacacagaggaggg

SEQ ID NO: 250288 - DNA, 20 bp, Artificial Sequence
  Description of Artificial Sequence: Synthetic oligonucleotide
  Target: LAMA2; (-) strand; PAM type: YTN; PAM sequence: TTT
ttccatggacacagaggagg

SEQ ID NO: 250289 - DNA, 20 bp, Artificial Sequence
  Description of Artificial Sequence: Synthetic oligonucleotide
  Target: LAMA2; (-) strand; PAM type: YTN; PAM sequence: TTC
gtggaagacaatttttccat

SEQ ID NO: 250290 - DNA, 20 bp, Artificial Sequence
  Description of Artificial Sequence: Synthetic oligonucleotide
  Target: LAMA2; (-) strand; PAM type: YTN; PAM sequence: TTT
cgtggaagacaatttttcca

SEQ ID NO: 250291 - DNA, 20 bp, Artificial Sequence
  Description of Artificial Sequence: Synthetic oligonucleotide
  Target: LAMA2; (-) strand; PAM type: YTN; PAM sequence: TTG
gcatcaggcatgggtttcgt

SEQ ID NO: 250292 - DNA, 20 bp, Artificial Sequence
  Description of Artificial Sequence: Synthetic oligonucleotide
  Target: LAMA2; (-) strand; PAM type: YTN; PAM sequence: TTT
ggcatcaggcatgggtttcg

SEQ ID NO: 250293 - DNA, 20 bp, Artificial Sequence
  Description of Artificial Sequence: Synthetic oligonucleotide
  Target: LAMA2; (-) strand; PAM type: YTN; PAM sequence: TTT
tggcatcaggcatgggtttc

SEQ ID NO: 250294 - DNA, 20 bp, Artificial Sequence
  Description of Artificial Sequence: Synthetic oligonucleotide
  Target: LAMA2; (-) strand; PAM type: YTN; PAM sequence: TTT
ttggcatcaggcatgggttt

SEQ ID NO: 250295 - DNA, 20 bp, Artificial Sequence
  Description of Artificial Sequence: Synthetic oligonucleotide
  Target: LAMA2; (-) strand; PAM type: YTN; PAM sequence: CTT
tttggcatcaggcatgggtt

SEQ ID NO: 250296 - DNA, 20 bp, Artificial Sequence
  Description of Artificial Sequence: Synthetic oligonucleotide
  Target: LAMA2; (-) strand; PAM type: YTN; PAM sequence: CTC
cccacctttttggcatcagg

SEQ ID NO: 250297 - DNA, 20 bp, Artificial Sequence
  Description of Artificial Sequence: Synthetic oligonucleotide
  Target: LAMA2; (-) strand; PAM type: YTN; PAM sequence: TTG
cagcactccccacctttttg

SEQ ID NO: 250298 - DNA, 20 bp, Artificial Sequence
  Description of Artificial Sequence: Synthetic oligonucleotide
  Target: LAMA2; (-) strand; PAM type: YTN; PAM sequence: CTT
gcagcactccccaccttttt

SEQ ID NO: 250299 - DNA, 20 bp, Artificial Sequence
  Description of Artificial Sequence: Synthetic oligonucleotide
  Target: LAMA2; (-) strand; PAM type: YTN; PAM sequence: TTA
taataaagtcacatataatg

SEQ ID NO: 250300 - DNA, 20 bp, Artificial Sequence
  Description of Artificial Sequence: Synthetic oligonucleotide
  Target: LAMA2; (-) strand; PAM type: YTN; PAM sequence: TTT
ataataaagtcacatataat

SEQ ID NO: 250301 - DNA, 20 bp, Artificial Sequence
  Description of Artificial Sequence: Synthetic oligonucleotide
  Target: LAMA2; (-) strand; PAM type: YTN; PAM sequence: CTA
tttataataaagtcacatat

SEQ ID NO: 250302 - DNA, 20 bp, Artificial Sequence
  Description of Artificial Sequence: Synthetic oligonucleotide
  Target: LAMA2; (-) strand; PAM type: YTN; PAM sequence: TTC
atacctatttataataaagt

SEQ ID NO: 250303 - DNA, 20 bp, Artificial Sequence
  Description of Artificial Sequence: Synthetic oligonucleotide
  Target: LAMA2; (-) strand; PAM type: YTN; PAM sequence: TTT
catacctatttataataaag

SEQ ID NO: 250304 - DNA, 20 bp, Artificial Sequence
  Description of Artificial Sequence: Synthetic oligonucleotide
  Target: LAMA2; (-) strand; PAM type: YTN; PAM sequence: TTT
tcatacctatttataataaa

SEQ ID NO: 250305 - DNA, 20 bp, Artificial Sequence
  Description of Artificial Sequence: Synthetic oligonucleotide
  Target: LAMA2; (-) strand; PAM type: YTN; PAM sequence: TTT
ttcatacctatttataataa

SEQ ID NO: 250306 - DNA, 20 bp, Artificial Sequence
  Description of Artificial Sequence: Synthetic oligonucleotide
  Target: LAMA2; (-) strand; PAM type: YTN; PAM sequence: CTA
atgtgtttttcatacctatt

SEQ ID NO: 250307 - DNA, 20 bp, Artificial Sequence
  Description of Artificial Sequence: Synthetic oligonucleotide
  Target: LAMA2; (-) strand; PAM type: YTN; PAM sequence: TTG
ctaatgtgtttttcatacct

SEQ ID NO: 250308 - DNA, 20 bp, Artificial Sequence
  Description of Artificial Sequence: Synthetic oligonucleotide
  Target: LAMA2; (-) strand; PAM type: YTN; PAM sequence: TTT
gctaatgtgtttttcatacc

SEQ ID NO: 250309 - DNA, 20 bp, Artificial Sequence
  Description of Artificial Sequence: Synthetic oligonucleotide
  Target: LAMA2; (-) strand; PAM type: YTN; PAM sequence: TTG
atttgctaatgtgtttttca

SEQ ID NO: 250310 - DNA, 20 bp, Artificial Sequence
  Description of Artificial Sequence: Synthetic oligonucleotide
  Target: LAMA2; (-) strand; PAM type: YTN; PAM sequence: CTT
gatttgctaatgtgtttttc

SEQ ID NO: 250311 - DNA, 20 bp, Artificial Sequence
  Description of Artificial Sequence: Synthetic oligonucleotide
  Target: LAMA2; (-) strand; PAM type: YTN; PAM sequence: CTA
tgatacttgatttgctaatg

SEQ ID NO: 250312 - DNA, 20 bp, Artificial Sequence
  Description of Artificial Sequence: Synthetic oligonucleotide
  Target: LAMA2; (-) strand; PAM type: YTN; PAM sequence: CTA
tagatgaagtagaaaaagat

SEQ ID NO: 250313 - DNA, 20 bp, Artificial Sequence
  Description of Artificial Sequence: Synthetic oligonucleotide
  Target: LAMA2; (-) strand; PAM type: YTN; PAM sequence: TTA
cgactatagatgaagtagaa

SEQ ID NO: 250314 - DNA, 20 bp, Artificial Sequence
  Description of Artificial Sequence: Synthetic oligonucleotide
  Target: LAMA2; (-) strand; PAM type: YTN; PAM sequence: CTG
ttacgactatagatgaagta

SEQ ID NO: 250315 - DNA, 20 bp, Artificial Sequence
  Description of Artificial Sequence: Synthetic oligonucleotide
  Target: LAMA2; (-) strand; PAM type: YTN; PAM sequence: TTG
aatgtcaaagctgttacgac

SEQ ID NO: 250316 - DNA, 20 bp, Artificial Sequence
  Description of Artificial Sequence: Synthetic oligonucleotide
  Target: LAMA2; (-) strand; PAM type: YTN; PAM sequence: TTT
gaatgtcaaagctgttacga

SEQ ID NO: 250317 - DNA, 20 bp, Artificial Sequence
  Description of Artificial Sequence: Synthetic oligonucleotide
  Target: LAMA2; (-) strand; PAM type: YTN; PAM sequence: TTG
tcaataaaaagagtcaaagt

SEQ ID NO: 250318 - DNA, 20 bp, Artificial Sequence
  Description of Artificial Sequence: Synthetic oligonucleotide
  Target: LAMA2; (-) strand; PAM type: YTN; PAM sequence: TTT
gtcaataaaaagagtcaaag

SEQ ID NO: 250319 - DNA, 20 bp, Artificial Sequence
  Description of Artificial Sequence: Synthetic oligonucleotide
  Target: LAMA2; (-) strand; PAM type: YTN; PAM sequence: TTT
tgtcaataaaaagagtcaaa

SEQ ID NO: 250320 - DNA, 20 bp, Artificial Sequence
  Description of Artificial Sequence: Synthetic oligonucleotide
  Target: LAMA2; (-) strand; PAM type: YTN; PAM sequence: TTC
cattttgtcaataaaaagag

SEQ ID NO: 250321 - DNA, 20 bp, Artificial Sequence
  Description of Artificial Sequence: Synthetic oligonucleotide
  Target: LAMA2; (-) strand; PAM type: YTN; PAM sequence: TTT
ccattttgtcaataaaaaga

SEQ ID NO: 250322 - DNA, 20 bp, Artificial Sequence
  Description of Artificial Sequence: Synthetic oligonucleotide
  Target: LAMA2; (-) strand; PAM type: YTN; PAM sequence: TTT
tccattttgtcaataaaaag

SEQ ID NO: 250323 - DNA, 20 bp, Artificial Sequence
  Description of Artificial Sequence: Synthetic oligonucleotide
  Target: LAMA2; (-) strand; PAM type: YTN; PAM sequence: TTA
aggataattttccattttgt

SEQ ID NO: 250324 - DNA, 20 bp, Artificial Sequence
  Description of Artificial Sequence: Synthetic oligonucleotide
  Target: LAMA2; (-) strand; PAM type: YTN; PAM sequence: TTG
aattaaggataattttccat

SEQ ID NO: 250325 - DNA, 20 bp, Artificial Sequence
  Description of Artificial Sequence: Synthetic oligonucleotide
  Target: LAMA2; (-) strand; PAM type: YTN; PAM sequence: TTT
gaattaaggataattttcca

SEQ ID NO: 250326 - DNA, 20 bp, Artificial Sequence
  Description of Artificial Sequence: Synthetic oligonucleotide
  Target: LAMA2; (-) strand; PAM type: YTN; PAM sequence: TTT
tgaattaaggataattttcc

SEQ ID NO: 250327 - DNA, 20 bp, Artificial Sequence
  Description of Artificial Sequence: Synthetic oligonucleotide
  Target: LAMA2; (-) strand; PAM type: YTN; PAM sequence: CTC
aaataaaatacattttgaat

SEQ ID NO: 250328 - DNA, 20 bp, Artificial Sequence
  Description of Artificial Sequence: Synthetic oligonucleotide
  Target: LAMA2; (-) strand; PAM type: YTN; PAM sequence: TTA
atatatgaaatcaccacata

SEQ ID NO: 250329 - DNA, 20 bp, Artificial Sequence
  Description of Artificial Sequence: Synthetic oligonucleotide
  Target: LAMA2; (-) strand; PAM type: YTN; PAM sequence: CTT
aatatatgaaatcaccacat

SEQ ID NO: 250330 - DNA, 20 bp, Artificial Sequence
  Description of Artificial Sequence: Synthetic oligonucleotide
  Target: LAMA2; (-) strand; PAM type: YTN; PAM sequence: CTA
aaaaggaaagaaaaatatca

SEQ ID NO: 250331 - DNA, 20 bp, Artificial Sequence
  Description of Artificial Sequence: Synthetic oligonucleotide
  Target: LAMA2; (-) strand; PAM type: YTN; PAM sequence: CTC
taaaaaggaaagaaaaatat

SEQ ID NO: 250332 - DNA, 20 bp, Artificial Sequence
  Description of Artificial Sequence: Synthetic oligonucleotide
  Target: LAMA2; (-) strand; PAM type: YTN; PAM sequence: TTC
tctaaaaaggaaagaaaaat

SEQ ID NO: 250333 - DNA, 20 bp, Artificial Sequence
  Description of Artificial Sequence: Synthetic oligonucleotide
  Target: LAMA2; (-) strand; PAM type: YTN; PAM sequence: CTT
ctctaaaaaggaaagaaaaa

SEQ ID NO: 250334 - DNA, 20 bp, Artificial Sequence
  Description of Artificial Sequence: Synthetic oligonucleotide
  Target: LAMA2; (-) strand; PAM type: YTN; PAM sequence: TTG
aatatggcttctctaaaaag

SEQ ID NO: 250335 - DNA, 20 bp, Artificial Sequence
  Description of Artificial Sequence: Synthetic oligonucleotide
  Target: LAMA2; (-) strand; PAM type: YTN; PAM sequence: CTT
gaatatggcttctctaaaaa

SEQ ID NO: 250336 - DNA, 20 bp, Artificial Sequence
  Description of Artificial Sequence: Synthetic oligonucleotide
  Target: LAMA2; (-) strand; PAM type: YTN; PAM sequence: TTC
ttgaatatggcttctctaaa

SEQ ID NO: 250337 - DNA, 20 bp, Artificial Sequence
  Description of Artificial Sequence: Synthetic oligonucleotide
  Target: LAMA2; (-) strand; PAM type: YTN; PAM sequence: TTT
cttgaatatggcttctctaa

SEQ ID NO: 250338 - DNA, 20 bp, Artificial Sequence
  Description of Artificial Sequence: Synthetic oligonucleotide
  Target: LAMA2; (-) strand; PAM type: YTN; PAM sequence: TTT
tcttgaatatggcttctcta

SEQ ID NO: 250339 - DNA, 20 bp, Artificial Sequence
  Description of Artificial Sequence: Synthetic oligonucleotide
  Target: LAMA2; (-) strand; PAM type: YTN; PAM sequence: TTT
ttcttgaatatggcttctct

SEQ ID NO: 250340 - DNA, 20 bp, Artificial Sequence
  Description of Artificial Sequence: Synthetic oligonucleotide
  Target: LAMA2; (-) strand; PAM type: YTN; PAM sequence: CTA
tttttcttgaatatggcttc

SEQ ID NO: 250341 - DNA, 20 bp, Artificial Sequence
  Description of Artificial Sequence: Synthetic oligonucleotide
  Target: LAMA2; (-) strand; PAM type: YTN; PAM sequence: TTA
catgctatttttcttgaata

SEQ ID NO: 250342 - DNA, 20 bp, Artificial Sequence
  Description of Artificial Sequence: Synthetic oligonucleotide
  Target: LAMA2; (-) strand; PAM type: YTN; PAM sequence: TTG
aattacatgctatttttctt

SEQ ID NO: 250343 - DNA, 20 bp, Artificial Sequence
  Description of Artificial Sequence: Synthetic oligonucleotide
  Target: LAMA2; (-) strand; PAM type: YTN; PAM sequence: TTT
gaattacatgctatttttct

SEQ ID NO: 250344 - DNA, 20 bp, Artificial Sequence
  Description of Artificial Sequence: Synthetic oligonucleotide
  Target: LAMA2; (-) strand; PAM type: YTN; PAM sequence: TTA
aaatttgaattacatgctat

SEQ ID NO: 250345 - DNA, 20 bp, Artificial Sequence
  Description of Artificial Sequence: Synthetic oligonucleotide
  Target: LAMA2; (-) strand; PAM type: YTN; PAM sequence: TTT
aaaatttgaattacatgcta

SEQ ID NO: 250346 - DNA, 20 bp, Artificial Sequence
  Description of Artificial Sequence: Synthetic oligonucleotide
  Target: LAMA2; (-) strand; PAM type: YTN; PAM sequence: TTA
tttaaaatttgaattacatg

SEQ ID NO: 250347 - DNA, 20 bp, Artificial Sequence
  Description of Artificial Sequence: Synthetic oligonucleotide
  Target: LAMA2; (-) strand; PAM type: YTN; PAM sequence: TTG
attatttaaaatttgaatta

SEQ ID NO: 250348 - DNA, 20 bp, Artificial Sequence
  Description of Artificial Sequence: Synthetic oligonucleotide
  Target: LAMA2; (-) strand; PAM type: YTN; PAM sequence: TTT
gattatttaaaatttgaatt

SEQ ID NO: 250349 - DNA, 20 bp, Artificial Sequence
  Description of Artificial Sequence: Synthetic oligonucleotide
  Target: LAMA2; (-) strand; PAM type: YTN; PAM sequence: TTT
tgattatttaaaatttgaat

SEQ ID NO: 250350 - DNA, 20 bp, Artificial Sequence
  Description of Artificial Sequence: Synthetic oligonucleotide
  Target: LAMA2; (-) strand; PAM type: YTN; PAM sequence: CTA
ttttgattatttaaaatttg

SEQ ID NO: 250351 - DNA, 20 bp, Artificial Sequence
  Description of Artificial Sequence: Synthetic oligonucleotide
  Target: LAMA2; (-) strand; PAM type: YTN; PAM sequence: TTC
aaatctattttgattattta

SEQ ID NO: 250352 - DNA, 20 bp, Artificial Sequence
  Description of Artificial Sequence: Synthetic oligonucleotide
  Target: LAMA2; (-) strand; PAM type: YTN; PAM sequence: TTT
caaatctattttgattattt

SEQ ID NO: 250353 - DNA, 20 bp, Artificial Sequence
  Description of Artificial Sequence: Synthetic oligonucleotide
  Target: LAMA2; (-) strand; PAM type: YTN; PAM sequence: CTT
tcaaatctattttgattatt

SEQ ID NO: 250354 - DNA, 20 bp, Artificial Sequence
  Description of Artificial Sequence: Synthetic oligonucleotide
  Target: LAMA2; (-) strand; PAM type: YTN; PAM sequence: TTG
agctttcaaatctattttga

SEQ ID NO: 250355 - DNA, 20 bp, Artificial Sequence
  Description of Artificial Sequence: Synthetic oligonucleotide
  Target: LAMA2; (-) strand; PAM type: YTN; PAM sequence: TTT
gagctttcaaatctattttg

SEQ ID NO: 250356 - DNA, 20 bp, Artificial Sequence
  Description of Artificial Sequence: Synthetic oligonucleotide
  Target: LAMA2; (-) strand; PAM type: YTN; PAM sequence: TTT
tgagctttcaaatctatttt

SEQ ID NO: 250357 - DNA, 20 bp, Artificial Sequence
  Description of Artificial Sequence: Synthetic oligonucleotide
  Target: LAMA2; (-) strand; PAM type: YTN; PAM sequence: TTC
caaaattttgagctttcaaa

SEQ ID NO: 250358 - DNA, 20 bp, Artificial Sequence
  Description of Artificial Sequence: Synthetic oligonucleotide
  Target: LAMA2; (-) strand; PAM type: YTN; PAM sequence: CTA
taatgttccaaaattttgag

SEQ ID NO: 250359 - DNA, 20 bp, Artificial Sequence
  Description of Artificial Sequence: Synthetic oligonucleotide
  Target: LAMA2; (-) strand; PAM type: YTN; PAM sequence: TTG
ggacataggcctataatgtt

SEQ ID NO: 250360 - DNA, 20 bp, Artificial Sequence
  Description of Artificial Sequence: Synthetic oligonucleotide
  Target: LAMA2; (-) strand; PAM type: YTN; PAM sequence: TTG
ggaagaatattgggacatag

SEQ ID NO: 250361 - DNA, 20 bp, Artificial Sequence
  Description of Artificial Sequence: Synthetic oligonucleotide
  Target: LAMA2; (-) strand; PAM type: YTN; PAM sequence: TTT
gggaagaatattgggacata

SEQ ID NO: 250362 - DNA, 20 bp, Artificial Sequence
  Description of Artificial Sequence: Synthetic oligonucleotide
  Target: LAMA2; (-) strand; PAM type: YTN; PAM sequence: TTG
aaaggaggtttgggaagaat

SEQ ID NO: 250363 - DNA, 20 bp, Artificial Sequence
  Description of Artificial Sequence: Synthetic oligonucleotide
  Target: LAMA2; (-) strand; PAM type: YTN; PAM sequence: TTT
gaaaggaggtttgggaagaa

SEQ ID NO: 250364 - DNA, 20 bp, Artificial Sequence
  Description of Artificial Sequence: Synthetic oligonucleotide
  Target: LAMA2; (-) strand; PAM type: YTN; PAM sequence: TTA
ataaatacgtttgaaaggag

SEQ ID NO: 250365 - DNA, 20 bp, Artificial Sequence
  Description of Artificial Sequence: Synthetic oligonucleotide
  Target: LAMA2; (-) strand; PAM type: YTN; PAM sequence: CTA
aattaataaatacgtttgaa

SEQ ID NO: 250366 - DNA, 20 bp, Artificial Sequence
  Description of Artificial Sequence: Synthetic oligonucleotide
  Target: LAMA2; (-) strand; PAM type: YTN; PAM sequence: TTC
taaattaataaatacgtttg

SEQ ID NO: 250367 - DNA, 20 bp, Artificial Sequence
  Description of Artificial Sequence: Synthetic oligonucleotide
  Target: LAMA2; (-) strand; PAM type: YTN; PAM sequence: TTT
ctaaattaataaatacgttt

SEQ ID NO: 250368 - DNA, 20 bp, Artificial Sequence
  Description of Artificial Sequence: Synthetic oligonucleotide
  Target: LAMA2; (-) strand; PAM type: YTN; PAM sequence: TTT
tctaaattaataaatacgtt

SEQ ID NO: 250369 - DNA, 20 bp, Artificial Sequence
  Description of Artificial Sequence: Synthetic oligonucleotide
  Target: LAMA2; (-) strand; PAM type: YTN; PAM sequence: TTA
gaattttctaaattaataaa

SEQ ID NO: 250370 - DNA, 20 bp, Artificial Sequence
  Description of Artificial Sequence: Synthetic oligonucleotide
  Target: LAMA2; (-) strand; PAM type: YTN; PAM sequence: TTT
agaattttctaaattaataa

SEQ ID NO: 250371 - DNA, 20 bp, Artificial Sequence
  Description of Artificial Sequence: Synthetic oligonucleotide
  Target: LAMA2; (-) strand; PAM type: YTN; PAM sequence: CTA
tttagaattttctaaattaa

SEQ ID NO: 250372 - DNA, 20 bp, Artificial Sequence
  Description of Artificial Sequence: Synthetic oligonucleotide
  Target: LAMA2; (-) strand; PAM type: YTN; PAM sequence: CTG
aactatttagaattttctaa

SEQ ID NO: 250373 - DNA, 20 bp, Artificial Sequence
  Description of Artificial Sequence: Synthetic oligonucleotide
  Target: LAMA2; (-) strand; PAM type: YTN; PAM sequence: TTC
aaacaaggactgaactattt

SEQ ID NO: 250374 - DNA, 20 bp, Artificial Sequence
  Description of Artificial Sequence: Synthetic oligonucleotide
  Target: LAMA2; (-) strand; PAM type: YTN; PAM sequence: TTT
caaacaaggactgaactatt

SEQ ID NO: 250375 - DNA, 20 bp, Artificial Sequence
  Description of Artificial Sequence: Synthetic oligonucleotide
  Target: LAMA2; (-) strand; PAM type: YTN; PAM sequence: TTG
tatatatttcaaacaaggac

SEQ ID NO: 250376 - DNA, 20 bp, Artificial Sequence
  Description of Artificial Sequence: Synthetic oligonucleotide
  Target: LAMA2; (-) strand; PAM type: YTN; PAM sequence: TTA
tgttgtatatatttcaaaca

SEQ ID NO: 250377 - DNA, 20 bp, Artificial Sequence
  Description of Artificial Sequence: Synthetic oligonucleotide
  Target: LAMA2; (-) strand; PAM type: YTN; PAM sequence: TTT
atgttgtatatatttcaaac

SEQ ID NO: 250378 - DNA, 20 bp, Artificial Sequence
  Description of Artificial Sequence: Synthetic oligonucleotide
  Target: LAMA2; (-) strand; PAM type: YTN; PAM sequence: TTT
tatgttgtatatatttcaaa

SEQ ID NO: 250379 - DNA, 20 bp, Artificial Sequence
  Description of Artificial Sequence: Synthetic oligonucleotide
  Target: LAMA2; (-) strand; PAM type: YTN; PAM sequence: CTA
gaaaggcaggagaaaaaaaa

SEQ ID NO: 250380 - DNA, 20 bp, Artificial Sequence
  Description of Artificial Sequence: Synthetic oligonucleotide
  Target: LAMA2; (-) strand; PAM type: YTN; PAM sequence: TTC
tagaaaggcaggagaaaaaa

SEQ ID NO: 250381 - DNA, 20 bp, Artificial Sequence
  Description of Artificial Sequence: Synthetic oligonucleotide
  Target: LAMA2; (-) strand; PAM type: YTN; PAM sequence: CTC
aataaaaggattctagaaag

SEQ ID NO: 250382 - DNA, 20 bp, Artificial Sequence
  Description of Artificial Sequence: Synthetic oligonucleotide
  Target: LAMA2; (-) strand; PAM type: YTN; PAM sequence: TTC
tcaataaaaggattctagaa

SEQ ID NO: 250383 - DNA, 20 bp, Artificial Sequence
  Description of Artificial Sequence: Synthetic oligonucleotide
  Target: LAMA2; (-) strand; PAM type: YTN; PAM sequence: TTT
ctcaataaaaggattctaga

SEQ ID NO: 250384 - DNA, 20 bp, Artificial Sequence
  Description of Artificial Sequence: Synthetic oligonucleotide
  Target: LAMA2; (-) strand; PAM type: YTN; PAM sequence: TTT
tctcaataaaaggattctag

SEQ ID NO: 250385 - DNA, 20 bp, Artificial Sequence
  Description of Artificial Sequence: Synthetic oligonucleotide
  Target: LAMA2; (-) strand; PAM type: YTN; PAM sequence: CTA
cacattttctcaataaaagg

SEQ ID NO: 250386 - DNA, 20 bp, Artificial Sequence
  Description of Artificial Sequence: Synthetic oligonucleotide
  Target: LAMA2; (-) strand; PAM type: YTN; PAM sequence: TTC
agatcagctacacattttct

SEQ ID NO: 250387 - DNA, 20 bp, Artificial Sequence
  Description of Artificial Sequence: Synthetic oligonucleotide
  Target: LAMA2; (-) strand; PAM type: YTN; PAM sequence: CTT
cagatcagctacacattttc

SEQ ID NO: 250388 - DNA, 20 bp, Artificial Sequence
  Description of Artificial Sequence: Synthetic oligonucleotide
  Target: LAMA2; (-) strand; PAM type: YTN; PAM sequence: TTC
ttcagatcagctacacattt

SEQ ID NO: 250389 - DNA, 20 bp, Artificial Sequence
  Description of Artificial Sequence: Synthetic oligonucleotide
  Target: LAMA2; (-) strand; PAM type: YTN; PAM sequence: CTT
cttcagatcagctacacatt

SEQ ID NO: 250390 - DNA, 20 bp, Artificial Sequence
  Description of Artificial Sequence: Synthetic oligonucleotide
  Target: LAMA2; (-) strand; PAM type: YTN; PAM sequence: TTC
acacagcatgcttcttcaga

SEQ ID NO: 250391 - DNA, 20 bp, Artificial Sequence
  Description of Artificial Sequence: Synthetic oligonucleotide
  Target: LAMA2; (-) strand; PAM type: YTN; PAM sequence: TTT
cacacagcatgcttcttcag

SEQ ID NO: 250392 - DNA, 20 bp, Artificial Sequence
  Description of Artificial Sequence: Synthetic oligonucleotide
  Target: LAMA2; (-) strand; PAM type: YTN; PAM sequence: TTC
aaaatttcacacagcatgct

SEQ ID NO: 250393 - DNA, 20 bp, Artificial Sequence
  Description of Artificial Sequence: Synthetic oligonucleotide
  Target: LAMA2; (-) strand; PAM type: YTN; PAM sequence: TTA
agataaacattcaaaatttc

SEQ ID NO: 250394 - DNA, 20 bp, Artificial Sequence
  Description of Artificial Sequence: Synthetic oligonucleotide
  Target: LAMA2; (-) strand; PAM type: YTN; PAM sequence: CTA
ttaagataaacattcaaaat

SEQ ID NO: 250395 - DNA, 20 bp, Artificial Sequence
  Description of Artificial Sequence: Synthetic oligonucleotide
  Target: LAMA2; (-) strand; PAM type: YTN; PAM sequence: TTC
tattaagataaacattcaaa

SEQ ID NO: 250396 - DNA, 20 bp, Artificial Sequence
  Description of Artificial Sequence: Synthetic oligonucleotide
  Target: LAMA2; (-) strand; PAM type: YTN; PAM sequence: TTA
ggttctattaagataaacat

SEQ ID NO: 250397 - DNA, 20 bp, Artificial Sequence
  Description of Artificial Sequence: Synthetic oligonucleotide
  Target: LAMA2; (-) strand; PAM type: YTN; PAM sequence: TTT
aggttctattaagataaaca

SEQ ID NO: 250398 - DNA, 20 bp, Artificial Sequence
  Description of Artificial Sequence: Synthetic oligonucleotide
  Target: LAMA2; (-) strand; PAM type: YTN; PAM sequence: TTT
taggttctattaagataaac

SEQ ID NO: 250399 - DNA, 20 bp, Artificial Sequence
  Description of Artificial Sequence: Synthetic oligonucleotide
  Target: LAMA2; (-) strand; PAM type: YTN; PAM sequence: CTA
tgtggaagattttaggttct

SEQ ID NO: 250400 - DNA, 20 bp, Artificial Sequence
  Description of Artificial Sequence: Synthetic oligonucleotide
  Target: LAMA2; (-) strand; PAM type: YTN; PAM sequence: TTG
tgagtaatgaggggtgaacc

SEQ ID NO: 250401 - DNA, 20 bp, Artificial Sequence
  Description of Artificial Sequence: Synthetic oligonucleotide
  Target: LAMA2; (-) strand; PAM type: YTN; PAM sequence: TTA
ttgtgagtaatgaggggtga

SEQ ID NO: 250402 - DNA, 20 bp, Artificial Sequence
  Description of Artificial Sequence: Synthetic oligonucleotide
  Target: LAMA2; (-) strand; PAM type: YTN; PAM sequence: TTG
gcattattgtgagtaatgag

SEQ ID NO: 250403 - DNA, 20 bp, Artificial Sequence
  Description of Artificial Sequence: Synthetic oligonucleotide
  Target: LAMA2; (-) strand; PAM type: YTN; PAM sequence: CTT
ggcattattgtgagtaatga

SEQ ID NO: 250404 - DNA, 20 bp, Artificial Sequence
  Description of Artificial Sequence: Synthetic oligonucleotide
  Target: LAMA2; (-) strand; PAM type: YTN; PAM sequence: CTA
cagcacttggcattattgtg

SEQ ID NO: 250405 - DNA, 20 bp, Artificial Sequence
  Description of Artificial Sequence: Synthetic oligonucleotide
  Target: LAMA2; (-) strand; PAM type: YTN; PAM sequence: CTG
gactacagcacttggcatta

SEQ ID NO: 250406 - DNA, 20 bp, Artificial Sequence
  Description of Artificial Sequence: Synthetic oligonucleotide
  Target: LAMA2; (-) strand; PAM type: YTN; PAM sequence: CTG
cctggactacagcacttggc

SEQ ID NO: 250407 - DNA, 20 bp, Artificial Sequence
  Description of Artificial Sequence: Synthetic oligonucleotide
  Target: LAMA2; (-) strand; PAM type: YTN; PAM sequence: TTC
acatataaaataataaatat

SEQ ID NO: 250408 - DNA, 20 bp, Artificial Sequence
  Description of Artificial Sequence: Synthetic oligonucleotide
  Target: LAMA2; (-) strand; PAM type: YTN; PAM sequence: TTT
cacatataaaataataaata

SEQ ID NO: 250409 - DNA, 20 bp, Artificial Sequence
  Description of Artificial Sequence: Synthetic oligonucleotide
  Target: LAMA2; (-) strand; PAM type: YTN; PAM sequence: TTT
tcacatataaaataataaat

SEQ ID NO: 250410 - DNA, 20 bp, Artificial Sequence
  Description of Artificial Sequence: Synthetic oligonucleotide
  Target: LAMA2; (-) strand; PAM type: YTN; PAM sequence: CTT
ttcacatataaaataataaa

SEQ ID NO: 250411 - DNA, 20 bp, Artificial Sequence
  Description of Artificial Sequence: Synthetic oligonucleotide
  Target: LAMA2; (-) strand; PAM type: YTN; PAM sequence: TTC
gaatgtcttttcacatataa

SEQ ID NO: 250412 - DNA, 20 bp, Artificial Sequence
  Description of Artificial Sequence: Synthetic oligonucleotide
  Target: LAMA2; (-) strand; PAM type: YTN; PAM sequence: TTA
ttcgaatgtcttttcacata

SEQ ID NO: 250413 - DNA, 20 bp, Artificial Sequence
  Description of Artificial Sequence: Synthetic oligonucleotide
  Target: LAMA2; (-) strand; PAM type: YTN; PAM sequence: CTT
attcgaatgtcttttcacat

SEQ ID NO: 250414 - DNA, 20 bp, Artificial Sequence
  Description of Artificial Sequence: Synthetic oligonucleotide
  Target: LAMA2; (-) strand; PAM type: YTN; PAM sequence: CTG
agaaatggccttattcgaat

SEQ ID NO: 250415 - DNA, 20 bp, Artificial Sequence
  Description of Artificial Sequence: Synthetic oligonucleotide
  Target: LAMA2; (-) strand; PAM type: YTN; PAM sequence: CTA
atccactgagaaatggcctt

SEQ ID NO: 250416 - DNA, 20 bp, Artificial Sequence
  Description of Artificial Sequence: Synthetic oligonucleotide
  Target: LAMA2; (-) strand; PAM type: YTN; PAM sequence: TTC
ccctaatccactgagaaatg

SEQ ID NO: 250417 - DNA, 20 bp, Artificial Sequence
  Description of Artificial Sequence: Synthetic oligonucleotide
  Target: LAMA2; (-) strand; PAM type: YTN; PAM sequence: CTG
attcccctaatccactgaga

SEQ ID NO: 250418 - DNA, 20 bp, Artificial Sequence
  Description of Artificial Sequence: Synthetic oligonucleotide
  Target: LAMA2; (-) strand; PAM type: YTN; PAM sequence: CTC
tgattcccctaatccactga

SEQ ID NO: 250419 - DNA, 20 bp, Artificial Sequence
  Description of Artificial Sequence: Synthetic oligonucleotide
  Target: LAMA2; (-) strand; PAM type: YTN; PAM sequence: TTC
agaaaactctgattccccta

SEQ ID NO: 250420 - DNA, 20 bp, Artificial Sequence
  Description of Artificial Sequence: Synthetic oligonucleotide
  Target: LAMA2; (-) strand; PAM type: YTN; PAM sequence: TTA
aattcagaaaactctgattc

SEQ ID NO: 250421 - DNA, 20 bp, Artificial Sequence
  Description of Artificial Sequence: Synthetic oligonucleotide
  Target: LAMA2; (-) strand; PAM type: YTN; PAM sequence: CTT
aaattcagaaaactctgatt

SEQ ID NO: 250422 - DNA, 20 bp, Artificial Sequence
  Description of Artificial Sequence: Synthetic oligonucleotide
  Target: LAMA2; (-) strand; PAM type: YTN; PAM sequence: CTA
taaggaacttaaattcagaa

SEQ ID NO: 250423 - DNA, 20 bp, Artificial Sequence
  Description of Artificial Sequence: Synthetic oligonucleotide
  Target: LAMA2; (-) strand; PAM type: YTN; PAM sequence: CTC
tataaggaacttaaattcag

SEQ ID NO: 250424 - DNA, 20 bp, Artificial Sequence
  Description of Artificial Sequence: Synthetic oligonucleotide
  Target: LAMA2; (-) strand; PAM type: YTN; PAM sequence: TTA
catggggctctataaggaac

SEQ ID NO: 250425 - DNA, 20 bp, Artificial Sequence
  Description of Artificial Sequence: Synthetic oligonucleotide
  Target: LAMA2; (-) strand; PAM type: YTN; PAM sequence: CTC
attacatggggctctataag

SEQ ID NO: 250426 - DNA, 20 bp, Artificial Sequence
  Description of Artificial Sequence: Synthetic oligonucleotide
  Target: LAMA2; (-) strand; PAM type: YTN; PAM sequence: CTA
agagctcattacatggggct

SEQ ID NO: 250427 - DNA, 20 bp, Artificial Sequence
  Description of Artificial Sequence: Synthetic oligonucleotide
  Target: LAMA2; (-) strand; PAM type: YTN; PAM sequence: TTC
taagagctcattacatgggg

SEQ ID NO: 250428 - DNA, 20 bp, Artificial Sequence
  Description of Artificial Sequence: Synthetic oligonucleotide
  Target: LAMA2; (-) strand; PAM type: YTN; PAM sequence: CTT
ctaagagctcattacatggg

SEQ ID NO: 250429 - DNA, 20 bp, Artificial Sequence
  Description of Artificial Sequence: Synthetic oligonucleotide
  Target: LAMA2; (-) strand; PAM type: YTN; PAM sequence: CTG
caatgtcttctaagagctca

SEQ ID NO: 250430 - DNA, 20 bp, Artificial Sequence
  Description of Artificial Sequence: Synthetic oligonucleotide
  Target: LAMA2; (-) strand; PAM type: YTN; PAM sequence: CTC
tgcaatgtcttctaagagct

SEQ ID NO: 250431 - DNA, 20 bp, Artificial Sequence
  Description of Artificial Sequence: Synthetic oligonucleotide
  Target: LAMA2; (-) strand; PAM type: YTN; PAM sequence: TTG
cagctctgcaatgtcttcta

SEQ ID NO: 250432 - DNA, 20 bp, Artificial Sequence
  Description of Artificial Sequence: Synthetic oligonucleotide
  Target: LAMA2; (-) strand; PAM type: YTN; PAM sequence: TTA
aattgcagctctgcaatgtc

SEQ ID NO: 250433 - DNA, 20 bp, Artificial Sequence
  Description of Artificial Sequence: Synthetic oligonucleotide
  Target: LAMA2; (-) strand; PAM type: YTN; PAM sequence: TTT
aaattgcagctctgcaatgt

SEQ ID NO: 250434 - DNA, 20 bp, Artificial Sequence
  Description of Artificial Sequence: Synthetic oligonucleotide
  Target: LAMA2; (-) strand; PAM type: YTN; PAM sequence: TTT
taaattgcagctctgcaatg

SEQ ID NO: 250435 - DNA, 20 bp, Artificial Sequence
  Description of Artificial Sequence: Synthetic oligonucleotide
  Target: LAMA2; (-) strand; PAM type: YTN; PAM sequence: TTA
aacaggattttaaattgcag

SEQ ID NO: 250436 - DNA, 20 bp, Artificial Sequence
  Description of Artificial Sequence: Synthetic oligonucleotide
  Target: LAMA2; (-) strand; PAM type: YTN; PAM sequence: CTG
attaaacaggattttaaatt

SEQ ID NO: 250437 - DNA, 20 bp, Artificial Sequence
  Description of Artificial Sequence: Synthetic oligonucleotide
  Target: LAMA2; (-) strand; PAM type: YTN; PAM sequence: CTA
cggctgattaaacaggattt

SEQ ID NO: 250438 - DNA, 20 bp, Artificial Sequence
  Description of Artificial Sequence: Synthetic oligonucleotide
  Target: LAMA2; (-) strand; PAM type: YTN; PAM sequence: CTC
gctacggctgattaaacagg

SEQ ID NO: 250439 - DNA, 20 bp, Artificial Sequence
  Description of Artificial Sequence: Synthetic oligonucleotide
  Target: LAMA2; (-) strand; PAM type: YTN; PAM sequence: TTC
cacagagaatggcacatagc

SEQ ID NO: 250440 - DNA, 20 bp, Artificial Sequence
  Description of Artificial Sequence: Synthetic oligonucleotide
  Target: LAMA2; (-) strand; PAM type: YTN; PAM sequence: TTA
gtgttccacagagaatggca

SEQ ID NO: 250441 - DNA, 20 bp, Artificial Sequence
  Description of Artificial Sequence: Synthetic oligonucleotide
  Target: LAMA2; (-) strand; PAM type: YTN; PAM sequence: CTT
agtgttccacagagaatggc

SEQ ID NO: 250442 - DNA, 20 bp, Artificial Sequence
  Description of Artificial Sequence: Synthetic oligonucleotide
  Target: LAMA2; (-) strand; PAM type: YTN; PAM sequence: CTC
ttagtgttccacagagaatg

SEQ ID NO: 250443 - DNA, 20 bp, Artificial Sequence
  Description of Artificial Sequence: Synthetic oligonucleotide
  Target: LAMA2; (-) strand; PAM type: YTN; PAM sequence: TTC
ctcttagtgttccacagaga

SEQ ID NO: 250444 - DNA, 20 bp, Artificial Sequence
  Description of Artificial Sequence: Synthetic oligonucleotide
  Target: LAMA2; (-) strand; PAM type: YTN; PAM sequence: CTG
attcctcttagtgttccaca

SEQ ID NO: 250445 - DNA, 20 bp, Artificial Sequence
  Description of Artificial Sequence: Synthetic oligonucleotide
  Target: LAMA2; (-) strand; PAM type: YTN; PAM sequence: CTG
gatggaggaggaagaaccct

SEQ ID NO: 250446 - DNA, 20 bp, Artificial Sequence
  Description of Artificial Sequence: Synthetic oligonucleotide
  Target: LAMA2; (-) strand; PAM type: YTN; PAM sequence: TTG
ggaatgtactggatggagga

SEQ ID NO: 250447 - DNA, 20 bp, Artificial Sequence
  Description of Artificial Sequence: Synthetic oligonucleotide
  Target: LAMA2; (-) strand; PAM type: YTN; PAM sequence: CTG
gttgggaatgtactggatgg

SEQ ID NO: 250448 - DNA, 20 bp, Artificial Sequence
  Description of Artificial Sequence: Synthetic oligonucleotide
  Target: LAMA2; (-) strand; PAM type: YTN; PAM sequence: TTC
ctggttgggaatgtactgga

SEQ ID NO: 250449 - DNA, 20 bp, Artificial Sequence
  Description of Artificial Sequence: Synthetic oligonucleotide
  Target: LAMA2; (-) strand; PAM type: YTN; PAM sequence: CTG
accagacagcaattcctggt

SEQ ID NO: 250450 - DNA, 20 bp, Artificial Sequence
  Description of Artificial Sequence: Synthetic oligonucleotide
  Target: LAMA2; (-) strand; PAM type: YTN; PAM sequence: TTC
acgtccaaccctgaccagac

SEQ ID NO: 250451 - DNA, 20 bp, Artificial Sequence
  Description of Artificial Sequence: Synthetic oligonucleotide
  Target: LAMA2; (-) strand; PAM type: YTN; PAM sequence: TTT
cacgtccaaccctgaccaga

SEQ ID NO: 250452 - DNA, 20 bp, Artificial Sequence
  Description of Artificial Sequence: Synthetic oligonucleotide
  Target: LAMA2; (-) strand; PAM type: YTN; PAM sequence: CTT
tcacgtccaaccctgaccag

SEQ ID NO: 250453 - DNA, 20 bp, Artificial Sequence
  Description of Artificial Sequence: Synthetic oligonucleotide
  Target: LAMA2; (-) strand; PAM type: YTN; PAM sequence: CTA
tggcctttcacgtccaaccc

SEQ ID NO: 250454 - DNA, 20 bp, Artificial Sequence
  Description of Artificial Sequence: Synthetic oligonucleotide
  Target: LAMA2; (-) strand; PAM type: YTN; PAM sequence: CTC
tatggcctttcacgtccaac

SEQ ID NO: 250455 - DNA, 20 bp, Artificial Sequence
  Description of Artificial Sequence: Synthetic oligonucleotide
  Target: LAMA2; (-) strand; PAM type: YTN; PAM sequence: CTC
tctatggcctttcacgtcca

SEQ ID NO: 250456 - DNA, 20 bp, Artificial Sequence
  Description of Artificial Sequence: Synthetic oligonucleotide
  Target: LAMA2; (-) strand; PAM type: YTN; PAM sequence: TTG
gctctctatggcctttcacg

SEQ ID NO: 250457 - DNA, 20 bp, Artificial Sequence
  Description of Artificial Sequence: Synthetic oligonucleotide
  Target: LAMA2; (-) strand; PAM type: YTN; PAM sequence: TTC
gcagggttggctctctatgg

SEQ ID NO: 250458 - DNA, 20 bp, Artificial Sequence
  Description of Artificial Sequence: Synthetic oligonucleotide
  Target: LAMA2; (-) strand; PAM type: YTN; PAM sequence: CTT
cgcagggttggctctctatg

SEQ ID NO: 250459 - DNA, 20 bp, Artificial Sequence
  Description of Artificial Sequence: Synthetic oligonucleotide
  Target: LAMA2; (-) strand; PAM type: YTN; PAM sequence: TTG
gcttcgcagggttggctctc

SEQ ID NO: 250460 - DNA, 20 bp, Artificial Sequence
  Description of Artificial Sequence: Synthetic oligonucleotide
  Target: LAMA2; (-) strand; PAM type: YTN; PAM sequence: CTT
ggcttcgcagggttggctct

SEQ ID NO: 250461 - DNA, 20 bp, Artificial Sequence
  Description of Artificial Sequence: Synthetic oligonucleotide
  Target: LAMA2; (-) strand; PAM type: YTN; PAM sequence: CTG
acatgcagagacttggcttc

SEQ ID NO: 250462 - DNA, 20 bp, Artificial Sequence
  Description of Artificial Sequence: Synthetic oligonucleotide
  Target: LAMA2; (-) strand; PAM type: YTN; PAM sequence: CTG
tgctgacatgcagagacttg

SEQ ID NO: 250463 - DNA, 20 bp, Artificial Sequence
  Description of Artificial Sequence: Synthetic oligonucleotide
  Target: LAMA2; (-) strand; PAM type: YTN; PAM sequence: CTC
tgtgctgacatgcagagact

SEQ ID NO: 250464 - DNA, 20 bp, Artificial Sequence
  Description of Artificial Sequence: Synthetic oligonucleotide
  Target: LAMA2; (-) strand; PAM type: YTN; PAM sequence: TTG
ctctgtgctgacatgcagag

SEQ ID NO: 250465 - DNA, 20 bp, Artificial Sequence
  Description of Artificial Sequence: Synthetic oligonucleotide
  Target: LAMA2; (-) strand; PAM type: YTN; PAM sequence: CTT
gctctgtgctgacatgcaga

SEQ ID NO: 250466 - DNA, 20 bp, Artificial Sequence
  Description of Artificial Sequence: Synthetic oligonucleotide
  Target: LAMA2; (-) strand; PAM type: YTN; PAM sequence: CTG
cttgctctgtgctgacatgc

SEQ ID NO: 250467 - DNA, 20 bp, Artificial Sequence
  Description of Artificial Sequence: Synthetic oligonucleotide
  Target: LAMA2; (-) strand; PAM type: YTN; PAM sequence: CTG
ctgcttgctctgtgctgaca

SEQ ID NO: 250468 - DNA, 20 bp, Artificial Sequence
  Description of Artificial Sequence: Synthetic oligonucleotide
  Target: LAMA2; (-) strand; PAM type: YTN; PAM sequence: TTC
tgctgcttgctctgtgctga

SEQ ID NO: 250469 - DNA, 20 bp, Artificial Sequence
  Description of Artificial Sequence: Synthetic oligonucleotide
  Target: LAMA2; (-) strand; PAM type: YTN; PAM sequence: CTG
tattctgctgcttgctctgt

SEQ ID NO: 250470 - DNA, 20 bp, Artificial Sequence
  Description of Artificial Sequence: Synthetic oligonucleotide
  Target: LAMA2; (-) strand; PAM type: YTN; PAM sequence: CTG
atgatctgtattctgctgct

SEQ ID NO: 250471 - DNA, 20 bp, Artificial Sequence
  Description of Artificial Sequence: Synthetic oligonucleotide
  Target: LAMA2; (-) strand; PAM type: YTN; PAM sequence: TTC
ataaaacaaagctgatgatc

SEQ ID NO: 250472 - DNA, 20 bp, Artificial Sequence
  Description of Artificial Sequence: Synthetic oligonucleotide
  Target: LAMA2; (-) strand; PAM type: YTN; PAM sequence: CTG
taaatagagatattcataaa

SEQ ID NO: 250473 - DNA, 20 bp, Artificial Sequence
  Description of Artificial Sequence: Synthetic oligonucleotide
  Target: LAMA2; (-) strand; PAM type: YTN; PAM sequence: CTC
cagcactgtaaatagagata

SEQ ID NO: 250474 - DNA, 20 bp, Artificial Sequence
  Description of Artificial Sequence: Synthetic oligonucleotide
  Target: LAMA2; (-) strand; PAM type: YTN; PAM sequence: TTC
cactccagcactgtaaatag

SEQ ID NO: 250475 - DNA, 20 bp, Artificial Sequence
  Description of Artificial Sequence: Synthetic oligonucleotide
  Target: LAMA2; (-) strand; PAM type: YTN; PAM sequence: TTA
aaattccactccagcactgt

SEQ ID NO: 250476 - DNA, 20 bp, Artificial Sequence
  Description of Artificial Sequence: Synthetic oligonucleotide
  Target: LAMA2; (-) strand; PAM type: YTN; PAM sequence: TTT
aaaattccactccagcactg

SEQ ID NO: 250477 - DNA, 20 bp, Artificial Sequence
  Description of Artificial Sequence: Synthetic oligonucleotide
  Target: LAMA2; (-) strand; PAM type: YTN; PAM sequence: TTT
taaaattccactccagcact

SEQ ID NO: 250478 - DNA, 20 bp, Artificial Sequence
  Description of Artificial Sequence: Synthetic oligonucleotide
  Target: LAMA2; (-) strand; PAM type: YTN; PAM sequence: TTT
ttaaaattccactccagcac

SEQ ID NO: 250479 - DNA, 20 bp, Artificial Sequence
  Description of Artificial Sequence: Synthetic oligonucleotide
  Target: LAMA2; (-) strand; PAM type: YTN; PAM sequence: TTT
tttaaaattccactccagca

SEQ ID NO: 250480 - DNA, 20 bp, Artificial Sequence
  Description of Artificial Sequence: Synthetic oligonucleotide
  Target: LAMA2; (-) strand; PAM type: YTN; PAM sequence: TTT
ttttaaaattccactccagc

SEQ ID NO: 250481 - DNA, 20 bp, Artificial Sequence
  Description of Artificial Sequence: Synthetic oligonucleotide
  Target: LAMA2; (-) strand; PAM type: YTN; PAM sequence: CTT
tttttaaaattccactccag

SEQ ID NO: 250482 - DNA, 20 bp, Artificial Sequence
  Description of Artificial Sequence: Synthetic oligonucleotide
  Target: LAMA2; (-) strand; PAM type: YTN; PAM sequence: CTG
caatcctttttttaaaattc

SEQ ID NO: 250483 - DNA, 20 bp, Artificial Sequence
  Description of Artificial Sequence: Synthetic oligonucleotide
  Target: LAMA2; (-) strand; PAM type: YTN; PAM sequence: TTC
aatgcaaatgctgcaatcct

SEQ ID NO: 250484 - DNA, 20 bp, Artificial Sequence
  Description of Artificial Sequence: Synthetic oligonucleotide
  Target: LAMA2; (-) strand; PAM type: YTN; PAM sequence: CTG
tgagtgacagattcaatgca

SEQ ID NO: 250485 - DNA, 20 bp, Artificial Sequence
  Description of Artificial Sequence: Synthetic oligonucleotide
  Target: LAMA2; (-) strand; PAM type: YTN; PAM sequence: TTG
aagctgtgagtgacagattc

SEQ ID NO: 250486 - DNA, 20 bp, Artificial Sequence
  Description of Artificial Sequence: Synthetic oligonucleotide
  Target: LAMA2; (-) strand; PAM type: YTN; PAM sequence: TTA
taggacaggaatcaaaattg

SEQ ID NO: 250487 - DNA, 20 bp, Artificial Sequence
  Description of Artificial Sequence: Synthetic oligonucleotide
  Target: LAMA2; (-) strand; PAM type: YTN; PAM sequence: TTT
ataggacaggaatcaaaatt

SEQ ID NO: 250488 - DNA, 20 bp, Artificial Sequence
  Description of Artificial Sequence: Synthetic oligonucleotide
  Target: LAMA2; (-) strand; PAM type: YTN; PAM sequence: TTC
agaaaaaaataggaaagcaa

SEQ ID NO: 250489 - DNA, 20 bp, Artificial Sequence
  Description of Artificial Sequence: Synthetic oligonucleotide
  Target: LAMA2; (-) strand; PAM type: YTN; PAM sequence: TTG
tagaaattcagaaaaaaata

SEQ ID NO: 250490 - DNA, 20 bp, Artificial Sequence
  Description of Artificial Sequence: Synthetic oligonucleotide
  Target: LAMA2; (-) strand; PAM type: YTN; PAM sequence: CTT
gtagaaattcagaaaaaaat

SEQ ID NO: 250491 - DNA, 20 bp, Artificial Sequence
  Description of Artificial Sequence: Synthetic oligonucleotide
  Target: LAMA2; (-) strand; PAM type: YTN; PAM sequence: TTG
acagtcaccttgtagaaatt

SEQ ID NO: 250492 - DNA, 20 bp, Artificial Sequence
  Description of Artificial Sequence: Synthetic oligonucleotide
  Target: LAMA2; (-) strand; PAM type: YTN; PAM sequence: CTG
acattgacagtcaccttgta

SEQ ID NO: 250493 - DNA, 20 bp, Artificial Sequence
  Description of Artificial Sequence: Synthetic oligonucleotide
  Target: LAMA2; (-) strand; PAM type: YTN; PAM sequence: TTC
tgacattgacagtcaccttg

SEQ ID NO: 250494 - DNA, 20 bp, Artificial Sequence
  Description of Artificial Sequence: Synthetic oligonucleotide
  Target: LAMA2; (-) strand; PAM type: YTN; PAM sequence: TTT
ctgacattgacagtcacctt

SEQ ID NO: 250495 - DNA, 20 bp, Artificial Sequence
  Description of Artificial Sequence: Synthetic oligonucleotide
  Target: LAMA2; (-) strand; PAM type: YTN; PAM sequence: TTT
tctgacattgacagtcacct

SEQ ID NO: 250496 - DNA, 20 bp, Artificial Sequence
  Description of Artificial Sequence: Synthetic oligonucleotide
  Target: LAMA2; (-) strand; PAM type: YTN; PAM sequence: TTA
cattttctgacattgacagt

SEQ ID NO: 250497 - DNA, 20 bp, Artificial Sequence
  Description of Artificial Sequence: Synthetic oligonucleotide
  Target: LAMA2; (-) strand; PAM type: YTN; PAM sequence: TTT
acattttctgacattgacag

SEQ ID NO: 250498 - DNA, 20 bp, Artificial Sequence
  Description of Artificial Sequence: Synthetic oligonucleotide
  Target: LAMA2; (-) strand; PAM type: YTN; PAM sequence: TTG
aggtttacattttctgacat

SEQ ID NO: 250499 - DNA, 20 bp, Artificial Sequence
  Description of Artificial Sequence: Synthetic oligonucleotide
  Target: LAMA2; (-) strand; PAM type: YTN; PAM sequence: CTT
gaggtttacattttctgaca

SEQ ID NO: 250500 - DNA, 20 bp, Artificial Sequence
  Description of Artificial Sequence: Synthetic oligonucleotide
  Target: LAMA2; (-) strand; PAM type: YTN; PAM sequence: CTA
atatacatgccaagccccat

SEQ ID NO: 250501 - DNA, 20 bp, Artificial Sequence
  Description of Artificial Sequence: Synthetic oligonucleotide
  Target: LAMA2; (-) strand; PAM type: YTN; PAM sequence: TTC
taatatacatgccaagcccc

SEQ ID NO: 250502 - DNA, 20 bp, Artificial Sequence
  Description of Artificial Sequence: Synthetic oligonucleotide
  Target: LAMA2; (-) strand; PAM type: YTN; PAM sequence: TTT
ctaatatacatgccaagccc

SEQ ID NO: 250503 - DNA, 20 bp, Artificial Sequence
  Description of Artificial Sequence: Synthetic oligonucleotide
  Target: LAMA2; (-) strand; PAM type: YTN; PAM sequence: CTT
tctaatatacatgccaagcc

SEQ ID NO: 250504 - DNA, 20 bp, Artificial Sequence
  Description of Artificial Sequence: Synthetic oligonucleotide
  Target: LAMA2; (-) strand; PAM type: YTN; PAM sequence: TTC
tttctaatatacatgccaag

SEQ ID NO: 250505 - DNA, 20 bp, Artificial Sequence
  Description of Artificial Sequence: Synthetic oligonucleotide
  Target: LAMA2; (-) strand; PAM type: YTN; PAM sequence: TTT
ctttctaatatacatgccaa

SEQ ID NO: 250506 - DNA, 20 bp, Artificial Sequence
  Description of Artificial Sequence: Synthetic oligonucleotide
  Target: LAMA2; (-) strand; PAM type: YTN; PAM sequence: CTT
tctttctaatatacatgcca

SEQ ID NO: 250507 - DNA, 20 bp, Artificial Sequence
  Description of Artificial Sequence: Synthetic oligonucleotide
  Target: LAMA2; (-) strand; PAM type: YTN; PAM sequence: TTC
tttctttctaatatacatgc

SEQ ID NO: 250508 - DNA, 20 bp, Artificial Sequence
  Description of Artificial Sequence: Synthetic oligonucleotide
  Target: LAMA2; (-) strand; PAM type: YTN; PAM sequence: CTT
ctttctttctaatatacatg

SEQ ID NO: 250509 - DNA, 20 bp, Artificial Sequence
  Description of Artificial Sequence: Synthetic oligonucleotide
  Target: LAMA2; (-) strand; PAM type: YTN; PAM sequence: TTA
agcaaacttctttctttcta

SEQ ID NO: 250510 - DNA, 20 bp, Artificial Sequence
  Description of Artificial Sequence: Synthetic oligonucleotide
  Target: LAMA2; (-) strand; PAM type: YTN; PAM sequence: TTC
attaagcaaacttctttctt

SEQ ID NO: 250511 - DNA, 20 bp, Artificial Sequence
  Description of Artificial Sequence: Synthetic oligonucleotide
  Target: LAMA2; (-) strand; PAM type: YTN; PAM sequence: TTT
cattaagcaaacttctttct

SEQ ID NO: 250512 - DNA, 20 bp, Artificial Sequence
  Description of Artificial Sequence: Synthetic oligonucleotide
  Target: LAMA2; (-) strand; PAM type: YTN; PAM sequence: TTT
tcattaagcaaacttctttc

SEQ ID NO: 250513 - DNA, 20 bp, Artificial Sequence
  Description of Artificial Sequence: Synthetic oligonucleotide
  Target: LAMA2; (-) strand; PAM type: YTN; PAM sequence: CTT
ttcattaagcaaacttcttt

SEQ ID NO: 250514 - DNA, 20 bp, Artificial Sequence
  Description of Artificial Sequence: Synthetic oligonucleotide
  Target: LAMA2; (-) strand; PAM type: YTN; PAM sequence: CTC
ttttcattaagcaaacttct

SEQ ID NO: 250515 - DNA, 20 bp, Artificial Sequence
  Description of Artificial Sequence: Synthetic oligonucleotide
  Target: LAMA2; (-) strand; PAM type: YTN; PAM sequence: TTA
tcctcttttcattaagcaaa

SEQ ID NO: 250516 - DNA, 20 bp, Artificial Sequence
  Description of Artificial Sequence: Synthetic oligonucleotide
  Target: LAMA2; (-) strand; PAM type: YTN; PAM sequence: TTG
aataaatattatcctctttt

SEQ ID NO: 250517 - DNA, 20 bp, Artificial Sequence
  Description of Artificial Sequence: Synthetic oligonucleotide
  Target: LAMA2; (-) strand; PAM type: YTN; PAM sequence: TTT
gaataaatattatcctcttt

SEQ ID NO: 250518 - DNA, 20 bp, Artificial Sequence
  Description of Artificial Sequence: Synthetic oligonucleotide
  Target: LAMA2; (-) strand; PAM type: YTN; PAM sequence: TTA
gtttgaataaatattatcct

SEQ ID NO: 250519 - DNA, 20 bp, Artificial Sequence
  Description of Artificial Sequence: Synthetic oligonucleotide
  Target: LAMA2; (-) strand; PAM type: YTN; PAM sequence: CTT
agtttgaataaatattatcc

SEQ ID NO: 250520 - DNA, 20 bp, Artificial Sequence
  Description of Artificial Sequence: Synthetic oligonucleotide
  Target: LAMA2; (-) strand; PAM type: YTN; PAM sequence: TTA
aataggcttagtttgaataa

SEQ ID NO: 250521 - DNA, 20 bp, Artificial Sequence
  Description of Artificial Sequence: Synthetic oligonucleotide
  Target: LAMA2; (-) strand; PAM type: YTN; PAM sequence: CTG
tgcaattaaataggcttagt

SEQ ID NO: 250522 - DNA, 20 bp, Artificial Sequence
  Description of Artificial Sequence: Synthetic oligonucleotide
  Target: LAMA2; (-) strand; PAM type: YTN; PAM sequence: CTC
tgtgcaattaaataggctta

SEQ ID NO: 250523 - DNA, 20 bp, Artificial Sequence
  Description of Artificial Sequence: Synthetic oligonucleotide
  Target: LAMA2; (-) strand; PAM type: YTN; PAM sequence: TTC
ctctgtgcaattaaataggc

SEQ ID NO: 250524 - DNA, 20 bp, Artificial Sequence
  Description of Artificial Sequence: Synthetic oligonucleotide
  Target: LAMA2; (-) strand; PAM type: YTN; PAM sequence: TTT
cctctgtgcaattaaatagg

SEQ ID NO: 250525 - DNA, 20 bp, Artificial Sequence
  Description of Artificial Sequence: Synthetic oligonucleotide
  Target: LAMA2; (-) strand; PAM type: YTN; PAM sequence: CTT
tcctctgtgcaattaaatag

SEQ ID NO: 250526 - DNA, 20 bp, Artificial Sequence
  Description of Artificial Sequence: Synthetic oligonucleotide
  Target: LAMA2; (-) strand; PAM type: YTN; PAM sequence: TTC
aaacaaaacaggcaaagaag

SEQ ID NO: 250527 - DNA, 20 bp, Artificial Sequence
  Description of Artificial Sequence: Synthetic oligonucleotide
  Target: LAMA2; (-) strand; PAM type: YTN; PAM sequence: TTA
aaattcaaacaaaacaggca

SEQ ID NO: 250528 - DNA, 20 bp, Artificial Sequence
  Description of Artificial Sequence: Synthetic oligonucleotide
  Target: LAMA2; (-) strand; PAM type: YTN; PAM sequence: TTA
tattaaaattcaaacaaaac

SEQ ID NO: 250529 - DNA, 20 bp, Artificial Sequence
  Description of Artificial Sequence: Synthetic oligonucleotide
  Target: LAMA2; (-) strand; PAM type: YTN; PAM sequence: TTT
atattaaaattcaaacaaaa

SEQ ID NO: 250530 - DNA, 20 bp, Artificial Sequence
  Description of Artificial Sequence: Synthetic oligonucleotide
  Target: LAMA2; (-) strand; PAM type: YTN; PAM sequence: TTT
tatattaaaattcaaacaaa

SEQ ID NO: 250531 - DNA, 20 bp, Artificial Sequence
  Description of Artificial Sequence: Synthetic oligonucleotide
  Target: LAMA2; (-) strand; PAM type: YTN; PAM sequence: TTA
ttttatattaaaattcaaac

SEQ ID NO: 250532 - DNA, 20 bp, Artificial Sequence
  Description of Artificial Sequence: Synthetic oligonucleotide
  Target: LAMA2; (-) strand; PAM type: YTN; PAM sequence: TTT
attttatattaaaattcaaa

SEQ ID NO: 250533 - DNA, 20 bp, Artificial Sequence
  Description of Artificial Sequence: Synthetic oligonucleotide
  Target: LAMA2; (-) strand; PAM type: YTN; PAM sequence: TTT
tattttatattaaaattcaa

SEQ ID NO: 250534 - DNA, 20 bp, Artificial Sequence
  Description of Artificial Sequence: Synthetic oligonucleotide
  Target: LAMA2; (-) strand; PAM type: YTN; PAM sequence: TTA
gcagcaaattttattttata

SEQ ID NO: 250535 - DNA, 20 bp, Artificial Sequence
  Description of Artificial Sequence: Synthetic oligonucleotide
  Target: LAMA2; (-) strand; PAM type: YTN; PAM sequence: TTG
gtcaaagaaaaacaaaaggt

SEQ ID NO: 250536 - DNA, 20 bp, Artificial Sequence
  Description of Artificial Sequence: Synthetic oligonucleotide
  Target: LAMA2; (-) strand; PAM type: YTN; PAM sequence: TTA
ttggtcaaagaaaaacaaaa

SEQ ID NO: 250537 - DNA, 20 bp, Artificial Sequence
  Description of Artificial Sequence: Synthetic oligonucleotide
  Target: LAMA2; (-) strand; PAM type: YTN; PAM sequence: CTG
agaaatgttattggtcaaag

SEQ ID NO: 250538 - DNA, 20 bp, Artificial Sequence
  Description of Artificial Sequence: Synthetic oligonucleotide
  Target: LAMA2; (-) strand; PAM type: YTN; PAM sequence: CTA
agctgagaaatgttattggt

SEQ ID NO: 250539 - DNA, 20 bp, Artificial Sequence
  Description of Artificial Sequence: Synthetic oligonucleotide
  Target: LAMA2; (-) strand; PAM type: YTN; PAM sequence: TTA
catagcccatacactaagct

SEQ ID NO: 250540 - DNA, 20 bp, Artificial Sequence
  Description of Artificial Sequence: Synthetic oligonucleotide
  Target: LAMA2; (-) strand; PAM type: YTN; PAM sequence: TTT
acatagcccatacactaagc

SEQ ID NO: 250541 - DNA, 20 bp, Artificial Sequence
  Description of Artificial Sequence: Synthetic oligonucleotide
  Target: LAMA2; (-) strand; PAM type: YTN; PAM sequence: CTT
tacatagcccatacactaag

SEQ ID NO: 250542 - DNA, 20 bp, Artificial Sequence
  Description of Artificial Sequence: Synthetic oligonucleotide
  Target: LAMA2; (-) strand; PAM type: YTN; PAM sequence: TTG
acaggcactttacatagccc

SEQ ID NO: 250543 - DNA, 20 bp, Artificial Sequence
  Description of Artificial Sequence: Synthetic oligonucleotide
  Target: LAMA2; (-) strand; PAM type: YTN; PAM sequence: TTT
gacaggcactttacatagcc

SEQ ID NO: 250544 - DNA, 20 bp, Artificial Sequence
  Description of Artificial Sequence: Synthetic oligonucleotide
  Target: LAMA2; (-) strand; PAM type: YTN; PAM sequence: CTC
catttgacaggcactttaca

SEQ ID NO: 250545 - DNA, 20 bp, Artificial Sequence
  Description of Artificial Sequence: Synthetic oligonucleotide
  Target: LAMA2; (-) strand; PAM type: YTN; PAM sequence: TTC
aacaaagacatccctccatt

SEQ ID NO: 250546 - DNA, 20 bp, Artificial Sequence
  Description of Artificial Sequence: Synthetic oligonucleotide
  Target: LAMA2; (-) strand; PAM type: YTN; PAM sequence: TTT
caacaaagacatccctccat

SEQ ID NO: 250547 - DNA, 20 bp, Artificial Sequence
  Description of Artificial Sequence: Synthetic oligonucleotide
  Target: LAMA2; (-) strand; PAM type: YTN; PAM sequence: CTT
tcaacaaagacatccctcca

SEQ ID NO: 250548 - DNA, 20 bp, Artificial Sequence
  Description of Artificial Sequence: Synthetic oligonucleotide
  Target: LAMA2; (-) strand; PAM type: YTN; PAM sequence: TTC
tttcaacaaagacatccctc

SEQ ID NO: 250549 - DNA, 20 bp, Artificial Sequence
  Description of Artificial Sequence: Synthetic oligonucleotide
  Target: LAMA2; (-) strand; PAM type: YTN; PAM sequence: CTG
gattctttcaacaaagacat

SEQ ID NO: 250550 - DNA, 20 bp, Artificial Sequence
  Description of Artificial Sequence: Synthetic oligonucleotide
  Target: LAMA2; (-) strand; PAM type: YTN; PAM sequence: CTG
tgagtctggattctttcaac

SEQ ID NO: 250551 - DNA, 20 bp, Artificial Sequence
  Description of Artificial Sequence: Synthetic oligonucleotide
  Target: LAMA2; (-) strand; PAM type: YTN; PAM sequence: TTC
tgtgagtctggattctttca

SEQ ID NO: 250552 - DNA, 20 bp, Artificial Sequence
  Description of Artificial Sequence: Synthetic oligonucleotide
  Target: LAMA2; (-) strand; PAM type: YTN; PAM sequence: TTT
ctgtgagtctggattctttc

SEQ ID NO: 250553 - DNA, 20 bp, Artificial Sequence
  Description of Artificial Sequence: Synthetic oligonucleotide
  Target: LAMA2; (-) strand; PAM type: YTN; PAM sequence: CTT
tctgtgagtctggattcttt

SEQ ID NO: 250554 - DNA, 20 bp, Artificial Sequence
  Description of Artificial Sequence: Synthetic oligonucleotide
  Target: LAMA2; (-) strand; PAM type: YTN; PAM sequence: CTC
actttctgtgagtctggatt

SEQ ID NO: 250555 - DNA, 20 bp, Artificial Sequence
  Description of Artificial Sequence: Synthetic oligonucleotide
  Target: LAMA2; (-) strand; PAM type: YTN; PAM sequence: CTG
accagaaagtcactcacttt

SEQ ID NO: 250556 - DNA, 20 bp, Artificial Sequence
  Description of Artificial Sequence: Synthetic oligonucleotide
  Target: LAMA2; (-) strand; PAM type: YTN; PAM sequence: CTA
accatctgaccagaaagtca

SEQ ID NO: 250557 - DNA, 20 bp, Artificial Sequence
  Description of Artificial Sequence: Synthetic oligonucleotide
  Target: LAMA2; (-) strand; PAM type: YTN; PAM sequence: TTC
taaccatctgaccagaaagt

SEQ ID NO: 250558 - DNA, 20 bp, Artificial Sequence
  Description of Artificial Sequence: Synthetic oligonucleotide
  Target: LAMA2; (-) strand; PAM type: YTN; PAM sequence: TTG
ggagagttctaaccatctga

SEQ ID NO: 250559 - DNA, 20 bp, Artificial Sequence
  Description of Artificial Sequence: Synthetic oligonucleotide
  Target: LAMA2; (-) strand; PAM type: YTN; PAM sequence: TTG
tcaaaattgggagagttcta

SEQ ID NO: 250560 - DNA, 20 bp, Artificial Sequence
  Description of Artificial Sequence: Synthetic oligonucleotide
  Target: LAMA2; (-) strand; PAM type: YTN; PAM sequence: TTT
gtcaaaattgggagagttct

SEQ ID NO: 250561 - DNA, 20 bp, Artificial Sequence
  Description of Artificial Sequence: Synthetic oligonucleotide
  Target: LAMA2; (-) strand; PAM type: YTN; PAM sequence: CTT
tgtcaaaattgggagagttc

SEQ ID NO: 250562 - DNA, 20 bp, Artificial Sequence
  Description of Artificial Sequence: Synthetic oligonucleotide
  Target: LAMA2; (-) strand; PAM type: YTN; PAM sequence: TTA
caaatcccaaacagagaacg

SEQ ID NO: 250563 - DNA, 20 bp, Artificial Sequence
  Description of Artificial Sequence: Synthetic oligonucleotide
  Target: LAMA2; (-) strand; PAM type: YTN; PAM sequence: TTT
acaaatcccaaacagagaac

SEQ ID NO: 250564 - DNA, 20 bp, Artificial Sequence
  Description of Artificial Sequence: Synthetic oligonucleotide
  Target: LAMA2; (-) strand; PAM type: YTN; PAM sequence: CTT
tacaaatcccaaacagagaa

SEQ ID NO: 250565 - DNA, 20 bp, Artificial Sequence
  Description of Artificial Sequence: Synthetic oligonucleotide
  Target: LAMA2; (-) strand; PAM type: YTN; PAM sequence: TTG
agctttacaaatcccaaaca

SEQ ID NO: 250566 - DNA, 20 bp, Artificial Sequence
  Description of Artificial Sequence: Synthetic oligonucleotide
  Target: LAMA2; (-) strand; PAM type: YTN; PAM sequence: TTT
gagctttacaaatcccaaac

SEQ ID NO: 250567 - DNA, 20 bp, Artificial Sequence
  Description of Artificial Sequence: Synthetic oligonucleotide
  Target: LAMA2; (-) strand; PAM type: YTN; PAM sequence: CTA
cagtttgagctttacaaatc

SEQ ID NO: 250568 - DNA, 20 bp, Artificial Sequence
  Description of Artificial Sequence: Synthetic oligonucleotide
  Target: LAMA2; (-) strand; PAM type: YTN; PAM sequence: TTA
gtctacagtttgagctttac

SEQ ID NO: 250569 - DNA, 20 bp, Artificial Sequence
  Description of Artificial Sequence: Synthetic oligonucleotide
  Target: LAMA2; (-) strand; PAM type: YTN; PAM sequence: CTT
agtctacagtttgagcttta

SEQ ID NO: 250570 - DNA, 20 bp, Artificial Sequence
  Description of Artificial Sequence: Synthetic oligonucleotide
  Target: LAMA2; (-) strand; PAM type: YTN; PAM sequence: CTG
tcatcatcttagtctacagt

SEQ ID NO: 250571 - DNA, 20 bp, Artificial Sequence
  Description of Artificial Sequence: Synthetic oligonucleotide
  Target: LAMA2; (-) strand; PAM type: YTN; PAM sequence: CTC
ctgtcatcatcttagtctac

SEQ ID NO: 250572 - DNA, 20 bp, Artificial Sequence
  Description of Artificial Sequence: Synthetic oligonucleotide
  Target: LAMA2; (-) strand; PAM type: YTN; PAM sequence: TTC
catgaagccaaacagcagat

SEQ ID NO: 250573 - DNA, 20 bp, Artificial Sequence
  Description of Artificial Sequence: Synthetic oligonucleotide
  Target: LAMA2; (-) strand; PAM type: YTN; PAM sequence: TTA
agttccatgaagccaaacag

SEQ ID NO: 250574 - DNA, 20 bp, Artificial Sequence
  Description of Artificial Sequence: Synthetic oligonucleotide
  Target: LAMA2; (-) strand; PAM type: YTN; PAM sequence: CTG
aaataggttaagttccatga

SEQ ID NO: 250575 - DNA, 20 bp, Artificial Sequence
  Description of Artificial Sequence: Synthetic oligonucleotide
  Target: LAMA2; (-) strand; PAM type: YTN; PAM sequence: TTG
ctgaaataggttaagttcca

SEQ ID NO: 250576 - DNA, 20 bp, Artificial Sequence
  Description of Artificial Sequence: Synthetic oligonucleotide
  Target: LAMA2; (-) strand; PAM type: YTN; PAM sequence: CTT
gctgaaataggttaagttcc

SEQ ID NO: 250577 - DNA, 20 bp, Artificial Sequence
  Description of Artificial Sequence: Synthetic oligonucleotide
  Target: LAMA2; (-) strand; PAM type: YTN; PAM sequence: TTG
caggcttgctgaaataggtt

SEQ ID NO: 250578 - DNA, 20 bp, Artificial Sequence
  Description of Artificial Sequence: Synthetic oligonucleotide
  Target: LAMA2; (-) strand; PAM type: YTN; PAM sequence: TTC
cccagtattgcaggcttgct

SEQ ID NO: 250579 - DNA, 20 bp, Artificial Sequence
  Description of Artificial Sequence: Synthetic oligonucleotide
  Target: LAMA2; (-) strand; PAM type: YTN; PAM sequence: TTT
ccccagtattgcaggcttgc

SEQ ID NO: 250580 - DNA, 20 bp, Artificial Sequence
  Description of Artificial Sequence: Synthetic oligonucleotide
  Target: LAMA2; (-) strand; PAM type: YTN; PAM sequence: TTT
tccccagtattgcaggcttg

SEQ ID NO: 250581 - DNA, 20 bp, Artificial Sequence
  Description of Artificial Sequence: Synthetic oligonucleotide
  Target: LAMA2; (-) strand; PAM type: YTN; PAM sequence: TTA
ttttccccagtattgcaggc

SEQ ID NO: 250582 - DNA, 20 bp, Artificial Sequence
  Description of Artificial Sequence: Synthetic oligonucleotide
  Target: LAMA2; (-) strand; PAM type: YTN; PAM sequence: CTG
acataaacataaatatatgt

SEQ ID NO: 250583 - DNA, 20 bp, Artificial Sequence
  Description of Artificial Sequence: Synthetic oligonucleotide
  Target: LAMA2; (-) strand; PAM type: YTN; PAM sequence: CTG
caagcctgacataaacataa

SEQ ID NO: 250584 - DNA, 20 bp, Artificial Sequence
  Description of Artificial Sequence: Synthetic oligonucleotide
  Target: LAMA2; (-) strand; PAM type: YTN; PAM sequence: TTA
cccatcaactgcaagcctga

SEQ ID NO: 250585 - DNA, 20 bp, Artificial Sequence
  Description of Artificial Sequence: Synthetic oligonucleotide
  Target: LAMA2; (-) strand; PAM type: YTN; PAM sequence: CTT
acccatcaactgcaagcctg

SEQ ID NO: 250586 - DNA, 20 bp, Artificial Sequence
  Description of Artificial Sequence: Synthetic oligonucleotide
  Target: LAMA2; (-) strand; PAM type: YTN; PAM sequence: TTA
tgaaccttacccatcaactg

SEQ ID NO: 250587 - DNA, 20 bp, Artificial Sequence
  Description of Artificial Sequence: Synthetic oligonucleotide
  Target: LAMA2; (-) strand; PAM type: YTN; PAM sequence: TTT
atgaaccttacccatcaact

SEQ ID NO: 250588 - DNA, 20 bp, Artificial Sequence
  Description of Artificial Sequence: Synthetic oligonucleotide
  Target: LAMA2; (-) strand; PAM type: YTN; PAM sequence: TTT
tatgaaccttacccatcaac

SEQ ID NO: 250589 - DNA, 20 bp, Artificial Sequence
  Description of Artificial Sequence: Synthetic oligonucleotide
  Target: LAMA2; (-) strand; PAM type: YTN; PAM sequence: CTT
ttatgaaccttacccatcaa

SEQ ID NO: 250590 - DNA, 20 bp, Artificial Sequence
  Description of Artificial Sequence: Synthetic oligonucleotide
  Target: LAMA2; (-) strand; PAM type: YTN; PAM sequence: TTA
ggagtaaccttttatgaacc

SEQ ID NO: 250591 - DNA, 20 bp, Artificial Sequence
  Description of Artificial Sequence: Synthetic oligonucleotide
  Target: LAMA2; (-) strand; PAM type: YTN; PAM sequence: TTT
aggagtaaccttttatgaac

SEQ ID NO: 250592 - DNA, 20 bp, Artificial Sequence
  Description of Artificial Sequence: Synthetic oligonucleotide
  Target: LAMA2; (-) strand; PAM type: YTN; PAM sequence: TTA
tttaggagtaaccttttatg

SEQ ID NO: 250593 - DNA, 20 bp, Artificial Sequence
  Description of Artificial Sequence: Synthetic oligonucleotide
  Target: LAMA2; (-) strand; PAM type: YTN; PAM sequence: TTT
atttaggagtaaccttttat

SEQ ID NO: 250594 - DNA, 20 bp, Artificial Sequence
  Description of Artificial Sequence: Synthetic oligonucleotide
  Target: LAMA2; (-) strand; PAM type: YTN; PAM sequence: CTG
gagtacggagtgggaatgat

SEQ ID NO: 250595 - DNA, 20 bp, Artificial Sequence
  Description of Artificial Sequence: Synthetic oligonucleotide
  Target: LAMA2; (-) strand; PAM type: YTN; PAM sequence: TTG
caagacgcagaaatcactgg

SEQ ID NO: 250596 - DNA, 20 bp, Artificial Sequence
  Description of Artificial Sequence: Synthetic oligonucleotide
  Target: LAMA2; (-) strand; PAM type: YTN; PAM sequence: TTT
gcaagacgcagaaatcactg

SEQ ID NO: 250597 - DNA, 20 bp, Artificial Sequence
  Description of Artificial Sequence: Synthetic oligonucleotide
  Target: LAMA2; (-) strand; PAM type: YTN; PAM sequence: CTA
tagggcagtatttgcaagac

SEQ ID NO: 250598 - DNA, 20 bp, Artificial Sequence
  Description of Artificial Sequence: Synthetic oligonucleotide
  Target: LAMA2; (-) strand; PAM type: YTN; PAM sequence: TTC
tatagggcagtatttgcaag

SEQ ID NO: 250599 - DNA, 20 bp, Artificial Sequence
  Description of Artificial Sequence: Synthetic oligonucleotide
  Target: LAMA2; (-) strand; PAM type: YTN; PAM sequence: TTG
ttctatagggcagtatttgc

SEQ ID NO: 250600 - DNA, 20 bp, Artificial Sequence
  Description of Artificial Sequence: Synthetic oligonucleotide
  Target: LAMA2; (-) strand; PAM type: YTN; PAM sequence: TTA
ttgttctatagggcagtatt

SEQ ID NO: 250601 - DNA, 20 bp, Artificial Sequence
  Description of Artificial Sequence: Synthetic oligonucleotide
  Target: LAMA2; (-) strand; PAM type: YTN; PAM sequence: TTT
attgttctatagggcagtat

SEQ ID NO: 250602 - DNA, 20 bp, Artificial Sequence
  Description of Artificial Sequence: Synthetic oligonucleotide
  Target: LAMA2; (-) strand; PAM type: YTN; PAM sequence: TTT
tattgttctatagggcagta

SEQ ID NO: 250603 - DNA, 20 bp, Artificial Sequence
  Description of Artificial Sequence: Synthetic oligonucleotide
  Target: LAMA2; (-) strand; PAM type: YTN; PAM sequence: TTG
tatacgaattttattgttct

SEQ ID NO: 250604 - DNA, 20 bp, Artificial Sequence
  Description of Artificial Sequence: Synthetic oligonucleotide
  Target: LAMA2; (-) strand; PAM type: YTN; PAM sequence: CTG
ttgtatacgaattttattgt

SEQ ID NO: 250605 - DNA, 20 bp, Artificial Sequence
  Description of Artificial Sequence: Synthetic oligonucleotide
  Target: LAMA2; (-) strand; PAM type: YTN; PAM sequence: TTA
ctgttgtatacgaattttat

SEQ ID NO: 250606 - DNA, 20 bp, Artificial Sequence
  Description of Artificial Sequence: Synthetic oligonucleotide
  Target: LAMA2; (-) strand; PAM type: YTN; PAM sequence: CTT
actgttgtatacgaatttta

SEQ ID NO: 250607 - DNA, 20 bp, Artificial Sequence
  Description of Artificial Sequence: Synthetic oligonucleotide
  Target: LAMA2; (-) strand; PAM type: YTN; PAM sequence: TTA
cttactgttgtatacgaatt

SEQ ID NO: 250608 - DNA, 20 bp, Artificial Sequence
  Description of Artificial Sequence: Synthetic oligonucleotide
  Target: LAMA2; (-) strand; PAM type: YTN; PAM sequence: TTT
acttactgttgtatacgaat

SEQ ID NO: 250609 - DNA, 20 bp, Artificial Sequence
  Description of Artificial Sequence: Synthetic oligonucleotide
  Target: LAMA2; (-) strand; PAM type: YTN; PAM sequence: TTT
tacttactgttgtatacgaa

SEQ ID NO: 250610 - DNA, 20 bp, Artificial Sequence
  Description of Artificial Sequence: Synthetic oligonucleotide
  Target: LAMA2; (-) strand; PAM type: YTN; PAM sequence: TTA
aatcatattttacttactgt

SEQ ID NO: 250611 - DNA, 20 bp, Artificial Sequence
  Description of Artificial Sequence: Synthetic oligonucleotide
  Target: LAMA2; (-) strand; PAM type: YTN; PAM sequence: CTA
ttaaatcatattttacttac

SEQ ID NO: 250612 - DNA, 20 bp, Artificial Sequence
  Description of Artificial Sequence: Synthetic oligonucleotide
  Target: LAMA2; (-) strand; PAM type: YTN; PAM sequence: TTA
cgggataggagatgggctat

SEQ ID NO: 250613 - DNA, 20 bp, Artificial Sequence
  Description of Artificial Sequence: Synthetic oligonucleotide
  Target: LAMA2; (-) strand; PAM type: YTN; PAM sequence: CTA
caagacagaagatgcataat

SEQ ID NO: 250614 - DNA, 20 bp, Artificial Sequence
  Description of Artificial Sequence: Synthetic oligonucleotide
  Target: LAMA2; (-) strand; PAM type: YTN; PAM sequence: CTG
ggagctacaagacagaagat

SEQ ID NO: 250615 - DNA, 20 bp, Artificial Sequence
  Description of Artificial Sequence: Synthetic oligonucleotide
  Target: LAMA2; (-) strand; PAM type: YTN; PAM sequence: CTG
ctgggagctacaagacagaa

SEQ ID NO: 250616 - DNA, 20 bp, Artificial Sequence
  Description of Artificial Sequence: Synthetic oligonucleotide
  Target: LAMA2; (-) strand; PAM type: YTN; PAM sequence: CTA
ctgctgggagctacaagaca

SEQ ID NO: 250617 - DNA, 20 bp, Artificial Sequence
  Description of Artificial Sequence: Synthetic oligonucleotide
  Target: LAMA2; (-) strand; PAM type: YTN; PAM sequence: CTC
ctactgctgggagctacaag

SEQ ID NO: 250618 - DNA, 20 bp, Artificial Sequence
  Description of Artificial Sequence: Synthetic oligonucleotide
  Target: LAMA2; (-) strand; PAM type: YTN; PAM sequence: CTG
tcctcctactgctgggagct

SEQ ID NO: 250619 - DNA, 20 bp, Artificial Sequence
  Description of Artificial Sequence: Synthetic oligonucleotide
  Target: LAMA2; (-) strand; PAM type: YTN; PAM sequence: TTC
aaggtcatatgatatggtaa

SEQ ID NO: 250620 - DNA, 20 bp, Artificial Sequence
  Description of Artificial Sequence: Synthetic oligonucleotide
  Target: LAMA2; (-) strand; PAM type: YTN; PAM sequence: CTT
caaggtcatatgatatggta

SEQ ID NO: 250621 - DNA, 20 bp, Artificial Sequence
  Description of Artificial Sequence: Synthetic oligonucleotide
  Target: LAMA2; (-) strand; PAM type: YTN; PAM sequence: TTC
ttcaaggtcatatgatatgg

SEQ ID NO: 250622 - DNA, 20 bp, Artificial Sequence
  Description of Artificial Sequence: Synthetic oligonucleotide
  Target: LAMA2; (-) strand; PAM type: YTN; PAM sequence: CTT
cttcaaggtcatatgatatg

SEQ ID NO: 250623 - DNA, 20 bp, Artificial Sequence
  Description of Artificial Sequence: Synthetic oligonucleotide
  Target: LAMA2; (-) strand; PAM type: YTN; PAM sequence: CTC
ttcttcaaggtcatatgata

SEQ ID NO: 250624 - DNA, 20 bp, Artificial Sequence
  Description of Artificial Sequence: Synthetic oligonucleotide
  Target: LAMA2; (-) strand; PAM type: YTN; PAM sequence: TTC
ctcttcttcaaggtcatatg

SEQ ID NO: 250625 - DNA, 20 bp, Artificial Sequence
  Description of Artificial Sequence: Synthetic oligonucleotide
  Target: LAMA2; (-) strand; PAM type: YTN; PAM sequence: CTT
cctcttcttcaaggtcatat

SEQ ID NO: 250626 - DNA, 20 bp, Artificial Sequence
  Description of Artificial Sequence: Synthetic oligonucleotide
  Target: LAMA2; (-) strand; PAM type: YTN; PAM sequence: TTC
ttcctcttcttcaaggtcat

SEQ ID NO: 250627 - DNA, 20 bp, Artificial Sequence
  Description of Artificial Sequence: Synthetic oligonucleotide
  Target: LAMA2; (-) strand; PAM type: YTN; PAM sequence: CTT
cttcctcttcttcaaggtca

SEQ ID NO: 250628 - DNA, 20 bp, Artificial Sequence
  Description of Artificial Sequence: Synthetic oligonucleotide
  Target: LAMA2; (-) strand; PAM type: YTN; PAM sequence: CTG
tatcttcttcctcttcttca

SEQ ID NO: 250629 - DNA, 20 bp, Artificial Sequence
  Description of Artificial Sequence: Synthetic oligonucleotide
  Target: LAMA2; (-) strand; PAM type: YTN; PAM sequence: TTC
tgtatcttcttcctcttctt

SEQ ID NO: 250630 - DNA, 20 bp, Artificial Sequence
  Description of Artificial Sequence: Synthetic oligonucleotide
  Target: LAMA2; (-) strand; PAM type: YTN; PAM sequence: CTG
gagaacacgttctgtatctt

SEQ ID NO: 250631 - DNA, 20 bp, Artificial Sequence
  Description of Artificial Sequence: Synthetic oligonucleotide
  Target: LAMA2; (-) strand; PAM type: YTN; PAM sequence: CTA
agataatcataagctggaga

SEQ ID NO: 250632 - DNA, 20 bp, Artificial Sequence
  Description of Artificial Sequence: Synthetic oligonucleotide
  Target: LAMA2; (-) strand; PAM type: YTN; PAM sequence: CTC
taagataatcataagctgga

SEQ ID NO: 250633 - DNA, 20 bp, Artificial Sequence
  Description of Artificial Sequence: Synthetic oligonucleotide
  Target: LAMA2; (-) strand; PAM type: YTN; PAM sequence: CTA
cctctaagataatcataagc

SEQ ID NO: 250634 - DNA, 20 bp, Artificial Sequence
  Description of Artificial Sequence: Synthetic oligonucleotide
  Target: LAMA2; (-) strand; PAM type: YTN; PAM sequence: CTC
tacctctaagataatcataa

SEQ ID NO: 250635 - DNA, 20 bp, Artificial Sequence
  Description of Artificial Sequence: Synthetic oligonucleotide
  Target: LAMA2; (-) strand; PAM type: YTN; PAM sequence: CTC
agtactctacctctaagata

SEQ ID NO: 250636 - DNA, 20 bp, Artificial Sequence
  Description of Artificial Sequence: Synthetic oligonucleotide
  Target: LAMA2; (-) strand; PAM type: YTN; PAM sequence: CTC
tcagtactctacctctaaga

SEQ ID NO: 250637 - DNA, 20 bp, Artificial Sequence
  Description of Artificial Sequence: Synthetic oligonucleotide
  Target: LAMA2; (-) strand; PAM type: YTN; PAM sequence: TTA
agtaacatcaggaagtaaca

SEQ ID NO: 250638 - DNA, 20 bp, Artificial Sequence
  Description of Artificial Sequence: Synthetic oligonucleotide
  Target: LAMA2; (-) strand; PAM type: YTN; PAM sequence: CTT
aagtaacatcaggaagtaac

SEQ ID NO: 250639 - DNA, 20 bp, Artificial Sequence
  Description of Artificial Sequence: Synthetic oligonucleotide
  Target: LAMA2; (-) strand; PAM type: YTN; PAM sequence: CTG
gtaaccttaagtaacatcag

SEQ ID NO: 250640 - DNA, 20 bp, Artificial Sequence
  Description of Artificial Sequence: Synthetic oligonucleotide
  Target: LAMA2; (-) strand; PAM type: YTN; PAM sequence: CTG
taagtcagtgtcaaaccagg

SEQ ID NO: 250641 - DNA, 20 bp, Artificial Sequence
  Description of Artificial Sequence: Synthetic oligonucleotide
  Target: LAMA2; (-) strand; PAM type: YTN; PAM sequence: TTA
gtagtcctgtaagtcagtgt

SEQ ID NO: 250642 - DNA, 20 bp, Artificial Sequence
  Description of Artificial Sequence: Synthetic oligonucleotide
  Target: LAMA2; (-) strand; PAM type: YTN; PAM sequence: TTT
agtagtcctgtaagtcagtg

SEQ ID NO: 250643 - DNA, 20 bp, Artificial Sequence
  Description of Artificial Sequence: Synthetic oligonucleotide
  Target: LAMA2; (-) strand; PAM type: YTN; PAM sequence: TTT
tagtagtcctgtaagtcagt

SEQ ID NO: 250644 - DNA, 20 bp, Artificial Sequence
  Description of Artificial Sequence: Synthetic oligonucleotide
  Target: LAMA2; (-) strand; PAM type: YTN; PAM sequence: TTT
ttagtagtcctgtaagtcag

SEQ ID NO: 250645 - DNA, 20 bp, Artificial Sequence
  Description of Artificial Sequence: Synthetic oligonucleotide
  Target: LAMA2; (-) strand; PAM type: YTN; PAM sequence: TTT
tttagtagtcctgtaagtca

SEQ ID NO: 250646 - DNA, 20 bp, Artificial Sequence
  Description of Artificial Sequence: Synthetic oligonucleotide
  Target: LAMA2; (-) strand; PAM type: YTN; PAM sequence: TTT
ttttagtagtcctgtaagtc

SEQ ID NO: 250647 - DNA, 20 bp, Artificial Sequence
  Description of Artificial Sequence: Synthetic oligonucleotide
  Target: LAMA2; (-) strand; PAM type: YTN; PAM sequence: TTT
tttttagtagtcctgtaagt

SEQ ID NO: 250648 - DNA, 20 bp, Artificial Sequence
  Description of Artificial Sequence: Synthetic oligonucleotide
  Target: LAMA2; (-) strand; PAM type: YTN; PAM sequence: TTT
ttttttagtagtcctgtaag

SEQ ID NO: 250649 - DNA, 20 bp, Artificial Sequence
  Description of Artificial Sequence: Synthetic oligonucleotide
  Target: LAMA2; (-) strand; PAM type: YTN; PAM sequence: CTA
aggtatatttttttttagta

SEQ ID NO: 250650 - DNA, 20 bp, Artificial Sequence
  Description of Artificial Sequence: Synthetic oligonucleotide
  Target: LAMA2; (-) strand; PAM type: YTN; PAM sequence: CTC
ctaaggtatattttttttta

SEQ ID NO: 250651 - DNA, 20 bp, Artificial Sequence
  Description of Artificial Sequence: Synthetic oligonucleotide
  Target: LAMA2; (-) strand; PAM type: YTN; PAM sequence: CTC
agagtgaaacaaaagagtgg

SEQ ID NO: 250652 - DNA, 20 bp, Artificial Sequence
  Description of Artificial Sequence: Synthetic oligonucleotide
  Target: LAMA2; (-) strand; PAM type: YTN; PAM sequence: CTA
gatatgtctcagagtgaaac

SEQ ID NO: 250653 - DNA, 20 bp, Artificial Sequence
  Description of Artificial Sequence: Synthetic oligonucleotide
  Target: LAMA2; (-) strand; PAM type: YTN; PAM sequence: TTC
tagatatgtctcagagtgaa

SEQ ID NO: 250654 - DNA, 20 bp, Artificial Sequence
  Description of Artificial Sequence: Synthetic oligonucleotide
  Target: LAMA2; (-) strand; PAM type: YTN; PAM sequence: CTT
ctagatatgtctcagagtga

SEQ ID NO: 250655 - DNA, 20 bp, Artificial Sequence
  Description of Artificial Sequence: Synthetic oligonucleotide
  Target: LAMA2; (-) strand; PAM type: YTN; PAM sequence: CTC
aatcttctagatatgtctca

SEQ ID NO: 250656 - DNA, 20 bp, Artificial Sequence
  Description of Artificial Sequence: Synthetic oligonucleotide
  Target: LAMA2; (-) strand; PAM type: YTN; PAM sequence: TTC
aaacccaacaaatatactca

SEQ ID NO: 250657 - DNA, 20 bp, Artificial Sequence
  Description of Artificial Sequence: Synthetic oligonucleotide
  Target: LAMA2; (-) strand; PAM type: YTN; PAM sequence: TTA
tcattcaaacccaacaaata

SEQ ID NO: 250658 - DNA, 20 bp, Artificial Sequence
  Description of Artificial Sequence: Synthetic oligonucleotide
  Target: LAMA2; (-) strand; PAM type: YTN; PAM sequence: TTT
atcattcaaacccaacaaat

SEQ ID NO: 250659 - DNA, 20 bp, Artificial Sequence
  Description of Artificial Sequence: Synthetic oligonucleotide
  Target: LAMA2; (-) strand; PAM type: YTN; PAM sequence: CTT
tatcattcaaacccaacaaa

SEQ ID NO: 250660 - DNA, 20 bp, Artificial Sequence
  Description of Artificial Sequence: Synthetic oligonucleotide
  Target: LAMA2; (-) strand; PAM type: YTN; PAM sequence: CTC
ctttatcattcaaacccaac

SEQ ID NO: 250661 - DNA, 20 bp, Artificial Sequence
  Description of Artificial Sequence: Synthetic oligonucleotide
  Target: LAMA2; (-) strand; PAM type: YTN; PAM sequence: TTC
tcctttatcattcaaaccca

SEQ ID NO: 250662 - DNA, 20 bp, Artificial Sequence
  Description of Artificial Sequence: Synthetic oligonucleotide
  Target: LAMA2; (-) strand; PAM type: YTN; PAM sequence: CTA
aagttctcctttatcattca

SEQ ID NO: 250663 - DNA, 20 bp, Artificial Sequence
  Description of Artificial Sequence: Synthetic oligonucleotide
  Target: LAMA2; (-) strand; PAM type: YTN; PAM sequence: CTG
gtctaaagttctcctttatc

SEQ ID NO: 250664 - DNA, 20 bp, Artificial Sequence
  Description of Artificial Sequence: Synthetic oligonucleotide
  Target: LAMA2; (-) strand; PAM type: YTN; PAM sequence: TTC
aagtctggtctaaagttctc

SEQ ID NO: 250665 - DNA, 20 bp, Artificial Sequence
  Description of Artificial Sequence: Synthetic oligonucleotide
  Target: LAMA2; (-) strand; PAM type: YTN; PAM sequence: TTT
caagtctggtctaaagttct

SEQ ID NO: 250666 - DNA, 20 bp, Artificial Sequence
  Description of Artificial Sequence: Synthetic oligonucleotide
  Target: LAMA2; (-) strand; PAM type: YTN; PAM sequence: TTA
atttcaagtctggtctaaag

SEQ ID NO: 250667 - DNA, 20 bp, Artificial Sequence
  Description of Artificial Sequence: Synthetic oligonucleotide
  Target: LAMA2; (-) strand; PAM type: YTN; PAM sequence: TTT
aatttcaagtctggtctaaa

SEQ ID NO: 250668 - DNA, 20 bp, Artificial Sequence
  Description of Artificial Sequence: Synthetic oligonucleotide
  Target: LAMA2; (-) strand; PAM type: YTN; PAM sequence: TTG
aaatttaatttcaagtctgg

SEQ ID NO: 250669 - DNA, 20 bp, Artificial Sequence
  Description of Artificial Sequence: Synthetic oligonucleotide
  Target: LAMA2; (-) strand; PAM type: YTN; PAM sequence: TTT
gaaatttaatttcaagtctg

SEQ ID NO: 250670 - DNA, 20 bp, Artificial Sequence
  Description of Artificial Sequence: Synthetic oligonucleotide
  Target: LAMA2; (-) strand; PAM type: YTN; PAM sequence: TTA
tgtttgaaatttaatttcaa

SEQ ID NO: 250671 - DNA, 20 bp, Artificial Sequence
  Description of Artificial Sequence: Synthetic oligonucleotide
  Target: LAMA2; (-) strand; PAM type: YTN; PAM sequence: CTT
atgtttgaaatttaatttca

SEQ ID NO: 250672 - DNA, 20 bp, Artificial Sequence
  Description of Artificial Sequence: Synthetic oligonucleotide
  Target: LAMA2; (-) strand; PAM type: YTN; PAM sequence: TTG
gaaatatggtccttatgttt

SEQ ID NO: 250673 - DNA, 20 bp, Artificial Sequence
  Description of Artificial Sequence: Synthetic oligonucleotide
  Target: LAMA2; (-) strand; PAM type: YTN; PAM sequence: TTT
ggaaatatggtccttatgtt

SEQ ID NO: 250674 - DNA, 20 bp, Artificial Sequence
  Description of Artificial Sequence: Synthetic oligonucleotide
  Target: LAMA2; (-) strand; PAM type: YTN; PAM sequence: TTT
tggaaatatggtccttatgt

SEQ ID NO: 250675 - DNA, 20 bp, Artificial Sequence
  Description of Artificial Sequence: Synthetic oligonucleotide
  Target: LAMA2; (-) strand; PAM type: YTN; PAM sequence: TTA
aattttggaaatatggtcct

SEQ ID NO: 250676 - DNA, 20 bp, Artificial Sequence
  Description of Artificial Sequence: Synthetic oligonucleotide
  Target: LAMA2; (-) strand; PAM type: YTN; PAM sequence: TTT
aaattttggaaatatggtcc

SEQ ID NO: 250677 - DNA, 20 bp, Artificial Sequence
  Description of Artificial Sequence: Synthetic oligonucleotide
  Target: LAMA2; (-) strand; PAM type: YTN; PAM sequence: TTC
ataatatttaaattttggaa

SEQ ID NO: 250678 - DNA, 20 bp, Artificial Sequence
  Description of Artificial Sequence: Synthetic oligonucleotide
  Target: LAMA2; (-) strand; PAM type: YTN; PAM sequence: TTT
cataatatttaaattttgga

SEQ ID NO: 250679 - DNA, 20 bp, Artificial Sequence
  Description of Artificial Sequence: Synthetic oligonucleotide
  Target: LAMA2; (-) strand; PAM type: YTN; PAM sequence: CTT
tcataatatttaaattttgg

SEQ ID NO: 250680 - DNA, 20 bp, Artificial Sequence
  Description of Artificial Sequence: Synthetic oligonucleotide
  Target: LAMA2; (-) strand; PAM type: YTN; PAM sequence: CTA
aacactttcataatatttaa

SEQ ID NO: 250681 - DNA, 20 bp, Artificial Sequence
  Description of Artificial Sequence: Synthetic oligonucleotide
  Target: LAMA2; (-) strand; PAM type: YTN; PAM sequence: TTA
gcatgtacctaaacactttc

SEQ ID NO: 250682 - DNA, 20 bp, Artificial Sequence
  Description of Artificial Sequence: Synthetic oligonucleotide
  Target: LAMA2; (-) strand; PAM type: YTN; PAM sequence: CTG
gaagcaagagaaaacaggaa

SEQ ID NO: 250683 - DNA, 20 bp, Artificial Sequence
  Description of Artificial Sequence: Synthetic oligonucleotide
  Target: LAMA2; (-) strand; PAM type: YTN; PAM sequence: CTA
tctggaagcaagagaaaaca

SEQ ID NO: 250684 - DNA, 20 bp, Artificial Sequence
  Description of Artificial Sequence: Synthetic oligonucleotide
  Target: LAMA2; (-) strand; PAM type: YTN; PAM sequence: CTA
atataaacaagggagtagac

SEQ ID NO: 250685 - DNA, 20 bp, Artificial Sequence
  Description of Artificial Sequence: Synthetic oligonucleotide
  Target: LAMA2; (-) strand; PAM type: YTN; PAM sequence: TTA
tctaatataaacaagggagt

SEQ ID NO: 250686 - DNA, 20 bp, Artificial Sequence
  Description of Artificial Sequence: Synthetic oligonucleotide
  Target: LAMA2; (-) strand; PAM type: YTN; PAM sequence: TTT
atctaatataaacaagggag

SEQ ID NO: 250687 - DNA, 20 bp, Artificial Sequence
  Description of Artificial Sequence: Synthetic oligonucleotide
  Target: LAMA2; (-) strand; PAM type: YTN; PAM sequence: TTT
tatctaatataaacaaggga

SEQ ID NO: 250688 - DNA, 20 bp, Artificial Sequence
  Description of Artificial Sequence: Synthetic oligonucleotide
  Target: LAMA2; (-) strand; PAM type: YTN; PAM sequence: TTA
ttttatctaatataaacaag

SEQ ID NO: 250689 - DNA, 20 bp, Artificial Sequence
  Description of Artificial Sequence: Synthetic oligonucleotide
  Target: LAMA2; (-) strand; PAM type: YTN; PAM sequence: TTT
attttatctaatataaacaa

SEQ ID NO: 250690 - DNA, 20 bp, Artificial Sequence
  Description of Artificial Sequence: Synthetic oligonucleotide
  Target: LAMA2; (-) strand; PAM type: YTN; PAM sequence: TTT
tattttatctaatataaaca

SEQ ID NO: 250691 - DNA, 20 bp, Artificial Sequence
  Description of Artificial Sequence: Synthetic oligonucleotide
  Target: LAMA2; (-) strand; PAM type: YTN; PAM sequence: TTC
attttattttatctaatata

SEQ ID NO: 250692 - DNA, 20 bp, Artificial Sequence
  Description of Artificial Sequence: Synthetic oligonucleotide
  Target: LAMA2; (-) strand; PAM type: YTN; PAM sequence: TTT
cattttattttatctaatat

SEQ ID NO: 250693 - DNA, 20 bp, Artificial Sequence
  Description of Artificial Sequence: Synthetic oligonucleotide
  Target: LAMA2; (-) strand; PAM type: YTN; PAM sequence: CTG
tttcattttattttatctaa

SEQ ID NO: 250694 - DNA, 20 bp, Artificial Sequence
  Description of Artificial Sequence: Synthetic oligonucleotide
  Target: LAMA2; (-) strand; PAM type: YTN; PAM sequence: TTC
ctgtttcattttattttatc

SEQ ID NO: 250695 - DNA, 20 bp, Artificial Sequence
  Description of Artificial Sequence: Synthetic oligonucleotide
  Target: LAMA2; (-) strand; PAM type: YTN; PAM sequence: TTT
cctgtttcattttattttat

SEQ ID NO: 250696 - DNA, 20 bp, Artificial Sequence
  Description of Artificial Sequence: Synthetic oligonucleotide
  Target: LAMA2; (-) strand; PAM type: YTN; PAM sequence: CTA
aataaacaagtttcctgttt

SEQ ID NO: 250697 - DNA, 20 bp, Artificial Sequence
  Description of Artificial Sequence: Synthetic oligonucleotide
  Target: LAMA2; (-) strand; PAM type: YTN; PAM sequence: CTA
tagctaaataaacaagtttc

SEQ ID NO: 250698 - DNA, 20 bp, Artificial Sequence
  Description of Artificial Sequence: Synthetic oligonucleotide
  Target: LAMA2; (-) strand; PAM type: YTN; PAM sequence: TTA
actatagctaaataaacaag

SEQ ID NO: 250699 - DNA, 20 bp, Artificial Sequence
  Description of Artificial Sequence: Synthetic oligonucleotide
  Target: LAMA2; (-) strand; PAM type: YTN; PAM sequence: TTT
aactatagctaaataaacaa

SEQ ID NO: 250700 - DNA, 20 bp, Artificial Sequence
  Description of Artificial Sequence: Synthetic oligonucleotide
  Target: LAMA2; (-) strand; PAM type: YTN; PAM sequence: CTG
aagtcaagatttaactatag

SEQ ID NO: 250701 - DNA, 20 bp, Artificial Sequence
  Description of Artificial Sequence: Synthetic oligonucleotide
  Target: LAMA2; (-) strand; PAM type: YTN; PAM sequence: TTC
tgaagtcaagatttaactat

SEQ ID NO: 250702 - DNA, 20 bp, Artificial Sequence
  Description of Artificial Sequence: Synthetic oligonucleotide
  Target: LAMA2; (-) strand; PAM type: YTN; PAM sequence: CTA
aaacaggattctgaagtcaa

SEQ ID NO: 250703 - DNA, 20 bp, Artificial Sequence
  Description of Artificial Sequence: Synthetic oligonucleotide
  Target: LAMA2; (-) strand; PAM type: YTN; PAM sequence: TTA
cctaaaacaggattctgaag

SEQ ID NO: 250704 - DNA, 20 bp, Artificial Sequence
  Description of Artificial Sequence: Synthetic oligonucleotide
  Target: LAMA2; (-) strand; PAM type: YTN; PAM sequence: CTT
acctaaaacaggattctgaa

SEQ ID NO: 250705 - DNA, 20 bp, Artificial Sequence
  Description of Artificial Sequence: Synthetic oligonucleotide
  Target: LAMA2; (-) strand; PAM type: YTN; PAM sequence: TTC
ttacctaaaacaggattctg

SEQ ID NO: 250706 - DNA, 20 bp, Artificial Sequence
  Description of Artificial Sequence: Synthetic oligonucleotide
  Target: LAMA2; (-) strand; PAM type: YTN; PAM sequence: TTT
cttacctaaaacaggattct

SEQ ID NO: 250707 - DNA, 20 bp, Artificial Sequence
  Description of Artificial Sequence: Synthetic oligonucleotide
  Target: LAMA2; (-) strand; PAM type: YTN; PAM sequence: CTT
tcttacctaaaacaggattc

SEQ ID NO: 250708 - DNA, 20 bp, Artificial Sequence
  Description of Artificial Sequence: Synthetic oligonucleotide
  Target: LAMA2; (-) strand; PAM type: YTN; PAM sequence: CTG
tacctttcttacctaaaaca

SEQ ID NO: 250709 - DNA, 20 bp, Artificial Sequence
  Description of Artificial Sequence: Synthetic oligonucleotide
  Target: LAMA2; (-) strand; PAM type: YTN; PAM sequence: CTC
ctgtacctttcttacctaaa

SEQ ID NO: 250710 - DNA, 20 bp, Artificial Sequence
  Description of Artificial Sequence: Synthetic oligonucleotide
  Target: LAMA2; (-) strand; PAM type: YTN; PAM sequence: TTC
tcctgtacctttcttaccta

SEQ ID NO: 250711 - DNA, 20 bp, Artificial Sequence
  Description of Artificial Sequence: Synthetic oligonucleotide
  Target: LAMA2; (-) strand; PAM type: YTN; PAM sequence: TTT
ctcctgtacctttcttacct

SEQ ID NO: 250712 - DNA, 20 bp, Artificial Sequence
  Description of Artificial Sequence: Synthetic oligonucleotide
  Target: LAMA2; (-) strand; PAM type: YTN; PAM sequence: TTG
aaagcagtttctcctgtacc

SEQ ID NO: 250713 - DNA, 20 bp, Artificial Sequence
  Description of Artificial Sequence: Synthetic oligonucleotide
  Target: LAMA2; (-) strand; PAM type: YTN; PAM sequence: CTT
gaaagcagtttctcctgtac

SEQ ID NO: 250714 - DNA, 20 bp, Artificial Sequence
  Description of Artificial Sequence: Synthetic oligonucleotide
  Target: LAMA2; (-) strand; PAM type: YTN; PAM sequence: TTC
aaatcttgaaagcagtttct

SEQ ID NO: 250715 - DNA, 20 bp, Artificial Sequence
  Description of Artificial Sequence: Synthetic oligonucleotide
  Target: LAMA2; (-) strand; PAM type: YTN; PAM sequence: CTT
caaatcttgaaagcagtttc

SEQ ID NO: 250716 - DNA, 20 bp, Artificial Sequence
  Description of Artificial Sequence: Synthetic oligonucleotide
  Target: LAMA2; (-) strand; PAM type: YTN; PAM sequence: CTA
tggcccttcaaatcttgaaa

SEQ ID NO: 250717 - DNA, 20 bp, Artificial Sequence
  Description of Artificial Sequence: Synthetic oligonucleotide
  Target: LAMA2; (-) strand; PAM type: YTN; PAM sequence: TTG
cctatggcccttcaaatctt

SEQ ID NO: 250718 - DNA, 20 bp, Artificial Sequence
  Description of Artificial Sequence: Synthetic oligonucleotide
  Target: LAMA2; (-) strand; PAM type: YTN; PAM sequence: TTG
aagttgcctatggcccttca

SEQ ID NO: 250719 - DNA, 20 bp, Artificial Sequence
  Description of Artificial Sequence: Synthetic oligonucleotide
  Target: LAMA2; (-) strand; PAM type: YTN; PAM sequence: TTT
gaagttgcctatggcccttc

SEQ ID NO: 250720 - DNA, 20 bp, Artificial Sequence
  Description of Artificial Sequence: Synthetic oligonucleotide
  Target: LAMA2; (-) strand; PAM type: YTN; PAM sequence: TTT
tgaagttgcctatggccctt

SEQ ID NO: 250721 - DNA, 20 bp, Artificial Sequence
  Description of Artificial Sequence: Synthetic oligonucleotide
  Target: LAMA2; (-) strand; PAM type: YTN; PAM sequence: TTG
agcattttgaagttgcctat

SEQ ID NO: 250722 - DNA, 20 bp, Artificial Sequence
  Description of Artificial Sequence: Synthetic oligonucleotide
  Target: LAMA2; (-) strand; PAM type: YTN; PAM sequence: TTT
gagcattttgaagttgccta

SEQ ID NO: 250723 - DNA, 20 bp, Artificial Sequence
  Description of Artificial Sequence: Synthetic oligonucleotide
  Target: LAMA2; (-) strand; PAM type: YTN; PAM sequence: CTT
tgagcattttgaagttgcct

SEQ ID NO: 250724 - DNA, 20 bp, Artificial Sequence
  Description of Artificial Sequence: Synthetic oligonucleotide
  Target: LAMA2; (-) strand; PAM type: YTN; PAM sequence: TTC
aggctttgagcattttgaag

SEQ ID NO: 250725 - DNA, 20 bp, Artificial Sequence
  Description of Artificial Sequence: Synthetic oligonucleotide
  Target: LAMA2; (-) strand; PAM type: YTN; PAM sequence: CTT
caggctttgagcattttgaa

SEQ ID NO: 250726 - DNA, 20 bp, Artificial Sequence
  Description of Artificial Sequence: Synthetic oligonucleotide
  Target: LAMA2; (-) strand; PAM type: YTN; PAM sequence: CTA
aggaaacttcaggctttgag

SEQ ID NO: 250727 - DNA, 20 bp, Artificial Sequence
  Description of Artificial Sequence: Synthetic oligonucleotide
  Target: LAMA2; (-) strand; PAM type: YTN; PAM sequence: CTC
taaggaaacttcaggctttg

SEQ ID NO: 250728 - DNA, 20 bp, Artificial Sequence
  Description of Artificial Sequence: Synthetic oligonucleotide
  Target: LAMA2; (-) strand; PAM type: YTN; PAM sequence: TTG
gaaagaatggatatgataag

SEQ ID NO: 250729 - DNA, 20 bp, Artificial Sequence
  Description of Artificial Sequence: Synthetic oligonucleotide
  Target: LAMA2; (-) strand; PAM type: YTN; PAM sequence: TTA
ttggaaagaatggatatgat

SEQ ID NO: 250730 - DNA, 20 bp, Artificial Sequence
  Description of Artificial Sequence: Synthetic oligonucleotide
  Target: LAMA2; (-) strand; PAM type: YTN; PAM sequence: CTG
aatacgtatcagtgtcaagg

SEQ ID NO: 250731 - DNA, 20 bp, Artificial Sequence
  Description of Artificial Sequence: Synthetic oligonucleotide
  Target: LAMA2; (-) strand; PAM type: YTN; PAM sequence: CTC
tgaatacgtatcagtgtcaa

SEQ ID NO: 250732 - DNA, 20 bp, Artificial Sequence
  Description of Artificial Sequence: Synthetic oligonucleotide
  Target: LAMA2; (-) strand; PAM type: YTN; PAM sequence: TTG
gaataatgaacatgcatgta

SEQ ID NO: 250733 - DNA, 20 bp, Artificial Sequence
  Description of Artificial Sequence: Synthetic oligonucleotide
  Target: LAMA2; (-) strand; PAM type: YTN; PAM sequence: TTT
ggaataatgaacatgcatgt

SEQ ID NO: 250734 - DNA, 20 bp, Artificial Sequence
  Description of Artificial Sequence: Synthetic oligonucleotide
  Target: LAMA2; (-) strand; PAM type: YTN; PAM sequence: CTA
cccatttggaataatgaaca

SEQ ID NO: 250735 - DNA, 20 bp, Artificial Sequence
  Description of Artificial Sequence: Synthetic oligonucleotide
  Target: LAMA2; (-) strand; PAM type: YTN; PAM sequence: TTA
acatctacccatttggaata

SEQ ID NO: 250736 - DNA, 20 bp, Artificial Sequence
  Description of Artificial Sequence: Synthetic oligonucleotide
  Target: LAMA2; (-) strand; PAM type: YTN; PAM sequence: CTA
aattaacatctacccatttg

SEQ ID NO: 250737 - DNA, 20 bp, Artificial Sequence
  Description of Artificial Sequence: Synthetic oligonucleotide
  Target: LAMA2; (-) strand; PAM type: YTN; PAM sequence: CTG
gtgctaaattaacatctacc

SEQ ID NO: 250738 - DNA, 20 bp, Artificial Sequence
  Description of Artificial Sequence: Synthetic oligonucleotide
  Target: LAMA2; (-) strand; PAM type: YTN; PAM sequence: TTC
aagacaggaaacaacagagc

SEQ ID NO: 250739 - DNA, 20 bp, Artificial Sequence
  Description of Artificial Sequence: Synthetic oligonucleotide
  Target: LAMA2; (-) strand; PAM type: YTN; PAM sequence: TTT
caagacaggaaacaacagag

SEQ ID NO: 250740 - DNA, 20 bp, Artificial Sequence
  Description of Artificial Sequence: Synthetic oligonucleotide
  Target: LAMA2; (-) strand; PAM type: YTN; PAM sequence: TTC
acatgcatgaaagtttcaag

SEQ ID NO: 250741 - DNA, 20 bp, Artificial Sequence
  Description of Artificial Sequence: Synthetic oligonucleotide
  Target: LAMA2; (-) strand; PAM type: YTN; PAM sequence: TTG
tcatagattcacatgcatga

SEQ ID NO: 250742 - DNA, 20 bp, Artificial Sequence
  Description of Artificial Sequence: Synthetic oligonucleotide
  Target: LAMA2; (-) strand; PAM type: YTN; PAM sequence: TTT
gtcatagattcacatgcatg

SEQ ID NO: 250743 - DNA, 20 bp, Artificial Sequence
  Description of Artificial Sequence: Synthetic oligonucleotide
  Target: LAMA2; (-) strand; PAM type: YTN; PAM sequence: TTT
tgtcatagattcacatgcat

SEQ ID NO: 250744 - DNA, 20 bp, Artificial Sequence
  Description of Artificial Sequence: Synthetic oligonucleotide
  Target: LAMA2; (-) strand; PAM type: YTN; PAM sequence: TTC
attttgtcatagattcacat

SEQ ID NO: 250745 - DNA, 20 bp, Artificial Sequence
  Description of Artificial Sequence: Synthetic oligonucleotide
  Target: LAMA2; (-) strand; PAM type: YTN; PAM sequence: TTT
cattttgtcatagattcaca

SEQ ID NO: 250746 - DNA, 20 bp, Artificial Sequence
  Description of Artificial Sequence: Synthetic oligonucleotide
  Target: LAMA2; (-) strand; PAM type: YTN; PAM sequence: TTT
tcattttgtcatagattcac

SEQ ID NO: 250747 - DNA, 20 bp, Artificial Sequence
  Description of Artificial Sequence: Synthetic oligonucleotide
  Target: LAMA2; (-) strand; PAM type: YTN; PAM sequence: TTT
ttcattttgtcatagattca

SEQ ID NO: 250748 - DNA, 20 bp, Artificial Sequence
  Description of Artificial Sequence: Synthetic oligonucleotide
  Target: LAMA2; (-) strand; PAM type: YTN; PAM sequence: TTG
agaaaagaatttttcatttt

SEQ ID NO: 250749 - DNA, 20 bp, Artificial Sequence
  Description of Artificial Sequence: Synthetic oligonucleotide
  Target: LAMA2; (-) strand; PAM type: YTN; PAM sequence: TTT
gagaaaagaatttttcattt

SEQ ID NO: 250750 - DNA, 20 bp, Artificial Sequence
  Description of Artificial Sequence: Synthetic oligonucleotide
  Target: LAMA2; (-) strand; PAM type: YTN; PAM sequence: TTT
tgagaaaagaatttttcatt

SEQ ID NO: 250751 - DNA, 20 bp, Artificial Sequence
  Description of Artificial Sequence: Synthetic oligonucleotide
  Target: LAMA2; (-) strand; PAM type: YTN; PAM sequence: CTG
gaaaatgtccattttgagaa

SEQ ID NO: 250752 - DNA, 20 bp, Artificial Sequence
  Description of Artificial Sequence: Synthetic oligonucleotide
  Target: LAMA2; (-) strand; PAM type: YTN; PAM sequence: TTC
atccaatactggaaaatgtc

SEQ ID NO: 250753 - DNA, 20 bp, Artificial Sequence
  Description of Artificial Sequence: Synthetic oligonucleotide
  Target: LAMA2; (-) strand; PAM type: YTN; PAM sequence: CTT
catccaatactggaaaatgt

SEQ ID NO: 250754 - DNA, 20 bp, Artificial Sequence
  Description of Artificial Sequence: Synthetic oligonucleotide
  Target: LAMA2; (-) strand; PAM type: YTN; PAM sequence: TTG
ccatatatatatatatatat

SEQ ID NO: 250755 - DNA, 20 bp, Artificial Sequence
  Description of Artificial Sequence: Synthetic oligonucleotide
  Target: LAMA2; (-) strand; PAM type: YTN; PAM sequence: CTA
gttgccatatatatatatat

SEQ ID NO: 250756 - DNA, 20 bp, Artificial Sequence
  Description of Artificial Sequence: Synthetic oligonucleotide
  Target: LAMA2; (-) strand; PAM type: YTN; PAM sequence: TTC
caaagtatacatctagttgc

SEQ ID NO: 250757 - DNA, 20 bp, Artificial Sequence
  Description of Artificial Sequence: Synthetic oligonucleotide
  Target: LAMA2; (-) strand; PAM type: YTN; PAM sequence: TTA
aaggaattccaaagtataca

SEQ ID NO: 250758 - DNA, 20 bp, Artificial Sequence
  Description of Artificial Sequence: Synthetic oligonucleotide
  Target: LAMA2; (-) strand; PAM type: YTN; PAM sequence: CTT
aaaggaattccaaagtatac

SEQ ID NO: 250759 - DNA, 20 bp, Artificial Sequence
  Description of Artificial Sequence: Synthetic oligonucleotide
  Target: LAMA2; (-) strand; PAM type: YTN; PAM sequence: TTC
accttaaaggaattccaaag

SEQ ID NO: 250760 - DNA, 20 bp, Artificial Sequence
  Description of Artificial Sequence: Synthetic oligonucleotide
  Target: LAMA2; (-) strand; PAM type: YTN; PAM sequence: TTT
caccttaaaggaattccaaa

SEQ ID NO: 250761 - DNA, 20 bp, Artificial Sequence
  Description of Artificial Sequence: Synthetic oligonucleotide
  Target: LAMA2; (-) strand; PAM type: YTN; PAM sequence: TTT
tcaccttaaaggaattccaa

SEQ ID NO: 250762 - DNA, 20 bp, Artificial Sequence
  Description of Artificial Sequence: Synthetic oligonucleotide
  Target: LAMA2; (-) strand; PAM type: YTN; PAM sequence: CTT
ttcaccttaaaggaattcca

SEQ ID NO: 250763 - DNA, 20 bp, Artificial Sequence
  Description of Artificial Sequence: Synthetic oligonucleotide
  Target: LAMA2; (-) strand; PAM type: YTN; PAM sequence: CTC
ttttcaccttaaaggaattc

SEQ ID NO: 250764 - DNA, 20 bp, Artificial Sequence
  Description of Artificial Sequence: Synthetic oligonucleotide
  Target: LAMA2; (-) strand; PAM type: YTN; PAM sequence: TTA
gagaactcttttcaccttaa

SEQ ID NO: 250765 - DNA, 20 bp, Artificial Sequence
  Description of Artificial Sequence: Synthetic oligonucleotide
  Target: LAMA2; (-) strand; PAM type: YTN; PAM sequence: TTT
agagaactcttttcacctta

SEQ ID NO: 250766 - DNA, 20 bp, Artificial Sequence
  Description of Artificial Sequence: Synthetic oligonucleotide
  Target: LAMA2; (-) strand; PAM type: YTN; PAM sequence: TTA
catttagagaactcttttca

SEQ ID NO: 250767 - DNA, 20 bp, Artificial Sequence
  Description of Artificial Sequence: Synthetic oligonucleotide
  Target: LAMA2; (-) strand; PAM type: YTN; PAM sequence: TTT
acatttagagaactcttttc

SEQ ID NO: 250768 - DNA, 20 bp, Artificial Sequence
  Description of Artificial Sequence: Synthetic oligonucleotide
  Target: LAMA2; (-) strand; PAM type: YTN; PAM sequence: CTT
tacatttagagaactctttt

SEQ ID NO: 250769 - DNA, 20 bp, Artificial Sequence
  Description of Artificial Sequence: Synthetic oligonucleotide
  Target: LAMA2; (-) strand; PAM type: YTN; PAM sequence: CTC
aacactttacatttagagaa

SEQ ID NO: 250770 - DNA, 20 bp, Artificial Sequence
  Description of Artificial Sequence: Synthetic oligonucleotide
  Target: LAMA2; (-) strand; PAM type: YTN; PAM sequence: TTC
actcaacactttacatttag

SEQ ID NO: 250771 - DNA, 20 bp, Artificial Sequence
  Description of Artificial Sequence: Synthetic oligonucleotide
  Target: LAMA2; (-) strand; PAM type: YTN; PAM sequence: TTT
cactcaacactttacattta

SEQ ID NO: 250772 - DNA, 20 bp, Artificial Sequence
  Description of Artificial Sequence: Synthetic oligonucleotide
  Target: LAMA2; (-) strand; PAM type: YTN; PAM sequence: CTA
aataatttcactcaacactt

SEQ ID NO: 250773 - DNA, 20 bp, Artificial Sequence
  Description of Artificial Sequence: Synthetic oligonucleotide
  Target: LAMA2; (-) strand; PAM type: YTN; PAM sequence: TTC
acatgaatgctaaataattt

SEQ ID NO: 250774 - DNA, 20 bp, Artificial Sequence
  Description of Artificial Sequence: Synthetic oligonucleotide
  Target: LAMA2; (-) strand; PAM type: YTN; PAM sequence: TTC
attcacatgaatgctaaata

SEQ ID NO: 250775 - DNA, 20 bp, Artificial Sequence
  Description of Artificial Sequence: Synthetic oligonucleotide
  Target: LAMA2; (-) strand; PAM type: YTN; PAM sequence: TTA
gttcattcacatgaatgcta

SEQ ID NO: 250776 - DNA, 20 bp, Artificial Sequence
  Description of Artificial Sequence: Synthetic oligonucleotide
  Target: LAMA2; (-) strand; PAM type: YTN; PAM sequence: CTT
agttcattcacatgaatgct

SEQ ID NO: 250777 - DNA, 20 bp, Artificial Sequence
  Description of Artificial Sequence: Synthetic oligonucleotide
  Target: LAMA2; (-) strand; PAM type: YTN; PAM sequence: TTG
tcttagttcattcacatgaa

SEQ ID NO: 250778 - DNA, 20 bp, Artificial Sequence
  Description of Artificial Sequence: Synthetic oligonucleotide
  Target: LAMA2; (-) strand; PAM type: YTN; PAM sequence: CTT
gtcttagttcattcacatga

SEQ ID NO: 250779 - DNA, 20 bp, Artificial Sequence
  Description of Artificial Sequence: Synthetic oligonucleotide
  Target: LAMA2; (-) strand; PAM type: YTN; PAM sequence: TTC
ttgtcttagttcattcacat

SEQ ID NO: 250780 - DNA, 20 bp, Artificial Sequence
  Description of Artificial Sequence: Synthetic oligonucleotide
  Target: LAMA2; (-) strand; PAM type: YTN; PAM sequence: CTT
cttgtcttagttcattcaca

SEQ ID NO: 250781 - DNA, 20 bp, Artificial Sequence
  Description of Artificial Sequence: Synthetic oligonucleotide
  Target: LAMA2; (-) strand; PAM type: YTN; PAM sequence: TTA
ggtaatccttcttgtcttag

SEQ ID NO: 250782 - DNA, 20 bp, Artificial Sequence
  Description of Artificial Sequence: Synthetic oligonucleotide
  Target: LAMA2; (-) strand; PAM type: YTN; PAM sequence: CTT
aggtaatccttcttgtctta

SEQ ID NO: 250783 - DNA, 20 bp, Artificial Sequence
  Description of Artificial Sequence: Synthetic oligonucleotide
  Target: LAMA2; (-) strand; PAM type: YTN; PAM sequence: CTA
tgacacttaggtaatccttc

SEQ ID NO: 250784 - DNA, 20 bp, Artificial Sequence
  Description of Artificial Sequence: Synthetic oligonucleotide
  Target: LAMA2; (-) strand; PAM type: YTN; PAM sequence: TTG
aatgacctatgacacttagg

SEQ ID NO: 250785 - DNA, 20 bp, Artificial Sequence
  Description of Artificial Sequence: Synthetic oligonucleotide
  Target: LAMA2; (-) strand; PAM type: YTN; PAM sequence: CTA
aggagtatattgaatgacct

SEQ ID NO: 250786 - DNA, 20 bp, Artificial Sequence
  Description of Artificial Sequence: Synthetic oligonucleotide
  Target: LAMA2; (-) strand; PAM type: YTN; PAM sequence: CTC
aaaataggacaatggcatct

SEQ ID NO: 250787 - DNA, 20 bp, Artificial Sequence
  Description of Artificial Sequence: Synthetic oligonucleotide
  Target: LAMA2; (-) strand; PAM type: YTN; PAM sequence: TTC
tcaaaataggacaatggcat

SEQ ID NO: 250788 - DNA, 20 bp, Artificial Sequence
  Description of Artificial Sequence: Synthetic oligonucleotide
  Target: LAMA2; (-) strand; PAM type: YTN; PAM sequence: CTA
attctcaaaataggacaatg

SEQ ID NO: 250789 - DNA, 20 bp, Artificial Sequence
  Description of Artificial Sequence: Synthetic oligonucleotide
  Target: LAMA2; (-) strand; PAM type: YTN; PAM sequence: CTG
cagtctaattctcaaaatag

SEQ ID NO: 250790 - DNA, 20 bp, Artificial Sequence
  Description of Artificial Sequence: Synthetic oligonucleotide
  Target: LAMA2; (-) strand; PAM type: YTN; PAM sequence: CTA
catgggaaaaaacaaacaac

SEQ ID NO: 250791 - DNA, 20 bp, Artificial Sequence
  Description of Artificial Sequence: Synthetic oligonucleotide
  Target: LAMA2; (-) strand; PAM type: YTN; PAM sequence: TTA
ctacatgggaaaaaacaaac

SEQ ID NO: 250792 - DNA, 20 bp, Artificial Sequence
  Description of Artificial Sequence: Synthetic oligonucleotide
  Target: LAMA2; (-) strand; PAM type: YTN; PAM sequence: CTT
actacatgggaaaaaacaaa

SEQ ID NO: 250793 - DNA, 20 bp, Artificial Sequence
  Description of Artificial Sequence: Synthetic oligonucleotide
  Target: LAMA2; (-) strand; PAM type: YTN; PAM sequence: TTA
aaggaacttactacatggga

SEQ ID NO: 250794 - DNA, 20 bp, Artificial Sequence
  Description of Artificial Sequence: Synthetic oligonucleotide
  Target: LAMA2; (-) strand; PAM type: YTN; PAM sequence: TTT
aaaggaacttactacatggg

SEQ ID NO: 250795 - DNA, 20 bp, Artificial Sequence
  Description of Artificial Sequence: Synthetic oligonucleotide
  Target: LAMA2; (-) strand; PAM type: YTN; PAM sequence: TTT
taaaggaacttactacatgg

SEQ ID NO: 250796 - DNA, 20 bp, Artificial Sequence
  Description of Artificial Sequence: Synthetic oligonucleotide
  Target: LAMA2; (-) strand; PAM type: YTN; PAM sequence: TTA
ttttaaaggaacttactaca

SEQ ID NO: 250797 - DNA, 20 bp, Artificial Sequence
  Description of Artificial Sequence: Synthetic oligonucleotide
  Target: LAMA2; (-) strand; PAM type: YTN; PAM sequence: CTA
ttattttaaaggaacttact

SEQ ID NO: 250798 - DNA, 20 bp, Artificial Sequence
  Description of Artificial Sequence: Synthetic oligonucleotide
  Target: LAMA2; (-) strand; PAM type: YTN; PAM sequence: TTA
agctattattttaaaggaac

SEQ ID NO: 250799 - DNA, 20 bp, Artificial Sequence
  Description of Artificial Sequence: Synthetic oligonucleotide
  Target: LAMA2; (-) strand; PAM type: YTN; PAM sequence: CTG
aattaagctattattttaaa

SEQ ID NO: 250800 - DNA, 20 bp, Artificial Sequence
  Description of Artificial Sequence: Synthetic oligonucleotide
  Target: LAMA2; (-) strand; PAM type: YTN; PAM sequence: TTA
aaactgaattaagctattat

SEQ ID NO: 250801 - DNA, 20 bp, Artificial Sequence
  Description of Artificial Sequence: Synthetic oligonucleotide
  Target: LAMA2; (-) strand; PAM type: YTN; PAM sequence: CTT
aaaactgaattaagctatta

SEQ ID NO: 250802 - DNA, 20 bp, Artificial Sequence
  Description of Artificial Sequence: Synthetic oligonucleotide
  Target: LAMA2; (-) strand; PAM type: YTN; PAM sequence: TTG
tgtagaacaatagggaaaga

SEQ ID NO: 250803 - DNA, 20 bp, Artificial Sequence
  Description of Artificial Sequence: Synthetic oligonucleotide
  Target: LAMA2; (-) strand; PAM type: YTN; PAM sequence: CTG
tagatggatgtgggttgtgt

SEQ ID NO: 250804 - DNA, 20 bp, Artificial Sequence
  Description of Artificial Sequence: Synthetic oligonucleotide
  Target: LAMA2; (-) strand; PAM type: YTN; PAM sequence: TTC
aaactgtagatggatgtggg

SEQ ID NO: 250805 - DNA, 20 bp, Artificial Sequence
  Description of Artificial Sequence: Synthetic oligonucleotide
  Target: LAMA2; (-) strand; PAM type: YTN; PAM sequence: TTT
caaactgtagatggatgtgg

SEQ ID NO: 250806 - DNA, 20 bp, Artificial Sequence
  Description of Artificial Sequence: Synthetic oligonucleotide
  Target: LAMA2; (-) strand; PAM type: YTN; PAM sequence: TTA
catatttcaaactgtagatg

SEQ ID NO: 250807 - DNA, 20 bp, Artificial Sequence
  Description of Artificial Sequence: Synthetic oligonucleotide
  Target: LAMA2; (-) strand; PAM type: YTN; PAM sequence: TTG
aaaaaagtgcacgaaagtta

SEQ ID NO: 250808 - DNA, 20 bp, Artificial Sequence
  Description of Artificial Sequence: Synthetic oligonucleotide
  Target: LAMA2; (-) strand; PAM type: YTN; PAM sequence: TTG
aattgaaaaaagtgcacgaa

SEQ ID NO: 250809 - DNA, 20 bp, Artificial Sequence
  Description of Artificial Sequence: Synthetic oligonucleotide
  Target: LAMA2; (-) strand; PAM type: YTN; PAM sequence: CTT
gaattgaaaaaagtgcacga

SEQ ID NO: 250810 - DNA, 20 bp, Artificial Sequence
  Description of Artificial Sequence: Synthetic oligonucleotide
  Target: LAMA2; (-) strand; PAM type: YTN; PAM sequence: TTA
caaacaccttgaattgaaaa

SEQ ID NO: 250811 - DNA, 20 bp, Artificial Sequence
  Description of Artificial Sequence: Synthetic oligonucleotide
  Target: LAMA2; (-) strand; PAM type: YTN; PAM sequence: CTC
ataaacatatatgtgattac

SEQ ID NO: 250812 - DNA, 20 bp, Artificial Sequence
  Description of Artificial Sequence: Synthetic oligonucleotide
  Target: LAMA2; (-) strand; PAM type: YTN; PAM sequence: CTG
acaactcataaacatatatg

SEQ ID NO: 250813 - DNA, 20 bp, Artificial Sequence
  Description of Artificial Sequence: Synthetic oligonucleotide
  Target: LAMA2; (-) strand; PAM type: YTN; PAM sequence: CTA
cctgacaactcataaacata

SEQ ID NO: 250814 - DNA, 20 bp, Artificial Sequence
  Description of Artificial Sequence: Synthetic oligonucleotide
  Target: LAMA2; (-) strand; PAM type: YTN; PAM sequence: CTA
aaataatagctacctgacaa

SEQ ID NO: 250815 - DNA, 20 bp, Artificial Sequence
  Description of Artificial Sequence: Synthetic oligonucleotide
  Target: LAMA2; (-) strand; PAM type: YTN; PAM sequence: TTA
actaaaataatagctacctg

SEQ ID NO: 250816 - DNA, 20 bp, Artificial Sequence
  Description of Artificial Sequence: Synthetic oligonucleotide
  Target: LAMA2; (-) strand; PAM type: YTN; PAM sequence: CTG
ttaactaaaataatagctac

SEQ ID NO: 250817 - DNA, 20 bp, Artificial Sequence
  Description of Artificial Sequence: Synthetic oligonucleotide
  Target: LAMA2; (-) strand; PAM type: YTN; PAM sequence: TTC
cctgttaactaaaataatag

SEQ ID NO: 250818 - DNA, 20 bp, Artificial Sequence
  Description of Artificial Sequence: Synthetic oligonucleotide
  Target: LAMA2; (-) strand; PAM type: YTN; PAM sequence: TTA
gttccctgttaactaaaata

SEQ ID NO: 250819 - DNA, 20 bp, Artificial Sequence
  Description of Artificial Sequence: Synthetic oligonucleotide
  Target: LAMA2; (-) strand; PAM type: YTN; PAM sequence: CTT
agttccctgttaactaaaat

SEQ ID NO: 250820 - DNA, 20 bp, Artificial Sequence
  Description of Artificial Sequence: Synthetic oligonucleotide
  Target: LAMA2; (-) strand; PAM type: YTN; PAM sequence: TTG
gcatgaccttagttccctgt

SEQ ID NO: 250821 - DNA, 20 bp, Artificial Sequence
  Description of Artificial Sequence: Synthetic oligonucleotide
  Target: LAMA2; (-) strand; PAM type: YTN; PAM sequence: TTT
ggcatgaccttagttccctg

SEQ ID NO: 250822 - DNA, 20 bp, Artificial Sequence
  Description of Artificial Sequence: Synthetic oligonucleotide
  Target: LAMA2; (-) strand; PAM type: YTN; PAM sequence: TTG
gtttggcatgaccttagttc

SEQ ID NO: 250823 - DNA, 20 bp, Artificial Sequence
  Description of Artificial Sequence: Synthetic oligonucleotide
  Target: LAMA2; (-) strand; PAM type: YTN; PAM sequence: CTT
ggtttggcatgaccttagtt

SEQ ID NO: 250824 - DNA, 20 bp, Artificial Sequence
  Description of Artificial Sequence: Synthetic oligonucleotide
  Target: LAMA2; (-) strand; PAM type: YTN; PAM sequence: TTC
ttggtttggcatgaccttag

SEQ ID NO: 250825 - DNA, 20 bp, Artificial Sequence
  Description of Artificial Sequence: Synthetic oligonucleotide
  Target: LAMA2; (-) strand; PAM type: YTN; PAM sequence: CTT
cttggtttggcatgacctta

SEQ ID NO: 250826 - DNA, 20 bp, Artificial Sequence
  Description of Artificial Sequence: Synthetic oligonucleotide
  Target: LAMA2; (-) strand; PAM type: YTN; PAM sequence: TTA
tgaagcatatgcttcttggt

SEQ ID NO: 250827 - DNA, 20 bp, Artificial Sequence
  Description of Artificial Sequence: Synthetic oligonucleotide
  Target: LAMA2; (-) strand; PAM type: YTN; PAM sequence: TTA
gccaaatgcattatgaagca

SEQ ID NO: 250828 - DNA, 20 bp, Artificial Sequence
  Description of Artificial Sequence: Synthetic oligonucleotide
  Target: LAMA2; (-) strand; PAM type: YTN; PAM sequence: CTT
agccaaatgcattatgaagc

SEQ ID NO: 250829 - DNA, 20 bp, Artificial Sequence
  Description of Artificial Sequence: Synthetic oligonucleotide
  Target: LAMA2; (-) strand; PAM type: YTN; PAM sequence: TTA
gccttagccaaatgcattat

SEQ ID NO: 250830 - DNA, 20 bp, Artificial Sequence
  Description of Artificial Sequence: Synthetic oligonucleotide
  Target: LAMA2; (-) strand; PAM type: YTN; PAM sequence: TTC
aatattagccttagccaaat

SEQ ID NO: 250831 - DNA, 20 bp, Artificial Sequence
  Description of Artificial Sequence: Synthetic oligonucleotide
  Target: LAMA2; (-) strand; PAM type: YTN; PAM sequence: TTT
caatattagccttagccaaa

SEQ ID NO: 250832 - DNA, 20 bp, Artificial Sequence
  Description of Artificial Sequence: Synthetic oligonucleotide
  Target: LAMA2; (-) strand; PAM type: YTN; PAM sequence: TTG
tggtatacatgaagggaagg

SEQ ID NO: 250833 - DNA, 20 bp, Artificial Sequence
  Description of Artificial Sequence: Synthetic oligonucleotide
  Target: LAMA2; (-) strand; PAM type: YTN; PAM sequence: TTT
gtggtatacatgaagggaag

SEQ ID NO: 250834 - DNA, 20 bp, Artificial Sequence
  Description of Artificial Sequence: Synthetic oligonucleotide
  Target: LAMA2; (-) strand; PAM type: YTN; PAM sequence: TTC
agggaatatatttgtggtat

SEQ ID NO: 250835 - DNA, 20 bp, Artificial Sequence
  Description of Artificial Sequence: Synthetic oligonucleotide
  Target: LAMA2; (-) strand; PAM type: YTN; PAM sequence: CTG
tcattcagggaatatatttg

SEQ ID NO: 250836 - DNA, 20 bp, Artificial Sequence
  Description of Artificial Sequence: Synthetic oligonucleotide
  Target: LAMA2; (-) strand; PAM type: YTN; PAM sequence: TTC
cctgtcattcagggaatata

SEQ ID NO: 250837 - DNA, 20 bp, Artificial Sequence
  Description of Artificial Sequence: Synthetic oligonucleotide
  Target: LAMA2; (-) strand; PAM type: YTN; PAM sequence: TTT
ccctgtcattcagggaatat

SEQ ID NO: 250838 - DNA, 20 bp, Artificial Sequence
  Description of Artificial Sequence: Synthetic oligonucleotide
  Target: LAMA2; (-) strand; PAM type: YTN; PAM sequence: CTT
tccctgtcattcagggaata

SEQ ID NO: 250839 - DNA, 20 bp, Artificial Sequence
  Description of Artificial Sequence: Synthetic oligonucleotide
  Target: LAMA2; (-) strand; PAM type: YTN; PAM sequence: TTG
gctttccctgtcattcaggg

SEQ ID NO: 250840 - DNA, 20 bp, Artificial Sequence
  Description of Artificial Sequence: Synthetic oligonucleotide
  Target: LAMA2; (-) strand; PAM type: YTN; PAM sequence: TTC
aggttggctttccctgtcat

SEQ ID NO: 250841 - DNA, 20 bp, Artificial Sequence
  Description of Artificial Sequence: Synthetic oligonucleotide
  Target: LAMA2; (-) strand; PAM type: YTN; PAM sequence: TTT
caggttggctttccctgtca

SEQ ID NO: 250842 - DNA, 20 bp, Artificial Sequence
  Description of Artificial Sequence: Synthetic oligonucleotide
  Target: LAMA2; (-) strand; PAM type: YTN; PAM sequence: TTT
tcaggttggctttccctgtc

SEQ ID NO: 250843 - DNA, 20 bp, Artificial Sequence
  Description of Artificial Sequence: Synthetic oligonucleotide
  Target: LAMA2; (-) strand; PAM type: YTN; PAM sequence: TTA
ttttcaggttggctttccct

SEQ ID NO: 250844 - DNA, 20 bp, Artificial Sequence
  Description of Artificial Sequence: Synthetic oligonucleotide
  Target: LAMA2; (-) strand; PAM type: YTN; PAM sequence: TTT
attttcaggttggctttccc

SEQ ID NO: 250845 - DNA, 20 bp, Artificial Sequence
  Description of Artificial Sequence: Synthetic oligonucleotide
  Target: LAMA2; (-) strand; PAM type: YTN; PAM sequence: TTT
tattttcaggttggctttcc

SEQ ID NO: 250846 - DNA, 20 bp, Artificial Sequence
  Description of Artificial Sequence: Synthetic oligonucleotide
  Target: LAMA2; (-) strand; PAM type: YTN; PAM sequence: CTT
ttattttcaggttggctttc

SEQ ID NO: 250847 - DNA, 20 bp, Artificial Sequence
  Description of Artificial Sequence: Synthetic oligonucleotide
  Target: LAMA2; (-) strand; PAM type: YTN; PAM sequence: TTA
gtagacttttattttcaggt

SEQ ID NO: 250848 - DNA, 20 bp, Artificial Sequence
  Description of Artificial Sequence: Synthetic oligonucleotide
  Target: LAMA2; (-) strand; PAM type: YTN; PAM sequence: CTT
agtagacttttattttcagg

SEQ ID NO: 250849 - DNA, 20 bp, Artificial Sequence
  Description of Artificial Sequence: Synthetic oligonucleotide
  Target: LAMA2; (-) strand; PAM type: YTN; PAM sequence: TTA
cagacatgagccaccacacc

SEQ ID NO: 250850 - DNA, 20 bp, Artificial Sequence
  Description of Artificial Sequence: Synthetic oligonucleotide
  Target: LAMA2; (-) strand; PAM type: YTN; PAM sequence: CTA
ggattacagacatgagccac

SEQ ID NO: 250851 - DNA, 20 bp, Artificial Sequence
  Description of Artificial Sequence: Synthetic oligonucleotide
  Target: LAMA2; (-) strand; PAM type: YTN; PAM sequence: CTC
ccaaagtgctaggattacag

SEQ ID NO: 250852 - DNA, 20 bp, Artificial Sequence
  Description of Artificial Sequence: Synthetic oligonucleotide
  Target: LAMA2; (-) strand; PAM type: YTN; PAM sequence: CTC
agcctcccaaagtgctagga

SEQ ID NO: 250853 - DNA, 20 bp, Artificial Sequence
  Description of Artificial Sequence: Synthetic oligonucleotide
  Target: LAMA2; (-) strand; PAM type: YTN; PAM sequence: CTG
cctcagcctcccaaagtgct

SEQ ID NO: 250854 - DNA, 20 bp, Artificial Sequence
  Description of Artificial Sequence: Synthetic oligonucleotide
  Target: LAMA2; (-) strand; PAM type: YTN; PAM sequence: CTG
acatcaggtgatccacctgc

SEQ ID NO: 250855 - DNA, 20 bp, Artificial Sequence
  Description of Artificial Sequence: Synthetic oligonucleotide
  Target: LAMA2; (-) strand; PAM type: YTN; PAM sequence: CTC
ctgacatcaggtgatccacc

SEQ ID NO: 250856 - DNA, 20 bp, Artificial Sequence
  Description of Artificial Sequence: Synthetic oligonucleotide
  Target: LAMA2; (-) strand; PAM type: YTN; PAM sequence: CTC
aaactcctgacatcaggtga

SEQ ID NO: 250857 - DNA, 20 bp, Artificial Sequence
  Description of Artificial Sequence: Synthetic oligonucleotide
  Target: LAMA2; (-) strand; PAM type: YTN; PAM sequence: CTG
gtctcaaactcctgacatca

SEQ ID NO: 250858 - DNA, 20 bp, Artificial Sequence
  Description of Artificial Sequence: Synthetic oligonucleotide
  Target: LAMA2; (-) strand; PAM type: YTN; PAM sequence: TTG
gccagtctggtctcaaactc

SEQ ID NO: 250859 - DNA, 20 bp, Artificial Sequence
  Description of Artificial Sequence: Synthetic oligonucleotide
  Target: LAMA2; (-) strand; PAM type: YTN; PAM sequence: TTG
ccatgttggccagtctggtc

SEQ ID NO: 250860 - DNA, 20 bp, Artificial Sequence
  Description of Artificial Sequence: Synthetic oligonucleotide
  Target: LAMA2; (-) strand; PAM type: YTN; PAM sequence: TTT
gccatgttggccagtctggt

SEQ ID NO: 250861 - DNA, 20 bp, Artificial Sequence
  Description of Artificial Sequence: Synthetic oligonucleotide
  Target: LAMA2; (-) strand; PAM type: YTN; PAM sequence: TTT
tgccatgttggccagtctgg

SEQ ID NO: 250862 - DNA, 20 bp, Artificial Sequence
  Description of Artificial Sequence: Synthetic oligonucleotide
  Target: LAMA2; (-) strand; PAM type: YTN; PAM sequence: TTG
tagaagaggcgggggttttg

SEQ ID NO: 250863 - DNA, 20 bp, Artificial Sequence
  Description of Artificial Sequence: Synthetic oligonucleotide
  Target: LAMA2; (-) strand; PAM type: YTN; PAM sequence: TTT
gtagaagaggcgggggtttt

SEQ ID NO: 250864 - DNA, 20 bp, Artificial Sequence
  Description of Artificial Sequence: Synthetic oligonucleotide
  Target: LAMA2; (-) strand; PAM type: YTN; PAM sequence: TTG
catttgtagaagaggcgggg

SEQ ID NO: 250865 - DNA, 20 bp, Artificial Sequence
  Description of Artificial Sequence: Synthetic oligonucleotide
  Target: LAMA2; (-) strand; PAM type: YTN; PAM sequence: TTT
gcatttgtagaagaggcggg

SEQ ID NO: 250866 - DNA, 20 bp, Artificial Sequence
  Description of Artificial Sequence: Synthetic oligonucleotide
  Target: LAMA2; (-) strand; PAM type: YTN; PAM sequence: TTT
tgcatttgtagaagaggcgg

SEQ ID NO: 250867 - DNA, 20 bp, Artificial Sequence
  Description of Artificial Sequence: Synthetic oligonucleotide
  Target: LAMA2; (-) strand; PAM type: YTN; PAM sequence: TTT
ttgcatttgtagaagaggcg

SEQ ID NO: 250868 - DNA, 20 bp, Artificial Sequence
  Description of Artificial Sequence: Synthetic oligonucleotide
  Target: LAMA2; (-) strand; PAM type: YTN; PAM sequence: TTT
tttgcatttgtagaagaggc

SEQ ID NO: 250869 - DNA, 20 bp, Artificial Sequence
  Description of Artificial Sequence: Synthetic oligonucleotide
  Target: LAMA2; (-) strand; PAM type: YTN; PAM sequence: CTA
attttttgcatttgtagaag

SEQ ID NO: 250870 - DNA, 20 bp, Artificial Sequence
  Description of Artificial Sequence: Synthetic oligonucleotide
  Target: LAMA2; (-) strand; PAM type: YTN; PAM sequence: CTG
gctaattttttgcatttgta

SEQ ID NO: 250871 - DNA, 20 bp, Artificial Sequence
  Description of Artificial Sequence: Synthetic oligonucleotide
  Target: LAMA2; (-) strand; PAM type: YTN; PAM sequence: CTG
ccaccaagcctggctaattt

SEQ ID NO: 250872 - DNA, 20 bp, Artificial Sequence
  Description of Artificial Sequence: Synthetic oligonucleotide
  Target: LAMA2; (-) strand; PAM type: YTN; PAM sequence: TTA
caggcgcctgccaccaagcc

SEQ ID NO: 250873 - DNA, 20 bp, Artificial Sequence
  Description of Artificial Sequence: Synthetic oligonucleotide
  Target: LAMA2; (-) strand; PAM type: YTN; PAM sequence: CTG
agattacaggcgcctgccac

SEQ ID NO: 250874 - DNA, 20 bp, Artificial Sequence
  Description of Artificial Sequence: Synthetic oligonucleotide
  Target: LAMA2; (-) strand; PAM type: YTN; PAM sequence: CTC
cataatagctgagattacag

SEQ ID NO: 250875 - DNA, 20 bp, Artificial Sequence
  Description of Artificial Sequence: Synthetic oligonucleotide
  Target: LAMA2; (-) strand; PAM type: YTN; PAM sequence: CTC
agcctccataatagctgaga

SEQ ID NO: 250876 - DNA, 20 bp, Artificial Sequence
  Description of Artificial Sequence: Synthetic oligonucleotide
  Target: LAMA2; (-) strand; PAM type: YTN; PAM sequence: CTC
atgcctcagcctccataata

SEQ ID NO: 250877 - DNA, 20 bp, Artificial Sequence
  Description of Artificial Sequence: Synthetic oligonucleotide
  Target: LAMA2; (-) strand; PAM type: YTN; PAM sequence: TTC
tcatgcctcagcctccataa

SEQ ID NO: 250878 - DNA, 20 bp, Artificial Sequence
  Description of Artificial Sequence: Synthetic oligonucleotide
  Target: LAMA2; (-) strand; PAM type: YTN; PAM sequence: TTC
aagcgattctcatgcctcag

SEQ ID NO: 250879 - DNA, 20 bp, Artificial Sequence
  Description of Artificial Sequence: Synthetic oligonucleotide
  Target: LAMA2; (-) strand; PAM type: YTN; PAM sequence: CTC
ccaggttcaagcgattctca

SEQ ID NO: 250880 - DNA, 20 bp, Artificial Sequence
  Description of Artificial Sequence: Synthetic oligonucleotide
  Target: LAMA2; (-) strand; PAM type: YTN; PAM sequence: CTG
tgcctcccaggttcaagcga

SEQ ID NO: 250881 - DNA, 20 bp, Artificial Sequence
  Description of Artificial Sequence: Synthetic oligonucleotide
  Target: LAMA2; (-) strand; PAM type: YTN; PAM sequence: CTG
ccacctgtgcctcccaggtt

SEQ ID NO: 250882 - DNA, 20 bp, Artificial Sequence
  Description of Artificial Sequence: Synthetic oligonucleotide
  Target: LAMA2; (-) strand; PAM type: YTN; PAM sequence: CTC
gctgccacctgtgcctccca

SEQ ID NO: 250883 - DNA, 20 bp, Artificial Sequence
  Description of Artificial Sequence: Synthetic oligonucleotide
  Target: LAMA2; (-) strand; PAM type: YTN; PAM sequence: CTC
ggctcgctgccacctgtgcc

SEQ ID NO: 250884 - DNA, 20 bp, Artificial Sequence
  Description of Artificial Sequence: Synthetic oligonucleotide
  Target: LAMA2; (-) strand; PAM type: YTN; PAM sequence: CTG
gagtgcaacggcgcgatctc

SEQ ID NO: 250885 - DNA, 20 bp, Artificial Sequence
  Description of Artificial Sequence: Synthetic oligonucleotide
  Target: LAMA2; (-) strand; PAM type: YTN; PAM sequence: CTA
tcccccaggctggagtgcaa

SEQ ID NO: 250886 - DNA, 20 bp, Artificial Sequence
  Description of Artificial Sequence: Synthetic oligonucleotide
  Target: LAMA2; (-) strand; PAM type: YTN; PAM sequence: CTC
tatcccccaggctggagtgc

SEQ ID NO: 250887 - DNA, 20 bp, Artificial Sequence
  Description of Artificial Sequence: Synthetic oligonucleotide
  Target: LAMA2; (-) strand; PAM type: YTN; PAM sequence: CTC
gctctatcccccaggctgga

SEQ ID NO: 250888 - DNA, 20 bp, Artificial Sequence
  Description of Artificial Sequence: Synthetic oligonucleotide
  Target: LAMA2; (-) strand; PAM type: YTN; PAM sequence: TTG
gagacagagtctcgctctat

SEQ ID NO: 250889 - DNA, 20 bp, Artificial Sequence
  Description of Artificial Sequence: Synthetic oligonucleotide
  Target: LAMA2; (-) strand; PAM type: YTN; PAM sequence: TTT
ggagacagagtctcgctcta

SEQ ID NO: 250890 - DNA, 20 bp, Artificial Sequence
  Description of Artificial Sequence: Synthetic oligonucleotide
  Target: LAMA2; (-) strand; PAM type: YTN; PAM sequence: TTT
tggagacagagtctcgctct

SEQ ID NO: 250891 - DNA, 20 bp, Artificial Sequence
  Description of Artificial Sequence: Synthetic oligonucleotide
  Target: LAMA2; (-) strand; PAM type: YTN; PAM sequence: TTT
ttggagacagagtctcgctc

SEQ ID NO: 250892 - DNA, 20 bp, Artificial Sequence
  Description of Artificial Sequence: Synthetic oligonucleotide
  Target: LAMA2; (-) strand; PAM type: YTN; PAM sequence: TTT
tttggagacagagtctcgct

SEQ ID NO: 250893 - DNA, 20 bp, Artificial Sequence
  Description of Artificial Sequence: Synthetic oligonucleotide
  Target: LAMA2; (-) strand; PAM type: YTN; PAM sequence: TTT
ttttggagacagagtctcgc

SEQ ID NO: 250894 - DNA, 20 bp, Artificial Sequence
  Description of Artificial Sequence: Synthetic oligonucleotide
  Target: LAMA2; (-) strand; PAM type: YTN; PAM sequence: TTT
tttttggagacagagtctcg

SEQ ID NO: 250895 - DNA, 20 bp, Artificial Sequence
  Description of Artificial Sequence: Synthetic oligonucleotide
  Target: LAMA2; (-) strand; PAM type: YTN; PAM sequence: TTT
ttttttggagacagagtctc

SEQ ID NO: 250896 - DNA, 20 bp, Artificial Sequence
  Description of Artificial Sequence: Synthetic oligonucleotide
  Target: LAMA2; (-) strand; PAM type: YTN; PAM sequence: TTA
tttttttttggagacagagt

SEQ ID NO: 250897 - DNA, 20 bp, Artificial Sequence
  Description of Artificial Sequence: Synthetic oligonucleotide
  Target: LAMA2; (-) strand; PAM type: YTN; PAM sequence: TTT
atttttttttggagacagag

SEQ ID NO: 250898 - DNA, 20 bp, Artificial Sequence
  Description of Artificial Sequence: Synthetic oligonucleotide
  Target: LAMA2; (-) strand; PAM type: YTN; PAM sequence: TTA
tttatttttttttggagaca

SEQ ID NO: 250899 - DNA, 20 bp, Artificial Sequence
  Description of Artificial Sequence: Synthetic oligonucleotide
  Target: LAMA2; (-) strand; PAM type: YTN; PAM sequence: TTT
atttatttttttttggagac

SEQ ID NO: 250900 - DNA, 20 bp, Artificial Sequence
  Description of Artificial Sequence: Synthetic oligonucleotide
  Target: LAMA2; (-) strand; PAM type: YTN; PAM sequence: TTA
tttatttatttttttttgga

SEQ ID NO: 250901 - DNA, 20 bp, Artificial Sequence
  Description of Artificial Sequence: Synthetic oligonucleotide
  Target: LAMA2; (-) strand; PAM type: YTN; PAM sequence: TTT
atttatttatttttttttgg

SEQ ID NO: 250902 - DNA, 20 bp, Artificial Sequence
  Description of Artificial Sequence: Synthetic oligonucleotide
  Target: LAMA2; (-) strand; PAM type: YTN; PAM sequence: TTT
tatttatttatttttttttg

SEQ ID NO: 250903 - DNA, 20 bp, Artificial Sequence
  Description of Artificial Sequence: Synthetic oligonucleotide
  Target: LAMA2; (-) strand; PAM type: YTN; PAM sequence: TTT
ttatttatttattttttttt

SEQ ID NO: 250904 - DNA, 20 bp, Artificial Sequence
  Description of Artificial Sequence: Synthetic oligonucleotide
  Target: LAMA2; (-) strand; PAM type: YTN; PAM sequence: TTT
tttatttatttatttttttt

SEQ ID NO: 250905 - DNA, 20 bp, Artificial Sequence
  Description of Artificial Sequence: Synthetic oligonucleotide
  Target: LAMA2; (-) strand; PAM type: YTN; PAM sequence: TTA
ttttttatttatttattttt

SEQ ID NO: 250906 - DNA, 20 bp, Artificial Sequence
  Description of Artificial Sequence: Synthetic oligonucleotide
  Target: LAMA2; (-) strand; PAM type: YTN; PAM sequence: TTT
attttttatttatttatttt

SEQ ID NO: 250907 - DNA, 20 bp, Artificial Sequence
  Description of Artificial Sequence: Synthetic oligonucleotide
  Target: LAMA2; (-) strand; PAM type: YTN; PAM sequence: TTA
tgtttattttttatttattt

SEQ ID NO: 250908 - DNA, 20 bp, Artificial Sequence
  Description of Artificial Sequence: Synthetic oligonucleotide
  Target: LAMA2; (-) strand; PAM type: YTN; PAM sequence: TTT
atgtttattttttatttatt

SEQ ID NO: 250909 - DNA, 20 bp, Artificial Sequence
  Description of Artificial Sequence: Synthetic oligonucleotide
  Target: LAMA2; (-) strand; PAM type: YTN; PAM sequence: TTA
aaaatttatgtttatttttt

SEQ ID NO: 250910 - DNA, 20 bp, Artificial Sequence
  Description of Artificial Sequence: Synthetic oligonucleotide
  Target: LAMA2; (-) strand; PAM type: YTN; PAM sequence: TTT
aaaaatttatgtttattttt

SEQ ID NO: 250911 - DNA, 20 bp, Artificial Sequence
  Description of Artificial Sequence: Synthetic oligonucleotide
  Target: LAMA2; (-) strand; PAM type: YTN; PAM sequence: CTT
taaaaatttatgtttatttt

SEQ ID NO: 250912 - DNA, 20 bp, Artificial Sequence
  Description of Artificial Sequence: Synthetic oligonucleotide
  Target: LAMA2; (-) strand; PAM type: YTN; PAM sequence: TTA
actttaaaaatttatgttta

SEQ ID NO: 250913 - DNA, 20 bp, Artificial Sequence
  Description of Artificial Sequence: Synthetic oligonucleotide
  Target: LAMA2; (-) strand; PAM type: YTN; PAM sequence: TTT
aactttaaaaatttatgttt

SEQ ID NO: 250914 - DNA, 20 bp, Artificial Sequence
  Description of Artificial Sequence: Synthetic oligonucleotide
  Target: LAMA2; (-) strand; PAM type: YTN; PAM sequence: TTT
taactttaaaaatttatgtt

SEQ ID NO: 250915 - DNA, 20 bp, Artificial Sequence
  Description of Artificial Sequence: Synthetic oligonucleotide
  Target: LAMA2; (-) strand; PAM type: YTN; PAM sequence: CTT
ttaactttaaaaatttatgt

SEQ ID NO: 250916 - DNA, 20 bp, Artificial Sequence
  Description of Artificial Sequence: Synthetic oligonucleotide
  Target: LAMA2; (-) strand; PAM type: YTN; PAM sequence: CTC
aatagacttttaactttaaa

SEQ ID NO: 250917 - DNA, 20 bp, Artificial Sequence
  Description of Artificial Sequence: Synthetic oligonucleotide
  Target: LAMA2; (-) strand; PAM type: YTN; PAM sequence: CTC
caccctcaatagacttttaa

SEQ ID NO: 250918 - DNA, 20 bp, Artificial Sequence
  Description of Artificial Sequence: Synthetic oligonucleotide
  Target: LAMA2; (-) strand; PAM type: YTN; PAM sequence: TTG
tatcctccaccctcaataga

SEQ ID NO: 250919 - DNA, 20 bp, Artificial Sequence
  Description of Artificial Sequence: Synthetic oligonucleotide
  Target: LAMA2; (-) strand; PAM type: YTN; PAM sequence: TTT
gtatcctccaccctcaatag

SEQ ID NO: 250920 - DNA, 20 bp, Artificial Sequence
  Description of Artificial Sequence: Synthetic oligonucleotide
  Target: LAMA2; (-) strand; PAM type: YTN; PAM sequence: CTA
tatttgtatcctccaccctc

SEQ ID NO: 250921 - DNA, 20 bp, Artificial Sequence
  Description of Artificial Sequence: Synthetic oligonucleotide
  Target: LAMA2; (-) strand; PAM type: YTN; PAM sequence: CTG
aaaagagggtacaaaagtgt

SEQ ID NO: 250922 - DNA, 20 bp, Artificial Sequence
  Description of Artificial Sequence: Synthetic oligonucleotide
  Target: LAMA2; (-) strand; PAM type: YTN; PAM sequence: CTA
aagggggaaaaaaaagaaat

SEQ ID NO: 250923 - DNA, 20 bp, Artificial Sequence
  Description of Artificial Sequence: Synthetic oligonucleotide
  Target: LAMA2; (-) strand; PAM type: YTN; PAM sequence: TTA
ccctaaagggggaaaaaaaa

SEQ ID NO: 250924 - DNA, 20 bp, Artificial Sequence
  Description of Artificial Sequence: Synthetic oligonucleotide
  Target: LAMA2; (-) strand; PAM type: YTN; PAM sequence: CTC
aagtcattaccctaaagggg

SEQ ID NO: 250925 - DNA, 20 bp, Artificial Sequence
  Description of Artificial Sequence: Synthetic oligonucleotide
  Target: LAMA2; (-) strand; PAM type: YTN; PAM sequence: CTG
atgctcaagtcattacccta

SEQ ID NO: 250926 - DNA, 20 bp, Artificial Sequence
  Description of Artificial Sequence: Synthetic oligonucleotide
  Target: LAMA2; (-) strand; PAM type: YTN; PAM sequence: CTG
tgctgatgctcaagtcatta

SEQ ID NO: 250927 - DNA, 20 bp, Artificial Sequence
  Description of Artificial Sequence: Synthetic oligonucleotide
  Target: LAMA2; (-) strand; PAM type: YTN; PAM sequence: TTG
ggctgtgctgatgctcaagt

SEQ ID NO: 250928 - DNA, 20 bp, Artificial Sequence
  Description of Artificial Sequence: Synthetic oligonucleotide
  Target: LAMA2; (-) strand; PAM type: YTN; PAM sequence: CTT
gggctgtgctgatgctcaag

SEQ ID NO: 250929 - DNA, 20 bp, Artificial Sequence
  Description of Artificial Sequence: Synthetic oligonucleotide
  Target: LAMA2; (-) strand; PAM type: YTN; PAM sequence: CTC
atcttgggctgtgctgatgc

SEQ ID NO: 250930 - DNA, 20 bp, Artificial Sequence
  Description of Artificial Sequence: Synthetic oligonucleotide
  Target: LAMA2; (-) strand; PAM type: YTN; PAM sequence: TTC
agatgggtgcaggtacacct

SEQ ID NO: 250931 - DNA, 20 bp, Artificial Sequence
  Description of Artificial Sequence: Synthetic oligonucleotide
  Target: LAMA2; (-) strand; PAM type: YTN; PAM sequence: CTT
cagatgggtgcaggtacacc

SEQ ID NO: 250932 - DNA, 20 bp, Artificial Sequence
  Description of Artificial Sequence: Synthetic oligonucleotide
  Target: LAMA2; (-) strand; PAM type: YTN; PAM sequence: TTC
ttcagatgggtgcaggtaca

SEQ ID NO: 250933 - DNA, 20 bp, Artificial Sequence
  Description of Artificial Sequence: Synthetic oligonucleotide
  Target: LAMA2; (-) strand; PAM type: YTN; PAM sequence: TTA
gtatgttcttcagatgggtg

SEQ ID NO: 250934 - DNA, 20 bp, Artificial Sequence
  Description of Artificial Sequence: Synthetic oligonucleotide
  Target: LAMA2; (-) strand; PAM type: YTN; PAM sequence: TTA
agtaacaatacattagtatg

SEQ ID NO: 250935 - DNA, 20 bp, Artificial Sequence
  Description of Artificial Sequence: Synthetic oligonucleotide
  Target: LAMA2; (-) strand; PAM type: YTN; PAM sequence: TTT
aagtaacaatacattagtat

SEQ ID NO: 250936 - DNA, 20 bp, Artificial Sequence
  Description of Artificial Sequence: Synthetic oligonucleotide
  Target: LAMA2; (-) strand; PAM type: YTN; PAM sequence: CTT
taagtaacaatacattagta

SEQ ID NO: 250937 - DNA, 20 bp, Artificial Sequence
  Description of Artificial Sequence: Synthetic oligonucleotide
  Target: LAMA2; (-) strand; PAM type: YTN; PAM sequence: TTC
tttaagtaacaatacattag

SEQ ID NO: 250938 - DNA, 20 bp, Artificial Sequence
  Description of Artificial Sequence: Synthetic oligonucleotide
  Target: LAMA2; (-) strand; PAM type: YTN; PAM sequence: CTT
ctttaagtaacaatacatta

SEQ ID NO: 250939 - DNA, 20 bp, Artificial Sequence
  Description of Artificial Sequence: Synthetic oligonucleotide
  Target: LAMA2; (-) strand; PAM type: YTN; PAM sequence: TTC
ttctttaagtaacaatacat

SEQ ID NO: 250940 - DNA, 20 bp, Artificial Sequence
  Description of Artificial Sequence: Synthetic oligonucleotide
  Target: LAMA2; (-) strand; PAM type: YTN; PAM sequence: CTG
gaaaatgtgtgccatgtatg

SEQ ID NO: 250941 - DNA, 20 bp, Artificial Sequence
  Description of Artificial Sequence: Synthetic oligonucleotide
  Target: LAMA2; (-) strand; PAM type: YTN; PAM sequence: CTA
cggactggaaaatgtgtgcc

SEQ ID NO: 250942 - DNA, 20 bp, Artificial Sequence
  Description of Artificial Sequence: Synthetic oligonucleotide
  Target: LAMA2; (-) strand; PAM type: YTN; PAM sequence: TTC
tacggactggaaaatgtgtg

SEQ ID NO: 250943 - DNA, 20 bp, Artificial Sequence
  Description of Artificial Sequence: Synthetic oligonucleotide
  Target: LAMA2; (-) strand; PAM type: YTN; PAM sequence: TTT
ctacggactggaaaatgtgt

SEQ ID NO: 250944 - DNA, 20 bp, Artificial Sequence
  Description of Artificial Sequence: Synthetic oligonucleotide
  Target: LAMA2; (-) strand; PAM type: YTN; PAM sequence: CTT
tctacggactggaaaatgtg

SEQ ID NO: 250945 - DNA, 20 bp, Artificial Sequence
  Description of Artificial Sequence: Synthetic oligonucleotide
  Target: LAMA2; (-) strand; PAM type: YTN; PAM sequence: TTC
ctttctacggactggaaaat

SEQ ID NO: 250946 - DNA, 20 bp, Artificial Sequence
  Description of Artificial Sequence: Synthetic oligonucleotide
  Target: LAMA2; (-) strand; PAM type: YTN; PAM sequence: CTG
tcataaattcctttctacgg

SEQ ID NO: 250947 - DNA, 20 bp, Artificial Sequence
  Description of Artificial Sequence: Synthetic oligonucleotide
  Target: LAMA2; (-) strand; PAM type: YTN; PAM sequence: TTC
gcaagcactgtcataaattc

SEQ ID NO: 250948 - DNA, 20 bp, Artificial Sequence
  Description of Artificial Sequence: Synthetic oligonucleotide
  Target: LAMA2; (-) strand; PAM type: YTN; PAM sequence: TTC
aaattcgcaagcactgtcat

SEQ ID NO: 250949 - DNA, 20 bp, Artificial Sequence
  Description of Artificial Sequence: Synthetic oligonucleotide
  Target: LAMA2; (-) strand; PAM type: YTN; PAM sequence: CTT
caaattcgcaagcactgtca

SEQ ID NO: 250950 - DNA, 20 bp, Artificial Sequence
  Description of Artificial Sequence: Synthetic oligonucleotide
  Target: LAMA2; (-) strand; PAM type: YTN; PAM sequence: CTC
ttcaaattcgcaagcactgt

SEQ ID NO: 250951 - DNA, 20 bp, Artificial Sequence
  Description of Artificial Sequence: Synthetic oligonucleotide
  Target: LAMA2; (-) strand; PAM type: YTN; PAM sequence: CTC
tcttcaaattcgcaagcact

SEQ ID NO: 250952 - DNA, 20 bp, Artificial Sequence
  Description of Artificial Sequence: Synthetic oligonucleotide
  Target: LAMA2; (-) strand; PAM type: YTN; PAM sequence: TTG
taggaggactctcttcaaat

SEQ ID NO: 250953 - DNA, 20 bp, Artificial Sequence
  Description of Artificial Sequence: Synthetic oligonucleotide
  Target: LAMA2; (-) strand; PAM type: YTN; PAM sequence: TTT
gtaggaggactctcttcaaa

SEQ ID NO: 250954 - DNA, 20 bp, Artificial Sequence
  Description of Artificial Sequence: Synthetic oligonucleotide
  Target: LAMA2; (-) strand; PAM type: YTN; PAM sequence: CTG
tatgtgatttgtaggaggac

SEQ ID NO: 250955 - DNA, 20 bp, Artificial Sequence
  Description of Artificial Sequence: Synthetic oligonucleotide
  Target: LAMA2; (-) strand; PAM type: YTN; PAM sequence: CTG
aagatggcatccatcccaaa

SEQ ID NO: 250956 - DNA, 20 bp, Artificial Sequence
  Description of Artificial Sequence: Synthetic oligonucleotide
  Target: LAMA2; (-) strand; PAM type: YTN; PAM sequence: TTA
cctgaagatggcatccatcc

SEQ ID NO: 250957 - DNA, 20 bp, Artificial Sequence
  Description of Artificial Sequence: Synthetic oligonucleotide
  Target: LAMA2; (-) strand; PAM type: YTN; PAM sequence: TTT
acctgaagatggcatccatc

SEQ ID NO: 250958 - DNA, 20 bp, Artificial Sequence
  Description of Artificial Sequence: Synthetic oligonucleotide
  Target: LAMA2; (-) strand; PAM type: YTN; PAM sequence: TTT
tacctgaagatggcatccat

SEQ ID NO: 250959 - DNA, 20 bp, Artificial Sequence
  Description of Artificial Sequence: Synthetic oligonucleotide
  Target: LAMA2; (-) strand; PAM type: YTN; PAM sequence: TTG
attttacctgaagatggcat

SEQ ID NO: 250960 - DNA, 20 bp, Artificial Sequence
  Description of Artificial Sequence: Synthetic oligonucleotide
  Target: LAMA2; (-) strand; PAM type: YTN; PAM sequence: CTT
gattttacctgaagatggca

SEQ ID NO: 250961 - DNA, 20 bp, Artificial Sequence
  Description of Artificial Sequence: Synthetic oligonucleotide
  Target: LAMA2; (-) strand; PAM type: YTN; PAM sequence: TTC
ttgattttacctgaagatgg

SEQ ID NO: 250962 - DNA, 20 bp, Artificial Sequence
  Description of Artificial Sequence: Synthetic oligonucleotide
  Target: LAMA2; (-) strand; PAM type: YTN; PAM sequence: CTG
cagttcttgattttacctga

SEQ ID NO: 250963 - DNA, 20 bp, Artificial Sequence
  Description of Artificial Sequence: Synthetic oligonucleotide
  Target: LAMA2; (-) strand; PAM type: YTN; PAM sequence: TTG
gagctgcagttcttgatttt

SEQ ID NO: 250964 - DNA, 20 bp, Artificial Sequence
  Description of Artificial Sequence: Synthetic oligonucleotide
  Target: LAMA2; (-) strand; PAM type: YTN; PAM sequence: TTG
gccccaaagtaaatgtgtga

SEQ ID NO: 250965 - DNA, 20 bp, Artificial Sequence
  Description of Artificial Sequence: Synthetic oligonucleotide
  Target: LAMA2; (-) strand; PAM type: YTN; PAM sequence: CTT
ggccccaaagtaaatgtgtg

SEQ ID NO: 250966 - DNA, 20 bp, Artificial Sequence
  Description of Artificial Sequence: Synthetic oligonucleotide
  Target: LAMA2; (-) strand; PAM type: YTN; PAM sequence: CTG
caccttggccccaaagtaaa

SEQ ID NO: 250967 - DNA, 20 bp, Artificial Sequence
  Description of Artificial Sequence: Synthetic oligonucleotide
  Target: LAMA2; (-) strand; PAM type: YTN; PAM sequence: CTC
ctgcaccttggccccaaagt

SEQ ID NO: 250968 - DNA, 20 bp, Artificial Sequence
  Description of Artificial Sequence: Synthetic oligonucleotide
  Target: LAMA2; (-) strand; PAM type: YTN; PAM sequence: CTG
gggcggctcctgcaccttgg

SEQ ID NO: 250969 - DNA, 20 bp, Artificial Sequence
  Description of Artificial Sequence: Synthetic oligonucleotide
  Target: LAMA2; (-) strand; PAM type: YTN; PAM sequence: CTC
ctggggcggctcctgcacct

SEQ ID NO: 250970 - DNA, 20 bp, Artificial Sequence
  Description of Artificial Sequence: Synthetic oligonucleotide
  Target: LAMA2; (-) strand; PAM type: YTN; PAM sequence: TTC
actcctggggcggctcctgc

SEQ ID NO: 250971 - DNA, 20 bp, Artificial Sequence
  Description of Artificial Sequence: Synthetic oligonucleotide
  Target: LAMA2; (-) strand; PAM type: YTN; PAM sequence: TTA
aaaaattcactcctggggcg

SEQ ID NO: 250972 - DNA, 20 bp, Artificial Sequence
  Description of Artificial Sequence: Synthetic oligonucleotide
  Target: LAMA2; (-) strand; PAM type: YTN; PAM sequence: CTT
aaaaaattcactcctggggc

SEQ ID NO: 250973 - DNA, 20 bp, Artificial Sequence
  Description of Artificial Sequence: Synthetic oligonucleotide
  Target: LAMA2; (-) strand; PAM type: YTN; PAM sequence: CTA
ggtgccttaaaaaattcact

SEQ ID NO: 250974 - DNA, 20 bp, Artificial Sequence
  Description of Artificial Sequence: Synthetic oligonucleotide
  Target: LAMA2; (-) strand; PAM type: YTN; PAM sequence: TTG
aagacagcaaatcctaggtg

SEQ ID NO: 250975 - DNA, 20 bp, Artificial Sequence
  Description of Artificial Sequence: Synthetic oligonucleotide
  Target: LAMA2; (-) strand; PAM type: YTN; PAM sequence: TTT
gaagacagcaaatcctaggt

SEQ ID NO: 250976 - DNA, 20 bp, Artificial Sequence
  Description of Artificial Sequence: Synthetic oligonucleotide
  Target: LAMA2; (-) strand; PAM type: YTN; PAM sequence: CTT
tgaagacagcaaatcctagg

SEQ ID NO: 250977 - DNA, 20 bp, Artificial Sequence
  Description of Artificial Sequence: Synthetic oligonucleotide
  Target: LAMA2; (-) strand; PAM type: YTN; PAM sequence: CTC
tttgaagacagcaaatccta

SEQ ID NO: 250978 - DNA, 20 bp, Artificial Sequence
  Description of Artificial Sequence: Synthetic oligonucleotide
  Target: LAMA2; (-) strand; PAM type: YTN; PAM sequence: CTG
ctctttgaagacagcaaatc

SEQ ID NO: 250979 - DNA, 20 bp, Artificial Sequence
  Description of Artificial Sequence: Synthetic oligonucleotide
  Target: LAMA2; (-) strand; PAM type: YTN; PAM sequence: TTA
tctgctctttgaagacagca

SEQ ID NO: 250980 - DNA, 20 bp, Artificial Sequence
  Description of Artificial Sequence: Synthetic oligonucleotide
  Target: LAMA2; (-) strand; PAM type: YTN; PAM sequence: CTT
atctgctctttgaagacagc

SEQ ID NO: 250981 - DNA, 20 bp, Artificial Sequence
  Description of Artificial Sequence: Synthetic oligonucleotide
  Target: LAMA2; (-) strand; PAM type: YTN; PAM sequence: TTC
ttatctgctctttgaagaca

SEQ ID NO: 250982 - DNA, 20 bp, Artificial Sequence
  Description of Artificial Sequence: Synthetic oligonucleotide
  Target: LAMA2; (-) strand; PAM type: YTN; PAM sequence: CTC
cgttcttatctgctctttga

SEQ ID NO: 250983 - DNA, 20 bp, Artificial Sequence
  Description of Artificial Sequence: Synthetic oligonucleotide
  Target: LAMA2; (-) strand; PAM type: YTN; PAM sequence: CTA
gggctccgttcttatctgct

SEQ ID NO: 250984 - DNA, 20 bp, Artificial Sequence
  Description of Artificial Sequence: Synthetic oligonucleotide
  Target: LAMA2; (-) strand; PAM type: YTN; PAM sequence: TTC
agaaaactagggctccgttc

SEQ ID NO: 250985 - DNA, 20 bp, Artificial Sequence
  Description of Artificial Sequence: Synthetic oligonucleotide
  Target: LAMA2; (-) strand; PAM type: YTN; PAM sequence: TTT
cagaaaactagggctccgtt

SEQ ID NO: 250986 - DNA, 20 bp, Artificial Sequence
  Description of Artificial Sequence: Synthetic oligonucleotide
  Target: LAMA2; (-) strand; PAM type: YTN; PAM sequence: CTT
tcagaaaactagggctccgt

SEQ ID NO: 250987 - DNA, 20 bp, Artificial Sequence
  Description of Artificial Sequence: Synthetic oligonucleotide
  Target: LAMA2; (-) strand; PAM type: YTN; PAM sequence: TTA
agagaaaaatctttcagaaa

SEQ ID NO: 250988 - DNA, 20 bp, Artificial Sequence
  Description of Artificial Sequence: Synthetic oligonucleotide
  Target: LAMA2; (-) strand; PAM type: YTN; PAM sequence: TTT
aagagaaaaatctttcagaa

SEQ ID NO: 250989 - DNA, 20 bp, Artificial Sequence
  Description of Artificial Sequence: Synthetic oligonucleotide
  Target: LAMA2; (-) strand; PAM type: YTN; PAM sequence: CTG
taaaggtttaagagaaaaat

SEQ ID NO: 250990 - DNA, 20 bp, Artificial Sequence
  Description of Artificial Sequence: Synthetic oligonucleotide
  Target: LAMA2; (-) strand; PAM type: YTN; PAM sequence: TTA
aaactgtaaaggtttaagag

SEQ ID NO: 250991 - DNA, 20 bp, Artificial Sequence
  Description of Artificial Sequence: Synthetic oligonucleotide
  Target: LAMA2; (-) strand; PAM type: YTN; PAM sequence: TTT
aaaactgtaaaggtttaaga

SEQ ID NO: 250992 - DNA, 20 bp, Artificial Sequence
  Description of Artificial Sequence: Synthetic oligonucleotide
  Target: LAMA2; (-) strand; PAM type: YTN; PAM sequence: CTG
catatttaaaactgtaaagg

SEQ ID NO: 250993 - DNA, 20 bp, Artificial Sequence
  Description of Artificial Sequence: Synthetic oligonucleotide
  Target: LAMA2; (-) strand; PAM type: YTN; PAM sequence: TTC
tgcatatttaaaactgtaaa

SEQ ID NO: 250994 - DNA, 20 bp, Artificial Sequence
  Description of Artificial Sequence: Synthetic oligonucleotide
  Target: LAMA2; (-) strand; PAM type: YTN; PAM sequence: TTA
ttctgcatatttaaaactgt

SEQ ID NO: 250995 - DNA, 20 bp, Artificial Sequence
  Description of Artificial Sequence: Synthetic oligonucleotide
  Target: LAMA2; (-) strand; PAM type: YTN; PAM sequence: TTT
attctgcatatttaaaactg

SEQ ID NO: 250996 - DNA, 20 bp, Artificial Sequence
  Description of Artificial Sequence: Synthetic oligonucleotide
  Target: LAMA2; (-) strand; PAM type: YTN; PAM sequence: TTG
tgaaagaatcatcaataata

SEQ ID NO: 250997 - DNA, 20 bp, Artificial Sequence
  Description of Artificial Sequence: Synthetic oligonucleotide
  Target: LAMA2; (-) strand; PAM type: YTN; PAM sequence: CTG
acaattgtgaaagaatcatc

SEQ ID NO: 250998 - DNA, 20 bp, Artificial Sequence
  Description of Artificial Sequence: Synthetic oligonucleotide
  Target: LAMA2; (-) strand; PAM type: YTN; PAM sequence: TTC
tgacaattgtgaaagaatca

SEQ ID NO: 250999 - DNA, 20 bp, Artificial Sequence
  Description of Artificial Sequence: Synthetic oligonucleotide
  Target: LAMA2; (-) strand; PAM type: YTN; PAM sequence: TTG
atcacatgttctgacaattg

SEQ ID NO: 251000 - DNA, 20 bp, Artificial Sequence
  Description of Artificial Sequence: Synthetic oligonucleotide
  Target: LAMA2; (-) strand; PAM type: YTN; PAM sequence: TTA
ttgatcacatgttctgacaa

SEQ ID NO: 251001 - DNA, 20 bp, Artificial Sequence
  Description of Artificial Sequence: Synthetic oligonucleotide
  Target: LAMA2; (-) strand; PAM type: YTN; PAM sequence: CTC
aatataggaatcgttattga

SEQ ID NO: 251002 - DNA, 20 bp, Artificial Sequence
  Description of Artificial Sequence: Synthetic oligonucleotide
  Target: LAMA2; (-) strand; PAM type: YTN; PAM sequence: TTC
tcaatataggaatcgttatt

SEQ ID NO: 251003 - DNA, 20 bp, Artificial Sequence
  Description of Artificial Sequence: Synthetic oligonucleotide
  Target: LAMA2; (-) strand; PAM type: YTN; PAM sequence: TTT
ctcaatataggaatcgttat

SEQ ID NO: 251004 - DNA, 20 bp, Artificial Sequence
  Description of Artificial Sequence: Synthetic oligonucleotide
  Target: LAMA2; (-) strand; PAM type: YTN; PAM sequence: TTC
caatataacatttctcaata

SEQ ID NO: 251005 - DNA, 20 bp, Artificial Sequence
  Description of Artificial Sequence: Synthetic oligonucleotide
  Target: LAMA2; (-) strand; PAM type: YTN; PAM sequence: TTT
ccaatataacatttctcaat

SEQ ID NO: 251006 - DNA, 20 bp, Artificial Sequence
  Description of Artificial Sequence: Synthetic oligonucleotide
  Target: LAMA2; (-) strand; PAM type: YTN; PAM sequence: TTT
tccaatataacatttctcaa

SEQ ID NO: 251007 - DNA, 20 bp, Artificial Sequence
  Description of Artificial Sequence: Synthetic oligonucleotide
  Target: LAMA2; (-) strand; PAM type: YTN; PAM sequence: TTA
ttttccaatataacatttct

SEQ ID NO: 251008 - DNA, 20 bp, Artificial Sequence
  Description of Artificial Sequence: Synthetic oligonucleotide
  Target: LAMA2; (-) strand; PAM type: YTN; PAM sequence: TTT
attttccaatataacatttc

SEQ ID NO: 251009 - DNA, 20 bp, Artificial Sequence
  Description of Artificial Sequence: Synthetic oligonucleotide
  Target: LAMA2; (-) strand; PAM type: YTN; PAM sequence: CTT
tattttccaatataacattt

SEQ ID NO: 251010 - DNA, 20 bp, Artificial Sequence
  Description of Artificial Sequence: Synthetic oligonucleotide
  Target: LAMA2; (-) strand; PAM type: YTN; PAM sequence: CTA
tgagccatcataaaggagac

SEQ ID NO: 251011 - DNA, 20 bp, Artificial Sequence
  Description of Artificial Sequence: Synthetic oligonucleotide
  Target: LAMA2; (-) strand; PAM type: YTN; PAM sequence: TTC
ccacgctatgagccatcata

SEQ ID NO: 251012 - DNA, 20 bp, Artificial Sequence
  Description of Artificial Sequence: Synthetic oligonucleotide
  Target: LAMA2; (-) strand; PAM type: YTN; PAM sequence: CTT
cccacgctatgagccatcat

SEQ ID NO: 251013 - DNA, 20 bp, Artificial Sequence
  Description of Artificial Sequence: Synthetic oligonucleotide
  Target: LAMA2; (-) strand; PAM type: YTN; PAM sequence: TTA
gcttcccacgctatgagcca

SEQ ID NO: 251014 - DNA, 20 bp, Artificial Sequence
  Description of Artificial Sequence: Synthetic oligonucleotide
  Target: LAMA2; (-) strand; PAM type: YTN; PAM sequence: TTT
agcttcccacgctatgagcc

SEQ ID NO: 251015 - DNA, 20 bp, Artificial Sequence
  Description of Artificial Sequence: Synthetic oligonucleotide
  Target: LAMA2; (-) strand; PAM type: YTN; PAM sequence: TTT
tagcttcccacgctatgagc

SEQ ID NO: 251016 - DNA, 20 bp, Artificial Sequence
  Description of Artificial Sequence: Synthetic oligonucleotide
  Target: LAMA2; (-) strand; PAM type: YTN; PAM sequence: TTT
ttagcttcccacgctatgag

SEQ ID NO: 251017 - DNA, 20 bp, Artificial Sequence
  Description of Artificial Sequence: Synthetic oligonucleotide
  Target: LAMA2; (-) strand; PAM type: YTN; PAM sequence: CTT
tttagcttcccacgctatga

SEQ ID NO: 251018 - DNA, 20 bp, Artificial Sequence
  Description of Artificial Sequence: Synthetic oligonucleotide
  Target: LAMA2; (-) strand; PAM type: YTN; PAM sequence: TTA
tatctttttagcttcccacg

SEQ ID NO: 251019 - DNA, 20 bp, Artificial Sequence
  Description of Artificial Sequence: Synthetic oligonucleotide
  Target: LAMA2; (-) strand; PAM type: YTN; PAM sequence: TTT
atatctttttagcttcccac

SEQ ID NO: 251020 - DNA, 20 bp, Artificial Sequence
  Description of Artificial Sequence: Synthetic oligonucleotide
  Target: LAMA2; (-) strand; PAM type: YTN; PAM sequence: CTG
gaatttatatctttttagct

SEQ ID NO: 251021 - DNA, 20 bp, Artificial Sequence
  Description of Artificial Sequence: Synthetic oligonucleotide
  Target: LAMA2; (-) strand; PAM type: YTN; PAM sequence: TTC
caaataggggtgccctggaa

SEQ ID NO: 251022 - DNA, 20 bp, Artificial Sequence
  Description of Artificial Sequence: Synthetic oligonucleotide
  Target: LAMA2; (-) strand; PAM type: YTN; PAM sequence: TTT
ccaaataggggtgccctgga

SEQ ID NO: 251023 - DNA, 20 bp, Artificial Sequence
  Description of Artificial Sequence: Synthetic oligonucleotide
  Target: LAMA2; (-) strand; PAM type: YTN; PAM sequence: CTT
tccaaataggggtgccctgg

SEQ ID NO: 251024 - DNA, 20 bp, Artificial Sequence
  Description of Artificial Sequence: Synthetic oligonucleotide
  Target: LAMA2; (-) strand; PAM type: YTN; PAM sequence: TTA
aaaaccactttccaaatagg

SEQ ID NO: 251025 - DNA, 20 bp, Artificial Sequence
  Description of Artificial Sequence: Synthetic oligonucleotide
  Target: LAMA2; (-) strand; PAM type: YTN; PAM sequence: TTT
aaaaaccactttccaaatag

SEQ ID NO: 251026 - DNA, 20 bp, Artificial Sequence
  Description of Artificial Sequence: Synthetic oligonucleotide
  Target: LAMA2; (-) strand; PAM type: YTN; PAM sequence: TTT
taaaaaccactttccaaata

SEQ ID NO: 251027 - DNA, 20 bp, Artificial Sequence
  Description of Artificial Sequence: Synthetic oligonucleotide
  Target: LAMA2; (-) strand; PAM type: YTN; PAM sequence: CTG
gaaggaaatattttaaaaac

SEQ ID NO: 251028 - DNA, 20 bp, Artificial Sequence
  Description of Artificial Sequence: Synthetic oligonucleotide
  Target: LAMA2; (-) strand; PAM type: YTN; PAM sequence: CTA
ctggaaggaaatattttaaa

SEQ ID NO: 251029 - DNA, 20 bp, Artificial Sequence
  Description of Artificial Sequence: Synthetic oligonucleotide
  Target: LAMA2; (-) strand; PAM type: YTN; PAM sequence: TTA
acaactactggaaggaaata

SEQ ID NO: 251030 - DNA, 20 bp, Artificial Sequence
  Description of Artificial Sequence: Synthetic oligonucleotide
  Target: LAMA2; (-) strand; PAM type: YTN; PAM sequence: CTA
gttaacaactactggaagga

SEQ ID NO: 251031 - DNA, 20 bp, Artificial Sequence
  Description of Artificial Sequence: Synthetic oligonucleotide
  Target: LAMA2; (-) strand; PAM type: YTN; PAM sequence: TTA
agccagaaactagttaacaa

SEQ ID NO: 251032 - DNA, 20 bp, Artificial Sequence
  Description of Artificial Sequence: Synthetic oligonucleotide
  Target: LAMA2; (-) strand; PAM type: YTN; PAM sequence: CTA
ttaagccagaaactagttaa

SEQ ID NO: 251033 - DNA, 20 bp, Artificial Sequence
  Description of Artificial Sequence: Synthetic oligonucleotide
  Target: LAMA2; (-) strand; PAM type: YTN; PAM sequence: CTA
tatactattaagccagaaac

SEQ ID NO: 251034 - DNA, 20 bp, Artificial Sequence
  Description of Artificial Sequence: Synthetic oligonucleotide
  Target: LAMA2; (-) strand; PAM type: YTN; PAM sequence: TTA
caatctatatactattaagc

SEQ ID NO: 251035 - DNA, 20 bp, Artificial Sequence
  Description of Artificial Sequence: Synthetic oligonucleotide
  Target: LAMA2; (-) strand; PAM type: YTN; PAM sequence: TTA
ttacaatctatatactatta

SEQ ID NO: 251036 - DNA, 20 bp, Artificial Sequence
  Description of Artificial Sequence: Synthetic oligonucleotide
  Target: LAMA2; (-) strand; PAM type: YTN; PAM sequence: CTT
attacaatctatatactatt

SEQ ID NO: 251037 - DNA, 20 bp, Artificial Sequence
  Description of Artificial Sequence: Synthetic oligonucleotide
  Target: LAMA2; (-) strand; PAM type: YTN; PAM sequence: TTC
ttattacaatctatatacta

SEQ ID NO: 251038 - DNA, 20 bp, Artificial Sequence
  Description of Artificial Sequence: Synthetic oligonucleotide
  Target: LAMA2; (-) strand; PAM type: YTN; PAM sequence: TTT
cttattacaatctatatact

SEQ ID NO: 251039 - DNA, 20 bp, Artificial Sequence
  Description of Artificial Sequence: Synthetic oligonucleotide
  Target: LAMA2; (-) strand; PAM type: YTN; PAM sequence: TTT
tcttattacaatctatatac

SEQ ID NO: 251040 - DNA, 20 bp, Artificial Sequence
  Description of Artificial Sequence: Synthetic oligonucleotide
  Target: LAMA2; (-) strand; PAM type: YTN; PAM sequence: CTT
ttcttattacaatctatata

SEQ ID NO: 251041 - DNA, 20 bp, Artificial Sequence
  Description of Artificial Sequence: Synthetic oligonucleotide
  Target: LAMA2; (-) strand; PAM type: YTN; PAM sequence: TTA
cttttcttattacaatctat

SEQ ID NO: 251042 - DNA, 20 bp, Artificial Sequence
  Description of Artificial Sequence: Synthetic oligonucleotide
  Target: LAMA2; (-) strand; PAM type: YTN; PAM sequence: CTT
acttttcttattacaatcta

SEQ ID NO: 251043 - DNA, 20 bp, Artificial Sequence
  Description of Artificial Sequence: Synthetic oligonucleotide
  Target: LAMA2; (-) strand; PAM type: YTN; PAM sequence: TTA
aatgaaaagacttacttttc

SEQ ID NO: 251044 - DNA, 20 bp, Artificial Sequence
  Description of Artificial Sequence: Synthetic oligonucleotide
  Target: LAMA2; (-) strand; PAM type: YTN; PAM sequence: CTT
aaatgaaaagacttactttt

SEQ ID NO: 251045 - DNA, 20 bp, Artificial Sequence
  Description of Artificial Sequence: Synthetic oligonucleotide
  Target: LAMA2; (-) strand; PAM type: YTN; PAM sequence: TTA
tagtgagatgggtggtcact

SEQ ID NO: 251046 - DNA, 20 bp, Artificial Sequence
  Description of Artificial Sequence: Synthetic oligonucleotide
  Target: LAMA2; (-) strand; PAM type: YTN; PAM sequence: TTT
atagtgagatgggtggtcac

SEQ ID NO: 251047 - DNA, 20 bp, Artificial Sequence
  Description of Artificial Sequence: Synthetic oligonucleotide
  Target: LAMA2; (-) strand; PAM type: YTN; PAM sequence: TTT
tatagtgagatgggtggtca

SEQ ID NO: 251048 - DNA, 20 bp, Artificial Sequence
  Description of Artificial Sequence: Synthetic oligonucleotide
  Target: LAMA2; (-) strand; PAM type: YTN; PAM sequence: TTA
aagtgttttatagtgagatg

SEQ ID NO: 251049 - DNA, 20 bp, Artificial Sequence
  Description of Artificial Sequence: Synthetic oligonucleotide
  Target: LAMA2; (-) strand; PAM type: YTN; PAM sequence: CTT
aaagtgttttatagtgagat

SEQ ID NO: 251050 - DNA, 20 bp, Artificial Sequence
  Description of Artificial Sequence: Synthetic oligonucleotide
  Target: LAMA2; (-) strand; PAM type: YTN; PAM sequence: TTA
tagtcttaaagtgttttata

SEQ ID NO: 251051 - DNA, 20 bp, Artificial Sequence
  Description of Artificial Sequence: Synthetic oligonucleotide
  Target: LAMA2; (-) strand; PAM type: YTN; PAM sequence: CTG
ttatagtcttaaagtgtttt

SEQ ID NO: 251052 - DNA, 20 bp, Artificial Sequence
  Description of Artificial Sequence: Synthetic oligonucleotide
  Target: LAMA2; (-) strand; PAM type: YTN; PAM sequence: TTA
taccatatggctgttatagt

SEQ ID NO: 251053 - DNA, 20 bp, Artificial Sequence
  Description of Artificial Sequence: Synthetic oligonucleotide
  Target: LAMA2; (-) strand; PAM type: YTN; PAM sequence: TTT
ataccatatggctgttatag

SEQ ID NO: 251054 - DNA, 20 bp, Artificial Sequence
  Description of Artificial Sequence: Synthetic oligonucleotide
  Target: LAMA2; (-) strand; PAM type: YTN; PAM sequence: CTT
tataccatatggctgttata

SEQ ID NO: 251055 - DNA, 20 bp, Artificial Sequence
  Description of Artificial Sequence: Synthetic oligonucleotide
  Target: LAMA2; (-) strand; PAM type: YTN; PAM sequence: TTC
ctttataccatatggctgtt

SEQ ID NO: 251056 - DNA, 20 bp, Artificial Sequence
  Description of Artificial Sequence: Synthetic oligonucleotide
  Target: LAMA2; (-) strand; PAM type: YTN; PAM sequence: TTT
cctttataccatatggctgt

SEQ ID NO: 251057 - DNA, 20 bp, Artificial Sequence
  Description of Artificial Sequence: Synthetic oligonucleotide
  Target: LAMA2; (-) strand; PAM type: YTN; PAM sequence: CTT
tcctttataccatatggctg

SEQ ID NO: 251058 - DNA, 20 bp, Artificial Sequence
  Description of Artificial Sequence: Synthetic oligonucleotide
  Target: LAMA2; (-) strand; PAM type: YTN; PAM sequence: TTC
tttcctttataccatatggc

SEQ ID NO: 251059 - DNA, 20 bp, Artificial Sequence
  Description of Artificial Sequence: Synthetic oligonucleotide
  Target: LAMA2; (-) strand; PAM type: YTN; PAM sequence: TTC
atattctttcctttatacca

SEQ ID NO: 251060 - DNA, 20 bp, Artificial Sequence
  Description of Artificial Sequence: Synthetic oligonucleotide
  Target: LAMA2; (-) strand; PAM type: YTN; PAM sequence: CTC
caaagttcatattctttcct

SEQ ID NO: 251061 - DNA, 20 bp, Artificial Sequence
  Description of Artificial Sequence: Synthetic oligonucleotide
  Target: LAMA2; (-) strand; PAM type: YTN; PAM sequence: TTG
gctccaaagttcatattctt

SEQ ID NO: 251062 - DNA, 20 bp, Artificial Sequence
  Description of Artificial Sequence: Synthetic oligonucleotide
  Target: LAMA2; (-) strand; PAM type: YTN; PAM sequence: TTT
ggctccaaagttcatattct

SEQ ID NO: 251063 - DNA, 20 bp, Artificial Sequence
  Description of Artificial Sequence: Synthetic oligonucleotide
  Target: LAMA2; (-) strand; PAM type: YTN; PAM sequence: TTC
agtttggctccaaagttcat

SEQ ID NO: 251064 - DNA, 20 bp, Artificial Sequence
  Description of Artificial Sequence: Synthetic oligonucleotide
  Target: LAMA2; (-) strand; PAM type: YTN; PAM sequence: CTA
ttcagtttggctccaaagtt

SEQ ID NO: 251065 - DNA, 20 bp, Artificial Sequence
  Description of Artificial Sequence: Synthetic oligonucleotide
  Target: LAMA2; (-) strand; PAM type: YTN; PAM sequence: TTC
tattcagtttggctccaaag

SEQ ID NO: 251066 - DNA, 20 bp, Artificial Sequence
  Description of Artificial Sequence: Synthetic oligonucleotide
  Target: LAMA2; (-) strand; PAM type: YTN; PAM sequence: TTT
ctattcagtttggctccaaa

SEQ ID NO: 251067 - DNA, 20 bp, Artificial Sequence
  Description of Artificial Sequence: Synthetic oligonucleotide
  Target: LAMA2; (-) strand; PAM type: YTN; PAM sequence: TTG
aatttctattcagtttggct

SEQ ID NO: 251068 - DNA, 20 bp, Artificial Sequence
  Description of Artificial Sequence: Synthetic oligonucleotide
  Target: LAMA2; (-) strand; PAM type: YTN; PAM sequence: TTA
ttgaatttctattcagtttg

SEQ ID NO: 251069 - DNA, 20 bp, Artificial Sequence
  Description of Artificial Sequence: Synthetic oligonucleotide
  Target: LAMA2; (-) strand; PAM type: YTN; PAM sequence: CTT
attgaatttctattcagttt

SEQ ID NO: 251070 - DNA, 20 bp, Artificial Sequence
  Description of Artificial Sequence: Synthetic oligonucleotide
  Target: LAMA2; (-) strand; PAM type: YTN; PAM sequence: TTG
ccaaaggtcacacataaaat

SEQ ID NO: 251071 - DNA, 20 bp, Artificial Sequence
  Description of Artificial Sequence: Synthetic oligonucleotide
  Target: LAMA2; (-) strand; PAM type: YTN; PAM sequence: CTT
gccaaaggtcacacataaaa

SEQ ID NO: 251072 - DNA, 20 bp, Artificial Sequence
  Description of Artificial Sequence: Synthetic oligonucleotide
  Target: LAMA2; (-) strand; PAM type: YTN; PAM sequence: TTA
atcacttgccaaaggtcaca

SEQ ID NO: 251073 - DNA, 20 bp, Artificial Sequence
  Description of Artificial Sequence: Synthetic oligonucleotide
  Target: LAMA2; (-) strand; PAM type: YTN; PAM sequence: CTT
aatcacttgccaaaggtcac

SEQ ID NO: 251074 - DNA, 20 bp, Artificial Sequence
  Description of Artificial Sequence: Synthetic oligonucleotide
  Target: LAMA2; (-) strand; PAM type: YTN; PAM sequence: CTC
aaggcttaatcacttgccaa

SEQ ID NO: 251075 - DNA, 20 bp, Artificial Sequence
  Description of Artificial Sequence: Synthetic oligonucleotide
  Target: LAMA2; (-) strand; PAM type: YTN; PAM sequence: TTC
ctcaaggcttaatcacttgc

SEQ ID NO: 251076 - DNA, 20 bp, Artificial Sequence
  Description of Artificial Sequence: Synthetic oligonucleotide
  Target: LAMA2; (-) strand; PAM type: YTN; PAM sequence: CTG
aaaagaaacgttcctcaagg

SEQ ID NO: 251077 - DNA, 20 bp, Artificial Sequence
  Description of Artificial Sequence: Synthetic oligonucleotide
  Target: LAMA2; (-) strand; PAM type: YTN; PAM sequence: TTA
cactgaaaagaaacgttcct

SEQ ID NO: 251078 - DNA, 20 bp, Artificial Sequence
  Description of Artificial Sequence: Synthetic oligonucleotide
  Target: LAMA2; (-) strand; PAM type: YTN; PAM sequence: TTT
acactgaaaagaaacgttcc

SEQ ID NO: 251079 - DNA, 20 bp, Artificial Sequence
  Description of Artificial Sequence: Synthetic oligonucleotide
  Target: LAMA2; (-) strand; PAM type: YTN; PAM sequence: CTT
tacactgaaaagaaacgttc

SEQ ID NO: 251080 - DNA, 20 bp, Artificial Sequence
  Description of Artificial Sequence: Synthetic oligonucleotide
  Target: LAMA2; (-) strand; PAM type: YTN; PAM sequence: CTA
tatccactttacactgaaaa

SEQ ID NO: 251081 - DNA, 20 bp, Artificial Sequence
  Description of Artificial Sequence: Synthetic oligonucleotide
  Target: LAMA2; (-) strand; PAM type: YTN; PAM sequence: TTA
ctatatccactttacactga

SEQ ID NO: 251082 - DNA, 20 bp, Artificial Sequence
  Description of Artificial Sequence: Synthetic oligonucleotide
  Target: LAMA2; (-) strand; PAM type: YTN; PAM sequence: CTG
aaaagtaggcattactatat

SEQ ID NO: 251083 - DNA, 20 bp, Artificial Sequence
  Description of Artificial Sequence: Synthetic oligonucleotide
  Target: LAMA2; (-) strand; PAM type: YTN; PAM sequence: TTA
acaaagaccctgaaaagtag

SEQ ID NO: 251084 - DNA, 20 bp, Artificial Sequence
  Description of Artificial Sequence: Synthetic oligonucleotide
  Target: LAMA2; (-) strand; PAM type: YTN; PAM sequence: CTA
atgatcacatatcatgttaa

SEQ ID NO: 251085 - DNA, 20 bp, Artificial Sequence
  Description of Artificial Sequence: Synthetic oligonucleotide
  Target: LAMA2; (-) strand; PAM type: YTN; PAM sequence: TTC
ctaatgatcacatatcatgt

SEQ ID NO: 251086 - DNA, 20 bp, Artificial Sequence
  Description of Artificial Sequence: Synthetic oligonucleotide
  Target: LAMA2; (-) strand; PAM type: YTN; PAM sequence: TTT
cctaatgatcacatatcatg

SEQ ID NO: 251087 - DNA, 20 bp, Artificial Sequence
  Description of Artificial Sequence: Synthetic oligonucleotide
  Target: LAMA2; (-) strand; PAM type: YTN; PAM sequence: CTT
tcctaatgatcacatatcat

SEQ ID NO: 251088 - DNA, 20 bp, Artificial Sequence
  Description of Artificial Sequence: Synthetic oligonucleotide
  Target: LAMA2; (-) strand; PAM type: YTN; PAM sequence: CTA
ggtgatgagtactttcctaa

SEQ ID NO: 251089 - DNA, 20 bp, Artificial Sequence
  Description of Artificial Sequence: Synthetic oligonucleotide
  Target: LAMA2; (-) strand; PAM type: YTN; PAM sequence: TTC
taggtgatgagtactttcct

SEQ ID NO: 251090 - DNA, 20 bp, Artificial Sequence
  Description of Artificial Sequence: Synthetic oligonucleotide
  Target: LAMA2; (-) strand; PAM type: YTN; PAM sequence: CTG
aaagtgttctaggtgatgag

SEQ ID NO: 251091 - DNA, 20 bp, Artificial Sequence
  Description of Artificial Sequence: Synthetic oligonucleotide
  Target: LAMA2; (-) strand; PAM type: YTN; PAM sequence: TTA
aaaaaagggggcggggagaa

SEQ ID NO: 251092 - DNA, 20 bp, Artificial Sequence
  Description of Artificial Sequence: Synthetic oligonucleotide
  Target: LAMA2; (-) strand; PAM type: YTN; PAM sequence: TTT
aaaaaaagggggcggggaga

SEQ ID NO: 251093 - DNA, 20 bp, Artificial Sequence
  Description of Artificial Sequence: Synthetic oligonucleotide
  Target: LAMA2; (-) strand; PAM type: YTN; PAM sequence: TTT
taaaaaaagggggcggggag

SEQ ID NO: 251094 - DNA, 20 bp, Artificial Sequence
  Description of Artificial Sequence: Synthetic oligonucleotide
  Target: LAMA2; (-) strand; PAM type: YTN; PAM sequence: CTT
ttaaaaaaagggggcgggga

SEQ ID NO: 251095 - DNA, 20 bp, Artificial Sequence
  Description of Artificial Sequence: Synthetic oligonucleotide
  Target: LAMA2; (-) strand; PAM type: YTN; PAM sequence: CTC
ttttaaaaaaagggggcggg

SEQ ID NO: 251096 - DNA, 20 bp, Artificial Sequence
  Description of Artificial Sequence: Synthetic oligonucleotide
  Target: LAMA2; (-) strand; PAM type: YTN; PAM sequence: TTC
actcttttaaaaaaaggggg

SEQ ID NO: 251097 - DNA, 20 bp, Artificial Sequence
  Description of Artificial Sequence: Synthetic oligonucleotide
  Target: LAMA2; (-) strand; PAM type: YTN; PAM sequence: TTC
aagtcaggtagttcactctt

SEQ ID NO: 251098 - DNA, 20 bp, Artificial Sequence
  Description of Artificial Sequence: Synthetic oligonucleotide
  Target: LAMA2; (-) strand; PAM type: YTN; PAM sequence: TTG
gttcaagtcaggtagttcac

SEQ ID NO: 251099 - DNA, 20 bp, Artificial Sequence
  Description of Artificial Sequence: Synthetic oligonucleotide
  Target: LAMA2; (-) strand; PAM type: YTN; PAM sequence: TTT
ggttcaagtcaggtagttca

SEQ ID NO: 251100 - DNA, 20 bp, Artificial Sequence
  Description of Artificial Sequence: Synthetic oligonucleotide
  Target: LAMA2; (-) strand; PAM type: YTN; PAM sequence: TTA
atcagacccgagcatatttg

SEQ ID NO: 251101 - DNA, 20 bp, Artificial Sequence
  Description of Artificial Sequence: Synthetic oligonucleotide
  Target: LAMA2; (-) strand; PAM type: YTN; PAM sequence: TTA
cagcagttaatcagacccga

SEQ ID NO: 251102 - DNA, 20 bp, Artificial Sequence
  Description of Artificial Sequence: Synthetic oligonucleotide
  Target: LAMA2; (-) strand; PAM type: YTN; PAM sequence: CTT
acagcagttaatcagacccg

SEQ ID NO: 251103 - DNA, 20 bp, Artificial Sequence
  Description of Artificial Sequence: Synthetic oligonucleotide
  Target: LAMA2; (-) strand; PAM type: YTN; PAM sequence: TTA
aaaataaaaaaaacaaagcc

SEQ ID NO: 251104 - DNA, 20 bp, Artificial Sequence
  Description of Artificial Sequence: Synthetic oligonucleotide
  Target: LAMA2; (-) strand; PAM type: YTN; PAM sequence: TTT
aaaaataaaaaaaacaaagc

SEQ ID NO: 251105 - DNA, 20 bp, Artificial Sequence
  Description of Artificial Sequence: Synthetic oligonucleotide
  Target: LAMA2; (-) strand; PAM type: YTN; PAM sequence: TTT
taaaaataaaaaaaacaaag

SEQ ID NO: 251106 - DNA, 20 bp, Artificial Sequence
  Description of Artificial Sequence: Synthetic oligonucleotide
  Target: LAMA2; (-) strand; PAM type: YTN; PAM sequence: TTG
ttttaaaaataaaaaaaaca

SEQ ID NO: 251107 - DNA, 20 bp, Artificial Sequence
  Description of Artificial Sequence: Synthetic oligonucleotide
  Target: LAMA2; (-) strand; PAM type: YTN; PAM sequence: CTG
tcagataaaaatgtcattgt

SEQ ID NO: 251108 - DNA, 20 bp, Artificial Sequence
  Description of Artificial Sequence: Synthetic oligonucleotide
  Target: LAMA2; (-) strand; PAM type: YTN; PAM sequence: TTC
tgtcagataaaaatgtcatt

SEQ ID NO: 251109 - DNA, 20 bp, Artificial Sequence
  Description of Artificial Sequence: Synthetic oligonucleotide
  Target: LAMA2; (-) strand; PAM type: YTN; PAM sequence: TTA
aaattctgtcagataaaaat

SEQ ID NO: 251110 - DNA, 20 bp, Artificial Sequence
  Description of Artificial Sequence: Synthetic oligonucleotide
  Target: LAMA2; (-) strand; PAM type: YTN; PAM sequence: TTG
aagttaaaattctgtcagat

SEQ ID NO: 251111 - DNA, 20 bp, Artificial Sequence
  Description of Artificial Sequence: Synthetic oligonucleotide
  Target: LAMA2; (-) strand; PAM type: YTN; PAM sequence: TTC
agacacagttgaagttaaaa

SEQ ID NO: 251112 - DNA, 20 bp, Artificial Sequence
  Description of Artificial Sequence: Synthetic oligonucleotide
  Target: LAMA2; (-) strand; PAM type: YTN; PAM sequence: CTC
attcagacacagttgaagtt

SEQ ID NO: 251113 - DNA, 20 bp, Artificial Sequence
  Description of Artificial Sequence: Synthetic oligonucleotide
  Target: LAMA2; (-) strand; PAM type: YTN; PAM sequence: TTA
gagtagaaaacgagaagcgt

SEQ ID NO: 251114 - DNA, 20 bp, Artificial Sequence
  Description of Artificial Sequence: Synthetic oligonucleotide
  Target: LAMA2; (-) strand; PAM type: YTN; PAM sequence: TTA
ttagagtagaaaacgagaag

SEQ ID NO: 251115 - DNA, 20 bp, Artificial Sequence
  Description of Artificial Sequence: Synthetic oligonucleotide
  Target: LAMA2; (-) strand; PAM type: YTN; PAM sequence: TTA
ttattagagtagaaaacgag

SEQ ID NO: 251116 - DNA, 20 bp, Artificial Sequence
  Description of Artificial Sequence: Synthetic oligonucleotide
  Target: LAMA2; (-) strand; PAM type: YTN; PAM sequence: TTT
attattagagtagaaaacga

SEQ ID NO: 251117 - DNA, 20 bp, Artificial Sequence
  Description of Artificial Sequence: Synthetic oligonucleotide
  Target: LAMA2; (-) strand; PAM type: YTN; PAM sequence: TTA
tttattattagagtagaaaa

SEQ ID NO: 251118 - DNA, 20 bp, Artificial Sequence
  Description of Artificial Sequence: Synthetic oligonucleotide
  Target: LAMA2; (-) strand; PAM type: YTN; PAM sequence: TTG
tgttatttattattagagta

SEQ ID NO: 251119 - DNA, 20 bp, Artificial Sequence
  Description of Artificial Sequence: Synthetic oligonucleotide
  Target: LAMA2; (-) strand; PAM type: YTN; PAM sequence: CTT
gtgttatttattattagagt

SEQ ID NO: 251120 - DNA, 20 bp, Artificial Sequence
  Description of Artificial Sequence: Synthetic oligonucleotide
  Target: LAMA2; (-) strand; PAM type: YTN; PAM sequence: CTA
tgacaccttgtgttatttat

SEQ ID NO: 251121 - DNA, 20 bp, Artificial Sequence
  Description of Artificial Sequence: Synthetic oligonucleotide
  Target: LAMA2; (-) strand; PAM type: YTN; PAM sequence: TTC
ctatgacaccttgtgttatt

SEQ ID NO: 251122 - DNA, 20 bp, Artificial Sequence
  Description of Artificial Sequence: Synthetic oligonucleotide
  Target: LAMA2; (-) strand; PAM type: YTN; PAM sequence: TTA
gaaggaagttcctatgacac

SEQ ID NO: 251123 - DNA, 20 bp, Artificial Sequence
  Description of Artificial Sequence: Synthetic oligonucleotide
  Target: LAMA2; (-) strand; PAM type: YTN; PAM sequence: TTT
agaaggaagttcctatgaca

SEQ ID NO: 251124 - DNA, 20 bp, Artificial Sequence
  Description of Artificial Sequence: Synthetic oligonucleotide
  Target: LAMA2; (-) strand; PAM type: YTN; PAM sequence: CTG
atttagaaggaagttcctat

SEQ ID NO: 251125 - DNA, 20 bp, Artificial Sequence
  Description of Artificial Sequence: Synthetic oligonucleotide
  Target: LAMA2; (-) strand; PAM type: YTN; PAM sequence: TTA
acctgatttagaaggaagtt

SEQ ID NO: 251126 - DNA, 20 bp, Artificial Sequence
  Description of Artificial Sequence: Synthetic oligonucleotide
  Target: LAMA2; (-) strand; PAM type: YTN; PAM sequence: CTT
aacctgatttagaaggaagt

SEQ ID NO: 251127 - DNA, 20 bp, Artificial Sequence
  Description of Artificial Sequence: Synthetic oligonucleotide
  Target: LAMA2; (-) strand; PAM type: YTN; PAM sequence: CTA
acttaacctgatttagaagg

SEQ ID NO: 251128 - DNA, 20 bp, Artificial Sequence
  Description of Artificial Sequence: Synthetic oligonucleotide
  Target: LAMA2; (-) strand; PAM type: YTN; PAM sequence: TTG
aatgtctaacttaacctgat

SEQ ID NO: 251129 - DNA, 20 bp, Artificial Sequence
  Description of Artificial Sequence: Synthetic oligonucleotide
  Target: LAMA2; (-) strand; PAM type: YTN; PAM sequence: TTT
gaatgtctaacttaacctga

SEQ ID NO: 251130 - DNA, 20 bp, Artificial Sequence
  Description of Artificial Sequence: Synthetic oligonucleotide
  Target: LAMA2; (-) strand; PAM type: YTN; PAM sequence: CTG
gggtcacatttgaatgtcta

SEQ ID NO: 251131 - DNA, 20 bp, Artificial Sequence
  Description of Artificial Sequence: Synthetic oligonucleotide
  Target: LAMA2; (-) strand; PAM type: YTN; PAM sequence: TTG
tcaggctggggtcacatttg

SEQ ID NO: 251132 - DNA, 20 bp, Artificial Sequence
  Description of Artificial Sequence: Synthetic oligonucleotide
  Target: LAMA2; (-) strand; PAM type: YTN; PAM sequence: TTA
aaggtataccgggttgtcag

SEQ ID NO: 251133 - DNA, 20 bp, Artificial Sequence
  Description of Artificial Sequence: Synthetic oligonucleotide
  Target: LAMA2; (-) strand; PAM type: YTN; PAM sequence: TTC
attaaaggtataccgggttg

SEQ ID NO: 251134 - DNA, 20 bp, Artificial Sequence
  Description of Artificial Sequence: Synthetic oligonucleotide
  Target: LAMA2; (-) strand; PAM type: YTN; PAM sequence: TTT
cattaaaggtataccgggtt

SEQ ID NO: 251135 - DNA, 20 bp, Artificial Sequence
  Description of Artificial Sequence: Synthetic oligonucleotide
  Target: LAMA2; (-) strand; PAM type: YTN; PAM sequence: CTT
tcattaaaggtataccgggt

SEQ ID NO: 251136 - DNA, 20 bp, Artificial Sequence
  Description of Artificial Sequence: Synthetic oligonucleotide
  Target: LAMA2; (-) strand; PAM type: YTN; PAM sequence: TTG
ctttcattaaaggtataccg

SEQ ID NO: 251137 - DNA, 20 bp, Artificial Sequence
  Description of Artificial Sequence: Synthetic oligonucleotide
  Target: LAMA2; (-) strand; PAM type: YTN; PAM sequence: TTG
gagacattgctttcattaaa

SEQ ID NO: 251138 - DNA, 20 bp, Artificial Sequence
  Description of Artificial Sequence: Synthetic oligonucleotide
  Target: LAMA2; (-) strand; PAM type: YTN; PAM sequence: CTC
caatattggagacattgctt

SEQ ID NO: 251139 - DNA, 20 bp, Artificial Sequence
  Description of Artificial Sequence: Synthetic oligonucleotide
  Target: LAMA2; (-) strand; PAM type: YTN; PAM sequence: CTA
ggcagcacagggaaatgatg

SEQ ID NO: 251140 - DNA, 20 bp, Artificial Sequence
  Description of Artificial Sequence: Synthetic oligonucleotide
  Target: LAMA2; (-) strand; PAM type: YTN; PAM sequence: TTA
ccagtgaaaggcaaactagg

SEQ ID NO: 251141 - DNA, 20 bp, Artificial Sequence
  Description of Artificial Sequence: Synthetic oligonucleotide
  Target: LAMA2; (-) strand; PAM type: YTN; PAM sequence: TTG
aaatattaccagtgaaaggc

SEQ ID NO: 251142 - DNA, 20 bp, Artificial Sequence
  Description of Artificial Sequence: Synthetic oligonucleotide
  Target: LAMA2; (-) strand; PAM type: YTN; PAM sequence: CTA
agttgaaatattaccagtga

SEQ ID NO: 251143 - DNA, 20 bp, Artificial Sequence
  Description of Artificial Sequence: Synthetic oligonucleotide
  Target: LAMA2; (-) strand; PAM type: YTN; PAM sequence: TTA
gactaagttgaaatattacc

SEQ ID NO: 251144 - DNA, 20 bp, Artificial Sequence
  Description of Artificial Sequence: Synthetic oligonucleotide
  Target: LAMA2; (-) strand; PAM type: YTN; PAM sequence: TTG
ggaaatggtaatgatgatta

SEQ ID NO: 251145 - DNA, 20 bp, Artificial Sequence
  Description of Artificial Sequence: Synthetic oligonucleotide
  Target: LAMA2; (-) strand; PAM type: YTN; PAM sequence: TTT
gggaaatggtaatgatgatt

SEQ ID NO: 251146 - DNA, 20 bp, Artificial Sequence
  Description of Artificial Sequence: Synthetic oligonucleotide
  Target: LAMA2; (-) strand; PAM type: YTN; PAM sequence: CTT
tgggaaatggtaatgatgat

SEQ ID NO: 251147 - DNA, 20 bp, Artificial Sequence
  Description of Artificial Sequence: Synthetic oligonucleotide
  Target: LAMA2; (-) strand; PAM type: YTN; PAM sequence: CTC
ctttgggaaatggtaatgat

SEQ ID NO: 251148 - DNA, 20 bp, Artificial Sequence
  Description of Artificial Sequence: Synthetic oligonucleotide
  Target: LAMA2; (-) strand; PAM type: YTN; PAM sequence: CTC
tcctttgggaaatggtaatg

SEQ ID NO: 251149 - DNA, 20 bp, Artificial Sequence
  Description of Artificial Sequence: Synthetic oligonucleotide
  Target: LAMA2; (-) strand; PAM type: YTN; PAM sequence: TTC
tctcctttgggaaatggtaa

SEQ ID NO: 251150 - DNA, 20 bp, Artificial Sequence
  Description of Artificial Sequence: Synthetic oligonucleotide
  Target: LAMA2; (-) strand; PAM type: YTN; PAM sequence: CTG
cagttctctcctttgggaaa

SEQ ID NO: 251151 - DNA, 20 bp, Artificial Sequence
  Description of Artificial Sequence: Synthetic oligonucleotide
  Target: LAMA2; (-) strand; PAM type: YTN; PAM sequence: TTC
tgcagttctctcctttggga

SEQ ID NO: 251152 - DNA, 20 bp, Artificial Sequence
  Description of Artificial Sequence: Synthetic oligonucleotide
  Target: LAMA2; (-) strand; PAM type: YTN; PAM sequence: TTA
tgattctgcagttctctcct

SEQ ID NO: 251153 - DNA, 20 bp, Artificial Sequence
  Description of Artificial Sequence: Synthetic oligonucleotide
  Target: LAMA2; (-) strand; PAM type: YTN; PAM sequence: TTT
atgattctgcagttctctcc

SEQ ID NO: 251154 - DNA, 20 bp, Artificial Sequence
  Description of Artificial Sequence: Synthetic oligonucleotide
  Target: LAMA2; (-) strand; PAM type: YTN; PAM sequence: CTG
tttatgattctgcagttctc

SEQ ID NO: 251155 - DNA, 20 bp, Artificial Sequence
  Description of Artificial Sequence: Synthetic oligonucleotide
  Target: LAMA2; (-) strand; PAM type: YTN; PAM sequence: TTC
tgtttatgattctgcagttc

SEQ ID NO: 251156 - DNA, 20 bp, Artificial Sequence
  Description of Artificial Sequence: Synthetic oligonucleotide
  Target: LAMA2; (-) strand; PAM type: YTN; PAM sequence: TTG
gcaatggttctgtttatgat

SEQ ID NO: 251157 - DNA, 20 bp, Artificial Sequence
  Description of Artificial Sequence: Synthetic oligonucleotide
  Target: LAMA2; (-) strand; PAM type: YTN; PAM sequence: TTT
ggcaatggttctgtttatga

SEQ ID NO: 251158 - DNA, 20 bp, Artificial Sequence
  Description of Artificial Sequence: Synthetic oligonucleotide
  Target: LAMA2; (-) strand; PAM type: YTN; PAM sequence: TTG
tttggcaatggttctgttta

SEQ ID NO: 251159 - DNA, 20 bp, Artificial Sequence
  Description of Artificial Sequence: Synthetic oligonucleotide
  Target: LAMA2; (-) strand; PAM type: YTN; PAM sequence: CTA
tgcaaaagaggtacattgtt

SEQ ID NO: 251160 - DNA, 20 bp, Artificial Sequence
  Description of Artificial Sequence: Synthetic oligonucleotide
  Target: LAMA2; (-) strand; PAM type: YTN; PAM sequence: TTG
cctatgcaaaagaggtacat

SEQ ID NO: 251161 - DNA, 20 bp, Artificial Sequence
  Description of Artificial Sequence: Synthetic oligonucleotide
  Target: LAMA2; (-) strand; PAM type: YTN; PAM sequence: CTA
gaagaattgcctatgcaaaa

SEQ ID NO: 251162 - DNA, 20 bp, Artificial Sequence
  Description of Artificial Sequence: Synthetic oligonucleotide
  Target: LAMA2; (-) strand; PAM type: YTN; PAM sequence: TTC
tagaagaattgcctatgcaa

SEQ ID NO: 251163 - DNA, 20 bp, Artificial Sequence
  Description of Artificial Sequence: Synthetic oligonucleotide
  Target: LAMA2; (-) strand; PAM type: YTN; PAM sequence: CTT
ctagaagaattgcctatgca

SEQ ID NO: 251164 - DNA, 20 bp, Artificial Sequence
  Description of Artificial Sequence: Synthetic oligonucleotide
  Target: LAMA2; (-) strand; PAM type: YTN; PAM sequence: TTA
acccagcttctagaagaatt

SEQ ID NO: 251165 - DNA, 20 bp, Artificial Sequence
  Description of Artificial Sequence: Synthetic oligonucleotide
  Target: LAMA2; (-) strand; PAM type: YTN; PAM sequence: TTT
aacccagcttctagaagaat

SEQ ID NO: 251166 - DNA, 20 bp, Artificial Sequence
  Description of Artificial Sequence: Synthetic oligonucleotide
  Target: LAMA2; (-) strand; PAM type: YTN; PAM sequence: TTT
taacccagcttctagaagaa

SEQ ID NO: 251167 - DNA, 20 bp, Artificial Sequence
  Description of Artificial Sequence: Synthetic oligonucleotide
  Target: LAMA2; (-) strand; PAM type: YTN; PAM sequence: CTC
catggcattttaacccagct

SEQ ID NO: 251168 - DNA, 20 bp, Artificial Sequence
  Description of Artificial Sequence: Synthetic oligonucleotide
  Target: LAMA2; (-) strand; PAM type: YTN; PAM sequence: CTC
atctccatggcattttaacc

SEQ ID NO: 251169 - DNA, 20 bp, Artificial Sequence
  Description of Artificial Sequence: Synthetic oligonucleotide
  Target: LAMA2; (-) strand; PAM type: YTN; PAM sequence: TTC
tcatctccatggcattttaa

SEQ ID NO: 251170 - DNA, 20 bp, Artificial Sequence
  Description of Artificial Sequence: Synthetic oligonucleotide
  Target: LAMA2; (-) strand; PAM type: YTN; PAM sequence: CTT
ctcatctccatggcatttta

SEQ ID NO: 251171 - DNA, 20 bp, Artificial Sequence
  Description of Artificial Sequence: Synthetic oligonucleotide
  Target: LAMA2; (-) strand; PAM type: YTN; PAM sequence: CTG
cttctcatctccatggcatt

SEQ ID NO: 251172 - DNA, 20 bp, Artificial Sequence
  Description of Artificial Sequence: Synthetic oligonucleotide
  Target: LAMA2; (-) strand; PAM type: YTN; PAM sequence: CTA
agtgctgcttctcatctcca

SEQ ID NO: 251173 - DNA, 20 bp, Artificial Sequence
  Description of Artificial Sequence: Synthetic oligonucleotide
  Target: LAMA2; (-) strand; PAM type: YTN; PAM sequence: TTC
ctaagtgctgcttctcatct

SEQ ID NO: 251174 - DNA, 20 bp, Artificial Sequence
  Description of Artificial Sequence: Synthetic oligonucleotide
  Target: LAMA2; (-) strand; PAM type: YTN; PAM sequence: TTA
attcctaagtgctgcttctc

SEQ ID NO: 251175 - DNA, 20 bp, Artificial Sequence
  Description of Artificial Sequence: Synthetic oligonucleotide
  Target: LAMA2; (-) strand; PAM type: YTN; PAM sequence: CTA
aatgtgaaaaacataattaa

SEQ ID NO: 251176 - DNA, 20 bp, Artificial Sequence
  Description of Artificial Sequence: Synthetic oligonucleotide
  Target: LAMA2; (-) strand; PAM type: YTN; PAM sequence: TTG
ctaaatgtgaaaaacataat

SEQ ID NO: 251177 - DNA, 20 bp, Artificial Sequence
  Description of Artificial Sequence: Synthetic oligonucleotide
  Target: LAMA2; (-) strand; PAM type: YTN; PAM sequence: TTT
gctaaatgtgaaaaacataa

SEQ ID NO: 251178 - DNA, 20 bp, Artificial Sequence
  Description of Artificial Sequence: Synthetic oligonucleotide
  Target: LAMA2; (-) strand; PAM type: YTN; PAM sequence: CTA
tttgctaaatgtgaaaaaca

SEQ ID NO: 251179 - DNA, 20 bp, Artificial Sequence
  Description of Artificial Sequence: Synthetic oligonucleotide
  Target: LAMA2; (-) strand; PAM type: YTN; PAM sequence: CTC
tatttgctaaatgtgaaaaa

SEQ ID NO: 251180 - DNA, 20 bp, Artificial Sequence
  Description of Artificial Sequence: Synthetic oligonucleotide
  Target: LAMA2; (-) strand; PAM type: YTN; PAM sequence: TTA
aacatcatgacaacctctat

SEQ ID NO: 251181 - DNA, 20 bp, Artificial Sequence
  Description of Artificial Sequence: Synthetic oligonucleotide
  Target: LAMA2; (-) strand; PAM type: YTN; PAM sequence: TTT
aaacatcatgacaacctcta

SEQ ID NO: 251182 - DNA, 20 bp, Artificial Sequence
  Description of Artificial Sequence: Synthetic oligonucleotide
  Target: LAMA2; (-) strand; PAM type: YTN; PAM sequence: CTG
tttaaacatcatgacaacct

SEQ ID NO: 251183 - DNA, 20 bp, Artificial Sequence
  Description of Artificial Sequence: Synthetic oligonucleotide
  Target: LAMA2; (-) strand; PAM type: YTN; PAM sequence: TTG
tactgtttaaacatcatgac

SEQ ID NO: 251184 - DNA, 20 bp, Artificial Sequence
  Description of Artificial Sequence: Synthetic oligonucleotide
  Target: LAMA2; (-) strand; PAM type: YTN; PAM sequence: TTT
gtactgtttaaacatcatga

SEQ ID NO: 251185 - DNA, 20 bp, Artificial Sequence
  Description of Artificial Sequence: Synthetic oligonucleotide
  Target: LAMA2; (-) strand; PAM type: YTN; PAM sequence: CTT
tgtactgtttaaacatcatg

SEQ ID NO: 251186 - DNA, 20 bp, Artificial Sequence
  Description of Artificial Sequence: Synthetic oligonucleotide
  Target: LAMA2; (-) strand; PAM type: YTN; PAM sequence: TTC
tttgtactgtttaaacatca

SEQ ID NO: 251187 - DNA, 20 bp, Artificial Sequence
  Description of Artificial Sequence: Synthetic oligonucleotide
  Target: LAMA2; (-) strand; PAM type: YTN; PAM sequence: TTT
ctttgtactgtttaaacatc

SEQ ID NO: 251188 - DNA, 20 bp, Artificial Sequence
  Description of Artificial Sequence: Synthetic oligonucleotide
  Target: LAMA2; (-) strand; PAM type: YTN; PAM sequence: CTC
atttctttgtactgtttaaa

SEQ ID NO: 251189 - DNA, 20 bp, Artificial Sequence
  Description of Artificial Sequence: Synthetic oligonucleotide
  Target: LAMA2; (-) strand; PAM type: YTN; PAM sequence: CTG
gaggactcatttctttgtac

SEQ ID NO: 251190 - DNA, 20 bp, Artificial Sequence
  Description of Artificial Sequence: Synthetic oligonucleotide
  Target: LAMA2; (-) strand; PAM type: YTN; PAM sequence: TTG
aaagctggaggactcatttc

SEQ ID NO: 251191 - DNA, 20 bp, Artificial Sequence
  Description of Artificial Sequence: Synthetic oligonucleotide
  Target: LAMA2; (-) strand; PAM type: YTN; PAM sequence: TTT
gaaagctggaggactcattt

SEQ ID NO: 251192 - DNA, 20 bp, Artificial Sequence
  Description of Artificial Sequence: Synthetic oligonucleotide
  Target: LAMA2; (-) strand; PAM type: YTN; PAM sequence: TTT
tgaaagctggaggactcatt

SEQ ID NO: 251193 - DNA, 20 bp, Artificial Sequence
  Description of Artificial Sequence: Synthetic oligonucleotide
  Target: LAMA2; (-) strand; PAM type: YTN; PAM sequence: TTC
attttgaaagctggaggact

SEQ ID NO: 251194 - DNA, 20 bp, Artificial Sequence
  Description of Artificial Sequence: Synthetic oligonucleotide
  Target: LAMA2; (-) strand; PAM type: YTN; PAM sequence: TTG
tcattcattttgaaagctgg

SEQ ID NO: 251195 - DNA, 20 bp, Artificial Sequence
  Description of Artificial Sequence: Synthetic oligonucleotide
  Target: LAMA2; (-) strand; PAM type: YTN; PAM sequence: TTG
gttgtcattcattttgaaag

SEQ ID NO: 251196 - DNA, 20 bp, Artificial Sequence
  Description of Artificial Sequence: Synthetic oligonucleotide
  Target: LAMA2; (-) strand; PAM type: YTN; PAM sequence: TTT
ggttgtcattcattttgaaa

SEQ ID NO: 251197 - DNA, 20 bp, Artificial Sequence
  Description of Artificial Sequence: Synthetic oligonucleotide
  Target: LAMA2; (-) strand; PAM type: YTN; PAM sequence: TTG
tcaatttggttgtcattcat

SEQ ID NO: 251198 - DNA, 20 bp, Artificial Sequence
  Description of Artificial Sequence: Synthetic oligonucleotide
  Target: LAMA2; (-) strand; PAM type: YTN; PAM sequence: TTT
gtcaatttggttgtcattca

SEQ ID NO: 251199 - DNA, 20 bp, Artificial Sequence
  Description of Artificial Sequence: Synthetic oligonucleotide
  Target: LAMA2; (-) strand; PAM type: YTN; PAM sequence: TTT
tgtcaatttggttgtcattc

SEQ ID NO: 251200 - DNA, 20 bp, Artificial Sequence
  Description of Artificial Sequence: Synthetic oligonucleotide
  Target: LAMA2; (-) strand; PAM type: YTN; PAM sequence: TTT
ttgtcaatttggttgtcatt

SEQ ID NO: 251201 - DNA, 20 bp, Artificial Sequence
  Description of Artificial Sequence: Synthetic oligonucleotide
  Target: LAMA2; (-) strand; PAM type: YTN; PAM sequence: TTT
tttgtcaatttggttgtcat

SEQ ID NO: 251202 - DNA, 20 bp, Artificial Sequence
  Description of Artificial Sequence: Synthetic oligonucleotide
  Target: LAMA2; (-) strand; PAM type: YTN; PAM sequence: TTT
ttttgtcaatttggttgtca

SEQ ID NO: 251203 - DNA, 20 bp, Artificial Sequence
  Description of Artificial Sequence: Synthetic oligonucleotide
  Target: LAMA2; (-) strand; PAM type: YTN; PAM sequence: CTT
tttttgtcaatttggttgtc

SEQ ID NO: 251204 - DNA, 20 bp, Artificial Sequence
  Description of Artificial Sequence: Synthetic oligonucleotide
  Target: LAMA2; (-) strand; PAM type: YTN; PAM sequence: CTG
acaaaaatatataagccccc

SEQ ID NO: 251205 - DNA, 20 bp, Artificial Sequence
  Description of Artificial Sequence: Synthetic oligonucleotide
  Target: LAMA2; (-) strand; PAM type: YTN; PAM sequence: CTG
aaaagcaatgctgacaaaaa

SEQ ID NO: 251206 - DNA, 20 bp, Artificial Sequence
  Description of Artificial Sequence: Synthetic oligonucleotide
  Target: LAMA2; (-) strand; PAM type: YTN; PAM sequence: CTA
gcctgaaaagcaatgctgac

SEQ ID NO: 251207 - DNA, 20 bp, Artificial Sequence
  Description of Artificial Sequence: Synthetic oligonucleotide
  Target: LAMA2; (-) strand; PAM type: YTN; PAM sequence: TTA
actagcctgaaaagcaatgc

SEQ ID NO: 251208 - DNA, 20 bp, Artificial Sequence
  Description of Artificial Sequence: Synthetic oligonucleotide
  Target: LAMA2; (-) strand; PAM type: YTN; PAM sequence: TTG
tattaactagcctgaaaagc

SEQ ID NO: 251209 - DNA, 20 bp, Artificial Sequence
  Description of Artificial Sequence: Synthetic oligonucleotide
  Target: LAMA2; (-) strand; PAM type: YTN; PAM sequence: TTT
gtattaactagcctgaaaag

SEQ ID NO: 251210 - DNA, 20 bp, Artificial Sequence
  Description of Artificial Sequence: Synthetic oligonucleotide
  Target: LAMA2; (-) strand; PAM type: YTN; PAM sequence: CTT
tgtattaactagcctgaaaa

SEQ ID NO: 251211 - DNA, 20 bp, Artificial Sequence
  Description of Artificial Sequence: Synthetic oligonucleotide
  Target: LAMA2; (-) strand; PAM type: YTN; PAM sequence: CTG
tccaacataaatcaggggga

SEQ ID NO: 251212 - DNA, 20 bp, Artificial Sequence
  Description of Artificial Sequence: Synthetic oligonucleotide
  Target: LAMA2; (-) strand; PAM type: YTN; PAM sequence: CTG
aaactgtccaacataaatca

SEQ ID NO: 251213 - DNA, 20 bp, Artificial Sequence
  Description of Artificial Sequence: Synthetic oligonucleotide
  Target: LAMA2; (-) strand; PAM type: YTN; PAM sequence: TTA
agacgggtagacactgaaac

SEQ ID NO: 251214 - DNA, 20 bp, Artificial Sequence
  Description of Artificial Sequence: Synthetic oligonucleotide
  Target: LAMA2; (-) strand; PAM type: YTN; PAM sequence: TTT
aagacgggtagacactgaaa

SEQ ID NO: 251215 - DNA, 20 bp, Artificial Sequence
  Description of Artificial Sequence: Synthetic oligonucleotide
  Target: LAMA2; (-) strand; PAM type: YTN; PAM sequence: TTT
taagacgggtagacactgaa

SEQ ID NO: 251216 - DNA, 20 bp, Artificial Sequence
  Description of Artificial Sequence: Synthetic oligonucleotide
  Target: LAMA2; (-) strand; PAM type: YTN; PAM sequence: CTG
caaatgaaaccagtgatttt

SEQ ID NO: 251217 - DNA, 20 bp, Artificial Sequence
  Description of Artificial Sequence: Synthetic oligonucleotide
  Target: LAMA2; (-) strand; PAM type: YTN; PAM sequence: CTC
agaagactgcaaatgaaacc

SEQ ID NO: 251218 - DNA, 20 bp, Artificial Sequence
  Description of Artificial Sequence: Synthetic oligonucleotide
  Target: LAMA2; (-) strand; PAM type: YTN; PAM sequence: CTG
tatggcgaaacctcagaaga

SEQ ID NO: 251219 - DNA, 20 bp, Artificial Sequence
  Description of Artificial Sequence: Synthetic oligonucleotide
  Target: LAMA2; (-) strand; PAM type: YTN; PAM sequence: CTC
ctgtatggcgaaacctcaga

SEQ ID NO: 251220 - DNA, 20 bp, Artificial Sequence
  Description of Artificial Sequence: Synthetic oligonucleotide
  Target: LAMA2; (-) strand; PAM type: YTN; PAM sequence: TTC
ctcctgtatggcgaaacctc

SEQ ID NO: 251221 - DNA, 20 bp, Artificial Sequence
  Description of Artificial Sequence: Synthetic oligonucleotide
  Target: LAMA2; (-) strand; PAM type: YTN; PAM sequence: CTG
tgaatgcattcctcctgtat

SEQ ID NO: 251222 - DNA, 20 bp, Artificial Sequence
  Description of Artificial Sequence: Synthetic oligonucleotide
  Target: LAMA2; (-) strand; PAM type: YTN; PAM sequence: TTC
acagagccgcgctgtgaatg

SEQ ID NO: 251223 - DNA, 20 bp, Artificial Sequence
  Description of Artificial Sequence: Synthetic oligonucleotide
  Target: LAMA2; (-) strand; PAM type: YTN; PAM sequence: TTT
cacagagccgcgctgtgaat

SEQ ID NO: 251224 - DNA, 20 bp, Artificial Sequence
  Description of Artificial Sequence: Synthetic oligonucleotide
  Target: LAMA2; (-) strand; PAM type: YTN; PAM sequence: TTG
tgtcatttcacagagccgcg

SEQ ID NO: 251225 - DNA, 20 bp, Artificial Sequence
  Description of Artificial Sequence: Synthetic oligonucleotide
  Target: LAMA2; (-) strand; PAM type: YTN; PAM sequence: CTT
gtgtcatttcacagagccgc

SEQ ID NO: 251226 - DNA, 20 bp, Artificial Sequence
  Description of Artificial Sequence: Synthetic oligonucleotide
  Target: LAMA2; (-) strand; PAM type: YTN; PAM sequence: CTC
ttgtgtcatttcacagagcc

SEQ ID NO: 251227 - DNA, 20 bp, Artificial Sequence
  Description of Artificial Sequence: Synthetic oligonucleotide
  Target: LAMA2; (-) strand; PAM type: YTN; PAM sequence: TTA
gctcttgtgtcatttcacag

SEQ ID NO: 251228 - DNA, 20 bp, Artificial Sequence
  Description of Artificial Sequence: Synthetic oligonucleotide
  Target: LAMA2; (-) strand; PAM type: YTN; PAM sequence: TTG
gattagctcttgtgtcattt

SEQ ID NO: 251229 - DNA, 20 bp, Artificial Sequence
  Description of Artificial Sequence: Synthetic oligonucleotide
  Target: LAMA2; (-) strand; PAM type: YTN; PAM sequence: CTT
ggattagctcttgtgtcatt

SEQ ID NO: 251230 - DNA, 20 bp, Artificial Sequence
  Description of Artificial Sequence: Synthetic oligonucleotide
  Target: LAMA2; (-) strand; PAM type: YTN; PAM sequence: CTA
cttggattagctcttgtgtc

SEQ ID NO: 251231 - DNA, 20 bp, Artificial Sequence
  Description of Artificial Sequence: Synthetic oligonucleotide
  Target: LAMA2; (-) strand; PAM type: YTN; PAM sequence: TTA
ggtaatgtaggtgacagaaa

SEQ ID NO: 251232 - DNA, 20 bp, Artificial Sequence
  Description of Artificial Sequence: Synthetic oligonucleotide
  Target: LAMA2; (-) strand; PAM type: YTN; PAM sequence: TTT
aggtaatgtaggtgacagaa

SEQ ID NO: 251233 - DNA, 20 bp, Artificial Sequence
  Description of Artificial Sequence: Synthetic oligonucleotide
  Target: LAMA2; (-) strand; PAM type: YTN; PAM sequence: CTT
taggtaatgtaggtgacaga

SEQ ID NO: 251234 - DNA, 20 bp, Artificial Sequence
  Description of Artificial Sequence: Synthetic oligonucleotide
  Target: LAMA2; (-) strand; PAM type: YTN; PAM sequence: TTG
aaccacagtgctttaggtaa

SEQ ID NO: 251235 - DNA, 20 bp, Artificial Sequence
  Description of Artificial Sequence: Synthetic oligonucleotide
  Target: LAMA2; (-) strand; PAM type: YTN; PAM sequence: TTA
ttgaaccacagtgctttagg

SEQ ID NO: 251236 - DNA, 20 bp, Artificial Sequence
  Description of Artificial Sequence: Synthetic oligonucleotide
  Target: LAMA2; (-) strand; PAM type: YTN; PAM sequence: CTT
attgaaccacagtgctttag

SEQ ID NO: 251237 - DNA, 20 bp, Artificial Sequence
  Description of Artificial Sequence: Synthetic oligonucleotide
  Target: LAMA2; (-) strand; PAM type: YTN; PAM sequence: TTA
cttattgaaccacagtgctt

SEQ ID NO: 251238 - DNA, 20 bp, Artificial Sequence
  Description of Artificial Sequence: Synthetic oligonucleotide
  Target: LAMA2; (-) strand; PAM type: YTN; PAM sequence: TTT
acttattgaaccacagtgct

SEQ ID NO: 251239 - DNA, 20 bp, Artificial Sequence
  Description of Artificial Sequence: Synthetic oligonucleotide
  Target: LAMA2; (-) strand; PAM type: YTN; PAM sequence: TTT
tacttattgaaccacagtgc

SEQ ID NO: 251240 - DNA, 20 bp, Artificial Sequence
  Description of Artificial Sequence: Synthetic oligonucleotide
  Target: LAMA2; (-) strand; PAM type: YTN; PAM sequence: CTT
ttacttattgaaccacagtg

SEQ ID NO: 251241 - DNA, 20 bp, Artificial Sequence
  Description of Artificial Sequence: Synthetic oligonucleotide
  Target: LAMA2; (-) strand; PAM type: YTN; PAM sequence: TTG
gcttttacttattgaaccac

SEQ ID NO: 251242 - DNA, 20 bp, Artificial Sequence
  Description of Artificial Sequence: Synthetic oligonucleotide
  Target: LAMA2; (-) strand; PAM type: YTN; PAM sequence: TTG
acattggcttttacttattg

SEQ ID NO: 251243 - DNA, 20 bp, Artificial Sequence
  Description of Artificial Sequence: Synthetic oligonucleotide
  Target: LAMA2; (-) strand; PAM type: YTN; PAM sequence: TTT
gacattggcttttacttatt

SEQ ID NO: 251244 - DNA, 20 bp, Artificial Sequence
  Description of Artificial Sequence: Synthetic oligonucleotide
  Target: LAMA2; (-) strand; PAM type: YTN; PAM sequence: TTC
aaatttgacattggctttta

SEQ ID NO: 251245 - DNA, 20 bp, Artificial Sequence
  Description of Artificial Sequence: Synthetic oligonucleotide
  Target: LAMA2; (-) strand; PAM type: YTN; PAM sequence: TTT
caaatttgacattggctttt

SEQ ID NO: 251246 - DNA, 20 bp, Artificial Sequence
  Description of Artificial Sequence: Synthetic oligonucleotide
  Target: LAMA2; (-) strand; PAM type: YTN; PAM sequence: CTG
agtgggtaggagtttcaaat

SEQ ID NO: 251247 - DNA, 20 bp, Artificial Sequence
  Description of Artificial Sequence: Synthetic oligonucleotide
  Target: LAMA2; (-) strand; PAM type: YTN; PAM sequence: CTC
acctgagtgggtaggagttt

SEQ ID NO: 251248 - DNA, 20 bp, Artificial Sequence
  Description of Artificial Sequence: Synthetic oligonucleotide
  Target: LAMA2; (-) strand; PAM type: YTN; PAM sequence: TTC
agctcacctgagtgggtagg

SEQ ID NO: 251249 - DNA, 20 bp, Artificial Sequence
  Description of Artificial Sequence: Synthetic oligonucleotide
  Target: LAMA2; (-) strand; PAM type: YTN; PAM sequence: TTT
cagctcacctgagtgggtag

SEQ ID NO: 251250 - DNA, 20 bp, Artificial Sequence
  Description of Artificial Sequence: Synthetic oligonucleotide
  Target: LAMA2; (-) strand; PAM type: YTN; PAM sequence: CTT
tcagctcacctgagtgggta

SEQ ID NO: 251251 - DNA, 20 bp, Artificial Sequence
  Description of Artificial Sequence: Synthetic oligonucleotide
  Target: LAMA2; (-) strand; PAM type: YTN; PAM sequence: TTC
atgccgactttcagctcacc

SEQ ID NO: 251252 - DNA, 20 bp, Artificial Sequence
  Description of Artificial Sequence: Synthetic oligonucleotide
  Target: LAMA2; (-) strand; PAM type: YTN; PAM sequence: CTC
cagattcatgccgactttca

SEQ ID NO: 251253 - DNA, 20 bp, Artificial Sequence
  Description of Artificial Sequence: Synthetic oligonucleotide
  Target: LAMA2; (-) strand; PAM type: YTN; PAM sequence: CTG
actccagattcatgccgact

SEQ ID NO: 251254 - DNA, 20 bp, Artificial Sequence
  Description of Artificial Sequence: Synthetic oligonucleotide
  Target: LAMA2; (-) strand; PAM type: YTN; PAM sequence: CTG
actgactccagattcatgcc

SEQ ID NO: 251255 - DNA, 20 bp, Artificial Sequence
  Description of Artificial Sequence: Synthetic oligonucleotide
  Target: LAMA2; (-) strand; PAM type: YTN; PAM sequence: TTA
ctgactgactccagattcat

SEQ ID NO: 251256 - DNA, 20 bp, Artificial Sequence
  Description of Artificial Sequence: Synthetic oligonucleotide
  Target: LAMA2; (-) strand; PAM type: YTN; PAM sequence: CTT
actgactgactccagattca

SEQ ID NO: 251257 - DNA, 20 bp, Artificial Sequence
  Description of Artificial Sequence: Synthetic oligonucleotide
  Target: LAMA2; (-) strand; PAM type: YTN; PAM sequence: CTA
gtagatcaaagataaaatat

SEQ ID NO: 251258 - DNA, 20 bp, Artificial Sequence
  Description of Artificial Sequence: Synthetic oligonucleotide
  Target: LAMA2; (-) strand; PAM type: YTN; PAM sequence: CTA
ctagtagatcaaagataaaa

SEQ ID NO: 251259 - DNA, 20 bp, Artificial Sequence
  Description of Artificial Sequence: Synthetic oligonucleotide
  Target: LAMA2; (-) strand; PAM type: YTN; PAM sequence: CTC
aatctactagtagatcaaag

SEQ ID NO: 251260 - DNA, 20 bp, Artificial Sequence
  Description of Artificial Sequence: Synthetic oligonucleotide
  Target: LAMA2; (-) strand; PAM type: YTN; PAM sequence: TTA
caaatatgactcaatctact

SEQ ID NO: 251261 - DNA, 20 bp, Artificial Sequence
  Description of Artificial Sequence: Synthetic oligonucleotide
  Target: LAMA2; (-) strand; PAM type: YTN; PAM sequence: TTT
acaaatatgactcaatctac

SEQ ID NO: 251262 - DNA, 20 bp, Artificial Sequence
  Description of Artificial Sequence: Synthetic oligonucleotide
  Target: LAMA2; (-) strand; PAM type: YTN; PAM sequence: TTT
tacaaatatgactcaatcta

SEQ ID NO: 251263 - DNA, 20 bp, Artificial Sequence
  Description of Artificial Sequence: Synthetic oligonucleotide
  Target: LAMA2; (-) strand; PAM type: YTN; PAM sequence: TTC
aagtgatgttttacaaatat

SEQ ID NO: 251264 - DNA, 20 bp, Artificial Sequence
  Description of Artificial Sequence: Synthetic oligonucleotide
  Target: LAMA2; (-) strand; PAM type: YTN; PAM sequence: TTG
aaatcaattcaagtgatgtt

SEQ ID NO: 251265 - DNA, 20 bp, Artificial Sequence
  Description of Artificial Sequence: Synthetic oligonucleotide
  Target: LAMA2; (-) strand; PAM type: YTN; PAM sequence: CTG
tgcaagacaagttgaaatca

SEQ ID NO: 251266 - DNA, 20 bp, Artificial Sequence
  Description of Artificial Sequence: Synthetic oligonucleotide
  Target: LAMA2; (-) strand; PAM type: YTN; PAM sequence: CTA
ctgtgcaagacaagttgaaa

SEQ ID NO: 251267 - DNA, 20 bp, Artificial Sequence
  Description of Artificial Sequence: Synthetic oligonucleotide
  Target: LAMA2; (-) strand; PAM type: YTN; PAM sequence: TTG
tacacaaacagtataccaag

SEQ ID NO: 251268 - DNA, 20 bp, Artificial Sequence
  Description of Artificial Sequence: Synthetic oligonucleotide
  Target: LAMA2; (-) strand; PAM type: YTN; PAM sequence: CTT
gtacacaaacagtataccaa

SEQ ID NO: 251269 - DNA, 20 bp, Artificial Sequence
  Description of Artificial Sequence: Synthetic oligonucleotide
  Target: LAMA2; (-) strand; PAM type: YTN; PAM sequence: TTG
tgcttgtacacaaacagtat

SEQ ID NO: 251270 - DNA, 20 bp, Artificial Sequence
  Description of Artificial Sequence: Synthetic oligonucleotide
  Target: LAMA2; (-) strand; PAM type: YTN; PAM sequence: CTT
gtgcttgtacacaaacagta

SEQ ID NO: 251271 - DNA, 20 bp, Artificial Sequence
  Description of Artificial Sequence: Synthetic oligonucleotide
  Target: LAMA2; (-) strand; PAM type: YTN; PAM sequence: TTA
cttgtgcttgtacacaaaca

SEQ ID NO: 251272 - DNA, 20 bp, Artificial Sequence
  Description of Artificial Sequence: Synthetic oligonucleotide
  Target: LAMA2; (-) strand; PAM type: YTN; PAM sequence: TTT
acttgtgcttgtacacaaac

SEQ ID NO: 251273 - DNA, 20 bp, Artificial Sequence
  Description of Artificial Sequence: Synthetic oligonucleotide
  Target: LAMA2; (-) strand; PAM type: YTN; PAM sequence: TTC
aatttacttgtgcttgtaca

SEQ ID NO: 251274 - DNA, 20 bp, Artificial Sequence
  Description of Artificial Sequence: Synthetic oligonucleotide
  Target: LAMA2; (-) strand; PAM type: YTN; PAM sequence: CTT
caatttacttgtgcttgtac

SEQ ID NO: 251275 - DNA, 20 bp, Artificial Sequence
  Description of Artificial Sequence: Synthetic oligonucleotide
  Target: LAMA2; (-) strand; PAM type: YTN; PAM sequence: TTG
agcttcaatttacttgtgct

SEQ ID NO: 251276 - DNA, 20 bp, Artificial Sequence
  Description of Artificial Sequence: Synthetic oligonucleotide
  Target: LAMA2; (-) strand; PAM type: YTN; PAM sequence: TTG
ttgagcttcaatttacttgt

SEQ ID NO: 251277 - DNA, 20 bp, Artificial Sequence
  Description of Artificial Sequence: Synthetic oligonucleotide
  Target: LAMA2; (-) strand; PAM type: YTN; PAM sequence: TTT
gttgagcttcaatttacttg

SEQ ID NO: 251278 - DNA, 20 bp, Artificial Sequence
  Description of Artificial Sequence: Synthetic oligonucleotide
  Target: LAMA2; (-) strand; PAM type: YTN; PAM sequence: TTT
tgttgagcttcaatttactt

SEQ ID NO: 251279 - DNA, 20 bp, Artificial Sequence
  Description of Artificial Sequence: Synthetic oligonucleotide
  Target: LAMA2; (-) strand; PAM type: YTN; PAM sequence: TTT
ttgttgagcttcaatttact

SEQ ID NO: 251280 - DNA, 20 bp, Artificial Sequence
  Description of Artificial Sequence: Synthetic oligonucleotide
  Target: LAMA2; (-) strand; PAM type: YTN; PAM sequence: CTG
aatatgaatttttgttgagc

SEQ ID NO: 251281 - DNA, 20 bp, Artificial Sequence
  Description of Artificial Sequence: Synthetic oligonucleotide
  Target: LAMA2; (-) strand; PAM type: YTN; PAM sequence: CTG
taaataagtctgaatatgaa

SEQ ID NO: 251282 - DNA, 20 bp, Artificial Sequence
  Description of Artificial Sequence: Synthetic oligonucleotide
  Target: LAMA2; (-) strand; PAM type: YTN; PAM sequence: CTG
ccatggaagtaaatccactg

SEQ ID NO: 251283 - DNA, 20 bp, Artificial Sequence
  Description of Artificial Sequence: Synthetic oligonucleotide
  Target: LAMA2; (-) strand; PAM type: YTN; PAM sequence: CTG
aaagaactgccatggaagta

SEQ ID NO: 251284 - DNA, 20 bp, Artificial Sequence
  Description of Artificial Sequence: Synthetic oligonucleotide
  Target: LAMA2; (-) strand; PAM type: YTN; PAM sequence: TTG
ctgaaagaactgccatggaa

SEQ ID NO: 251285 - DNA, 20 bp, Artificial Sequence
  Description of Artificial Sequence: Synthetic oligonucleotide
  Target: LAMA2; (-) strand; PAM type: YTN; PAM sequence: TTT
gctgaaagaactgccatgga

SEQ ID NO: 251286 - DNA, 20 bp, Artificial Sequence
  Description of Artificial Sequence: Synthetic oligonucleotide
  Target: LAMA2; (-) strand; PAM type: YTN; PAM sequence: CTA
agcccatttgctgaaagaac

SEQ ID NO: 251287 - DNA, 20 bp, Artificial Sequence
  Description of Artificial Sequence: Synthetic oligonucleotide
  Target: LAMA2; (-) strand; PAM type: YTN; PAM sequence: CTG
gaggaacctaagcccatttg

SEQ ID NO: 251288 - DNA, 20 bp, Artificial Sequence
  Description of Artificial Sequence: Synthetic oligonucleotide
  Target: LAMA2; (-) strand; PAM type: YTN; PAM sequence: CTA
actggaggaacctaagccca

SEQ ID NO: 251289 - DNA, 20 bp, Artificial Sequence
  Description of Artificial Sequence: Synthetic oligonucleotide
  Target: LAMA2; (-) strand; PAM type: YTN; PAM sequence: CTA
atcatataactaactggagg

SEQ ID NO: 251290 - DNA, 20 bp, Artificial Sequence
  Description of Artificial Sequence: Synthetic oligonucleotide
  Target: LAMA2; (-) strand; PAM type: YTN; PAM sequence: TTC
catctaatcatataactaac

SEQ ID NO: 251291 - DNA, 20 bp, Artificial Sequence
  Description of Artificial Sequence: Synthetic oligonucleotide
  Target: LAMA2; (-) strand; PAM type: YTN; PAM sequence: TTA
tacaattccatctaatcata

SEQ ID NO: 251292 - DNA, 20 bp, Artificial Sequence
  Description of Artificial Sequence: Synthetic oligonucleotide
  Target: LAMA2; (-) strand; PAM type: YTN; PAM sequence: CTG
ttatacaattccatctaatc

SEQ ID NO: 251293 - DNA, 20 bp, Artificial Sequence
  Description of Artificial Sequence: Synthetic oligonucleotide
  Target: LAMA2; (-) strand; PAM type: YTN; PAM sequence: TTC
tgttatacaattccatctaa

SEQ ID NO: 251294 - DNA, 20 bp, Artificial Sequence
  Description of Artificial Sequence: Synthetic oligonucleotide
  Target: LAMA2; (-) strand; PAM type: YTN; PAM sequence: CTT
ctgttatacaattccatcta

SEQ ID NO: 251295 - DNA, 20 bp, Artificial Sequence
  Description of Artificial Sequence: Synthetic oligonucleotide
  Target: LAMA2; (-) strand; PAM type: YTN; PAM sequence: CTC
cttctgttatacaattccat

SEQ ID NO: 251296 - DNA, 20 bp, Artificial Sequence
  Description of Artificial Sequence: Synthetic oligonucleotide
  Target: LAMA2; (-) strand; PAM type: YTN; PAM sequence: TTC
tccttctgttatacaattcc

SEQ ID NO: 251297 - DNA, 20 bp, Artificial Sequence
  Description of Artificial Sequence: Synthetic oligonucleotide
  Target: LAMA2; (-) strand; PAM type: YTN; PAM sequence: TTG
acccgcagtccagttctcct

SEQ ID NO: 251298 - DNA, 20 bp, Artificial Sequence
  Description of Artificial Sequence: Synthetic oligonucleotide
  Target: LAMA2; (-) strand; PAM type: YTN; PAM sequence: CTT
gacccgcagtccagttctcc

SEQ ID NO: 251299 - DNA, 20 bp, Artificial Sequence
  Description of Artificial Sequence: Synthetic oligonucleotide
  Target: LAMA2; (-) strand; PAM type: YTN; PAM sequence: TTC
ttgacccgcagtccagttct

SEQ ID NO: 251300 - DNA, 20 bp, Artificial Sequence
  Description of Artificial Sequence: Synthetic oligonucleotide
  Target: LAMA2; (-) strand; PAM type: YTN; PAM sequence: TTG
aaaacaaaagtcaaaattct

SEQ ID NO: 251301 - DNA, 20 bp, Artificial Sequence
  Description of Artificial Sequence: Synthetic oligonucleotide
  Target: LAMA2; (-) strand; PAM type: YTN; PAM sequence: CTG
agttgaaaacaaaagtcaaa

SEQ ID NO: 251302 - DNA, 20 bp, Artificial Sequence
  Description of Artificial Sequence: Synthetic oligonucleotide
  Target: LAMA2; (-) strand; PAM type: YTN; PAM sequence: TTA
aatagctgagttgaaaacaa

SEQ ID NO: 251303 - DNA, 20 bp, Artificial Sequence
  Description of Artificial Sequence: Synthetic oligonucleotide
  Target: LAMA2; (-) strand; PAM type: YTN; PAM sequence: CTA
ttaaatagctgagttgaaaa

SEQ ID NO: 251304 - DNA, 20 bp, Artificial Sequence
  Description of Artificial Sequence: Synthetic oligonucleotide
  Target: LAMA2; (-) strand; PAM type: YTN; PAM sequence: TTA
caactattaaatagctgagt

SEQ ID NO: 251305 - DNA, 20 bp, Artificial Sequence
  Description of Artificial Sequence: Synthetic oligonucleotide
  Target: LAMA2; (-) strand; PAM type: YTN; PAM sequence: TTT
acaactattaaatagctgag

SEQ ID NO: 251306 - DNA, 20 bp, Artificial Sequence
  Description of Artificial Sequence: Synthetic oligonucleotide
  Target: LAMA2; (-) strand; PAM type: YTN; PAM sequence: TTA
tgtttacaactattaaatag

SEQ ID NO: 251307 - DNA, 20 bp, Artificial Sequence
  Description of Artificial Sequence: Synthetic oligonucleotide
  Target: LAMA2; (-) strand; PAM type: YTN; PAM sequence: CTT
atgtttacaactattaaata

SEQ ID NO: 251308 - DNA, 20 bp, Artificial Sequence
  Description of Artificial Sequence: Synthetic oligonucleotide
  Target: LAMA2; (-) strand; PAM type: YTN; PAM sequence: TTG
aagtccaaagaggtcaaagc

SEQ ID NO: 251309 - DNA, 20 bp, Artificial Sequence
  Description of Artificial Sequence: Synthetic oligonucleotide
  Target: LAMA2; (-) strand; PAM type: YTN; PAM sequence: TTA
cagatgaagtgattgaagtc

SEQ ID NO: 251310 - DNA, 20 bp, Artificial Sequence
  Description of Artificial Sequence: Synthetic oligonucleotide
  Target: LAMA2; (-) strand; PAM type: YTN; PAM sequence: TTT
acagatgaagtgattgaagt

SEQ ID NO: 251311 - DNA, 20 bp, Artificial Sequence
  Description of Artificial Sequence: Synthetic oligonucleotide
  Target: LAMA2; (-) strand; PAM type: YTN; PAM sequence: TTT
tacagatgaagtgattgaag

SEQ ID NO: 251312 - DNA, 20 bp, Artificial Sequence
  Description of Artificial Sequence: Synthetic oligonucleotide
  Target: LAMA2; (-) strand; PAM type: YTN; PAM sequence: TTA
ttttacagatgaagtgattg

SEQ ID NO: 251313 - DNA, 20 bp, Artificial Sequence
  Description of Artificial Sequence: Synthetic oligonucleotide
  Target: LAMA2; (-) strand; PAM type: YTN; PAM sequence: CTT
attttacagatgaagtgatt

SEQ ID NO: 251314 - DNA, 20 bp, Artificial Sequence
  Description of Artificial Sequence: Synthetic oligonucleotide
  Target: LAMA2; (-) strand; PAM type: YTN; PAM sequence: CTC
cttattttacagatgaagtg

SEQ ID NO: 251315 - DNA, 20 bp, Artificial Sequence
  Description of Artificial Sequence: Synthetic oligonucleotide
  Target: LAMA2; (-) strand; PAM type: YTN; PAM sequence: CTC
ctccttattttacagatgaa

SEQ ID NO: 251316 - DNA, 20 bp, Artificial Sequence
  Description of Artificial Sequence: Synthetic oligonucleotide
  Target: LAMA2; (-) strand; PAM type: YTN; PAM sequence: TTG
tcctcctccttattttacag

SEQ ID NO: 251317 - DNA, 20 bp, Artificial Sequence
  Description of Artificial Sequence: Synthetic oligonucleotide
  Target: LAMA2; (-) strand; PAM type: YTN; PAM sequence: CTG
gcagagcaattgtcctcctc

SEQ ID NO: 251318 - DNA, 20 bp, Artificial Sequence
  Description of Artificial Sequence: Synthetic oligonucleotide
  Target: LAMA2; (-) strand; PAM type: YTN; PAM sequence: TTG
aagctggcagagcaattgtc

SEQ ID NO: 251319 - DNA, 20 bp, Artificial Sequence
  Description of Artificial Sequence: Synthetic oligonucleotide
  Target: LAMA2; (-) strand; PAM type: YTN; PAM sequence: TTT
gaagctggcagagcaattgt

SEQ ID NO: 251320 - DNA, 20 bp, Artificial Sequence
  Description of Artificial Sequence: Synthetic oligonucleotide
  Target: LAMA2; (-) strand; PAM type: YTN; PAM sequence: TTT
tgaagctggcagagcaattg

SEQ ID NO: 251321 - DNA, 20 bp, Artificial Sequence
  Description of Artificial Sequence: Synthetic oligonucleotide
  Target: LAMA2; (-) strand; PAM type: YTN; PAM sequence: TTT
ttgaagctggcagagcaatt

SEQ ID NO: 251322 - DNA, 20 bp, Artificial Sequence
  Description of Artificial Sequence: Synthetic oligonucleotide
  Target: LAMA2; (-) strand; PAM type: YTN; PAM sequence: CTT
tttgaagctggcagagcaat

SEQ ID NO: 251323 - DNA, 20 bp, Artificial Sequence
  Description of Artificial Sequence: Synthetic oligonucleotide
  Target: LAMA2; (-) strand; PAM type: YTN; PAM sequence: TTG
cggtgactttttgaagctgg

SEQ ID NO: 251324 - DNA, 20 bp, Artificial Sequence
  Description of Artificial Sequence: Synthetic oligonucleotide
  Target: LAMA2; (-) strand; PAM type: YTN; PAM sequence: CTT
gcggtgactttttgaagctg

SEQ ID NO: 251325 - DNA, 20 bp, Artificial Sequence
  Description of Artificial Sequence: Synthetic oligonucleotide
  Target: LAMA2; (-) strand; PAM type: YTN; PAM sequence: TTC
ttgcggtgactttttgaagc

SEQ ID NO: 251326 - DNA, 20 bp, Artificial Sequence
  Description of Artificial Sequence: Synthetic oligonucleotide
  Target: LAMA2; (-) strand; PAM type: YTN; PAM sequence: TTC
aattcttgcggtgacttttt

SEQ ID NO: 251327 - DNA, 20 bp, Artificial Sequence
  Description of Artificial Sequence: Synthetic oligonucleotide
  Target: LAMA2; (-) strand; PAM type: YTN; PAM sequence: CTA
attcaattcttgcggtgact

SEQ ID NO: 251328 - DNA, 20 bp, Artificial Sequence
  Description of Artificial Sequence: Synthetic oligonucleotide
  Target: LAMA2; (-) strand; PAM type: YTN; PAM sequence: CTC
taattcaattcttgcggtga

SEQ ID NO: 251329 - DNA, 20 bp, Artificial Sequence
  Description of Artificial Sequence: Synthetic oligonucleotide
  Target: LAMA2; (-) strand; PAM type: YTN; PAM sequence: CTC
tctaattcaattcttgcggt

SEQ ID NO: 251330 - DNA, 20 bp, Artificial Sequence
  Description of Artificial Sequence: Synthetic oligonucleotide
  Target: LAMA2; (-) strand; PAM type: YTN; PAM sequence: TTG
cagctctctaattcaattct

SEQ ID NO: 251331 - DNA, 20 bp, Artificial Sequence
  Description of Artificial Sequence: Synthetic oligonucleotide
  Target: LAMA2; (-) strand; PAM type: YTN; PAM sequence: TTT
gcagctctctaattcaattc

SEQ ID NO: 251332 - DNA, 20 bp, Artificial Sequence
  Description of Artificial Sequence: Synthetic oligonucleotide
  Target: LAMA2; (-) strand; PAM type: YTN; PAM sequence: TTT
tgcagctctctaattcaatt

SEQ ID NO: 251333 - DNA, 20 bp, Artificial Sequence
  Description of Artificial Sequence: Synthetic oligonucleotide
  Target: LAMA2; (-) strand; PAM type: YTN; PAM sequence: CTT
ttgcagctctctaattcaat

SEQ ID NO: 251334 - DNA, 20 bp, Artificial Sequence
  Description of Artificial Sequence: Synthetic oligonucleotide
  Target: LAMA2; (-) strand; PAM type: YTN; PAM sequence: CTA
gccaagtgcttttgcagctc

SEQ ID NO: 251335 - DNA, 20 bp, Artificial Sequence
  Description of Artificial Sequence: Synthetic oligonucleotide
  Target: LAMA2; (-) strand; PAM type: YTN; PAM sequence: TTA
ccactagccaagtgcttttg

SEQ ID NO: 251336 - DNA, 20 bp, Artificial Sequence
  Description of Artificial Sequence: Synthetic oligonucleotide
  Target: LAMA2; (-) strand; PAM type: YTN; PAM sequence: CTG
ggttaccactagccaagtgc

SEQ ID NO: 251337 - DNA, 20 bp, Artificial Sequence
  Description of Artificial Sequence: Synthetic oligonucleotide
  Target: LAMA2; (-) strand; PAM type: YTN; PAM sequence: TTG
tgtgctgggttaccactagc

SEQ ID NO: 251338 - DNA, 20 bp, Artificial Sequence
  Description of Artificial Sequence: Synthetic oligonucleotide
  Target: LAMA2; (-) strand; PAM type: YTN; PAM sequence: TTT
gtgtgctgggttaccactag

SEQ ID NO: 251339 - DNA, 20 bp, Artificial Sequence
  Description of Artificial Sequence: Synthetic oligonucleotide
  Target: LAMA2; (-) strand; PAM type: YTN; PAM sequence: TTC
atatttgtgtgctgggttac

SEQ ID NO: 251340 - DNA, 20 bp, Artificial Sequence
  Description of Artificial Sequence: Synthetic oligonucleotide
  Target: LAMA2; (-) strand; PAM type: YTN; PAM sequence: CTT
catatttgtgtgctgggtta

SEQ ID NO: 251341 - DNA, 20 bp, Artificial Sequence
  Description of Artificial Sequence: Synthetic oligonucleotide
  Target: LAMA2; (-) strand; PAM type: YTN; PAM sequence: TTG
ggatgaagtagataagatag

SEQ ID NO: 251342 - DNA, 20 bp, Artificial Sequence
  Description of Artificial Sequence: Synthetic oligonucleotide
  Target: LAMA2; (-) strand; PAM type: YTN; PAM sequence: TTT
gggatgaagtagataagata

SEQ ID NO: 251343 - DNA, 20 bp, Artificial Sequence
  Description of Artificial Sequence: Synthetic oligonucleotide
  Target: LAMA2; (-) strand; PAM type: YTN; PAM sequence: CTT
tgggatgaagtagataagat

SEQ ID NO: 251344 - DNA, 20 bp, Artificial Sequence
  Description of Artificial Sequence: Synthetic oligonucleotide
  Target: LAMA2; (-) strand; PAM type: YTN; PAM sequence: TTG
gagaaaatgtgatcctttgg

SEQ ID NO: 251345 - DNA, 20 bp, Artificial Sequence
  Description of Artificial Sequence: Synthetic oligonucleotide
  Target: LAMA2; (-) strand; PAM type: YTN; PAM sequence: TTT
ggagaaaatgtgatcctttg

SEQ ID NO: 251346 - DNA, 20 bp, Artificial Sequence
  Description of Artificial Sequence: Synthetic oligonucleotide
  Target: LAMA2; (-) strand; PAM type: YTN; PAM sequence: TTA
atggtatttggagaaaatgt

SEQ ID NO: 251347 - DNA, 20 bp, Artificial Sequence
  Description of Artificial Sequence: Synthetic oligonucleotide
  Target: LAMA2; (-) strand; PAM type: YTN; PAM sequence: CTT
aatggtatttggagaaaatg

SEQ ID NO: 251348 - DNA, 20 bp, Artificial Sequence
  Description of Artificial Sequence: Synthetic oligonucleotide
  Target: LAMA2; (-) strand; PAM type: YTN; PAM sequence: CTA
agtcttaatggtatttggag

SEQ ID NO: 251349 - DNA, 20 bp, Artificial Sequence
  Description of Artificial Sequence: Synthetic oligonucleotide
  Target: LAMA2; (-) strand; PAM type: YTN; PAM sequence: CTC
taagtcttaatggtatttgg

SEQ ID NO: 251350 - DNA, 20 bp, Artificial Sequence
  Description of Artificial Sequence: Synthetic oligonucleotide
  Target: LAMA2; (-) strand; PAM type: YTN; PAM sequence: TTA
gaggtctctaagtcttaatg

SEQ ID NO: 251351 - DNA, 20 bp, Artificial Sequence
  Description of Artificial Sequence: Synthetic oligonucleotide
  Target: LAMA2; (-) strand; PAM type: YTN; PAM sequence: TTT
agaggtctctaagtcttaat

SEQ ID NO: 251352 - DNA, 20 bp, Artificial Sequence
  Description of Artificial Sequence: Synthetic oligonucleotide
  Target: LAMA2; (-) strand; PAM type: YTN; PAM sequence: CTT
tagaggtctctaagtcttaa

SEQ ID NO: 251353 - DNA, 20 bp, Artificial Sequence
  Description of Artificial Sequence: Synthetic oligonucleotide
  Target: LAMA2; (-) strand; PAM type: YTN; PAM sequence: TTC
tttagaggtctctaagtctt

SEQ ID NO: 251354 - DNA, 20 bp, Artificial Sequence
  Description of Artificial Sequence: Synthetic oligonucleotide
  Target: LAMA2; (-) strand; PAM type: YTN; PAM sequence: TTT
ctttagaggtctctaagtct

SEQ ID NO: 251355 - DNA, 20 bp, Artificial Sequence
  Description of Artificial Sequence: Synthetic oligonucleotide
  Target: LAMA2; (-) strand; PAM type: YTN; PAM sequence: CTT
tctttagaggtctctaagtc

SEQ ID NO: 251356 - DNA, 20 bp, Artificial Sequence
  Description of Artificial Sequence: Synthetic oligonucleotide
  Target: LAMA2; (-) strand; PAM type: YTN; PAM sequence: CTG
tcatatgtatggaaatgcca

SEQ ID NO: 251357 - DNA, 20 bp, Artificial Sequence
  Description of Artificial Sequence: Synthetic oligonucleotide
  Target: LAMA2; (-) strand; PAM type: YTN; PAM sequence: CTG
gataaaaatgatagtaagaa

SEQ ID NO: 251358 - DNA, 20 bp, Artificial Sequence
  Description of Artificial Sequence: Synthetic oligonucleotide
  Target: LAMA2; (-) strand; PAM type: YTN; PAM sequence: TTC
tggataaaaatgatagtaag

SEQ ID NO: 251359 - DNA, 20 bp, Artificial Sequence
  Description of Artificial Sequence: Synthetic oligonucleotide
  Target: LAMA2; (-) strand; PAM type: YTN; PAM sequence: CTC
agcattctggataaaaatga

SEQ ID NO: 251360 - DNA, 20 bp, Artificial Sequence
  Description of Artificial Sequence: Synthetic oligonucleotide
  Target: LAMA2; (-) strand; PAM type: YTN; PAM sequence: CTA
atgggtctcagcattctgga

SEQ ID NO: 251361 - DNA, 20 bp, Artificial Sequence
  Description of Artificial Sequence: Synthetic oligonucleotide
  Target: LAMA2; (-) strand; PAM type: YTN; PAM sequence: TTA
tctaatgggtctcagcattc

SEQ ID NO: 251362 - DNA, 20 bp, Artificial Sequence
  Description of Artificial Sequence: Synthetic oligonucleotide
  Target: LAMA2; (-) strand; PAM type: YTN; PAM sequence: TTT
atctaatgggtctcagcatt

SEQ ID NO: 251363 - DNA, 20 bp, Artificial Sequence
  Description of Artificial Sequence: Synthetic oligonucleotide
  Target: LAMA2; (-) strand; PAM type: YTN; PAM sequence: TTT
tatctaatgggtctcagcat

SEQ ID NO: 251364 - DNA, 20 bp, Artificial Sequence
  Description of Artificial Sequence: Synthetic oligonucleotide
  Target: LAMA2; (-) strand; PAM type: YTN; PAM sequence: TTA
attttatctaatgggtctca

SEQ ID NO: 251365 - DNA, 20 bp, Artificial Sequence
  Description of Artificial Sequence: Synthetic oligonucleotide
  Target: LAMA2; (-) strand; PAM type: YTN; PAM sequence: CTA
gtgaagacagcgagaagaaa

SEQ ID NO: 251366 - DNA, 20 bp, Artificial Sequence
  Description of Artificial Sequence: Synthetic oligonucleotide
  Target: LAMA2; (-) strand; PAM type: YTN; PAM sequence: TTC
ctagtgaagacagcgagaag

SEQ ID NO: 251367 - DNA, 20 bp, Artificial Sequence
  Description of Artificial Sequence: Synthetic oligonucleotide
  Target: LAMA2; (-) strand; PAM type: YTN; PAM sequence: CTT
cctagtgaagacagcgagaa

SEQ ID NO: 251368 - DNA, 20 bp, Artificial Sequence
  Description of Artificial Sequence: Synthetic oligonucleotide
  Target: LAMA2; (-) strand; PAM type: YTN; PAM sequence: TTC
atcttcctagtgaagacagc

SEQ ID NO: 251369 - DNA, 20 bp, Artificial Sequence
  Description of Artificial Sequence: Synthetic oligonucleotide
  Target: LAMA2; (-) strand; PAM type: YTN; PAM sequence: CTT
catcttcctagtgaagacag

SEQ ID NO: 251370 - DNA, 20 bp, Artificial Sequence
  Description of Artificial Sequence: Synthetic oligonucleotide
  Target: LAMA2; (-) strand; PAM type: YTN; PAM sequence: TTG
tgccttcatcttcctagtga

SEQ ID NO: 251371 - DNA, 20 bp, Artificial Sequence
  Description of Artificial Sequence: Synthetic oligonucleotide
  Target: LAMA2; (-) strand; PAM type: YTN; PAM sequence: CTT
gtgccttcatcttcctagtg

SEQ ID NO: 251372 - DNA, 20 bp, Artificial Sequence
  Description of Artificial Sequence: Synthetic oligonucleotide
  Target: LAMA2; (-) strand; PAM type: YTN; PAM sequence: CTA
cttgtgccttcatcttccta

SEQ ID NO: 251373 - DNA, 20 bp, Artificial Sequence
  Description of Artificial Sequence: Synthetic oligonucleotide
  Target: LAMA2; (-) strand; PAM type: YTN; PAM sequence: TTC
tacttgtgccttcatcttcc

SEQ ID NO: 251374 - DNA, 20 bp, Artificial Sequence
  Description of Artificial Sequence: Synthetic oligonucleotide
  Target: LAMA2; (-) strand; PAM type: YTN; PAM sequence: TTT
ctacttgtgccttcatcttc

SEQ ID NO: 251375 - DNA, 20 bp, Artificial Sequence
  Description of Artificial Sequence: Synthetic oligonucleotide
  Target: LAMA2; (-) strand; PAM type: YTN; PAM sequence: TTT
tctacttgtgccttcatctt

SEQ ID NO: 251376 - DNA, 20 bp, Artificial Sequence
  Description of Artificial Sequence: Synthetic oligonucleotide
  Target: LAMA2; (-) strand; PAM type: YTN; PAM sequence: TTA
aaagaagaatgaagagtttt

SEQ ID NO: 251377 - DNA, 20 bp, Artificial Sequence
  Description of Artificial Sequence: Synthetic oligonucleotide
  Target: LAMA2; (-) strand; PAM type: YTN; PAM sequence: CTT
aaaagaagaatgaagagttt

SEQ ID NO: 251378 - DNA, 20 bp, Artificial Sequence
  Description of Artificial Sequence: Synthetic oligonucleotide
  Target: LAMA2; (-) strand; PAM type: YTN; PAM sequence: TTC
ttaaaagaagaatgaagagt

SEQ ID NO: 251379 - DNA, 20 bp, Artificial Sequence
  Description of Artificial Sequence: Synthetic oligonucleotide
  Target: LAMA2; (-) strand; PAM type: YTN; PAM sequence: TTA
tattcttaaaagaagaatga

SEQ ID NO: 251380 - DNA, 20 bp, Artificial Sequence
  Description of Artificial Sequence: Synthetic oligonucleotide
  Target: LAMA2; (-) strand; PAM type: YTN; PAM sequence: CTT
atattcttaaaagaagaatg

SEQ ID NO: 251381 - DNA, 20 bp, Artificial Sequence
  Description of Artificial Sequence: Synthetic oligonucleotide
  Target: LAMA2; (-) strand; PAM type: YTN; PAM sequence: CTC
ttatattcttaaaagaagaa

SEQ ID NO: 251382 - DNA, 20 bp, Artificial Sequence
  Description of Artificial Sequence: Synthetic oligonucleotide
  Target: LAMA2; (-) strand; PAM type: YTN; PAM sequence: TTC
tcttatattcttaaaagaag

SEQ ID NO: 251383 - DNA, 20 bp, Artificial Sequence
  Description of Artificial Sequence: Synthetic oligonucleotide
  Target: LAMA2; (-) strand; PAM type: YTN; PAM sequence: TTT
ctcttatattcttaaaagaa

SEQ ID NO: 251384 - DNA, 20 bp, Artificial Sequence
  Description of Artificial Sequence: Synthetic oligonucleotide
  Target: LAMA2; (-) strand; PAM type: YTN; PAM sequence: TTG
atttctcttatattcttaaa

SEQ ID NO: 251385 - DNA, 20 bp, Artificial Sequence
  Description of Artificial Sequence: Synthetic oligonucleotide
  Target: LAMA2; (-) strand; PAM type: YTN; PAM sequence: TTA
ggttgatttctcttatattc

SEQ ID NO: 251386 - DNA, 20 bp, Artificial Sequence
  Description of Artificial Sequence: Synthetic oligonucleotide
  Target: LAMA2; (-) strand; PAM type: YTN; PAM sequence: TTC
agttaggttgatttctctta

SEQ ID NO: 251387 - DNA, 20 bp, Artificial Sequence
  Description of Artificial Sequence: Synthetic oligonucleotide
  Target: LAMA2; (-) strand; PAM type: YTN; PAM sequence: TTA
aaggtgaaagatgcacagtt

SEQ ID NO: 251388 - DNA, 20 bp, Artificial Sequence
  Description of Artificial Sequence: Synthetic oligonucleotide
  Target: LAMA2; (-) strand; PAM type: YTN; PAM sequence: TTT
aaaggtgaaagatgcacagt

SEQ ID NO: 251389 - DNA, 20 bp, Artificial Sequence
  Description of Artificial Sequence: Synthetic oligonucleotide
  Target: LAMA2; (-) strand; PAM type: YTN; PAM sequence: TTG
gataatttaaaggtgaaaga

SEQ ID NO: 251390 - DNA, 20 bp, Artificial Sequence
  Description of Artificial Sequence: Synthetic oligonucleotide
  Target: LAMA2; (-) strand; PAM type: YTN; PAM sequence: CTT
ggataatttaaaggtgaaag

SEQ ID NO: 251391 - DNA, 20 bp, Artificial Sequence
  Description of Artificial Sequence: Synthetic oligonucleotide
  Target: LAMA2; (-) strand; PAM type: YTN; PAM sequence: CTA
aatccaagtcttggataatt

SEQ ID NO: 251392 - DNA, 20 bp, Artificial Sequence
  Description of Artificial Sequence: Synthetic oligonucleotide
  Target: LAMA2; (-) strand; PAM type: YTN; PAM sequence: TTA
ctaaatccaagtcttggata

SEQ ID NO: 251393 - DNA, 20 bp, Artificial Sequence
  Description of Artificial Sequence: Synthetic oligonucleotide
  Target: LAMA2; (-) strand; PAM type: YTN; PAM sequence: TTA
aagaccaaggatgttactaa

SEQ ID NO: 251394 - DNA, 20 bp, Artificial Sequence
  Description of Artificial Sequence: Synthetic oligonucleotide
  Target: LAMA2; (-) strand; PAM type: YTN; PAM sequence: TTT
aaagaccaaggatgttacta

SEQ ID NO: 251395 - DNA, 20 bp, Artificial Sequence
  Description of Artificial Sequence: Synthetic oligonucleotide
  Target: LAMA2; (-) strand; PAM type: YTN; PAM sequence: TTG
atttaaagaccaaggatgtt

SEQ ID NO: 251396 - DNA, 20 bp, Artificial Sequence
  Description of Artificial Sequence: Synthetic oligonucleotide
  Target: LAMA2; (-) strand; PAM type: YTN; PAM sequence: CTT
gatttaaagaccaaggatgt

SEQ ID NO: 251397 - DNA, 20 bp, Artificial Sequence
  Description of Artificial Sequence: Synthetic oligonucleotide
  Target: LAMA2; (-) strand; PAM type: YTN; PAM sequence: TTC
ttgatttaaagaccaaggat

SEQ ID NO: 251398 - DNA, 20 bp, Artificial Sequence
  Description of Artificial Sequence: Synthetic oligonucleotide
  Target: LAMA2; (-) strand; PAM type: YTN; PAM sequence: TTT
cttgatttaaagaccaagga

SEQ ID NO: 251399 - DNA, 20 bp, Artificial Sequence
  Description of Artificial Sequence: Synthetic oligonucleotide
  Target: LAMA2; (-) strand; PAM type: YTN; PAM sequence: CTT
tcttgatttaaagaccaagg

SEQ ID NO: 251400 - DNA, 20 bp, Artificial Sequence
  Description of Artificial Sequence: Synthetic oligonucleotide
  Target: LAMA2; (-) strand; PAM type: YTN; PAM sequence: TTC
ataaaagcctttcttgattt

SEQ ID NO: 251401 - DNA, 20 bp, Artificial Sequence
  Description of Artificial Sequence: Synthetic oligonucleotide
  Target: LAMA2; (-) strand; PAM type: YTN; PAM sequence: CTT
cataaaagcctttcttgatt

SEQ ID NO: 251402 - DNA, 20 bp, Artificial Sequence
  Description of Artificial Sequence: Synthetic oligonucleotide
  Target: LAMA2; (-) strand; PAM type: YTN; PAM sequence: CTA
atataggtgcttcataaaag

SEQ ID NO: 251403 - DNA, 20 bp, Artificial Sequence
  Description of Artificial Sequence: Synthetic oligonucleotide
  Target: LAMA2; (-) strand; PAM type: YTN; PAM sequence: CTA
tatctaatataggtgcttca

SEQ ID NO: 251404 - DNA, 20 bp, Artificial Sequence
  Description of Artificial Sequence: Synthetic oligonucleotide
  Target: LAMA2; (-) strand; PAM type: YTN; PAM sequence: TTC
tatatctaatataggtgctt

SEQ ID NO: 251405 - DNA, 20 bp, Artificial Sequence
  Description of Artificial Sequence: Synthetic oligonucleotide
  Target: LAMA2; (-) strand; PAM type: YTN; PAM sequence: TTG
tgcagagttctatatctaat

SEQ ID NO: 251406 - DNA, 20 bp, Artificial Sequence
  Description of Artificial Sequence: Synthetic oligonucleotide
  Target: LAMA2; (-) strand; PAM type: YTN; PAM sequence: TTT
gtgcagagttctatatctaa

SEQ ID NO: 251407 - DNA, 20 bp, Artificial Sequence
  Description of Artificial Sequence: Synthetic oligonucleotide
  Target: LAMA2; (-) strand; PAM type: YTN; PAM sequence: CTT
tgtgcagagttctatatcta

SEQ ID NO: 251408 - DNA, 20 bp, Artificial Sequence
  Description of Artificial Sequence: Synthetic oligonucleotide
  Target: LAMA2; (-) strand; PAM type: YTN; PAM sequence: TTA
gaggaaaatacactttgtgc

SEQ ID NO: 251409 - DNA, 20 bp, Artificial Sequence
  Description of Artificial Sequence: Synthetic oligonucleotide
  Target: LAMA2; (-) strand; PAM type: YTN; PAM sequence: CTG
taaagttagaggaaaataca

SEQ ID NO: 251410 - DNA, 20 bp, Artificial Sequence
  Description of Artificial Sequence: Synthetic oligonucleotide
  Target: LAMA2; (-) strand; PAM type: YTN; PAM sequence: CTA
ctgtaaagttagaggaaaat

SEQ ID NO: 251411 - DNA, 20 bp, Artificial Sequence
  Description of Artificial Sequence: Synthetic oligonucleotide
  Target: LAMA2; (-) strand; PAM type: YTN; PAM sequence: CTA
atgtctactgtaaagttaga

SEQ ID NO: 251412 - DNA, 20 bp, Artificial Sequence
  Description of Artificial Sequence: Synthetic oligonucleotide
  Target: LAMA2; (-) strand; PAM type: YTN; PAM sequence: CTA
ctaatgtctactgtaaagtt

SEQ ID NO: 251413 - DNA, 20 bp, Artificial Sequence
  Description of Artificial Sequence: Synthetic oligonucleotide
  Target: LAMA2; (-) strand; PAM type: YTN; PAM sequence: CTC
tactaatgtctactgtaaag

SEQ ID NO: 251414 - DNA, 20 bp, Artificial Sequence
  Description of Artificial Sequence: Synthetic oligonucleotide
  Target: LAMA2; (-) strand; PAM type: YTN; PAM sequence: TTG
gtgaactctactaatgtcta

SEQ ID NO: 251415 - DNA, 20 bp, Artificial Sequence
  Description of Artificial Sequence: Synthetic oligonucleotide
  Target: LAMA2; (-) strand; PAM type: YTN; PAM sequence: TTT
ggtgaactctactaatgtct

SEQ ID NO: 251416 - DNA, 20 bp, Artificial Sequence
  Description of Artificial Sequence: Synthetic oligonucleotide
  Target: LAMA2; (-) strand; PAM type: YTN; PAM sequence: TTG
gaaatttggtgaactctact

SEQ ID NO: 251417 - DNA, 20 bp, Artificial Sequence
  Description of Artificial Sequence: Synthetic oligonucleotide
  Target: LAMA2; (-) strand; PAM type: YTN; PAM sequence: CTA
tagatgagattggaaatttg

SEQ ID NO: 251418 - DNA, 20 bp, Artificial Sequence
  Description of Artificial Sequence: Synthetic oligonucleotide
  Target: LAMA2; (-) strand; PAM type: YTN; PAM sequence: TTA
gagaaatgcaatatccccta

SEQ ID NO: 251419 - DNA, 20 bp, Artificial Sequence
  Description of Artificial Sequence: Synthetic oligonucleotide
  Target: LAMA2; (-) strand; PAM type: YTN; PAM sequence: CTC
caggattagagaaatgcaat

SEQ ID NO: 251420 - DNA, 20 bp, Artificial Sequence
  Description of Artificial Sequence: Synthetic oligonucleotide
  Target: LAMA2; (-) strand; PAM type: YTN; PAM sequence: CTA
ccctccaggattagagaaat

SEQ ID NO: 251421 - DNA, 20 bp, Artificial Sequence
  Description of Artificial Sequence: Synthetic oligonucleotide
  Target: LAMA2; (-) strand; PAM type: YTN; PAM sequence: CTA
aaccaagtcatgtgacacat

SEQ ID NO: 251422 - DNA, 20 bp, Artificial Sequence
  Description of Artificial Sequence: Synthetic oligonucleotide
  Target: LAMA2; (-) strand; PAM type: YTN; PAM sequence: TTG
gctaaaccaagtcatgtgac

SEQ ID NO: 251423 - DNA, 20 bp, Artificial Sequence
  Description of Artificial Sequence: Synthetic oligonucleotide
  Target: LAMA2; (-) strand; PAM type: YTN; PAM sequence: TTC
attggctaaaccaagtcatg

SEQ ID NO: 251424 - DNA, 20 bp, Artificial Sequence
  Description of Artificial Sequence: Synthetic oligonucleotide
  Target: LAMA2; (-) strand; PAM type: YTN; PAM sequence: TTT
cattggctaaaccaagtcat

SEQ ID NO: 251425 - DNA, 20 bp, Artificial Sequence
  Description of Artificial Sequence: Synthetic oligonucleotide
  Target: LAMA2; (-) strand; PAM type: YTN; PAM sequence: CTA
ccacatttcattggctaaac

SEQ ID NO: 251426 - DNA, 20 bp, Artificial Sequence
  Description of Artificial Sequence: Synthetic oligonucleotide
  Target: LAMA2; (-) strand; PAM type: YTN; PAM sequence: TTC
taccacatttcattggctaa

SEQ ID NO: 251427 - DNA, 20 bp, Artificial Sequence
  Description of Artificial Sequence: Synthetic oligonucleotide
  Target: LAMA2; (-) strand; PAM type: YTN; PAM sequence: TTT
ctaccacatttcattggcta

SEQ ID NO: 251428 - DNA, 20 bp, Artificial Sequence
  Description of Artificial Sequence: Synthetic oligonucleotide
  Target: LAMA2; (-) strand; PAM type: YTN; PAM sequence: CTC
aggaaaaaaaaaaatacatc

SEQ ID NO: 251429 - DNA, 20 bp, Artificial Sequence
  Description of Artificial Sequence: Synthetic oligonucleotide
  Target: LAMA2; (-) strand; PAM type: YTN; PAM sequence: TTA
cctcaggaaaaaaaaaaata

SEQ ID NO: 251430 - DNA, 20 bp, Artificial Sequence
  Description of Artificial Sequence: Synthetic oligonucleotide
  Target: LAMA2; (-) strand; PAM type: YTN; PAM sequence: TTT
acctcaggaaaaaaaaaaat

SEQ ID NO: 251431 - DNA, 20 bp, Artificial Sequence
  Description of Artificial Sequence: Synthetic oligonucleotide
  Target: LAMA2; (-) strand; PAM type: YTN; PAM sequence: TTC
aatgtttacctcaggaaaaa

SEQ ID NO: 251432 - DNA, 20 bp, Artificial Sequence
  Description of Artificial Sequence: Synthetic oligonucleotide
  Target: LAMA2; (-) strand; PAM type: YTN; PAM sequence: TTG
gaaattcaatgtttacctca

SEQ ID NO: 251433 - DNA, 20 bp, Artificial Sequence
  Description of Artificial Sequence: Synthetic oligonucleotide
  Target: LAMA2; (-) strand; PAM type: YTN; PAM sequence: CTC
acattggaaattcaatgttt

SEQ ID NO: 251434 - DNA, 20 bp, Artificial Sequence
  Description of Artificial Sequence: Synthetic oligonucleotide
  Target: LAMA2; (-) strand; PAM type: YTN; PAM sequence: CTG
cagagagtctcacattggaa

SEQ ID NO: 251435 - DNA, 20 bp, Artificial Sequence
  Description of Artificial Sequence: Synthetic oligonucleotide
  Target: LAMA2; (-) strand; PAM type: YTN; PAM sequence: CTG
agtaagctgcagagagtctc

SEQ ID NO: 251436 - DNA, 20 bp, Artificial Sequence
  Description of Artificial Sequence: Synthetic oligonucleotide
  Target: LAMA2; (-) strand; PAM type: YTN; PAM sequence: TTG
ctgagtaagctgcagagagt

SEQ ID NO: 251437 - DNA, 20 bp, Artificial Sequence
  Description of Artificial Sequence: Synthetic oligonucleotide
  Target: LAMA2; (-) strand; PAM type: YTN; PAM sequence: CTG
attgctgagtaagctgcaga

SEQ ID NO: 251438 - DNA, 20 bp, Artificial Sequence
  Description of Artificial Sequence: Synthetic oligonucleotide
  Target: LAMA2; (-) strand; PAM type: YTN; PAM sequence: TTC
tgattgctgagtaagctgca

SEQ ID NO: 251439 - DNA, 20 bp, Artificial Sequence
  Description of Artificial Sequence: Synthetic oligonucleotide
  Target: LAMA2; (-) strand; PAM type: YTN; PAM sequence: CTT
ctgattgctgagtaagctgc

SEQ ID NO: 251440 - DNA, 20 bp, Artificial Sequence
  Description of Artificial Sequence: Synthetic oligonucleotide
  Target: LAMA2; (-) strand; PAM type: YTN; PAM sequence: TTA
atcttctgattgctgagtaa

SEQ ID NO: 251441 - DNA, 20 bp, Artificial Sequence
  Description of Artificial Sequence: Synthetic oligonucleotide
  Target: LAMA2; (-) strand; PAM type: YTN; PAM sequence: TTT
aatcttctgattgctgagta

SEQ ID NO: 251442 - DNA, 20 bp, Artificial Sequence
  Description of Artificial Sequence: Synthetic oligonucleotide
  Target: LAMA2; (-) strand; PAM type: YTN; PAM sequence: TTT
taatcttctgattgctgagt

SEQ ID NO: 251443 - DNA, 20 bp, Artificial Sequence
  Description of Artificial Sequence: Synthetic oligonucleotide
  Target: LAMA2; (-) strand; PAM type: YTN; PAM sequence: TTT
ttaatcttctgattgctgag

SEQ ID NO: 251444 - DNA, 20 bp, Artificial Sequence
  Description of Artificial Sequence: Synthetic oligonucleotide
  Target: LAMA2; (-) strand; PAM type: YTN; PAM sequence: TTT
tttaatcttctgattgctga

SEQ ID NO: 251445 - DNA, 20 bp, Artificial Sequence
  Description of Artificial Sequence: Synthetic oligonucleotide
  Target: LAMA2; (-) strand; PAM type: YTN; PAM sequence: CTG
ttttttaatcttctgattgc

SEQ ID NO: 251446 - DNA, 20 bp, Artificial Sequence
  Description of Artificial Sequence: Synthetic oligonucleotide
  Target: LAMA2; (-) strand; PAM type: YTN; PAM sequence: TTA
caggcatgagccaccgtgcc

SEQ ID NO: 251447 - DNA, 20 bp, Artificial Sequence
  Description of Artificial Sequence: Synthetic oligonucleotide
  Target: LAMA2; (-) strand; PAM type: YTN; PAM sequence: CTG
ggattacaggcatgagccac

SEQ ID NO: 251448 - DNA, 20 bp, Artificial Sequence
  Description of Artificial Sequence: Synthetic oligonucleotide
  Target: LAMA2; (-) strand; PAM type: YTN; PAM sequence: TTG
ctgggattacaggcatgagc

SEQ ID NO: 251449 - DNA, 20 bp, Artificial Sequence
  Description of Artificial Sequence: Synthetic oligonucleotide
  Target: LAMA2; (-) strand; PAM type: YTN; PAM sequence: CTC
ccaaattgctgggattacag

SEQ ID NO: 251450 - DNA, 20 bp, Artificial Sequence
  Description of Artificial Sequence: Synthetic oligonucleotide
  Target: LAMA2; (-) strand; PAM type: YTN; PAM sequence: CTC
agcctcccaaattgctggga

SEQ ID NO: 251451 - DNA, 20 bp, Artificial Sequence
  Description of Artificial Sequence: Synthetic oligonucleotide
  Target: LAMA2; (-) strand; PAM type: YTN; PAM sequence: CTG
cctcagcctcccaaattgct

SEQ ID NO: 251452 - DNA, 20 bp, Artificial Sequence
  Description of Artificial Sequence: Synthetic oligonucleotide
  Target: LAMA2; (-) strand; PAM type: YTN; PAM sequence: CTG
cctgcctcagcctcccaaat

SEQ ID NO: 251453 - DNA, 20 bp, Artificial Sequence
  Description of Artificial Sequence: Synthetic oligonucleotide
  Target: LAMA2; (-) strand; PAM type: YTN; PAM sequence: CTC
gtgatctgcctgcctcagcc

SEQ ID NO: 251454 - DNA, 20 bp, Artificial Sequence
  Description of Artificial Sequence: Synthetic oligonucleotide
  Target: LAMA2; (-) strand; PAM type: YTN; PAM sequence: CTG
acctcgtgatctgcctgcct

SEQ ID NO: 251455 - DNA, 20 bp, Artificial Sequence
  Description of Artificial Sequence: Synthetic oligonucleotide
  Target: LAMA2; (-) strand; PAM type: YTN; PAM sequence: CTC
gaacaactgacctcgtgatc

SEQ ID NO: 251456 - DNA, 20 bp, Artificial Sequence
  Description of Artificial Sequence: Synthetic oligonucleotide
  Target: LAMA2; (-) strand; PAM type: YTN; PAM sequence: CTG
gtctcgaacaactgacctcg

SEQ ID NO: 251457 - DNA, 20 bp, Artificial Sequence
  Description of Artificial Sequence: Synthetic oligonucleotide
  Target: LAMA2; (-) strand; PAM type: YTN; PAM sequence: TTG
gtcaggctggtctcgaacaa

SEQ ID NO: 251458 - DNA, 20 bp, Artificial Sequence
  Description of Artificial Sequence: Synthetic oligonucleotide
  Target: LAMA2; (-) strand; PAM type: YTN; PAM sequence: TTC
accatgttggtcaggctggt

SEQ ID NO: 251459 - DNA, 20 bp, Artificial Sequence
  Description of Artificial Sequence: Synthetic oligonucleotide
  Target: LAMA2; (-) strand; PAM type: YTN; PAM sequence: TTT
caccatgttggtcaggctgg

SEQ ID NO: 251460 - DNA, 20 bp, Artificial Sequence
  Description of Artificial Sequence: Synthetic oligonucleotide
  Target: LAMA2; (-) strand; PAM type: YTN; PAM sequence: TTA
gtagagatggggtttcacca

SEQ ID NO: 251461 - DNA, 20 bp, Artificial Sequence
  Description of Artificial Sequence: Synthetic oligonucleotide
  Target: LAMA2; (-) strand; PAM type: YTN; PAM sequence: TTT
agtagagatggggtttcacc

SEQ ID NO: 251462 - DNA, 20 bp, Artificial Sequence
  Description of Artificial Sequence: Synthetic oligonucleotide
  Target: LAMA2; (-) strand; PAM type: YTN; PAM sequence: TTT
tagtagagatggggtttcac

SEQ ID NO: 251463 - DNA, 20 bp, Artificial Sequence
  Description of Artificial Sequence: Synthetic oligonucleotide
  Target: LAMA2; (-) strand; PAM type: YTN; PAM sequence: TTT
ttagtagagatggggtttca

SEQ ID NO: 251464 - DNA, 20 bp, Artificial Sequence
  Description of Artificial Sequence: Synthetic oligonucleotide
  Target: LAMA2; (-) strand; PAM type: YTN; PAM sequence: TTG
gtatttttagtagagatggg

SEQ ID NO: 251465 - DNA, 20 bp, Artificial Sequence
  Description of Artificial Sequence: Synthetic oligonucleotide
  Target: LAMA2; (-) strand; PAM type: YTN; PAM sequence: TTT
ggtatttttagtagagatgg

SEQ ID NO: 251466 - DNA, 20 bp, Artificial Sequence
  Description of Artificial Sequence: Synthetic oligonucleotide
  Target: LAMA2; (-) strand; PAM type: YTN; PAM sequence: TTT
tggtatttttagtagagatg

SEQ ID NO: 251467 - DNA, 20 bp, Artificial Sequence
  Description of Artificial Sequence: Synthetic oligonucleotide
  Target: LAMA2; (-) strand; PAM type: YTN; PAM sequence: CTA
attttggtatttttagtaga

SEQ ID NO: 251468 - DNA, 20 bp, Artificial Sequence
  Description of Artificial Sequence: Synthetic oligonucleotide
  Target: LAMA2; (-) strand; PAM type: YTN; PAM sequence: CTG
gctaattttggtatttttag

SEQ ID NO: 251469 - DNA, 20 bp, Artificial Sequence
  Description of Artificial Sequence: Synthetic oligonucleotide
  Target: LAMA2; (-) strand; PAM type: YTN; PAM sequence: CTG
acacgtgccaccatgtctgg

SEQ ID NO: 251470 - DNA, 20 bp, Artificial Sequence
  Description of Artificial Sequence: Synthetic oligonucleotide
  Target: LAMA2; (-) strand; PAM type: YTN; PAM sequence: TTA
ctgacacgtgccaccatgtc

SEQ ID NO: 251471 - DNA, 20 bp, Artificial Sequence
  Description of Artificial Sequence: Synthetic oligonucleotide
  Target: LAMA2; (-) strand; PAM type: YTN; PAM sequence: CTG
ggattactgacacgtgccac

SEQ ID NO: 251472 - DNA, 20 bp, Artificial Sequence
  Description of Artificial Sequence: Synthetic oligonucleotide
  Target: LAMA2; (-) strand; PAM type: YTN; PAM sequence: CTG
agtagctgggattactgaca

SEQ ID NO: 251473 - DNA, 20 bp, Artificial Sequence
  Description of Artificial Sequence: Synthetic oligonucleotide
  Target: LAMA2; (-) strand; PAM type: YTN; PAM sequence: CTC
ctgagtagctgggattactg

SEQ ID NO: 251474 - DNA, 20 bp, Artificial Sequence
  Description of Artificial Sequence: Synthetic oligonucleotide
  Target: LAMA2; (-) strand; PAM type: YTN; PAM sequence: CTC
agcctcctgagtagctggga

SEQ ID NO: 251475 - DNA, 20 bp, Artificial Sequence
  Description of Artificial Sequence: Synthetic oligonucleotide
  Target: LAMA2; (-) strand; PAM type: YTN; PAM sequence: CTG
cctcagcctcctgagtagct

SEQ ID NO: 251476 - DNA, 20 bp, Artificial Sequence
  Description of Artificial Sequence: Synthetic oligonucleotide
  Target: LAMA2; (-) strand; PAM type: YTN; PAM sequence: CTA
ctgcctcagcctcctgagta

SEQ ID NO: 251477 - DNA, 20 bp, Artificial Sequence
  Description of Artificial Sequence: Synthetic oligonucleotide
  Target: LAMA2; (-) strand; PAM type: YTN; PAM sequence: TTC
tactgcctcagcctcctgag

SEQ ID NO: 251478 - DNA, 20 bp, Artificial Sequence
  Description of Artificial Sequence: Synthetic oligonucleotide
  Target: LAMA2; (-) strand; PAM type: YTN; PAM sequence: TTC
aagtgattctactgcctcag

SEQ ID NO: 251479 - DNA, 20 bp, Artificial Sequence
  Description of Artificial Sequence: Synthetic oligonucleotide
  Target: LAMA2; (-) strand; PAM type: YTN; PAM sequence: CTC
cacatcccgggttcaagtga

SEQ ID NO: 251480 - DNA, 20 bp, Artificial Sequence
  Description of Artificial Sequence: Synthetic oligonucleotide
  Target: LAMA2; (-) strand; PAM type: YTN; PAM sequence: CTG
caacctccacatcccgggtt

SEQ ID NO: 251481 - DNA, 20 bp, Artificial Sequence
  Description of Artificial Sequence: Synthetic oligonucleotide
  Target: LAMA2; (-) strand; PAM type: YTN; PAM sequence: CTC
actgcaacctccacatcccg

SEQ ID NO: 251482 - DNA, 20 bp, Artificial Sequence
  Description of Artificial Sequence: Synthetic oligonucleotide
  Target: LAMA2; (-) strand; PAM type: YTN; PAM sequence: CTC
ggctcactgcaacctccaca

SEQ ID NO: 251483 - DNA, 20 bp, Artificial Sequence
  Description of Artificial Sequence: Synthetic oligonucleotide
  Target: LAMA2; (-) strand; PAM type: YTN; PAM sequence: CTG
gagtgcaatggcgcgatctc

SEQ ID NO: 251484 - DNA, 20 bp, Artificial Sequence
  Description of Artificial Sequence: Synthetic oligonucleotide
  Target: LAMA2; (-) strand; PAM type: YTN; PAM sequence: CTG
tcacccaggctggagtgcaa

SEQ ID NO: 251485 - DNA, 20 bp, Artificial Sequence
  Description of Artificial Sequence: Synthetic oligonucleotide
  Target: LAMA2; (-) strand; PAM type: YTN; PAM sequence: CTC
tgtcacccaggctggagtgc

SEQ ID NO: 251486 - DNA, 20 bp, Artificial Sequence
  Description of Artificial Sequence: Synthetic oligonucleotide
  Target: LAMA2; (-) strand; PAM type: YTN; PAM sequence: CTC
cctctgtcacccaggctgga

SEQ ID NO: 251487 - DNA, 20 bp, Artificial Sequence
  Description of Artificial Sequence: Synthetic oligonucleotide
  Target: LAMA2; (-) strand; PAM type: YTN; PAM sequence: TTG
agacagagtctccctctgtc

SEQ ID NO: 251488 - DNA, 20 bp, Artificial Sequence
  Description of Artificial Sequence: Synthetic oligonucleotide
  Target: LAMA2; (-) strand; PAM type: YTN; PAM sequence: TTT
gagacagagtctccctctgt

SEQ ID NO: 251489 - DNA, 20 bp, Artificial Sequence
  Description of Artificial Sequence: Synthetic oligonucleotide
  Target: LAMA2; (-) strand; PAM type: YTN; PAM sequence: TTT
tgagacagagtctccctctg

SEQ ID NO: 251490 - DNA, 20 bp, Artificial Sequence
  Description of Artificial Sequence: Synthetic oligonucleotide
  Target: LAMA2; (-) strand; PAM type: YTN; PAM sequence: TTT
ttgagacagagtctccctct

SEQ ID NO: 251491 - DNA, 20 bp, Artificial Sequence
  Description of Artificial Sequence: Synthetic oligonucleotide
  Target: LAMA2; (-) strand; PAM type: YTN; PAM sequence: TTT
tttgagacagagtctccctc

SEQ ID NO: 251492 - DNA, 20 bp, Artificial Sequence
  Description of Artificial Sequence: Synthetic oligonucleotide
  Target: LAMA2; (-) strand; PAM type: YTN; PAM sequence: TTT
ttttgagacagagtctccct

SEQ ID NO: 251493 - DNA, 20 bp, Artificial Sequence
  Description of Artificial Sequence: Synthetic oligonucleotide
  Target: LAMA2; (-) strand; PAM type: YTN; PAM sequence: TTT
tttttgagacagagtctccc

SEQ ID NO: 251494 - DNA, 20 bp, Artificial Sequence
  Description of Artificial Sequence: Synthetic oligonucleotide
  Target: LAMA2; (-) strand; PAM type: YTN; PAM sequence: TTT
ttttttgagacagagtctcc

SEQ ID NO: 251495 - DNA, 20 bp, Artificial Sequence
  Description of Artificial Sequence: Synthetic oligonucleotide
  Target: LAMA2; (-) strand; PAM type: YTN; PAM sequence: TTT
tttttttgagacagagtctc

SEQ ID NO: 251496 - DNA, 20 bp, Artificial Sequence
  Description of Artificial Sequence: Synthetic oligonucleotide
  Target: LAMA2; (-) strand; PAM type: YTN; PAM sequence: TTT
ttttttttgagacagagtct

SEQ ID NO: 251497 - DNA, 20 bp, Artificial Sequence
  Description of Artificial Sequence: Synthetic oligonucleotide
  Target: LAMA2; (-) strand; PAM type: YTN; PAM sequence: TTT
tttttttttgagacagagtc

SEQ ID NO: 251498 - DNA, 20 bp, Artificial Sequence
  Description of Artificial Sequence: Synthetic oligonucleotide
  Target: LAMA2; (-) strand; PAM type: YTN; PAM sequence: TTT
ttttttttttgagacagagt

SEQ ID NO: 251499 - DNA, 20 bp, Artificial Sequence
  Description of Artificial Sequence: Synthetic oligonucleotide
  Target: LAMA2; (-) strand; PAM type: YTN; PAM sequence: TTT
tttttttttttgagacagag

SEQ ID NO: 251500 - DNA, 20 bp, Artificial Sequence
  Description of Artificial Sequence: Synthetic oligonucleotide
  Target: LAMA2; (-) strand; PAM type: YTN; PAM sequence: TTT
ttttttttttttgagacaga

SEQ ID NO: 251501 - DNA, 20 bp, Artificial Sequence
  Description of Artificial Sequence: Synthetic oligonucleotide
  Target: LAMA2; (-) strand; PAM type: YTN; PAM sequence: TTT
tttttttttttttgagacag

SEQ ID NO: 251502 - DNA, 20 bp, Artificial Sequence
  Description of Artificial Sequence: Synthetic oligonucleotide
  Target: LAMA2; (-) strand; PAM type: YTN; PAM sequence: TTT
ttttttttttttttgagaca

SEQ ID NO: 251503 - DNA, 20 bp, Artificial Sequence
  Description of Artificial Sequence: Synthetic oligonucleotide
  Target: LAMA2; (-) strand; PAM type: YTN; PAM sequence: TTT
tttttttttttttttgagac

SEQ ID NO: 251504 - DNA, 20 bp, Artificial Sequence
  Description of Artificial Sequence: Synthetic oligonucleotide
  Target: LAMA2; (-) strand; PAM type: YTN; PAM sequence: TTT
ttttttttttttttttgaga

SEQ ID NO: 251505 - DNA, 20 bp, Artificial Sequence
  Description of Artificial Sequence: Synthetic oligonucleotide
  Target: LAMA2; (-) strand; PAM type: YTN; PAM sequence: TTT
tttttttttttttttttgag

SEQ ID NO: 251506 - DNA, 20 bp, Artificial Sequence
  Description of Artificial Sequence: Synthetic oligonucleotide
  Target: LAMA2; (-) strand; PAM type: YTN; PAM sequence: TTT
ttttttttttttttttttga

SEQ ID NO: 251507 - DNA, 20 bp, Artificial Sequence
  Description of Artificial Sequence: Synthetic oligonucleotide
  Target: LAMA2; (-) strand; PAM type: YTN; PAM sequence: TTT
tttttttttttttttttttg

SEQ ID NO: 251508 - DNA, 20 bp, Artificial Sequence
  Description of Artificial Sequence: Synthetic oligonucleotide
  Target: LAMA2; (-) strand; PAM type: YTN; PAM sequence: TTT
tttttttttttttttttttt

SEQ ID NO: 251509 - DNA, 20 bp, Artificial Sequence
  Description of Artificial Sequence: Synthetic oligonucleotide
  Target: LAMA2; (-) strand; PAM type: YTN; PAM sequence: TTT
tttttttttttttttttttt

SEQ ID NO: 251510 - DNA, 20 bp, Artificial Sequence
  Description of Artificial Sequence: Synthetic oligonucleotide
  Target: LAMA2; (-) strand; PAM type: YTN; PAM sequence: TTT
tttttttttttttttttttt

SEQ ID NO: 251511 - DNA, 20 bp, Artificial Sequence
  Description of Artificial Sequence: Synthetic oligonucleotide
  Target: LAMA2; (-) strand; PAM type: YTN; PAM sequence: TTT
tttttttttttttttttttt

SEQ ID NO: 251512 - DNA, 20 bp, Artificial Sequence
  Description of Artificial Sequence: Synthetic oligonucleotide
  Target: LAMA2; (-) strand; PAM type: YTN; PAM sequence: TTT
tttttttttttttttttttt

SEQ ID NO: 251513 - DNA, 20 bp, Artificial Sequence
  Description of Artificial Sequence: Synthetic oligonucleotide
  Target: LAMA2; (-) strand; PAM type: YTN; PAM sequence: TTT
tttttttttttttttttttt

SEQ ID NO: 251514 - DNA, 20 bp, Artificial Sequence
  Description of Artificial Sequence: Synthetic oligonucleotide
  Target: LAMA2; (-) strand; PAM type: YTN; PAM sequence: TTT
tttttttttttttttttttt

SEQ ID NO: 251515 - DNA, 20 bp, Artificial Sequence
  Description of Artificial Sequence: Synthetic oligonucleotide
  Target: LAMA2; (-) strand; PAM type: YTN; PAM sequence: TTT
tttttttttttttttttttt

SEQ ID NO: 251516 - DNA, 20 bp, Artificial Sequence
  Description of Artificial Sequence: Synthetic oligonucleotide
  Target: LAMA2; (-) strand; PAM type: YTN; PAM sequence: CTT
tttttttttttttttttttt

SEQ ID NO: 251517 - DNA, 20 bp, Artificial Sequence
  Description of Artificial Sequence: Synthetic oligonucleotide
  Target: LAMA2; (-) strand; PAM type: YTN; PAM sequence: TTC
caggcttttttttttttttt

SEQ ID NO: 251518 - DNA, 20 bp, Artificial Sequence
  Description of Artificial Sequence: Synthetic oligonucleotide
  Target: LAMA2; (-) strand; PAM type: YTN; PAM sequence: CTA
aatcagtattccaggctttt

SEQ ID NO: 251519 - DNA, 20 bp, Artificial Sequence
  Description of Artificial Sequence: Synthetic oligonucleotide
  Target: LAMA2; (-) strand; PAM type: YTN; PAM sequence: CTG
tgtgctaaatcagtattcca

SEQ ID NO: 251520 - DNA, 20 bp, Artificial Sequence
  Description of Artificial Sequence: Synthetic oligonucleotide
  Target: LAMA2; (-) strand; PAM type: YTN; PAM sequence: CTC
tgtgtgctaaatcagtattc

SEQ ID NO: 251521 - DNA, 20 bp, Artificial Sequence
  Description of Artificial Sequence: Synthetic oligonucleotide
  Target: LAMA2; (-) strand; PAM type: YTN; PAM sequence: CTG
acctctgtgtgctaaatcag

SEQ ID NO: 251522 - DNA, 20 bp, Artificial Sequence
  Description of Artificial Sequence: Synthetic oligonucleotide
  Target: LAMA2; (-) strand; PAM type: YTN; PAM sequence: TTA
gggcagctgacctctgtgtg

SEQ ID NO: 251523 - DNA, 20 bp, Artificial Sequence
  Description of Artificial Sequence: Synthetic oligonucleotide
  Target: LAMA2; (-) strand; PAM type: YTN; PAM sequence: CTG
ttagggcagctgacctctgt

SEQ ID NO: 251524 - DNA, 20 bp, Artificial Sequence
  Description of Artificial Sequence: Synthetic oligonucleotide
  Target: LAMA2; (-) strand; PAM type: YTN; PAM sequence: CTG
ggtgactgttagggcagctg

SEQ ID NO: 251525 - DNA, 20 bp, Artificial Sequence
  Description of Artificial Sequence: Synthetic oligonucleotide
  Target: LAMA2; (-) strand; PAM type: YTN; PAM sequence: CTA
caggcctgggtgactgttag

SEQ ID NO: 251526 - DNA, 20 bp, Artificial Sequence
  Description of Artificial Sequence: Synthetic oligonucleotide
  Target: LAMA2; (-) strand; PAM type: YTN; PAM sequence: CTC
tacaggcctgggtgactgtt

SEQ ID NO: 251527 - DNA, 20 bp, Artificial Sequence
  Description of Artificial Sequence: Synthetic oligonucleotide
  Target: LAMA2; (-) strand; PAM type: YTN; PAM sequence: CTC
atgtaaaatcctctacaggc

SEQ ID NO: 251528 - DNA, 20 bp, Artificial Sequence
  Description of Artificial Sequence: Synthetic oligonucleotide
  Target: LAMA2; (-) strand; PAM type: YTN; PAM sequence: TTA
ctcatgtaaaatcctctaca

SEQ ID NO: 251529 - DNA, 20 bp, Artificial Sequence
  Description of Artificial Sequence: Synthetic oligonucleotide
  Target: LAMA2; (-) strand; PAM type: YTN; PAM sequence: CTT
actcatgtaaaatcctctac

SEQ ID NO: 251530 - DNA, 20 bp, Artificial Sequence
  Description of Artificial Sequence: Synthetic oligonucleotide
  Target: LAMA2; (-) strand; PAM type: YTN; PAM sequence: TTA
acagaaaacaaaggcttact

SEQ ID NO: 251531 - DNA, 20 bp, Artificial Sequence
  Description of Artificial Sequence: Synthetic oligonucleotide
  Target: LAMA2; (-) strand; PAM type: YTN; PAM sequence: CTT
aacagaaaacaaaggcttac

SEQ ID NO: 251532 - DNA, 20 bp, Artificial Sequence
  Description of Artificial Sequence: Synthetic oligonucleotide
  Target: LAMA2; (-) strand; PAM type: YTN; PAM sequence: CTC
aatggcttaacagaaaacaa

SEQ ID NO: 251533 - DNA, 20 bp, Artificial Sequence
  Description of Artificial Sequence: Synthetic oligonucleotide
  Target: LAMA2; (-) strand; PAM type: YTN; PAM sequence: CTC
caaaatctcaatggcttaac

SEQ ID NO: 251534 - DNA, 20 bp, Artificial Sequence
  Description of Artificial Sequence: Synthetic oligonucleotide
  Target: LAMA2; (-) strand; PAM type: YTN; PAM sequence: CTG
tggtaacaactccaaaatct

SEQ ID NO: 251535 - DNA, 20 bp, Artificial Sequence
  Description of Artificial Sequence: Synthetic oligonucleotide
  Target: LAMA2; (-) strand; PAM type: YTN; PAM sequence: TTA
tgctgtggtaacaactccaa

SEQ ID NO: 251536 - DNA, 20 bp, Artificial Sequence
  Description of Artificial Sequence: Synthetic oligonucleotide
  Target: LAMA2; (-) strand; PAM type: YTN; PAM sequence: CTC
ggttatgctgtggtaacaac

SEQ ID NO: 251537 - DNA, 20 bp, Artificial Sequence
  Description of Artificial Sequence: Synthetic oligonucleotide
  Target: LAMA2; (-) strand; PAM type: YTN; PAM sequence: TTA
tatcgtgatgaagtcacgat

SEQ ID NO: 251538 - DNA, 20 bp, Artificial Sequence
  Description of Artificial Sequence: Synthetic oligonucleotide
  Target: LAMA2; (-) strand; PAM type: YTN; PAM sequence: CTC
atgagttatatcgtgatgaa

SEQ ID NO: 251539 - DNA, 20 bp, Artificial Sequence
  Description of Artificial Sequence: Synthetic oligonucleotide
  Target: LAMA2; (-) strand; PAM type: YTN; PAM sequence: TTC
aagcaatactcatgagttat

SEQ ID NO: 251540 - DNA, 20 bp, Artificial Sequence
  Description of Artificial Sequence: Synthetic oligonucleotide
  Target: LAMA2; (-) strand; PAM type: YTN; PAM sequence: TTT
caagcaatactcatgagtta

SEQ ID NO: 251541 - DNA, 20 bp, Artificial Sequence
  Description of Artificial Sequence: Synthetic oligonucleotide
  Target: LAMA2; (-) strand; PAM type: YTN; PAM sequence: TTT
tcaagcaatactcatgagtt

SEQ ID NO: 251542 - DNA, 20 bp, Artificial Sequence
  Description of Artificial Sequence: Synthetic oligonucleotide
  Target: LAMA2; (-) strand; PAM type: YTN; PAM sequence: TTA
ttttcaagcaatactcatga

SEQ ID NO: 251543 - DNA, 20 bp, Artificial Sequence
  Description of Artificial Sequence: Synthetic oligonucleotide
  Target: LAMA2; (-) strand; PAM type: YTN; PAM sequence: TTT
attttcaagcaatactcatg

SEQ ID NO: 251544 - DNA, 20 bp, Artificial Sequence
  Description of Artificial Sequence: Synthetic oligonucleotide
  Target: LAMA2; (-) strand; PAM type: YTN; PAM sequence: CTG
tatttattttcaagcaatac

SEQ ID NO: 251545 - DNA, 20 bp, Artificial Sequence
  Description of Artificial Sequence: Synthetic oligonucleotide
  Target: LAMA2; (-) strand; PAM type: YTN; PAM sequence: TTC
tgtatttattttcaagcaat

SEQ ID NO: 251546 - DNA, 20 bp, Artificial Sequence
  Description of Artificial Sequence: Synthetic oligonucleotide
  Target: LAMA2; (-) strand; PAM type: YTN; PAM sequence: TTG
aaaagattctgtatttattt

SEQ ID NO: 251547 - DNA, 20 bp, Artificial Sequence
  Description of Artificial Sequence: Synthetic oligonucleotide
  Target: LAMA2; (-) strand; PAM type: YTN; PAM sequence: CTT
gaaaagattctgtatttatt

SEQ ID NO: 251548 - DNA, 20 bp, Artificial Sequence
  Description of Artificial Sequence: Synthetic oligonucleotide
  Target: LAMA2; (-) strand; PAM type: YTN; PAM sequence: TTG
ccttgaaaagattctgtatt

SEQ ID NO: 251549 - DNA, 20 bp, Artificial Sequence
  Description of Artificial Sequence: Synthetic oligonucleotide
  Target: LAMA2; (-) strand; PAM type: YTN; PAM sequence: CTT
gccttgaaaagattctgtat

SEQ ID NO: 251550 - DNA, 20 bp, Artificial Sequence
  Description of Artificial Sequence: Synthetic oligonucleotide
  Target: LAMA2; (-) strand; PAM type: YTN; PAM sequence: TTG
tgtaaaaatatcttgccttg

SEQ ID NO: 251551 - DNA, 20 bp, Artificial Sequence
  Description of Artificial Sequence: Synthetic oligonucleotide
  Target: LAMA2; (-) strand; PAM type: YTN; PAM sequence: CTA
aaagttgtgtaaaaatatct

SEQ ID NO: 251552 - DNA, 20 bp, Artificial Sequence
  Description of Artificial Sequence: Synthetic oligonucleotide
  Target: LAMA2; (-) strand; PAM type: YTN; PAM sequence: TTA
cactaaaagttgtgtaaaaa

SEQ ID NO: 251553 - DNA, 20 bp, Artificial Sequence
  Description of Artificial Sequence: Synthetic oligonucleotide
  Target: LAMA2; (-) strand; PAM type: YTN; PAM sequence: TTT
acactaaaagttgtgtaaaa

SEQ ID NO: 251554 - DNA, 20 bp, Artificial Sequence
  Description of Artificial Sequence: Synthetic oligonucleotide
  Target: LAMA2; (-) strand; PAM type: YTN; PAM sequence: TTG
atcccaaaccgcaaaattta

SEQ ID NO: 251555 - DNA, 20 bp, Artificial Sequence
  Description of Artificial Sequence: Synthetic oligonucleotide
  Target: LAMA2; (-) strand; PAM type: YTN; PAM sequence: TTT
gatcccaaaccgcaaaattt

SEQ ID NO: 251556 - DNA, 20 bp, Artificial Sequence
  Description of Artificial Sequence: Synthetic oligonucleotide
  Target: LAMA2; (-) strand; PAM type: YTN; PAM sequence: TTT
tgatcccaaaccgcaaaatt

SEQ ID NO: 251557 - DNA, 20 bp, Artificial Sequence
  Description of Artificial Sequence: Synthetic oligonucleotide
  Target: LAMA2; (-) strand; PAM type: YTN; PAM sequence: TTT
ttgatcccaaaccgcaaaat

SEQ ID NO: 251558 - DNA, 20 bp, Artificial Sequence
  Description of Artificial Sequence: Synthetic oligonucleotide
  Target: LAMA2; (-) strand; PAM type: YTN; PAM sequence: TTT
tttgatcccaaaccgcaaaa

SEQ ID NO: 251559 - DNA, 20 bp, Artificial Sequence
  Description of Artificial Sequence: Synthetic oligonucleotide
  Target: LAMA2; (-) strand; PAM type: YTN; PAM sequence: CTT
ttttgatcccaaaccgcaaa

SEQ ID NO: 251560 - DNA, 20 bp, Artificial Sequence
  Description of Artificial Sequence: Synthetic oligonucleotide
  Target: LAMA2; (-) strand; PAM type: YTN; PAM sequence: CTG
tataatcttttttgatccca

SEQ ID NO: 251561 - DNA, 20 bp, Artificial Sequence
  Description of Artificial Sequence: Synthetic oligonucleotide
  Target: LAMA2; (-) strand; PAM type: YTN; PAM sequence: TTC
tgtataatcttttttgatcc

SEQ ID NO: 251562 - DNA, 20 bp, Artificial Sequence
  Description of Artificial Sequence: Synthetic oligonucleotide
  Target: LAMA2; (-) strand; PAM type: YTN; PAM sequence: TTA
tataaattctgtataatctt

SEQ ID NO: 251563 - DNA, 20 bp, Artificial Sequence
  Description of Artificial Sequence: Synthetic oligonucleotide
  Target: LAMA2; (-) strand; PAM type: YTN; PAM sequence: TTA
ttatataaattctgtataat

SEQ ID NO: 251564 - DNA, 20 bp, Artificial Sequence
  Description of Artificial Sequence: Synthetic oligonucleotide
  Target: LAMA2; (-) strand; PAM type: YTN; PAM sequence: TTT
attatataaattctgtataa

SEQ ID NO: 251565 - DNA, 20 bp, Artificial Sequence
  Description of Artificial Sequence: Synthetic oligonucleotide
  Target: LAMA2; (-) strand; PAM type: YTN; PAM sequence: TTA
tttattatataaattctgta

SEQ ID NO: 251566 - DNA, 20 bp, Artificial Sequence
  Description of Artificial Sequence: Synthetic oligonucleotide
  Target: LAMA2; (-) strand; PAM type: YTN; PAM sequence: CTA
gattatttattatataaatt

SEQ ID NO: 251567 - DNA, 20 bp, Artificial Sequence
  Description of Artificial Sequence: Synthetic oligonucleotide
  Target: LAMA2; (-) strand; PAM type: YTN; PAM sequence: TTC
tagattatttattatataaa

SEQ ID NO: 251568 - DNA, 20 bp, Artificial Sequence
  Description of Artificial Sequence: Synthetic oligonucleotide
  Target: LAMA2; (-) strand; PAM type: YTN; PAM sequence: TTT
ctagattatttattatataa

SEQ ID NO: 251569 - DNA, 20 bp, Artificial Sequence
  Description of Artificial Sequence: Synthetic oligonucleotide
  Target: LAMA2; (-) strand; PAM type: YTN; PAM sequence: TTT
tctagattatttattatata

SEQ ID NO: 251570 - DNA, 20 bp, Artificial Sequence
  Description of Artificial Sequence: Synthetic oligonucleotide
  Target: LAMA2; (-) strand; PAM type: YTN; PAM sequence: TTT
ttctagattatttattatat

SEQ ID NO: 251571 - DNA, 20 bp, Artificial Sequence
  Description of Artificial Sequence: Synthetic oligonucleotide
  Target: LAMA2; (-) strand; PAM type: YTN; PAM sequence: TTA
caaaggaatttttctagatt

SEQ ID NO: 251572 - DNA, 20 bp, Artificial Sequence
  Description of Artificial Sequence: Synthetic oligonucleotide
  Target: LAMA2; (-) strand; PAM type: YTN; PAM sequence: TTT
acaaaggaatttttctagat

SEQ ID NO: 251573 - DNA, 20 bp, Artificial Sequence
  Description of Artificial Sequence: Synthetic oligonucleotide
  Target: LAMA2; (-) strand; PAM type: YTN; PAM sequence: TTG
tttacaaaggaatttttcta

SEQ ID NO: 251574 - DNA, 20 bp, Artificial Sequence
  Description of Artificial Sequence: Synthetic oligonucleotide
  Target: LAMA2; (-) strand; PAM type: YTN; PAM sequence: TTT
gtttacaaaggaatttttct

SEQ ID NO: 251575 - DNA, 20 bp, Artificial Sequence
  Description of Artificial Sequence: Synthetic oligonucleotide
  Target: LAMA2; (-) strand; PAM type: YTN; PAM sequence: CTT
tgtttacaaaggaatttttc

SEQ ID NO: 251576 - DNA, 20 bp, Artificial Sequence
  Description of Artificial Sequence: Synthetic oligonucleotide
  Target: LAMA2; (-) strand; PAM type: YTN; PAM sequence: CTC
ctttgtttacaaaggaattt

SEQ ID NO: 251577 - DNA, 20 bp, Artificial Sequence
  Description of Artificial Sequence: Synthetic oligonucleotide
  Target: LAMA2; (-) strand; PAM type: YTN; PAM sequence: TTA
tcaaagactcctttgtttac

SEQ ID NO: 251578 - DNA, 20 bp, Artificial Sequence
  Description of Artificial Sequence: Synthetic oligonucleotide
  Target: LAMA2; (-) strand; PAM type: YTN; PAM sequence: CTA
tgattatcaaagactccttt

SEQ ID NO: 251579 - DNA, 20 bp, Artificial Sequence
  Description of Artificial Sequence: Synthetic oligonucleotide
  Target: LAMA2; (-) strand; PAM type: YTN; PAM sequence: TTC
tatgattatcaaagactcct

SEQ ID NO: 251580 - DNA, 20 bp, Artificial Sequence
  Description of Artificial Sequence: Synthetic oligonucleotide
  Target: LAMA2; (-) strand; PAM type: YTN; PAM sequence: TTT
ctatgattatcaaagactcc

SEQ ID NO: 251581 - DNA, 20 bp, Artificial Sequence
  Description of Artificial Sequence: Synthetic oligonucleotide
  Target: LAMA2; (-) strand; PAM type: YTN; PAM sequence: CTA
tttctatgattatcaaagac

SEQ ID NO: 251582 - DNA, 20 bp, Artificial Sequence
  Description of Artificial Sequence: Synthetic oligonucleotide
  Target: LAMA2; (-) strand; PAM type: YTN; PAM sequence: CTA
tcaatactatttctatgatt

SEQ ID NO: 251583 - DNA, 20 bp, Artificial Sequence
  Description of Artificial Sequence: Synthetic oligonucleotide
  Target: LAMA2; (-) strand; PAM type: YTN; PAM sequence: CTG
tgtacctatcaatactattt

SEQ ID NO: 251584 - DNA, 20 bp, Artificial Sequence
  Description of Artificial Sequence: Synthetic oligonucleotide
  Target: LAMA2; (-) strand; PAM type: YTN; PAM sequence: TTC
agaaggcagaggtatactgt

SEQ ID NO: 251585 - DNA, 20 bp, Artificial Sequence
  Description of Artificial Sequence: Synthetic oligonucleotide
  Target: LAMA2; (-) strand; PAM type: YTN; PAM sequence: CTT
cagaaggcagaggtatactg

SEQ ID NO: 251586 - DNA, 20 bp, Artificial Sequence
  Description of Artificial Sequence: Synthetic oligonucleotide
  Target: LAMA2; (-) strand; PAM type: YTN; PAM sequence: TTA
acttcagaaggcagaggtat

SEQ ID NO: 251587 - DNA, 20 bp, Artificial Sequence
  Description of Artificial Sequence: Synthetic oligonucleotide
  Target: LAMA2; (-) strand; PAM type: YTN; PAM sequence: TTA
cccaaatcattaacttcaga

SEQ ID NO: 251588 - DNA, 20 bp, Artificial Sequence
  Description of Artificial Sequence: Synthetic oligonucleotide
  Target: LAMA2; (-) strand; PAM type: YTN; PAM sequence: TTC
aaaatgtagttacccaaatc

SEQ ID NO: 251589 - DNA, 20 bp, Artificial Sequence
  Description of Artificial Sequence: Synthetic oligonucleotide
  Target: LAMA2; (-) strand; PAM type: YTN; PAM sequence: CTT
caaaatgtagttacccaaat

SEQ ID NO: 251590 - DNA, 20 bp, Artificial Sequence
  Description of Artificial Sequence: Synthetic oligonucleotide
  Target: LAMA2; (-) strand; PAM type: YTN; PAM sequence: TTA
tcagtaaaatgtcttcaaaa

SEQ ID NO: 251591 - DNA, 20 bp, Artificial Sequence
  Description of Artificial Sequence: Synthetic oligonucleotide
  Target: LAMA2; (-) strand; PAM type: YTN; PAM sequence: CTA
gtgttatcagtaaaatgtct

SEQ ID NO: 251592 - DNA, 20 bp, Artificial Sequence
  Description of Artificial Sequence: Synthetic oligonucleotide
  Target: LAMA2; (-) strand; PAM type: YTN; PAM sequence: TTA
agtcctagtgttatcagtaa

SEQ ID NO: 251593 - DNA, 20 bp, Artificial Sequence
  Description of Artificial Sequence: Synthetic oligonucleotide
  Target: LAMA2; (-) strand; PAM type: YTN; PAM sequence: TTT
aagtcctagtgttatcagta

SEQ ID NO: 251594 - DNA, 20 bp, Artificial Sequence
  Description of Artificial Sequence: Synthetic oligonucleotide
  Target: LAMA2; (-) strand; PAM type: YTN; PAM sequence: TTT
taagtcctagtgttatcagt

SEQ ID NO: 251595 - DNA, 20 bp, Artificial Sequence
  Description of Artificial Sequence: Synthetic oligonucleotide
  Target: LAMA2; (-) strand; PAM type: YTN; PAM sequence: TTT
ttaagtcctagtgttatcag

SEQ ID NO: 251596 - DNA, 20 bp, Artificial Sequence
  Description of Artificial Sequence: Synthetic oligonucleotide
  Target: LAMA2; (-) strand; PAM type: YTN; PAM sequence: CTT
tttaagtcctagtgttatca

SEQ ID NO: 251597 - DNA, 20 bp, Artificial Sequence
  Description of Artificial Sequence: Synthetic oligonucleotide
  Target: LAMA2; (-) strand; PAM type: YTN; PAM sequence: CTG
caaaaatctttttaagtcct

SEQ ID NO: 251598 - DNA, 20 bp, Artificial Sequence
  Description of Artificial Sequence: Synthetic oligonucleotide
  Target: LAMA2; (-) strand; PAM type: YTN; PAM sequence: TTA
ccaatggccggatgccaagt

SEQ ID NO: 251599 - DNA, 20 bp, Artificial Sequence
  Description of Artificial Sequence: Synthetic oligonucleotide
  Target: LAMA2; (-) strand; PAM type: YTN; PAM sequence: CTT
accaatggccggatgccaag

SEQ ID NO: 251600 - DNA, 20 bp, Artificial Sequence
  Description of Artificial Sequence: Synthetic oligonucleotide
  Target: LAMA2; (-) strand; PAM type: YTN; PAM sequence: CTC
ttaccaatggccggatgcca

SEQ ID NO: 251601 - DNA, 20 bp, Artificial Sequence
  Description of Artificial Sequence: Synthetic oligonucleotide
  Target: LAMA2; (-) strand; PAM type: YTN; PAM sequence: CTG
cacctcttaccaatggccgg

SEQ ID NO: 251602 - DNA, 20 bp, Artificial Sequence
  Description of Artificial Sequence: Synthetic oligonucleotide
  Target: LAMA2; (-) strand; PAM type: YTN; PAM sequence: TTG
gctgcacctcttaccaatgg

SEQ ID NO: 251603 - DNA, 20 bp, Artificial Sequence
  Description of Artificial Sequence: Synthetic oligonucleotide
  Target: LAMA2; (-) strand; PAM type: YTN; PAM sequence: TTG
ggaggtagtcaaagataatg

SEQ ID NO: 251604 - DNA, 20 bp, Artificial Sequence
  Description of Artificial Sequence: Synthetic oligonucleotide
  Target: LAMA2; (-) strand; PAM type: YTN; PAM sequence: TTA
tggaatagcattgggaggta

SEQ ID NO: 251605 - DNA, 20 bp, Artificial Sequence
  Description of Artificial Sequence: Synthetic oligonucleotide
  Target: LAMA2; (-) strand; PAM type: YTN; PAM sequence: CTT
atggaatagcattgggaggt

SEQ ID NO: 251606 - DNA, 20 bp, Artificial Sequence
  Description of Artificial Sequence: Synthetic oligonucleotide
  Target: LAMA2; (-) strand; PAM type: YTN; PAM sequence: CTG
aacgaatccaacacttatgg

SEQ ID NO: 251607 - DNA, 20 bp, Artificial Sequence
  Description of Artificial Sequence: Synthetic oligonucleotide
  Target: LAMA2; (-) strand; PAM type: YTN; PAM sequence: TTG
cagactgaacgaatccaaca

SEQ ID NO: 251608 - DNA, 20 bp, Artificial Sequence
  Description of Artificial Sequence: Synthetic oligonucleotide
  Target: LAMA2; (-) strand; PAM type: YTN; PAM sequence: TTT
gcagactgaacgaatccaac

SEQ ID NO: 251609 - DNA, 20 bp, Artificial Sequence
  Description of Artificial Sequence: Synthetic oligonucleotide
  Target: LAMA2; (-) strand; PAM type: YTN; PAM sequence: CTC
agtaaatatttgcagactga

SEQ ID NO: 251610 - DNA, 20 bp, Artificial Sequence
  Description of Artificial Sequence: Synthetic oligonucleotide
  Target: LAMA2; (-) strand; PAM type: YTN; PAM sequence: TTA
cagagataatcatggaaggt

SEQ ID NO: 251611 - DNA, 20 bp, Artificial Sequence
  Description of Artificial Sequence: Synthetic oligonucleotide
  Target: LAMA2; (-) strand; PAM type: YTN; PAM sequence: TTT
acagagataatcatggaagg

SEQ ID NO: 251612 - DNA, 20 bp, Artificial Sequence
  Description of Artificial Sequence: Synthetic oligonucleotide
  Target: LAMA2; (-) strand; PAM type: YTN; PAM sequence: CTG
agatttacagagataatcat

SEQ ID NO: 251613 - DNA, 20 bp, Artificial Sequence
  Description of Artificial Sequence: Synthetic oligonucleotide
  Target: LAMA2; (-) strand; PAM type: YTN; PAM sequence: TTG
tatacaagaggaactgagat

SEQ ID NO: 251614 - DNA, 20 bp, Artificial Sequence
  Description of Artificial Sequence: Synthetic oligonucleotide
  Target: LAMA2; (-) strand; PAM type: YTN; PAM sequence: CTG
ccattgtatacaagaggaac

SEQ ID NO: 251615 - DNA, 20 bp, Artificial Sequence
  Description of Artificial Sequence: Synthetic oligonucleotide
  Target: LAMA2; (-) strand; PAM type: YTN; PAM sequence: TTC
tgccattgtatacaagagga

SEQ ID NO: 251616 - DNA, 20 bp, Artificial Sequence
  Description of Artificial Sequence: Synthetic oligonucleotide
  Target: LAMA2; (-) strand; PAM type: YTN; PAM sequence: TTT
ctgccattgtatacaagagg

SEQ ID NO: 251617 - DNA, 20 bp, Artificial Sequence
  Description of Artificial Sequence: Synthetic oligonucleotide
  Target: LAMA2; (-) strand; PAM type: YTN; PAM sequence: TTG
tttctgccattgtatacaag

SEQ ID NO: 251618 - DNA, 20 bp, Artificial Sequence
  Description of Artificial Sequence: Synthetic oligonucleotide
  Target: LAMA2; (-) strand; PAM type: YTN; PAM sequence: TTA
gacattgtttctgccattgt

SEQ ID NO: 251619 - DNA, 20 bp, Artificial Sequence
  Description of Artificial Sequence: Synthetic oligonucleotide
  Target: LAMA2; (-) strand; PAM type: YTN; PAM sequence: TTT
agacattgtttctgccattg

SEQ ID NO: 251620 - DNA, 20 bp, Artificial Sequence
  Description of Artificial Sequence: Synthetic oligonucleotide
  Target: LAMA2; (-) strand; PAM type: YTN; PAM sequence: TTG
aaatttagacattgtttctg

SEQ ID NO: 251621 - DNA, 20 bp, Artificial Sequence
  Description of Artificial Sequence: Synthetic oligonucleotide
  Target: LAMA2; (-) strand; PAM type: YTN; PAM sequence: TTG
ccaattgaaatttagacatt

SEQ ID NO: 251622 - DNA, 20 bp, Artificial Sequence
  Description of Artificial Sequence: Synthetic oligonucleotide
  Target: LAMA2; (-) strand; PAM type: YTN; PAM sequence: TTA
attgccaattgaaatttaga

SEQ ID NO: 251623 - DNA, 20 bp, Artificial Sequence
  Description of Artificial Sequence: Synthetic oligonucleotide
  Target: LAMA2; (-) strand; PAM type: YTN; PAM sequence: CTT
aattgccaattgaaatttag

SEQ ID NO: 251624 - DNA, 20 bp, Artificial Sequence
  Description of Artificial Sequence: Synthetic oligonucleotide
  Target: LAMA2; (-) strand; PAM type: YTN; PAM sequence: TTC
acttaattgccaattgaaat

SEQ ID NO: 251625 - DNA, 20 bp, Artificial Sequence
  Description of Artificial Sequence: Synthetic oligonucleotide
  Target: LAMA2; (-) strand; PAM type: YTN; PAM sequence: TTT
cacttaattgccaattgaaa

SEQ ID NO: 251626 - DNA, 20 bp, Artificial Sequence
  Description of Artificial Sequence: Synthetic oligonucleotide
  Target: LAMA2; (-) strand; PAM type: YTN; PAM sequence: TTT
tcacttaattgccaattgaa

SEQ ID NO: 251627 - DNA, 20 bp, Artificial Sequence
  Description of Artificial Sequence: Synthetic oligonucleotide
  Target: LAMA2; (-) strand; PAM type: YTN; PAM sequence: TTA
tgttttcacttaattgccaa

SEQ ID NO: 251628 - DNA, 20 bp, Artificial Sequence
  Description of Artificial Sequence: Synthetic oligonucleotide
  Target: LAMA2; (-) strand; PAM type: YTN; PAM sequence: TTA
acatacattatgttttcact

SEQ ID NO: 251629 - DNA, 20 bp, Artificial Sequence
  Description of Artificial Sequence: Synthetic oligonucleotide
  Target: LAMA2; (-) strand; PAM type: YTN; PAM sequence: CTT
aacatacattatgttttcac

SEQ ID NO: 251630 - DNA, 20 bp, Artificial Sequence
  Description of Artificial Sequence: Synthetic oligonucleotide
  Target: LAMA2; (-) strand; PAM type: YTN; PAM sequence: TTC
aggtgcttaacatacattat

SEQ ID NO: 251631 - DNA, 20 bp, Artificial Sequence
  Description of Artificial Sequence: Synthetic oligonucleotide
  Target: LAMA2; (-) strand; PAM type: YTN; PAM sequence: TTT
caggtgcttaacatacatta

SEQ ID NO: 251632 - DNA, 20 bp, Artificial Sequence
  Description of Artificial Sequence: Synthetic oligonucleotide
  Target: LAMA2; (-) strand; PAM type: YTN; PAM sequence: CTA
tttcaggtgcttaacataca

SEQ ID NO: 251633 - DNA, 20 bp, Artificial Sequence
  Description of Artificial Sequence: Synthetic oligonucleotide
  Target: LAMA2; (-) strand; PAM type: YTN; PAM sequence: TTA
gatactatttcaggtgctta

SEQ ID NO: 251634 - DNA, 20 bp, Artificial Sequence
  Description of Artificial Sequence: Synthetic oligonucleotide
  Target: LAMA2; (-) strand; PAM type: YTN; PAM sequence: CTC
ccaacatatgttagatacta

SEQ ID NO: 251635 - DNA, 20 bp, Artificial Sequence
  Description of Artificial Sequence: Synthetic oligonucleotide
  Target: LAMA2; (-) strand; PAM type: YTN; PAM sequence: TTG
cctcccaacatatgttagat

SEQ ID NO: 251636 - DNA, 20 bp, Artificial Sequence
  Description of Artificial Sequence: Synthetic oligonucleotide
  Target: LAMA2; (-) strand; PAM type: YTN; PAM sequence: CTG
cattgcctcccaacatatgt

SEQ ID NO: 251637 - DNA, 20 bp, Artificial Sequence
  Description of Artificial Sequence: Synthetic oligonucleotide
  Target: LAMA2; (-) strand; PAM type: YTN; PAM sequence: TTA
ccctgcattgcctcccaaca

SEQ ID NO: 251638 - DNA, 20 bp, Artificial Sequence
  Description of Artificial Sequence: Synthetic oligonucleotide
  Target: LAMA2; (-) strand; PAM type: YTN; PAM sequence: TTG
ttaccctgcattgcctccca

SEQ ID NO: 251639 - DNA, 20 bp, Artificial Sequence
  Description of Artificial Sequence: Synthetic oligonucleotide
  Target: LAMA2; (-) strand; PAM type: YTN; PAM sequence: CTT
gttaccctgcattgcctccc

SEQ ID NO: 251640 - DNA, 20 bp, Artificial Sequence
  Description of Artificial Sequence: Synthetic oligonucleotide
  Target: LAMA2; (-) strand; PAM type: YTN; PAM sequence: CTC
cttgttaccctgcattgcct

SEQ ID NO: 251641 - DNA, 20 bp, Artificial Sequence
  Description of Artificial Sequence: Synthetic oligonucleotide
  Target: LAMA2; (-) strand; PAM type: YTN; PAM sequence: CTC
caaaaccaaagatctccttg

SEQ ID NO: 251642 - DNA, 20 bp, Artificial Sequence
  Description of Artificial Sequence: Synthetic oligonucleotide
  Target: LAMA2; (-) strand; PAM type: YTN; PAM sequence: TTC
aaacccaagcatgactccaa

SEQ ID NO: 251643 - DNA, 20 bp, Artificial Sequence
  Description of Artificial Sequence: Synthetic oligonucleotide
  Target: LAMA2; (-) strand; PAM type: YTN; PAM sequence: TTA
gcaaagggtgcagcatagat

SEQ ID NO: 251644 - DNA, 20 bp, Artificial Sequence
  Description of Artificial Sequence: Synthetic oligonucleotide
  Target: LAMA2; (-) strand; PAM type: YTN; PAM sequence: TTG
tccaacataataccattagc

SEQ ID NO: 251645 - DNA, 20 bp, Artificial Sequence
  Description of Artificial Sequence: Synthetic oligonucleotide
  Target: LAMA2; (-) strand; PAM type: YTN; PAM sequence: CTT
gtccaacataataccattag

SEQ ID NO: 251646 - DNA, 20 bp, Artificial Sequence
  Description of Artificial Sequence: Synthetic oligonucleotide
  Target: LAMA2; (-) strand; PAM type: YTN; PAM sequence: CTC
agaggagtaaagagccttgt

SEQ ID NO: 251647 - DNA, 20 bp, Artificial Sequence
  Description of Artificial Sequence: Synthetic oligonucleotide
  Target: LAMA2; (-) strand; PAM type: YTN; PAM sequence: CTG
aggctcagaggagtaaagag

SEQ ID NO: 251648 - DNA, 20 bp, Artificial Sequence
  Description of Artificial Sequence: Synthetic oligonucleotide
  Target: LAMA2; (-) strand; PAM type: YTN; PAM sequence: TTA
caaatgaagaatctgaggct

SEQ ID NO: 251649 - DNA, 20 bp, Artificial Sequence
  Description of Artificial Sequence: Synthetic oligonucleotide
  Target: LAMA2; (-) strand; PAM type: YTN; PAM sequence: TTT
acaaatgaagaatctgaggc

SEQ ID NO: 251650 - DNA, 20 bp, Artificial Sequence
  Description of Artificial Sequence: Synthetic oligonucleotide
  Target: LAMA2; (-) strand; PAM type: YTN; PAM sequence: TTC
acatttacaaatgaagaatc

SEQ ID NO: 251651 - DNA, 20 bp, Artificial Sequence
  Description of Artificial Sequence: Synthetic oligonucleotide
  Target: LAMA2; (-) strand; PAM type: YTN; PAM sequence: CTA
ttcacatttacaaatgaaga

SEQ ID NO: 251652 - DNA, 20 bp, Artificial Sequence
  Description of Artificial Sequence: Synthetic oligonucleotide
  Target: LAMA2; (-) strand; PAM type: YTN; PAM sequence: TTA
agtatcaataaacaatgtaa

SEQ ID NO: 251653 - DNA, 20 bp, Artificial Sequence
  Description of Artificial Sequence: Synthetic oligonucleotide
  Target: LAMA2; (-) strand; PAM type: YTN; PAM sequence: TTT
aagtatcaataaacaatgta

SEQ ID NO: 251654 - DNA, 20 bp, Artificial Sequence
  Description of Artificial Sequence: Synthetic oligonucleotide
  Target: LAMA2; (-) strand; PAM type: YTN; PAM sequence: TTC
atttaagtatcaataaacaa

SEQ ID NO: 251655 - DNA, 20 bp, Artificial Sequence
  Description of Artificial Sequence: Synthetic oligonucleotide
  Target: LAMA2; (-) strand; PAM type: YTN; PAM sequence: TTT
catttaagtatcaataaaca

SEQ ID NO: 251656 - DNA, 20 bp, Artificial Sequence
  Description of Artificial Sequence: Synthetic oligonucleotide
  Target: LAMA2; (-) strand; PAM type: YTN; PAM sequence: CTG
gaaagacatttcatttaagt

SEQ ID NO: 251657 - DNA, 20 bp, Artificial Sequence
  Description of Artificial Sequence: Synthetic oligonucleotide
  Target: LAMA2; (-) strand; PAM type: YTN; PAM sequence: CTA
tgatacaggctggaaagaca

SEQ ID NO: 251658 - DNA, 20 bp, Artificial Sequence
  Description of Artificial Sequence: Synthetic oligonucleotide
  Target: LAMA2; (-) strand; PAM type: YTN; PAM sequence: CTG
tgtactatgatacaggctgg

SEQ ID NO: 251659 - DNA, 20 bp, Artificial Sequence
  Description of Artificial Sequence: Synthetic oligonucleotide
  Target: LAMA2; (-) strand; PAM type: YTN; PAM sequence: TTC
tgtgtactatgatacaggct

SEQ ID NO: 251660 - DNA, 20 bp, Artificial Sequence
  Description of Artificial Sequence: Synthetic oligonucleotide
  Target: LAMA2; (-) strand; PAM type: YTN; PAM sequence: TTT
ctgtgtactatgatacaggc

SEQ ID NO: 251661 - DNA, 20 bp, Artificial Sequence
  Description of Artificial Sequence: Synthetic oligonucleotide
  Target: LAMA2; (-) strand; PAM type: YTN; PAM sequence: TTT
tctgtgtactatgatacagg

SEQ ID NO: 251662 - DNA, 20 bp, Artificial Sequence
  Description of Artificial Sequence: Synthetic oligonucleotide
  Target: LAMA2; (-) strand; PAM type: YTN; PAM sequence: CTA
ttttctgtgtactatgatac

SEQ ID NO: 251663 - DNA, 20 bp, Artificial Sequence
  Description of Artificial Sequence: Synthetic oligonucleotide
  Target: LAMA2; (-) strand; PAM type: YTN; PAM sequence: CTA
ctattttctgtgtactatga

SEQ ID NO: 251664 - DNA, 20 bp, Artificial Sequence
  Description of Artificial Sequence: Synthetic oligonucleotide
  Target: LAMA2; (-) strand; PAM type: YTN; PAM sequence: CTG
tctactattttctgtgtact

SEQ ID NO: 251665 - DNA, 20 bp, Artificial Sequence
  Description of Artificial Sequence: Synthetic oligonucleotide
  Target: LAMA2; (-) strand; PAM type: YTN; PAM sequence: TTA
ctgtctactattttctgtgt

SEQ ID NO: 251666 - DNA, 20 bp, Artificial Sequence
  Description of Artificial Sequence: Synthetic oligonucleotide
  Target: LAMA2; (-) strand; PAM type: YTN; PAM sequence: CTT
actgtctactattttctgtg

SEQ ID NO: 251667 - DNA, 20 bp, Artificial Sequence
  Description of Artificial Sequence: Synthetic oligonucleotide
  Target: LAMA2; (-) strand; PAM type: YTN; PAM sequence: CTA
cttactgtctactattttct

SEQ ID NO: 251668 - DNA, 20 bp, Artificial Sequence
  Description of Artificial Sequence: Synthetic oligonucleotide
  Target: LAMA2; (-) strand; PAM type: YTN; PAM sequence: TTA
ctacttactgtctactattt

SEQ ID NO: 251669 - DNA, 20 bp, Artificial Sequence
  Description of Artificial Sequence: Synthetic oligonucleotide
  Target: LAMA2; (-) strand; PAM type: YTN; PAM sequence: TTA
atagttactacttactgtct

SEQ ID NO: 251670 - DNA, 20 bp, Artificial Sequence
  Description of Artificial Sequence: Synthetic oligonucleotide
  Target: LAMA2; (-) strand; PAM type: YTN; PAM sequence: TTT
aatagttactacttactgtc

SEQ ID NO: 251671 - DNA, 20 bp, Artificial Sequence
  Description of Artificial Sequence: Synthetic oligonucleotide
  Target: LAMA2; (-) strand; PAM type: YTN; PAM sequence: TTT
taatagttactacttactgt

SEQ ID NO: 251672 - DNA, 20 bp, Artificial Sequence
  Description of Artificial Sequence: Synthetic oligonucleotide
  Target: LAMA2; (-) strand; PAM type: YTN; PAM sequence: TTT
ttaatagttactacttactg

SEQ ID NO: 251673 - DNA, 20 bp, Artificial Sequence
  Description of Artificial Sequence: Synthetic oligonucleotide
  Target: LAMA2; (-) strand; PAM type: YTN; PAM sequence: CTT
tttaatagttactacttact

SEQ ID NO: 251674 - DNA, 20 bp, Artificial Sequence
  Description of Artificial Sequence: Synthetic oligonucleotide
  Target: LAMA2; (-) strand; PAM type: YTN; PAM sequence: CTG
ctttttaatagttactactt

SEQ ID NO: 251675 - DNA, 20 bp, Artificial Sequence
  Description of Artificial Sequence: Synthetic oligonucleotide
  Target: LAMA2; (-) strand; PAM type: YTN; PAM sequence: CTA
gaatgactgctttttaatag

SEQ ID NO: 251676 - DNA, 20 bp, Artificial Sequence
  Description of Artificial Sequence: Synthetic oligonucleotide
  Target: LAMA2; (-) strand; PAM type: YTN; PAM sequence: CTA
gcctagaatgactgcttttt

SEQ ID NO: 251677 - DNA, 20 bp, Artificial Sequence
  Description of Artificial Sequence: Synthetic oligonucleotide
  Target: LAMA2; (-) strand; PAM type: YTN; PAM sequence: TTA
tagcctagcctagaatgact

SEQ ID NO: 251678 - DNA, 20 bp, Artificial Sequence
  Description of Artificial Sequence: Synthetic oligonucleotide
  Target: LAMA2; (-) strand; PAM type: YTN; PAM sequence: CTT
atagcctagcctagaatgac

SEQ ID NO: 251679 - DNA, 20 bp, Artificial Sequence
  Description of Artificial Sequence: Synthetic oligonucleotide
  Target: LAMA2; (-) strand; PAM type: YTN; PAM sequence: TTG
tatccttatagcctagccta

SEQ ID NO: 251680 - DNA, 20 bp, Artificial Sequence
  Description of Artificial Sequence: Synthetic oligonucleotide
  Target: LAMA2; (-) strand; PAM type: YTN; PAM sequence: TTT
gtatccttatagcctagcct

SEQ ID NO: 251681 - DNA, 20 bp, Artificial Sequence
  Description of Artificial Sequence: Synthetic oligonucleotide
  Target: LAMA2; (-) strand; PAM type: YTN; PAM sequence: CTT
tgtatccttatagcctagcc

SEQ ID NO: 251682 - DNA, 20 bp, Artificial Sequence
  Description of Artificial Sequence: Synthetic oligonucleotide
  Target: LAMA2; (-) strand; PAM type: YTN; PAM sequence: TTG
tccacctttgtatccttata

SEQ ID NO: 251683 - DNA, 20 bp, Artificial Sequence
  Description of Artificial Sequence: Synthetic oligonucleotide
  Target: LAMA2; (-) strand; PAM type: YTN; PAM sequence: TTT
gtccacctttgtatccttat

SEQ ID NO: 251684 - DNA, 20 bp, Artificial Sequence
  Description of Artificial Sequence: Synthetic oligonucleotide
  Target: LAMA2; (-) strand; PAM type: YTN; PAM sequence: CTG
aatgatcatttgtccacctt

SEQ ID NO: 251685 - DNA, 20 bp, Artificial Sequence
  Description of Artificial Sequence: Synthetic oligonucleotide
  Target: LAMA2; (-) strand; PAM type: YTN; PAM sequence: TTG
aactgaatgatcatttgtcc

SEQ ID NO: 251686 - DNA, 20 bp, Artificial Sequence
  Description of Artificial Sequence: Synthetic oligonucleotide
  Target: LAMA2; (-) strand; PAM type: YTN; PAM sequence: TTT
gaactgaatgatcatttgtc

SEQ ID NO: 251687 - DNA, 20 bp, Artificial Sequence
  Description of Artificial Sequence: Synthetic oligonucleotide
  Target: LAMA2; (-) strand; PAM type: YTN; PAM sequence: CTT
tgaactgaatgatcatttgt

SEQ ID NO: 251688 - DNA, 20 bp, Artificial Sequence
  Description of Artificial Sequence: Synthetic oligonucleotide
  Target: LAMA2; (-) strand; PAM type: YTN; PAM sequence: TTC
tttgaactgaatgatcattt

SEQ ID NO: 251689 - DNA, 20 bp, Artificial Sequence
  Description of Artificial Sequence: Synthetic oligonucleotide
  Target: LAMA2; (-) strand; PAM type: YTN; PAM sequence: CTT
ctttgaactgaatgatcatt

SEQ ID NO: 251690 - DNA, 20 bp, Artificial Sequence
  Description of Artificial Sequence: Synthetic oligonucleotide
  Target: LAMA2; (-) strand; PAM type: YTN; PAM sequence: CTG
tacaatgccttctttgaact

SEQ ID NO: 251691 - DNA, 20 bp, Artificial Sequence
  Description of Artificial Sequence: Synthetic oligonucleotide
  Target: LAMA2; (-) strand; PAM type: YTN; PAM sequence: CTA
ctgtacaatgccttctttga

SEQ ID NO: 251692 - DNA, 20 bp, Artificial Sequence
  Description of Artificial Sequence: Synthetic oligonucleotide
  Target: LAMA2; (-) strand; PAM type: YTN; PAM sequence: CTC
tactgtacaatgccttcttt

SEQ ID NO: 251693 - DNA, 20 bp, Artificial Sequence
  Description of Artificial Sequence: Synthetic oligonucleotide
  Target: LAMA2; (-) strand; PAM type: YTN; PAM sequence: TTC
tctactgtacaatgccttct

SEQ ID NO: 251694 - DNA, 20 bp, Artificial Sequence
  Description of Artificial Sequence: Synthetic oligonucleotide
  Target: LAMA2; (-) strand; PAM type: YTN; PAM sequence: CTT
ctctactgtacaatgccttc

SEQ ID NO: 251695 - DNA, 20 bp, Artificial Sequence
  Description of Artificial Sequence: Synthetic oligonucleotide
  Target: LAMA2; (-) strand; PAM type: YTN; PAM sequence: CTG
tcttctctactgtacaatgc

SEQ ID NO: 251696 - DNA, 20 bp, Artificial Sequence
  Description of Artificial Sequence: Synthetic oligonucleotide
  Target: LAMA2; (-) strand; PAM type: YTN; PAM sequence: TTA
tcataaatgtacagtatgta

SEQ ID NO: 251697 - DNA, 20 bp, Artificial Sequence
  Description of Artificial Sequence: Synthetic oligonucleotide
  Target: LAMA2; (-) strand; PAM type: YTN; PAM sequence: TTA
tattatcataaatgtacagt

SEQ ID NO: 251698 - DNA, 20 bp, Artificial Sequence
  Description of Artificial Sequence: Synthetic oligonucleotide
  Target: LAMA2; (-) strand; PAM type: YTN; PAM sequence: TTT
atattatcataaatgtacag

SEQ ID NO: 251699 - DNA, 20 bp, Artificial Sequence
  Description of Artificial Sequence: Synthetic oligonucleotide
  Target: LAMA2; (-) strand; PAM type: YTN; PAM sequence: CTA
tttatattatcataaatgta

SEQ ID NO: 251700 - DNA, 20 bp, Artificial Sequence
  Description of Artificial Sequence: Synthetic oligonucleotide
  Target: LAMA2; (-) strand; PAM type: YTN; PAM sequence: CTG
cactatttatattatcataa

SEQ ID NO: 251701 - DNA, 20 bp, Artificial Sequence
  Description of Artificial Sequence: Synthetic oligonucleotide
  Target: LAMA2; (-) strand; PAM type: YTN; PAM sequence: TTC
tgcactatttatattatcat

SEQ ID NO: 251702 - DNA, 20 bp, Artificial Sequence
  Description of Artificial Sequence: Synthetic oligonucleotide
  Target: LAMA2; (-) strand; PAM type: YTN; PAM sequence: CTT
ctgcactatttatattatca

SEQ ID NO: 251703 - DNA, 20 bp, Artificial Sequence
  Description of Artificial Sequence: Synthetic oligonucleotide
  Target: LAMA2; (-) strand; PAM type: YTN; PAM sequence: TTC
ttctgcactatttatattat

SEQ ID NO: 251704 - DNA, 20 bp, Artificial Sequence
  Description of Artificial Sequence: Synthetic oligonucleotide
  Target: LAMA2; (-) strand; PAM type: YTN; PAM sequence: CTT
cttctgcactatttatatta

SEQ ID NO: 251705 - DNA, 20 bp, Artificial Sequence
  Description of Artificial Sequence: Synthetic oligonucleotide
  Target: LAMA2; (-) strand; PAM type: YTN; PAM sequence: TTG
tgcacacttcttctgcacta

SEQ ID NO: 251706 - DNA, 20 bp, Artificial Sequence
  Description of Artificial Sequence: Synthetic oligonucleotide
  Target: LAMA2; (-) strand; PAM type: YTN; PAM sequence: TTA
tatgcattgtgcacacttct

SEQ ID NO: 251707 - DNA, 20 bp, Artificial Sequence
  Description of Artificial Sequence: Synthetic oligonucleotide
  Target: LAMA2; (-) strand; PAM type: YTN; PAM sequence: TTT
atatgcattgtgcacacttc

SEQ ID NO: 251708 - DNA, 20 bp, Artificial Sequence
  Description of Artificial Sequence: Synthetic oligonucleotide
  Target: LAMA2; (-) strand; PAM type: YTN; PAM sequence: CTA
tttatatgcattgtgcacac

SEQ ID NO: 251709 - DNA, 20 bp, Artificial Sequence
  Description of Artificial Sequence: Synthetic oligonucleotide
  Target: LAMA2; (-) strand; PAM type: YTN; PAM sequence: CTG
cactatttatatgcattgtg

SEQ ID NO: 251710 - DNA, 20 bp, Artificial Sequence
  Description of Artificial Sequence: Synthetic oligonucleotide
  Target: LAMA2; (-) strand; PAM type: YTN; PAM sequence: TTC
tgcactatttatatgcattg

SEQ ID NO: 251711 - DNA, 20 bp, Artificial Sequence
  Description of Artificial Sequence: Synthetic oligonucleotide
  Target: LAMA2; (-) strand; PAM type: YTN; PAM sequence: CTT
ctgcactatttatatgcatt

SEQ ID NO: 251712 - DNA, 20 bp, Artificial Sequence
  Description of Artificial Sequence: Synthetic oligonucleotide
  Target: LAMA2; (-) strand; PAM type: YTN; PAM sequence: TTC
ttctgcactatttatatgca

SEQ ID NO: 251713 - DNA, 20 bp, Artificial Sequence
  Description of Artificial Sequence: Synthetic oligonucleotide
  Target: LAMA2; (-) strand; PAM type: YTN; PAM sequence: CTT
cttctgcactatttatatgc

SEQ ID NO: 251714 - DNA, 20 bp, Artificial Sequence
  Description of Artificial Sequence: Synthetic oligonucleotide
  Target: LAMA2; (-) strand; PAM type: YTN; PAM sequence: CTG
cgcacacttcttctgcacta

SEQ ID NO: 251715 - DNA, 20 bp, Artificial Sequence
  Description of Artificial Sequence: Synthetic oligonucleotide
  Target: LAMA2; (-) strand; PAM type: YTN; PAM sequence: CTA
ccagtatgcactgcgcacac

SEQ ID NO: 251716 - DNA, 20 bp, Artificial Sequence
  Description of Artificial Sequence: Synthetic oligonucleotide
  Target: LAMA2; (-) strand; PAM type: YTN; PAM sequence: TTC
taccagtatgcactgcgcac

SEQ ID NO: 251717 - DNA, 20 bp, Artificial Sequence
  Description of Artificial Sequence: Synthetic oligonucleotide
  Target: LAMA2; (-) strand; PAM type: YTN; PAM sequence: TTA
gttctaccagtatgcactgc

SEQ ID NO: 251718 - DNA, 20 bp, Artificial Sequence
  Description of Artificial Sequence: Synthetic oligonucleotide
  Target: LAMA2; (-) strand; PAM type: YTN; PAM sequence: CTT
agttctaccagtatgcactg

SEQ ID NO: 251719 - DNA, 20 bp, Artificial Sequence
  Description of Artificial Sequence: Synthetic oligonucleotide
  Target: LAMA2; (-) strand; PAM type: YTN; PAM sequence: TTC
ttagttctaccagtatgcac

SEQ ID NO: 251720 - DNA, 20 bp, Artificial Sequence
  Description of Artificial Sequence: Synthetic oligonucleotide
  Target: LAMA2; (-) strand; PAM type: YTN; PAM sequence: CTT
cttagttctaccagtatgca

SEQ ID NO: 251721 - DNA, 20 bp, Artificial Sequence
  Description of Artificial Sequence: Synthetic oligonucleotide
  Target: LAMA2; (-) strand; PAM type: YTN; PAM sequence: TTC
cttcttagttctaccagtat

SEQ ID NO: 251722 - DNA, 20 bp, Artificial Sequence
  Description of Artificial Sequence: Synthetic oligonucleotide
  Target: LAMA2; (-) strand; PAM type: YTN; PAM sequence: CTT
ccttcttagttctaccagta

SEQ ID NO: 251723 - DNA, 20 bp, Artificial Sequence
  Description of Artificial Sequence: Synthetic oligonucleotide
  Target: LAMA2; (-) strand; PAM type: YTN; PAM sequence: TTG
cttccttcttagttctacca

SEQ ID NO: 251724 - DNA, 20 bp, Artificial Sequence
  Description of Artificial Sequence: Synthetic oligonucleotide
  Target: LAMA2; (-) strand; PAM type: YTN; PAM sequence: TTC
attgcttccttcttagttct

SEQ ID NO: 251725 - DNA, 20 bp, Artificial Sequence
  Description of Artificial Sequence: Synthetic oligonucleotide
  Target: LAMA2; (-) strand; PAM type: YTN; PAM sequence: CTA
acacaagaattcattgcttc

SEQ ID NO: 251726 - DNA, 20 bp, Artificial Sequence
  Description of Artificial Sequence: Synthetic oligonucleotide
  Target: LAMA2; (-) strand; PAM type: YTN; PAM sequence: TTA
aatgctaacacaagaattca

SEQ ID NO: 251727 - DNA, 20 bp, Artificial Sequence
  Description of Artificial Sequence: Synthetic oligonucleotide
  Target: LAMA2; (-) strand; PAM type: YTN; PAM sequence: TTA
aaagtgtattaaatgctaac

SEQ ID NO: 251728 - DNA, 20 bp, Artificial Sequence
  Description of Artificial Sequence: Synthetic oligonucleotide
  Target: LAMA2; (-) strand; PAM type: YTN; PAM sequence: TTA
ttaaaagtgtattaaatgct

SEQ ID NO: 251729 - DNA, 20 bp, Artificial Sequence
  Description of Artificial Sequence: Synthetic oligonucleotide
  Target: LAMA2; (-) strand; PAM type: YTN; PAM sequence: TTT
attaaaagtgtattaaatgc

SEQ ID NO: 251730 - DNA, 20 bp, Artificial Sequence
  Description of Artificial Sequence: Synthetic oligonucleotide
  Target: LAMA2; (-) strand; PAM type: YTN; PAM sequence: CTA
tttattaaaagtgtattaaa

SEQ ID NO: 251731 - DNA, 20 bp, Artificial Sequence
  Description of Artificial Sequence: Synthetic oligonucleotide
  Target: LAMA2; (-) strand; PAM type: YTN; PAM sequence: TTG
cagctatttattaaaagtgt

SEQ ID NO: 251732 - DNA, 20 bp, Artificial Sequence
  Description of Artificial Sequence: Synthetic oligonucleotide
  Target: LAMA2; (-) strand; PAM type: YTN; PAM sequence: TTT
gcagctatttattaaaagtg

SEQ ID NO: 251733 - DNA, 20 bp, Artificial Sequence
  Description of Artificial Sequence: Synthetic oligonucleotide
  Target: LAMA2; (-) strand; PAM type: YTN; PAM sequence: TTT
tgcagctatttattaaaagt

SEQ ID NO: 251734 - DNA, 20 bp, Artificial Sequence
  Description of Artificial Sequence: Synthetic oligonucleotide
  Target: LAMA2; (-) strand; PAM type: YTN; PAM sequence: CTT
ttgcagctatttattaaaag

SEQ ID NO: 251735 - DNA, 20 bp, Artificial Sequence
  Description of Artificial Sequence: Synthetic oligonucleotide
  Target: LAMA2; (-) strand; PAM type: YTN; PAM sequence: CTG
atacttttgcagctatttat

SEQ ID NO: 251736 - DNA, 20 bp, Artificial Sequence
  Description of Artificial Sequence: Synthetic oligonucleotide
  Target: LAMA2; (-) strand; PAM type: YTN; PAM sequence: CTG
acagaaactgatacttttgc

SEQ ID NO: 251737 - DNA, 20 bp, Artificial Sequence
  Description of Artificial Sequence: Synthetic oligonucleotide
  Target: LAMA2; (-) strand; PAM type: YTN; PAM sequence: TTC
aatcccacatcgagtaagag

SEQ ID NO: 251738 - DNA, 20 bp, Artificial Sequence
  Description of Artificial Sequence: Synthetic oligonucleotide
  Target: LAMA2; (-) strand; PAM type: YTN; PAM sequence: TTT
caatcccacatcgagtaaga

SEQ ID NO: 251739 - DNA, 20 bp, Artificial Sequence
  Description of Artificial Sequence: Synthetic oligonucleotide
  Target: LAMA2; (-) strand; PAM type: YTN; PAM sequence: TTT
tcaatcccacatcgagtaag

SEQ ID NO: 251740 - DNA, 20 bp, Artificial Sequence
  Description of Artificial Sequence: Synthetic oligonucleotide
  Target: LAMA2; (-) strand; PAM type: YTN; PAM sequence: TTA
aacattttcaatcccacatc

SEQ ID NO: 251741 - DNA, 20 bp, Artificial Sequence
  Description of Artificial Sequence: Synthetic oligonucleotide
  Target: LAMA2; (-) strand; PAM type: YTN; PAM sequence: TTT
aaacattttcaatcccacat

SEQ ID NO: 251742 - DNA, 20 bp, Artificial Sequence
  Description of Artificial Sequence: Synthetic oligonucleotide
  Target: LAMA2; (-) strand; PAM type: YTN; PAM sequence: CTT
taaacattttcaatcccaca

SEQ ID NO: 251743 - DNA, 20 bp, Artificial Sequence
  Description of Artificial Sequence: Synthetic oligonucleotide
  Target: LAMA2; (-) strand; PAM type: YTN; PAM sequence: TTC
tttaaacattttcaatccca

SEQ ID NO: 251744 - DNA, 20 bp, Artificial Sequence
  Description of Artificial Sequence: Synthetic oligonucleotide
  Target: LAMA2; (-) strand; PAM type: YTN; PAM sequence: TTT
ctttaaacattttcaatccc

SEQ ID NO: 251745 - DNA, 20 bp, Artificial Sequence
  Description of Artificial Sequence: Synthetic oligonucleotide
  Target: LAMA2; (-) strand; PAM type: YTN; PAM sequence: TTT
tctttaaacattttcaatcc

SEQ ID NO: 251746 - DNA, 20 bp, Artificial Sequence
  Description of Artificial Sequence: Synthetic oligonucleotide
  Target: LAMA2; (-) strand; PAM type: YTN; PAM sequence: TTA
tatatatatagcaagatatt

SEQ ID NO: 251747 - DNA, 20 bp, Artificial Sequence
  Description of Artificial Sequence: Synthetic oligonucleotide
  Target: LAMA2; (-) strand; PAM type: YTN; PAM sequence: TTT
atatatatatagcaagatat

SEQ ID NO: 251748 - DNA, 20 bp, Artificial Sequence
  Description of Artificial Sequence: Synthetic oligonucleotide
  Target: LAMA2; (-) strand; PAM type: YTN; PAM sequence: TTT
tatatatatatagcaagata

SEQ ID NO: 251749 - DNA, 20 bp, Artificial Sequence
  Description of Artificial Sequence: Synthetic oligonucleotide
  Target: LAMA2; (-) strand; PAM type: YTN; PAM sequence: TTT
ttatatatatatagcaagat

SEQ ID NO: 251750 - DNA, 20 bp, Artificial Sequence
  Description of Artificial Sequence: Synthetic oligonucleotide
  Target: LAMA2; (-) strand; PAM type: YTN; PAM sequence: TTT
tttatatatatatagcaaga

SEQ ID NO: 251751 - DNA, 20 bp, Artificial Sequence
  Description of Artificial Sequence: Synthetic oligonucleotide
  Target: LAMA2; (-) strand; PAM type: YTN; PAM sequence: TTG
ttttttatatatatatagca

SEQ ID NO: 251752 - DNA, 20 bp, Artificial Sequence
  Description of Artificial Sequence: Synthetic oligonucleotide
  Target: LAMA2; (-) strand; PAM type: YTN; PAM sequence: TTT
gttttttatatatatatagc

SEQ ID NO: 251753 - DNA, 20 bp, Artificial Sequence
  Description of Artificial Sequence: Synthetic oligonucleotide
  Target: LAMA2; (-) strand; PAM type: YTN; PAM sequence: CTA
tataatttgttttttatata

SEQ ID NO: 251754 - DNA, 20 bp, Artificial Sequence
  Description of Artificial Sequence: Synthetic oligonucleotide
  Target: LAMA2; (-) strand; PAM type: YTN; PAM sequence: CTA
tatatatatatatatatata

SEQ ID NO: 251755 - DNA, 20 bp, Artificial Sequence
  Description of Artificial Sequence: Synthetic oligonucleotide
  Target: LAMA2; (-) strand; PAM type: YTN; PAM sequence: CTA
cccactatatatatatatat

SEQ ID NO: 251756 - DNA, 20 bp, Artificial Sequence
  Description of Artificial Sequence: Synthetic oligonucleotide
  Target: LAMA2; (-) strand; PAM type: YTN; PAM sequence: TTC
tacccactatatatatatat

SEQ ID NO: 251757 - DNA, 20 bp, Artificial Sequence
  Description of Artificial Sequence: Synthetic oligonucleotide
  Target: LAMA2; (-) strand; PAM type: YTN; PAM sequence: TTT
ctacccactatatatatata

SEQ ID NO: 251758 - DNA, 20 bp, Artificial Sequence
  Description of Artificial Sequence: Synthetic oligonucleotide
  Target: LAMA2; (-) strand; PAM type: YTN; PAM sequence: TTT
tctacccactatatatatat

SEQ ID NO: 251759 - DNA, 20 bp, Artificial Sequence
  Description of Artificial Sequence: Synthetic oligonucleotide
  Target: LAMA2; (-) strand; PAM type: YTN; PAM sequence: TTT
ttctacccactatatatata

SEQ ID NO: 251760 - DNA, 20 bp, Artificial Sequence
  Description of Artificial Sequence: Synthetic oligonucleotide
  Target: LAMA2; (-) strand; PAM type: YTN; PAM sequence: TTT
tttctacccactatatatat

SEQ ID NO: 251761 - DNA, 20 bp, Artificial Sequence
  Description of Artificial Sequence: Synthetic oligonucleotide
  Target: LAMA2; (-) strand; PAM type: YTN; PAM sequence: CTT
ttttctacccactatatata

SEQ ID NO: 251762 - DNA, 20 bp, Artificial Sequence
  Description of Artificial Sequence: Synthetic oligonucleotide
  Target: LAMA2; (-) strand; PAM type: YTN; PAM sequence: TTG
tcttttttctacccactata

SEQ ID NO: 251763 - DNA, 20 bp, Artificial Sequence
  Description of Artificial Sequence: Synthetic oligonucleotide
  Target: LAMA2; (-) strand; PAM type: YTN; PAM sequence: TTA
caattgtcttttttctaccc

SEQ ID NO: 251764 - DNA, 20 bp, Artificial Sequence
  Description of Artificial Sequence: Synthetic oligonucleotide
  Target: LAMA2; (-) strand; PAM type: YTN; PAM sequence: TTG
atgttacaattgtctttttt

SEQ ID NO: 251765 - DNA, 20 bp, Artificial Sequence
  Description of Artificial Sequence: Synthetic oligonucleotide
  Target: LAMA2; (-) strand; PAM type: YTN; PAM sequence: CTT
gatgttacaattgtcttttt

SEQ ID NO: 251766 - DNA, 20 bp, Artificial Sequence
  Description of Artificial Sequence: Synthetic oligonucleotide
  Target: LAMA2; (-) strand; PAM type: YTN; PAM sequence: TTA
aaacaacaaaaatacccttg

SEQ ID NO: 251767 - DNA, 20 bp, Artificial Sequence
  Description of Artificial Sequence: Synthetic oligonucleotide
  Target: LAMA2; (-) strand; PAM type: YTN; PAM sequence: TTT
aaaacaacaaaaataccctt

SEQ ID NO: 251768 - DNA, 20 bp, Artificial Sequence
  Description of Artificial Sequence: Synthetic oligonucleotide
  Target: LAMA2; (-) strand; PAM type: YTN; PAM sequence: CTT
taaaacaacaaaaataccct

SEQ ID NO: 251769 - DNA, 20 bp, Artificial Sequence
  Description of Artificial Sequence: Synthetic oligonucleotide
  Target: LAMA2; (-) strand; PAM type: YTN; PAM sequence: CTA
aaacaaccagcacaaaacat

SEQ ID NO: 251770 - DNA, 20 bp, Artificial Sequence
  Description of Artificial Sequence: Synthetic oligonucleotide
  Target: LAMA2; (-) strand; PAM type: YTN; PAM sequence: TTA
cactaaaacaaccagcacaa

SEQ ID NO: 251771 - DNA, 20 bp, Artificial Sequence
  Description of Artificial Sequence: Synthetic oligonucleotide
  Target: LAMA2; (-) strand; PAM type: YTN; PAM sequence: CTA
tattacactaaaacaaccag

SEQ ID NO: 251772 - DNA, 20 bp, Artificial Sequence
  Description of Artificial Sequence: Synthetic oligonucleotide
  Target: LAMA2; (-) strand; PAM type: YTN; PAM sequence: TTC
ccaccagagtaagatatgct

SEQ ID NO: 251773 - DNA, 20 bp, Artificial Sequence
  Description of Artificial Sequence: Synthetic oligonucleotide
  Target: LAMA2; (-) strand; PAM type: YTN; PAM sequence: TTT
cccaccagagtaagatatgc

SEQ ID NO: 251774 - DNA, 20 bp, Artificial Sequence
  Description of Artificial Sequence: Synthetic oligonucleotide
  Target: LAMA2; (-) strand; PAM type: YTN; PAM sequence: CTA
catttcccaccagagtaaga

SEQ ID NO: 251775 - DNA, 20 bp, Artificial Sequence
  Description of Artificial Sequence: Synthetic oligonucleotide
  Target: LAMA2; (-) strand; PAM type: YTN; PAM sequence: TTA
ctacatttcccaccagagta

SEQ ID NO: 251776 - DNA, 20 bp, Artificial Sequence
  Description of Artificial Sequence: Synthetic oligonucleotide
  Target: LAMA2; (-) strand; PAM type: YTN; PAM sequence: TTT
actacatttcccaccagagt

SEQ ID NO: 251777 - DNA, 20 bp, Artificial Sequence
  Description of Artificial Sequence: Synthetic oligonucleotide
  Target: LAMA2; (-) strand; PAM type: YTN; PAM sequence: TTT
tactacatttcccaccagag

SEQ ID NO: 251778 - DNA, 20 bp, Artificial Sequence
  Description of Artificial Sequence: Synthetic oligonucleotide
  Target: LAMA2; (-) strand; PAM type: YTN; PAM sequence: TTG
ttttactacatttcccacca

SEQ ID NO: 251779 - DNA, 20 bp, Artificial Sequence
  Description of Artificial Sequence: Synthetic oligonucleotide
  Target: LAMA2; (-) strand; PAM type: YTN; PAM sequence: TTT
gttttactacatttcccacc

SEQ ID NO: 251780 - DNA, 20 bp, Artificial Sequence
  Description of Artificial Sequence: Synthetic oligonucleotide
  Target: LAMA2; (-) strand; PAM type: YTN; PAM sequence: TTT
tgttttactacatttcccac

SEQ ID NO: 251781 - DNA, 20 bp, Artificial Sequence
  Description of Artificial Sequence: Synthetic oligonucleotide
  Target: LAMA2; (-) strand; PAM type: YTN; PAM sequence: TTT
ttgttttactacatttccca

SEQ ID NO: 251782 - DNA, 20 bp, Artificial Sequence
  Description of Artificial Sequence: Synthetic oligonucleotide
  Target: LAMA2; (-) strand; PAM type: YTN; PAM sequence: CTC
aatatttttgttttactaca

SEQ ID NO: 251783 - DNA, 20 bp, Artificial Sequence
  Description of Artificial Sequence: Synthetic oligonucleotide
  Target: LAMA2; (-) strand; PAM type: YTN; PAM sequence: TTC
tcaatatttttgttttacta

SEQ ID NO: 251784 - DNA, 20 bp, Artificial Sequence
  Description of Artificial Sequence: Synthetic oligonucleotide
  Target: LAMA2; (-) strand; PAM type: YTN; PAM sequence: TTG
ttctcaatatttttgtttta

SEQ ID NO: 251785 - DNA, 20 bp, Artificial Sequence
  Description of Artificial Sequence: Synthetic oligonucleotide
  Target: LAMA2; (-) strand; PAM type: YTN; PAM sequence: TTA
aagattgttctcaatatttt

SEQ ID NO: 251786 - DNA, 20 bp, Artificial Sequence
  Description of Artificial Sequence: Synthetic oligonucleotide
  Target: LAMA2; (-) strand; PAM type: YTN; PAM sequence: CTT
aaagattgttctcaatattt

SEQ ID NO: 251787 - DNA, 20 bp, Artificial Sequence
  Description of Artificial Sequence: Synthetic oligonucleotide
  Target: LAMA2; (-) strand; PAM type: YTN; PAM sequence: CTG
ccttaaagattgttctcaat

SEQ ID NO: 251788 - DNA, 20 bp, Artificial Sequence
  Description of Artificial Sequence: Synthetic oligonucleotide
  Target: LAMA2; (-) strand; PAM type: YTN; PAM sequence: TTG
gtgctgccttaaagattgtt

SEQ ID NO: 251789 - DNA, 20 bp, Artificial Sequence
  Description of Artificial Sequence: Synthetic oligonucleotide
  Target: LAMA2; (-) strand; PAM type: YTN; PAM sequence: CTT
ggtgctgccttaaagattgt

SEQ ID NO: 251790 - DNA, 20 bp, Artificial Sequence
  Description of Artificial Sequence: Synthetic oligonucleotide
  Target: LAMA2; (-) strand; PAM type: YTN; PAM sequence: TTG
tcttggtgctgccttaaaga

SEQ ID NO: 251791 - DNA, 20 bp, Artificial Sequence
  Description of Artificial Sequence: Synthetic oligonucleotide
  Target: LAMA2; (-) strand; PAM type: YTN; PAM sequence: TTC
agaaacgttgtcttggtgct

SEQ ID NO: 251792 - DNA, 20 bp, Artificial Sequence
  Description of Artificial Sequence: Synthetic oligonucleotide
  Target: LAMA2; (-) strand; PAM type: YTN; PAM sequence: TTT
cagaaacgttgtcttggtgc

SEQ ID NO: 251793 - DNA, 20 bp, Artificial Sequence
  Description of Artificial Sequence: Synthetic oligonucleotide
  Target: LAMA2; (-) strand; PAM type: YTN; PAM sequence: CTA
tttcagaaacgttgtcttgg

SEQ ID NO: 251794 - DNA, 20 bp, Artificial Sequence
  Description of Artificial Sequence: Synthetic oligonucleotide
  Target: LAMA2; (-) strand; PAM type: YTN; PAM sequence: TTG
gaactatttcagaaacgttg

SEQ ID NO: 251795 - DNA, 20 bp, Artificial Sequence
  Description of Artificial Sequence: Synthetic oligonucleotide
  Target: LAMA2; (-) strand; PAM type: YTN; PAM sequence: CTA
tgaataatattggaactatt

SEQ ID NO: 251796 - DNA, 20 bp, Artificial Sequence
  Description of Artificial Sequence: Synthetic oligonucleotide
  Target: LAMA2; (-) strand; PAM type: YTN; PAM sequence: TTA
tacaagccactatgaataat

SEQ ID NO: 251797 - DNA, 20 bp, Artificial Sequence
  Description of Artificial Sequence: Synthetic oligonucleotide
  Target: LAMA2; (-) strand; PAM type: YTN; PAM sequence: TTG
aaaatacagaaaagatgatg

SEQ ID NO: 251798 - DNA, 20 bp, Artificial Sequence
  Description of Artificial Sequence: Synthetic oligonucleotide
  Target: LAMA2; (-) strand; PAM type: YTN; PAM sequence: CTT
gaaaatacagaaaagatgat

SEQ ID NO: 251799 - DNA, 20 bp, Artificial Sequence
  Description of Artificial Sequence: Synthetic oligonucleotide
  Target: LAMA2; (-) strand; PAM type: YTN; PAM sequence: TTA
tgccttgaaaatacagaaaa

SEQ ID NO: 251800 - DNA, 20 bp, Artificial Sequence
  Description of Artificial Sequence: Synthetic oligonucleotide
  Target: LAMA2; (-) strand; PAM type: YTN; PAM sequence: TTT
atgccttgaaaatacagaaa

SEQ ID NO: 251801 - DNA, 20 bp, Artificial Sequence
  Description of Artificial Sequence: Synthetic oligonucleotide
  Target: LAMA2; (-) strand; PAM type: YTN; PAM sequence: TTT
tatgccttgaaaatacagaa

SEQ ID NO: 251802 - DNA, 20 bp, Artificial Sequence
  Description of Artificial Sequence: Synthetic oligonucleotide
  Target: LAMA2; (-) strand; PAM type: YTN; PAM sequence: TTT
ttatgccttgaaaatacaga

SEQ ID NO: 251803 - DNA, 20 bp, Artificial Sequence
  Description of Artificial Sequence: Synthetic oligonucleotide
  Target: LAMA2; (-) strand; PAM type: YTN; PAM sequence: TTA
tttttatgccttgaaaatac

SEQ ID NO: 251804 - DNA, 20 bp, Artificial Sequence
  Description of Artificial Sequence: Synthetic oligonucleotide
  Target: LAMA2; (-) strand; PAM type: YTN; PAM sequence: CTT
atttttatgccttgaaaata

SEQ ID NO: 251805 - DNA, 20 bp, Artificial Sequence
  Description of Artificial Sequence: Synthetic oligonucleotide
  Target: LAMA2; (-) strand; PAM type: YTN; PAM sequence: CTC
ttatttttatgccttgaaaa

SEQ ID NO: 251806 - DNA, 20 bp, Artificial Sequence
  Description of Artificial Sequence: Synthetic oligonucleotide
  Target: LAMA2; (-) strand; PAM type: YTN; PAM sequence: TTC
cctcttatttttatgccttg

SEQ ID NO: 251807 - DNA, 20 bp, Artificial Sequence
  Description of Artificial Sequence: Synthetic oligonucleotide
  Target: LAMA2; (-) strand; PAM type: YTN; PAM sequence: CTT
ccctcttatttttatgcctt

SEQ ID NO: 251808 - DNA, 20 bp, Artificial Sequence
  Description of Artificial Sequence: Synthetic oligonucleotide
  Target: LAMA2; (-) strand; PAM type: YTN; PAM sequence: CTC
ttccctcttatttttatgcc

SEQ ID NO: 251809 - DNA, 20 bp, Artificial Sequence
  Description of Artificial Sequence: Synthetic oligonucleotide
  Target: LAMA2; (-) strand; PAM type: YTN; PAM sequence: CTG
actcttccctcttattttta

SEQ ID NO: 251810 - DNA, 20 bp, Artificial Sequence
  Description of Artificial Sequence: Synthetic oligonucleotide
  Target: LAMA2; (-) strand; PAM type: YTN; PAM sequence: TTA
gctgactcttccctcttatt

SEQ ID NO: 251811 - DNA, 20 bp, Artificial Sequence
  Description of Artificial Sequence: Synthetic oligonucleotide
  Target: LAMA2; (-) strand; PAM type: YTN; PAM sequence: TTT
agctgactcttccctcttat

SEQ ID NO: 251812 - DNA, 20 bp, Artificial Sequence
  Description of Artificial Sequence: Synthetic oligonucleotide
  Target: LAMA2; (-) strand; PAM type: YTN; PAM sequence: CTT
tagctgactcttccctctta

SEQ ID NO: 251813 - DNA, 20 bp, Artificial Sequence
  Description of Artificial Sequence: Synthetic oligonucleotide
  Target: LAMA2; (-) strand; PAM type: YTN; PAM sequence: CTA
agtcaaatgctttagctgac

SEQ ID NO: 251814 - DNA, 20 bp, Artificial Sequence
  Description of Artificial Sequence: Synthetic oligonucleotide
  Target: LAMA2; (-) strand; PAM type: YTN; PAM sequence: TTG
tcaactaagtcaaatgcttt

SEQ ID NO: 251815 - DNA, 20 bp, Artificial Sequence
  Description of Artificial Sequence: Synthetic oligonucleotide
  Target: LAMA2; (-) strand; PAM type: YTN; PAM sequence: CTA
tcaaagaattgtcaactaag

SEQ ID NO: 251816 - DNA, 20 bp, Artificial Sequence
  Description of Artificial Sequence: Synthetic oligonucleotide
  Target: LAMA2; (-) strand; PAM type: YTN; PAM sequence: TTA
gagatgcatgagctatcaaa

SEQ ID NO: 251817 - DNA, 20 bp, Artificial Sequence
  Description of Artificial Sequence: Synthetic oligonucleotide
  Target: LAMA2; (-) strand; PAM type: YTN; PAM sequence: TTT
agagatgcatgagctatcaa

SEQ ID NO: 251818 - DNA, 20 bp, Artificial Sequence
  Description of Artificial Sequence: Synthetic oligonucleotide
  Target: LAMA2; (-) strand; PAM type: YTN; PAM sequence: TTT
tagagatgcatgagctatca

SEQ ID NO: 251819 - DNA, 20 bp, Artificial Sequence
  Description of Artificial Sequence: Synthetic oligonucleotide
  Target: LAMA2; (-) strand; PAM type: YTN; PAM sequence: CTA
aattttagagatgcatgagc

SEQ ID NO: 251820 - DNA, 20 bp, Artificial Sequence
  Description of Artificial Sequence: Synthetic oligonucleotide
  Target: LAMA2; (-) strand; PAM type: YTN; PAM sequence: TTG
gcaataatatagtactaaat

SEQ ID NO: 251821 - DNA, 20 bp, Artificial Sequence
  Description of Artificial Sequence: Synthetic oligonucleotide
  Target: LAMA2; (-) strand; PAM type: YTN; PAM sequence: TTA
aatacataatgttggcaata

SEQ ID NO: 251822 - DNA, 20 bp, Artificial Sequence
  Description of Artificial Sequence: Synthetic oligonucleotide
  Target: LAMA2; (-) strand; PAM type: YTN; PAM sequence: TTT
aaatacataatgttggcaat

SEQ ID NO: 251823 - DNA, 20 bp, Artificial Sequence
  Description of Artificial Sequence: Synthetic oligonucleotide
  Target: LAMA2; (-) strand; PAM type: YTN; PAM sequence: TTC
atttaaatacataatgttgg

SEQ ID NO: 251824 - DNA, 20 bp, Artificial Sequence
  Description of Artificial Sequence: Synthetic oligonucleotide
  Target: LAMA2; (-) strand; PAM type: YTN; PAM sequence: CTG
cattcatttaaatacataat

SEQ ID NO: 251825 - DNA, 20 bp, Artificial Sequence
  Description of Artificial Sequence: Synthetic oligonucleotide
  Target: LAMA2; (-) strand; PAM type: YTN; PAM sequence: TTG
atatcaagctgcattcattt

SEQ ID NO: 251826 - DNA, 20 bp, Artificial Sequence
  Description of Artificial Sequence: Synthetic oligonucleotide
  Target: LAMA2; (-) strand; PAM type: YTN; PAM sequence: CTT
gatatcaagctgcattcatt

SEQ ID NO: 251827 - DNA, 20 bp, Artificial Sequence
  Description of Artificial Sequence: Synthetic oligonucleotide
  Target: LAMA2; (-) strand; PAM type: YTN; PAM sequence: CTC
ttgatatcaagctgcattca

SEQ ID NO: 251828 - DNA, 20 bp, Artificial Sequence
  Description of Artificial Sequence: Synthetic oligonucleotide
  Target: LAMA2; (-) strand; PAM type: YTN; PAM sequence: TTC
tcttgatatcaagctgcatt

SEQ ID NO: 251829 - DNA, 20 bp, Artificial Sequence
  Description of Artificial Sequence: Synthetic oligonucleotide
  Target: LAMA2; (-) strand; PAM type: YTN; PAM sequence: TTC
agtatggtcattctcttgat

SEQ ID NO: 251830 - DNA, 20 bp, Artificial Sequence
  Description of Artificial Sequence: Synthetic oligonucleotide
  Target: LAMA2; (-) strand; PAM type: YTN; PAM sequence: CTT
cagtatggtcattctcttga

SEQ ID NO: 251831 - DNA, 20 bp, Artificial Sequence
  Description of Artificial Sequence: Synthetic oligonucleotide
  Target: LAMA2; (-) strand; PAM type: YTN; PAM sequence: TTC
cccttcagtatggtcattct

SEQ ID NO: 251832 - DNA, 20 bp, Artificial Sequence
  Description of Artificial Sequence: Synthetic oligonucleotide
  Target: LAMA2; (-) strand; PAM type: YTN; PAM sequence: TTT
ccccttcagtatggtcattc

SEQ ID NO: 251833 - DNA, 20 bp, Artificial Sequence
  Description of Artificial Sequence: Synthetic oligonucleotide
  Target: LAMA2; (-) strand; PAM type: YTN; PAM sequence: TTT
tccccttcagtatggtcatt

SEQ ID NO: 251834 - DNA, 20 bp, Artificial Sequence
  Description of Artificial Sequence: Synthetic oligonucleotide
  Target: LAMA2; (-) strand; PAM type: YTN; PAM sequence: TTT
ttccccttcagtatggtcat

SEQ ID NO: 251835 - DNA, 20 bp, Artificial Sequence
  Description of Artificial Sequence: Synthetic oligonucleotide
  Target: LAMA2; (-) strand; PAM type: YTN; PAM sequence: TTT
tttccccttcagtatggtca

SEQ ID NO: 251836 - DNA, 20 bp, Artificial Sequence
  Description of Artificial Sequence: Synthetic oligonucleotide
  Target: LAMA2; (-) strand; PAM type: YTN; PAM sequence: TTT
ttttccccttcagtatggtc

SEQ ID NO: 251837 - DNA, 20 bp, Artificial Sequence
  Description of Artificial Sequence: Synthetic oligonucleotide
  Target: LAMA2; (-) strand; PAM type: YTN; PAM sequence: TTT
tttttccccttcagtatggt

SEQ ID NO: 251838 - DNA, 20 bp, Artificial Sequence
  Description of Artificial Sequence: Synthetic oligonucleotide
  Target: LAMA2; (-) strand; PAM type: YTN; PAM sequence: TTT
ttttttccccttcagtatgg

SEQ ID NO: 251839 - DNA, 20 bp, Artificial Sequence
  Description of Artificial Sequence: Synthetic oligonucleotide
  Target: LAMA2; (-) strand; PAM type: YTN; PAM sequence: TTA
tttttttttccccttcagta

SEQ ID NO: 251840 - DNA, 20 bp, Artificial Sequence
  Description of Artificial Sequence: Synthetic oligonucleotide
  Target: LAMA2; (-) strand; PAM type: YTN; PAM sequence: TTT
atttttttttccccttcagt

SEQ ID NO: 251841 - DNA, 20 bp, Artificial Sequence
  Description of Artificial Sequence: Synthetic oligonucleotide
  Target: LAMA2; (-) strand; PAM type: YTN; PAM sequence: CTG
cagtttatttttttttcccc

SEQ ID NO: 251842 - DNA, 20 bp, Artificial Sequence
  Description of Artificial Sequence: Synthetic oligonucleotide
  Target: LAMA2; (-) strand; PAM type: YTN; PAM sequence: CTC
atgaagaaggctgcagttta

SEQ ID NO: 251843 - DNA, 20 bp, Artificial Sequence
  Description of Artificial Sequence: Synthetic oligonucleotide
  Target: LAMA2; (-) strand; PAM type: YTN; PAM sequence: TTA
ctcatgaagaaggctgcagt

SEQ ID NO: 251844 - DNA, 20 bp, Artificial Sequence
  Description of Artificial Sequence: Synthetic oligonucleotide
  Target: LAMA2; (-) strand; PAM type: YTN; PAM sequence: TTC
aagtgttactcatgaagaag

SEQ ID NO: 251845 - DNA, 20 bp, Artificial Sequence
  Description of Artificial Sequence: Synthetic oligonucleotide
  Target: LAMA2; (-) strand; PAM type: YTN; PAM sequence: TTT
caagtgttactcatgaagaa

SEQ ID NO: 251846 - DNA, 20 bp, Artificial Sequence
  Description of Artificial Sequence: Synthetic oligonucleotide
  Target: LAMA2; (-) strand; PAM type: YTN; PAM sequence: TTA
acagtttcaagtgttactca

SEQ ID NO: 251847 - DNA, 20 bp, Artificial Sequence
  Description of Artificial Sequence: Synthetic oligonucleotide
  Target: LAMA2; (-) strand; PAM type: YTN; PAM sequence: TTT
aacagtttcaagtgttactc

SEQ ID NO: 251848 - DNA, 20 bp, Artificial Sequence
  Description of Artificial Sequence: Synthetic oligonucleotide
  Target: LAMA2; (-) strand; PAM type: YTN; PAM sequence: TTA
atgtgtttaacagtttcaag

SEQ ID NO: 251849 - DNA, 20 bp, Artificial Sequence
  Description of Artificial Sequence: Synthetic oligonucleotide
  Target: LAMA2; (-) strand; PAM type: YTN; PAM sequence: TTT
aatgtgtttaacagtttcaa

SEQ ID NO: 251850 - DNA, 20 bp, Artificial Sequence
  Description of Artificial Sequence: Synthetic oligonucleotide
  Target: LAMA2; (-) strand; PAM type: YTN; PAM sequence: TTT
taatgtgtttaacagtttca

SEQ ID NO: 251851 - DNA, 20 bp, Artificial Sequence
  Description of Artificial Sequence: Synthetic oligonucleotide
  Target: LAMA2; (-) strand; PAM type: YTN; PAM sequence: TTA
aatgggattttaatgtgttt

SEQ ID NO: 251852 - DNA, 20 bp, Artificial Sequence
  Description of Artificial Sequence: Synthetic oligonucleotide
  Target: LAMA2; (-) strand; PAM type: YTN; PAM sequence: TTG
ttaaatgggattttaatgtg

SEQ ID NO: 251853 - DNA, 20 bp, Artificial Sequence
  Description of Artificial Sequence: Synthetic oligonucleotide
  Target: LAMA2; (-) strand; PAM type: YTN; PAM sequence: TTT
gttaaatgggattttaatgt

SEQ ID NO: 251854 - DNA, 20 bp, Artificial Sequence
  Description of Artificial Sequence: Synthetic oligonucleotide
  Target: LAMA2; (-) strand; PAM type: YTN; PAM sequence: CTA
tttgttaaatgggattttaa

SEQ ID NO: 251855 - DNA, 20 bp, Artificial Sequence
  Description of Artificial Sequence: Synthetic oligonucleotide
  Target: LAMA2; (-) strand; PAM type: YTN; PAM sequence: CTG
ctatttgttaaatgggattt

SEQ ID NO: 251856 - DNA, 20 bp, Artificial Sequence
  Description of Artificial Sequence: Synthetic oligonucleotide
  Target: LAMA2; (-) strand; PAM type: YTN; PAM sequence: TTC
tgctatttgttaaatgggat

SEQ ID NO: 251857 - DNA, 20 bp, Artificial Sequence
  Description of Artificial Sequence: Synthetic oligonucleotide
  Target: LAMA2; (-) strand; PAM type: YTN; PAM sequence: TTA
ggttctgctatttgttaaat

SEQ ID NO: 251858 - DNA, 20 bp, Artificial Sequence
  Description of Artificial Sequence: Synthetic oligonucleotide
  Target: LAMA2; (-) strand; PAM type: YTN; PAM sequence: TTC
attaggttctgctatttgtt

SEQ ID NO: 251859 - DNA, 20 bp, Artificial Sequence
  Description of Artificial Sequence: Synthetic oligonucleotide
  Target: LAMA2; (-) strand; PAM type: YTN; PAM sequence: CTG
agcaatcccaatgttcatta

SEQ ID NO: 251860 - DNA, 20 bp, Artificial Sequence
  Description of Artificial Sequence: Synthetic oligonucleotide
  Target: LAMA2; (-) strand; PAM type: YTN; PAM sequence: CTC
actgagcaatcccaatgttc

SEQ ID NO: 251861 - DNA, 20 bp, Artificial Sequence
  Description of Artificial Sequence: Synthetic oligonucleotide
  Target: LAMA2; (-) strand; PAM type: YTN; PAM sequence: TTA
gtactcactgagcaatccca

SEQ ID NO: 251862 - DNA, 20 bp, Artificial Sequence
  Description of Artificial Sequence: Synthetic oligonucleotide
  Target: LAMA2; (-) strand; PAM type: YTN; PAM sequence: TTC
cacattagtactcactgagc

SEQ ID NO: 251863 - DNA, 20 bp, Artificial Sequence
  Description of Artificial Sequence: Synthetic oligonucleotide
  Target: LAMA2; (-) strand; PAM type: YTN; PAM sequence: TTC
ccagtaatattccacattag

SEQ ID NO: 251864 - DNA, 20 bp, Artificial Sequence
  Description of Artificial Sequence: Synthetic oligonucleotide
  Target: LAMA2; (-) strand; PAM type: YTN; PAM sequence: TTT
cccagtaatattccacatta

SEQ ID NO: 251865 - DNA, 20 bp, Artificial Sequence
  Description of Artificial Sequence: Synthetic oligonucleotide
  Target: LAMA2; (-) strand; PAM type: YTN; PAM sequence: CTT
tcccagtaatattccacatt

SEQ ID NO: 251866 - DNA, 20 bp, Artificial Sequence
  Description of Artificial Sequence: Synthetic oligonucleotide
  Target: LAMA2; (-) strand; PAM type: YTN; PAM sequence: CTC
aaacatctttcccagtaata

SEQ ID NO: 251867 - DNA, 20 bp, Artificial Sequence
  Description of Artificial Sequence: Synthetic oligonucleotide
  Target: LAMA2; (-) strand; PAM type: YTN; PAM sequence: TTC
aacactcaaacatctttccc

SEQ ID NO: 251868 - DNA, 20 bp, Artificial Sequence
  Description of Artificial Sequence: Synthetic oligonucleotide
  Target: LAMA2; (-) strand; PAM type: YTN; PAM sequence: CTT
caacactcaaacatctttcc

SEQ ID NO: 251869 - DNA, 20 bp, Artificial Sequence
  Description of Artificial Sequence: Synthetic oligonucleotide
  Target: LAMA2; (-) strand; PAM type: YTN; PAM sequence: CTA
tgagaaacttcaacactcaa

SEQ ID NO: 251870 - DNA, 20 bp, Artificial Sequence
  Description of Artificial Sequence: Synthetic oligonucleotide
  Target: LAMA2; (-) strand; PAM type: YTN; PAM sequence: CTG
agctatgagaaacttcaaca

SEQ ID NO: 251871 - DNA, 20 bp, Artificial Sequence
  Description of Artificial Sequence: Synthetic oligonucleotide
  Target: LAMA2; (-) strand; PAM type: YTN; PAM sequence: TTC
tgagctatgagaaacttcaa

SEQ ID NO: 251872 - DNA, 20 bp, Artificial Sequence
  Description of Artificial Sequence: Synthetic oligonucleotide
  Target: LAMA2; (-) strand; PAM type: YTN; PAM sequence: CTG
tgtaaccattctgagctatg

SEQ ID NO: 251873 - DNA, 20 bp, Artificial Sequence
  Description of Artificial Sequence: Synthetic oligonucleotide
  Target: LAMA2; (-) strand; PAM type: YTN; PAM sequence: TTA
atctgtgtaaccattctgag

SEQ ID NO: 251874 - DNA, 20 bp, Artificial Sequence
  Description of Artificial Sequence: Synthetic oligonucleotide
  Target: LAMA2; (-) strand; PAM type: YTN; PAM sequence: CTT
aatctgtgtaaccattctga

SEQ ID NO: 251875 - DNA, 20 bp, Artificial Sequence
  Description of Artificial Sequence: Synthetic oligonucleotide
  Target: LAMA2; (-) strand; PAM type: YTN; PAM sequence: CTC
cttaatctgtgtaaccattc

SEQ ID NO: 251876 - DNA, 20 bp, Artificial Sequence
  Description of Artificial Sequence: Synthetic oligonucleotide
  Target: LAMA2; (-) strand; PAM type: YTN; PAM sequence: CTC
tccttaatctgtgtaaccat

SEQ ID NO: 251877 - DNA, 20 bp, Artificial Sequence
  Description of Artificial Sequence: Synthetic oligonucleotide
  Target: LAMA2; (-) strand; PAM type: YTN; PAM sequence: TTC
ctctccttaatctgtgtaac

SEQ ID NO: 251878 - DNA, 20 bp, Artificial Sequence
  Description of Artificial Sequence: Synthetic oligonucleotide
  Target: LAMA2; (-) strand; PAM type: YTN; PAM sequence: TTG
aacaacagacattcctctcc

SEQ ID NO: 251879 - DNA, 20 bp, Artificial Sequence
  Description of Artificial Sequence: Synthetic oligonucleotide
  Target: LAMA2; (-) strand; PAM type: YTN; PAM sequence: TTT
gaacaacagacattcctctc

SEQ ID NO: 251880 - DNA, 20 bp, Artificial Sequence
  Description of Artificial Sequence: Synthetic oligonucleotide
  Target: LAMA2; (-) strand; PAM type: YTN; PAM sequence: TTT
tgaacaacagacattcctct

SEQ ID NO: 251881 - DNA, 20 bp, Artificial Sequence
  Description of Artificial Sequence: Synthetic oligonucleotide
  Target: LAMA2; (-) strand; PAM type: YTN; PAM sequence: CTT
ttgaacaacagacattcctc

SEQ ID NO: 251882 - DNA, 20 bp, Artificial Sequence
  Description of Artificial Sequence: Synthetic oligonucleotide
  Target: LAMA2; (-) strand; PAM type: YTN; PAM sequence: TTG
tcttttgaacaacagacatt

SEQ ID NO: 251883 - DNA, 20 bp, Artificial Sequence
  Description of Artificial Sequence: Synthetic oligonucleotide
  Target: LAMA2; (-) strand; PAM type: YTN; PAM sequence: TTT
gtcttttgaacaacagacat

SEQ ID NO: 251884 - DNA, 20 bp, Artificial Sequence
  Description of Artificial Sequence: Synthetic oligonucleotide
  Target: LAMA2; (-) strand; PAM type: YTN; PAM sequence: TTC
atttgtcttttgaacaacag

SEQ ID NO: 251885 - DNA, 20 bp, Artificial Sequence
  Description of Artificial Sequence: Synthetic oligonucleotide
  Target: LAMA2; (-) strand; PAM type: YTN; PAM sequence: TTT
catttgtcttttgaacaaca

SEQ ID NO: 251886 - DNA, 20 bp, Artificial Sequence
  Description of Artificial Sequence: Synthetic oligonucleotide
  Target: LAMA2; (-) strand; PAM type: YTN; PAM sequence: CTG
acaaatttcatttgtctttt

SEQ ID NO: 251887 - DNA, 20 bp, Artificial Sequence
  Description of Artificial Sequence: Synthetic oligonucleotide
  Target: LAMA2; (-) strand; PAM type: YTN; PAM sequence: TTC
agtgaactgacaaatttcat

SEQ ID NO: 251888 - DNA, 20 bp, Artificial Sequence
  Description of Artificial Sequence: Synthetic oligonucleotide
  Target: LAMA2; (-) strand; PAM type: YTN; PAM sequence: TTT
cagtgaactgacaaatttca

SEQ ID NO: 251889 - DNA, 20 bp, Artificial Sequence
  Description of Artificial Sequence: Synthetic oligonucleotide
  Target: LAMA2; (-) strand; PAM type: YTN; PAM sequence: TTT
tcagtgaactgacaaatttc

SEQ ID NO: 251890 - DNA, 20 bp, Artificial Sequence
  Description of Artificial Sequence: Synthetic oligonucleotide
  Target: LAMA2; (-) strand; PAM type: YTN; PAM sequence: TTA
aaaaagatacaaaaacaaaa

SEQ ID NO: 251891 - DNA, 20 bp, Artificial Sequence
  Description of Artificial Sequence: Synthetic oligonucleotide
  Target: LAMA2; (-) strand; PAM type: YTN; PAM sequence: TTT
aaaaaagatacaaaaacaaa

SEQ ID NO: 251892 - DNA, 20 bp, Artificial Sequence
  Description of Artificial Sequence: Synthetic oligonucleotide
  Target: LAMA2; (-) strand; PAM type: YTN; PAM sequence: TTT
taaaaaagatacaaaaacaa

SEQ ID NO: 251893 - DNA, 20 bp, Artificial Sequence
  Description of Artificial Sequence: Synthetic oligonucleotide
  Target: LAMA2; (-) strand; PAM type: YTN; PAM sequence: TTA
agaaacagttttaaaaaaga

SEQ ID NO: 251894 - DNA, 20 bp, Artificial Sequence
  Description of Artificial Sequence: Synthetic oligonucleotide
  Target: LAMA2; (-) strand; PAM type: YTN; PAM sequence: TTT
aagaaacagttttaaaaaag

SEQ ID NO: 251895 - DNA, 20 bp, Artificial Sequence
  Description of Artificial Sequence: Synthetic oligonucleotide
  Target: LAMA2; (-) strand; PAM type: YTN; PAM sequence: CTT
taagaaacagttttaaaaaa

SEQ ID NO: 251896 - DNA, 20 bp, Artificial Sequence
  Description of Artificial Sequence: Synthetic oligonucleotide
  Target: LAMA2; (-) strand; PAM type: YTN; PAM sequence: CTA
ctttaagaaacagttttaaa

SEQ ID NO: 251897 - DNA, 20 bp, Artificial Sequence
  Description of Artificial Sequence: Synthetic oligonucleotide
  Target: LAMA2; (-) strand; PAM type: YTN; PAM sequence: TTG
actactttaagaaacagttt

SEQ ID NO: 251898 - DNA, 20 bp, Artificial Sequence
  Description of Artificial Sequence: Synthetic oligonucleotide
  Target: LAMA2; (-) strand; PAM type: YTN; PAM sequence: TTC
aaaatagaagaatgagcagt

SEQ ID NO: 251899 - DNA, 20 bp, Artificial Sequence
  Description of Artificial Sequence: Synthetic oligonucleotide
  Target: LAMA2; (-) strand; PAM type: YTN; PAM sequence: TTT
caaaatagaagaatgagcag

SEQ ID NO: 251900 - DNA, 20 bp, Artificial Sequence
  Description of Artificial Sequence: Synthetic oligonucleotide
  Target: LAMA2; (-) strand; PAM type: YTN; PAM sequence: CTG
gaaatttcaaaatagaagaa

SEQ ID NO: 251901 - DNA, 20 bp, Artificial Sequence
  Description of Artificial Sequence: Synthetic oligonucleotide
  Target: LAMA2; (-) strand; PAM type: YTN; PAM sequence: TTC
tggaaatttcaaaatagaag

SEQ ID NO: 251902 - DNA, 20 bp, Artificial Sequence
  Description of Artificial Sequence: Synthetic oligonucleotide
  Target: LAMA2; (-) strand; PAM type: YTN; PAM sequence: TTA
aacaaagagttctggaaatt

SEQ ID NO: 251903 - DNA, 20 bp, Artificial Sequence
  Description of Artificial Sequence: Synthetic oligonucleotide
  Target: LAMA2; (-) strand; PAM type: YTN; PAM sequence: CTT
aaacaaagagttctggaaat

SEQ ID NO: 251904 - DNA, 20 bp, Artificial Sequence
  Description of Artificial Sequence: Synthetic oligonucleotide
  Target: LAMA2; (-) strand; PAM type: YTN; PAM sequence: TTG
acatgcaaaacttaaacaaa

SEQ ID NO: 251905 - DNA, 20 bp, Artificial Sequence
  Description of Artificial Sequence: Synthetic oligonucleotide
  Target: LAMA2; (-) strand; PAM type: YTN; PAM sequence: CTC
atataaaattgacatgcaaa

SEQ ID NO: 251906 - DNA, 20 bp, Artificial Sequence
  Description of Artificial Sequence: Synthetic oligonucleotide
  Target: LAMA2; (-) strand; PAM type: YTN; PAM sequence: TTC
tcatataaaattgacatgca

SEQ ID NO: 251907 - DNA, 20 bp, Artificial Sequence
  Description of Artificial Sequence: Synthetic oligonucleotide
  Target: LAMA2; (-) strand; PAM type: YTN; PAM sequence: TTT
ctcatataaaattgacatgc

SEQ ID NO: 251908 - DNA, 20 bp, Artificial Sequence
  Description of Artificial Sequence: Synthetic oligonucleotide
  Target: LAMA2; (-) strand; PAM type: YTN; PAM sequence: CTA
gatacagtccaagaatttct

SEQ ID NO: 251909 - DNA, 20 bp, Artificial Sequence
  Description of Artificial Sequence: Synthetic oligonucleotide
  Target: LAMA2; (-) strand; PAM type: YTN; PAM sequence: CTG
tatctagatacagtccaaga

SEQ ID NO: 251910 - DNA, 20 bp, Artificial Sequence
  Description of Artificial Sequence: Synthetic oligonucleotide
  Target: LAMA2; (-) strand; PAM type: YTN; PAM sequence: TTA
actgtatctagatacagtcc

SEQ ID NO: 251911 - DNA, 20 bp, Artificial Sequence
  Description of Artificial Sequence: Synthetic oligonucleotide
  Target: LAMA2; (-) strand; PAM type: YTN; PAM sequence: TTG
attaactgtatctagataca

SEQ ID NO: 251912 - DNA, 20 bp, Artificial Sequence
  Description of Artificial Sequence: Synthetic oligonucleotide
  Target: LAMA2; (-) strand; PAM type: YTN; PAM sequence: CTA
aacagcagattgattaactg

SEQ ID NO: 251913 - DNA, 20 bp, Artificial Sequence
  Description of Artificial Sequence: Synthetic oligonucleotide
  Target: LAMA2; (-) strand; PAM type: YTN; PAM sequence: TTA
ctaaacagcagattgattaa

SEQ ID NO: 251914 - DNA, 20 bp, Artificial Sequence
  Description of Artificial Sequence: Synthetic oligonucleotide
  Target: LAMA2; (-) strand; PAM type: YTN; PAM sequence: TTT
actaaacagcagattgatta

SEQ ID NO: 251915 - DNA, 20 bp, Artificial Sequence
  Description of Artificial Sequence: Synthetic oligonucleotide
  Target: LAMA2; (-) strand; PAM type: YTN; PAM sequence: TTA
tcatacaatagatcaccaca

SEQ ID NO: 251916 - DNA, 20 bp, Artificial Sequence
  Description of Artificial Sequence: Synthetic oligonucleotide
  Target: LAMA2; (-) strand; PAM type: YTN; PAM sequence: TTG
attatcatacaatagatcac

SEQ ID NO: 251917 - DNA, 20 bp, Artificial Sequence
  Description of Artificial Sequence: Synthetic oligonucleotide
  Target: LAMA2; (-) strand; PAM type: YTN; PAM sequence: CTA
gttgattatcatacaataga

SEQ ID NO: 251918 - DNA, 20 bp, Artificial Sequence
  Description of Artificial Sequence: Synthetic oligonucleotide
  Target: LAMA2; (-) strand; PAM type: YTN; PAM sequence: TTG
atacactagttgattatcat

SEQ ID NO: 251919 - DNA, 20 bp, Artificial Sequence
  Description of Artificial Sequence: Synthetic oligonucleotide
  Target: LAMA2; (-) strand; PAM type: YTN; PAM sequence: TTC
atggttgatacactagttga

SEQ ID NO: 251920 - DNA, 20 bp, Artificial Sequence
  Description of Artificial Sequence: Synthetic oligonucleotide
  Target: LAMA2; (-) strand; PAM type: YTN; PAM sequence: TTT
catggttgatacactagttg

SEQ ID NO: 251921 - DNA, 20 bp, Artificial Sequence
  Description of Artificial Sequence: Synthetic oligonucleotide
  Target: LAMA2; (-) strand; PAM type: YTN; PAM sequence: TTA
gatgatttcatggttgatac

SEQ ID NO: 251922 - DNA, 20 bp, Artificial Sequence
  Description of Artificial Sequence: Synthetic oligonucleotide
  Target: LAMA2; (-) strand; PAM type: YTN; PAM sequence: TTC
agaattagatgatttcatgg

SEQ ID NO: 251923 - DNA, 20 bp, Artificial Sequence
  Description of Artificial Sequence: Synthetic oligonucleotide
  Target: LAMA2; (-) strand; PAM type: YTN; PAM sequence: TTT
cagaattagatgatttcatg

SEQ ID NO: 251924 - DNA, 20 bp, Artificial Sequence
  Description of Artificial Sequence: Synthetic oligonucleotide
  Target: LAMA2; (-) strand; PAM type: YTN; PAM sequence: TTA
atttcagaattagatgattt

SEQ ID NO: 251925 - DNA, 20 bp, Artificial Sequence
  Description of Artificial Sequence: Synthetic oligonucleotide
  Target: LAMA2; (-) strand; PAM type: YTN; PAM sequence: TTT
aatttcagaattagatgatt

SEQ ID NO: 251926 - DNA, 20 bp, Artificial Sequence
  Description of Artificial Sequence: Synthetic oligonucleotide
  Target: LAMA2; (-) strand; PAM type: YTN; PAM sequence: TTT
taatttcagaattagatgat

SEQ ID NO: 251927 - DNA, 20 bp, Artificial Sequence
  Description of Artificial Sequence: Synthetic oligonucleotide
  Target: LAMA2; (-) strand; PAM type: YTN; PAM sequence: CTT
ttaatttcagaattagatga

SEQ ID NO: 251928 - DNA, 20 bp, Artificial Sequence
  Description of Artificial Sequence: Synthetic oligonucleotide
  Target: LAMA2; (-) strand; PAM type: YTN; PAM sequence: CTG
atccttttaatttcagaatt

SEQ ID NO: 251929 - DNA, 20 bp, Artificial Sequence
  Description of Artificial Sequence: Synthetic oligonucleotide
  Target: LAMA2; (-) strand; PAM type: YTN; PAM sequence: TTC
tgatccttttaatttcagaa

SEQ ID NO: 251930 - DNA, 20 bp, Artificial Sequence
  Description of Artificial Sequence: Synthetic oligonucleotide
  Target: LAMA2; (-) strand; PAM type: YTN; PAM sequence: CTA
taattctgatccttttaatt

SEQ ID NO: 251931 - DNA, 20 bp, Artificial Sequence
  Description of Artificial Sequence: Synthetic oligonucleotide
  Target: LAMA2; (-) strand; PAM type: YTN; PAM sequence: TTG
ataaacctataattctgatc

SEQ ID NO: 251932 - DNA, 20 bp, Artificial Sequence
  Description of Artificial Sequence: Synthetic oligonucleotide
  Target: LAMA2; (-) strand; PAM type: YTN; PAM sequence: CTT
gataaacctataattctgat

SEQ ID NO: 251933 - DNA, 20 bp, Artificial Sequence
  Description of Artificial Sequence: Synthetic oligonucleotide
  Target: LAMA2; (-) strand; PAM type: YTN; PAM sequence: CTG
tcacttgataaacctataat

SEQ ID NO: 251934 - DNA, 20 bp, Artificial Sequence
  Description of Artificial Sequence: Synthetic oligonucleotide
  Target: LAMA2; (-) strand; PAM type: YTN; PAM sequence: TTA
atggactgtcacttgataaa

SEQ ID NO: 251935 - DNA, 20 bp, Artificial Sequence
  Description of Artificial Sequence: Synthetic oligonucleotide
  Target: LAMA2; (-) strand; PAM type: YTN; PAM sequence: CTG
gaattaatggactgtcactt

SEQ ID NO: 251936 - DNA, 20 bp, Artificial Sequence
  Description of Artificial Sequence: Synthetic oligonucleotide
  Target: LAMA2; (-) strand; PAM type: YTN; PAM sequence: CTG
cctggaattaatggactgtc

SEQ ID NO: 251937 - DNA, 20 bp, Artificial Sequence
  Description of Artificial Sequence: Synthetic oligonucleotide
  Target: LAMA2; (-) strand; PAM type: YTN; PAM sequence: CTA
actgcctggaattaatggac

SEQ ID NO: 251938 - DNA, 20 bp, Artificial Sequence
  Description of Artificial Sequence: Synthetic oligonucleotide
  Target: LAMA2; (-) strand; PAM type: YTN; PAM sequence: TTG
tgaaatctaactgcctggaa

SEQ ID NO: 251939 - DNA, 20 bp, Artificial Sequence
  Description of Artificial Sequence: Synthetic oligonucleotide
  Target: LAMA2; (-) strand; PAM type: YTN; PAM sequence: CTG
aatgtattgtgaaatctaac

SEQ ID NO: 251940 - DNA, 20 bp, Artificial Sequence
  Description of Artificial Sequence: Synthetic oligonucleotide
  Target: LAMA2; (-) strand; PAM type: YTN; PAM sequence: CTC
gcctgaatgtattgtgaaat

SEQ ID NO: 251941 - DNA, 20 bp, Artificial Sequence
  Description of Artificial Sequence: Synthetic oligonucleotide
  Target: LAMA2; (-) strand; PAM type: YTN; PAM sequence: TTG
aggccagagaccagaactcg

SEQ ID NO: 251942 - DNA, 20 bp, Artificial Sequence
  Description of Artificial Sequence: Synthetic oligonucleotide
  Target: LAMA2; (-) strand; PAM type: YTN; PAM sequence: CTT
gaggccagagaccagaactc

SEQ ID NO: 251943 - DNA, 20 bp, Artificial Sequence
  Description of Artificial Sequence: Synthetic oligonucleotide
  Target: LAMA2; (-) strand; PAM type: YTN; PAM sequence: TTA
gaacttgaggccagagacca

SEQ ID NO: 251944 - DNA, 20 bp, Artificial Sequence
  Description of Artificial Sequence: Synthetic oligonucleotide
  Target: LAMA2; (-) strand; PAM type: YTN; PAM sequence: TTA
tcattagaacttgaggccag

SEQ ID NO: 251945 - DNA, 20 bp, Artificial Sequence
  Description of Artificial Sequence: Synthetic oligonucleotide
  Target: LAMA2; (-) strand; PAM type: YTN; PAM sequence: CTG
ttatcattagaacttgaggc

SEQ ID NO: 251946 - DNA, 20 bp, Artificial Sequence
  Description of Artificial Sequence: Synthetic oligonucleotide
  Target: LAMA2; (-) strand; PAM type: YTN; PAM sequence: TTG
acatagaagataaatggaaa

SEQ ID NO: 251947 - DNA, 20 bp, Artificial Sequence
  Description of Artificial Sequence: Synthetic oligonucleotide
  Target: LAMA2; (-) strand; PAM type: YTN; PAM sequence: TTT
gacatagaagataaatggaa

SEQ ID NO: 251948 - DNA, 20 bp, Artificial Sequence
  Description of Artificial Sequence: Synthetic oligonucleotide
  Target: LAMA2; (-) strand; PAM type: YTN; PAM sequence: TTG
atttgacatagaagataaat

SEQ ID NO: 251949 - DNA, 20 bp, Artificial Sequence
  Description of Artificial Sequence: Synthetic oligonucleotide
  Target: LAMA2; (-) strand; PAM type: YTN; PAM sequence: TTT
gatttgacatagaagataaa

SEQ ID NO: 251950 - DNA, 20 bp, Artificial Sequence
  Description of Artificial Sequence: Synthetic oligonucleotide
  Target: LAMA2; (-) strand; PAM type: YTN; PAM sequence: TTG
tttgatttgacatagaagat

SEQ ID NO: 251951 - DNA, 20 bp, Artificial Sequence
  Description of Artificial Sequence: Synthetic oligonucleotide
  Target: LAMA2; (-) strand; PAM type: YTN; PAM sequence: CTT
gtttgatttgacatagaaga

SEQ ID NO: 251952 - DNA, 20 bp, Artificial Sequence
  Description of Artificial Sequence: Synthetic oligonucleotide
  Target: LAMA2; (-) strand; PAM type: YTN; PAM sequence: TTA
cttgtttgatttgacataga

SEQ ID NO: 251953 - DNA, 20 bp, Artificial Sequence
  Description of Artificial Sequence: Synthetic oligonucleotide
  Target: LAMA2; (-) strand; PAM type: YTN; PAM sequence: TTC
agatgaataaaatcagaaaa

SEQ ID NO: 251954 - DNA, 20 bp, Artificial Sequence
  Description of Artificial Sequence: Synthetic oligonucleotide
  Target: LAMA2; (-) strand; PAM type: YTN; PAM sequence: TTT
cagatgaataaaatcagaaa

SEQ ID NO: 251955 - DNA, 20 bp, Artificial Sequence
  Description of Artificial Sequence: Synthetic oligonucleotide
  Target: LAMA2; (-) strand; PAM type: YTN; PAM sequence: CTA
gccacatttcagatgaataa

SEQ ID NO: 251956 - DNA, 20 bp, Artificial Sequence
  Description of Artificial Sequence: Synthetic oligonucleotide
  Target: LAMA2; (-) strand; PAM type: YTN; PAM sequence: CTA
ctagccacatttcagatgaa

SEQ ID NO: 251957 - DNA, 20 bp, Artificial Sequence
  Description of Artificial Sequence: Synthetic oligonucleotide
  Target: LAMA2; (-) strand; PAM type: YTN; PAM sequence: CTC
catggcaaaggatacaataa

SEQ ID NO: 251958 - DNA, 20 bp, Artificial Sequence
  Description of Artificial Sequence: Synthetic oligonucleotide
  Target: LAMA2; (-) strand; PAM type: YTN; PAM sequence: CTA
acaaactccatggcaaagga

SEQ ID NO: 251959 - DNA, 20 bp, Artificial Sequence
  Description of Artificial Sequence: Synthetic oligonucleotide
  Target: LAMA2; (-) strand; PAM type: YTN; PAM sequence: TTA
caaacaatgactaacaaact

SEQ ID NO: 251960 - DNA, 20 bp, Artificial Sequence
  Description of Artificial Sequence: Synthetic oligonucleotide
  Target: LAMA2; (-) strand; PAM type: YTN; PAM sequence: CTA
ttacaaacaatgactaacaa

SEQ ID NO: 251961 - DNA, 20 bp, Artificial Sequence
  Description of Artificial Sequence: Synthetic oligonucleotide
  Target: LAMA2; (-) strand; PAM type: YTN; PAM sequence: TTC
tattacaaacaatgactaac

SEQ ID NO: 251962 - DNA, 20 bp, Artificial Sequence
  Description of Artificial Sequence: Synthetic oligonucleotide
  Target: LAMA2; (-) strand; PAM type: YTN; PAM sequence: TTA
aataataaatgaatagatga

SEQ ID NO: 251963 - DNA, 20 bp, Artificial Sequence
  Description of Artificial Sequence: Synthetic oligonucleotide
  Target: LAMA2; (-) strand; PAM type: YTN; PAM sequence: CTT
aaataataaatgaatagatg

SEQ ID NO: 251964 - DNA, 20 bp, Artificial Sequence
  Description of Artificial Sequence: Synthetic oligonucleotide
  Target: LAMA2; (-) strand; PAM type: YTN; PAM sequence: CTA
aatacttaaataataaatga

SEQ ID NO: 251965 - DNA, 20 bp, Artificial Sequence
  Description of Artificial Sequence: Synthetic oligonucleotide
  Target: LAMA2; (-) strand; PAM type: YTN; PAM sequence: CTG
actaaatacttaaataataa

SEQ ID NO: 251966 - DNA, 20 bp, Artificial Sequence
  Description of Artificial Sequence: Synthetic oligonucleotide
  Target: LAMA2; (-) strand; PAM type: YTN; PAM sequence: TTG
atgaatggatggatggatgg

SEQ ID NO: 251967 - DNA, 20 bp, Artificial Sequence
  Description of Artificial Sequence: Synthetic oligonucleotide
  Target: LAMA2; (-) strand; PAM type: YTN; PAM sequence: TTG
tcgaatgggtgaattgatga

SEQ ID NO: 251968 - DNA, 20 bp, Artificial Sequence
  Description of Artificial Sequence: Synthetic oligonucleotide
  Target: LAMA2; (-) strand; PAM type: YTN; PAM sequence: TTT
gtcgaatgggtgaattgatg

SEQ ID NO: 251969 - DNA, 20 bp, Artificial Sequence
  Description of Artificial Sequence: Synthetic oligonucleotide
  Target: LAMA2; (-) strand; PAM type: YTN; PAM sequence: TTT
tgtcgaatgggtgaattgat

SEQ ID NO: 251970 - DNA, 20 bp, Artificial Sequence
  Description of Artificial Sequence: Synthetic oligonucleotide
  Target: LAMA2; (-) strand; PAM type: YTN; PAM sequence: CTT
ttgtcgaatgggtgaattga

SEQ ID NO: 251971 - DNA, 20 bp, Artificial Sequence
  Description of Artificial Sequence: Synthetic oligonucleotide
  Target: LAMA2; (-) strand; PAM type: YTN; PAM sequence: TTC
agtagacttttgtcgaatgg

SEQ ID NO: 251972 - DNA, 20 bp, Artificial Sequence
  Description of Artificial Sequence: Synthetic oligonucleotide
  Target: LAMA2; (-) strand; PAM type: YTN; PAM sequence: TTC
atgttcagtagacttttgtc

SEQ ID NO: 251973 - DNA, 20 bp, Artificial Sequence
  Description of Artificial Sequence: Synthetic oligonucleotide
  Target: LAMA2; (-) strand; PAM type: YTN; PAM sequence: CTC
catacatgttcatgttcagt

SEQ ID NO: 251974 - DNA, 20 bp, Artificial Sequence
  Description of Artificial Sequence: Synthetic oligonucleotide
  Target: LAMA2; (-) strand; PAM type: YTN; PAM sequence: CTA
tatatgcaggatgatcatct

SEQ ID NO: 251975 - DNA, 20 bp, Artificial Sequence
  Description of Artificial Sequence: Synthetic oligonucleotide
  Target: LAMA2; (-) strand; PAM type: YTN; PAM sequence: TTG
ccatctatatatgcaggatg

SEQ ID NO: 251976 - DNA, 20 bp, Artificial Sequence
  Description of Artificial Sequence: Synthetic oligonucleotide
  Target: LAMA2; (-) strand; PAM type: YTN; PAM sequence: CTT
gccatctatatatgcaggat

SEQ ID NO: 251977 - DNA, 20 bp, Artificial Sequence
  Description of Artificial Sequence: Synthetic oligonucleotide
  Target: LAMA2; (-) strand; PAM type: YTN; PAM sequence: CTA
tcttgccatctatatatgca

SEQ ID NO: 251978 - DNA, 20 bp, Artificial Sequence
  Description of Artificial Sequence: Synthetic oligonucleotide
  Target: LAMA2; (-) strand; PAM type: YTN; PAM sequence: TTG
agaacagaaacctatcttgc

SEQ ID NO: 251979 - DNA, 20 bp, Artificial Sequence
  Description of Artificial Sequence: Synthetic oligonucleotide
  Target: LAMA2; (-) strand; PAM type: YTN; PAM sequence: CTT
gagaacagaaacctatcttg

SEQ ID NO: 251980 - DNA, 20 bp, Artificial Sequence
  Description of Artificial Sequence: Synthetic oligonucleotide
  Target: LAMA2; (-) strand; PAM type: YTN; PAM sequence: CTC
cttgagaacagaaacctatc

SEQ ID NO: 251981 - DNA, 20 bp, Artificial Sequence
  Description of Artificial Sequence: Synthetic oligonucleotide
  Target: LAMA2; (-) strand; PAM type: YTN; PAM sequence: CTA
ctccttgagaacagaaacct

SEQ ID NO: 251982 - DNA, 20 bp, Artificial Sequence
  Description of Artificial Sequence: Synthetic oligonucleotide
  Target: LAMA2; (-) strand; PAM type: YTN; PAM sequence: TTA
tgggctactccttgagaaca

SEQ ID NO: 251983 - DNA, 20 bp, Artificial Sequence
  Description of Artificial Sequence: Synthetic oligonucleotide
  Target: LAMA2; (-) strand; PAM type: YTN; PAM sequence: CTT
atgggctactccttgagaac

SEQ ID NO: 251984 - DNA, 20 bp, Artificial Sequence
  Description of Artificial Sequence: Synthetic oligonucleotide
  Target: LAMA2; (-) strand; PAM type: YTN; PAM sequence: TTG
gcatgagcttatgggctact

SEQ ID NO: 251985 - DNA, 20 bp, Artificial Sequence
  Description of Artificial Sequence: Synthetic oligonucleotide
  Target: LAMA2; (-) strand; PAM type: YTN; PAM sequence: TTA
tgttggcatgagcttatggg

SEQ ID NO: 251986 - DNA, 20 bp, Artificial Sequence
  Description of Artificial Sequence: Synthetic oligonucleotide
  Target: LAMA2; (-) strand; PAM type: YTN; PAM sequence: CTT
atgttggcatgagcttatgg

SEQ ID NO: 251987 - DNA, 20 bp, Artificial Sequence
  Description of Artificial Sequence: Synthetic oligonucleotide
  Target: LAMA2; (-) strand; PAM type: YTN; PAM sequence: CTA
aagccagtacttatgttggc

SEQ ID NO: 251988 - DNA, 20 bp, Artificial Sequence
  Description of Artificial Sequence: Synthetic oligonucleotide
  Target: LAMA2; (-) strand; PAM type: YTN; PAM sequence: TTA
ctaaagccagtacttatgtt

SEQ ID NO: 251989 - DNA, 20 bp, Artificial Sequence
  Description of Artificial Sequence: Synthetic oligonucleotide
  Target: LAMA2; (-) strand; PAM type: YTN; PAM sequence: TTG
aagagttactaaagccagta

SEQ ID NO: 251990 - DNA, 20 bp, Artificial Sequence
  Description of Artificial Sequence: Synthetic oligonucleotide
  Target: LAMA2; (-) strand; PAM type: YTN; PAM sequence: TTT
gaagagttactaaagccagt

SEQ ID NO: 251991 - DNA, 20 bp, Artificial Sequence
  Description of Artificial Sequence: Synthetic oligonucleotide
  Target: LAMA2; (-) strand; PAM type: YTN; PAM sequence: TTT
tgaagagttactaaagccag

SEQ ID NO: 251992 - DNA, 20 bp, Artificial Sequence
  Description of Artificial Sequence: Synthetic oligonucleotide
  Target: LAMA2; (-) strand; PAM type: YTN; PAM sequence: TTA
acacaacggggttttgaaga

SEQ ID NO: 251993 - DNA, 20 bp, Artificial Sequence
  Description of Artificial Sequence: Synthetic oligonucleotide
  Target: LAMA2; (-) strand; PAM type: YTN; PAM sequence: CTT
aacacaacggggttttgaag

SEQ ID NO: 251994 - DNA, 20 bp, Artificial Sequence
  Description of Artificial Sequence: Synthetic oligonucleotide
  Target: LAMA2; (-) strand; PAM type: YTN; PAM sequence: CTC
cttaacacaacggggttttg

SEQ ID NO: 251995 - DNA, 20 bp, Artificial Sequence
  Description of Artificial Sequence: Synthetic oligonucleotide
  Target: LAMA2; (-) strand; PAM type: YTN; PAM sequence: CTG
ataagtctccttaacacaac

SEQ ID NO: 251996 - DNA, 20 bp, Artificial Sequence
  Description of Artificial Sequence: Synthetic oligonucleotide
  Target: LAMA2; (-) strand; PAM type: YTN; PAM sequence: CTG
ggcctgataagtctccttaa

SEQ ID NO: 251997 - DNA, 20 bp, Artificial Sequence
  Description of Artificial Sequence: Synthetic oligonucleotide
  Target: LAMA2; (-) strand; PAM type: YTN; PAM sequence: TTC
tgggcctgataagtctcctt

SEQ ID NO: 251998 - DNA, 20 bp, Artificial Sequence
  Description of Artificial Sequence: Synthetic oligonucleotide
  Target: LAMA2; (-) strand; PAM type: YTN; PAM sequence: TTT
ctgggcctgataagtctcct

SEQ ID NO: 251999 - DNA, 20 bp, Artificial Sequence
  Description of Artificial Sequence: Synthetic oligonucleotide
  Target: LAMA2; (-) strand; PAM type: YTN; PAM sequence: CTA
gaaacagaatttctgggcct

SEQ ID NO: 252000 - DNA, 20 bp, Artificial Sequence
  Description of Artificial Sequence: Synthetic oligonucleotide
  Target: LAMA2; (-) strand; PAM type: YTN; PAM sequence: TTG
gatatatatctagaaacaga

SEQ ID NO: 252001 - DNA, 20 bp, Artificial Sequence
  Description of Artificial Sequence: Synthetic oligonucleotide
  Target: LAMA2; (-) strand; PAM type: YTN; PAM sequence: TTT
ggatatatatctagaaacag

SEQ ID NO: 252002 - DNA, 20 bp, Artificial Sequence
  Description of Artificial Sequence: Synthetic oligonucleotide
  Target: LAMA2; (-) strand; PAM type: YTN; PAM sequence: TTT
tggatatatatctagaaaca

SEQ ID NO: 252003 - DNA, 20 bp, Artificial Sequence
  Description of Artificial Sequence: Synthetic oligonucleotide
  Target: LAMA2; (-) strand; PAM type: YTN; PAM sequence: CTT
ttggatatatatctagaaac

SEQ ID NO: 252004 - DNA, 20 bp, Artificial Sequence
  Description of Artificial Sequence: Synthetic oligonucleotide
  Target: LAMA2; (-) strand; PAM type: YTN; PAM sequence: TTC
ttttggatatatatctagaa

SEQ ID NO: 252005 - DNA, 20 bp, Artificial Sequence
  Description of Artificial Sequence: Synthetic oligonucleotide
  Target: LAMA2; (-) strand; PAM type: YTN; PAM sequence: TTC
agttcttttggatatatatc

SEQ ID NO: 252006 - DNA, 20 bp, Artificial Sequence
  Description of Artificial Sequence: Synthetic oligonucleotide
  Target: LAMA2; (-) strand; PAM type: YTN; PAM sequence: TTT
cagttcttttggatatatat

SEQ ID NO: 252007 - DNA, 20 bp, Artificial Sequence
  Description of Artificial Sequence: Synthetic oligonucleotide
  Target: LAMA2; (-) strand; PAM type: YTN; PAM sequence: TTT
tcagttcttttggatatata

SEQ ID NO: 252008 - DNA, 20 bp, Artificial Sequence
  Description of Artificial Sequence: Synthetic oligonucleotide
  Target: LAMA2; (-) strand; PAM type: YTN; PAM sequence: CTA
ttttcagttcttttggatat

SEQ ID NO: 252009 - DNA, 20 bp, Artificial Sequence
  Description of Artificial Sequence: Synthetic oligonucleotide
  Target: LAMA2; (-) strand; PAM type: YTN; PAM sequence: TTC
atgaacacataatacctatt

SEQ ID NO: 252010 - DNA, 20 bp, Artificial Sequence
  Description of Artificial Sequence: Synthetic oligonucleotide
  Target: LAMA2; (-) strand; PAM type: YTN; PAM sequence: TTC
atattcatgaacacataata

SEQ ID NO: 252011 - DNA, 20 bp, Artificial Sequence
  Description of Artificial Sequence: Synthetic oligonucleotide
  Target: LAMA2; (-) strand; PAM type: YTN; PAM sequence: CTA
ttcatattcatgaacacata

SEQ ID NO: 252012 - DNA, 20 bp, Artificial Sequence
  Description of Artificial Sequence: Synthetic oligonucleotide
  Target: LAMA2; (-) strand; PAM type: YTN; PAM sequence: TTG
ctattcatattcatgaacac

SEQ ID NO: 252013 - DNA, 20 bp, Artificial Sequence
  Description of Artificial Sequence: Synthetic oligonucleotide
  Target: LAMA2; (-) strand; PAM type: YTN; PAM sequence: CTA
tcataaataatattgctatt

SEQ ID NO: 252014 - DNA, 20 bp, Artificial Sequence
  Description of Artificial Sequence: Synthetic oligonucleotide
  Target: LAMA2; (-) strand; PAM type: YTN; PAM sequence: TTC
gagctatcataaataatatt

SEQ ID NO: 252015 - DNA, 20 bp, Artificial Sequence
  Description of Artificial Sequence: Synthetic oligonucleotide
  Target: LAMA2; (-) strand; PAM type: YTN; PAM sequence: CTT
cgagctatcataaataatat

SEQ ID NO: 252016 - DNA, 20 bp, Artificial Sequence
  Description of Artificial Sequence: Synthetic oligonucleotide
  Target: LAMA2; (-) strand; PAM type: YTN; PAM sequence: CTA
ccttcgagctatcataaata

SEQ ID NO: 252017 - DNA, 20 bp, Artificial Sequence
  Description of Artificial Sequence: Synthetic oligonucleotide
  Target: LAMA2; (-) strand; PAM type: YTN; PAM sequence: TTC
taccttcgagctatcataaa

SEQ ID NO: 252018 - DNA, 20 bp, Artificial Sequence
  Description of Artificial Sequence: Synthetic oligonucleotide
  Target: LAMA2; (-) strand; PAM type: YTN; PAM sequence: TTT
ctaccttcgagctatcataa

SEQ ID NO: 252019 - DNA, 20 bp, Artificial Sequence
  Description of Artificial Sequence: Synthetic oligonucleotide
  Target: LAMA2; (-) strand; PAM type: YTN; PAM sequence: TTG
tttctaccttcgagctatca

SEQ ID NO: 252020 - DNA, 20 bp, Artificial Sequence
  Description of Artificial Sequence: Synthetic oligonucleotide
  Target: LAMA2; (-) strand; PAM type: YTN; PAM sequence: TTG
gattgtttctaccttcgagc

SEQ ID NO: 252021 - DNA, 20 bp, Artificial Sequence
  Description of Artificial Sequence: Synthetic oligonucleotide
  Target: LAMA2; (-) strand; PAM type: YTN; PAM sequence: TTT
ggattgtttctaccttcgag

SEQ ID NO: 252022 - DNA, 20 bp, Artificial Sequence
  Description of Artificial Sequence: Synthetic oligonucleotide
  Target: LAMA2; (-) strand; PAM type: YTN; PAM sequence: TTG
atgaatatttggattgtttc

SEQ ID NO: 252023 - DNA, 20 bp, Artificial Sequence
  Description of Artificial Sequence: Synthetic oligonucleotide
  Target: LAMA2; (-) strand; PAM type: YTN; PAM sequence: TTC
atcagttgatgaatatttgg

SEQ ID NO: 252024 - DNA, 20 bp, Artificial Sequence
  Description of Artificial Sequence: Synthetic oligonucleotide
  Target: LAMA2; (-) strand; PAM type: YTN; PAM sequence: TTC
attcatcagttgatgaatat

SEQ ID NO: 252025 - DNA, 20 bp, Artificial Sequence
  Description of Artificial Sequence: Synthetic oligonucleotide
  Target: LAMA2; (-) strand; PAM type: YTN; PAM sequence: TTA
ttcattcatcagttgatgaa

SEQ ID NO: 252026 - DNA, 20 bp, Artificial Sequence
  Description of Artificial Sequence: Synthetic oligonucleotide
  Target: LAMA2; (-) strand; PAM type: YTN; PAM sequence: TTT
attcattcatcagttgatga

SEQ ID NO: 252027 - DNA, 20 bp, Artificial Sequence
  Description of Artificial Sequence: Synthetic oligonucleotide
  Target: LAMA2; (-) strand; PAM type: YTN; PAM sequence: TTG
tttattcattcatcagttga

SEQ ID NO: 252028 - DNA, 20 bp, Artificial Sequence
  Description of Artificial Sequence: Synthetic oligonucleotide
  Target: LAMA2; (-) strand; PAM type: YTN; PAM sequence: TTT
gtttattcattcatcagttg

SEQ ID NO: 252029 - DNA, 20 bp, Artificial Sequence
  Description of Artificial Sequence: Synthetic oligonucleotide
  Target: LAMA2; (-) strand; PAM type: YTN; PAM sequence: TTT
tgtttattcattcatcagtt

SEQ ID NO: 252030 - DNA, 20 bp, Artificial Sequence
  Description of Artificial Sequence: Synthetic oligonucleotide
  Target: LAMA2; (-) strand; PAM type: YTN; PAM sequence: CTG
catgtacatgccacattttg

SEQ ID NO: 252031 - DNA, 20 bp, Artificial Sequence
  Description of Artificial Sequence: Synthetic oligonucleotide
  Target: LAMA2; (-) strand; PAM type: YTN; PAM sequence: TTC
actgcatgtacatgccacat

SEQ ID NO: 252032 - DNA, 20 bp, Artificial Sequence
  Description of Artificial Sequence: Synthetic oligonucleotide
  Target: LAMA2; (-) strand; PAM type: YTN; PAM sequence: CTA
atgttcactgcatgtacatg

SEQ ID NO: 252033 - DNA, 20 bp, Artificial Sequence
  Description of Artificial Sequence: Synthetic oligonucleotide
  Target: LAMA2; (-) strand; PAM type: YTN; PAM sequence: TTA
atgactaatgttcactgcat

SEQ ID NO: 252034 - DNA, 20 bp, Artificial Sequence
  Description of Artificial Sequence: Synthetic oligonucleotide
  Target: LAMA2; (-) strand; PAM type: YTN; PAM sequence: TTT
aatgactaatgttcactgca

SEQ ID NO: 252035 - DNA, 20 bp, Artificial Sequence
  Description of Artificial Sequence: Synthetic oligonucleotide
  Target: LAMA2; (-) strand; PAM type: YTN; PAM sequence: TTT
taatgactaatgttcactgc

SEQ ID NO: 252036 - DNA, 20 bp, Artificial Sequence
  Description of Artificial Sequence: Synthetic oligonucleotide
  Target: LAMA2; (-) strand; PAM type: YTN; PAM sequence: CTT
ttaatgactaatgttcactg

SEQ ID NO: 252037 - DNA, 20 bp, Artificial Sequence
  Description of Artificial Sequence: Synthetic oligonucleotide
  Target: LAMA2; (-) strand; PAM type: YTN; PAM sequence: TTC
cttttaatgactaatgttca

SEQ ID NO: 252038 - DNA, 20 bp, Artificial Sequence
  Description of Artificial Sequence: Synthetic oligonucleotide
  Target: LAMA2; (-) strand; PAM type: YTN; PAM sequence: TTC
attccttttaatgactaatg

SEQ ID NO: 252039 - DNA, 20 bp, Artificial Sequence
  Description of Artificial Sequence: Synthetic oligonucleotide
  Target: LAMA2; (-) strand; PAM type: YTN; PAM sequence: TTT
cattccttttaatgactaat

SEQ ID NO: 252040 - DNA, 20 bp, Artificial Sequence
  Description of Artificial Sequence: Synthetic oligonucleotide
  Target: LAMA2; (-) strand; PAM type: YTN; PAM sequence: TTG
cagcatgtatcagtatttca

SEQ ID NO: 252041 - DNA, 20 bp, Artificial Sequence
  Description of Artificial Sequence: Synthetic oligonucleotide
  Target: LAMA2; (-) strand; PAM type: YTN; PAM sequence: TTC
attgcagcatgtatcagtat

SEQ ID NO: 252042 - DNA, 20 bp, Artificial Sequence
  Description of Artificial Sequence: Synthetic oligonucleotide
  Target: LAMA2; (-) strand; PAM type: YTN; PAM sequence: CTT
cattgcagcatgtatcagta

SEQ ID NO: 252043 - DNA, 20 bp, Artificial Sequence
  Description of Artificial Sequence: Synthetic oligonucleotide
  Target: LAMA2; (-) strand; PAM type: YTN; PAM sequence: CTA
gataacttcattgcagcatg

SEQ ID NO: 252044 - DNA, 20 bp, Artificial Sequence
  Description of Artificial Sequence: Synthetic oligonucleotide
  Target: LAMA2; (-) strand; PAM type: YTN; PAM sequence: TTC
tagataacttcattgcagca

SEQ ID NO: 252045 - DNA, 20 bp, Artificial Sequence
  Description of Artificial Sequence: Synthetic oligonucleotide
  Target: LAMA2; (-) strand; PAM type: YTN; PAM sequence: CTA
ttctagataacttcattgca

SEQ ID NO: 252046 - DNA, 20 bp, Artificial Sequence
  Description of Artificial Sequence: Synthetic oligonucleotide
  Target: LAMA2; (-) strand; PAM type: YTN; PAM sequence: TTA
cctattctagataacttcat

SEQ ID NO: 252047 - DNA, 20 bp, Artificial Sequence
  Description of Artificial Sequence: Synthetic oligonucleotide
  Target: LAMA2; (-) strand; PAM type: YTN; PAM sequence: CTA
tgaagttacctattctagat

SEQ ID NO: 252048 - DNA, 20 bp, Artificial Sequence
  Description of Artificial Sequence: Synthetic oligonucleotide
  Target: LAMA2; (-) strand; PAM type: YTN; PAM sequence: TTG
ctatgaagttacctattcta

SEQ ID NO: 252049 - DNA, 20 bp, Artificial Sequence
  Description of Artificial Sequence: Synthetic oligonucleotide
  Target: LAMA2; (-) strand; PAM type: YTN; PAM sequence: TTG
ttgctatgaagttacctatt

SEQ ID NO: 252050 - DNA, 20 bp, Artificial Sequence
  Description of Artificial Sequence: Synthetic oligonucleotide
  Target: LAMA2; (-) strand; PAM type: YTN; PAM sequence: TTT
gttgctatgaagttacctat

SEQ ID NO: 252051 - DNA, 20 bp, Artificial Sequence
  Description of Artificial Sequence: Synthetic oligonucleotide
  Target: LAMA2; (-) strand; PAM type: YTN; PAM sequence: TTT
tgttgctatgaagttaccta

SEQ ID NO: 252052 - DNA, 20 bp, Artificial Sequence
  Description of Artificial Sequence: Synthetic oligonucleotide
  Target: LAMA2; (-) strand; PAM type: YTN; PAM sequence: CTT
ttgttgctatgaagttacct

SEQ ID NO: 252053 - DNA, 20 bp, Artificial Sequence
  Description of Artificial Sequence: Synthetic oligonucleotide
  Target: LAMA2; (-) strand; PAM type: YTN; PAM sequence: CTG
cttttgttgctatgaagtta

SEQ ID NO: 252054 - DNA, 20 bp, Artificial Sequence
  Description of Artificial Sequence: Synthetic oligonucleotide
  Target: LAMA2; (-) strand; PAM type: YTN; PAM sequence: CTA
acaatctgcttttgttgcta

SEQ ID NO: 252055 - DNA, 20 bp, Artificial Sequence
  Description of Artificial Sequence: Synthetic oligonucleotide
  Target: LAMA2; (-) strand; PAM type: YTN; PAM sequence: CTG
taaactaacaatctgctttt

SEQ ID NO: 252056 - DNA, 20 bp, Artificial Sequence
  Description of Artificial Sequence: Synthetic oligonucleotide
  Target: LAMA2; (-) strand; PAM type: YTN; PAM sequence: CTA
acccctgtaaactaacaatc

SEQ ID NO: 252057 - DNA, 20 bp, Artificial Sequence
  Description of Artificial Sequence: Synthetic oligonucleotide
  Target: LAMA2; (-) strand; PAM type: YTN; PAM sequence: CTC
taacccctgtaaactaacaa

SEQ ID NO: 252058 - DNA, 20 bp, Artificial Sequence
  Description of Artificial Sequence: Synthetic oligonucleotide
  Target: LAMA2; (-) strand; PAM type: YTN; PAM sequence: TTC
ctctaacccctgtaaactaa

SEQ ID NO: 252059 - DNA, 20 bp, Artificial Sequence
  Description of Artificial Sequence: Synthetic oligonucleotide
  Target: LAMA2; (-) strand; PAM type: YTN; PAM sequence: CTT
cctctaacccctgtaaacta

SEQ ID NO: 252060 - DNA, 20 bp, Artificial Sequence
  Description of Artificial Sequence: Synthetic oligonucleotide
  Target: LAMA2; (-) strand; PAM type: YTN; PAM sequence: CTC
ttcctctaacccctgtaaac

SEQ ID NO: 252061 - DNA, 20 bp, Artificial Sequence
  Description of Artificial Sequence: Synthetic oligonucleotide
  Target: LAMA2; (-) strand; PAM type: YTN; PAM sequence: TTC
ccctcttcctctaacccctg

SEQ ID NO: 252062 - DNA, 20 bp, Artificial Sequence
  Description of Artificial Sequence: Synthetic oligonucleotide
  Target: LAMA2; (-) strand; PAM type: YTN; PAM sequence: TTT
cccctcttcctctaacccct

SEQ ID NO: 252063 - DNA, 20 bp, Artificial Sequence
  Description of Artificial Sequence: Synthetic oligonucleotide
  Target: LAMA2; (-) strand; PAM type: YTN; PAM sequence: TTT
tcccctcttcctctaacccc

SEQ ID NO: 252064 - DNA, 20 bp, Artificial Sequence
  Description of Artificial Sequence: Synthetic oligonucleotide
  Target: LAMA2; (-) strand; PAM type: YTN; PAM sequence: CTT
ttcccctcttcctctaaccc

SEQ ID NO: 252065 - DNA, 20 bp, Artificial Sequence
  Description of Artificial Sequence: Synthetic oligonucleotide
  Target: LAMA2; (-) strand; PAM type: YTN; PAM sequence: CTC
ttttcccctcttcctctaac

SEQ ID NO: 252066 - DNA, 20 bp, Artificial Sequence
  Description of Artificial Sequence: Synthetic oligonucleotide
  Target: LAMA2; (-) strand; PAM type: YTN; PAM sequence: TTC
tcttttcccctcttcctcta

SEQ ID NO: 252067 - DNA, 20 bp, Artificial Sequence
  Description of Artificial Sequence: Synthetic oligonucleotide
  Target: LAMA2; (-) strand; PAM type: YTN; PAM sequence: TTA
ggcagtcattctcttttccc

SEQ ID NO: 252068 - DNA, 20 bp, Artificial Sequence
  Description of Artificial Sequence: Synthetic oligonucleotide
  Target: LAMA2; (-) strand; PAM type: YTN; PAM sequence: TTA
tcagcccaaaagaaaaccca

SEQ ID NO: 252069 - DNA, 20 bp, Artificial Sequence
  Description of Artificial Sequence: Synthetic oligonucleotide
  Target: LAMA2; (-) strand; PAM type: YTN; PAM sequence: TTT
atcagcccaaaagaaaaccc

SEQ ID NO: 252070 - DNA, 20 bp, Artificial Sequence
  Description of Artificial Sequence: Synthetic oligonucleotide
  Target: LAMA2; (-) strand; PAM type: YTN; PAM sequence: TTT
tatcagcccaaaagaaaacc

SEQ ID NO: 252071 - DNA, 20 bp, Artificial Sequence
  Description of Artificial Sequence: Synthetic oligonucleotide
  Target: LAMA2; (-) strand; PAM type: YTN; PAM sequence: CTA
agacattttatcagcccaaa

SEQ ID NO: 252072 - DNA, 20 bp, Artificial Sequence
  Description of Artificial Sequence: Synthetic oligonucleotide
  Target: LAMA2; (-) strand; PAM type: YTN; PAM sequence: TTC
taagacattttatcagccca

SEQ ID NO: 252073 - DNA, 20 bp, Artificial Sequence
  Description of Artificial Sequence: Synthetic oligonucleotide
  Target: LAMA2; (-) strand; PAM type: YTN; PAM sequence: CTA
attctaagacattttatcag

SEQ ID NO: 252074 - DNA, 20 bp, Artificial Sequence
  Description of Artificial Sequence: Synthetic oligonucleotide
  Target: LAMA2; (-) strand; PAM type: YTN; PAM sequence: CTA
cgacatatatctaattctaa

SEQ ID NO: 252075 - DNA, 20 bp, Artificial Sequence
  Description of Artificial Sequence: Synthetic oligonucleotide
  Target: LAMA2; (-) strand; PAM type: YTN; PAM sequence: TTG
tgcaactacgacatatatct

SEQ ID NO: 252076 - DNA, 20 bp, Artificial Sequence
  Description of Artificial Sequence: Synthetic oligonucleotide
  Target: LAMA2; (-) strand; PAM type: YTN; PAM sequence: TTA
caatgttgtgcaactacgac

SEQ ID NO: 252077 - DNA, 20 bp, Artificial Sequence
  Description of Artificial Sequence: Synthetic oligonucleotide
  Target: LAMA2; (-) strand; PAM type: YTN; PAM sequence: TTT
acaatgttgtgcaactacga

SEQ ID NO: 252078 - DNA, 20 bp, Artificial Sequence
  Description of Artificial Sequence: Synthetic oligonucleotide
  Target: LAMA2; (-) strand; PAM type: YTN; PAM sequence: TTA
gtacatttacaatgttgtgc

SEQ ID NO: 252079 - DNA, 20 bp, Artificial Sequence
  Description of Artificial Sequence: Synthetic oligonucleotide
  Target: LAMA2; (-) strand; PAM type: YTN; PAM sequence: TTT
agtacatttacaatgttgtg

SEQ ID NO: 252080 - DNA, 20 bp, Artificial Sequence
  Description of Artificial Sequence: Synthetic oligonucleotide
  Target: LAMA2; (-) strand; PAM type: YTN; PAM sequence: CTG
tgatttagtacatttacaat

SEQ ID NO: 252081 - DNA, 20 bp, Artificial Sequence
  Description of Artificial Sequence: Synthetic oligonucleotide
  Target: LAMA2; (-) strand; PAM type: YTN; PAM sequence: TTC
tgtgatttagtacatttaca

SEQ ID NO: 252082 - DNA, 20 bp, Artificial Sequence
  Description of Artificial Sequence: Synthetic oligonucleotide
  Target: LAMA2; (-) strand; PAM type: YTN; PAM sequence: TTG
tacaattctgtgatttagta

SEQ ID NO: 252083 - DNA, 20 bp, Artificial Sequence
  Description of Artificial Sequence: Synthetic oligonucleotide
  Target: LAMA2; (-) strand; PAM type: YTN; PAM sequence: TTA
aaaaataaattgtacaattc

SEQ ID NO: 252084 - DNA, 20 bp, Artificial Sequence
  Description of Artificial Sequence: Synthetic oligonucleotide
  Target: LAMA2; (-) strand; PAM type: YTN; PAM sequence: TTT
aaaaaataaattgtacaatt

SEQ ID NO: 252085 - DNA, 20 bp, Artificial Sequence
  Description of Artificial Sequence: Synthetic oligonucleotide
  Target: LAMA2; (-) strand; PAM type: YTN; PAM sequence: TTA
aaatttaaaaaataaattgt

SEQ ID NO: 252086 - DNA, 20 bp, Artificial Sequence
  Description of Artificial Sequence: Synthetic oligonucleotide
  Target: LAMA2; (-) strand; PAM type: YTN; PAM sequence: TTT
aaaatttaaaaaataaattg

SEQ ID NO: 252087 - DNA, 20 bp, Artificial Sequence
  Description of Artificial Sequence: Synthetic oligonucleotide
  Target: LAMA2; (-) strand; PAM type: YTN; PAM sequence: CTA
tttaaaatttaaaaaataaa

SEQ ID NO: 252088 - DNA, 20 bp, Artificial Sequence
  Description of Artificial Sequence: Synthetic oligonucleotide
  Target: LAMA2; (-) strand; PAM type: YTN; PAM sequence: TTC
aaacctatttaaaatttaaa

SEQ ID NO: 252089 - DNA, 20 bp, Artificial Sequence
  Description of Artificial Sequence: Synthetic oligonucleotide
  Target: LAMA2; (-) strand; PAM type: YTN; PAM sequence: TTT
caaacctatttaaaatttaa

SEQ ID NO: 252090 - DNA, 20 bp, Artificial Sequence
  Description of Artificial Sequence: Synthetic oligonucleotide
  Target: LAMA2; (-) strand; PAM type: YTN; PAM sequence: TTT
tcaaacctatttaaaattta

SEQ ID NO: 252091 - DNA, 20 bp, Artificial Sequence
  Description of Artificial Sequence: Synthetic oligonucleotide
  Target: LAMA2; (-) strand; PAM type: YTN; PAM sequence: TTG
gggtaggatgaaaattttca

SEQ ID NO: 252092 - DNA, 20 bp, Artificial Sequence
  Description of Artificial Sequence: Synthetic oligonucleotide
  Target: LAMA2; (-) strand; PAM type: YTN; PAM sequence: TTT
ggggtaggatgaaaattttc

SEQ ID NO: 252093 - DNA, 20 bp, Artificial Sequence
  Description of Artificial Sequence: Synthetic oligonucleotide
  Target: LAMA2; (-) strand; PAM type: YTN; PAM sequence: TTG
acatttggggtaggatgaaa

SEQ ID NO: 252094 - DNA, 20 bp, Artificial Sequence
  Description of Artificial Sequence: Synthetic oligonucleotide
  Target: LAMA2; (-) strand; PAM type: YTN; PAM sequence: TTT
gacatttggggtaggatgaa

SEQ ID NO: 252095 - DNA, 20 bp, Artificial Sequence
  Description of Artificial Sequence: Synthetic oligonucleotide
  Target: LAMA2; (-) strand; PAM type: YTN; PAM sequence: CTT
tgacatttggggtaggatga

SEQ ID NO: 252096 - DNA, 20 bp, Artificial Sequence
  Description of Artificial Sequence: Synthetic oligonucleotide
  Target: LAMA2; (-) strand; PAM type: YTN; PAM sequence: TTG
tacatagagaggaactttga

SEQ ID NO: 252097 - DNA, 20 bp, Artificial Sequence
  Description of Artificial Sequence: Synthetic oligonucleotide
  Target: LAMA2; (-) strand; PAM type: YTN; PAM sequence: TTC
aagttgtacatagagaggaa

SEQ ID NO: 252098 - DNA, 20 bp, Artificial Sequence
  Description of Artificial Sequence: Synthetic oligonucleotide
  Target: LAMA2; (-) strand; PAM type: YTN; PAM sequence: TTT
caagttgtacatagagagga

SEQ ID NO: 252099 - DNA, 20 bp, Artificial Sequence
  Description of Artificial Sequence: Synthetic oligonucleotide
  Target: LAMA2; (-) strand; PAM type: YTN; PAM sequence: TTA
agcatttcaagttgtacata

SEQ ID NO: 252100 - DNA, 20 bp, Artificial Sequence
  Description of Artificial Sequence: Synthetic oligonucleotide
  Target: LAMA2; (-) strand; PAM type: YTN; PAM sequence: TTC
acatcatataaaattaagca

SEQ ID NO: 252101 - DNA, 20 bp, Artificial Sequence
  Description of Artificial Sequence: Synthetic oligonucleotide
  Target: LAMA2; (-) strand; PAM type: YTN; PAM sequence: TTA
gatgaaattcacatcatata

SEQ ID NO: 252102 - DNA, 20 bp, Artificial Sequence
  Description of Artificial Sequence: Synthetic oligonucleotide
  Target: LAMA2; (-) strand; PAM type: YTN; PAM sequence: TTT
agatgaaattcacatcatat

SEQ ID NO: 252103 - DNA, 20 bp, Artificial Sequence
  Description of Artificial Sequence: Synthetic oligonucleotide
  Target: LAMA2; (-) strand; PAM type: YTN; PAM sequence: TTA
gtttagatgaaattcacatc

SEQ ID NO: 252104 - DNA, 20 bp, Artificial Sequence
  Description of Artificial Sequence: Synthetic oligonucleotide
  Target: LAMA2; (-) strand; PAM type: YTN; PAM sequence: TTG
tcattagtttagatgaaatt

SEQ ID NO: 252105 - DNA, 20 bp, Artificial Sequence
  Description of Artificial Sequence: Synthetic oligonucleotide
  Target: LAMA2; (-) strand; PAM type: YTN; PAM sequence: CTT
gtcattagtttagatgaaat

SEQ ID NO: 252106 - DNA, 20 bp, Artificial Sequence
  Description of Artificial Sequence: Synthetic oligonucleotide
  Target: LAMA2; (-) strand; PAM type: YTN; PAM sequence: TTC
ttgtcattagtttagatgaa

SEQ ID NO: 252107 - DNA, 20 bp, Artificial Sequence
  Description of Artificial Sequence: Synthetic oligonucleotide
  Target: LAMA2; (-) strand; PAM type: YTN; PAM sequence: TTT
cttgtcattagtttagatga

SEQ ID NO: 252108 - DNA, 20 bp, Artificial Sequence
  Description of Artificial Sequence: Synthetic oligonucleotide
  Target: LAMA2; (-) strand; PAM type: YTN; PAM sequence: TTT
tcttgtcattagtttagatg

SEQ ID NO: 252109 - DNA, 20 bp, Artificial Sequence
  Description of Artificial Sequence: Synthetic oligonucleotide
  Target: LAMA2; (-) strand; PAM type: YTN; PAM sequence: CTT
ttcttgtcattagtttagat

SEQ ID NO: 252110 - DNA, 20 bp, Artificial Sequence
  Description of Artificial Sequence: Synthetic oligonucleotide
  Target: LAMA2; (-) strand; PAM type: YTN; PAM sequence: TTA
cttttcttgtcattagttta

SEQ ID NO: 252111 - DNA, 20 bp, Artificial Sequence
  Description of Artificial Sequence: Synthetic oligonucleotide
  Target: LAMA2; (-) strand; PAM type: YTN; PAM sequence: TTT
acttttcttgtcattagttt

SEQ ID NO: 252112 - DNA, 20 bp, Artificial Sequence
  Description of Artificial Sequence: Synthetic oligonucleotide
  Target: LAMA2; (-) strand; PAM type: YTN; PAM sequence: CTG
tcaatgaaaaatgcagtgtc

SEQ ID NO: 252113 - DNA, 20 bp, Artificial Sequence
  Description of Artificial Sequence: Synthetic oligonucleotide
  Target: LAMA2; (-) strand; PAM type: YTN; PAM sequence: CTG
aggaaccctgtcaatgaaaa

SEQ ID NO: 252114 - DNA, 20 bp, Artificial Sequence
  Description of Artificial Sequence: Synthetic oligonucleotide
  Target: LAMA2; (-) strand; PAM type: YTN; PAM sequence: CTC
actgaggaaccctgtcaatg

SEQ ID NO: 252115 - DNA, 20 bp, Artificial Sequence
  Description of Artificial Sequence: Synthetic oligonucleotide
  Target: LAMA2; (-) strand; PAM type: YTN; PAM sequence: TTC
ccccctcactgaggaaccct

SEQ ID NO: 252116 - DNA, 20 bp, Artificial Sequence
  Description of Artificial Sequence: Synthetic oligonucleotide
  Target: LAMA2; (-) strand; PAM type: YTN; PAM sequence: TTT
cccccctcactgaggaaccc

SEQ ID NO: 252117 - DNA, 20 bp, Artificial Sequence
  Description of Artificial Sequence: Synthetic oligonucleotide
  Target: LAMA2; (-) strand; PAM type: YTN; PAM sequence: TTT
tcccccctcactgaggaacc

SEQ ID NO: 252118 - DNA, 20 bp, Artificial Sequence
  Description of Artificial Sequence: Synthetic oligonucleotide
  Target: LAMA2; (-) strand; PAM type: YTN; PAM sequence: TTT
ttcccccctcactgaggaac

SEQ ID NO: 252119 - DNA, 20 bp, Artificial Sequence
  Description of Artificial Sequence: Synthetic oligonucleotide
  Target: LAMA2; (-) strand; PAM type: YTN; PAM sequence: TTT
tttcccccctcactgaggaa

SEQ ID NO: 252120 - DNA, 20 bp, Artificial Sequence
  Description of Artificial Sequence: Synthetic oligonucleotide
  Target: LAMA2; (-) strand; PAM type: YTN; PAM sequence: CTT
ttttcccccctcactgagga

SEQ ID NO: 252121 - DNA, 20 bp, Artificial Sequence
  Description of Artificial Sequence: Synthetic oligonucleotide
  Target: LAMA2; (-) strand; PAM type: YTN; PAM sequence: TTA
aatgcttttttcccccctca

SEQ ID NO: 252122 - DNA, 20 bp, Artificial Sequence
  Description of Artificial Sequence: Synthetic oligonucleotide
  Target: LAMA2; (-) strand; PAM type: YTN; PAM sequence: TTG
aaaatcattaaatgcttttt

SEQ ID NO: 252123 - DNA, 20 bp, Artificial Sequence
  Description of Artificial Sequence: Synthetic oligonucleotide
  Target: LAMA2; (-) strand; PAM type: YTN; PAM sequence: TTT
gaaaatcattaaatgctttt

SEQ ID NO: 252124 - DNA, 20 bp, Artificial Sequence
  Description of Artificial Sequence: Synthetic oligonucleotide
  Target: LAMA2; (-) strand; PAM type: YTN; PAM sequence: TTA
catgtgtcatttgaaaatca

SEQ ID NO: 252125 - DNA, 20 bp, Artificial Sequence
  Description of Artificial Sequence: Synthetic oligonucleotide
  Target: LAMA2; (-) strand; PAM type: YTN; PAM sequence: TTA
ggttacatgtgtcatttgaa

SEQ ID NO: 252126 - DNA, 20 bp, Artificial Sequence
  Description of Artificial Sequence: Synthetic oligonucleotide
  Target: LAMA2; (-) strand; PAM type: YTN; PAM sequence: TTT
aggttacatgtgtcatttga

SEQ ID NO: 252127 - DNA, 20 bp, Artificial Sequence
  Description of Artificial Sequence: Synthetic oligonucleotide
  Target: LAMA2; (-) strand; PAM type: YTN; PAM sequence: CTA
tagtgtttaggttacatgtg

SEQ ID NO: 252128 - DNA, 20 bp, Artificial Sequence
  Description of Artificial Sequence: Synthetic oligonucleotide
  Target: LAMA2; (-) strand; PAM type: YTN; PAM sequence: CTG
tcctatagtgtttaggttac

SEQ ID NO: 252129 - DNA, 20 bp, Artificial Sequence
  Description of Artificial Sequence: Synthetic oligonucleotide
  Target: LAMA2; (-) strand; PAM type: YTN; PAM sequence: TTA
ggcaaatatcactgtcctat

SEQ ID NO: 252130 - DNA, 20 bp, Artificial Sequence
  Description of Artificial Sequence: Synthetic oligonucleotide
  Target: LAMA2; (-) strand; PAM type: YTN; PAM sequence: CTA
gattaggcaaatatcactgt

SEQ ID NO: 252131 - DNA, 20 bp, Artificial Sequence
  Description of Artificial Sequence: Synthetic oligonucleotide
  Target: LAMA2; (-) strand; PAM type: YTN; PAM sequence: TTC
tagattaggcaaatatcact

SEQ ID NO: 252132 - DNA, 20 bp, Artificial Sequence
  Description of Artificial Sequence: Synthetic oligonucleotide
  Target: LAMA2; (-) strand; PAM type: YTN; PAM sequence: CTG
gtagaaggttctagattagg

SEQ ID NO: 252133 - DNA, 20 bp, Artificial Sequence
  Description of Artificial Sequence: Synthetic oligonucleotide
  Target: LAMA2; (-) strand; PAM type: YTN; PAM sequence: TTG
gacaacctggtagaaggttc

SEQ ID NO: 252134 - DNA, 20 bp, Artificial Sequence
  Description of Artificial Sequence: Synthetic oligonucleotide
  Target: LAMA2; (-) strand; PAM type: YTN; PAM sequence: CTT
ggacaacctggtagaaggtt

SEQ ID NO: 252135 - DNA, 20 bp, Artificial Sequence
  Description of Artificial Sequence: Synthetic oligonucleotide
  Target: LAMA2; (-) strand; PAM type: YTN; PAM sequence: CTA
ggggcacatcttggacaacc

SEQ ID NO: 252136 - DNA, 20 bp, Artificial Sequence
  Description of Artificial Sequence: Synthetic oligonucleotide
  Target: LAMA2; (-) strand; PAM type: YTN; PAM sequence: CTC
taggggcacatcttggacaa

SEQ ID NO: 252137 - DNA, 20 bp, Artificial Sequence
  Description of Artificial Sequence: Synthetic oligonucleotide
  Target: LAMA2; (-) strand; PAM type: YTN; PAM sequence: TTC
tctaggggcacatcttggac

SEQ ID NO: 252138 - DNA, 20 bp, Artificial Sequence
  Description of Artificial Sequence: Synthetic oligonucleotide
  Target: LAMA2; (-) strand; PAM type: YTN; PAM sequence: CTA
tattctctaggggcacatct

SEQ ID NO: 252139 - DNA, 20 bp, Artificial Sequence
  Description of Artificial Sequence: Synthetic oligonucleotide
  Target: LAMA2; (-) strand; PAM type: YTN; PAM sequence: TTG
agtgctatattctctagggg

SEQ ID NO: 252140 - DNA, 20 bp, Artificial Sequence
  Description of Artificial Sequence: Synthetic oligonucleotide
  Target: LAMA2; (-) strand; PAM type: YTN; PAM sequence: TTA
attgagtgctatattctcta

SEQ ID NO: 252141 - DNA, 20 bp, Artificial Sequence
  Description of Artificial Sequence: Synthetic oligonucleotide
  Target: LAMA2; (-) strand; PAM type: YTN; PAM sequence: CTA
ttaattgagtgctatattct

SEQ ID NO: 252142 - DNA, 20 bp, Artificial Sequence
  Description of Artificial Sequence: Synthetic oligonucleotide
  Target: LAMA2; (-) strand; PAM type: YTN; PAM sequence: CTC
atccaacactattaattgag

SEQ ID NO: 252143 - DNA, 20 bp, Artificial Sequence
  Description of Artificial Sequence: Synthetic oligonucleotide
  Target: LAMA2; (-) strand; PAM type: YTN; PAM sequence: CTG
taaataaactcatccaacac

SEQ ID NO: 252144 - DNA, 20 bp, Artificial Sequence
  Description of Artificial Sequence: Synthetic oligonucleotide
  Target: LAMA2; (-) strand; PAM type: YTN; PAM sequence: TTA
cctgtaaataaactcatcca

SEQ ID NO: 252145 - DNA, 20 bp, Artificial Sequence
  Description of Artificial Sequence: Synthetic oligonucleotide
  Target: LAMA2; (-) strand; PAM type: YTN; PAM sequence: TTT
acctgtaaataaactcatcc

SEQ ID NO: 252146 - DNA, 20 bp, Artificial Sequence
  Description of Artificial Sequence: Synthetic oligonucleotide
  Target: LAMA2; (-) strand; PAM type: YTN; PAM sequence: CTT
tacctgtaaataaactcatc

SEQ ID NO: 252147 - DNA, 20 bp, Artificial Sequence
  Description of Artificial Sequence: Synthetic oligonucleotide
  Target: LAMA2; (-) strand; PAM type: YTN; PAM sequence: TTA
tctttacctgtaaataaact

SEQ ID NO: 252148 - DNA, 20 bp, Artificial Sequence
  Description of Artificial Sequence: Synthetic oligonucleotide
  Target: LAMA2; (-) strand; PAM type: YTN; PAM sequence: CTA
aacacaaggcaattatcttt

SEQ ID NO: 252149 - DNA, 20 bp, Artificial Sequence
  Description of Artificial Sequence: Synthetic oligonucleotide
  Target: LAMA2; (-) strand; PAM type: YTN; PAM sequence: CTC
taaacacaaggcaattatct

SEQ ID NO: 252150 - DNA, 20 bp, Artificial Sequence
  Description of Artificial Sequence: Synthetic oligonucleotide
  Target: LAMA2; (-) strand; PAM type: YTN; PAM sequence: CTG
agtgccagatggcaccctct

SEQ ID NO: 252151 - DNA, 20 bp, Artificial Sequence
  Description of Artificial Sequence: Synthetic oligonucleotide
  Target: LAMA2; (-) strand; PAM type: YTN; PAM sequence: CTG
ctgagtgccagatggcaccc

SEQ ID NO: 252152 - DNA, 20 bp, Artificial Sequence
  Description of Artificial Sequence: Synthetic oligonucleotide
  Target: LAMA2; (-) strand; PAM type: YTN; PAM sequence: CTG
gctgctgagtgccagatggc

SEQ ID NO: 252153 - DNA, 20 bp, Artificial Sequence
  Description of Artificial Sequence: Synthetic oligonucleotide
  Target: LAMA2; (-) strand; PAM type: YTN; PAM sequence: TTG
gatggaatcatcctggctgc

SEQ ID NO: 252154 - DNA, 20 bp, Artificial Sequence
  Description of Artificial Sequence: Synthetic oligonucleotide
  Target: LAMA2; (-) strand; PAM type: YTN; PAM sequence: CTG
aaatcaccagatataggcag

SEQ ID NO: 252155 - DNA, 20 bp, Artificial Sequence
  Description of Artificial Sequence: Synthetic oligonucleotide
  Target: LAMA2; (-) strand; PAM type: YTN; PAM sequence: TTA
accctgaaatcaccagatat

SEQ ID NO: 252156 - DNA, 20 bp, Artificial Sequence
  Description of Artificial Sequence: Synthetic oligonucleotide
  Target: LAMA2; (-) strand; PAM type: YTN; PAM sequence: CTC
atatatgatcaggaagcaga

SEQ ID NO: 252157 - DNA, 20 bp, Artificial Sequence
  Description of Artificial Sequence: Synthetic oligonucleotide
  Target: LAMA2; (-) strand; PAM type: YTN; PAM sequence: TTG
aatatgtatgagctcatata

SEQ ID NO: 252158 - DNA, 20 bp, Artificial Sequence
  Description of Artificial Sequence: Synthetic oligonucleotide
  Target: LAMA2; (-) strand; PAM type: YTN; PAM sequence: TTT
gaatatgtatgagctcatat

SEQ ID NO: 252159 - DNA, 20 bp, Artificial Sequence
  Description of Artificial Sequence: Synthetic oligonucleotide
  Target: LAMA2; (-) strand; PAM type: YTN; PAM sequence: TTT
tgaatatgtatgagctcata

SEQ ID NO: 252160 - DNA, 20 bp, Artificial Sequence
  Description of Artificial Sequence: Synthetic oligonucleotide
  Target: LAMA2; (-) strand; PAM type: YTN; PAM sequence: CTT
ttgaatatgtatgagctcat

SEQ ID NO: 252161 - DNA, 20 bp, Artificial Sequence
  Description of Artificial Sequence: Synthetic oligonucleotide
  Target: LAMA2; (-) strand; PAM type: YTN; PAM sequence: TTG
acagtacttttgaatatgta

SEQ ID NO: 252162 - DNA, 20 bp, Artificial Sequence
  Description of Artificial Sequence: Synthetic oligonucleotide
  Target: LAMA2; (-) strand; PAM type: YTN; PAM sequence: CTT
gacagtacttttgaatatgt

SEQ ID NO: 252163 - DNA, 20 bp, Artificial Sequence
  Description of Artificial Sequence: Synthetic oligonucleotide
  Target: LAMA2; (-) strand; PAM type: YTN; PAM sequence: CTA
gacacttgacagtacttttg

SEQ ID NO: 252164 - DNA, 20 bp, Artificial Sequence
  Description of Artificial Sequence: Synthetic oligonucleotide
  Target: LAMA2; (-) strand; PAM type: YTN; PAM sequence: CTA
atcctagacacttgacagta

SEQ ID NO: 252165 - DNA, 20 bp, Artificial Sequence
  Description of Artificial Sequence: Synthetic oligonucleotide
  Target: LAMA2; (-) strand; PAM type: YTN; PAM sequence: TTG
ctaatcctagacacttgaca

SEQ ID NO: 252166 - DNA, 20 bp, Artificial Sequence
  Description of Artificial Sequence: Synthetic oligonucleotide
  Target: LAMA2; (-) strand; PAM type: YTN; PAM sequence: TTT
gctaatcctagacacttgac

SEQ ID NO: 252167 - DNA, 20 bp, Artificial Sequence
  Description of Artificial Sequence: Synthetic oligonucleotide
  Target: LAMA2; (-) strand; PAM type: YTN; PAM sequence: CTT
tgctaatcctagacacttga

SEQ ID NO: 252168 - DNA, 20 bp, Artificial Sequence
  Description of Artificial Sequence: Synthetic oligonucleotide
  Target: LAMA2; (-) strand; PAM type: YTN; PAM sequence: TTA
cccccactttgctaatccta

SEQ ID NO: 252169 - DNA, 20 bp, Artificial Sequence
  Description of Artificial Sequence: Synthetic oligonucleotide
  Target: LAMA2; (-) strand; PAM type: YTN; PAM sequence: TTT
acccccactttgctaatcct

SEQ ID NO: 252170 - DNA, 20 bp, Artificial Sequence
  Description of Artificial Sequence: Synthetic oligonucleotide
  Target: LAMA2; (-) strand; PAM type: YTN; PAM sequence: TTT
tacccccactttgctaatcc

SEQ ID NO: 252171 - DNA, 20 bp, Artificial Sequence
  Description of Artificial Sequence: Synthetic oligonucleotide
  Target: LAMA2; (-) strand; PAM type: YTN; PAM sequence: CTT
ttacccccactttgctaatc

SEQ ID NO: 252172 - DNA, 20 bp, Artificial Sequence
  Description of Artificial Sequence: Synthetic oligonucleotide
  Target: LAMA2; (-) strand; PAM type: YTN; PAM sequence: TTG
cttttacccccactttgcta

SEQ ID NO: 252173 - DNA, 20 bp, Artificial Sequence
  Description of Artificial Sequence: Synthetic oligonucleotide
  Target: LAMA2; (-) strand; PAM type: YTN; PAM sequence: TTC
attgcttttacccccacttt

SEQ ID NO: 252174 - DNA, 20 bp, Artificial Sequence
  Description of Artificial Sequence: Synthetic oligonucleotide
  Target: LAMA2; (-) strand; PAM type: YTN; PAM sequence: TTT
cattgcttttacccccactt

SEQ ID NO: 252175 - DNA, 20 bp, Artificial Sequence
  Description of Artificial Sequence: Synthetic oligonucleotide
  Target: LAMA2; (-) strand; PAM type: YTN; PAM sequence: TTT
tcattgcttttacccccact

SEQ ID NO: 252176 - DNA, 20 bp, Artificial Sequence
  Description of Artificial Sequence: Synthetic oligonucleotide
  Target: LAMA2; (-) strand; PAM type: YTN; PAM sequence: CTA
aaattttcattgcttttacc

SEQ ID NO: 252177 - DNA, 20 bp, Artificial Sequence
  Description of Artificial Sequence: Synthetic oligonucleotide
  Target: LAMA2; (-) strand; PAM type: YTN; PAM sequence: TTC
taaaattttcattgctttta

SEQ ID NO: 252178 - DNA, 20 bp, Artificial Sequence
  Description of Artificial Sequence: Synthetic oligonucleotide
  Target: LAMA2; (-) strand; PAM type: YTN; PAM sequence: TTT
ctaaaattttcattgctttt

SEQ ID NO: 252179 - DNA, 20 bp, Artificial Sequence
  Description of Artificial Sequence: Synthetic oligonucleotide
  Target: LAMA2; (-) strand; PAM type: YTN; PAM sequence: TTC
agcaatagatttctaaaatt

SEQ ID NO: 252180 - DNA, 20 bp, Artificial Sequence
  Description of Artificial Sequence: Synthetic oligonucleotide
  Target: LAMA2; (-) strand; PAM type: YTN; PAM sequence: TTT
cagcaatagatttctaaaat

SEQ ID NO: 252181 - DNA, 20 bp, Artificial Sequence
  Description of Artificial Sequence: Synthetic oligonucleotide
  Target: LAMA2; (-) strand; PAM type: YTN; PAM sequence: TTT
tcagcaatagatttctaaaa

SEQ ID NO: 252182 - DNA, 20 bp, Artificial Sequence
  Description of Artificial Sequence: Synthetic oligonucleotide
  Target: LAMA2; (-) strand; PAM type: YTN; PAM sequence: CTT
ttcagcaatagatttctaaa

SEQ ID NO: 252183 - DNA, 20 bp, Artificial Sequence
  Description of Artificial Sequence: Synthetic oligonucleotide
  Target: LAMA2; (-) strand; PAM type: YTN; PAM sequence: TTG
taagcttttcagcaatagat

SEQ ID NO: 252184 - DNA, 20 bp, Artificial Sequence
  Description of Artificial Sequence: Synthetic oligonucleotide
  Target: LAMA2; (-) strand; PAM type: YTN; PAM sequence: TTA
tccaaattgtaagcttttca

SEQ ID NO: 252185 - DNA, 20 bp, Artificial Sequence
  Description of Artificial Sequence: Synthetic oligonucleotide
  Target: LAMA2; (-) strand; PAM type: YTN; PAM sequence: TTT
atccaaattgtaagcttttc

SEQ ID NO: 252186 - DNA, 20 bp, Artificial Sequence
  Description of Artificial Sequence: Synthetic oligonucleotide
  Target: LAMA2; (-) strand; PAM type: YTN; PAM sequence: CTT
tatccaaattgtaagctttt

SEQ ID NO: 252187 - DNA, 20 bp, Artificial Sequence
  Description of Artificial Sequence: Synthetic oligonucleotide
  Target: LAMA2; (-) strand; PAM type: YTN; PAM sequence: TTC
aaaagtgatgatctttatcc

SEQ ID NO: 252188 - DNA, 20 bp, Artificial Sequence
  Description of Artificial Sequence: Synthetic oligonucleotide
  Target: LAMA2; (-) strand; PAM type: YTN; PAM sequence: CTT
caaaagtgatgatctttatc

SEQ ID NO: 252189 - DNA, 20 bp, Artificial Sequence
  Description of Artificial Sequence: Synthetic oligonucleotide
  Target: LAMA2; (-) strand; PAM type: YTN; PAM sequence: TTA
caaggtgtaaacatatcttc

SEQ ID NO: 252190 - DNA, 20 bp, Artificial Sequence
  Description of Artificial Sequence: Synthetic oligonucleotide
  Target: LAMA2; (-) strand; PAM type: YTN; PAM sequence: CTC
attacaaggtgtaaacatat

SEQ ID NO: 252191 - DNA, 20 bp, Artificial Sequence
  Description of Artificial Sequence: Synthetic oligonucleotide
  Target: LAMA2; (-) strand; PAM type: YTN; PAM sequence: CTA
aaaggctcattacaaggtgt

SEQ ID NO: 252192 - DNA, 20 bp, Artificial Sequence
  Description of Artificial Sequence: Synthetic oligonucleotide
  Target: LAMA2; (-) strand; PAM type: YTN; PAM sequence: TTG
ggaatcaagccagagagcaa

SEQ ID NO: 252193 - DNA, 20 bp, Artificial Sequence
  Description of Artificial Sequence: Synthetic oligonucleotide
  Target: LAMA2; (-) strand; PAM type: YTN; PAM sequence: TTT
gggaatcaagccagagagca

SEQ ID NO: 252194 - DNA, 20 bp, Artificial Sequence
  Description of Artificial Sequence: Synthetic oligonucleotide
  Target: LAMA2; (-) strand; PAM type: YTN; PAM sequence: CTG
ggaatttgggaatcaagcca

SEQ ID NO: 252195 - DNA, 20 bp, Artificial Sequence
  Description of Artificial Sequence: Synthetic oligonucleotide
  Target: LAMA2; (-) strand; PAM type: YTN; PAM sequence: TTG
ggaatcaatgctgggaattt

SEQ ID NO: 252196 - DNA, 20 bp, Artificial Sequence
  Description of Artificial Sequence: Synthetic oligonucleotide
  Target: LAMA2; (-) strand; PAM type: YTN; PAM sequence: TTT
gggaatcaatgctgggaatt

SEQ ID NO: 252197 - DNA, 20 bp, Artificial Sequence
  Description of Artificial Sequence: Synthetic oligonucleotide
  Target: LAMA2; (-) strand; PAM type: YTN; PAM sequence: TTA
gatttgggaatcaatgctgg

SEQ ID NO: 252198 - DNA, 20 bp, Artificial Sequence
  Description of Artificial Sequence: Synthetic oligonucleotide
  Target: LAMA2; (-) strand; PAM type: YTN; PAM sequence: TTG
ttagatttgggaatcaatgc

SEQ ID NO: 252199 - DNA, 20 bp, Artificial Sequence
  Description of Artificial Sequence: Synthetic oligonucleotide
  Target: LAMA2; (-) strand; PAM type: YTN; PAM sequence: CTT
gttagatttgggaatcaatg

SEQ ID NO: 252200 - DNA, 20 bp, Artificial Sequence
  Description of Artificial Sequence: Synthetic oligonucleotide
  Target: LAMA2; (-) strand; PAM type: YTN; PAM sequence: TTA
ccaaataacttgttagattt

SEQ ID NO: 252201 - DNA, 20 bp, Artificial Sequence
  Description of Artificial Sequence: Synthetic oligonucleotide
  Target: LAMA2; (-) strand; PAM type: YTN; PAM sequence: TTC
acaattaccaaataacttgt

SEQ ID NO: 252202 - DNA, 20 bp, Artificial Sequence
  Description of Artificial Sequence: Synthetic oligonucleotide
  Target: LAMA2; (-) strand; PAM type: YTN; PAM sequence: TTG
atcagtgattcacaattacc

SEQ ID NO: 252203 - DNA, 20 bp, Artificial Sequence
  Description of Artificial Sequence: Synthetic oligonucleotide
  Target: LAMA2; (-) strand; PAM type: YTN; PAM sequence: TTG
ttgatcagtgattcacaatt

SEQ ID NO: 252204 - DNA, 20 bp, Artificial Sequence
  Description of Artificial Sequence: Synthetic oligonucleotide
  Target: LAMA2; (-) strand; PAM type: YTN; PAM sequence: TTT
gttgatcagtgattcacaat

SEQ ID NO: 252205 - DNA, 20 bp, Artificial Sequence
  Description of Artificial Sequence: Synthetic oligonucleotide
  Target: LAMA2; (-) strand; PAM type: YTN; PAM sequence: TTT
tgttgatcagtgattcacaa

SEQ ID NO: 252206 - DNA, 20 bp, Artificial Sequence
  Description of Artificial Sequence: Synthetic oligonucleotide
  Target: LAMA2; (-) strand; PAM type: YTN; PAM sequence: TTT
ttgttgatcagtgattcaca

SEQ ID NO: 252207 - DNA, 20 bp, Artificial Sequence
  Description of Artificial Sequence: Synthetic oligonucleotide
  Target: LAMA2; (-) strand; PAM type: YTN; PAM sequence: CTC
aggagtgatggtagattttt

SEQ ID NO: 252208 - DNA, 20 bp, Artificial Sequence
  Description of Artificial Sequence: Synthetic oligonucleotide
  Target: LAMA2; (-) strand; PAM type: YTN; PAM sequence: TTC
tcaggagtgatggtagattt

SEQ ID NO: 252209 - DNA, 20 bp, Artificial Sequence
  Description of Artificial Sequence: Synthetic oligonucleotide
  Target: LAMA2; (-) strand; PAM type: YTN; PAM sequence: TTT
ctcaggagtgatggtagatt

SEQ ID NO: 252210 - DNA, 20 bp, Artificial Sequence
  Description of Artificial Sequence: Synthetic oligonucleotide
  Target: LAMA2; (-) strand; PAM type: YTN; PAM sequence: CTT
tctcaggagtgatggtagat

SEQ ID NO: 252211 - DNA, 20 bp, Artificial Sequence
  Description of Artificial Sequence: Synthetic oligonucleotide
  Target: LAMA2; (-) strand; PAM type: YTN; PAM sequence: TTC
ctttctcaggagtgatggta

SEQ ID NO: 252212 - DNA, 20 bp, Artificial Sequence
  Description of Artificial Sequence: Synthetic oligonucleotide
  Target: LAMA2; (-) strand; PAM type: YTN; PAM sequence: TTC
agttcctttctcaggagtga

SEQ ID NO: 252213 - DNA, 20 bp, Artificial Sequence
  Description of Artificial Sequence: Synthetic oligonucleotide
  Target: LAMA2; (-) strand; PAM type: YTN; PAM sequence: TTT
cagttcctttctcaggagtg

SEQ ID NO: 252214 - DNA, 20 bp, Artificial Sequence
  Description of Artificial Sequence: Synthetic oligonucleotide
  Target: LAMA2; (-) strand; PAM type: YTN; PAM sequence: TTT
tcagttcctttctcaggagt

SEQ ID NO: 252215 - DNA, 20 bp, Artificial Sequence
  Description of Artificial Sequence: Synthetic oligonucleotide
  Target: LAMA2; (-) strand; PAM type: YTN; PAM sequence: TTT
ttcagttcctttctcaggag

SEQ ID NO: 252216 - DNA, 20 bp, Artificial Sequence
  Description of Artificial Sequence: Synthetic oligonucleotide
  Target: LAMA2; (-) strand; PAM type: YTN; PAM sequence: CTG
catttttcagttcctttctc

SEQ ID NO: 252217 - DNA, 20 bp, Artificial Sequence
  Description of Artificial Sequence: Synthetic oligonucleotide
  Target: LAMA2; (-) strand; PAM type: YTN; PAM sequence: CTA
tggcctgcatttttcagttc

SEQ ID NO: 252218 - DNA, 20 bp, Artificial Sequence
  Description of Artificial Sequence: Synthetic oligonucleotide
  Target: LAMA2; (-) strand; PAM type: YTN; PAM sequence: CTC
gctatggcctgcatttttca

SEQ ID NO: 252219 - DNA, 20 bp, Artificial Sequence
  Description of Artificial Sequence: Synthetic oligonucleotide
  Target: LAMA2; (-) strand; PAM type: YTN; PAM sequence: TTC
tcgctatggcctgcattttt

SEQ ID NO: 252220 - DNA, 20 bp, Artificial Sequence
  Description of Artificial Sequence: Synthetic oligonucleotide
  Target: LAMA2; (-) strand; PAM type: YTN; PAM sequence: CTG
attctcgctatggcctgcat

SEQ ID NO: 252221 - DNA, 20 bp, Artificial Sequence
  Description of Artificial Sequence: Synthetic oligonucleotide
  Target: LAMA2; (-) strand; PAM type: YTN; PAM sequence: TTG
taaccataagaaagaagcaa

SEQ ID NO: 252222 - DNA, 20 bp, Artificial Sequence
  Description of Artificial Sequence: Synthetic oligonucleotide
  Target: LAMA2; (-) strand; PAM type: YTN; PAM sequence: CTT
gtaaccataagaaagaagca

SEQ ID NO: 252223 - DNA, 20 bp, Artificial Sequence
  Description of Artificial Sequence: Synthetic oligonucleotide
  Target: LAMA2; (-) strand; PAM type: YTN; PAM sequence: TTA
tagcatatgatatggcatct

SEQ ID NO: 252224 - DNA, 20 bp, Artificial Sequence
  Description of Artificial Sequence: Synthetic oligonucleotide
  Target: LAMA2; (-) strand; PAM type: YTN; PAM sequence: TTT
atagcatatgatatggcatc

SEQ ID NO: 252225 - DNA, 20 bp, Artificial Sequence
  Description of Artificial Sequence: Synthetic oligonucleotide
  Target: LAMA2; (-) strand; PAM type: YTN; PAM sequence: TTT
tatagcatatgatatggcat

SEQ ID NO: 252226 - DNA, 20 bp, Artificial Sequence
  Description of Artificial Sequence: Synthetic oligonucleotide
  Target: LAMA2; (-) strand; PAM type: YTN; PAM sequence: TTA
ccgatagacattttatagca

SEQ ID NO: 252227 - DNA, 20 bp, Artificial Sequence
  Description of Artificial Sequence: Synthetic oligonucleotide
  Target: LAMA2; (-) strand; PAM type: YTN; PAM sequence: TTA
aaaattaccgatagacattt

SEQ ID NO: 252228 - DNA, 20 bp, Artificial Sequence
  Description of Artificial Sequence: Synthetic oligonucleotide
  Target: LAMA2; (-) strand; PAM type: YTN; PAM sequence: TTT
aaaaattaccgatagacatt

SEQ ID NO: 252229 - DNA, 20 bp, Artificial Sequence
  Description of Artificial Sequence: Synthetic oligonucleotide
  Target: LAMA2; (-) strand; PAM type: YTN; PAM sequence: TTT
taaaaattaccgatagacat

SEQ ID NO: 252230 - DNA, 20 bp, Artificial Sequence
  Description of Artificial Sequence: Synthetic oligonucleotide
  Target: LAMA2; (-) strand; PAM type: YTN; PAM sequence: CTC
ataataatcacagttttaaa

SEQ ID NO: 252231 - DNA, 20 bp, Artificial Sequence
  Description of Artificial Sequence: Synthetic oligonucleotide
  Target: LAMA2; (-) strand; PAM type: YTN; PAM sequence: TTG
actcataataatcacagttt

SEQ ID NO: 252232 - DNA, 20 bp, Artificial Sequence
  Description of Artificial Sequence: Synthetic oligonucleotide
  Target: LAMA2; (-) strand; PAM type: YTN; PAM sequence: CTA
ttgactcataataatcacag

SEQ ID NO: 252233 - DNA, 20 bp, Artificial Sequence
  Description of Artificial Sequence: Synthetic oligonucleotide
  Target: LAMA2; (-) strand; PAM type: YTN; PAM sequence: CTA
ctattgactcataataatca

SEQ ID NO: 252234 - DNA, 20 bp, Artificial Sequence
  Description of Artificial Sequence: Synthetic oligonucleotide
  Target: LAMA2; (-) strand; PAM type: YTN; PAM sequence: TTA
aatgactactattgactcat

SEQ ID NO: 252235 - DNA, 20 bp, Artificial Sequence
  Description of Artificial Sequence: Synthetic oligonucleotide
  Target: LAMA2; (-) strand; PAM type: YTN; PAM sequence: CTA
agagcacataattaaatgac

SEQ ID NO: 252236 - DNA, 20 bp, Artificial Sequence
  Description of Artificial Sequence: Synthetic oligonucleotide
  Target: LAMA2; (-) strand; PAM type: YTN; PAM sequence: CTC
taagagcacataattaaatg

SEQ ID NO: 252237 - DNA, 20 bp, Artificial Sequence
  Description of Artificial Sequence: Synthetic oligonucleotide
  Target: LAMA2; (-) strand; PAM type: YTN; PAM sequence: TTA
aataaactctaagagcacat

SEQ ID NO: 252238 - DNA, 20 bp, Artificial Sequence
  Description of Artificial Sequence: Synthetic oligonucleotide
  Target: LAMA2; (-) strand; PAM type: YTN; PAM sequence: TTT
aaataaactctaagagcaca

SEQ ID NO: 252239 - DNA, 20 bp, Artificial Sequence
  Description of Artificial Sequence: Synthetic oligonucleotide
  Target: LAMA2; (-) strand; PAM type: YTN; PAM sequence: TTT
taaataaactctaagagcac

SEQ ID NO: 252240 - DNA, 20 bp, Artificial Sequence
  Description of Artificial Sequence: Synthetic oligonucleotide
  Target: LAMA2; (-) strand; PAM type: YTN; PAM sequence: TTA
gtgcatgaaaataaatttta

SEQ ID NO: 252241 - DNA, 20 bp, Artificial Sequence
  Description of Artificial Sequence: Synthetic oligonucleotide
  Target: LAMA2; (-) strand; PAM type: YTN; PAM sequence: TTT
agtgcatgaaaataaatttt

SEQ ID NO: 252242 - DNA, 20 bp, Artificial Sequence
  Description of Artificial Sequence: Synthetic oligonucleotide
  Target: LAMA2; (-) strand; PAM type: YTN; PAM sequence: TTT
tagtgcatgaaaataaattt

SEQ ID NO: 252243 - DNA, 20 bp, Artificial Sequence
  Description of Artificial Sequence: Synthetic oligonucleotide
  Target: LAMA2; (-) strand; PAM type: YTN; PAM sequence: CTC
caaatcattttagtgcatga

SEQ ID NO: 252244 - DNA, 20 bp, Artificial Sequence
  Description of Artificial Sequence: Synthetic oligonucleotide
  Target: LAMA2; (-) strand; PAM type: YTN; PAM sequence: TTG
tatctccaaatcattttagt

SEQ ID NO: 252245 - DNA, 20 bp, Artificial Sequence
  Description of Artificial Sequence: Synthetic oligonucleotide
  Target: LAMA2; (-) strand; PAM type: YTN; PAM sequence: TTT
gtatctccaaatcattttag

SEQ ID NO: 252246 - DNA, 20 bp, Artificial Sequence
  Description of Artificial Sequence: Synthetic oligonucleotide
  Target: LAMA2; (-) strand; PAM type: YTN; PAM sequence: CTA
tttgtatctccaaatcattt

SEQ ID NO: 252247 - DNA, 20 bp, Artificial Sequence
  Description of Artificial Sequence: Synthetic oligonucleotide
  Target: LAMA2; (-) strand; PAM type: YTN; PAM sequence: TTC
actatttgtatctccaaatc

SEQ ID NO: 252248 - DNA, 20 bp, Artificial Sequence
  Description of Artificial Sequence: Synthetic oligonucleotide
  Target: LAMA2; (-) strand; PAM type: YTN; PAM sequence: TTT
cactatttgtatctccaaat

SEQ ID NO: 252249 - DNA, 20 bp, Artificial Sequence
  Description of Artificial Sequence: Synthetic oligonucleotide
  Target: LAMA2; (-) strand; PAM type: YTN; PAM sequence: TTT
tcactatttgtatctccaaa

SEQ ID NO: 252250 - DNA, 20 bp, Artificial Sequence
  Description of Artificial Sequence: Synthetic oligonucleotide
  Target: LAMA2; (-) strand; PAM type: YTN; PAM sequence: CTT
ttcactatttgtatctccaa

SEQ ID NO: 252251 - DNA, 20 bp, Artificial Sequence
  Description of Artificial Sequence: Synthetic oligonucleotide
  Target: LAMA2; (-) strand; PAM type: YTN; PAM sequence: TTA
caagaaatatacttttcact

SEQ ID NO: 252252 - DNA, 20 bp, Artificial Sequence
  Description of Artificial Sequence: Synthetic oligonucleotide
  Target: LAMA2; (-) strand; PAM type: YTN; PAM sequence: CTA
caaaacattacaagaaatat

SEQ ID NO: 252253 - DNA, 20 bp, Artificial Sequence
  Description of Artificial Sequence: Synthetic oligonucleotide
  Target: LAMA2; (-) strand; PAM type: YTN; PAM sequence: TTA
ctacaaaacattacaagaaa

SEQ ID NO: 252254 - DNA, 20 bp, Artificial Sequence
  Description of Artificial Sequence: Synthetic oligonucleotide
  Target: LAMA2; (-) strand; PAM type: YTN; PAM sequence: TTG
aaaccaaataaaaattacta

SEQ ID NO: 252255 - DNA, 20 bp, Artificial Sequence
  Description of Artificial Sequence: Synthetic oligonucleotide
  Target: LAMA2; (-) strand; PAM type: YTN; PAM sequence: CTG
ttgaaaccaaataaaaatta

SEQ ID NO: 252256 - DNA, 20 bp, Artificial Sequence
  Description of Artificial Sequence: Synthetic oligonucleotide
  Target: LAMA2; (-) strand; PAM type: YTN; PAM sequence: TTG
actgttgaaaccaaataaaa

SEQ ID NO: 252257 - DNA, 20 bp, Artificial Sequence
  Description of Artificial Sequence: Synthetic oligonucleotide
  Target: LAMA2; (-) strand; PAM type: YTN; PAM sequence: TTC
attgactgttgaaaccaaat

SEQ ID NO: 252258 - DNA, 20 bp, Artificial Sequence
  Description of Artificial Sequence: Synthetic oligonucleotide
  Target: LAMA2; (-) strand; PAM type: YTN; PAM sequence: TTT
cattgactgttgaaaccaaa

SEQ ID NO: 252259 - DNA, 20 bp, Artificial Sequence
  Description of Artificial Sequence: Synthetic oligonucleotide
  Target: LAMA2; (-) strand; PAM type: YTN; PAM sequence: TTT
tcattgactgttgaaaccaa

SEQ ID NO: 252260 - DNA, 20 bp, Artificial Sequence
  Description of Artificial Sequence: Synthetic oligonucleotide
  Target: LAMA2; (-) strand; PAM type: YTN; PAM sequence: CTA
ttttcattgactgttgaaac

SEQ ID NO: 252261 - DNA, 20 bp, Artificial Sequence
  Description of Artificial Sequence: Synthetic oligonucleotide
  Target: LAMA2; (-) strand; PAM type: YTN; PAM sequence: TTA
acctattttcattgactgtt

SEQ ID NO: 252262 - DNA, 20 bp, Artificial Sequence
  Description of Artificial Sequence: Synthetic oligonucleotide
  Target: LAMA2; (-) strand; PAM type: YTN; PAM sequence: TTA
ttaacctattttcattgact

SEQ ID NO: 252263 - DNA, 20 bp, Artificial Sequence
  Description of Artificial Sequence: Synthetic oligonucleotide
  Target: LAMA2; (-) strand; PAM type: YTN; PAM sequence: TTT
attaacctattttcattgac

SEQ ID NO: 252264 - DNA, 20 bp, Artificial Sequence
  Description of Artificial Sequence: Synthetic oligonucleotide
  Target: LAMA2; (-) strand; PAM type: YTN; PAM sequence: TTT
tattaacctattttcattga

SEQ ID NO: 252265 - DNA, 20 bp, Artificial Sequence
  Description of Artificial Sequence: Synthetic oligonucleotide
  Target: LAMA2; (-) strand; PAM type: YTN; PAM sequence: CTA
gacattttattaacctattt

SEQ ID NO: 252266 - DNA, 20 bp, Artificial Sequence
  Description of Artificial Sequence: Synthetic oligonucleotide
  Target: LAMA2; (-) strand; PAM type: YTN; PAM sequence: TTA
tgaaatactagacattttat

SEQ ID NO: 252267 - DNA, 20 bp, Artificial Sequence
  Description of Artificial Sequence: Synthetic oligonucleotide
  Target: LAMA2; (-) strand; PAM type: YTN; PAM sequence: TTA
ttatgaaatactagacattt

SEQ ID NO: 252268 - DNA, 20 bp, Artificial Sequence
  Description of Artificial Sequence: Synthetic oligonucleotide
  Target: LAMA2; (-) strand; PAM type: YTN; PAM sequence: TTG
gtataatatgtaacacacag

SEQ ID NO: 252269 - DNA, 20 bp, Artificial Sequence
  Description of Artificial Sequence: Synthetic oligonucleotide
  Target: LAMA2; (-) strand; PAM type: YTN; PAM sequence: CTT
ggtataatatgtaacacaca

SEQ ID NO: 252270 - DNA, 20 bp, Artificial Sequence
  Description of Artificial Sequence: Synthetic oligonucleotide
  Target: LAMA2; (-) strand; PAM type: YTN; PAM sequence: TTC
ttggtataatatgtaacaca

SEQ ID NO: 252271 - DNA, 20 bp, Artificial Sequence
  Description of Artificial Sequence: Synthetic oligonucleotide
  Target: LAMA2; (-) strand; PAM type: YTN; PAM sequence: CTT
cttggtataatatgtaacac

SEQ ID NO: 252272 - DNA, 20 bp, Artificial Sequence
  Description of Artificial Sequence: Synthetic oligonucleotide
  Target: LAMA2; (-) strand; PAM type: YTN; PAM sequence: TTA
aaaggaaatgaatataaact

SEQ ID NO: 252273 - DNA, 20 bp, Artificial Sequence
  Description of Artificial Sequence: Synthetic oligonucleotide
  Target: LAMA2; (-) strand; PAM type: YTN; PAM sequence: TTT
aaaaggaaatgaatataaac

SEQ ID NO: 252274 - DNA, 20 bp, Artificial Sequence
  Description of Artificial Sequence: Synthetic oligonucleotide
  Target: LAMA2; (-) strand; PAM type: YTN; PAM sequence: TTG
atttaaaaggaaatgaatat

SEQ ID NO: 252275 - DNA, 20 bp, Artificial Sequence
  Description of Artificial Sequence: Synthetic oligonucleotide
  Target: LAMA2; (-) strand; PAM type: YTN; PAM sequence: CTT
gatttaaaaggaaatgaata

SEQ ID NO: 252276 - DNA, 20 bp, Artificial Sequence
  Description of Artificial Sequence: Synthetic oligonucleotide
  Target: LAMA2; (-) strand; PAM type: YTN; PAM sequence: CTA
tacaatggagataatataat

SEQ ID NO: 252277 - DNA, 20 bp, Artificial Sequence
  Description of Artificial Sequence: Synthetic oligonucleotide
  Target: LAMA2; (-) strand; PAM type: YTN; PAM sequence: TTC
tatacaatggagataatata

SEQ ID NO: 252278 - DNA, 20 bp, Artificial Sequence
  Description of Artificial Sequence: Synthetic oligonucleotide
  Target: LAMA2; (-) strand; PAM type: YTN; PAM sequence: CTT
ctatacaatggagataatat

SEQ ID NO: 252279 - DNA, 20 bp, Artificial Sequence
  Description of Artificial Sequence: Synthetic oligonucleotide
  Target: LAMA2; (-) strand; PAM type: YTN; PAM sequence: TTC
ttctatacaatggagataat

SEQ ID NO: 252280 - DNA, 20 bp, Artificial Sequence
  Description of Artificial Sequence: Synthetic oligonucleotide
  Target: LAMA2; (-) strand; PAM type: YTN; PAM sequence: TTT
cttctatacaatggagataa

SEQ ID NO: 252281 - DNA, 20 bp, Artificial Sequence
  Description of Artificial Sequence: Synthetic oligonucleotide
  Target: LAMA2; (-) strand; PAM type: YTN; PAM sequence: TTT
tcttctatacaatggagata

SEQ ID NO: 252282 - DNA, 20 bp, Artificial Sequence
  Description of Artificial Sequence: Synthetic oligonucleotide
  Target: LAMA2; (-) strand; PAM type: YTN; PAM sequence: TTT
ttcttctatacaatggagat

SEQ ID NO: 252283 - DNA, 20 bp, Artificial Sequence
  Description of Artificial Sequence: Synthetic oligonucleotide
  Target: LAMA2; (-) strand; PAM type: YTN; PAM sequence: TTT
tttcttctatacaatggaga

SEQ ID NO: 252284 - DNA, 20 bp, Artificial Sequence
  Description of Artificial Sequence: Synthetic oligonucleotide
  Target: LAMA2; (-) strand; PAM type: YTN; PAM sequence: CTC
aattttttcttctatacaat

SEQ ID NO: 252285 - DNA, 20 bp, Artificial Sequence
  Description of Artificial Sequence: Synthetic oligonucleotide
  Target: LAMA2; (-) strand; PAM type: YTN; PAM sequence: CTA
ggcctcaattttttcttcta

SEQ ID NO: 252286 - DNA, 20 bp, Artificial Sequence
  Description of Artificial Sequence: Synthetic oligonucleotide
  Target: LAMA2; (-) strand; PAM type: YTN; PAM sequence: TTC
taggcctcaattttttcttc

SEQ ID NO: 252287 - DNA, 20 bp, Artificial Sequence
  Description of Artificial Sequence: Synthetic oligonucleotide
  Target: LAMA2; (-) strand; PAM type: YTN; PAM sequence: TTT
ctaggcctcaattttttctt

SEQ ID NO: 252288 - DNA, 20 bp, Artificial Sequence
  Description of Artificial Sequence: Synthetic oligonucleotide
  Target: LAMA2; (-) strand; PAM type: YTN; PAM sequence: CTT
tctaggcctcaattttttct

SEQ ID NO: 252289 - DNA, 20 bp, Artificial Sequence
  Description of Artificial Sequence: Synthetic oligonucleotide
  Target: LAMA2; (-) strand; PAM type: YTN; PAM sequence: TTC
tttctaggcctcaatttttt

SEQ ID NO: 252290 - DNA, 20 bp, Artificial Sequence
  Description of Artificial Sequence: Synthetic oligonucleotide
  Target: LAMA2; (-) strand; PAM type: YTN; PAM sequence: TTA
ttctttctaggcctcaattt

SEQ ID NO: 252291 - DNA, 20 bp, Artificial Sequence
  Description of Artificial Sequence: Synthetic oligonucleotide
  Target: LAMA2; (-) strand; PAM type: YTN; PAM sequence: CTT
attctttctaggcctcaatt

SEQ ID NO: 252292 - DNA, 20 bp, Artificial Sequence
  Description of Artificial Sequence: Synthetic oligonucleotide
  Target: LAMA2; (-) strand; PAM type: YTN; PAM sequence: CTA
gaagaaaataacttattctt

SEQ ID NO: 252293 - DNA, 20 bp, Artificial Sequence
  Description of Artificial Sequence: Synthetic oligonucleotide
  Target: LAMA2; (-) strand; PAM type: YTN; PAM sequence: TTG
tggcctagaagaaaataact

SEQ ID NO: 252294 - DNA, 20 bp, Artificial Sequence
  Description of Artificial Sequence: Synthetic oligonucleotide
  Target: LAMA2; (-) strand; PAM type: YTN; PAM sequence: CTT
gtggcctagaagaaaataac

SEQ ID NO: 252295 - DNA, 20 bp, Artificial Sequence
  Description of Artificial Sequence: Synthetic oligonucleotide
  Target: LAMA2; (-) strand; PAM type: YTN; PAM sequence: TTA
ccagccttgtggcctagaag

SEQ ID NO: 252296 - DNA, 20 bp, Artificial Sequence
  Description of Artificial Sequence: Synthetic oligonucleotide
  Target: LAMA2; (-) strand; PAM type: YTN; PAM sequence: TTT
accagccttgtggcctagaa

SEQ ID NO: 252297 - DNA, 20 bp, Artificial Sequence
  Description of Artificial Sequence: Synthetic oligonucleotide
  Target: LAMA2; (-) strand; PAM type: YTN; PAM sequence: CTG
atatttaccagccttgtggc

SEQ ID NO: 252298 - DNA, 20 bp, Artificial Sequence
  Description of Artificial Sequence: Synthetic oligonucleotide
  Target: LAMA2; (-) strand; PAM type: YTN; PAM sequence: CTC
tgatatttaccagccttgtg

SEQ ID NO: 252299 - DNA, 20 bp, Artificial Sequence
  Description of Artificial Sequence: Synthetic oligonucleotide
  Target: LAMA2; (-) strand; PAM type: YTN; PAM sequence: CTG
tctctgatatttaccagcct

SEQ ID NO: 252300 - DNA, 20 bp, Artificial Sequence
  Description of Artificial Sequence: Synthetic oligonucleotide
  Target: LAMA2; (-) strand; PAM type: YTN; PAM sequence: TTA
tatcctgtctctgatattta

SEQ ID NO: 252301 - DNA, 20 bp, Artificial Sequence
  Description of Artificial Sequence: Synthetic oligonucleotide
  Target: LAMA2; (-) strand; PAM type: YTN; PAM sequence: TTT
atatcctgtctctgatattt

SEQ ID NO: 252302 - DNA, 20 bp, Artificial Sequence
  Description of Artificial Sequence: Synthetic oligonucleotide
  Target: LAMA2; (-) strand; PAM type: YTN; PAM sequence: TTG
tgagtcaaatagaccaagat

SEQ ID NO: 252303 - DNA, 20 bp, Artificial Sequence
  Description of Artificial Sequence: Synthetic oligonucleotide
  Target: LAMA2; (-) strand; PAM type: YTN; PAM sequence: TTT
gtgagtcaaatagaccaaga

SEQ ID NO: 252304 - DNA, 20 bp, Artificial Sequence
  Description of Artificial Sequence: Synthetic oligonucleotide
  Target: LAMA2; (-) strand; PAM type: YTN; PAM sequence: TTT
tgtgagtcaaatagaccaag

SEQ ID NO: 252305 - DNA, 20 bp, Artificial Sequence
  Description of Artificial Sequence: Synthetic oligonucleotide
  Target: LAMA2; (-) strand; PAM type: YTN; PAM sequence: TTA
agaatacagttttgtgagtc

SEQ ID NO: 252306 - DNA, 20 bp, Artificial Sequence
  Description of Artificial Sequence: Synthetic oligonucleotide
  Target: LAMA2; (-) strand; PAM type: YTN; PAM sequence: TTA
ttaagaatacagttttgtga

SEQ ID NO: 252307 - DNA, 20 bp, Artificial Sequence
  Description of Artificial Sequence: Synthetic oligonucleotide
  Target: LAMA2; (-) strand; PAM type: YTN; PAM sequence: TTA
attattaagaatacagtttt

SEQ ID NO: 252308 - DNA, 20 bp, Artificial Sequence
  Description of Artificial Sequence: Synthetic oligonucleotide
  Target: LAMA2; (-) strand; PAM type: YTN; PAM sequence: CTT
aattattaagaatacagttt

SEQ ID NO: 252309 - DNA, 20 bp, Artificial Sequence
  Description of Artificial Sequence: Synthetic oligonucleotide
  Target: LAMA2; (-) strand; PAM type: YTN; PAM sequence: TTA
aaagcttaattattaagaat

SEQ ID NO: 252310 - DNA, 20 bp, Artificial Sequence
  Description of Artificial Sequence: Synthetic oligonucleotide
  Target: LAMA2; (-) strand; PAM type: YTN; PAM sequence: CTT
aaaagcttaattattaagaa

SEQ ID NO: 252311 - DNA, 20 bp, Artificial Sequence
  Description of Artificial Sequence: Synthetic oligonucleotide
  Target: LAMA2; (-) strand; PAM type: YTN; PAM sequence: TTG
tgtaaaaggacatcttaaaa

SEQ ID NO: 252312 - DNA, 20 bp, Artificial Sequence
  Description of Artificial Sequence: Synthetic oligonucleotide
  Target: LAMA2; (-) strand; PAM type: YTN; PAM sequence: TTT
gtgtaaaaggacatcttaaa

SEQ ID NO: 252313 - DNA, 20 bp, Artificial Sequence
  Description of Artificial Sequence: Synthetic oligonucleotide
  Target: LAMA2; (-) strand; PAM type: YTN; PAM sequence: TTT
tgtgtaaaaggacatcttaa

SEQ ID NO: 252314 - DNA, 20 bp, Artificial Sequence
  Description of Artificial Sequence: Synthetic oligonucleotide
  Target: LAMA2; (-) strand; PAM type: YTN; PAM sequence: TTT
ttgtgtaaaaggacatctta

SEQ ID NO: 252315 - DNA, 20 bp, Artificial Sequence
  Description of Artificial Sequence: Synthetic oligonucleotide
  Target: LAMA2; (-) strand; PAM type: YTN; PAM sequence: CTA
tttttgtgtaaaaggacatc

SEQ ID NO: 252316 - DNA, 20 bp, Artificial Sequence
  Description of Artificial Sequence: Synthetic oligonucleotide
  Target: LAMA2; (-) strand; PAM type: YTN; PAM sequence: TTC
ctatttttgtgtaaaaggac

SEQ ID NO: 252317 - DNA, 20 bp, Artificial Sequence
  Description of Artificial Sequence: Synthetic oligonucleotide
  Target: LAMA2; (-) strand; PAM type: YTN; PAM sequence: TTT
cctatttttgtgtaaaagga

SEQ ID NO: 252318 - DNA, 20 bp, Artificial Sequence
  Description of Artificial Sequence: Synthetic oligonucleotide
  Target: LAMA2; (-) strand; PAM type: YTN; PAM sequence: TTT
tcctatttttgtgtaaaagg

SEQ ID NO: 252319 - DNA, 20 bp, Artificial Sequence
  Description of Artificial Sequence: Synthetic oligonucleotide
  Target: LAMA2; (-) strand; PAM type: YTN; PAM sequence: CTT
ttcctatttttgtgtaaaag

SEQ ID NO: 252320 - DNA, 20 bp, Artificial Sequence
  Description of Artificial Sequence: Synthetic oligonucleotide
  Target: LAMA2; (-) strand; PAM type: YTN; PAM sequence: TTG
cttttcctatttttgtgtaa

SEQ ID NO: 252321 - DNA, 20 bp, Artificial Sequence
  Description of Artificial Sequence: Synthetic oligonucleotide
  Target: LAMA2; (-) strand; PAM type: YTN; PAM sequence: CTT
gcttttcctatttttgtgta

SEQ ID NO: 252322 - DNA, 20 bp, Artificial Sequence
  Description of Artificial Sequence: Synthetic oligonucleotide
  Target: LAMA2; (-) strand; PAM type: YTN; PAM sequence: TTA
cttgcttttcctatttttgt

SEQ ID NO: 252323 - DNA, 20 bp, Artificial Sequence
  Description of Artificial Sequence: Synthetic oligonucleotide
  Target: LAMA2; (-) strand; PAM type: YTN; PAM sequence: CTT
acttgcttttcctatttttg

SEQ ID NO: 252324 - DNA, 20 bp, Artificial Sequence
  Description of Artificial Sequence: Synthetic oligonucleotide
  Target: LAMA2; (-) strand; PAM type: YTN; PAM sequence: TTG
gtatcttacttgcttttcct

SEQ ID NO: 252325 - DNA, 20 bp, Artificial Sequence
  Description of Artificial Sequence: Synthetic oligonucleotide
  Target: LAMA2; (-) strand; PAM type: YTN; PAM sequence: TTA
ttggtatcttacttgctttt

SEQ ID NO: 252326 - DNA, 20 bp, Artificial Sequence
  Description of Artificial Sequence: Synthetic oligonucleotide
  Target: LAMA2; (-) strand; PAM type: YTN; PAM sequence: TTA
aataaatgttattggtatct

SEQ ID NO: 252327 - DNA, 20 bp, Artificial Sequence
  Description of Artificial Sequence: Synthetic oligonucleotide
  Target: LAMA2; (-) strand; PAM type: YTN; PAM sequence: TTT
aaataaatgttattggtatc

SEQ ID NO: 252328 - DNA, 20 bp, Artificial Sequence
  Description of Artificial Sequence: Synthetic oligonucleotide
  Target: LAMA2; (-) strand; PAM type: YTN; PAM sequence: TTT
taaataaatgttattggtat

SEQ ID NO: 252329 - DNA, 20 bp, Artificial Sequence
  Description of Artificial Sequence: Synthetic oligonucleotide
  Target: LAMA2; (-) strand; PAM type: YTN; PAM sequence: TTC
acattttaaataaatgttat

SEQ ID NO: 252330 - DNA, 20 bp, Artificial Sequence
  Description of Artificial Sequence: Synthetic oligonucleotide
  Target: LAMA2; (-) strand; PAM type: YTN; PAM sequence: CTA
tgcattcacattttaaataa

SEQ ID NO: 252331 - DNA, 20 bp, Artificial Sequence
  Description of Artificial Sequence: Synthetic oligonucleotide
  Target: LAMA2; (-) strand; PAM type: YTN; PAM sequence: TTA
ctatgcattcacattttaaa

SEQ ID NO: 252332 - DNA, 20 bp, Artificial Sequence
  Description of Artificial Sequence: Synthetic oligonucleotide
  Target: LAMA2; (-) strand; PAM type: YTN; PAM sequence: CTT
actatgcattcacattttaa

SEQ ID NO: 252333 - DNA, 20 bp, Artificial Sequence
  Description of Artificial Sequence: Synthetic oligonucleotide
  Target: LAMA2; (-) strand; PAM type: YTN; PAM sequence: TTC
ttactatgcattcacatttt

SEQ ID NO: 252334 - DNA, 20 bp, Artificial Sequence
  Description of Artificial Sequence: Synthetic oligonucleotide
  Target: LAMA2; (-) strand; PAM type: YTN; PAM sequence: TTT
cttactatgcattcacattt

SEQ ID NO: 252335 - DNA, 20 bp, Artificial Sequence
  Description of Artificial Sequence: Synthetic oligonucleotide
  Target: LAMA2; (-) strand; PAM type: YTN; PAM sequence: TTT
tcttactatgcattcacatt

SEQ ID NO: 252336 - DNA, 20 bp, Artificial Sequence
  Description of Artificial Sequence: Synthetic oligonucleotide
  Target: LAMA2; (-) strand; PAM type: YTN; PAM sequence: CTT
ttcttactatgcattcacat

SEQ ID NO: 252337 - DNA, 20 bp, Artificial Sequence
  Description of Artificial Sequence: Synthetic oligonucleotide
  Target: LAMA2; (-) strand; PAM type: YTN; PAM sequence: TTC
ttttcttactatgcattcac

SEQ ID NO: 252338 - DNA, 20 bp, Artificial Sequence
  Description of Artificial Sequence: Synthetic oligonucleotide
  Target: LAMA2; (-) strand; PAM type: YTN; PAM sequence: TTT
cttttcttactatgcattca

SEQ ID NO: 252339 - DNA, 20 bp, Artificial Sequence
  Description of Artificial Sequence: Synthetic oligonucleotide
  Target: LAMA2; (-) strand; PAM type: YTN; PAM sequence: CTG
tcacacacatatttcttttc

SEQ ID NO: 252340 - DNA, 20 bp, Artificial Sequence
  Description of Artificial Sequence: Synthetic oligonucleotide
  Target: LAMA2; (-) strand; PAM type: YTN; PAM sequence: TTG
gaaaaaaatgctgtcacaca

SEQ ID NO: 252341 - DNA, 20 bp, Artificial Sequence
  Description of Artificial Sequence: Synthetic oligonucleotide
  Target: LAMA2; (-) strand; PAM type: YTN; PAM sequence: TTG
gccaaatggaaaattggaaa

SEQ ID NO: 252342 - DNA, 20 bp, Artificial Sequence
  Description of Artificial Sequence: Synthetic oligonucleotide
  Target: LAMA2; (-) strand; PAM type: YTN; PAM sequence: TTT
ggccaaatggaaaattggaa

SEQ ID NO: 252343 - DNA, 20 bp, Artificial Sequence
  Description of Artificial Sequence: Synthetic oligonucleotide
  Target: LAMA2; (-) strand; PAM type: YTN; PAM sequence: CTG
gtttggccaaatggaaaatt

SEQ ID NO: 252344 - DNA, 20 bp, Artificial Sequence
  Description of Artificial Sequence: Synthetic oligonucleotide
  Target: LAMA2; (-) strand; PAM type: YTN; PAM sequence: TTA
gagaaaagctggtttggcca

SEQ ID NO: 252345 - DNA, 20 bp, Artificial Sequence
  Description of Artificial Sequence: Synthetic oligonucleotide
  Target: LAMA2; (-) strand; PAM type: YTN; PAM sequence: TTT
agagaaaagctggtttggcc

SEQ ID NO: 252346 - DNA, 20 bp, Artificial Sequence
  Description of Artificial Sequence: Synthetic oligonucleotide
  Target: LAMA2; (-) strand; PAM type: YTN; PAM sequence: TTT
tagagaaaagctggtttggc

SEQ ID NO: 252347 - DNA, 20 bp, Artificial Sequence
  Description of Artificial Sequence: Synthetic oligonucleotide
  Target: LAMA2; (-) strand; PAM type: YTN; PAM sequence: TTA
ttttagagaaaagctggttt

SEQ ID NO: 252348 - DNA, 20 bp, Artificial Sequence
  Description of Artificial Sequence: Synthetic oligonucleotide
  Target: LAMA2; (-) strand; PAM type: YTN; PAM sequence: CTC
attattttagagaaaagctg

SEQ ID NO: 252349 - DNA, 20 bp, Artificial Sequence
  Description of Artificial Sequence: Synthetic oligonucleotide
  Target: LAMA2; (-) strand; PAM type: YTN; PAM sequence: TTG
gcataactcattattttaga

SEQ ID NO: 252350 - DNA, 20 bp, Artificial Sequence
  Description of Artificial Sequence: Synthetic oligonucleotide
  Target: LAMA2; (-) strand; PAM type: YTN; PAM sequence: TTT
ggcataactcattattttag

SEQ ID NO: 252351 - DNA, 20 bp, Artificial Sequence
  Description of Artificial Sequence: Synthetic oligonucleotide
  Target: LAMA2; (-) strand; PAM type: YTN; PAM sequence: TTA
gcagagtgatttggcataac

SEQ ID NO: 252352 - DNA, 20 bp, Artificial Sequence
  Description of Artificial Sequence: Synthetic oligonucleotide
  Target: LAMA2; (-) strand; PAM type: YTN; PAM sequence: TTT
agcagagtgatttggcataa

SEQ ID NO: 252353 - DNA, 20 bp, Artificial Sequence
  Description of Artificial Sequence: Synthetic oligonucleotide
  Target: LAMA2; (-) strand; PAM type: YTN; PAM sequence: TTT
tagcagagtgatttggcata

SEQ ID NO: 252354 - DNA, 20 bp, Artificial Sequence
  Description of Artificial Sequence: Synthetic oligonucleotide
  Target: LAMA2; (-) strand; PAM type: YTN; PAM sequence: CTG
gtgattttagcagagtgatt

SEQ ID NO: 252355 - DNA, 20 bp, Artificial Sequence
  Description of Artificial Sequence: Synthetic oligonucleotide
  Target: LAMA2; (-) strand; PAM type: YTN; PAM sequence: TTG
tacaatctggtgattttagc

SEQ ID NO: 252356 - DNA, 20 bp, Artificial Sequence
  Description of Artificial Sequence: Synthetic oligonucleotide
  Target: LAMA2; (-) strand; PAM type: YTN; PAM sequence: TTT
gtacaatctggtgattttag

SEQ ID NO: 252357 - DNA, 20 bp, Artificial Sequence
  Description of Artificial Sequence: Synthetic oligonucleotide
  Target: LAMA2; (-) strand; PAM type: YTN; PAM sequence: TTT
tgtacaatctggtgatttta

SEQ ID NO: 252358 - DNA, 20 bp, Artificial Sequence
  Description of Artificial Sequence: Synthetic oligonucleotide
  Target: LAMA2; (-) strand; PAM type: YTN; PAM sequence: CTT
ttgtacaatctggtgatttt

SEQ ID NO: 252359 - DNA, 20 bp, Artificial Sequence
  Description of Artificial Sequence: Synthetic oligonucleotide
  Target: LAMA2; (-) strand; PAM type: YTN; PAM sequence: TTG
gtacttttgtacaatctggt

SEQ ID NO: 252360 - DNA, 20 bp, Artificial Sequence
  Description of Artificial Sequence: Synthetic oligonucleotide
  Target: LAMA2; (-) strand; PAM type: YTN; PAM sequence: TTA
ttggtacttttgtacaatct

SEQ ID NO: 252361 - DNA, 20 bp, Artificial Sequence
  Description of Artificial Sequence: Synthetic oligonucleotide
  Target: LAMA2; (-) strand; PAM type: YTN; PAM sequence: TTT
attggtacttttgtacaatc

SEQ ID NO: 252362 - DNA, 20 bp, Artificial Sequence
  Description of Artificial Sequence: Synthetic oligonucleotide
  Target: LAMA2; (-) strand; PAM type: YTN; PAM sequence: TTT
tattggtacttttgtacaat

SEQ ID NO: 252363 - DNA, 20 bp, Artificial Sequence
  Description of Artificial Sequence: Synthetic oligonucleotide
  Target: LAMA2; (-) strand; PAM type: YTN; PAM sequence: TTC
attttattggtacttttgta

SEQ ID NO: 252364 - DNA, 20 bp, Artificial Sequence
  Description of Artificial Sequence: Synthetic oligonucleotide
  Target: LAMA2; (-) strand; PAM type: YTN; PAM sequence: CTT
cattttattggtacttttgt

SEQ ID NO: 252365 - DNA, 20 bp, Artificial Sequence
  Description of Artificial Sequence: Synthetic oligonucleotide
  Target: LAMA2; (-) strand; PAM type: YTN; PAM sequence: CTA
tggccttcattttattggta

SEQ ID NO: 252366 - DNA, 20 bp, Artificial Sequence
  Description of Artificial Sequence: Synthetic oligonucleotide
  Target: LAMA2; (-) strand; PAM type: YTN; PAM sequence: CTG
tatctatggccttcatttta

SEQ ID NO: 252367 - DNA, 20 bp, Artificial Sequence
  Description of Artificial Sequence: Synthetic oligonucleotide
  Target: LAMA2; (-) strand; PAM type: YTN; PAM sequence: CTC
tgtatctatggccttcattt

SEQ ID NO: 252368 - DNA, 20 bp, Artificial Sequence
  Description of Artificial Sequence: Synthetic oligonucleotide
  Target: LAMA2; (-) strand; PAM type: YTN; PAM sequence: TTC
tctgtatctatggccttcat

SEQ ID NO: 252369 - DNA, 20 bp, Artificial Sequence
  Description of Artificial Sequence: Synthetic oligonucleotide
  Target: LAMA2; (-) strand; PAM type: YTN; PAM sequence: TTG
ttctctgtatctatggcctt

SEQ ID NO: 252370 - DNA, 20 bp, Artificial Sequence
  Description of Artificial Sequence: Synthetic oligonucleotide
  Target: LAMA2; (-) strand; PAM type: YTN; PAM sequence: TTA
aatccattgttctctgtatc

SEQ ID NO: 252371 - DNA, 20 bp, Artificial Sequence
  Description of Artificial Sequence: Synthetic oligonucleotide
  Target: LAMA2; (-) strand; PAM type: YTN; PAM sequence: CTA
aattaaatccattgttctct

SEQ ID NO: 252372 - DNA, 20 bp, Artificial Sequence
  Description of Artificial Sequence: Synthetic oligonucleotide
  Target: LAMA2; (-) strand; PAM type: YTN; PAM sequence: TTG
gcctaaattaaatccattgt

SEQ ID NO: 252373 - DNA, 20 bp, Artificial Sequence
  Description of Artificial Sequence: Synthetic oligonucleotide
  Target: LAMA2; (-) strand; PAM type: YTN; PAM sequence: TTT
ggcctaaattaaatccattg

SEQ ID NO: 252374 - DNA, 20 bp, Artificial Sequence
  Description of Artificial Sequence: Synthetic oligonucleotide
  Target: LAMA2; (-) strand; PAM type: YTN; PAM sequence: TTT
tggcctaaattaaatccatt

SEQ ID NO: 252375 - DNA, 20 bp, Artificial Sequence
  Description of Artificial Sequence: Synthetic oligonucleotide
  Target: LAMA2; (-) strand; PAM type: YTN; PAM sequence: TTT
ttggcctaaattaaatccat

SEQ ID NO: 252376 - DNA, 20 bp, Artificial Sequence
  Description of Artificial Sequence: Synthetic oligonucleotide
  Target: LAMA2; (-) strand; PAM type: YTN; PAM sequence: TTG
tttttggcctaaattaaatc

SEQ ID NO: 252377 - DNA, 20 bp, Artificial Sequence
  Description of Artificial Sequence: Synthetic oligonucleotide
  Target: LAMA2; (-) strand; PAM type: YTN; PAM sequence: TTT
gtttttggcctaaattaaat

SEQ ID NO: 252378 - DNA, 20 bp, Artificial Sequence
  Description of Artificial Sequence: Synthetic oligonucleotide
  Target: LAMA2; (-) strand; PAM type: YTN; PAM sequence: CTG
gaatttgtttttggcctaaa

SEQ ID NO: 252379 - DNA, 20 bp, Artificial Sequence
  Description of Artificial Sequence: Synthetic oligonucleotide
  Target: LAMA2; (-) strand; PAM type: YTN; PAM sequence: CTC
tggaatttgtttttggccta

SEQ ID NO: 252380 - DNA, 20 bp, Artificial Sequence
  Description of Artificial Sequence: Synthetic oligonucleotide
  Target: LAMA2; (-) strand; PAM type: YTN; PAM sequence: TTA
gaatgatctctggaatttgt

SEQ ID NO: 252381 - DNA, 20 bp, Artificial Sequence
  Description of Artificial Sequence: Synthetic oligonucleotide
  Target: LAMA2; (-) strand; PAM type: YTN; PAM sequence: CTT
agaatgatctctggaatttg

SEQ ID NO: 252382 - DNA, 20 bp, Artificial Sequence
  Description of Artificial Sequence: Synthetic oligonucleotide
  Target: LAMA2; (-) strand; PAM type: YTN; PAM sequence: CTG
acttagaatgatctctggaa

SEQ ID NO: 252383 - DNA, 20 bp, Artificial Sequence
  Description of Artificial Sequence: Synthetic oligonucleotide
  Target: LAMA2; (-) strand; PAM type: YTN; PAM sequence: TTG
actgacttagaatgatctct

SEQ ID NO: 252384 - DNA, 20 bp, Artificial Sequence
  Description of Artificial Sequence: Synthetic oligonucleotide
  Target: LAMA2; (-) strand; PAM type: YTN; PAM sequence: CTC
agttgactgacttagaatga

SEQ ID NO: 252385 - DNA, 20 bp, Artificial Sequence
  Description of Artificial Sequence: Synthetic oligonucleotide
  Target: LAMA2; (-) strand; PAM type: YTN; PAM sequence: CTC
aaagtgctcagttgactgac

SEQ ID NO: 252386 - DNA, 20 bp, Artificial Sequence
  Description of Artificial Sequence: Synthetic oligonucleotide
  Target: LAMA2; (-) strand; PAM type: YTN; PAM sequence: TTC
tcaaagtgctcagttgactg

SEQ ID NO: 252387 - DNA, 20 bp, Artificial Sequence
  Description of Artificial Sequence: Synthetic oligonucleotide
  Target: LAMA2; (-) strand; PAM type: YTN; PAM sequence: TTT
ctcaaagtgctcagttgact

SEQ ID NO: 252388 - DNA, 20 bp, Artificial Sequence
  Description of Artificial Sequence: Synthetic oligonucleotide
  Target: LAMA2; (-) strand; PAM type: YTN; PAM sequence: CTT
tctcaaagtgctcagttgac

SEQ ID NO: 252389 - DNA, 20 bp, Artificial Sequence
  Description of Artificial Sequence: Synthetic oligonucleotide
  Target: LAMA2; (-) strand; PAM type: YTN; PAM sequence: CTA
aactttctcaaagtgctcag

SEQ ID NO: 252390 - DNA, 20 bp, Artificial Sequence
  Description of Artificial Sequence: Synthetic oligonucleotide
  Target: LAMA2; (-) strand; PAM type: YTN; PAM sequence: TTG
gtataagctaaactttctca

SEQ ID NO: 252391 - DNA, 20 bp, Artificial Sequence
  Description of Artificial Sequence: Synthetic oligonucleotide
  Target: LAMA2; (-) strand; PAM type: YTN; PAM sequence: TTG
tagttggtataagctaaact

SEQ ID NO: 252392 - DNA, 20 bp, Artificial Sequence
  Description of Artificial Sequence: Synthetic oligonucleotide
  Target: LAMA2; (-) strand; PAM type: YTN; PAM sequence: TTT
gtagttggtataagctaaac

SEQ ID NO: 252393 - DNA, 20 bp, Artificial Sequence
  Description of Artificial Sequence: Synthetic oligonucleotide
  Target: LAMA2; (-) strand; PAM type: YTN; PAM sequence: TTG
tttgtagttggtataagcta

SEQ ID NO: 252394 - DNA, 20 bp, Artificial Sequence
  Description of Artificial Sequence: Synthetic oligonucleotide
  Target: LAMA2; (-) strand; PAM type: YTN; PAM sequence: CTT
gtttgtagttggtataagct

SEQ ID NO: 252395 - DNA, 20 bp, Artificial Sequence
  Description of Artificial Sequence: Synthetic oligonucleotide
  Target: LAMA2; (-) strand; PAM type: YTN; PAM sequence: CTG
cttgtttgtagttggtataa

SEQ ID NO: 252396 - DNA, 20 bp, Artificial Sequence
  Description of Artificial Sequence: Synthetic oligonucleotide
  Target: LAMA2; (-) strand; PAM type: YTN; PAM sequence: TTA
gagataaatctgcttgtttg

SEQ ID NO: 252397 - DNA, 20 bp, Artificial Sequence
  Description of Artificial Sequence: Synthetic oligonucleotide
  Target: LAMA2; (-) strand; PAM type: YTN; PAM sequence: CTT
agagataaatctgcttgttt

SEQ ID NO: 252398 - DNA, 20 bp, Artificial Sequence
  Description of Artificial Sequence: Synthetic oligonucleotide
  Target: LAMA2; (-) strand; PAM type: YTN; PAM sequence: TTC
ttagagataaatctgcttgt

SEQ ID NO: 252399 - DNA, 20 bp, Artificial Sequence
  Description of Artificial Sequence: Synthetic oligonucleotide
  Target: LAMA2; (-) strand; PAM type: YTN; PAM sequence: TTT
cttagagataaatctgcttg

SEQ ID NO: 252400 - DNA, 20 bp, Artificial Sequence
  Description of Artificial Sequence: Synthetic oligonucleotide
  Target: LAMA2; (-) strand; PAM type: YTN; PAM sequence: TTT
tcttagagataaatctgctt

SEQ ID NO: 252401 - DNA, 20 bp, Artificial Sequence
  Description of Artificial Sequence: Synthetic oligonucleotide
  Target: LAMA2; (-) strand; PAM type: YTN; PAM sequence: TTT
ttcttagagataaatctgct

SEQ ID NO: 252402 - DNA, 20 bp, Artificial Sequence
  Description of Artificial Sequence: Synthetic oligonucleotide
  Target: LAMA2; (-) strand; PAM type: YTN; PAM sequence: CTT
tttcttagagataaatctgc

SEQ ID NO: 252403 - DNA, 20 bp, Artificial Sequence
  Description of Artificial Sequence: Synthetic oligonucleotide
  Target: LAMA2; (-) strand; PAM type: YTN; PAM sequence: TTC
tttttcttagagataaatct

SEQ ID NO: 252404 - DNA, 20 bp, Artificial Sequence
  Description of Artificial Sequence: Synthetic oligonucleotide
  Target: LAMA2; (-) strand; PAM type: YTN; PAM sequence: TTT
ctttttcttagagataaatc

SEQ ID NO: 252405 - DNA, 20 bp, Artificial Sequence
  Description of Artificial Sequence: Synthetic oligonucleotide
  Target: LAMA2; (-) strand; PAM type: YTN; PAM sequence: TTT
tctttttcttagagataaat

SEQ ID NO: 252406 - DNA, 20 bp, Artificial Sequence
  Description of Artificial Sequence: Synthetic oligonucleotide
  Target: LAMA2; (-) strand; PAM type: YTN; PAM sequence: TTG
ttttctttttcttagagata

SEQ ID NO: 252407 - DNA, 20 bp, Artificial Sequence
  Description of Artificial Sequence: Synthetic oligonucleotide
  Target: LAMA2; (-) strand; PAM type: YTN; PAM sequence: TTT
gttttctttttcttagagat

SEQ ID NO: 252408 - DNA, 20 bp, Artificial Sequence
  Description of Artificial Sequence: Synthetic oligonucleotide
  Target: LAMA2; (-) strand; PAM type: YTN; PAM sequence: TTT
tgttttctttttcttagaga

SEQ ID NO: 252409 - DNA, 20 bp, Artificial Sequence
  Description of Artificial Sequence: Synthetic oligonucleotide
  Target: LAMA2; (-) strand; PAM type: YTN; PAM sequence: TTG
aaataaaagatggaaacaat

SEQ ID NO: 252410 - DNA, 20 bp, Artificial Sequence
  Description of Artificial Sequence: Synthetic oligonucleotide
  Target: LAMA2; (-) strand; PAM type: YTN; PAM sequence: TTA
aattgaaataaaagatggaa

SEQ ID NO: 252411 - DNA, 20 bp, Artificial Sequence
  Description of Artificial Sequence: Synthetic oligonucleotide
  Target: LAMA2; (-) strand; PAM type: YTN; PAM sequence: TTT
aaattgaaataaaagatgga

SEQ ID NO: 252412 - DNA, 20 bp, Artificial Sequence
  Description of Artificial Sequence: Synthetic oligonucleotide
  Target: LAMA2; (-) strand; PAM type: YTN; PAM sequence: TTT
taaattgaaataaaagatgg

SEQ ID NO: 252413 - DNA, 20 bp, Artificial Sequence
  Description of Artificial Sequence: Synthetic oligonucleotide
  Target: LAMA2; (-) strand; PAM type: YTN; PAM sequence: CTT
ttaaattgaaataaaagatg

SEQ ID NO: 252414 - DNA, 20 bp, Artificial Sequence
  Description of Artificial Sequence: Synthetic oligonucleotide
  Target: LAMA2; (-) strand; PAM type: YTN; PAM sequence: TTA
gcttttaaattgaaataaaa

SEQ ID NO: 252415 - DNA, 20 bp, Artificial Sequence
  Description of Artificial Sequence: Synthetic oligonucleotide
  Target: LAMA2; (-) strand; PAM type: YTN; PAM sequence: CTT
agcttttaaattgaaataaa

SEQ ID NO: 252416 - DNA, 20 bp, Artificial Sequence
  Description of Artificial Sequence: Synthetic oligonucleotide
  Target: LAMA2; (-) strand; PAM type: YTN; PAM sequence: TTC
catcttagcttttaaattga

SEQ ID NO: 252417 - DNA, 20 bp, Artificial Sequence
  Description of Artificial Sequence: Synthetic oligonucleotide
  Target: LAMA2; (-) strand; PAM type: YTN; PAM sequence: TTA
atattccatcttagctttta

SEQ ID NO: 252418 - DNA, 20 bp, Artificial Sequence
  Description of Artificial Sequence: Synthetic oligonucleotide
  Target: LAMA2; (-) strand; PAM type: YTN; PAM sequence: TTA
aacaaggaaagcagaagtag

SEQ ID NO: 252419 - DNA, 20 bp, Artificial Sequence
  Description of Artificial Sequence: Synthetic oligonucleotide
  Target: LAMA2; (-) strand; PAM type: YTN; PAM sequence: CTT
aaacaaggaaagcagaagta

SEQ ID NO: 252420 - DNA, 20 bp, Artificial Sequence
  Description of Artificial Sequence: Synthetic oligonucleotide
  Target: LAMA2; (-) strand; PAM type: YTN; PAM sequence: TTA
gtgcttaaacaaggaaagca

SEQ ID NO: 252421 - DNA, 20 bp, Artificial Sequence
  Description of Artificial Sequence: Synthetic oligonucleotide
  Target: LAMA2; (-) strand; PAM type: YTN; PAM sequence: TTT
agtgcttaaacaaggaaagc

SEQ ID NO: 252422 - DNA, 20 bp, Artificial Sequence
  Description of Artificial Sequence: Synthetic oligonucleotide
  Target: LAMA2; (-) strand; PAM type: YTN; PAM sequence: TTT
tagtgcttaaacaaggaaag

SEQ ID NO: 252423 - DNA, 20 bp, Artificial Sequence
  Description of Artificial Sequence: Synthetic oligonucleotide
  Target: LAMA2; (-) strand; PAM type: YTN; PAM sequence: CTT
ttagtgcttaaacaaggaaa

SEQ ID NO: 252424 - DNA, 20 bp, Artificial Sequence
  Description of Artificial Sequence: Synthetic oligonucleotide
  Target: LAMA2; (-) strand; PAM type: YTN; PAM sequence: TTC
ttttagtgcttaaacaagga

SEQ ID NO: 252425 - DNA, 20 bp, Artificial Sequence
  Description of Artificial Sequence: Synthetic oligonucleotide
  Target: LAMA2; (-) strand; PAM type: YTN; PAM sequence: TTT
cttttagtgcttaaacaagg

SEQ ID NO: 252426 - DNA, 20 bp, Artificial Sequence
  Description of Artificial Sequence: Synthetic oligonucleotide
  Target: LAMA2; (-) strand; PAM type: YTN; PAM sequence: TTG
atttcttttagtgcttaaac

SEQ ID NO: 252427 - DNA, 20 bp, Artificial Sequence
  Description of Artificial Sequence: Synthetic oligonucleotide
  Target: LAMA2; (-) strand; PAM type: YTN; PAM sequence: CTT
gatttcttttagtgcttaaa

SEQ ID NO: 252428 - DNA, 20 bp, Artificial Sequence
  Description of Artificial Sequence: Synthetic oligonucleotide
  Target: LAMA2; (-) strand; PAM type: YTN; PAM sequence: CTG
cttgatttcttttagtgctt

SEQ ID NO: 252429 - DNA, 20 bp, Artificial Sequence
  Description of Artificial Sequence: Synthetic oligonucleotide
  Target: LAMA2; (-) strand; PAM type: YTN; PAM sequence: TTC
caatgactgcttgatttctt

SEQ ID NO: 252430 - DNA, 20 bp, Artificial Sequence
  Description of Artificial Sequence: Synthetic oligonucleotide
  Target: LAMA2; (-) strand; PAM type: YTN; PAM sequence: TTA
aaaaagaaaacattccaatg

SEQ ID NO: 252431 - DNA, 20 bp, Artificial Sequence
  Description of Artificial Sequence: Synthetic oligonucleotide
  Target: LAMA2; (-) strand; PAM type: YTN; PAM sequence: TTT
aaaaaagaaaacattccaat

SEQ ID NO: 252432 - DNA, 20 bp, Artificial Sequence
  Description of Artificial Sequence: Synthetic oligonucleotide
  Target: LAMA2; (-) strand; PAM type: YTN; PAM sequence: TTT
taaaaaagaaaacattccaa

SEQ ID NO: 252433 - DNA, 20 bp, Artificial Sequence
  Description of Artificial Sequence: Synthetic oligonucleotide
  Target: LAMA2; (-) strand; PAM type: YTN; PAM sequence: CTT
ttaaaaaagaaaacattcca

SEQ ID NO: 252434 - DNA, 20 bp, Artificial Sequence
  Description of Artificial Sequence: Synthetic oligonucleotide
  Target: LAMA2; (-) strand; PAM type: YTN; PAM sequence: TTA
aagggtcttttaaaaaagaa

SEQ ID NO: 252435 - DNA, 20 bp, Artificial Sequence
  Description of Artificial Sequence: Synthetic oligonucleotide
  Target: LAMA2; (-) strand; PAM type: YTN; PAM sequence: TTA
aaatcatatagttaaagggt

SEQ ID NO: 252436 - DNA, 20 bp, Artificial Sequence
  Description of Artificial Sequence: Synthetic oligonucleotide
  Target: LAMA2; (-) strand; PAM type: YTN; PAM sequence: TTT
aaaatcatatagttaaaggg

SEQ ID NO: 252437 - DNA, 20 bp, Artificial Sequence
  Description of Artificial Sequence: Synthetic oligonucleotide
  Target: LAMA2; (-) strand; PAM type: YTN; PAM sequence: TTT
taaaatcatatagttaaagg

SEQ ID NO: 252438 - DNA, 20 bp, Artificial Sequence
  Description of Artificial Sequence: Synthetic oligonucleotide
  Target: LAMA2; (-) strand; PAM type: YTN; PAM sequence: TTT
ttaaaatcatatagttaaag

SEQ ID NO: 252439 - DNA, 20 bp, Artificial Sequence
  Description of Artificial Sequence: Synthetic oligonucleotide
  Target: LAMA2; (-) strand; PAM type: YTN; PAM sequence: TTG
gagacagacatttttaaaat

SEQ ID NO: 252440 - DNA, 20 bp, Artificial Sequence
  Description of Artificial Sequence: Synthetic oligonucleotide
  Target: LAMA2; (-) strand; PAM type: YTN; PAM sequence: TTT
ggagacagacatttttaaaa

SEQ ID NO: 252441 - DNA, 20 bp, Artificial Sequence
  Description of Artificial Sequence: Synthetic oligonucleotide
  Target: LAMA2; (-) strand; PAM type: YTN; PAM sequence: TTT
tggagacagacatttttaaa

SEQ ID NO: 252442 - DNA, 20 bp, Artificial Sequence
  Description of Artificial Sequence: Synthetic oligonucleotide
  Target: LAMA2; (-) strand; PAM type: YTN; PAM sequence: TTT
ttggagacagacatttttaa

SEQ ID NO: 252443 - DNA, 20 bp, Artificial Sequence
  Description of Artificial Sequence: Synthetic oligonucleotide
  Target: LAMA2; (-) strand; PAM type: YTN; PAM sequence: TTT
tttggagacagacattttta

SEQ ID NO: 252444 - DNA, 20 bp, Artificial Sequence
  Description of Artificial Sequence: Synthetic oligonucleotide
  Target: LAMA2; (-) strand; PAM type: YTN; PAM sequence: TTC
attttttggagacagacatt

SEQ ID NO: 252445 - DNA, 20 bp, Artificial Sequence
  Description of Artificial Sequence: Synthetic oligonucleotide
  Target: LAMA2; (-) strand; PAM type: YTN; PAM sequence: TTT
cattttttggagacagacat

SEQ ID NO: 252446 - DNA, 20 bp, Artificial Sequence
  Description of Artificial Sequence: Synthetic oligonucleotide
  Target: LAMA2; (-) strand; PAM type: YTN; PAM sequence: TTT
tcattttttggagacagaca

SEQ ID NO: 252447 - DNA, 20 bp, Artificial Sequence
  Description of Artificial Sequence: Synthetic oligonucleotide
  Target: LAMA2; (-) strand; PAM type: YTN; PAM sequence: TTG
attttcattttttggagaca

SEQ ID NO: 252448 - DNA, 20 bp, Artificial Sequence
  Description of Artificial Sequence: Synthetic oligonucleotide
  Target: LAMA2; (-) strand; PAM type: YTN; PAM sequence: TTT
gattttcattttttggagac

SEQ ID NO: 252449 - DNA, 20 bp, Artificial Sequence
  Description of Artificial Sequence: Synthetic oligonucleotide
  Target: LAMA2; (-) strand; PAM type: YTN; PAM sequence: TTT
tgattttcattttttggaga

SEQ ID NO: 252450 - DNA, 20 bp, Artificial Sequence
  Description of Artificial Sequence: Synthetic oligonucleotide
  Target: LAMA2; (-) strand; PAM type: YTN; PAM sequence: CTA
tgtgttttgattttcatttt

SEQ ID NO: 252451 - DNA, 20 bp, Artificial Sequence
  Description of Artificial Sequence: Synthetic oligonucleotide
  Target: LAMA2; (-) strand; PAM type: YTN; PAM sequence: TTG
gctatgtgttttgattttca

SEQ ID NO: 252452 - DNA, 20 bp, Artificial Sequence
  Description of Artificial Sequence: Synthetic oligonucleotide
  Target: LAMA2; (-) strand; PAM type: YTN; PAM sequence: CTT
ggctatgtgttttgattttc

SEQ ID NO: 252453 - DNA, 20 bp, Artificial Sequence
  Description of Artificial Sequence: Synthetic oligonucleotide
  Target: LAMA2; (-) strand; PAM type: YTN; PAM sequence: CTC
ttggctatgtgttttgattt

SEQ ID NO: 252454 - DNA, 20 bp, Artificial Sequence
  Description of Artificial Sequence: Synthetic oligonucleotide
  Target: LAMA2; (-) strand; PAM type: YTN; PAM sequence: TTG
gctcttggctatgtgttttg

SEQ ID NO: 252455 - DNA, 20 bp, Artificial Sequence
  Description of Artificial Sequence: Synthetic oligonucleotide
  Target: LAMA2; (-) strand; PAM type: YTN; PAM sequence: CTT
ggctcttggctatgtgtttt

SEQ ID NO: 252456 - DNA, 20 bp, Artificial Sequence
  Description of Artificial Sequence: Synthetic oligonucleotide
  Target: LAMA2; (-) strand; PAM type: YTN; PAM sequence: CTC
ttggctcttggctatgtgtt

SEQ ID NO: 252457 - DNA, 20 bp, Artificial Sequence
  Description of Artificial Sequence: Synthetic oligonucleotide
  Target: LAMA2; (-) strand; PAM type: YTN; PAM sequence: CTC
gtctcttggctcttggctat

SEQ ID NO: 252458 - DNA, 20 bp, Artificial Sequence
  Description of Artificial Sequence: Synthetic oligonucleotide
  Target: LAMA2; (-) strand; PAM type: YTN; PAM sequence: TTC
ctcgtctcttggctcttggc

SEQ ID NO: 252459 - DNA, 20 bp, Artificial Sequence
  Description of Artificial Sequence: Synthetic oligonucleotide
  Target: LAMA2; (-) strand; PAM type: YTN; PAM sequence: CTT
cctcgtctcttggctcttgg

SEQ ID NO: 252460 - DNA, 20 bp, Artificial Sequence
  Description of Artificial Sequence: Synthetic oligonucleotide
  Target: LAMA2; (-) strand; PAM type: YTN; PAM sequence: TTC
ttcctcgtctcttggctctt

SEQ ID NO: 252461 - DNA, 20 bp, Artificial Sequence
  Description of Artificial Sequence: Synthetic oligonucleotide
  Target: LAMA2; (-) strand; PAM type: YTN; PAM sequence: CTG
aaaagatatgagaatgttct

SEQ ID NO: 252462 - DNA, 20 bp, Artificial Sequence
  Description of Artificial Sequence: Synthetic oligonucleotide
  Target: LAMA2; (-) strand; PAM type: YTN; PAM sequence: CTC
caaatgctgaaaagatatga

SEQ ID NO: 252463 - DNA, 20 bp, Artificial Sequence
  Description of Artificial Sequence: Synthetic oligonucleotide
  Target: LAMA2; (-) strand; PAM type: YTN; PAM sequence: CTC
acaatcaccaccacctccaa

SEQ ID NO: 252464 - DNA, 20 bp, Artificial Sequence
  Description of Artificial Sequence: Synthetic oligonucleotide
  Target: LAMA2; (-) strand; PAM type: YTN; PAM sequence: CTA
aagtgctcacaatcaccacc

SEQ ID NO: 252465 - DNA, 20 bp, Artificial Sequence
  Description of Artificial Sequence: Synthetic oligonucleotide
  Target: LAMA2; (-) strand; PAM type: YTN; PAM sequence: CTC
agtctaaagtgctcacaatc

SEQ ID NO: 252466 - DNA, 20 bp, Artificial Sequence
  Description of Artificial Sequence: Synthetic oligonucleotide
  Target: LAMA2; (-) strand; PAM type: YTN; PAM sequence: TTG
gctcagtctaaagtgctcac

SEQ ID NO: 252467 - DNA, 20 bp, Artificial Sequence
  Description of Artificial Sequence: Synthetic oligonucleotide
  Target: LAMA2; (-) strand; PAM type: YTN; PAM sequence: TTA
ggtcaagttggctcagtcta

SEQ ID NO: 252468 - DNA, 20 bp, Artificial Sequence
  Description of Artificial Sequence: Synthetic oligonucleotide
  Target: LAMA2; (-) strand; PAM type: YTN; PAM sequence: TTG
tcatattaggtcaagttggc

SEQ ID NO: 252469 - DNA, 20 bp, Artificial Sequence
  Description of Artificial Sequence: Synthetic oligonucleotide
  Target: LAMA2; (-) strand; PAM type: YTN; PAM sequence: TTT
gtcatattaggtcaagttgg

SEQ ID NO: 252470 - DNA, 20 bp, Artificial Sequence
  Description of Artificial Sequence: Synthetic oligonucleotide
  Target: LAMA2; (-) strand; PAM type: YTN; PAM sequence: CTT
tgtcatattaggtcaagttg

SEQ ID NO: 252471 - DNA, 20 bp, Artificial Sequence
  Description of Artificial Sequence: Synthetic oligonucleotide
  Target: LAMA2; (-) strand; PAM type: YTN; PAM sequence: CTG
gtcctttgtcatattaggtc

SEQ ID NO: 252472 - DNA, 20 bp, Artificial Sequence
  Description of Artificial Sequence: Synthetic oligonucleotide
  Target: LAMA2; (-) strand; PAM type: YTN; PAM sequence: CTC
tggtcctttgtcatattagg

SEQ ID NO: 252473 - DNA, 20 bp, Artificial Sequence
  Description of Artificial Sequence: Synthetic oligonucleotide
  Target: LAMA2; (-) strand; PAM type: YTN; PAM sequence: CTG
atgaataccataaccaaaag

SEQ ID NO: 252474 - DNA, 20 bp, Artificial Sequence
  Description of Artificial Sequence: Synthetic oligonucleotide
  Target: LAMA2; (-) strand; PAM type: YTN; PAM sequence: CTG
agaaaggaagctgatgaata

SEQ ID NO: 252475 - DNA, 20 bp, Artificial Sequence
  Description of Artificial Sequence: Synthetic oligonucleotide
  Target: LAMA2; (-) strand; PAM type: YTN; PAM sequence: TTA
tgcatgctgagaaaggaagc

SEQ ID NO: 252476 - DNA, 20 bp, Artificial Sequence
  Description of Artificial Sequence: Synthetic oligonucleotide
  Target: LAMA2; (-) strand; PAM type: YTN; PAM sequence: CTG
taggaatcgtacagcaacaa

SEQ ID NO: 252477 - DNA, 20 bp, Artificial Sequence
  Description of Artificial Sequence: Synthetic oligonucleotide
  Target: LAMA2; (-) strand; PAM type: YTN; PAM sequence: TTA
tacagctgtaggaatcgtac

SEQ ID NO: 252478 - DNA, 20 bp, Artificial Sequence
  Description of Artificial Sequence: Synthetic oligonucleotide
  Target: LAMA2; (-) strand; PAM type: YTN; PAM sequence: TTA
ggtattatacagctgtagga

SEQ ID NO: 252479 - DNA, 20 bp, Artificial Sequence
  Description of Artificial Sequence: Synthetic oligonucleotide
  Target: LAMA2; (-) strand; PAM type: YTN; PAM sequence: CTT
aggtattatacagctgtagg

SEQ ID NO: 252480 - DNA, 20 bp, Artificial Sequence
  Description of Artificial Sequence: Synthetic oligonucleotide
  Target: LAMA2; (-) strand; PAM type: YTN; PAM sequence: TTC
ttaggtattatacagctgta

SEQ ID NO: 252481 - DNA, 20 bp, Artificial Sequence
  Description of Artificial Sequence: Synthetic oligonucleotide
  Target: LAMA2; (-) strand; PAM type: YTN; PAM sequence: CTA
tggcagaggaaaaaagagat

SEQ ID NO: 252482 - DNA, 20 bp, Artificial Sequence
  Description of Artificial Sequence: Synthetic oligonucleotide
  Target: LAMA2; (-) strand; PAM type: YTN; PAM sequence: CTC
aacctatggcagaggaaaaa

SEQ ID NO: 252483 - DNA, 20 bp, Artificial Sequence
  Description of Artificial Sequence: Synthetic oligonucleotide
  Target: LAMA2; (-) strand; PAM type: YTN; PAM sequence: TTA
acagagctcaacctatggca

SEQ ID NO: 252484 - DNA, 20 bp, Artificial Sequence
  Description of Artificial Sequence: Synthetic oligonucleotide
  Target: LAMA2; (-) strand; PAM type: YTN; PAM sequence: TTC
aaggttaacagagctcaacc

SEQ ID NO: 252485 - DNA, 20 bp, Artificial Sequence
  Description of Artificial Sequence: Synthetic oligonucleotide
  Target: LAMA2; (-) strand; PAM type: YTN; PAM sequence: TTC
catcagtaggataggagaca

SEQ ID NO: 252486 - DNA, 20 bp, Artificial Sequence
  Description of Artificial Sequence: Synthetic oligonucleotide
  Target: LAMA2; (-) strand; PAM type: YTN; PAM sequence: CTT
ccatcagtaggataggagac

SEQ ID NO: 252487 - DNA, 20 bp, Artificial Sequence
  Description of Artificial Sequence: Synthetic oligonucleotide
  Target: LAMA2; (-) strand; PAM type: YTN; PAM sequence: CTG
caatgcttccatcagtagga

SEQ ID NO: 252488 - DNA, 20 bp, Artificial Sequence
  Description of Artificial Sequence: Synthetic oligonucleotide
  Target: LAMA2; (-) strand; PAM type: YTN; PAM sequence: CTG
ctgcaatgcttccatcagta

SEQ ID NO: 252489 - DNA, 20 bp, Artificial Sequence
  Description of Artificial Sequence: Synthetic oligonucleotide
  Target: LAMA2; (-) strand; PAM type: YTN; PAM sequence: CTA
cagctgctgcaatgcttcca

SEQ ID NO: 252490 - DNA, 20 bp, Artificial Sequence
  Description of Artificial Sequence: Synthetic oligonucleotide
  Target: LAMA2; (-) strand; PAM type: YTN; PAM sequence: TTC
tacagctgctgcaatgcttc

SEQ ID NO: 252491 - DNA, 20 bp, Artificial Sequence
  Description of Artificial Sequence: Synthetic oligonucleotide
  Target: LAMA2; (-) strand; PAM type: YTN; PAM sequence: CTT
ctacagctgctgcaatgctt

SEQ ID NO: 252492 - DNA, 20 bp, Artificial Sequence
  Description of Artificial Sequence: Synthetic oligonucleotide
  Target: LAMA2; (-) strand; PAM type: YTN; PAM sequence: CTG
acacacttctacagctgctg

SEQ ID NO: 252493 - DNA, 20 bp, Artificial Sequence
  Description of Artificial Sequence: Synthetic oligonucleotide
  Target: LAMA2; (-) strand; PAM type: YTN; PAM sequence: CTG
gtgggcactgacacacttct

SEQ ID NO: 252494 - DNA, 20 bp, Artificial Sequence
  Description of Artificial Sequence: Synthetic oligonucleotide
  Target: LAMA2; (-) strand; PAM type: YTN; PAM sequence: TTC
acaagaggagccagtatacc

SEQ ID NO: 252495 - DNA, 20 bp, Artificial Sequence
  Description of Artificial Sequence: Synthetic oligonucleotide
  Target: LAMA2; (-) strand; PAM type: YTN; PAM sequence: CTT
cacaagaggagccagtatac

SEQ ID NO: 252496 - DNA, 20 bp, Artificial Sequence
  Description of Artificial Sequence: Synthetic oligonucleotide
  Target: LAMA2; (-) strand; PAM type: YTN; PAM sequence: TTA
cttcacaagaggagccagta

SEQ ID NO: 252497 - DNA, 20 bp, Artificial Sequence
  Description of Artificial Sequence: Synthetic oligonucleotide
  Target: LAMA2; (-) strand; PAM type: YTN; PAM sequence: CTT
acttcacaagaggagccagt

SEQ ID NO: 252498 - DNA, 20 bp, Artificial Sequence
  Description of Artificial Sequence: Synthetic oligonucleotide
  Target: LAMA2; (-) strand; PAM type: YTN; PAM sequence: TTG
caagcttacttcacaagagg

SEQ ID NO: 252499 - DNA, 20 bp, Artificial Sequence
  Description of Artificial Sequence: Synthetic oligonucleotide
  Target: LAMA2; (-) strand; PAM type: YTN; PAM sequence: CTT
gcaagcttacttcacaagag

SEQ ID NO: 252500 - DNA, 20 bp, Artificial Sequence
  Description of Artificial Sequence: Synthetic oligonucleotide
  Target: LAMA2; (-) strand; PAM type: YTN; PAM sequence: TTC
ttgcaagcttacttcacaag

SEQ ID NO: 252501 - DNA, 20 bp, Artificial Sequence
  Description of Artificial Sequence: Synthetic oligonucleotide
  Target: LAMA2; (-) strand; PAM type: YTN; PAM sequence: CTA
aggatacattcttgcaagct

SEQ ID NO: 252502 - DNA, 20 bp, Artificial Sequence
  Description of Artificial Sequence: Synthetic oligonucleotide
  Target: LAMA2; (-) strand; PAM type: YTN; PAM sequence: TTG
aaagcactaaggatacattc

SEQ ID NO: 252503 - DNA, 20 bp, Artificial Sequence
  Description of Artificial Sequence: Synthetic oligonucleotide
  Target: LAMA2; (-) strand; PAM type: YTN; PAM sequence: TTT
gaaagcactaaggatacatt

SEQ ID NO: 252504 - DNA, 20 bp, Artificial Sequence
  Description of Artificial Sequence: Synthetic oligonucleotide
  Target: LAMA2; (-) strand; PAM type: YTN; PAM sequence: CTT
tgaaagcactaaggatacat

SEQ ID NO: 252505 - DNA, 20 bp, Artificial Sequence
  Description of Artificial Sequence: Synthetic oligonucleotide
  Target: LAMA2; (-) strand; PAM type: YTN; PAM sequence: TTG
agggaactttgaaagcacta

SEQ ID NO: 252506 - DNA, 20 bp, Artificial Sequence
  Description of Artificial Sequence: Synthetic oligonucleotide
  Target: LAMA2; (-) strand; PAM type: YTN; PAM sequence: TTG
aaagcaatgttgagggaact

SEQ ID NO: 252507 - DNA, 20 bp, Artificial Sequence
  Description of Artificial Sequence: Synthetic oligonucleotide
  Target: LAMA2; (-) strand; PAM type: YTN; PAM sequence: TTA
ttgaaagcaatgttgaggga

SEQ ID NO: 252508 - DNA, 20 bp, Artificial Sequence
  Description of Artificial Sequence: Synthetic oligonucleotide
  Target: LAMA2; (-) strand; PAM type: YTN; PAM sequence: TTA
gaataggttattgaaagcaa

SEQ ID NO: 252509 - DNA, 20 bp, Artificial Sequence
  Description of Artificial Sequence: Synthetic oligonucleotide
  Target: LAMA2; (-) strand; PAM type: YTN; PAM sequence: TTA
ttagaataggttattgaaag

SEQ ID NO: 252510 - DNA, 20 bp, Artificial Sequence
  Description of Artificial Sequence: Synthetic oligonucleotide
  Target: LAMA2; (-) strand; PAM type: YTN; PAM sequence: CTT
attagaataggttattgaaa

SEQ ID NO: 252511 - DNA, 20 bp, Artificial Sequence
  Description of Artificial Sequence: Synthetic oligonucleotide
  Target: LAMA2; (-) strand; PAM type: YTN; PAM sequence: CTC
ttattagaataggttattga

SEQ ID NO: 252512 - DNA, 20 bp, Artificial Sequence
  Description of Artificial Sequence: Synthetic oligonucleotide
  Target: LAMA2; (-) strand; PAM type: YTN; PAM sequence: TTG
atagaaaaaaaacagctctt

SEQ ID NO: 252513 - DNA, 20 bp, Artificial Sequence
  Description of Artificial Sequence: Synthetic oligonucleotide
  Target: LAMA2; (-) strand; PAM type: YTN; PAM sequence: TTA
ttgatagaaaaaaaacagct

SEQ ID NO: 252514 - DNA, 20 bp, Artificial Sequence
  Description of Artificial Sequence: Synthetic oligonucleotide
  Target: LAMA2; (-) strand; PAM type: YTN; PAM sequence: TTG
tgtaattattgatagaaaaa

SEQ ID NO: 252515 - DNA, 20 bp, Artificial Sequence
  Description of Artificial Sequence: Synthetic oligonucleotide
  Target: LAMA2; (-) strand; PAM type: YTN; PAM sequence: TTT
gtgtaattattgatagaaaa

SEQ ID NO: 252516 - DNA, 20 bp, Artificial Sequence
  Description of Artificial Sequence: Synthetic oligonucleotide
  Target: LAMA2; (-) strand; PAM type: YTN; PAM sequence: TTA
tttgtgtaattattgataga

SEQ ID NO: 252517 - DNA, 20 bp, Artificial Sequence
  Description of Artificial Sequence: Synthetic oligonucleotide
  Target: LAMA2; (-) strand; PAM type: YTN; PAM sequence: TTA
agtgatacacattatttgtg

SEQ ID NO: 252518 - DNA, 20 bp, Artificial Sequence
  Description of Artificial Sequence: Synthetic oligonucleotide
  Target: LAMA2; (-) strand; PAM type: YTN; PAM sequence: TTT
aagtgatacacattatttgt

SEQ ID NO: 252519 - DNA, 20 bp, Artificial Sequence
  Description of Artificial Sequence: Synthetic oligonucleotide
  Target: LAMA2; (-) strand; PAM type: YTN; PAM sequence: TTT
taagtgatacacattatttg

SEQ ID NO: 252520 - DNA, 20 bp, Artificial Sequence
  Description of Artificial Sequence: Synthetic oligonucleotide
  Target: LAMA2; (-) strand; PAM type: YTN; PAM sequence: TTT
ttaagtgatacacattattt

SEQ ID NO: 252521 - DNA, 20 bp, Artificial Sequence
  Description of Artificial Sequence: Synthetic oligonucleotide
  Target: LAMA2; (-) strand; PAM type: YTN; PAM sequence: TTG
tttttaagtgatacacatta

SEQ ID NO: 252522 - DNA, 20 bp, Artificial Sequence
  Description of Artificial Sequence: Synthetic oligonucleotide
  Target: LAMA2; (-) strand; PAM type: YTN; PAM sequence: TTT
gtttttaagtgatacacatt

SEQ ID NO: 252523 - DNA, 20 bp, Artificial Sequence
  Description of Artificial Sequence: Synthetic oligonucleotide
  Target: LAMA2; (-) strand; PAM type: YTN; PAM sequence: TTT
tgtttttaagtgatacacat

SEQ ID NO: 252524 - DNA, 20 bp, Artificial Sequence
  Description of Artificial Sequence: Synthetic oligonucleotide
  Target: LAMA2; (-) strand; PAM type: YTN; PAM sequence: TTC
aagttttgtttttaagtgat

SEQ ID NO: 252525 - DNA, 20 bp, Artificial Sequence
  Description of Artificial Sequence: Synthetic oligonucleotide
  Target: LAMA2; (-) strand; PAM type: YTN; PAM sequence: TTG
gtagatattcaagttttgtt

SEQ ID NO: 252526 - DNA, 20 bp, Artificial Sequence
  Description of Artificial Sequence: Synthetic oligonucleotide
  Target: LAMA2; (-) strand; PAM type: YTN; PAM sequence: TTT
ggtagatattcaagttttgt

SEQ ID NO: 252527 - DNA, 20 bp, Artificial Sequence
  Description of Artificial Sequence: Synthetic oligonucleotide
  Target: LAMA2; (-) strand; PAM type: YTN; PAM sequence: TTT
tggtagatattcaagttttg

SEQ ID NO: 252528 - DNA, 20 bp, Artificial Sequence
  Description of Artificial Sequence: Synthetic oligonucleotide
  Target: LAMA2; (-) strand; PAM type: YTN; PAM sequence: CTT
ttggtagatattcaagtttt

SEQ ID NO: 252529 - DNA, 20 bp, Artificial Sequence
  Description of Artificial Sequence: Synthetic oligonucleotide
  Target: LAMA2; (-) strand; PAM type: YTN; PAM sequence: TTG
aaagccacagcttttggtag

SEQ ID NO: 252530 - DNA, 20 bp, Artificial Sequence
  Description of Artificial Sequence: Synthetic oligonucleotide
  Target: LAMA2; (-) strand; PAM type: YTN; PAM sequence: CTA
attgaaagccacagcttttg

SEQ ID NO: 252531 - DNA, 20 bp, Artificial Sequence
  Description of Artificial Sequence: Synthetic oligonucleotide
  Target: LAMA2; (-) strand; PAM type: YTN; PAM sequence: CTC
taattgaaagccacagcttt

SEQ ID NO: 252532 - DNA, 20 bp, Artificial Sequence
  Description of Artificial Sequence: Synthetic oligonucleotide
  Target: LAMA2; (-) strand; PAM type: YTN; PAM sequence: TTA
atactctaattgaaagccac

SEQ ID NO: 252533 - DNA, 20 bp, Artificial Sequence
  Description of Artificial Sequence: Synthetic oligonucleotide
  Target: LAMA2; (-) strand; PAM type: YTN; PAM sequence: TTA
tgtggttaatactctaattg

SEQ ID NO: 252534 - DNA, 20 bp, Artificial Sequence
  Description of Artificial Sequence: Synthetic oligonucleotide
  Target: LAMA2; (-) strand; PAM type: YTN; PAM sequence: TTA
caaaatgaaattatgtggtt

SEQ ID NO: 252535 - DNA, 20 bp, Artificial Sequence
  Description of Artificial Sequence: Synthetic oligonucleotide
  Target: LAMA2; (-) strand; PAM type: YTN; PAM sequence: CTC
agagagaaagagttacaaaa

SEQ ID NO: 252536 - DNA, 20 bp, Artificial Sequence
  Description of Artificial Sequence: Synthetic oligonucleotide
  Target: LAMA2; (-) strand; PAM type: YTN; PAM sequence: TTA
taggcaaaatatctcagaga

SEQ ID NO: 252537 - DNA, 20 bp, Artificial Sequence
  Description of Artificial Sequence: Synthetic oligonucleotide
  Target: LAMA2; (-) strand; PAM type: YTN; PAM sequence: TTC
agttataggcaaaatatctc

SEQ ID NO: 252538 - DNA, 20 bp, Artificial Sequence
  Description of Artificial Sequence: Synthetic oligonucleotide
  Target: LAMA2; (-) strand; PAM type: YTN; PAM sequence: TTT
cagttataggcaaaatatct

SEQ ID NO: 252539 - DNA, 20 bp, Artificial Sequence
  Description of Artificial Sequence: Synthetic oligonucleotide
  Target: LAMA2; (-) strand; PAM type: YTN; PAM sequence: TTT
tcagttataggcaaaatatc

SEQ ID NO: 252540 - DNA, 20 bp, Artificial Sequence
  Description of Artificial Sequence: Synthetic oligonucleotide
  Target: LAMA2; (-) strand; PAM type: YTN; PAM sequence: CTA
ccatccagcatacaatagat

SEQ ID NO: 252541 - DNA, 20 bp, Artificial Sequence
  Description of Artificial Sequence: Synthetic oligonucleotide
  Target: LAMA2; (-) strand; PAM type: YTN; PAM sequence: CTG
ctaccatccagcatacaata

SEQ ID NO: 252542 - DNA, 20 bp, Artificial Sequence
  Description of Artificial Sequence: Synthetic oligonucleotide
  Target: LAMA2; (-) strand; PAM type: YTN; PAM sequence: TTC
tgctaccatccagcatacaa

SEQ ID NO: 252543 - DNA, 20 bp, Artificial Sequence
  Description of Artificial Sequence: Synthetic oligonucleotide
  Target: LAMA2; (-) strand; PAM type: YTN; PAM sequence: CTA
ttctgctaccatccagcata

SEQ ID NO: 252544 - DNA, 20 bp, Artificial Sequence
  Description of Artificial Sequence: Synthetic oligonucleotide
  Target: LAMA2; (-) strand; PAM type: YTN; PAM sequence: TTG
aagtgctattctgctaccat

SEQ ID NO: 252545 - DNA, 20 bp, Artificial Sequence
  Description of Artificial Sequence: Synthetic oligonucleotide
  Target: LAMA2; (-) strand; PAM type: YTN; PAM sequence: TTT
gaagtgctattctgctacca

SEQ ID NO: 252546 - DNA, 20 bp, Artificial Sequence
  Description of Artificial Sequence: Synthetic oligonucleotide
  Target: LAMA2; (-) strand; PAM type: YTN; PAM sequence: TTT
tgaagtgctattctgctacc

SEQ ID NO: 252547 - DNA, 20 bp, Artificial Sequence
  Description of Artificial Sequence: Synthetic oligonucleotide
  Target: LAMA2; (-) strand; PAM type: YTN; PAM sequence: TTA
tgatgaaaatgaagagaaaa

SEQ ID NO: 252548 - DNA, 20 bp, Artificial Sequence
  Description of Artificial Sequence: Synthetic oligonucleotide
  Target: LAMA2; (-) strand; PAM type: YTN; PAM sequence: TTG
gataacattatgatgaaaat

SEQ ID NO: 252549 - DNA, 20 bp, Artificial Sequence
  Description of Artificial Sequence: Synthetic oligonucleotide
  Target: LAMA2; (-) strand; PAM type: YTN; PAM sequence: TTT
ggataacattatgatgaaaa

SEQ ID NO: 252550 - DNA, 20 bp, Artificial Sequence
  Description of Artificial Sequence: Synthetic oligonucleotide
  Target: LAMA2; (-) strand; PAM type: YTN; PAM sequence: TTT
tggataacattatgatgaaa

SEQ ID NO: 252551 - DNA, 20 bp, Artificial Sequence
  Description of Artificial Sequence: Synthetic oligonucleotide
  Target: LAMA2; (-) strand; PAM type: YTN; PAM sequence: CTA
aattttggataacattatga

SEQ ID NO: 252552 - DNA, 20 bp, Artificial Sequence
  Description of Artificial Sequence: Synthetic oligonucleotide
  Target: LAMA2; (-) strand; PAM type: YTN; PAM sequence: TTA
aaaaatgagagaaaagtaaa

SEQ ID NO: 252553 - DNA, 20 bp, Artificial Sequence
  Description of Artificial Sequence: Synthetic oligonucleotide
  Target: LAMA2; (-) strand; PAM type: YTN; PAM sequence: TTA
gaaatgaagtagaggaaaag

SEQ ID NO: 252554 - DNA, 20 bp, Artificial Sequence
  Description of Artificial Sequence: Synthetic oligonucleotide
  Target: LAMA2; (-) strand; PAM type: YTN; PAM sequence: CTT
agaaatgaagtagaggaaaa

SEQ ID NO: 252555 - DNA, 20 bp, Artificial Sequence
  Description of Artificial Sequence: Synthetic oligonucleotide
  Target: LAMA2; (-) strand; PAM type: YTN; PAM sequence: TTC
ttagaaatgaagtagaggaa

SEQ ID NO: 252556 - DNA, 20 bp, Artificial Sequence
  Description of Artificial Sequence: Synthetic oligonucleotide
  Target: LAMA2; (-) strand; PAM type: YTN; PAM sequence: TTG
tattcttagaaatgaagtag

SEQ ID NO: 252557 - DNA, 20 bp, Artificial Sequence
  Description of Artificial Sequence: Synthetic oligonucleotide
  Target: LAMA2; (-) strand; PAM type: YTN; PAM sequence: TTG
gttgtattcttagaaatgaa

SEQ ID NO: 252558 - DNA, 20 bp, Artificial Sequence
  Description of Artificial Sequence: Synthetic oligonucleotide
  Target: LAMA2; (-) strand; PAM type: YTN; PAM sequence: TTT
ggttgtattcttagaaatga

SEQ ID NO: 252559 - DNA, 20 bp, Artificial Sequence
  Description of Artificial Sequence: Synthetic oligonucleotide
  Target: LAMA2; (-) strand; PAM type: YTN; PAM sequence: TTG
tgatttggttgtattcttag

SEQ ID NO: 252560 - DNA, 20 bp, Artificial Sequence
  Description of Artificial Sequence: Synthetic oligonucleotide
  Target: LAMA2; (-) strand; PAM type: YTN; PAM sequence: TTC
agatgattgtgatttggttg

SEQ ID NO: 252561 - DNA, 20 bp, Artificial Sequence
  Description of Artificial Sequence: Synthetic oligonucleotide
  Target: LAMA2; (-) strand; PAM type: YTN; PAM sequence: CTT
cagatgattgtgatttggtt

SEQ ID NO: 252562 - DNA, 20 bp, Artificial Sequence
  Description of Artificial Sequence: Synthetic oligonucleotide
  Target: LAMA2; (-) strand; PAM type: YTN; PAM sequence: TTA
tatgcttcagatgattgtga

SEQ ID NO: 252563 - DNA, 20 bp, Artificial Sequence
  Description of Artificial Sequence: Synthetic oligonucleotide
  Target: LAMA2; (-) strand; PAM type: YTN; PAM sequence: CTG
aagattatatgcttcagatg

SEQ ID NO: 252564 - DNA, 20 bp, Artificial Sequence
  Description of Artificial Sequence: Synthetic oligonucleotide
  Target: LAMA2; (-) strand; PAM type: YTN; PAM sequence: TTC
tgaagattatatgcttcaga

SEQ ID NO: 252565 - DNA, 20 bp, Artificial Sequence
  Description of Artificial Sequence: Synthetic oligonucleotide
  Target: LAMA2; (-) strand; PAM type: YTN; PAM sequence: TTG
acattctgaagattatatgc

SEQ ID NO: 252566 - DNA, 20 bp, Artificial Sequence
  Description of Artificial Sequence: Synthetic oligonucleotide
  Target: LAMA2; (-) strand; PAM type: YTN; PAM sequence: CTT
gacattctgaagattatatg

SEQ ID NO: 252567 - DNA, 20 bp, Artificial Sequence
  Description of Artificial Sequence: Synthetic oligonucleotide
  Target: LAMA2; (-) strand; PAM type: YTN; PAM sequence: TTC
ttgacattctgaagattata

SEQ ID NO: 252568 - DNA, 20 bp, Artificial Sequence
  Description of Artificial Sequence: Synthetic oligonucleotide
  Target: LAMA2; (-) strand; PAM type: YTN; PAM sequence: TTA
tattcttgacattctgaaga

SEQ ID NO: 252569 - DNA, 20 bp, Artificial Sequence
  Description of Artificial Sequence: Synthetic oligonucleotide
  Target: LAMA2; (-) strand; PAM type: YTN; PAM sequence: TTC
catatattatattcttgaca

SEQ ID NO: 252570 - DNA, 20 bp, Artificial Sequence
  Description of Artificial Sequence: Synthetic oligonucleotide
  Target: LAMA2; (-) strand; PAM type: YTN; PAM sequence: TTT
ccatatattatattcttgac

SEQ ID NO: 252571 - DNA, 20 bp, Artificial Sequence
  Description of Artificial Sequence: Synthetic oligonucleotide
  Target: LAMA2; (-) strand; PAM type: YTN; PAM sequence: TTT
tccatatattatattcttga

SEQ ID NO: 252572 - DNA, 20 bp, Artificial Sequence
  Description of Artificial Sequence: Synthetic oligonucleotide
  Target: LAMA2; (-) strand; PAM type: YTN; PAM sequence: TTT
ttccatatattatattcttg

SEQ ID NO: 252573 - DNA, 20 bp, Artificial Sequence
  Description of Artificial Sequence: Synthetic oligonucleotide
  Target: LAMA2; (-) strand; PAM type: YTN; PAM sequence: TTT
tttccatatattatattctt

SEQ ID NO: 252574 - DNA, 20 bp, Artificial Sequence
  Description of Artificial Sequence: Synthetic oligonucleotide
  Target: LAMA2; (-) strand; PAM type: YTN; PAM sequence: CTA
tatcaaggtattttttccat

SEQ ID NO: 252575 - DNA, 20 bp, Artificial Sequence
  Description of Artificial Sequence: Synthetic oligonucleotide
  Target: LAMA2; (-) strand; PAM type: YTN; PAM sequence: TTC
tatatcaaggtattttttcc

SEQ ID NO: 252576 - DNA, 20 bp, Artificial Sequence
  Description of Artificial Sequence: Synthetic oligonucleotide
  Target: LAMA2; (-) strand; PAM type: YTN; PAM sequence: TTT
ctatatcaaggtattttttc

SEQ ID NO: 252577 - DNA, 20 bp, Artificial Sequence
  Description of Artificial Sequence: Synthetic oligonucleotide
  Target: LAMA2; (-) strand; PAM type: YTN; PAM sequence: TTT
tctatatcaaggtatttttt

SEQ ID NO: 252578 - DNA, 20 bp, Artificial Sequence
  Description of Artificial Sequence: Synthetic oligonucleotide
  Target: LAMA2; (-) strand; PAM type: YTN; PAM sequence: CTG
taggcagttttctatatcaa

SEQ ID NO: 252579 - DNA, 20 bp, Artificial Sequence
  Description of Artificial Sequence: Synthetic oligonucleotide
  Target: LAMA2; (-) strand; PAM type: YTN; PAM sequence: CTA
aacaaatcaaagacctgtag

SEQ ID NO: 252580 - DNA, 20 bp, Artificial Sequence
  Description of Artificial Sequence: Synthetic oligonucleotide
  Target: LAMA2; (-) strand; PAM type: YTN; PAM sequence: TTA
ggtgctaaacaaatcaaaga

SEQ ID NO: 252581 - DNA, 20 bp, Artificial Sequence
  Description of Artificial Sequence: Synthetic oligonucleotide
  Target: LAMA2; (-) strand; PAM type: YTN; PAM sequence: CTC
aaacattaggtgctaaacaa

SEQ ID NO: 252582 - DNA, 20 bp, Artificial Sequence
  Description of Artificial Sequence: Synthetic oligonucleotide
  Target: LAMA2; (-) strand; PAM type: YTN; PAM sequence: TTG
agacaacaataaatatctca

SEQ ID NO: 252583 - DNA, 20 bp, Artificial Sequence
  Description of Artificial Sequence: Synthetic oligonucleotide
  Target: LAMA2; (-) strand; PAM type: YTN; PAM sequence: CTA
ggatattgagacaacaataa

SEQ ID NO: 252584 - DNA, 20 bp, Artificial Sequence
  Description of Artificial Sequence: Synthetic oligonucleotide
  Target: LAMA2; (-) strand; PAM type: YTN; PAM sequence: TTA
taaatctaggatattgagac

SEQ ID NO: 252585 - DNA, 20 bp, Artificial Sequence
  Description of Artificial Sequence: Synthetic oligonucleotide
  Target: LAMA2; (-) strand; PAM type: YTN; PAM sequence: TTA
ttataaatctaggatattga

SEQ ID NO: 252586 - DNA, 20 bp, Artificial Sequence
  Description of Artificial Sequence: Synthetic oligonucleotide
  Target: LAMA2; (-) strand; PAM type: YTN; PAM sequence: CTT
attataaatctaggatattg

SEQ ID NO: 252587 - DNA, 20 bp, Artificial Sequence
  Description of Artificial Sequence: Synthetic oligonucleotide
  Target: LAMA2; (-) strand; PAM type: YTN; PAM sequence: TTA
atcttattataaatctagga

SEQ ID NO: 252588 - DNA, 20 bp, Artificial Sequence
  Description of Artificial Sequence: Synthetic oligonucleotide
  Target: LAMA2; (-) strand; PAM type: YTN; PAM sequence: TTA
agtaagaaccattaatctta

SEQ ID NO: 252589 - DNA, 20 bp, Artificial Sequence
  Description of Artificial Sequence: Synthetic oligonucleotide
  Target: LAMA2; (-) strand; PAM type: YTN; PAM sequence: CTG
cggtattaagtaagaaccat

SEQ ID NO: 252590 - DNA, 20 bp, Artificial Sequence
  Description of Artificial Sequence: Synthetic oligonucleotide
  Target: LAMA2; (-) strand; PAM type: YTN; PAM sequence: TTA
ggatgacacactgcggtatt

SEQ ID NO: 252591 - DNA, 20 bp, Artificial Sequence
  Description of Artificial Sequence: Synthetic oligonucleotide
  Target: LAMA2; (-) strand; PAM type: YTN; PAM sequence: CTT
aggatgacacactgcggtat

SEQ ID NO: 252592 - DNA, 20 bp, Artificial Sequence
  Description of Artificial Sequence: Synthetic oligonucleotide
  Target: LAMA2; (-) strand; PAM type: YTN; PAM sequence: TTA
ccttaggatgacacactgcg

SEQ ID NO: 252593 - DNA, 20 bp, Artificial Sequence
  Description of Artificial Sequence: Synthetic oligonucleotide
  Target: LAMA2; (-) strand; PAM type: YTN; PAM sequence: TTG
ttaccttaggatgacacact

SEQ ID NO: 252594 - DNA, 20 bp, Artificial Sequence
  Description of Artificial Sequence: Synthetic oligonucleotide
  Target: LAMA2; (-) strand; PAM type: YTN; PAM sequence: CTG
tgtaaaagaaaatacacaga

SEQ ID NO: 252595 - DNA, 20 bp, Artificial Sequence
  Description of Artificial Sequence: Synthetic oligonucleotide
  Target: LAMA2; (-) strand; PAM type: YTN; PAM sequence: TTC
tgtgtaaaagaaaatacaca

SEQ ID NO: 252596 - DNA, 20 bp, Artificial Sequence
  Description of Artificial Sequence: Synthetic oligonucleotide
  Target: LAMA2; (-) strand; PAM type: YTN; PAM sequence: TTT
ctgtgtaaaagaaaatacac

SEQ ID NO: 252597 - DNA, 20 bp, Artificial Sequence
  Description of Artificial Sequence: Synthetic oligonucleotide
  Target: LAMA2; (-) strand; PAM type: YTN; PAM sequence: TTT
tctgtgtaaaagaaaataca

SEQ ID NO: 252598 - DNA, 20 bp, Artificial Sequence
  Description of Artificial Sequence: Synthetic oligonucleotide
  Target: LAMA2; (-) strand; PAM type: YTN; PAM sequence: TTC
acaccagttttctgtgtaaa

SEQ ID NO: 252599 - DNA, 20 bp, Artificial Sequence
  Description of Artificial Sequence: Synthetic oligonucleotide
  Target: LAMA2; (-) strand; PAM type: YTN; PAM sequence: TTT
cacaccagttttctgtgtaa

SEQ ID NO: 252600 - DNA, 20 bp, Artificial Sequence
  Description of Artificial Sequence: Synthetic oligonucleotide
  Target: LAMA2; (-) strand; PAM type: YTN; PAM sequence: TTC
aagtaaaaccagtttcacac

SEQ ID NO: 252601 - DNA, 20 bp, Artificial Sequence
  Description of Artificial Sequence: Synthetic oligonucleotide
  Target: LAMA2; (-) strand; PAM type: YTN; PAM sequence: TTT
caagtaaaaccagtttcaca

SEQ ID NO: 252602 - DNA, 20 bp, Artificial Sequence
  Description of Artificial Sequence: Synthetic oligonucleotide
  Target: LAMA2; (-) strand; PAM type: YTN; PAM sequence: TTG
accaggtttcaagtaaaacc

SEQ ID NO: 252603 - DNA, 20 bp, Artificial Sequence
  Description of Artificial Sequence: Synthetic oligonucleotide
  Target: LAMA2; (-) strand; PAM type: YTN; PAM sequence: TTT
gaccaggtttcaagtaaaac

SEQ ID NO: 252604 - DNA, 20 bp, Artificial Sequence
  Description of Artificial Sequence: Synthetic oligonucleotide
  Target: LAMA2; (-) strand; PAM type: YTN; PAM sequence: TTT
tgaccaggtttcaagtaaaa

SEQ ID NO: 252605 - DNA, 20 bp, Artificial Sequence
  Description of Artificial Sequence: Synthetic oligonucleotide
  Target: LAMA2; (-) strand; PAM type: YTN; PAM sequence: TTT
ttgaccaggtttcaagtaaa

SEQ ID NO: 252606 - DNA, 20 bp, Artificial Sequence
  Description of Artificial Sequence: Synthetic oligonucleotide
  Target: LAMA2; (-) strand; PAM type: YTN; PAM sequence: TTT
tttgaccaggtttcaagtaa

SEQ ID NO: 252607 - DNA, 20 bp, Artificial Sequence
  Description of Artificial Sequence: Synthetic oligonucleotide
  Target: LAMA2; (-) strand; PAM type: YTN; PAM sequence: TTC
acattttttgaccaggtttc

SEQ ID NO: 252608 - DNA, 20 bp, Artificial Sequence
  Description of Artificial Sequence: Synthetic oligonucleotide
  Target: LAMA2; (-) strand; PAM type: YTN; PAM sequence: CTG
tcaaggaaatagtgttcaca

SEQ ID NO: 252609 - DNA, 20 bp, Artificial Sequence
  Description of Artificial Sequence: Synthetic oligonucleotide
  Target: LAMA2; (-) strand; PAM type: YTN; PAM sequence: CTC
tgtcaaggaaatagtgttca

SEQ ID NO: 252610 - DNA, 20 bp, Artificial Sequence
  Description of Artificial Sequence: Synthetic oligonucleotide
  Target: LAMA2; (-) strand; PAM type: YTN; PAM sequence: CTA
gccatgcgctctgtcaagga

SEQ ID NO: 252611 - DNA, 20 bp, Artificial Sequence
  Description of Artificial Sequence: Synthetic oligonucleotide
  Target: LAMA2; (-) strand; PAM type: YTN; PAM sequence: CTG
ctagccatgcgctctgtcaa

SEQ ID NO: 252612 - DNA, 20 bp, Artificial Sequence
  Description of Artificial Sequence: Synthetic oligonucleotide
  Target: LAMA2; (-) strand; PAM type: YTN; PAM sequence: TTA
tctgctagccatgcgctctg

SEQ ID NO: 252613 - DNA, 20 bp, Artificial Sequence
  Description of Artificial Sequence: Synthetic oligonucleotide
  Target: LAMA2; (-) strand; PAM type: YTN; PAM sequence: TTT
atctgctagccatgcgctct

SEQ ID NO: 252614 - DNA, 20 bp, Artificial Sequence
  Description of Artificial Sequence: Synthetic oligonucleotide
  Target: LAMA2; (-) strand; PAM type: YTN; PAM sequence: CTA
tttatctgctagccatgcgc

SEQ ID NO: 252615 - DNA, 20 bp, Artificial Sequence
  Description of Artificial Sequence: Synthetic oligonucleotide
  Target: LAMA2; (-) strand; PAM type: YTN; PAM sequence: CTC
ctatttatctgctagccatg

SEQ ID NO: 252616 - DNA, 20 bp, Artificial Sequence
  Description of Artificial Sequence: Synthetic oligonucleotide
  Target: LAMA2; (-) strand; PAM type: YTN; PAM sequence: CTA
agctcctatttatctgctag

SEQ ID NO: 252617 - DNA, 20 bp, Artificial Sequence
  Description of Artificial Sequence: Synthetic oligonucleotide
  Target: LAMA2; (-) strand; PAM type: YTN; PAM sequence: TTA
aagaaactaagctcctattt

SEQ ID NO: 252618 - DNA, 20 bp, Artificial Sequence
  Description of Artificial Sequence: Synthetic oligonucleotide
  Target: LAMA2; (-) strand; PAM type: YTN; PAM sequence: TTT
aaagaaactaagctcctatt

SEQ ID NO: 252619 - DNA, 20 bp, Artificial Sequence
  Description of Artificial Sequence: Synthetic oligonucleotide
  Target: LAMA2; (-) strand; PAM type: YTN; PAM sequence: TTT
taaagaaactaagctcctat

SEQ ID NO: 252620 - DNA, 20 bp, Artificial Sequence
  Description of Artificial Sequence: Synthetic oligonucleotide
  Target: LAMA2; (-) strand; PAM type: YTN; PAM sequence: TTA
aaggcaccattttaaagaaa

SEQ ID NO: 252621 - DNA, 20 bp, Artificial Sequence
  Description of Artificial Sequence: Synthetic oligonucleotide
  Target: LAMA2; (-) strand; PAM type: YTN; PAM sequence: CTT
aaaggcaccattttaaagaa

SEQ ID NO: 252622 - DNA, 20 bp, Artificial Sequence
  Description of Artificial Sequence: Synthetic oligonucleotide
  Target: LAMA2; (-) strand; PAM type: YTN; PAM sequence: TTC
cttaaaggcaccattttaaa

SEQ ID NO: 252623 - DNA, 20 bp, Artificial Sequence
  Description of Artificial Sequence: Synthetic oligonucleotide
  Target: LAMA2; (-) strand; PAM type: YTN; PAM sequence: CTC
aaatgattccttaaaggcac

SEQ ID NO: 252624 - DNA, 20 bp, Artificial Sequence
  Description of Artificial Sequence: Synthetic oligonucleotide
  Target: LAMA2; (-) strand; PAM type: YTN; PAM sequence: CTC
agtacactcaaatgattcct

SEQ ID NO: 252625 - DNA, 20 bp, Artificial Sequence
  Description of Artificial Sequence: Synthetic oligonucleotide
  Target: LAMA2; (-) strand; PAM type: YTN; PAM sequence: CTG
aagtggaacatctcagtaca

SEQ ID NO: 252626 - DNA, 20 bp, Artificial Sequence
  Description of Artificial Sequence: Synthetic oligonucleotide
  Target: LAMA2; (-) strand; PAM type: YTN; PAM sequence: TTC
tgaagtggaacatctcagta

SEQ ID NO: 252627 - DNA, 20 bp, Artificial Sequence
  Description of Artificial Sequence: Synthetic oligonucleotide
  Target: LAMA2; (-) strand; PAM type: YTN; PAM sequence: CTA
taaatggcataatgaggtag

SEQ ID NO: 252628 - DNA, 20 bp, Artificial Sequence
  Description of Artificial Sequence: Synthetic oligonucleotide
  Target: LAMA2; (-) strand; PAM type: YTN; PAM sequence: TTC
tataaatggcataatgaggt

SEQ ID NO: 252629 - DNA, 20 bp, Artificial Sequence
  Description of Artificial Sequence: Synthetic oligonucleotide
  Target: LAMA2; (-) strand; PAM type: YTN; PAM sequence: TTT
ctataaatggcataatgagg

SEQ ID NO: 252630 - DNA, 20 bp, Artificial Sequence
  Description of Artificial Sequence: Synthetic oligonucleotide
  Target: LAMA2; (-) strand; PAM type: YTN; PAM sequence: CTA
gagtatttctataaatggca

SEQ ID NO: 252631 - DNA, 20 bp, Artificial Sequence
  Description of Artificial Sequence: Synthetic oligonucleotide
  Target: LAMA2; (-) strand; PAM type: YTN; PAM sequence: CTG
acaaagcaatgcctagagta

SEQ ID NO: 252632 - DNA, 20 bp, Artificial Sequence
  Description of Artificial Sequence: Synthetic oligonucleotide
  Target: LAMA2; (-) strand; PAM type: YTN; PAM sequence: TTA
aaagtacgagagaactgaca

SEQ ID NO: 252633 - DNA, 20 bp, Artificial Sequence
  Description of Artificial Sequence: Synthetic oligonucleotide
  Target: LAMA2; (-) strand; PAM type: YTN; PAM sequence: TTT
aaaagtacgagagaactgac

SEQ ID NO: 252634 - DNA, 20 bp, Artificial Sequence
  Description of Artificial Sequence: Synthetic oligonucleotide
  Target: LAMA2; (-) strand; PAM type: YTN; PAM sequence: TTT
taaaagtacgagagaactga

SEQ ID NO: 252635 - DNA, 20 bp, Artificial Sequence
  Description of Artificial Sequence: Synthetic oligonucleotide
  Target: LAMA2; (-) strand; PAM type: YTN; PAM sequence: TTA
ttttaaaagtacgagagaac

SEQ ID NO: 252636 - DNA, 20 bp, Artificial Sequence
  Description of Artificial Sequence: Synthetic oligonucleotide
  Target: LAMA2; (-) strand; PAM type: YTN; PAM sequence: CTA
gatgtatgcattattttaaa

SEQ ID NO: 252637 - DNA, 20 bp, Artificial Sequence
  Description of Artificial Sequence: Synthetic oligonucleotide
  Target: LAMA2; (-) strand; PAM type: YTN; PAM sequence: CTC
tagatgtatgcattatttta

SEQ ID NO: 252638 - DNA, 20 bp, Artificial Sequence
  Description of Artificial Sequence: Synthetic oligonucleotide
  Target: LAMA2; (-) strand; PAM type: YTN; PAM sequence: CTA
taatgcgtatctctagatgt

SEQ ID NO: 252639 - DNA, 20 bp, Artificial Sequence
  Description of Artificial Sequence: Synthetic oligonucleotide
  Target: LAMA2; (-) strand; PAM type: YTN; PAM sequence: CTG
tcatgaatatgactataatg

SEQ ID NO: 252640 - DNA, 20 bp, Artificial Sequence
  Description of Artificial Sequence: Synthetic oligonucleotide
  Target: LAMA2; (-) strand; PAM type: YTN; PAM sequence: TTA
aaggaaacacagctgtcatg

SEQ ID NO: 252641 - DNA, 20 bp, Artificial Sequence
  Description of Artificial Sequence: Synthetic oligonucleotide
  Target: LAMA2; (-) strand; PAM type: YTN; PAM sequence: CTC
agttaaaggaaacacagctg

SEQ ID NO: 252642 - DNA, 20 bp, Artificial Sequence
  Description of Artificial Sequence: Synthetic oligonucleotide
  Target: LAMA2; (-) strand; PAM type: YTN; PAM sequence: CTG
agctcagttaaaggaaacac

SEQ ID NO: 252643 - DNA, 20 bp, Artificial Sequence
  Description of Artificial Sequence: Synthetic oligonucleotide
  Target: LAMA2; (-) strand; PAM type: YTN; PAM sequence: CTA
gaaaggtgaatctgagctca

SEQ ID NO: 252644 - DNA, 20 bp, Artificial Sequence
  Description of Artificial Sequence: Synthetic oligonucleotide
  Target: LAMA2; (-) strand; PAM type: YTN; PAM sequence: TTC
tagaaaggtgaatctgagct

SEQ ID NO: 252645 - DNA, 20 bp, Artificial Sequence
  Description of Artificial Sequence: Synthetic oligonucleotide
  Target: LAMA2; (-) strand; PAM type: YTN; PAM sequence: TTT
ctagaaaggtgaatctgagc

SEQ ID NO: 252646 - DNA, 20 bp, Artificial Sequence
  Description of Artificial Sequence: Synthetic oligonucleotide
  Target: LAMA2; (-) strand; PAM type: YTN; PAM sequence: TTA
tttctagaaaggtgaatctg

SEQ ID NO: 252647 - DNA, 20 bp, Artificial Sequence
  Description of Artificial Sequence: Synthetic oligonucleotide
  Target: LAMA2; (-) strand; PAM type: YTN; PAM sequence: TTT
atttctagaaaggtgaatct

SEQ ID NO: 252648 - DNA, 20 bp, Artificial Sequence
  Description of Artificial Sequence: Synthetic oligonucleotide
  Target: LAMA2; (-) strand; PAM type: YTN; PAM sequence: TTT
tatttctagaaaggtgaatc

SEQ ID NO: 252649 - DNA, 20 bp, Artificial Sequence
  Description of Artificial Sequence: Synthetic oligonucleotide
  Target: LAMA2; (-) strand; PAM type: YTN; PAM sequence: CTA
gttttatttctagaaaggtg

SEQ ID NO: 252650 - DNA, 20 bp, Artificial Sequence
  Description of Artificial Sequence: Synthetic oligonucleotide
  Target: LAMA2; (-) strand; PAM type: YTN; PAM sequence: TTA
tatctagttttatttctaga

SEQ ID NO: 252651 - DNA, 20 bp, Artificial Sequence
  Description of Artificial Sequence: Synthetic oligonucleotide
  Target: LAMA2; (-) strand; PAM type: YTN; PAM sequence: CTA
taagttatatctagttttat

SEQ ID NO: 252652 - DNA, 20 bp, Artificial Sequence
  Description of Artificial Sequence: Synthetic oligonucleotide
  Target: LAMA2; (-) strand; PAM type: YTN; PAM sequence: TTC
tataagttatatctagtttt

SEQ ID NO: 252653 - DNA, 20 bp, Artificial Sequence
  Description of Artificial Sequence: Synthetic oligonucleotide
  Target: LAMA2; (-) strand; PAM type: YTN; PAM sequence: CTT
ctataagttatatctagttt

SEQ ID NO: 252654 - DNA, 20 bp, Artificial Sequence
  Description of Artificial Sequence: Synthetic oligonucleotide
  Target: LAMA2; (-) strand; PAM type: YTN; PAM sequence: TTG
gaaaagcaagtacttctata

SEQ ID NO: 252655 - DNA, 20 bp, Artificial Sequence
  Description of Artificial Sequence: Synthetic oligonucleotide
  Target: LAMA2; (-) strand; PAM type: YTN; PAM sequence: TTT
ggaaaagcaagtacttctat

SEQ ID NO: 252656 - DNA, 20 bp, Artificial Sequence
  Description of Artificial Sequence: Synthetic oligonucleotide
  Target: LAMA2; (-) strand; PAM type: YTN; PAM sequence: TTT
tggaaaagcaagtacttcta

SEQ ID NO: 252657 - DNA, 20 bp, Artificial Sequence
  Description of Artificial Sequence: Synthetic oligonucleotide
  Target: LAMA2; (-) strand; PAM type: YTN; PAM sequence: CTA
catgaattttggaaaagcaa

SEQ ID NO: 252658 - DNA, 20 bp, Artificial Sequence
  Description of Artificial Sequence: Synthetic oligonucleotide
  Target: LAMA2; (-) strand; PAM type: YTN; PAM sequence: CTC
atctacatgaattttggaaa

SEQ ID NO: 252659 - DNA, 20 bp, Artificial Sequence
  Description of Artificial Sequence: Synthetic oligonucleotide
  Target: LAMA2; (-) strand; PAM type: YTN; PAM sequence: CTC
tcatctacatgaattttgga

SEQ ID NO: 252660 - DNA, 20 bp, Artificial Sequence
  Description of Artificial Sequence: Synthetic oligonucleotide
  Target: LAMA2; (-) strand; PAM type: YTN; PAM sequence: TTC
tctcatctacatgaattttg

SEQ ID NO: 252661 - DNA, 20 bp, Artificial Sequence
  Description of Artificial Sequence: Synthetic oligonucleotide
  Target: LAMA2; (-) strand; PAM type: YTN; PAM sequence: TTT
ctctcatctacatgaatttt

SEQ ID NO: 252662 - DNA, 20 bp, Artificial Sequence
  Description of Artificial Sequence: Synthetic oligonucleotide
  Target: LAMA2; (-) strand; PAM type: YTN; PAM sequence: TTT
tctctcatctacatgaattt

SEQ ID NO: 252663 - DNA, 20 bp, Artificial Sequence
  Description of Artificial Sequence: Synthetic oligonucleotide
  Target: LAMA2; (-) strand; PAM type: YTN; PAM sequence: TTT
ttctctcatctacatgaatt

SEQ ID NO: 252664 - DNA, 20 bp, Artificial Sequence
  Description of Artificial Sequence: Synthetic oligonucleotide
  Target: LAMA2; (-) strand; PAM type: YTN; PAM sequence: TTA
tttttctctcatctacatga

SEQ ID NO: 252665 - DNA, 20 bp, Artificial Sequence
  Description of Artificial Sequence: Synthetic oligonucleotide
  Target: LAMA2; (-) strand; PAM type: YTN; PAM sequence: TTG
atatccataattatttttct

SEQ ID NO: 252666 - DNA, 20 bp, Artificial Sequence
  Description of Artificial Sequence: Synthetic oligonucleotide
  Target: LAMA2; (-) strand; PAM type: YTN; PAM sequence: CTA
attgatatccataattattt

SEQ ID NO: 252667 - DNA, 20 bp, Artificial Sequence
  Description of Artificial Sequence: Synthetic oligonucleotide
  Target: LAMA2; (-) strand; PAM type: YTN; PAM sequence: TTG
acatagctaattgatatcca

SEQ ID NO: 252668 - DNA, 20 bp, Artificial Sequence
  Description of Artificial Sequence: Synthetic oligonucleotide
  Target: LAMA2; (-) strand; PAM type: YTN; PAM sequence: TTG
ggttgacatagctaattgat

SEQ ID NO: 252669 - DNA, 20 bp, Artificial Sequence
  Description of Artificial Sequence: Synthetic oligonucleotide
  Target: LAMA2; (-) strand; PAM type: YTN; PAM sequence: TTT
gggttgacatagctaattga

SEQ ID NO: 252670 - DNA, 20 bp, Artificial Sequence
  Description of Artificial Sequence: Synthetic oligonucleotide
  Target: LAMA2; (-) strand; PAM type: YTN; PAM sequence: TTA
tatgtaaaatcaaatttggg

SEQ ID NO: 252671 - DNA, 20 bp, Artificial Sequence
  Description of Artificial Sequence: Synthetic oligonucleotide
  Target: LAMA2; (-) strand; PAM type: YTN; PAM sequence: TTT
atatgtaaaatcaaatttgg

SEQ ID NO: 252672 - DNA, 20 bp, Artificial Sequence
  Description of Artificial Sequence: Synthetic oligonucleotide
  Target: LAMA2; (-) strand; PAM type: YTN; PAM sequence: TTT
tatatgtaaaatcaaatttg

SEQ ID NO: 252673 - DNA, 20 bp, Artificial Sequence
  Description of Artificial Sequence: Synthetic oligonucleotide
  Target: LAMA2; (-) strand; PAM type: YTN; PAM sequence: TTG
tgtattttatatgtaaaatc

SEQ ID NO: 252674 - DNA, 20 bp, Artificial Sequence
  Description of Artificial Sequence: Synthetic oligonucleotide
  Target: LAMA2; (-) strand; PAM type: YTN; PAM sequence: TTC
atcaaatacattgtgtattt

SEQ ID NO: 252675 - DNA, 20 bp, Artificial Sequence
  Description of Artificial Sequence: Synthetic oligonucleotide
  Target: LAMA2; (-) strand; PAM type: YTN; PAM sequence: TTT
catcaaatacattgtgtatt

SEQ ID NO: 252676 - DNA, 20 bp, Artificial Sequence
  Description of Artificial Sequence: Synthetic oligonucleotide
  Target: LAMA2; (-) strand; PAM type: YTN; PAM sequence: TTG
tttcatcaaatacattgtgt

SEQ ID NO: 252677 - DNA, 20 bp, Artificial Sequence
  Description of Artificial Sequence: Synthetic oligonucleotide
  Target: LAMA2; (-) strand; PAM type: YTN; PAM sequence: CTT
gtttcatcaaatacattgtg

SEQ ID NO: 252678 - DNA, 20 bp, Artificial Sequence
  Description of Artificial Sequence: Synthetic oligonucleotide
  Target: LAMA2; (-) strand; PAM type: YTN; PAM sequence: CTC
ttgtttcatcaaatacattg

SEQ ID NO: 252679 - DNA, 20 bp, Artificial Sequence
  Description of Artificial Sequence: Synthetic oligonucleotide
  Target: LAMA2; (-) strand; PAM type: YTN; PAM sequence: TTG
gaatcaagagcaaaaggctc

SEQ ID NO: 252680 - DNA, 20 bp, Artificial Sequence
  Description of Artificial Sequence: Synthetic oligonucleotide
  Target: LAMA2; (-) strand; PAM type: YTN; PAM sequence: TTT
ggaatcaagagcaaaaggct

SEQ ID NO: 252681 - DNA, 20 bp, Artificial Sequence
  Description of Artificial Sequence: Synthetic oligonucleotide
  Target: LAMA2; (-) strand; PAM type: YTN; PAM sequence: TTC
aaatagtttggaatcaagag

SEQ ID NO: 252682 - DNA, 20 bp, Artificial Sequence
  Description of Artificial Sequence: Synthetic oligonucleotide
  Target: LAMA2; (-) strand; PAM type: YTN; PAM sequence: TTA
aaagttcaaatagtttggaa

SEQ ID NO: 252683 - DNA, 20 bp, Artificial Sequence
  Description of Artificial Sequence: Synthetic oligonucleotide
  Target: LAMA2; (-) strand; PAM type: YTN; PAM sequence: CTT
aaaagttcaaatagtttgga

SEQ ID NO: 252684 - DNA, 20 bp, Artificial Sequence
  Description of Artificial Sequence: Synthetic oligonucleotide
  Target: LAMA2; (-) strand; PAM type: YTN; PAM sequence: TTG
agagaggatcttaaaagttc

SEQ ID NO: 252685 - DNA, 20 bp, Artificial Sequence
  Description of Artificial Sequence: Synthetic oligonucleotide
  Target: LAMA2; (-) strand; PAM type: YTN; PAM sequence: TTA
tgccaattgagagaggatct

SEQ ID NO: 252686 - DNA, 20 bp, Artificial Sequence
  Description of Artificial Sequence: Synthetic oligonucleotide
  Target: LAMA2; (-) strand; PAM type: YTN; PAM sequence: TTA
ttatgccaattgagagagga

SEQ ID NO: 252687 - DNA, 20 bp, Artificial Sequence
  Description of Artificial Sequence: Synthetic oligonucleotide
  Target: LAMA2; (-) strand; PAM type: YTN; PAM sequence: TTT
attatgccaattgagagagg

SEQ ID NO: 252688 - DNA, 20 bp, Artificial Sequence
  Description of Artificial Sequence: Synthetic oligonucleotide
  Target: LAMA2; (-) strand; PAM type: YTN; PAM sequence: TTA
tttattatgccaattgagag

SEQ ID NO: 252689 - DNA, 20 bp, Artificial Sequence
  Description of Artificial Sequence: Synthetic oligonucleotide
  Target: LAMA2; (-) strand; PAM type: YTN; PAM sequence: TTA
agttatttattatgccaatt

SEQ ID NO: 252690 - DNA, 20 bp, Artificial Sequence
  Description of Artificial Sequence: Synthetic oligonucleotide
  Target: LAMA2; (-) strand; PAM type: YTN; PAM sequence: TTA
aaacaagagtagaattaagt

SEQ ID NO: 252691 - DNA, 20 bp, Artificial Sequence
  Description of Artificial Sequence: Synthetic oligonucleotide
  Target: LAMA2; (-) strand; PAM type: YTN; PAM sequence: CTT
aaaacaagagtagaattaag

SEQ ID NO: 252692 - DNA, 20 bp, Artificial Sequence
  Description of Artificial Sequence: Synthetic oligonucleotide
  Target: LAMA2; (-) strand; PAM type: YTN; PAM sequence: TTG
tataaaagataatgcaaagg

SEQ ID NO: 252693 - DNA, 20 bp, Artificial Sequence
  Description of Artificial Sequence: Synthetic oligonucleotide
  Target: LAMA2; (-) strand; PAM type: YTN; PAM sequence: TTT
gtataaaagataatgcaaag

SEQ ID NO: 252694 - DNA, 20 bp, Artificial Sequence
  Description of Artificial Sequence: Synthetic oligonucleotide
  Target: LAMA2; (-) strand; PAM type: YTN; PAM sequence: TTA
gaatttgtataaaagataat

SEQ ID NO: 252695 - DNA, 20 bp, Artificial Sequence
  Description of Artificial Sequence: Synthetic oligonucleotide
  Target: LAMA2; (-) strand; PAM type: YTN; PAM sequence: CTT
agaatttgtataaaagataa

SEQ ID NO: 252696 - DNA, 20 bp, Artificial Sequence
  Description of Artificial Sequence: Synthetic oligonucleotide
  Target: LAMA2; (-) strand; PAM type: YTN; PAM sequence: TTC
agtgggcacttagaatttgt

SEQ ID NO: 252697 - DNA, 20 bp, Artificial Sequence
  Description of Artificial Sequence: Synthetic oligonucleotide
  Target: LAMA2; (-) strand; PAM type: YTN; PAM sequence: TTA
tattcagtgggcacttagaa

SEQ ID NO: 252698 - DNA, 20 bp, Artificial Sequence
  Description of Artificial Sequence: Synthetic oligonucleotide
  Target: LAMA2; (-) strand; PAM type: YTN; PAM sequence: TTT
atattcagtgggcacttaga

SEQ ID NO: 252699 - DNA, 20 bp, Artificial Sequence
  Description of Artificial Sequence: Synthetic oligonucleotide
  Target: LAMA2; (-) strand; PAM type: YTN; PAM sequence: TTT
tatattcagtgggcacttag

SEQ ID NO: 252700 - DNA, 20 bp, Artificial Sequence
  Description of Artificial Sequence: Synthetic oligonucleotide
  Target: LAMA2; (-) strand; PAM type: YTN; PAM sequence: TTC
aagtaattttatattcagtg

SEQ ID NO: 252701 - DNA, 20 bp, Artificial Sequence
  Description of Artificial Sequence: Synthetic oligonucleotide
  Target: LAMA2; (-) strand; PAM type: YTN; PAM sequence: TTG
taatattcaagtaattttat

SEQ ID NO: 252702 - DNA, 20 bp, Artificial Sequence
  Description of Artificial Sequence: Synthetic oligonucleotide
  Target: LAMA2; (-) strand; PAM type: YTN; PAM sequence: TTA
agcaattgtaatattcaagt

SEQ ID NO: 252703 - DNA, 20 bp, Artificial Sequence
  Description of Artificial Sequence: Synthetic oligonucleotide
  Target: LAMA2; (-) strand; PAM type: YTN; PAM sequence: CTA
aaagcatagccaattaagca

SEQ ID NO: 252704 - DNA, 20 bp, Artificial Sequence
  Description of Artificial Sequence: Synthetic oligonucleotide
  Target: LAMA2; (-) strand; PAM type: YTN; PAM sequence: TTG
aaggagagaaggaagagact

SEQ ID NO: 252705 - DNA, 20 bp, Artificial Sequence
  Description of Artificial Sequence: Synthetic oligonucleotide
  Target: LAMA2; (-) strand; PAM type: YTN; PAM sequence: TTT
gaaggagagaaggaagagac

SEQ ID NO: 252706 - DNA, 20 bp, Artificial Sequence
  Description of Artificial Sequence: Synthetic oligonucleotide
  Target: LAMA2; (-) strand; PAM type: YTN; PAM sequence: TTT
tgaaggagagaaggaagaga

SEQ ID NO: 252707 - DNA, 20 bp, Artificial Sequence
  Description of Artificial Sequence: Synthetic oligonucleotide
  Target: LAMA2; (-) strand; PAM type: YTN; PAM sequence: TTT
ttgaaggagagaaggaagag

SEQ ID NO: 252708 - DNA, 20 bp, Artificial Sequence
  Description of Artificial Sequence: Synthetic oligonucleotide
  Target: LAMA2; (-) strand; PAM type: YTN; PAM sequence: TTG
aaaatatttttgaaggagag

SEQ ID NO: 252709 - DNA, 20 bp, Artificial Sequence
  Description of Artificial Sequence: Synthetic oligonucleotide
  Target: LAMA2; (-) strand; PAM type: YTN; PAM sequence: CTA
gaatgtattgaaaatatttt

SEQ ID NO: 252710 - DNA, 20 bp, Artificial Sequence
  Description of Artificial Sequence: Synthetic oligonucleotide
  Target: LAMA2; (-) strand; PAM type: YTN; PAM sequence: TTA
tcaaacatatctagaatgta

SEQ ID NO: 252711 - DNA, 20 bp, Artificial Sequence
  Description of Artificial Sequence: Synthetic oligonucleotide
  Target: LAMA2; (-) strand; PAM type: YTN; PAM sequence: TTT
atcaaacatatctagaatgt

SEQ ID NO: 252712 - DNA, 20 bp, Artificial Sequence
  Description of Artificial Sequence: Synthetic oligonucleotide
  Target: LAMA2; (-) strand; PAM type: YTN; PAM sequence: TTA
cagaatttatcaaacatatc

SEQ ID NO: 252713 - DNA, 20 bp, Artificial Sequence
  Description of Artificial Sequence: Synthetic oligonucleotide
  Target: LAMA2; (-) strand; PAM type: YTN; PAM sequence: TTT
acagaatttatcaaacatat

SEQ ID NO: 252714 - DNA, 20 bp, Artificial Sequence
  Description of Artificial Sequence: Synthetic oligonucleotide
  Target: LAMA2; (-) strand; PAM type: YTN; PAM sequence: TTA
tacaggtaaatttacagaat

SEQ ID NO: 252715 - DNA, 20 bp, Artificial Sequence
  Description of Artificial Sequence: Synthetic oligonucleotide
  Target: LAMA2; (-) strand; PAM type: YTN; PAM sequence: TTT
atacaggtaaatttacagaa

SEQ ID NO: 252716 - DNA, 20 bp, Artificial Sequence
  Description of Artificial Sequence: Synthetic oligonucleotide
  Target: LAMA2; (-) strand; PAM type: YTN; PAM sequence: TTA
ataatttatacaggtaaatt

SEQ ID NO: 252717 - DNA, 20 bp, Artificial Sequence
  Description of Artificial Sequence: Synthetic oligonucleotide
  Target: LAMA2; (-) strand; PAM type: YTN; PAM sequence: TTA
ttaataatttatacaggtaa

SEQ ID NO: 252718 - DNA, 20 bp, Artificial Sequence
  Description of Artificial Sequence: Synthetic oligonucleotide
  Target: LAMA2; (-) strand; PAM type: YTN; PAM sequence: CTT
attaataatttatacaggta

SEQ ID NO: 252719 - DNA, 20 bp, Artificial Sequence
  Description of Artificial Sequence: Synthetic oligonucleotide
  Target: LAMA2; (-) strand; PAM type: YTN; PAM sequence: TTG
tatgtacttattaataattt

SEQ ID NO: 252720 - DNA, 20 bp, Artificial Sequence
  Description of Artificial Sequence: Synthetic oligonucleotide
  Target: LAMA2; (-) strand; PAM type: YTN; PAM sequence: TTA
tgttgtatgtacttattaat

SEQ ID NO: 252721 - DNA, 20 bp, Artificial Sequence
  Description of Artificial Sequence: Synthetic oligonucleotide
  Target: LAMA2; (-) strand; PAM type: YTN; PAM sequence: CTA
aacagataggacagggatta

SEQ ID NO: 252722 - DNA, 20 bp, Artificial Sequence
  Description of Artificial Sequence: Synthetic oligonucleotide
  Target: LAMA2; (-) strand; PAM type: YTN; PAM sequence: CTC
cctaaacagataggacaggg

SEQ ID NO: 252723 - DNA, 20 bp, Artificial Sequence
  Description of Artificial Sequence: Synthetic oligonucleotide
  Target: LAMA2; (-) strand; PAM type: YTN; PAM sequence: TTG
tctccctaaacagataggac

SEQ ID NO: 252724 - DNA, 20 bp, Artificial Sequence
  Description of Artificial Sequence: Synthetic oligonucleotide
  Target: LAMA2; (-) strand; PAM type: YTN; PAM sequence: TTA
ttgtctccctaaacagatag

SEQ ID NO: 252725 - DNA, 20 bp, Artificial Sequence
  Description of Artificial Sequence: Synthetic oligonucleotide
  Target: LAMA2; (-) strand; PAM type: YTN; PAM sequence: TTT
attgtctccctaaacagata

SEQ ID NO: 252726 - DNA, 20 bp, Artificial Sequence
  Description of Artificial Sequence: Synthetic oligonucleotide
  Target: LAMA2; (-) strand; PAM type: YTN; PAM sequence: TTC
atagatatttattgtctccc

SEQ ID NO: 252727 - DNA, 20 bp, Artificial Sequence
  Description of Artificial Sequence: Synthetic oligonucleotide
  Target: LAMA2; (-) strand; PAM type: YTN; PAM sequence: TTT
catagatatttattgtctcc

SEQ ID NO: 252728 - DNA, 20 bp, Artificial Sequence
  Description of Artificial Sequence: Synthetic oligonucleotide
  Target: LAMA2; (-) strand; PAM type: YTN; PAM sequence: TTT
tcatagatatttattgtctc

SEQ ID NO: 252729 - DNA, 20 bp, Artificial Sequence
  Description of Artificial Sequence: Synthetic oligonucleotide
  Target: LAMA2; (-) strand; PAM type: YTN; PAM sequence: TTT
ttcatagatatttattgtct

SEQ ID NO: 252730 - DNA, 20 bp, Artificial Sequence
  Description of Artificial Sequence: Synthetic oligonucleotide
  Target: LAMA2; (-) strand; PAM type: YTN; PAM sequence: CTG
agatcccatttttcatagat

SEQ ID NO: 252731 - DNA, 20 bp, Artificial Sequence
  Description of Artificial Sequence: Synthetic oligonucleotide
  Target: LAMA2; (-) strand; PAM type: YTN; PAM sequence: TTA
tacagtgctgagatcccatt

SEQ ID NO: 252732 - DNA, 20 bp, Artificial Sequence
  Description of Artificial Sequence: Synthetic oligonucleotide
  Target: LAMA2; (-) strand; PAM type: YTN; PAM sequence: TTA
attatacagtgctgagatcc

SEQ ID NO: 252733 - DNA, 20 bp, Artificial Sequence
  Description of Artificial Sequence: Synthetic oligonucleotide
  Target: LAMA2; (-) strand; PAM type: YTN; PAM sequence: CTT
aattatacagtgctgagatc

SEQ ID NO: 252734 - DNA, 20 bp, Artificial Sequence
  Description of Artificial Sequence: Synthetic oligonucleotide
  Target: LAMA2; (-) strand; PAM type: YTN; PAM sequence: CTC
ccttaattatacagtgctga

SEQ ID NO: 252735 - DNA, 20 bp, Artificial Sequence
  Description of Artificial Sequence: Synthetic oligonucleotide
  Target: LAMA2; (-) strand; PAM type: YTN; PAM sequence: CTC
tcccttaattatacagtgct

SEQ ID NO: 252736 - DNA, 20 bp, Artificial Sequence
  Description of Artificial Sequence: Synthetic oligonucleotide
  Target: LAMA2; (-) strand; PAM type: YTN; PAM sequence: CTG
tagcacatacctctccctta

SEQ ID NO: 252737 - DNA, 20 bp, Artificial Sequence
  Description of Artificial Sequence: Synthetic oligonucleotide
  Target: LAMA2; (-) strand; PAM type: YTN; PAM sequence: TTC
tgtagcacatacctctccct

SEQ ID NO: 252738 - DNA, 20 bp, Artificial Sequence
  Description of Artificial Sequence: Synthetic oligonucleotide
  Target: LAMA2; (-) strand; PAM type: YTN; PAM sequence: TTG
catgtatgttctgtagcaca

SEQ ID NO: 252739 - DNA, 20 bp, Artificial Sequence
  Description of Artificial Sequence: Synthetic oligonucleotide
  Target: LAMA2; (-) strand; PAM type: YTN; PAM sequence: TTA
ttgcatgtatgttctgtagc

SEQ ID NO: 252740 - DNA, 20 bp, Artificial Sequence
  Description of Artificial Sequence: Synthetic oligonucleotide
  Target: LAMA2; (-) strand; PAM type: YTN; PAM sequence: TTG
aatgattattgcatgtatgt

SEQ ID NO: 252741 - DNA, 20 bp, Artificial Sequence
  Description of Artificial Sequence: Synthetic oligonucleotide
  Target: LAMA2; (-) strand; PAM type: YTN; PAM sequence: TTT
gaatgattattgcatgtatg

SEQ ID NO: 252742 - DNA, 20 bp, Artificial Sequence
  Description of Artificial Sequence: Synthetic oligonucleotide
  Target: LAMA2; (-) strand; PAM type: YTN; PAM sequence: CTT
tgaatgattattgcatgtat

SEQ ID NO: 252743 - DNA, 20 bp, Artificial Sequence
  Description of Artificial Sequence: Synthetic oligonucleotide
  Target: LAMA2; (-) strand; PAM type: YTN; PAM sequence: CTC
atccctttgaatgattattg

SEQ ID NO: 252744 - DNA, 20 bp, Artificial Sequence
  Description of Artificial Sequence: Synthetic oligonucleotide
  Target: LAMA2; (-) strand; PAM type: YTN; PAM sequence: CTG
cagtagctcatccctttgaa

SEQ ID NO: 252745 - DNA, 20 bp, Artificial Sequence
  Description of Artificial Sequence: Synthetic oligonucleotide
  Target: LAMA2; (-) strand; PAM type: YTN; PAM sequence: CTC
cactgcagtagctcatccct

SEQ ID NO: 252746 - DNA, 20 bp, Artificial Sequence
  Description of Artificial Sequence: Synthetic oligonucleotide
  Target: LAMA2; (-) strand; PAM type: YTN; PAM sequence: CTC
tccactgcagtagctcatcc

SEQ ID NO: 252747 - DNA, 20 bp, Artificial Sequence
  Description of Artificial Sequence: Synthetic oligonucleotide
  Target: LAMA2; (-) strand; PAM type: YTN; PAM sequence: CTC
tctccactgcagtagctcat

SEQ ID NO: 252748 - DNA, 20 bp, Artificial Sequence
  Description of Artificial Sequence: Synthetic oligonucleotide
  Target: LAMA2; (-) strand; PAM type: YTN; PAM sequence: TTG
catctctctccactgcagta

SEQ ID NO: 252749 - DNA, 20 bp, Artificial Sequence
  Description of Artificial Sequence: Synthetic oligonucleotide
  Target: LAMA2; (-) strand; PAM type: YTN; PAM sequence: TTT
gcatctctctccactgcagt

SEQ ID NO: 252750 - DNA, 20 bp, Artificial Sequence
  Description of Artificial Sequence: Synthetic oligonucleotide
  Target: LAMA2; (-) strand; PAM type: YTN; PAM sequence: CTT
tgcatctctctccactgcag

SEQ ID NO: 252751 - DNA, 20 bp, Artificial Sequence
  Description of Artificial Sequence: Synthetic oligonucleotide
  Target: LAMA2; (-) strand; PAM type: YTN; PAM sequence: CTC
caggacactttgcatctctc

SEQ ID NO: 252752 - DNA, 20 bp, Artificial Sequence
  Description of Artificial Sequence: Synthetic oligonucleotide
  Target: LAMA2; (-) strand; PAM type: YTN; PAM sequence: CTC
cactccaggacactttgcat

SEQ ID NO: 252753 - DNA, 20 bp, Artificial Sequence
  Description of Artificial Sequence: Synthetic oligonucleotide
  Target: LAMA2; (-) strand; PAM type: YTN; PAM sequence: TTC
tccactccaggacactttgc

SEQ ID NO: 252754 - DNA, 20 bp, Artificial Sequence
  Description of Artificial Sequence: Synthetic oligonucleotide
  Target: LAMA2; (-) strand; PAM type: YTN; PAM sequence: TTT
ctccactccaggacactttg

SEQ ID NO: 252755 - DNA, 20 bp, Artificial Sequence
  Description of Artificial Sequence: Synthetic oligonucleotide
  Target: LAMA2; (-) strand; PAM type: YTN; PAM sequence: TTA
agatttctccactccaggac

SEQ ID NO: 252756 - DNA, 20 bp, Artificial Sequence
  Description of Artificial Sequence: Synthetic oligonucleotide
  Target: LAMA2; (-) strand; PAM type: YTN; PAM sequence: TTT
aagatttctccactccagga

SEQ ID NO: 252757 - DNA, 20 bp, Artificial Sequence
  Description of Artificial Sequence: Synthetic oligonucleotide
  Target: LAMA2; (-) strand; PAM type: YTN; PAM sequence: TTA
gcatccaatttaagatttct

SEQ ID NO: 252758 - DNA, 20 bp, Artificial Sequence
  Description of Artificial Sequence: Synthetic oligonucleotide
  Target: LAMA2; (-) strand; PAM type: YTN; PAM sequence: TTT
agcatccaatttaagatttc

SEQ ID NO: 252759 - DNA, 20 bp, Artificial Sequence
  Description of Artificial Sequence: Synthetic oligonucleotide
  Target: LAMA2; (-) strand; PAM type: YTN; PAM sequence: TTA
tttagcatccaatttaagat

SEQ ID NO: 252760 - DNA, 20 bp, Artificial Sequence
  Description of Artificial Sequence: Synthetic oligonucleotide
  Target: LAMA2; (-) strand; PAM type: YTN; PAM sequence: TTA
ccattatttagcatccaatt

SEQ ID NO: 252761 - DNA, 20 bp, Artificial Sequence
  Description of Artificial Sequence: Synthetic oligonucleotide
  Target: LAMA2; (-) strand; PAM type: YTN; PAM sequence: CTG
ttaccattatttagcatcca

SEQ ID NO: 252762 - DNA, 20 bp, Artificial Sequence
  Description of Artificial Sequence: Synthetic oligonucleotide
  Target: LAMA2; (-) strand; PAM type: YTN; PAM sequence: CTA
tctgttaccattatttagca

SEQ ID NO: 252763 - DNA, 20 bp, Artificial Sequence
  Description of Artificial Sequence: Synthetic oligonucleotide
  Target: LAMA2; (-) strand; PAM type: YTN; PAM sequence: CTA
tctatctgttaccattattt

SEQ ID NO: 252764 - DNA, 20 bp, Artificial Sequence
  Description of Artificial Sequence: Synthetic oligonucleotide
  Target: LAMA2; (-) strand; PAM type: YTN; PAM sequence: TTC
tatctatctgttaccattat

SEQ ID NO: 252765 - DNA, 20 bp, Artificial Sequence
  Description of Artificial Sequence: Synthetic oligonucleotide
  Target: LAMA2; (-) strand; PAM type: YTN; PAM sequence: CTT
ctatctatctgttaccatta

SEQ ID NO: 252766 - DNA, 20 bp, Artificial Sequence
  Description of Artificial Sequence: Synthetic oligonucleotide
  Target: LAMA2; (-) strand; PAM type: YTN; PAM sequence: CTC
aaatgcttctatctatctgt

SEQ ID NO: 252767 - DNA, 20 bp, Artificial Sequence
  Description of Artificial Sequence: Synthetic oligonucleotide
  Target: LAMA2; (-) strand; PAM type: YTN; PAM sequence: TTC
acactcaaatgcttctatct

SEQ ID NO: 252768 - DNA, 20 bp, Artificial Sequence
  Description of Artificial Sequence: Synthetic oligonucleotide
  Target: LAMA2; (-) strand; PAM type: YTN; PAM sequence: TTT
cacactcaaatgcttctatc

SEQ ID NO: 252769 - DNA, 20 bp, Artificial Sequence
  Description of Artificial Sequence: Synthetic oligonucleotide
  Target: LAMA2; (-) strand; PAM type: YTN; PAM sequence: TTT
tcacactcaaatgcttctat

SEQ ID NO: 252770 - DNA, 20 bp, Artificial Sequence
  Description of Artificial Sequence: Synthetic oligonucleotide
  Target: LAMA2; (-) strand; PAM type: YTN; PAM sequence: TTT
ttcacactcaaatgcttcta

SEQ ID NO: 252771 - DNA, 20 bp, Artificial Sequence
  Description of Artificial Sequence: Synthetic oligonucleotide
  Target: LAMA2; (-) strand; PAM type: YTN; PAM sequence: TTT
tttcacactcaaatgcttct

SEQ ID NO: 252772 - DNA, 20 bp, Artificial Sequence
  Description of Artificial Sequence: Synthetic oligonucleotide
  Target: LAMA2; (-) strand; PAM type: YTN; PAM sequence: TTT
ttttcacactcaaatgcttc

SEQ ID NO: 252773 - DNA, 20 bp, Artificial Sequence
  Description of Artificial Sequence: Synthetic oligonucleotide
  Target: LAMA2; (-) strand; PAM type: YTN; PAM sequence: TTT
tttttcacactcaaatgctt

SEQ ID NO: 252774 - DNA, 20 bp, Artificial Sequence
  Description of Artificial Sequence: Synthetic oligonucleotide
  Target: LAMA2; (-) strand; PAM type: YTN; PAM sequence: TTT
ttttttcacactcaaatgct

SEQ ID NO: 252775 - DNA, 20 bp, Artificial Sequence
  Description of Artificial Sequence: Synthetic oligonucleotide
  Target: LAMA2; (-) strand; PAM type: YTN; PAM sequence: CTT
tttttttcacactcaaatgc

SEQ ID NO: 252776 - DNA, 20 bp, Artificial Sequence
  Description of Artificial Sequence: Synthetic oligonucleotide
  Target: LAMA2; (-) strand; PAM type: YTN; PAM sequence: CTC
ctttttttttcacactcaaa

SEQ ID NO: 252777 - DNA, 20 bp, Artificial Sequence
  Description of Artificial Sequence: Synthetic oligonucleotide
  Target: LAMA2; (-) strand; PAM type: YTN; PAM sequence: CTC
tcctttttttttcacactca

SEQ ID NO: 252778 - DNA, 20 bp, Artificial Sequence
  Description of Artificial Sequence: Synthetic oligonucleotide
  Target: LAMA2; (-) strand; PAM type: YTN; PAM sequence: TTA
tctctcctttttttttcaca

SEQ ID NO: 252779 - DNA, 20 bp, Artificial Sequence
  Description of Artificial Sequence: Synthetic oligonucleotide
  Target: LAMA2; (-) strand; PAM type: YTN; PAM sequence: TTA
ttatctctcctttttttttc

SEQ ID NO: 252780 - DNA, 20 bp, Artificial Sequence
  Description of Artificial Sequence: Synthetic oligonucleotide
  Target: LAMA2; (-) strand; PAM type: YTN; PAM sequence: TTT
attatctctccttttttttt

SEQ ID NO: 252781 - DNA, 20 bp, Artificial Sequence
  Description of Artificial Sequence: Synthetic oligonucleotide
  Target: LAMA2; (-) strand; PAM type: YTN; PAM sequence: TTT
tattatctctcctttttttt

SEQ ID NO: 252782 - DNA, 20 bp, Artificial Sequence
  Description of Artificial Sequence: Synthetic oligonucleotide
  Target: LAMA2; (-) strand; PAM type: YTN; PAM sequence: CTT
ttattatctctccttttttt

SEQ ID NO: 252783 - DNA, 20 bp, Artificial Sequence
  Description of Artificial Sequence: Synthetic oligonucleotide
  Target: LAMA2; (-) strand; PAM type: YTN; PAM sequence: TTG
tgtgacagatacaggaagct

SEQ ID NO: 252784 - DNA, 20 bp, Artificial Sequence
  Description of Artificial Sequence: Synthetic oligonucleotide
  Target: LAMA2; (-) strand; PAM type: YTN; PAM sequence: TTA
ttgtgtgacagatacaggaa

SEQ ID NO: 252785 - DNA, 20 bp, Artificial Sequence
  Description of Artificial Sequence: Synthetic oligonucleotide
  Target: LAMA2; (-) strand; PAM type: YTN; PAM sequence: TTA
tcaaacaattattgtgtgac

SEQ ID NO: 252786 - DNA, 20 bp, Artificial Sequence
  Description of Artificial Sequence: Synthetic oligonucleotide
  Target: LAMA2; (-) strand; PAM type: YTN; PAM sequence: TTT
atcaaacaattattgtgtga

SEQ ID NO: 252787 - DNA, 20 bp, Artificial Sequence
  Description of Artificial Sequence: Synthetic oligonucleotide
  Target: LAMA2; (-) strand; PAM type: YTN; PAM sequence: TTA
tttatcaaacaattattgtg

SEQ ID NO: 252788 - DNA, 20 bp, Artificial Sequence
  Description of Artificial Sequence: Synthetic oligonucleotide
  Target: LAMA2; (-) strand; PAM type: YTN; PAM sequence: TTT
atttatcaaacaattattgt

SEQ ID NO: 252789 - DNA, 20 bp, Artificial Sequence
  Description of Artificial Sequence: Synthetic oligonucleotide
  Target: LAMA2; (-) strand; PAM type: YTN; PAM sequence: TTT
tatttatcaaacaattattg

SEQ ID NO: 252790 - DNA, 20 bp, Artificial Sequence
  Description of Artificial Sequence: Synthetic oligonucleotide
  Target: LAMA2; (-) strand; PAM type: YTN; PAM sequence: TTA
caaagtaattttatttatca

SEQ ID NO: 252791 - DNA, 20 bp, Artificial Sequence
  Description of Artificial Sequence: Synthetic oligonucleotide
  Target: LAMA2; (-) strand; PAM type: YTN; PAM sequence: TTA
tggattacaaagtaatttta

SEQ ID NO: 252792 - DNA, 20 bp, Artificial Sequence
  Description of Artificial Sequence: Synthetic oligonucleotide
  Target: LAMA2; (-) strand; PAM type: YTN; PAM sequence: TTT
atggattacaaagtaatttt

SEQ ID NO: 252793 - DNA, 20 bp, Artificial Sequence
  Description of Artificial Sequence: Synthetic oligonucleotide
  Target: LAMA2; (-) strand; PAM type: YTN; PAM sequence: TTT
tatggattacaaagtaattt

SEQ ID NO: 252794 - DNA, 20 bp, Artificial Sequence
  Description of Artificial Sequence: Synthetic oligonucleotide
  Target: LAMA2; (-) strand; PAM type: YTN; PAM sequence: CTT
ttatggattacaaagtaatt

SEQ ID NO: 252795 - DNA, 20 bp, Artificial Sequence
  Description of Artificial Sequence: Synthetic oligonucleotide
  Target: LAMA2; (-) strand; PAM type: YTN; PAM sequence: TTC
ttttatggattacaaagtaa

SEQ ID NO: 252796 - DNA, 20 bp, Artificial Sequence
  Description of Artificial Sequence: Synthetic oligonucleotide
  Target: LAMA2; (-) strand; PAM type: YTN; PAM sequence: TTA
agttcttttatggattacaa

SEQ ID NO: 252797 - DNA, 20 bp, Artificial Sequence
  Description of Artificial Sequence: Synthetic oligonucleotide
  Target: LAMA2; (-) strand; PAM type: YTN; PAM sequence: TTC
aattaagttcttttatggat

SEQ ID NO: 252798 - DNA, 20 bp, Artificial Sequence
  Description of Artificial Sequence: Synthetic oligonucleotide
  Target: LAMA2; (-) strand; PAM type: YTN; PAM sequence: TTG
attcaattaagttcttttat

SEQ ID NO: 252799 - DNA, 20 bp, Artificial Sequence
  Description of Artificial Sequence: Synthetic oligonucleotide
  Target: LAMA2; (-) strand; PAM type: YTN; PAM sequence: CTT
gattcaattaagttctttta

SEQ ID NO: 252800 - DNA, 20 bp, Artificial Sequence
  Description of Artificial Sequence: Synthetic oligonucleotide
  Target: LAMA2; (-) strand; PAM type: YTN; PAM sequence: CTC
ttgattcaattaagttcttt

SEQ ID NO: 252801 - DNA, 20 bp, Artificial Sequence
  Description of Artificial Sequence: Synthetic oligonucleotide
  Target: LAMA2; (-) strand; PAM type: YTN; PAM sequence: TTG
tctcttgattcaattaagtt

SEQ ID NO: 252802 - DNA, 20 bp, Artificial Sequence
  Description of Artificial Sequence: Synthetic oligonucleotide
  Target: LAMA2; (-) strand; PAM type: YTN; PAM sequence: TTC
attgtctcttgattcaatta

SEQ ID NO: 252803 - DNA, 20 bp, Artificial Sequence
  Description of Artificial Sequence: Synthetic oligonucleotide
  Target: LAMA2; (-) strand; PAM type: YTN; PAM sequence: TTC
caaaattcattgtctcttga

SEQ ID NO: 252804 - DNA, 20 bp, Artificial Sequence
  Description of Artificial Sequence: Synthetic oligonucleotide
  Target: LAMA2; (-) strand; PAM type: YTN; PAM sequence: TTA
gagagtagaagaaatgaaga

SEQ ID NO: 252805 - DNA, 20 bp, Artificial Sequence
  Description of Artificial Sequence: Synthetic oligonucleotide
  Target: LAMA2; (-) strand; PAM type: YTN; PAM sequence: TTT
agagagtagaagaaatgaag

SEQ ID NO: 252806 - DNA, 20 bp, Artificial Sequence
  Description of Artificial Sequence: Synthetic oligonucleotide
  Target: LAMA2; (-) strand; PAM type: YTN; PAM sequence: TTT
tagagagtagaagaaatgaa

SEQ ID NO: 252807 - DNA, 20 bp, Artificial Sequence
  Description of Artificial Sequence: Synthetic oligonucleotide
  Target: LAMA2; (-) strand; PAM type: YTN; PAM sequence: TTG
ataaggaaaaaatgaatttt

SEQ ID NO: 252808 - DNA, 20 bp, Artificial Sequence
  Description of Artificial Sequence: Synthetic oligonucleotide
  Target: LAMA2; (-) strand; PAM type: YTN; PAM sequence: TTT
gataaggaaaaaatgaattt

SEQ ID NO: 252809 - DNA, 20 bp, Artificial Sequence
  Description of Artificial Sequence: Synthetic oligonucleotide
  Target: LAMA2; (-) strand; PAM type: YTN; PAM sequence: TTT
tgataaggaaaaaatgaatt

SEQ ID NO: 252810 - DNA, 20 bp, Artificial Sequence
  Description of Artificial Sequence: Synthetic oligonucleotide
  Target: LAMA2; (-) strand; PAM type: YTN; PAM sequence: TTA
gggacagaaagttttgataa

SEQ ID NO: 252811 - DNA, 20 bp, Artificial Sequence
  Description of Artificial Sequence: Synthetic oligonucleotide
  Target: LAMA2; (-) strand; PAM type: YTN; PAM sequence: TTT
agggacagaaagttttgata

SEQ ID NO: 252812 - DNA, 20 bp, Artificial Sequence
  Description of Artificial Sequence: Synthetic oligonucleotide
  Target: LAMA2; (-) strand; PAM type: YTN; PAM sequence: CTG
aataatagtgaatttaggga

SEQ ID NO: 252813 - DNA, 20 bp, Artificial Sequence
  Description of Artificial Sequence: Synthetic oligonucleotide
  Target: LAMA2; (-) strand; PAM type: YTN; PAM sequence: TTG
aaaagcaaatgaaataatga

SEQ ID NO: 252814 - DNA, 20 bp, Artificial Sequence
  Description of Artificial Sequence: Synthetic oligonucleotide
  Target: LAMA2; (-) strand; PAM type: YTN; PAM sequence: TTA
attgaaaagcaaatgaaata

SEQ ID NO: 252815 - DNA, 20 bp, Artificial Sequence
  Description of Artificial Sequence: Synthetic oligonucleotide
  Target: LAMA2; (-) strand; PAM type: YTN; PAM sequence: CTT
aattgaaaagcaaatgaaat

SEQ ID NO: 252816 - DNA, 20 bp, Artificial Sequence
  Description of Artificial Sequence: Synthetic oligonucleotide
  Target: LAMA2; (-) strand; PAM type: YTN; PAM sequence: CTA
cacttaattgaaaagcaaat

SEQ ID NO: 252817 - DNA, 20 bp, Artificial Sequence
  Description of Artificial Sequence: Synthetic oligonucleotide
  Target: LAMA2; (-) strand; PAM type: YTN; PAM sequence: TTA
caaactacacttaattgaaa

SEQ ID NO: 252818 - DNA, 20 bp, Artificial Sequence
  Description of Artificial Sequence: Synthetic oligonucleotide
  Target: LAMA2; (-) strand; PAM type: YTN; PAM sequence: CTT
acaaactacacttaattgaa

SEQ ID NO: 252819 - DNA, 20 bp, Artificial Sequence
  Description of Artificial Sequence: Synthetic oligonucleotide
  Target: LAMA2; (-) strand; PAM type: YTN; PAM sequence: CTG
gccttacaaactacacttaa

SEQ ID NO: 252820 - DNA, 20 bp, Artificial Sequence
  Description of Artificial Sequence: Synthetic oligonucleotide
  Target: LAMA2; (-) strand; PAM type: YTN; PAM sequence: CTA
gaatgactggccttacaaac

SEQ ID NO: 252821 - DNA, 20 bp, Artificial Sequence
  Description of Artificial Sequence: Synthetic oligonucleotide
  Target: LAMA2; (-) strand; PAM type: YTN; PAM sequence: TTA
gtgataacaaggctagaatg

SEQ ID NO: 252822 - DNA, 20 bp, Artificial Sequence
  Description of Artificial Sequence: Synthetic oligonucleotide
  Target: LAMA2; (-) strand; PAM type: YTN; PAM sequence: TTA
agggatcccaggatattagt

SEQ ID NO: 252823 - DNA, 20 bp, Artificial Sequence
  Description of Artificial Sequence: Synthetic oligonucleotide
  Target: LAMA2; (-) strand; PAM type: YTN; PAM sequence: TTT
aagggatcccaggatattag

SEQ ID NO: 252824 - DNA, 20 bp, Artificial Sequence
  Description of Artificial Sequence: Synthetic oligonucleotide
  Target: LAMA2; (-) strand; PAM type: YTN; PAM sequence: TTT
taagggatcccaggatatta

SEQ ID NO: 252825 - DNA, 20 bp, Artificial Sequence
  Description of Artificial Sequence: Synthetic oligonucleotide
  Target: LAMA2; (-) strand; PAM type: YTN; PAM sequence: CTT
ttaagggatcccaggatatt

SEQ ID NO: 252826 - DNA, 20 bp, Artificial Sequence
  Description of Artificial Sequence: Synthetic oligonucleotide
  Target: LAMA2; (-) strand; PAM type: YTN; PAM sequence: CTC
agcttttaagggatcccagg

SEQ ID NO: 252827 - DNA, 20 bp, Artificial Sequence
  Description of Artificial Sequence: Synthetic oligonucleotide
  Target: LAMA2; (-) strand; PAM type: YTN; PAM sequence: TTA
ctcagcttttaagggatccc

SEQ ID NO: 252828 - DNA, 20 bp, Artificial Sequence
  Description of Artificial Sequence: Synthetic oligonucleotide
  Target: LAMA2; (-) strand; PAM type: YTN; PAM sequence: TTT
actcagcttttaagggatcc

SEQ ID NO: 252829 - DNA, 20 bp, Artificial Sequence
  Description of Artificial Sequence: Synthetic oligonucleotide
  Target: LAMA2; (-) strand; PAM type: YTN; PAM sequence: TTG
gcgtttactcagcttttaag

SEQ ID NO: 252830 - DNA, 20 bp, Artificial Sequence
  Description of Artificial Sequence: Synthetic oligonucleotide
  Target: LAMA2; (-) strand; PAM type: YTN; PAM sequence: TTT
ggcgtttactcagcttttaa

SEQ ID NO: 252831 - DNA, 20 bp, Artificial Sequence
  Description of Artificial Sequence: Synthetic oligonucleotide
  Target: LAMA2; (-) strand; PAM type: YTN; PAM sequence: CTT
tggcgtttactcagctttta

SEQ ID NO: 252832 - DNA, 20 bp, Artificial Sequence
  Description of Artificial Sequence: Synthetic oligonucleotide
  Target: LAMA2; (-) strand; PAM type: YTN; PAM sequence: TTA
atggtctttggcgtttactc

SEQ ID NO: 252833 - DNA, 20 bp, Artificial Sequence
  Description of Artificial Sequence: Synthetic oligonucleotide
  Target: LAMA2; (-) strand; PAM type: YTN; PAM sequence: TTA
agacattaatggtctttggc

SEQ ID NO: 252834 - DNA, 20 bp, Artificial Sequence
  Description of Artificial Sequence: Synthetic oligonucleotide
  Target: LAMA2; (-) strand; PAM type: YTN; PAM sequence: CTG
gaattaagacattaatggtc

SEQ ID NO: 252835 - DNA, 20 bp, Artificial Sequence
  Description of Artificial Sequence: Synthetic oligonucleotide
  Target: LAMA2; (-) strand; PAM type: YTN; PAM sequence: CTC
agcaagctggaattaagaca

SEQ ID NO: 252836 - DNA, 20 bp, Artificial Sequence
  Description of Artificial Sequence: Synthetic oligonucleotide
  Target: LAMA2; (-) strand; PAM type: YTN; PAM sequence: TTC
tcagcaagctggaattaaga

SEQ ID NO: 252837 - DNA, 20 bp, Artificial Sequence
  Description of Artificial Sequence: Synthetic oligonucleotide
  Target: LAMA2; (-) strand; PAM type: YTN; PAM sequence: TTG
gccagaggttctcagcaagc

SEQ ID NO: 252838 - DNA, 20 bp, Artificial Sequence
  Description of Artificial Sequence: Synthetic oligonucleotide
  Target: LAMA2; (-) strand; PAM type: YTN; PAM sequence: TTT
ggccagaggttctcagcaag

SEQ ID NO: 252839 - DNA, 20 bp, Artificial Sequence
  Description of Artificial Sequence: Synthetic oligonucleotide
  Target: LAMA2; (-) strand; PAM type: YTN; PAM sequence: TTT
tggccagaggttctcagcaa

SEQ ID NO: 252840 - DNA, 20 bp, Artificial Sequence
  Description of Artificial Sequence: Synthetic oligonucleotide
  Target: LAMA2; (-) strand; PAM type: YTN; PAM sequence: TTT
ttggccagaggttctcagca

SEQ ID NO: 252841 - DNA, 20 bp, Artificial Sequence
  Description of Artificial Sequence: Synthetic oligonucleotide
  Target: LAMA2; (-) strand; PAM type: YTN; PAM sequence: TTT
tttggccagaggttctcagc

SEQ ID NO: 252842 - DNA, 20 bp, Artificial Sequence
  Description of Artificial Sequence: Synthetic oligonucleotide
  Target: LAMA2; (-) strand; PAM type: YTN; PAM sequence: CTT
ttttggccagaggttctcag

SEQ ID NO: 252843 - DNA, 20 bp, Artificial Sequence
  Description of Artificial Sequence: Synthetic oligonucleotide
  Target: LAMA2; (-) strand; PAM type: YTN; PAM sequence: TTG
atccttttttggccagaggt

SEQ ID NO: 252844 - DNA, 20 bp, Artificial Sequence
  Description of Artificial Sequence: Synthetic oligonucleotide
  Target: LAMA2; (-) strand; PAM type: YTN; PAM sequence: TTT
gatccttttttggccagagg

SEQ ID NO: 252845 - DNA, 20 bp, Artificial Sequence
  Description of Artificial Sequence: Synthetic oligonucleotide
  Target: LAMA2; (-) strand; PAM type: YTN; PAM sequence: CTA
caatggagtcatttgatcct

SEQ ID NO: 252846 - DNA, 20 bp, Artificial Sequence
  Description of Artificial Sequence: Synthetic oligonucleotide
  Target: LAMA2; (-) strand; PAM type: YTN; PAM sequence: CTA
tggccccaaatgaagtaaaa

SEQ ID NO: 252847 - DNA, 20 bp, Artificial Sequence
  Description of Artificial Sequence: Synthetic oligonucleotide
  Target: LAMA2; (-) strand; PAM type: YTN; PAM sequence: CTG
aatcaacactatggccccaa

SEQ ID NO: 252848 - DNA, 20 bp, Artificial Sequence
  Description of Artificial Sequence: Synthetic oligonucleotide
  Target: LAMA2; (-) strand; PAM type: YTN; PAM sequence: TTC
acaagaagtcaagtagaaat

SEQ ID NO: 252849 - DNA, 20 bp, Artificial Sequence
  Description of Artificial Sequence: Synthetic oligonucleotide
  Target: LAMA2; (-) strand; PAM type: YTN; PAM sequence: CTT
cacaagaagtcaagtagaaa

SEQ ID NO: 252850 - DNA, 20 bp, Artificial Sequence
  Description of Artificial Sequence: Synthetic oligonucleotide
  Target: LAMA2; (-) strand; PAM type: YTN; PAM sequence: CTG
cagaacacttcacaagaagt

SEQ ID NO: 252851 - DNA, 20 bp, Artificial Sequence
  Description of Artificial Sequence: Synthetic oligonucleotide
  Target: LAMA2; (-) strand; PAM type: YTN; PAM sequence: TTA
actgcagaacacttcacaag

SEQ ID NO: 252852 - DNA, 20 bp, Artificial Sequence
  Description of Artificial Sequence: Synthetic oligonucleotide
  Target: LAMA2; (-) strand; PAM type: YTN; PAM sequence: TTT
aactgcagaacacttcacaa

SEQ ID NO: 252853 - DNA, 20 bp, Artificial Sequence
  Description of Artificial Sequence: Synthetic oligonucleotide
  Target: LAMA2; (-) strand; PAM type: YTN; PAM sequence: TTG
aaagatttaactgcagaaca

SEQ ID NO: 252854 - DNA, 20 bp, Artificial Sequence
  Description of Artificial Sequence: Synthetic oligonucleotide
  Target: LAMA2; (-) strand; PAM type: YTN; PAM sequence: TTT
gaaagatttaactgcagaac

SEQ ID NO: 252855 - DNA, 20 bp, Artificial Sequence
  Description of Artificial Sequence: Synthetic oligonucleotide
  Target: LAMA2; (-) strand; PAM type: YTN; PAM sequence: TTT
tgaaagatttaactgcagaa

SEQ ID NO: 252856 - DNA, 20 bp, Artificial Sequence
  Description of Artificial Sequence: Synthetic oligonucleotide
  Target: LAMA2; (-) strand; PAM type: YTN; PAM sequence: TTT
ttgaaagatttaactgcaga

SEQ ID NO: 252857 - DNA, 20 bp, Artificial Sequence
  Description of Artificial Sequence: Synthetic oligonucleotide
  Target: LAMA2; (-) strand; PAM type: YTN; PAM sequence: CTA
tgaaagtaagaaaatttttg

SEQ ID NO: 252858 - DNA, 20 bp, Artificial Sequence
  Description of Artificial Sequence: Synthetic oligonucleotide
  Target: LAMA2; (-) strand; PAM type: YTN; PAM sequence: CTA
tgatgacagcactatgaaag

SEQ ID NO: 252859 - DNA, 20 bp, Artificial Sequence
  Description of Artificial Sequence: Synthetic oligonucleotide
  Target: LAMA2; (-) strand; PAM type: YTN; PAM sequence: CTG
tcaagtgaaatctatgatga

SEQ ID NO: 252860 - DNA, 20 bp, Artificial Sequence
  Description of Artificial Sequence: Synthetic oligonucleotide
  Target: LAMA2; (-) strand; PAM type: YTN; PAM sequence: CTC
atctgtcaagtgaaatctat

SEQ ID NO: 252861 - DNA, 20 bp, Artificial Sequence
  Description of Artificial Sequence: Synthetic oligonucleotide
  Target: LAMA2; (-) strand; PAM type: YTN; PAM sequence: CTG
tctcatctgtcaagtgaaat

SEQ ID NO: 252862 - DNA, 20 bp, Artificial Sequence
  Description of Artificial Sequence: Synthetic oligonucleotide
  Target: LAMA2; (-) strand; PAM type: YTN; PAM sequence: TTA
atagtatatcccctgtctca

SEQ ID NO: 252863 - DNA, 20 bp, Artificial Sequence
  Description of Artificial Sequence: Synthetic oligonucleotide
  Target: LAMA2; (-) strand; PAM type: YTN; PAM sequence: TTT
aatagtatatcccctgtctc

SEQ ID NO: 252864 - DNA, 20 bp, Artificial Sequence
  Description of Artificial Sequence: Synthetic oligonucleotide
  Target: LAMA2; (-) strand; PAM type: YTN; PAM sequence: TTT
taatagtatatcccctgtct

SEQ ID NO: 252865 - DNA, 20 bp, Artificial Sequence
  Description of Artificial Sequence: Synthetic oligonucleotide
  Target: LAMA2; (-) strand; PAM type: YTN; PAM sequence: TTT
ttaatagtatatcccctgtc

SEQ ID NO: 252866 - DNA, 20 bp, Artificial Sequence
  Description of Artificial Sequence: Synthetic oligonucleotide
  Target: LAMA2; (-) strand; PAM type: YTN; PAM sequence: CTT
tttaatagtatatcccctgt

SEQ ID NO: 252867 - DNA, 20 bp, Artificial Sequence
  Description of Artificial Sequence: Synthetic oligonucleotide
  Target: LAMA2; (-) strand; PAM type: YTN; PAM sequence: CTC
tttttaatagtatatcccct

SEQ ID NO: 252868 - DNA, 20 bp, Artificial Sequence
  Description of Artificial Sequence: Synthetic oligonucleotide
  Target: LAMA2; (-) strand; PAM type: YTN; PAM sequence: TTG
cataacactctttttaatag

SEQ ID NO: 252869 - DNA, 20 bp, Artificial Sequence
  Description of Artificial Sequence: Synthetic oligonucleotide
  Target: LAMA2; (-) strand; PAM type: YTN; PAM sequence: CTG
agattgcataacactctttt

SEQ ID NO: 252870 - DNA, 20 bp, Artificial Sequence
  Description of Artificial Sequence: Synthetic oligonucleotide
  Target: LAMA2; (-) strand; PAM type: YTN; PAM sequence: TTC
atggaagaagaaactgagat

SEQ ID NO: 252871 - DNA, 20 bp, Artificial Sequence
  Description of Artificial Sequence: Synthetic oligonucleotide
  Target: LAMA2; (-) strand; PAM type: YTN; PAM sequence: TTT
catggaagaagaaactgaga

SEQ ID NO: 252872 - DNA, 20 bp, Artificial Sequence
  Description of Artificial Sequence: Synthetic oligonucleotide
  Target: LAMA2; (-) strand; PAM type: YTN; PAM sequence: TTC
atttcatggaagaagaaact

SEQ ID NO: 252873 - DNA, 20 bp, Artificial Sequence
  Description of Artificial Sequence: Synthetic oligonucleotide
  Target: LAMA2; (-) strand; PAM type: YTN; PAM sequence: TTT
catttcatggaagaagaaac

SEQ ID NO: 252874 - DNA, 20 bp, Artificial Sequence
  Description of Artificial Sequence: Synthetic oligonucleotide
  Target: LAMA2; (-) strand; PAM type: YTN; PAM sequence: TTT
tcatttcatggaagaagaaa

SEQ ID NO: 252875 - DNA, 20 bp, Artificial Sequence
  Description of Artificial Sequence: Synthetic oligonucleotide
  Target: LAMA2; (-) strand; PAM type: YTN; PAM sequence: TTA
ttttcatttcatggaagaag

SEQ ID NO: 252876 - DNA, 20 bp, Artificial Sequence
  Description of Artificial Sequence: Synthetic oligonucleotide
  Target: LAMA2; (-) strand; PAM type: YTN; PAM sequence: TTA
atattattttcatttcatgg

SEQ ID NO: 252877 - DNA, 20 bp, Artificial Sequence
  Description of Artificial Sequence: Synthetic oligonucleotide
  Target: LAMA2; (-) strand; PAM type: YTN; PAM sequence: CTA
tgaggtggttaatattattt

SEQ ID NO: 252878 - DNA, 20 bp, Artificial Sequence
  Description of Artificial Sequence: Synthetic oligonucleotide
  Target: LAMA2; (-) strand; PAM type: YTN; PAM sequence: TTC
tatgaggtggttaatattat

SEQ ID NO: 252879 - DNA, 20 bp, Artificial Sequence
  Description of Artificial Sequence: Synthetic oligonucleotide
  Target: LAMA2; (-) strand; PAM type: YTN; PAM sequence: CTA
aatgaaagtacgaacaaaca

SEQ ID NO: 252880 - DNA, 20 bp, Artificial Sequence
  Description of Artificial Sequence: Synthetic oligonucleotide
  Target: LAMA2; (-) strand; PAM type: YTN; PAM sequence: CTA
gtcagctaaatgaaagtacg

SEQ ID NO: 252881 - DNA, 20 bp, Artificial Sequence
  Description of Artificial Sequence: Synthetic oligonucleotide
  Target: LAMA2; (-) strand; PAM type: YTN; PAM sequence: CTC
atcaaatactagtcagctaa

SEQ ID NO: 252882 - DNA, 20 bp, Artificial Sequence
  Description of Artificial Sequence: Synthetic oligonucleotide
  Target: LAMA2; (-) strand; PAM type: YTN; PAM sequence: CTC
aaaatacacgctcatcaaat

SEQ ID NO: 252883 - DNA, 20 bp, Artificial Sequence
  Description of Artificial Sequence: Synthetic oligonucleotide
  Target: LAMA2; (-) strand; PAM type: YTN; PAM sequence: TTG
tctcaaaatacacgctcatc

SEQ ID NO: 252884 - DNA, 20 bp, Artificial Sequence
  Description of Artificial Sequence: Synthetic oligonucleotide
  Target: LAMA2; (-) strand; PAM type: YTN; PAM sequence: TTT
gtctcaaaatacacgctcat

SEQ ID NO: 252885 - DNA, 20 bp, Artificial Sequence
  Description of Artificial Sequence: Synthetic oligonucleotide
  Target: LAMA2; (-) strand; PAM type: YTN; PAM sequence: TTG
tttgtctcaaaatacacgct

SEQ ID NO: 252886 - DNA, 20 bp, Artificial Sequence
  Description of Artificial Sequence: Synthetic oligonucleotide
  Target: LAMA2; (-) strand; PAM type: YTN; PAM sequence: CTT
gtttgtctcaaaatacacgc

SEQ ID NO: 252887 - DNA, 20 bp, Artificial Sequence
  Description of Artificial Sequence: Synthetic oligonucleotide
  Target: LAMA2; (-) strand; PAM type: YTN; PAM sequence: CTG
tgtagggtcttgtttgtctc

SEQ ID NO: 252888 - DNA, 20 bp, Artificial Sequence
  Description of Artificial Sequence: Synthetic oligonucleotide
  Target: LAMA2; (-) strand; PAM type: YTN; PAM sequence: TTC
cctgtgtagggtcttgtttg

SEQ ID NO: 252889 - DNA, 20 bp, Artificial Sequence
  Description of Artificial Sequence: Synthetic oligonucleotide
  Target: LAMA2; (-) strand; PAM type: YTN; PAM sequence: TTT
ccctgtgtagggtcttgttt

SEQ ID NO: 252890 - DNA, 20 bp, Artificial Sequence
  Description of Artificial Sequence: Synthetic oligonucleotide
  Target: LAMA2; (-) strand; PAM type: YTN; PAM sequence: TTT
tccctgtgtagggtcttgtt

SEQ ID NO: 252891 - DNA, 20 bp, Artificial Sequence
  Description of Artificial Sequence: Synthetic oligonucleotide
  Target: LAMA2; (-) strand; PAM type: YTN; PAM sequence: CTA
ttttccctgtgtagggtctt

SEQ ID NO: 252892 - DNA, 20 bp, Artificial Sequence
  Description of Artificial Sequence: Synthetic oligonucleotide
  Target: LAMA2; (-) strand; PAM type: YTN; PAM sequence: TTA
atggcactattttccctgtg

SEQ ID NO: 252893 - DNA, 20 bp, Artificial Sequence
  Description of Artificial Sequence: Synthetic oligonucleotide
  Target: LAMA2; (-) strand; PAM type: YTN; PAM sequence: TTG
ttaatggcactattttccct

SEQ ID NO: 252894 - DNA, 20 bp, Artificial Sequence
  Description of Artificial Sequence: Synthetic oligonucleotide
  Target: LAMA2; (-) strand; PAM type: YTN; PAM sequence: CTG
tattgttaatggcactattt

SEQ ID NO: 252895 - DNA, 20 bp, Artificial Sequence
  Description of Artificial Sequence: Synthetic oligonucleotide
  Target: LAMA2; (-) strand; PAM type: YTN; PAM sequence: TTG
gggacagggacaatatctgt

SEQ ID NO: 252896 - DNA, 20 bp, Artificial Sequence
  Description of Artificial Sequence: Synthetic oligonucleotide
  Target: LAMA2; (-) strand; PAM type: YTN; PAM sequence: CTT
ggggacagggacaatatctg

SEQ ID NO: 252897 - DNA, 20 bp, Artificial Sequence
  Description of Artificial Sequence: Synthetic oligonucleotide
  Target: LAMA2; (-) strand; PAM type: YTN; PAM sequence: CTC
agtgcaacgtccttggggac

SEQ ID NO: 252898 - DNA, 20 bp, Artificial Sequence
  Description of Artificial Sequence: Synthetic oligonucleotide
  Target: LAMA2; (-) strand; PAM type: YTN; PAM sequence: TTA
atgccaccactcagtgcaac

SEQ ID NO: 252899 - DNA, 20 bp, Artificial Sequence
  Description of Artificial Sequence: Synthetic oligonucleotide
  Target: LAMA2; (-) strand; PAM type: YTN; PAM sequence: CTG
gcatatcgttaatgccacca

SEQ ID NO: 252900 - DNA, 20 bp, Artificial Sequence
  Description of Artificial Sequence: Synthetic oligonucleotide
  Target: LAMA2; (-) strand; PAM type: YTN; PAM sequence: TTC
tggcatatcgttaatgccac

SEQ ID NO: 252901 - DNA, 20 bp, Artificial Sequence
  Description of Artificial Sequence: Synthetic oligonucleotide
  Target: LAMA2; (-) strand; PAM type: YTN; PAM sequence: TTT
ctggcatatcgttaatgcca

SEQ ID NO: 252902 - DNA, 20 bp, Artificial Sequence
  Description of Artificial Sequence: Synthetic oligonucleotide
  Target: LAMA2; (-) strand; PAM type: YTN; PAM sequence: CTT
tctggcatatcgttaatgcc

SEQ ID NO: 252903 - DNA, 20 bp, Artificial Sequence
  Description of Artificial Sequence: Synthetic oligonucleotide
  Target: LAMA2; (-) strand; PAM type: YTN; PAM sequence: TTG
ctttctggcatatcgttaat

SEQ ID NO: 252904 - DNA, 20 bp, Artificial Sequence
  Description of Artificial Sequence: Synthetic oligonucleotide
  Target: LAMA2; (-) strand; PAM type: YTN; PAM sequence: TTT
gctttctggcatatcgttaa

SEQ ID NO: 252905 - DNA, 20 bp, Artificial Sequence
  Description of Artificial Sequence: Synthetic oligonucleotide
  Target: LAMA2; (-) strand; PAM type: YTN; PAM sequence: CTA
tttgctttctggcatatcgt

SEQ ID NO: 252906 - DNA, 20 bp, Artificial Sequence
  Description of Artificial Sequence: Synthetic oligonucleotide
  Target: LAMA2; (-) strand; PAM type: YTN; PAM sequence: TTC
tatttgctttctggcatatc

SEQ ID NO: 252907 - DNA, 20 bp, Artificial Sequence
  Description of Artificial Sequence: Synthetic oligonucleotide
  Target: LAMA2; (-) strand; PAM type: YTN; PAM sequence: TTT
ctatttgctttctggcatat

SEQ ID NO: 252908 - DNA, 20 bp, Artificial Sequence
  Description of Artificial Sequence: Synthetic oligonucleotide
  Target: LAMA2; (-) strand; PAM type: YTN; PAM sequence: TTA
tttctatttgctttctggca

SEQ ID NO: 252909 - DNA, 20 bp, Artificial Sequence
  Description of Artificial Sequence: Synthetic oligonucleotide
  Target: LAMA2; (-) strand; PAM type: YTN; PAM sequence: TTT
atttctatttgctttctggc

SEQ ID NO: 252910 - DNA, 20 bp, Artificial Sequence
  Description of Artificial Sequence: Synthetic oligonucleotide
  Target: LAMA2; (-) strand; PAM type: YTN; PAM sequence: TTG
tcacgtttatttctatttgc

SEQ ID NO: 252911 - DNA, 20 bp, Artificial Sequence
  Description of Artificial Sequence: Synthetic oligonucleotide
  Target: LAMA2; (-) strand; PAM type: YTN; PAM sequence: TTT
gtcacgtttatttctatttg

SEQ ID NO: 252912 - DNA, 20 bp, Artificial Sequence
  Description of Artificial Sequence: Synthetic oligonucleotide
  Target: LAMA2; (-) strand; PAM type: YTN; PAM sequence: TTC
atagaatttgtcacgtttat

SEQ ID NO: 252913 - DNA, 20 bp, Artificial Sequence
  Description of Artificial Sequence: Synthetic oligonucleotide
  Target: LAMA2; (-) strand; PAM type: YTN; PAM sequence: CTT
catagaatttgtcacgttta

SEQ ID NO: 252914 - DNA, 20 bp, Artificial Sequence
  Description of Artificial Sequence: Synthetic oligonucleotide
  Target: LAMA2; (-) strand; PAM type: YTN; PAM sequence: TTC
cttcatagaatttgtcacgt

SEQ ID NO: 252915 - DNA, 20 bp, Artificial Sequence
  Description of Artificial Sequence: Synthetic oligonucleotide
  Target: LAMA2; (-) strand; PAM type: YTN; PAM sequence: TTT
ccttcatagaatttgtcacg

SEQ ID NO: 252916 - DNA, 20 bp, Artificial Sequence
  Description of Artificial Sequence: Synthetic oligonucleotide
  Target: LAMA2; (-) strand; PAM type: YTN; PAM sequence: TTA
tttccttcatagaatttgtc

SEQ ID NO: 252917 - DNA, 20 bp, Artificial Sequence
  Description of Artificial Sequence: Synthetic oligonucleotide
  Target: LAMA2; (-) strand; PAM type: YTN; PAM sequence: TTT
atttccttcatagaatttgt

SEQ ID NO: 252918 - DNA, 20 bp, Artificial Sequence
  Description of Artificial Sequence: Synthetic oligonucleotide
  Target: LAMA2; (-) strand; PAM type: YTN; PAM sequence: CTG
tttatttccttcatagaatt

SEQ ID NO: 252919 - DNA, 20 bp, Artificial Sequence
  Description of Artificial Sequence: Synthetic oligonucleotide
  Target: LAMA2; (-) strand; PAM type: YTN; PAM sequence: TTC
accctgtttatttccttcat

SEQ ID NO: 252920 - DNA, 20 bp, Artificial Sequence
  Description of Artificial Sequence: Synthetic oligonucleotide
  Target: LAMA2; (-) strand; PAM type: YTN; PAM sequence: TTT
caccctgtttatttccttca

SEQ ID NO: 252921 - DNA, 20 bp, Artificial Sequence
  Description of Artificial Sequence: Synthetic oligonucleotide
  Target: LAMA2; (-) strand; PAM type: YTN; PAM sequence: TTA
tttcaccctgtttatttcct

SEQ ID NO: 252922 - DNA, 20 bp, Artificial Sequence
  Description of Artificial Sequence: Synthetic oligonucleotide
  Target: LAMA2; (-) strand; PAM type: YTN; PAM sequence: TTT
atttcaccctgtttatttcc

SEQ ID NO: 252923 - DNA, 20 bp, Artificial Sequence
  Description of Artificial Sequence: Synthetic oligonucleotide
  Target: LAMA2; (-) strand; PAM type: YTN; PAM sequence: CTG
tttatttcaccctgtttatt

SEQ ID NO: 252924 - DNA, 20 bp, Artificial Sequence
  Description of Artificial Sequence: Synthetic oligonucleotide
  Target: LAMA2; (-) strand; PAM type: YTN; PAM sequence: TTA
tcatagaaccctgtttattt

SEQ ID NO: 252925 - DNA, 20 bp, Artificial Sequence
  Description of Artificial Sequence: Synthetic oligonucleotide
  Target: LAMA2; (-) strand; PAM type: YTN; PAM sequence: TTT
atcatagaaccctgtttatt

SEQ ID NO: 252926 - DNA, 20 bp, Artificial Sequence
  Description of Artificial Sequence: Synthetic oligonucleotide
  Target: LAMA2; (-) strand; PAM type: YTN; PAM sequence: CTT
tatcatagaaccctgtttat

SEQ ID NO: 252927 - DNA, 20 bp, Artificial Sequence
  Description of Artificial Sequence: Synthetic oligonucleotide
  Target: LAMA2; (-) strand; PAM type: YTN; PAM sequence: TTG
cagtaactttatcatagaac

SEQ ID NO: 252928 - DNA, 20 bp, Artificial Sequence
  Description of Artificial Sequence: Synthetic oligonucleotide
  Target: LAMA2; (-) strand; PAM type: YTN; PAM sequence: CTT
gcagtaactttatcatagaa

SEQ ID NO: 252929 - DNA, 20 bp, Artificial Sequence
  Description of Artificial Sequence: Synthetic oligonucleotide
  Target: LAMA2; (-) strand; PAM type: YTN; PAM sequence: TTC
atacaaccacttgcagtaac

SEQ ID NO: 252930 - DNA, 20 bp, Artificial Sequence
  Description of Artificial Sequence: Synthetic oligonucleotide
  Target: LAMA2; (-) strand; PAM type: YTN; PAM sequence: CTT
catacaaccacttgcagtaa

SEQ ID NO: 252931 - DNA, 20 bp, Artificial Sequence
  Description of Artificial Sequence: Synthetic oligonucleotide
  Target: LAMA2; (-) strand; PAM type: YTN; PAM sequence: CTA
accttcatacaaccacttgc

SEQ ID NO: 252932 - DNA, 20 bp, Artificial Sequence
  Description of Artificial Sequence: Synthetic oligonucleotide
  Target: LAMA2; (-) strand; PAM type: YTN; PAM sequence: TTC
taaccttcatacaaccactt

SEQ ID NO: 252933 - DNA, 20 bp, Artificial Sequence
  Description of Artificial Sequence: Synthetic oligonucleotide
  Target: LAMA2; (-) strand; PAM type: YTN; PAM sequence: TTT
ctaaccttcatacaaccact

SEQ ID NO: 252934 - DNA, 20 bp, Artificial Sequence
  Description of Artificial Sequence: Synthetic oligonucleotide
  Target: LAMA2; (-) strand; PAM type: YTN; PAM sequence: CTT
tctaaccttcatacaaccac

SEQ ID NO: 252935 - DNA, 20 bp, Artificial Sequence
  Description of Artificial Sequence: Synthetic oligonucleotide
  Target: LAMA2; (-) strand; PAM type: YTN; PAM sequence: TTA
caaagtagactttctaacct

SEQ ID NO: 252936 - DNA, 20 bp, Artificial Sequence
  Description of Artificial Sequence: Synthetic oligonucleotide
  Target: LAMA2; (-) strand; PAM type: YTN; PAM sequence: TTT
acaaagtagactttctaacc

SEQ ID NO: 252937 - DNA, 20 bp, Artificial Sequence
  Description of Artificial Sequence: Synthetic oligonucleotide
  Target: LAMA2; (-) strand; PAM type: YTN; PAM sequence: TTT
tacaaagtagactttctaac

SEQ ID NO: 252938 - DNA, 20 bp, Artificial Sequence
  Description of Artificial Sequence: Synthetic oligonucleotide
  Target: LAMA2; (-) strand; PAM type: YTN; PAM sequence: CTT
ttacaaagtagactttctaa

SEQ ID NO: 252939 - DNA, 20 bp, Artificial Sequence
  Description of Artificial Sequence: Synthetic oligonucleotide
  Target: LAMA2; (-) strand; PAM type: YTN; PAM sequence: CTG
acaaacttttacaaagtaga

SEQ ID NO: 252940 - DNA, 20 bp, Artificial Sequence
  Description of Artificial Sequence: Synthetic oligonucleotide
  Target: LAMA2; (-) strand; PAM type: YTN; PAM sequence: TTC
ctgacaaacttttacaaagt

SEQ ID NO: 252941 - DNA, 20 bp, Artificial Sequence
  Description of Artificial Sequence: Synthetic oligonucleotide
  Target: LAMA2; (-) strand; PAM type: YTN; PAM sequence: TTT
cctgacaaacttttacaaag

SEQ ID NO: 252942 - DNA, 20 bp, Artificial Sequence
  Description of Artificial Sequence: Synthetic oligonucleotide
  Target: LAMA2; (-) strand; PAM type: YTN; PAM sequence: CTT
tcctgacaaacttttacaaa

SEQ ID NO: 252943 - DNA, 20 bp, Artificial Sequence
  Description of Artificial Sequence: Synthetic oligonucleotide
  Target: LAMA2; (-) strand; PAM type: YTN; PAM sequence: CTC
aggaagcctttcctgacaaa

SEQ ID NO: 252944 - DNA, 20 bp, Artificial Sequence
  Description of Artificial Sequence: Synthetic oligonucleotide
  Target: LAMA2; (-) strand; PAM type: YTN; PAM sequence: CTG
tcaccacctcaggaagcctt

SEQ ID NO: 252945 - DNA, 20 bp, Artificial Sequence
  Description of Artificial Sequence: Synthetic oligonucleotide
  Target: LAMA2; (-) strand; PAM type: YTN; PAM sequence: TTA
gctgtcaccacctcaggaag

SEQ ID NO: 252946 - DNA, 20 bp, Artificial Sequence
  Description of Artificial Sequence: Synthetic oligonucleotide
  Target: LAMA2; (-) strand; PAM type: YTN; PAM sequence: TTT
agctgtcaccacctcaggaa

SEQ ID NO: 252947 - DNA, 20 bp, Artificial Sequence
  Description of Artificial Sequence: Synthetic oligonucleotide
  Target: LAMA2; (-) strand; PAM type: YTN; PAM sequence: CTC
gatttagctgtcaccacctc

SEQ ID NO: 252948 - DNA, 20 bp, Artificial Sequence
  Description of Artificial Sequence: Synthetic oligonucleotide
  Target: LAMA2; (-) strand; PAM type: YTN; PAM sequence: TTC
aacactcgatttagctgtca

SEQ ID NO: 252949 - DNA, 20 bp, Artificial Sequence
  Description of Artificial Sequence: Synthetic oligonucleotide
  Target: LAMA2; (-) strand; PAM type: YTN; PAM sequence: CTT
caacactcgatttagctgtc

SEQ ID NO: 252950 - DNA, 20 bp, Artificial Sequence
  Description of Artificial Sequence: Synthetic oligonucleotide
  Target: LAMA2; (-) strand; PAM type: YTN; PAM sequence: TTC
ttcaacactcgatttagctg

SEQ ID NO: 252951 - DNA, 20 bp, Artificial Sequence
  Description of Artificial Sequence: Synthetic oligonucleotide
  Target: LAMA2; (-) strand; PAM type: YTN; PAM sequence: CTC
attcttcaacactcgattta

SEQ ID NO: 252952 - DNA, 20 bp, Artificial Sequence
  Description of Artificial Sequence: Synthetic oligonucleotide
  Target: LAMA2; (-) strand; PAM type: YTN; PAM sequence: CTC
tcattcttcaacactcgatt

SEQ ID NO: 252953 - DNA, 20 bp, Artificial Sequence
  Description of Artificial Sequence: Synthetic oligonucleotide
  Target: LAMA2; (-) strand; PAM type: YTN; PAM sequence: TTG
tccctctcattcttcaacac

SEQ ID NO: 252954 - DNA, 20 bp, Artificial Sequence
  Description of Artificial Sequence: Synthetic oligonucleotide
  Target: LAMA2; (-) strand; PAM type: YTN; PAM sequence: TTA
catcgttgtccctctcattc

SEQ ID NO: 252955 - DNA, 20 bp, Artificial Sequence
  Description of Artificial Sequence: Synthetic oligonucleotide
  Target: LAMA2; (-) strand; PAM type: YTN; PAM sequence: TTT
acatcgttgtccctctcatt

SEQ ID NO: 252956 - DNA, 20 bp, Artificial Sequence
  Description of Artificial Sequence: Synthetic oligonucleotide
  Target: LAMA2; (-) strand; PAM type: YTN; PAM sequence: TTT
tacatcgttgtccctctcat

SEQ ID NO: 252957 - DNA, 20 bp, Artificial Sequence
  Description of Artificial Sequence: Synthetic oligonucleotide
  Target: LAMA2; (-) strand; PAM type: YTN; PAM sequence: CTG
gttttacatcgttgtccctc

SEQ ID NO: 252958 - DNA, 20 bp, Artificial Sequence
  Description of Artificial Sequence: Synthetic oligonucleotide
  Target: LAMA2; (-) strand; PAM type: YTN; PAM sequence: TTA
gcagctggttttacatcgtt

SEQ ID NO: 252959 - DNA, 20 bp, Artificial Sequence
  Description of Artificial Sequence: Synthetic oligonucleotide
  Target: LAMA2; (-) strand; PAM type: YTN; PAM sequence: CTT
agcagctggttttacatcgt

SEQ ID NO: 252960 - DNA, 20 bp, Artificial Sequence
  Description of Artificial Sequence: Synthetic oligonucleotide
  Target: LAMA2; (-) strand; PAM type: YTN; PAM sequence: TTC
cttagcagctggttttacat

SEQ ID NO: 252961 - DNA, 20 bp, Artificial Sequence
  Description of Artificial Sequence: Synthetic oligonucleotide
  Target: LAMA2; (-) strand; PAM type: YTN; PAM sequence: CTT
ccttagcagctggttttaca

SEQ ID NO: 252962 - DNA, 20 bp, Artificial Sequence
  Description of Artificial Sequence: Synthetic oligonucleotide
  Target: LAMA2; (-) strand; PAM type: YTN; PAM sequence: CTG
cttccttagcagctggtttt

SEQ ID NO: 252963 - DNA, 20 bp, Artificial Sequence
  Description of Artificial Sequence: Synthetic oligonucleotide
  Target: LAMA2; (-) strand; PAM type: YTN; PAM sequence: CTA
tgctgcttccttagcagctg

SEQ ID NO: 252964 - DNA, 20 bp, Artificial Sequence
  Description of Artificial Sequence: Synthetic oligonucleotide
  Target: LAMA2; (-) strand; PAM type: YTN; PAM sequence: CTC
cacgatctatgctgcttcct

SEQ ID NO: 252965 - DNA, 20 bp, Artificial Sequence
  Description of Artificial Sequence: Synthetic oligonucleotide
  Target: LAMA2; (-) strand; PAM type: YTN; PAM sequence: TTA
cagactccacgatctatgct

SEQ ID NO: 252966 - DNA, 20 bp, Artificial Sequence
  Description of Artificial Sequence: Synthetic oligonucleotide
  Target: LAMA2; (-) strand; PAM type: YTN; PAM sequence: CTT
acagactccacgatctatgc

SEQ ID NO: 252967 - DNA, 20 bp, Artificial Sequence
  Description of Artificial Sequence: Synthetic oligonucleotide
  Target: LAMA2; (-) strand; PAM type: YTN; PAM sequence: TTC
cagtccttacagactccacg

SEQ ID NO: 252968 - DNA, 20 bp, Artificial Sequence
  Description of Artificial Sequence: Synthetic oligonucleotide
  Target: LAMA2; (-) strand; PAM type: YTN; PAM sequence: TTT
ccagtccttacagactccac

SEQ ID NO: 252969 - DNA, 20 bp, Artificial Sequence
  Description of Artificial Sequence: Synthetic oligonucleotide
  Target: LAMA2; (-) strand; PAM type: YTN; PAM sequence: CTT
tccagtccttacagactcca

SEQ ID NO: 252970 - DNA, 20 bp, Artificial Sequence
  Description of Artificial Sequence: Synthetic oligonucleotide
  Target: LAMA2; (-) strand; PAM type: YTN; PAM sequence: TTC
tttccagtccttacagactc

SEQ ID NO: 252971 - DNA, 20 bp, Artificial Sequence
  Description of Artificial Sequence: Synthetic oligonucleotide
  Target: LAMA2; (-) strand; PAM type: YTN; PAM sequence: CTT
ctttccagtccttacagact

SEQ ID NO: 252972 - DNA, 20 bp, Artificial Sequence
  Description of Artificial Sequence: Synthetic oligonucleotide
  Target: LAMA2; (-) strand; PAM type: YTN; PAM sequence: CTC
cttctttccagtccttacag

SEQ ID NO: 252973 - DNA, 20 bp, Artificial Sequence
  Description of Artificial Sequence: Synthetic oligonucleotide
  Target: LAMA2; (-) strand; PAM type: YTN; PAM sequence: CTC
cagccacgctccttctttcc

SEQ ID NO: 252974 - DNA, 20 bp, Artificial Sequence
  Description of Artificial Sequence: Synthetic oligonucleotide
  Target: LAMA2; (-) strand; PAM type: YTN; PAM sequence: TTA
caaggctccagccacgctcc

SEQ ID NO: 252975 - DNA, 20 bp, Artificial Sequence
  Description of Artificial Sequence: Synthetic oligonucleotide
  Target: LAMA2; (-) strand; PAM type: YTN; PAM sequence: CTT
acaaggctccagccacgctc

SEQ ID NO: 252976 - DNA, 20 bp, Artificial Sequence
  Description of Artificial Sequence: Synthetic oligonucleotide
  Target: LAMA2; (-) strand; PAM type: YTN; PAM sequence: TTG
cttacaaggctccagccacg

SEQ ID NO: 252977 - DNA, 20 bp, Artificial Sequence
  Description of Artificial Sequence: Synthetic oligonucleotide
  Target: LAMA2; (-) strand; PAM type: YTN; PAM sequence: CTT
gcttacaaggctccagccac

SEQ ID NO: 252978 - DNA, 20 bp, Artificial Sequence
  Description of Artificial Sequence: Synthetic oligonucleotide
  Target: LAMA2; (-) strand; PAM type: YTN; PAM sequence: TTC
cccttgcttacaaggctcca

SEQ ID NO: 252979 - DNA, 20 bp, Artificial Sequence
  Description of Artificial Sequence: Synthetic oligonucleotide
  Target: LAMA2; (-) strand; PAM type: YTN; PAM sequence: TTT
ccccttgcttacaaggctcc

SEQ ID NO: 252980 - DNA, 20 bp, Artificial Sequence
  Description of Artificial Sequence: Synthetic oligonucleotide
  Target: LAMA2; (-) strand; PAM type: YTN; PAM sequence: TTT
tccccttgcttacaaggctc

SEQ ID NO: 252981 - DNA, 20 bp, Artificial Sequence
  Description of Artificial Sequence: Synthetic oligonucleotide
  Target: LAMA2; (-) strand; PAM type: YTN; PAM sequence: CTT
ttccccttgcttacaaggct

SEQ ID NO: 252982 - DNA, 20 bp, Artificial Sequence
  Description of Artificial Sequence: Synthetic oligonucleotide
  Target: LAMA2; (-) strand; PAM type: YTN; PAM sequence: TTG
tcccacttttccccttgctt

SEQ ID NO: 252983 - DNA, 20 bp, Artificial Sequence
  Description of Artificial Sequence: Synthetic oligonucleotide
  Target: LAMA2; (-) strand; PAM type: YTN; PAM sequence: CTT
gtcccacttttccccttgct

SEQ ID NO: 252984 - DNA, 20 bp, Artificial Sequence
  Description of Artificial Sequence: Synthetic oligonucleotide
  Target: LAMA2; (-) strand; PAM type: YTN; PAM sequence: TTC
ttgtcccacttttccccttg

SEQ ID NO: 252985 - DNA, 20 bp, Artificial Sequence
  Description of Artificial Sequence: Synthetic oligonucleotide
  Target: LAMA2; (-) strand; PAM type: YTN; PAM sequence: CTT
cttgtcccacttttcccctt

SEQ ID NO: 252986 - DNA, 20 bp, Artificial Sequence
  Description of Artificial Sequence: Synthetic oligonucleotide
  Target: LAMA2; (-) strand; PAM type: YTN; PAM sequence: TTC
caatcacttcttgtcccact

SEQ ID NO: 252987 - DNA, 20 bp, Artificial Sequence
  Description of Artificial Sequence: Synthetic oligonucleotide
  Target: LAMA2; (-) strand; PAM type: YTN; PAM sequence: TTT
ccaatcacttcttgtcccac

SEQ ID NO: 252988 - DNA, 20 bp, Artificial Sequence
  Description of Artificial Sequence: Synthetic oligonucleotide
  Target: LAMA2; (-) strand; PAM type: YTN; PAM sequence: TTT
tccaatcacttcttgtccca

SEQ ID NO: 252989 - DNA, 20 bp, Artificial Sequence
  Description of Artificial Sequence: Synthetic oligonucleotide
  Target: LAMA2; (-) strand; PAM type: YTN; PAM sequence: CTT
ttccaatcacttcttgtccc

SEQ ID NO: 252990 - DNA, 20 bp, Artificial Sequence
  Description of Artificial Sequence: Synthetic oligonucleotide
  Target: LAMA2; (-) strand; PAM type: YTN; PAM sequence: TTG
cttttccaatcacttcttgt

SEQ ID NO: 252991 - DNA, 20 bp, Artificial Sequence
  Description of Artificial Sequence: Synthetic oligonucleotide
  Target: LAMA2; (-) strand; PAM type: YTN; PAM sequence: CTT
gcttttccaatcacttcttg

SEQ ID NO: 252992 - DNA, 20 bp, Artificial Sequence
  Description of Artificial Sequence: Synthetic oligonucleotide
  Target: LAMA2; (-) strand; PAM type: YTN; PAM sequence: CTC
atggccttgcttttccaatc

SEQ ID NO: 252993 - DNA, 20 bp, Artificial Sequence
  Description of Artificial Sequence: Synthetic oligonucleotide
  Target: LAMA2; (-) strand; PAM type: YTN; PAM sequence: CTC
ctcatggccttgcttttcca

SEQ ID NO: 252994 - DNA, 20 bp, Artificial Sequence
  Description of Artificial Sequence: Synthetic oligonucleotide
  Target: LAMA2; (-) strand; PAM type: YTN; PAM sequence: TTA
tcatatgtgcaaatctcctc

SEQ ID NO: 252995 - DNA, 20 bp, Artificial Sequence
  Description of Artificial Sequence: Synthetic oligonucleotide
  Target: LAMA2; (-) strand; PAM type: YTN; PAM sequence: CTT
atcatatgtgcaaatctcct

SEQ ID NO: 252996 - DNA, 20 bp, Artificial Sequence
  Description of Artificial Sequence: Synthetic oligonucleotide
  Target: LAMA2; (-) strand; PAM type: YTN; PAM sequence: TTC
ttatcatatgtgcaaatctc

SEQ ID NO: 252997 - DNA, 20 bp, Artificial Sequence
  Description of Artificial Sequence: Synthetic oligonucleotide
  Target: LAMA2; (-) strand; PAM type: YTN; PAM sequence: TTT
cttatcatatgtgcaaatct

SEQ ID NO: 252998 - DNA, 20 bp, Artificial Sequence
  Description of Artificial Sequence: Synthetic oligonucleotide
  Target: LAMA2; (-) strand; PAM type: YTN; PAM sequence: CTC
atttcttatcatatgtgcaa

SEQ ID NO: 252999 - DNA, 20 bp, Artificial Sequence
  Description of Artificial Sequence: Synthetic oligonucleotide
  Target: LAMA2; (-) strand; PAM type: YTN; PAM sequence: TTC
catgccatgagaataaaatg

SEQ ID NO: 253000 - DNA, 20 bp, Artificial Sequence
  Description of Artificial Sequence: Synthetic oligonucleotide
  Target: LAMA2; (-) strand; PAM type: YTN; PAM sequence: TTG
taatgatgttccatgccatg

SEQ ID NO: 253001 - DNA, 20 bp, Artificial Sequence
  Description of Artificial Sequence: Synthetic oligonucleotide
  Target: LAMA2; (-) strand; PAM type: YTN; PAM sequence: CTT
gtaatgatgttccatgccat

SEQ ID NO: 253002 - DNA, 20 bp, Artificial Sequence
  Description of Artificial Sequence: Synthetic oligonucleotide
  Target: LAMA2; (-) strand; PAM type: YTN; PAM sequence: CTG
aaaggcttgtaatgatgttc

SEQ ID NO: 253003 - DNA, 20 bp, Artificial Sequence
  Description of Artificial Sequence: Synthetic oligonucleotide
  Target: LAMA2; (-) strand; PAM type: YTN; PAM sequence: CTG
ctgaaaggcttgtaatgatg

SEQ ID NO: 253004 - DNA, 20 bp, Artificial Sequence
  Description of Artificial Sequence: Synthetic oligonucleotide
  Target: LAMA2; (-) strand; PAM type: YTN; PAM sequence: CTC
tgctgaaaggcttgtaatga

SEQ ID NO: 253005 - DNA, 20 bp, Artificial Sequence
  Description of Artificial Sequence: Synthetic oligonucleotide
  Target: LAMA2; (-) strand; PAM type: YTN; PAM sequence: CTA
ctctgctgaaaggcttgtaa

SEQ ID NO: 253006 - DNA, 20 bp, Artificial Sequence
  Description of Artificial Sequence: Synthetic oligonucleotide
  Target: LAMA2; (-) strand; PAM type: YTN; PAM sequence: CTC
cactactctgctgaaaggct

SEQ ID NO: 253007 - DNA, 20 bp, Artificial Sequence
  Description of Artificial Sequence: Synthetic oligonucleotide
  Target: LAMA2; (-) strand; PAM type: YTN; PAM sequence: CTA
ctccactactctgctgaaag

SEQ ID NO: 253008 - DNA, 20 bp, Artificial Sequence
  Description of Artificial Sequence: Synthetic oligonucleotide
  Target: LAMA2; (-) strand; PAM type: YTN; PAM sequence: TTA
cactactccactactctgct

SEQ ID NO: 253009 - DNA, 20 bp, Artificial Sequence
  Description of Artificial Sequence: Synthetic oligonucleotide
  Target: LAMA2; (-) strand; PAM type: YTN; PAM sequence: CTC
aaacaacaaaaaacacccca

SEQ ID NO: 253010 - DNA, 20 bp, Artificial Sequence
  Description of Artificial Sequence: Synthetic oligonucleotide
  Target: LAMA2; (-) strand; PAM type: YTN; PAM sequence: CTG
tctcaaacaacaaaaaacac

SEQ ID NO: 253011 - DNA, 20 bp, Artificial Sequence
  Description of Artificial Sequence: Synthetic oligonucleotide
  Target: LAMA2; (-) strand; PAM type: YTN; PAM sequence: CTA
ggtgacagagcaagaccctg

SEQ ID NO: 253012 - DNA, 20 bp, Artificial Sequence
  Description of Artificial Sequence: Synthetic oligonucleotide
  Target: LAMA2; (-) strand; PAM type: YTN; PAM sequence: CTC
cagcctaggtgacagagcaa

SEQ ID NO: 253013 - DNA, 20 bp, Artificial Sequence
  Description of Artificial Sequence: Synthetic oligonucleotide
  Target: LAMA2; (-) strand; PAM type: YTN; PAM sequence: CTG
cactccagcctaggtgacag

SEQ ID NO: 253014 - DNA, 20 bp, Artificial Sequence
  Description of Artificial Sequence: Synthetic oligonucleotide
  Target: LAMA2; (-) strand; PAM type: YTN; PAM sequence: CTA
tgacagcatcactgcactcc

SEQ ID NO: 253015 - DNA, 20 bp, Artificial Sequence
  Description of Artificial Sequence: Synthetic oligonucleotide
  Target: LAMA2; (-) strand; PAM type: YTN; PAM sequence: CTG
cagcaagctatgacagcatc

SEQ ID NO: 253016 - DNA, 20 bp, Artificial Sequence
  Description of Artificial Sequence: Synthetic oligonucleotide
  Target: LAMA2; (-) strand; PAM type: YTN; PAM sequence: TTG
aggctgcagcaagctatgac

SEQ ID NO: 253017 - DNA, 20 bp, Artificial Sequence
  Description of Artificial Sequence: Synthetic oligonucleotide
  Target: LAMA2; (-) strand; PAM type: YTN; PAM sequence: TTT
gaggctgcagcaagctatga

SEQ ID NO: 253018 - DNA, 20 bp, Artificial Sequence
  Description of Artificial Sequence: Synthetic oligonucleotide
  Target: LAMA2; (-) strand; PAM type: YTN; PAM sequence: CTC
aggagtttgaggctgcagca

SEQ ID NO: 253019 - DNA, 20 bp, Artificial Sequence
  Description of Artificial Sequence: Synthetic oligonucleotide
  Target: LAMA2; (-) strand; PAM type: YTN; PAM sequence: TTG
agctcaggagtttgaggctg

SEQ ID NO: 253020 - DNA, 20 bp, Artificial Sequence
  Description of Artificial Sequence: Synthetic oligonucleotide
  Target: LAMA2; (-) strand; PAM type: YTN; PAM sequence: CTT
gagctcaggagtttgaggct

SEQ ID NO: 253021 - DNA, 20 bp, Artificial Sequence
  Description of Artificial Sequence: Synthetic oligonucleotide
  Target: LAMA2; (-) strand; PAM type: YTN; PAM sequence: CTG
aggcaggaggatcacttgag

SEQ ID NO: 253022 - DNA, 20 bp, Artificial Sequence
  Description of Artificial Sequence: Synthetic oligonucleotide
  Target: LAMA2; (-) strand; PAM type: YTN; PAM sequence: CTC
aggaggctgaggcaggagga

SEQ ID NO: 253023 - DNA, 20 bp, Artificial Sequence
  Description of Artificial Sequence: Synthetic oligonucleotide
  Target: LAMA2; (-) strand; PAM type: YTN; PAM sequence: CTA
ctcaggaggctgaggcagga

SEQ ID NO: 253024 - DNA, 20 bp, Artificial Sequence
  Description of Artificial Sequence: Synthetic oligonucleotide
  Target: LAMA2; (-) strand; PAM type: YTN; PAM sequence: CTG
tagtcccagctactcaggag

SEQ ID NO: 253025 - DNA, 20 bp, Artificial Sequence
  Description of Artificial Sequence: Synthetic oligonucleotide
  Target: LAMA2; (-) strand; PAM type: YTN; PAM sequence: CTG
ggcatggtggtatacacctg

SEQ ID NO: 253026 - DNA, 20 bp, Artificial Sequence
  Description of Artificial Sequence: Synthetic oligonucleotide
  Target: LAMA2; (-) strand; PAM type: YTN; PAM sequence: TTA
aaacaaacaaaaaaaaatag

SEQ ID NO: 253027 - DNA, 20 bp, Artificial Sequence
  Description of Artificial Sequence: Synthetic oligonucleotide
  Target: LAMA2; (-) strand; PAM type: YTN; PAM sequence: CTA
ttaaaacaaacaaaaaaaaa

SEQ ID NO: 253028 - DNA, 20 bp, Artificial Sequence
  Description of Artificial Sequence: Synthetic oligonucleotide
  Target: LAMA2; (-) strand; PAM type: YTN; PAM sequence: CTC
tattaaaacaaacaaaaaaa

SEQ ID NO: 253029 - DNA, 20 bp, Artificial Sequence
  Description of Artificial Sequence: Synthetic oligonucleotide
  Target: LAMA2; (-) strand; PAM type: YTN; PAM sequence: TTG
tctctattaaaacaaacaaa

SEQ ID NO: 253030 - DNA, 20 bp, Artificial Sequence
  Description of Artificial Sequence: Synthetic oligonucleotide
  Target: LAMA2; (-) strand; PAM type: YTN; PAM sequence: CTT
gtctctattaaaacaaacaa

SEQ ID NO: 253031 - DNA, 20 bp, Artificial Sequence
  Description of Artificial Sequence: Synthetic oligonucleotide
  Target: LAMA2; (-) strand; PAM type: YTN; PAM sequence: TTG
agatcttgtctctattaaaa

SEQ ID NO: 253032 - DNA, 20 bp, Artificial Sequence
  Description of Artificial Sequence: Synthetic oligonucleotide
  Target: LAMA2; (-) strand; PAM type: YTN; PAM sequence: CTG
tgcaacatattgagatcttg

SEQ ID NO: 253033 - DNA, 20 bp, Artificial Sequence
  Description of Artificial Sequence: Synthetic oligonucleotide
  Target: LAMA2; (-) strand; PAM type: YTN; PAM sequence: TTC
gagatcagcctgtgcaacat

SEQ ID NO: 253034 - DNA, 20 bp, Artificial Sequence
  Description of Artificial Sequence: Synthetic oligonucleotide
  Target: LAMA2; (-) strand; PAM type: YTN; PAM sequence: CTC
aggagttcgagatcagcctg

SEQ ID NO: 253035 - DNA, 20 bp, Artificial Sequence
  Description of Artificial Sequence: Synthetic oligonucleotide
  Target: LAMA2; (-) strand; PAM type: YTN; PAM sequence: TTG
agctcaggagttcgagatca

SEQ ID NO: 253036 - DNA, 20 bp, Artificial Sequence
  Description of Artificial Sequence: Synthetic oligonucleotide
  Target: LAMA2; (-) strand; PAM type: YTN; PAM sequence: CTT
gagctcaggagttcgagatc

SEQ ID NO: 253037 - DNA, 20 bp, Artificial Sequence
  Description of Artificial Sequence: Synthetic oligonucleotide
  Target: LAMA2; (-) strand; PAM type: YTN; PAM sequence: TTG
cttgagctcaggagttcgag

SEQ ID NO: 253038 - DNA, 20 bp, Artificial Sequence
  Description of Artificial Sequence: Synthetic oligonucleotide
  Target: LAMA2; (-) strand; PAM type: YTN; PAM sequence: CTG
aggtgggaggattgcttgag

SEQ ID NO: 253039 - DNA, 20 bp, Artificial Sequence
  Description of Artificial Sequence: Synthetic oligonucleotide
  Target: LAMA2; (-) strand; PAM type: YTN; PAM sequence: TTG
ggaggctgaggtgggaggat

SEQ ID NO: 253040 - DNA, 20 bp, Artificial Sequence
  Description of Artificial Sequence: Synthetic oligonucleotide
  Target: LAMA2; (-) strand; PAM type: YTN; PAM sequence: TTT
gggaggctgaggtgggagga

SEQ ID NO: 253041 - DNA, 20 bp, Artificial Sequence
  Description of Artificial Sequence: Synthetic oligonucleotide
  Target: LAMA2; (-) strand; PAM type: YTN; PAM sequence: CTT
tgggaggctgaggtgggagg

SEQ ID NO: 253042 - DNA, 20 bp, Artificial Sequence
  Description of Artificial Sequence: Synthetic oligonucleotide
  Target: LAMA2; (-) strand; PAM type: YTN; PAM sequence: CTG
taaccccagaactttgggag

SEQ ID NO: 253043 - DNA, 20 bp, Artificial Sequence
  Description of Artificial Sequence: Synthetic oligonucleotide
  Target: LAMA2; (-) strand; PAM type: YTN; PAM sequence: TTG
gcccatgcctgtaaccccag

SEQ ID NO: 253044 - DNA, 20 bp, Artificial Sequence
  Description of Artificial Sequence: Synthetic oligonucleotide
  Target: LAMA2; (-) strand; PAM type: YTN; PAM sequence: CTG
ggtgcgttggcccatgcctg

SEQ ID NO: 253045 - DNA, 20 bp, Artificial Sequence
  Description of Artificial Sequence: Synthetic oligonucleotide
  Target: LAMA2; (-) strand; PAM type: YTN; PAM sequence: CTC
aggctgggtgcgttggccca

SEQ ID NO: 253046 - DNA, 20 bp, Artificial Sequence
  Description of Artificial Sequence: Synthetic oligonucleotide
  Target: LAMA2; (-) strand; PAM type: YTN; PAM sequence: TTC
aaaaaaatgtaactcaggct

SEQ ID NO: 253047 - DNA, 20 bp, Artificial Sequence
  Description of Artificial Sequence: Synthetic oligonucleotide
  Target: LAMA2; (-) strand; PAM type: YTN; PAM sequence: CTT
caaaaaaatgtaactcaggc

SEQ ID NO: 253048 - DNA, 20 bp, Artificial Sequence
  Description of Artificial Sequence: Synthetic oligonucleotide
  Target: LAMA2; (-) strand; PAM type: YTN; PAM sequence: TTC
ttcaaaaaaatgtaactcag

SEQ ID NO: 253049 - DNA, 20 bp, Artificial Sequence
  Description of Artificial Sequence: Synthetic oligonucleotide
  Target: LAMA2; (-) strand; PAM type: YTN; PAM sequence: CTT
cttcaaaaaaatgtaactca

SEQ ID NO: 253050 - DNA, 20 bp, Artificial Sequence
  Description of Artificial Sequence: Synthetic oligonucleotide
  Target: LAMA2; (-) strand; PAM type: YTN; PAM sequence: CTG
tagccataatgccttcttca

SEQ ID NO: 253051 - DNA, 20 bp, Artificial Sequence
  Description of Artificial Sequence: Synthetic oligonucleotide
  Target: LAMA2; (-) strand; PAM type: YTN; PAM sequence: CTA
ctgtagccataatgccttct

SEQ ID NO: 253052 - DNA, 20 bp, Artificial Sequence
  Description of Artificial Sequence: Synthetic oligonucleotide
  Target: LAMA2; (-) strand; PAM type: YTN; PAM sequence: TTC
ctactgtagccataatgcct

SEQ ID NO: 253053 - DNA, 20 bp, Artificial Sequence
  Description of Artificial Sequence: Synthetic oligonucleotide
  Target: LAMA2; (-) strand; PAM type: YTN; PAM sequence: CTT
cctactgtagccataatgcc

SEQ ID NO: 253054 - DNA, 20 bp, Artificial Sequence
  Description of Artificial Sequence: Synthetic oligonucleotide
  Target: LAMA2; (-) strand; PAM type: YTN; PAM sequence: TTC
ttcctactgtagccataatg

SEQ ID NO: 253055 - DNA, 20 bp, Artificial Sequence
  Description of Artificial Sequence: Synthetic oligonucleotide
  Target: LAMA2; (-) strand; PAM type: YTN; PAM sequence: CTA
agacacattcttcctactgt

SEQ ID NO: 253056 - DNA, 20 bp, Artificial Sequence
  Description of Artificial Sequence: Synthetic oligonucleotide
  Target: LAMA2; (-) strand; PAM type: YTN; PAM sequence: CTC
ctaagacacattcttcctac

SEQ ID NO: 253057 - DNA, 20 bp, Artificial Sequence
  Description of Artificial Sequence: Synthetic oligonucleotide
  Target: LAMA2; (-) strand; PAM type: YTN; PAM sequence: TTC
atgccctcctaagacacatt

SEQ ID NO: 253058 - DNA, 20 bp, Artificial Sequence
  Description of Artificial Sequence: Synthetic oligonucleotide
  Target: LAMA2; (-) strand; PAM type: YTN; PAM sequence: TTA
ttcatgccctcctaagacac

SEQ ID NO: 253059 - DNA, 20 bp, Artificial Sequence
  Description of Artificial Sequence: Synthetic oligonucleotide
  Target: LAMA2; (-) strand; PAM type: YTN; PAM sequence: CTA
ttattcatgccctcctaaga

SEQ ID NO: 253060 - DNA, 20 bp, Artificial Sequence
  Description of Artificial Sequence: Synthetic oligonucleotide
  Target: LAMA2; (-) strand; PAM type: YTN; PAM sequence: TTC
ctattattcatgccctccta

SEQ ID NO: 253061 - DNA, 20 bp, Artificial Sequence
  Description of Artificial Sequence: Synthetic oligonucleotide
  Target: LAMA2; (-) strand; PAM type: YTN; PAM sequence: CTT
cctattattcatgccctcct

SEQ ID NO: 253062 - DNA, 20 bp, Artificial Sequence
  Description of Artificial Sequence: Synthetic oligonucleotide
  Target: LAMA2; (-) strand; PAM type: YTN; PAM sequence: CTC
cttcctattattcatgccct

SEQ ID NO: 253063 - DNA, 20 bp, Artificial Sequence
  Description of Artificial Sequence: Synthetic oligonucleotide
  Target: LAMA2; (-) strand; PAM type: YTN; PAM sequence: TTC
tccttcctattattcatgcc

SEQ ID NO: 253064 - DNA, 20 bp, Artificial Sequence
  Description of Artificial Sequence: Synthetic oligonucleotide
  Target: LAMA2; (-) strand; PAM type: YTN; PAM sequence: CTT
ctccttcctattattcatgc

SEQ ID NO: 253065 - DNA, 20 bp, Artificial Sequence
  Description of Artificial Sequence: Synthetic oligonucleotide
  Target: LAMA2; (-) strand; PAM type: YTN; PAM sequence: TTA
acccttctccttcctattat

SEQ ID NO: 253066 - DNA, 20 bp, Artificial Sequence
  Description of Artificial Sequence: Synthetic oligonucleotide
  Target: LAMA2; (-) strand; PAM type: YTN; PAM sequence: CTA
catattaacccttctccttc

SEQ ID NO: 253067 - DNA, 20 bp, Artificial Sequence
  Description of Artificial Sequence: Synthetic oligonucleotide
  Target: LAMA2; (-) strand; PAM type: YTN; PAM sequence: CTG
caactacatattaacccttc

SEQ ID NO: 253068 - DNA, 20 bp, Artificial Sequence
  Description of Artificial Sequence: Synthetic oligonucleotide
  Target: LAMA2; (-) strand; PAM type: YTN; PAM sequence: TTC
cactgcaactacatattaac

SEQ ID NO: 253069 - DNA, 20 bp, Artificial Sequence
  Description of Artificial Sequence: Synthetic oligonucleotide
  Target: LAMA2; (-) strand; PAM type: YTN; PAM sequence: CTG
tgttccactgcaactacata

SEQ ID NO: 253070 - DNA, 20 bp, Artificial Sequence
  Description of Artificial Sequence: Synthetic oligonucleotide
  Target: LAMA2; (-) strand; PAM type: YTN; PAM sequence: TTG
ctgtgttccactgcaactac

SEQ ID NO: 253071 - DNA, 20 bp, Artificial Sequence
  Description of Artificial Sequence: Synthetic oligonucleotide
  Target: LAMA2; (-) strand; PAM type: YTN; PAM sequence: CTG
tcattgctgtgttccactgc

SEQ ID NO: 253072 - DNA, 20 bp, Artificial Sequence
  Description of Artificial Sequence: Synthetic oligonucleotide
  Target: LAMA2; (-) strand; PAM type: YTN; PAM sequence: CTA
ctgtcattgctgtgttccac

SEQ ID NO: 253073 - DNA, 20 bp, Artificial Sequence
  Description of Artificial Sequence: Synthetic oligonucleotide
  Target: LAMA2; (-) strand; PAM type: YTN; PAM sequence: CTA
acagcaactactgtcattgc

SEQ ID NO: 253074 - DNA, 20 bp, Artificial Sequence
  Description of Artificial Sequence: Synthetic oligonucleotide
  Target: LAMA2; (-) strand; PAM type: YTN; PAM sequence: CTG
ccatgatcctaacagcaact

SEQ ID NO: 253075 - DNA, 20 bp, Artificial Sequence
  Description of Artificial Sequence: Synthetic oligonucleotide
  Target: LAMA2; (-) strand; PAM type: YTN; PAM sequence: TTC
cctgccatgatcctaacagc

SEQ ID NO: 253076 - DNA, 20 bp, Artificial Sequence
  Description of Artificial Sequence: Synthetic oligonucleotide
  Target: LAMA2; (-) strand; PAM type: YTN; PAM sequence: TTA
tattccctgccatgatccta

SEQ ID NO: 253077 - DNA, 20 bp, Artificial Sequence
  Description of Artificial Sequence: Synthetic oligonucleotide
  Target: LAMA2; (-) strand; PAM type: YTN; PAM sequence: TTT
atattccctgccatgatcct

SEQ ID NO: 253078 - DNA, 20 bp, Artificial Sequence
  Description of Artificial Sequence: Synthetic oligonucleotide
  Target: LAMA2; (-) strand; PAM type: YTN; PAM sequence: TTT
tatattccctgccatgatcc

SEQ ID NO: 253079 - DNA, 20 bp, Artificial Sequence
  Description of Artificial Sequence: Synthetic oligonucleotide
  Target: LAMA2; (-) strand; PAM type: YTN; PAM sequence: TTT
ttatattccctgccatgatc

SEQ ID NO: 253080 - DNA, 20 bp, Artificial Sequence
  Description of Artificial Sequence: Synthetic oligonucleotide
  Target: LAMA2; (-) strand; PAM type: YTN; PAM sequence: CTT
tttatattccctgccatgat

SEQ ID NO: 253081 - DNA, 20 bp, Artificial Sequence
  Description of Artificial Sequence: Synthetic oligonucleotide
  Target: LAMA2; (-) strand; PAM type: YTN; PAM sequence: CTC
tttttatattccctgccatg

SEQ ID NO: 253082 - DNA, 20 bp, Artificial Sequence
  Description of Artificial Sequence: Synthetic oligonucleotide
  Target: LAMA2; (-) strand; PAM type: YTN; PAM sequence: CTA
actctttttatattccctgc

SEQ ID NO: 253083 - DNA, 20 bp, Artificial Sequence
  Description of Artificial Sequence: Synthetic oligonucleotide
  Target: LAMA2; (-) strand; PAM type: YTN; PAM sequence: CTA
tcaaaatatatatagaatat

SEQ ID NO: 253084 - DNA, 20 bp, Artificial Sequence
  Description of Artificial Sequence: Synthetic oligonucleotide
  Target: LAMA2; (-) strand; PAM type: YTN; PAM sequence: CTA
ctatcaaaatatatatagaa

SEQ ID NO: 253085 - DNA, 20 bp, Artificial Sequence
  Description of Artificial Sequence: Synthetic oligonucleotide
  Target: LAMA2; (-) strand; PAM type: YTN; PAM sequence: TTC
tactatcaaaatatatatag

SEQ ID NO: 253086 - DNA, 20 bp, Artificial Sequence
  Description of Artificial Sequence: Synthetic oligonucleotide
  Target: LAMA2; (-) strand; PAM type: YTN; PAM sequence: TTG
ttctactatcaaaatatata

SEQ ID NO: 253087 - DNA, 20 bp, Artificial Sequence
  Description of Artificial Sequence: Synthetic oligonucleotide
  Target: LAMA2; (-) strand; PAM type: YTN; PAM sequence: TTT
gttctactatcaaaatatat

SEQ ID NO: 253088 - DNA, 20 bp, Artificial Sequence
  Description of Artificial Sequence: Synthetic oligonucleotide
  Target: LAMA2; (-) strand; PAM type: YTN; PAM sequence: CTA
tttgttctactatcaaaata

SEQ ID NO: 253089 - DNA, 20 bp, Artificial Sequence
  Description of Artificial Sequence: Synthetic oligonucleotide
  Target: LAMA2; (-) strand; PAM type: YTN; PAM sequence: CTC
gaatcagtaagtcctatttg

SEQ ID NO: 253090 - DNA, 20 bp, Artificial Sequence
  Description of Artificial Sequence: Synthetic oligonucleotide
  Target: LAMA2; (-) strand; PAM type: YTN; PAM sequence: CTG
acatacagtctcgaatcagt

SEQ ID NO: 253091 - DNA, 20 bp, Artificial Sequence
  Description of Artificial Sequence: Synthetic oligonucleotide
  Target: LAMA2; (-) strand; PAM type: YTN; PAM sequence: CTC
ccctgacatacagtctcgaa

SEQ ID NO: 253092 - DNA, 20 bp, Artificial Sequence
  Description of Artificial Sequence: Synthetic oligonucleotide
  Target: LAMA2; (-) strand; PAM type: YTN; PAM sequence: CTC
tcccctgacatacagtctcg

SEQ ID NO: 253093 - DNA, 20 bp, Artificial Sequence
  Description of Artificial Sequence: Synthetic oligonucleotide
  Target: LAMA2; (-) strand; PAM type: YTN; PAM sequence: TTA
atctctcccctgacatacag

SEQ ID NO: 253094 - DNA, 20 bp, Artificial Sequence
  Description of Artificial Sequence: Synthetic oligonucleotide
  Target: LAMA2; (-) strand; PAM type: YTN; PAM sequence: TTT
aatctctcccctgacataca

SEQ ID NO: 253095 - DNA, 20 bp, Artificial Sequence
  Description of Artificial Sequence: Synthetic oligonucleotide
  Target: LAMA2; (-) strand; PAM type: YTN; PAM sequence: CTT
taatctctcccctgacatac

SEQ ID NO: 253096 - DNA, 20 bp, Artificial Sequence
  Description of Artificial Sequence: Synthetic oligonucleotide
  Target: LAMA2; (-) strand; PAM type: YTN; PAM sequence: TTC
tttaatctctcccctgacat

SEQ ID NO: 253097 - DNA, 20 bp, Artificial Sequence
  Description of Artificial Sequence: Synthetic oligonucleotide
  Target: LAMA2; (-) strand; PAM type: YTN; PAM sequence: TTT
ctttaatctctcccctgaca

SEQ ID NO: 253098 - DNA, 20 bp, Artificial Sequence
  Description of Artificial Sequence: Synthetic oligonucleotide
  Target: LAMA2; (-) strand; PAM type: YTN; PAM sequence: TTA
tttctttaatctctcccctg

SEQ ID NO: 253099 - DNA, 20 bp, Artificial Sequence
  Description of Artificial Sequence: Synthetic oligonucleotide
  Target: LAMA2; (-) strand; PAM type: YTN; PAM sequence: TTT
atttctttaatctctcccct

SEQ ID NO: 253100 - DNA, 20 bp, Artificial Sequence
  Description of Artificial Sequence: Synthetic oligonucleotide
  Target: LAMA2; (-) strand; PAM type: YTN; PAM sequence: CTT
tatttctttaatctctcccc

SEQ ID NO: 253101 - DNA, 20 bp, Artificial Sequence
  Description of Artificial Sequence: Synthetic oligonucleotide
  Target: LAMA2; (-) strand; PAM type: YTN; PAM sequence: CTC
tttatttctttaatctctcc

SEQ ID NO: 253102 - DNA, 20 bp, Artificial Sequence
  Description of Artificial Sequence: Synthetic oligonucleotide
  Target: LAMA2; (-) strand; PAM type: YTN; PAM sequence: TTA
aactctttatttctttaatc

SEQ ID NO: 253103 - DNA, 20 bp, Artificial Sequence
  Description of Artificial Sequence: Synthetic oligonucleotide
  Target: LAMA2; (-) strand; PAM type: YTN; PAM sequence: CTT
aaactctttatttctttaat

SEQ ID NO: 253104 - DNA, 20 bp, Artificial Sequence
  Description of Artificial Sequence: Synthetic oligonucleotide
  Target: LAMA2; (-) strand; PAM type: YTN; PAM sequence: TTC
ttaaactctttatttcttta

SEQ ID NO: 253105 - DNA, 20 bp, Artificial Sequence
  Description of Artificial Sequence: Synthetic oligonucleotide
  Target: LAMA2; (-) strand; PAM type: YTN; PAM sequence: CTC
attcttaaactctttatttc

SEQ ID NO: 253106 - DNA, 20 bp, Artificial Sequence
  Description of Artificial Sequence: Synthetic oligonucleotide
  Target: LAMA2; (-) strand; PAM type: YTN; PAM sequence: CTA
tgactcattcttaaactctt

SEQ ID NO: 253107 - DNA, 20 bp, Artificial Sequence
  Description of Artificial Sequence: Synthetic oligonucleotide
  Target: LAMA2; (-) strand; PAM type: YTN; PAM sequence: CTG
gtcatctatgactcattctt

SEQ ID NO: 253108 - DNA, 20 bp, Artificial Sequence
  Description of Artificial Sequence: Synthetic oligonucleotide
  Target: LAMA2; (-) strand; PAM type: YTN; PAM sequence: TTC
aaactggtcatctatgactc

SEQ ID NO: 253109 - DNA, 20 bp, Artificial Sequence
  Description of Artificial Sequence: Synthetic oligonucleotide
  Target: LAMA2; (-) strand; PAM type: YTN; PAM sequence: CTG
atcaatcattcaaactggtc

SEQ ID NO: 253110 - DNA, 20 bp, Artificial Sequence
  Description of Artificial Sequence: Synthetic oligonucleotide
  Target: LAMA2; (-) strand; PAM type: YTN; PAM sequence: CTC
agtaaatgacaccacaacca

SEQ ID NO: 253111 - DNA, 20 bp, Artificial Sequence
  Description of Artificial Sequence: Synthetic oligonucleotide
  Target: LAMA2; (-) strand; PAM type: YTN; PAM sequence: CTC
agctcagtaaatgacaccac

SEQ ID NO: 253112 - DNA, 20 bp, Artificial Sequence
  Description of Artificial Sequence: Synthetic oligonucleotide
  Target: LAMA2; (-) strand; PAM type: YTN; PAM sequence: TTC
ctcagctcagtaaatgacac

SEQ ID NO: 253113 - DNA, 20 bp, Artificial Sequence
  Description of Artificial Sequence: Synthetic oligonucleotide
  Target: LAMA2; (-) strand; PAM type: YTN; PAM sequence: CTA
ttcctcagctcagtaaatga

SEQ ID NO: 253114 - DNA, 20 bp, Artificial Sequence
  Description of Artificial Sequence: Synthetic oligonucleotide
  Target: LAMA2; (-) strand; PAM type: YTN; PAM sequence: TTC
catgcccccacccccccaca

SEQ ID NO: 253115 - DNA, 20 bp, Artificial Sequence
  Description of Artificial Sequence: Synthetic oligonucleotide
  Target: LAMA2; (-) strand; PAM type: YTN; PAM sequence: CTA
tggattccatgcccccaccc

SEQ ID NO: 253116 - DNA, 20 bp, Artificial Sequence
  Description of Artificial Sequence: Synthetic oligonucleotide
  Target: LAMA2; (-) strand; PAM type: YTN; PAM sequence: CTG
gactatggattccatgcccc

SEQ ID NO: 253117 - DNA, 20 bp, Artificial Sequence
  Description of Artificial Sequence: Synthetic oligonucleotide
  Target: LAMA2; (-) strand; PAM type: YTN; PAM sequence: CTA
aactggactatggattccat

SEQ ID NO: 253118 - DNA, 20 bp, Artificial Sequence
  Description of Artificial Sequence: Synthetic oligonucleotide
  Target: LAMA2; (-) strand; PAM type: YTN; PAM sequence: TTC
taaactggactatggattcc

SEQ ID NO: 253119 - DNA, 20 bp, Artificial Sequence
  Description of Artificial Sequence: Synthetic oligonucleotide
  Target: LAMA2; (-) strand; PAM type: YTN; PAM sequence: TTT
ctaaactggactatggattc

SEQ ID NO: 253120 - DNA, 20 bp, Artificial Sequence
  Description of Artificial Sequence: Synthetic oligonucleotide
  Target: LAMA2; (-) strand; PAM type: YTN; PAM sequence: TTC
aaatcgaaaatttctaaact

SEQ ID NO: 253121 - DNA, 20 bp, Artificial Sequence
  Description of Artificial Sequence: Synthetic oligonucleotide
  Target: LAMA2; (-) strand; PAM type: YTN; PAM sequence: TTT
caaatcgaaaatttctaaac

SEQ ID NO: 253122 - DNA, 20 bp, Artificial Sequence
  Description of Artificial Sequence: Synthetic oligonucleotide
  Target: LAMA2; (-) strand; PAM type: YTN; PAM sequence: TTT
tcaaatcgaaaatttctaaa

SEQ ID NO: 253123 - DNA, 20 bp, Artificial Sequence
  Description of Artificial Sequence: Synthetic oligonucleotide
  Target: LAMA2; (-) strand; PAM type: YTN; PAM sequence: TTC
acagcgttttcaaatcgaaa

SEQ ID NO: 253124 - DNA, 20 bp, Artificial Sequence
  Description of Artificial Sequence: Synthetic oligonucleotide
  Target: LAMA2; (-) strand; PAM type: YTN; PAM sequence: CTT
cacagcgttttcaaatcgaa

SEQ ID NO: 253125 - DNA, 20 bp, Artificial Sequence
  Description of Artificial Sequence: Synthetic oligonucleotide
  Target: LAMA2; (-) strand; PAM type: YTN; PAM sequence: TTA
cacttcacagcgttttcaaa

SEQ ID NO: 253126 - DNA, 20 bp, Artificial Sequence
  Description of Artificial Sequence: Synthetic oligonucleotide
  Target: LAMA2; (-) strand; PAM type: YTN; PAM sequence: TTT
acacttcacagcgttttcaa

SEQ ID NO: 253127 - DNA, 20 bp, Artificial Sequence
  Description of Artificial Sequence: Synthetic oligonucleotide
  Target: LAMA2; (-) strand; PAM type: YTN; PAM sequence: TTG
acatttacacttcacagcgt

SEQ ID NO: 253128 - DNA, 20 bp, Artificial Sequence
  Description of Artificial Sequence: Synthetic oligonucleotide
  Target: LAMA2; (-) strand; PAM type: YTN; PAM sequence: TTA
taaatacacattgacattta

SEQ ID NO: 253129 - DNA, 20 bp, Artificial Sequence
  Description of Artificial Sequence: Synthetic oligonucleotide
  Target: LAMA2; (-) strand; PAM type: YTN; PAM sequence: CTG
aatattataaatacacattg

SEQ ID NO: 253130 - DNA, 20 bp, Artificial Sequence
  Description of Artificial Sequence: Synthetic oligonucleotide
  Target: LAMA2; (-) strand; PAM type: YTN; PAM sequence: TTA
agacctgaatattataaata

SEQ ID NO: 253131 - DNA, 20 bp, Artificial Sequence
  Description of Artificial Sequence: Synthetic oligonucleotide
  Target: LAMA2; (-) strand; PAM type: YTN; PAM sequence: TTT
aagacctgaatattataaat

SEQ ID NO: 253132 - DNA, 20 bp, Artificial Sequence
  Description of Artificial Sequence: Synthetic oligonucleotide
  Target: LAMA2; (-) strand; PAM type: YTN; PAM sequence: CTG
aatttaagacctgaatatta

SEQ ID NO: 253133 - DNA, 20 bp, Artificial Sequence
  Description of Artificial Sequence: Synthetic oligonucleotide
  Target: LAMA2; (-) strand; PAM type: YTN; PAM sequence: CTA
gaccagacagacatgctgaa

SEQ ID NO: 253134 - DNA, 20 bp, Artificial Sequence
  Description of Artificial Sequence: Synthetic oligonucleotide
  Target: LAMA2; (-) strand; PAM type: YTN; PAM sequence: CTC
tagaccagacagacatgctg

SEQ ID NO: 253135 - DNA, 20 bp, Artificial Sequence
  Description of Artificial Sequence: Synthetic oligonucleotide
  Target: LAMA2; (-) strand; PAM type: YTN; PAM sequence: TTC
caaaaacatatctctagacc

SEQ ID NO: 253136 - DNA, 20 bp, Artificial Sequence
  Description of Artificial Sequence: Synthetic oligonucleotide
  Target: LAMA2; (-) strand; PAM type: YTN; PAM sequence: CTT
ccaaaaacatatctctagac

SEQ ID NO: 253137 - DNA, 20 bp, Artificial Sequence
  Description of Artificial Sequence: Synthetic oligonucleotide
  Target: LAMA2; (-) strand; PAM type: YTN; PAM sequence: TTA
tgacgccttccaaaaacata

SEQ ID NO: 253138 - DNA, 20 bp, Artificial Sequence
  Description of Artificial Sequence: Synthetic oligonucleotide
  Target: LAMA2; (-) strand; PAM type: YTN; PAM sequence: TTT
atgacgccttccaaaaacat

SEQ ID NO: 253139 - DNA, 20 bp, Artificial Sequence
  Description of Artificial Sequence: Synthetic oligonucleotide
  Target: LAMA2; (-) strand; PAM type: YTN; PAM sequence: TTC
catagtttatgacgccttcc

SEQ ID NO: 253140 - DNA, 20 bp, Artificial Sequence
  Description of Artificial Sequence: Synthetic oligonucleotide
  Target: LAMA2; (-) strand; PAM type: YTN; PAM sequence: TTC
agttccatagtttatgacgc

SEQ ID NO: 253141 - DNA, 20 bp, Artificial Sequence
  Description of Artificial Sequence: Synthetic oligonucleotide
  Target: LAMA2; (-) strand; PAM type: YTN; PAM sequence: TTA
ttcagttccatagtttatga

SEQ ID NO: 253142 - DNA, 20 bp, Artificial Sequence
  Description of Artificial Sequence: Synthetic oligonucleotide
  Target: LAMA2; (-) strand; PAM type: YTN; PAM sequence: TTT
attcagttccatagtttatg

SEQ ID NO: 253143 - DNA, 20 bp, Artificial Sequence
  Description of Artificial Sequence: Synthetic oligonucleotide
  Target: LAMA2; (-) strand; PAM type: YTN; PAM sequence: TTT
tattcagttccatagtttat

SEQ ID NO: 253144 - DNA, 20 bp, Artificial Sequence
  Description of Artificial Sequence: Synthetic oligonucleotide
  Target: LAMA2; (-) strand; PAM type: YTN; PAM sequence: CTG
ggtaattttattcagttcca

SEQ ID NO: 253145 - DNA, 20 bp, Artificial Sequence
  Description of Artificial Sequence: Synthetic oligonucleotide
  Target: LAMA2; (-) strand; PAM type: YTN; PAM sequence: CTC
ctgggtaattttattcagtt

SEQ ID NO: 253146 - DNA, 20 bp, Artificial Sequence
  Description of Artificial Sequence: Synthetic oligonucleotide
  Target: LAMA2; (-) strand; PAM type: YTN; PAM sequence: TTC
tcctgggtaattttattcag

SEQ ID NO: 253147 - DNA, 20 bp, Artificial Sequence
  Description of Artificial Sequence: Synthetic oligonucleotide
  Target: LAMA2; (-) strand; PAM type: YTN; PAM sequence: TTT
ctcctgggtaattttattca

SEQ ID NO: 253148 - DNA, 20 bp, Artificial Sequence
  Description of Artificial Sequence: Synthetic oligonucleotide
  Target: LAMA2; (-) strand; PAM type: YTN; PAM sequence: CTT
tctcctgggtaattttattc

SEQ ID NO: 253149 - DNA, 20 bp, Artificial Sequence
  Description of Artificial Sequence: Synthetic oligonucleotide
  Target: LAMA2; (-) strand; PAM type: YTN; PAM sequence: TTG
cactttctcctgggtaattt

SEQ ID NO: 253150 - DNA, 20 bp, Artificial Sequence
  Description of Artificial Sequence: Synthetic oligonucleotide
  Target: LAMA2; (-) strand; PAM type: YTN; PAM sequence: TTA
aatcaattgcactttctcct

SEQ ID NO: 253151 - DNA, 20 bp, Artificial Sequence
  Description of Artificial Sequence: Synthetic oligonucleotide
  Target: LAMA2; (-) strand; PAM type: YTN; PAM sequence: TTT
aaatcaattgcactttctcc

SEQ ID NO: 253152 - DNA, 20 bp, Artificial Sequence
  Description of Artificial Sequence: Synthetic oligonucleotide
  Target: LAMA2; (-) strand; PAM type: YTN; PAM sequence: TTT
taaatcaattgcactttctc

SEQ ID NO: 253153 - DNA, 20 bp, Artificial Sequence
  Description of Artificial Sequence: Synthetic oligonucleotide
  Target: LAMA2; (-) strand; PAM type: YTN; PAM sequence: TTT
ttaaatcaattgcactttct

SEQ ID NO: 253154 - DNA, 20 bp, Artificial Sequence
  Description of Artificial Sequence: Synthetic oligonucleotide
  Target: LAMA2; (-) strand; PAM type: YTN; PAM sequence: TTT
tttaaatcaattgcactttc

SEQ ID NO: 253155 - DNA, 20 bp, Artificial Sequence
  Description of Artificial Sequence: Synthetic oligonucleotide
  Target: LAMA2; (-) strand; PAM type: YTN; PAM sequence: CTT
ttttaaatcaattgcacttt

SEQ ID NO: 253156 - DNA, 20 bp, Artificial Sequence
  Description of Artificial Sequence: Synthetic oligonucleotide
  Target: LAMA2; (-) strand; PAM type: YTN; PAM sequence: CTC
ttttttaaatcaattgcact

SEQ ID NO: 253157 - DNA, 20 bp, Artificial Sequence
  Description of Artificial Sequence: Synthetic oligonucleotide
  Target: LAMA2; (-) strand; PAM type: YTN; PAM sequence: CTC
tcttttttaaatcaattgca

SEQ ID NO: 253158 - DNA, 20 bp, Artificial Sequence
  Description of Artificial Sequence: Synthetic oligonucleotide
  Target: LAMA2; (-) strand; PAM type: YTN; PAM sequence: TTC
tctcttttttaaatcaattg

SEQ ID NO: 253159 - DNA, 20 bp, Artificial Sequence
  Description of Artificial Sequence: Synthetic oligonucleotide
  Target: LAMA2; (-) strand; PAM type: YTN; PAM sequence: TTT
ctctcttttttaaatcaatt

SEQ ID NO: 253160 - DNA, 20 bp, Artificial Sequence
  Description of Artificial Sequence: Synthetic oligonucleotide
  Target: LAMA2; (-) strand; PAM type: YTN; PAM sequence: TTT
tctctcttttttaaatcaat

SEQ ID NO: 253161 - DNA, 20 bp, Artificial Sequence
  Description of Artificial Sequence: Synthetic oligonucleotide
  Target: LAMA2; (-) strand; PAM type: YTN; PAM sequence: TTT
ttctctcttttttaaatcaa

SEQ ID NO: 253162 - DNA, 20 bp, Artificial Sequence
  Description of Artificial Sequence: Synthetic oligonucleotide
  Target: LAMA2; (-) strand; PAM type: YTN; PAM sequence: CTA
tttttctctcttttttaaat

SEQ ID NO: 253163 - DNA, 20 bp, Artificial Sequence
  Description of Artificial Sequence: Synthetic oligonucleotide
  Target: LAMA2; (-) strand; PAM type: YTN; PAM sequence: CTG
ggctatttttctctcttttt

SEQ ID NO: 253164 - DNA, 20 bp, Artificial Sequence
  Description of Artificial Sequence: Synthetic oligonucleotide
  Target: LAMA2; (-) strand; PAM type: YTN; PAM sequence: TTG
ggctgggctatttttctctc

SEQ ID NO: 253165 - DNA, 20 bp, Artificial Sequence
  Description of Artificial Sequence: Synthetic oligonucleotide
  Target: LAMA2; (-) strand; PAM type: YTN; PAM sequence: CTT
gggctgggctatttttctct

SEQ ID NO: 253166 - DNA, 20 bp, Artificial Sequence
  Description of Artificial Sequence: Synthetic oligonucleotide
  Target: LAMA2; (-) strand; PAM type: YTN; PAM sequence: CTC
agggcttgggctgggctatt

SEQ ID NO: 253167 - DNA, 20 bp, Artificial Sequence
  Description of Artificial Sequence: Synthetic oligonucleotide
  Target: LAMA2; (-) strand; PAM type: YTN; PAM sequence: CTC
ctcagggcttgggctgggct

SEQ ID NO: 253168 - DNA, 20 bp, Artificial Sequence
  Description of Artificial Sequence: Synthetic oligonucleotide
  Target: LAMA2; (-) strand; PAM type: YTN; PAM sequence: TTA
acgtcaggagctcctcaggg

SEQ ID NO: 253169 - DNA, 20 bp, Artificial Sequence
  Description of Artificial Sequence: Synthetic oligonucleotide
  Target: LAMA2; (-) strand; PAM type: YTN; PAM sequence: CTT
aacgtcaggagctcctcagg

SEQ ID NO: 253170 - DNA, 20 bp, Artificial Sequence
  Description of Artificial Sequence: Synthetic oligonucleotide
  Target: LAMA2; (-) strand; PAM type: YTN; PAM sequence: TTC
ttaacgtcaggagctcctca

SEQ ID NO: 253171 - DNA, 20 bp, Artificial Sequence
  Description of Artificial Sequence: Synthetic oligonucleotide
  Target: LAMA2; (-) strand; PAM type: YTN; PAM sequence: CTT
cttaacgtcaggagctcctc

SEQ ID NO: 253172 - DNA, 20 bp, Artificial Sequence
  Description of Artificial Sequence: Synthetic oligonucleotide
  Target: LAMA2; (-) strand; PAM type: YTN; PAM sequence: CTG
cttcttaacgtcaggagctc

SEQ ID NO: 253173 - DNA, 20 bp, Artificial Sequence
  Description of Artificial Sequence: Synthetic oligonucleotide
  Target: LAMA2; (-) strand; PAM type: YTN; PAM sequence: TTG
accctgcttcttaacgtcag

SEQ ID NO: 253174 - DNA, 20 bp, Artificial Sequence
  Description of Artificial Sequence: Synthetic oligonucleotide
  Target: LAMA2; (-) strand; PAM type: YTN; PAM sequence: TTT
gaccctgcttcttaacgtca

SEQ ID NO: 253175 - DNA, 20 bp, Artificial Sequence
  Description of Artificial Sequence: Synthetic oligonucleotide
  Target: LAMA2; (-) strand; PAM type: YTN; PAM sequence: CTT
tgaccctgcttcttaacgtc

SEQ ID NO: 253176 - DNA, 20 bp, Artificial Sequence
  Description of Artificial Sequence: Synthetic oligonucleotide
  Target: LAMA2; (-) strand; PAM type: YTN; PAM sequence: CTG
ctttgaccctgcttcttaac

SEQ ID NO: 253177 - DNA, 20 bp, Artificial Sequence
  Description of Artificial Sequence: Synthetic oligonucleotide
  Target: LAMA2; (-) strand; PAM type: YTN; PAM sequence: CTC
tgctttgaccctgcttctta

SEQ ID NO: 253178 - DNA, 20 bp, Artificial Sequence
  Description of Artificial Sequence: Synthetic oligonucleotide
  Target: LAMA2; (-) strand; PAM type: YTN; PAM sequence: CTC
ctctgctttgaccctgcttc

SEQ ID NO: 253179 - DNA, 20 bp, Artificial Sequence
  Description of Artificial Sequence: Synthetic oligonucleotide
  Target: LAMA2; (-) strand; PAM type: YTN; PAM sequence: CTG
tctcctctgctttgaccctg

SEQ ID NO: 253180 - DNA, 20 bp, Artificial Sequence
  Description of Artificial Sequence: Synthetic oligonucleotide
  Target: LAMA2; (-) strand; PAM type: YTN; PAM sequence: TTG
ctgtctcctctgctttgacc

SEQ ID NO: 253181 - DNA, 20 bp, Artificial Sequence
  Description of Artificial Sequence: Synthetic oligonucleotide
  Target: LAMA2; (-) strand; PAM type: YTN; PAM sequence: TTT
gctgtctcctctgctttgac

SEQ ID NO: 253182 - DNA, 20 bp, Artificial Sequence
  Description of Artificial Sequence: Synthetic oligonucleotide
  Target: LAMA2; (-) strand; PAM type: YTN; PAM sequence: CTT
tgctgtctcctctgctttga

SEQ ID NO: 253183 - DNA, 20 bp, Artificial Sequence
  Description of Artificial Sequence: Synthetic oligonucleotide
  Target: LAMA2; (-) strand; PAM type: YTN; PAM sequence: TTC
tttgctgtctcctctgcttt

SEQ ID NO: 253184 - DNA, 20 bp, Artificial Sequence
  Description of Artificial Sequence: Synthetic oligonucleotide
  Target: LAMA2; (-) strand; PAM type: YTN; PAM sequence: TTT
ctttgctgtctcctctgctt

SEQ ID NO: 253185 - DNA, 20 bp, Artificial Sequence
  Description of Artificial Sequence: Synthetic oligonucleotide
  Target: LAMA2; (-) strand; PAM type: YTN; PAM sequence: CTA
gcatatttctttgctgtctc

SEQ ID NO: 253186 - DNA, 20 bp, Artificial Sequence
  Description of Artificial Sequence: Synthetic oligonucleotide
  Target: LAMA2; (-) strand; PAM type: YTN; PAM sequence: TTC
tagcatatttctttgctgtc

SEQ ID NO: 253187 - DNA, 20 bp, Artificial Sequence
  Description of Artificial Sequence: Synthetic oligonucleotide
  Target: LAMA2; (-) strand; PAM type: YTN; PAM sequence: TTT
ctagcatatttctttgctgt

SEQ ID NO: 253188 - DNA, 20 bp, Artificial Sequence
  Description of Artificial Sequence: Synthetic oligonucleotide
  Target: LAMA2; (-) strand; PAM type: YTN; PAM sequence: TTC
ccaaatttctagcatatttc

SEQ ID NO: 253189 - DNA, 20 bp, Artificial Sequence
  Description of Artificial Sequence: Synthetic oligonucleotide
  Target: LAMA2; (-) strand; PAM type: YTN; PAM sequence: CTT
cccaaatttctagcatattt

SEQ ID NO: 253190 - DNA, 20 bp, Artificial Sequence
  Description of Artificial Sequence: Synthetic oligonucleotide
  Target: LAMA2; (-) strand; PAM type: YTN; PAM sequence: TTC
atgacatcacacttcccaaa

SEQ ID NO: 253191 - DNA, 20 bp, Artificial Sequence
  Description of Artificial Sequence: Synthetic oligonucleotide
  Target: LAMA2; (-) strand; PAM type: YTN; PAM sequence: CTT
catgacatcacacttcccaa

SEQ ID NO: 253192 - DNA, 20 bp, Artificial Sequence
  Description of Artificial Sequence: Synthetic oligonucleotide
  Target: LAMA2; (-) strand; PAM type: YTN; PAM sequence: CTC
aacttcatgacatcacactt

SEQ ID NO: 253193 - DNA, 20 bp, Artificial Sequence
  Description of Artificial Sequence: Synthetic oligonucleotide
  Target: LAMA2; (-) strand; PAM type: YTN; PAM sequence: TTC
tcaacttcatgacatcacac

SEQ ID NO: 253194 - DNA, 20 bp, Artificial Sequence
  Description of Artificial Sequence: Synthetic oligonucleotide
  Target: LAMA2; (-) strand; PAM type: YTN; PAM sequence: TTT
ctcaacttcatgacatcaca

SEQ ID NO: 253195 - DNA, 20 bp, Artificial Sequence
  Description of Artificial Sequence: Synthetic oligonucleotide
  Target: LAMA2; (-) strand; PAM type: YTN; PAM sequence: TTT
tctcaacttcatgacatcac

SEQ ID NO: 253196 - DNA, 20 bp, Artificial Sequence
  Description of Artificial Sequence: Synthetic oligonucleotide
  Target: LAMA2; (-) strand; PAM type: YTN; PAM sequence: CTT
ttctcaacttcatgacatca

SEQ ID NO: 253197 - DNA, 20 bp, Artificial Sequence
  Description of Artificial Sequence: Synthetic oligonucleotide
  Target: LAMA2; (-) strand; PAM type: YTN; PAM sequence: TTC
ttttctcaacttcatgacat

SEQ ID NO: 253198 - DNA, 20 bp, Artificial Sequence
  Description of Artificial Sequence: Synthetic oligonucleotide
  Target: LAMA2; (-) strand; PAM type: YTN; PAM sequence: TTT
cttttctcaacttcatgaca

SEQ ID NO: 253199 - DNA, 20 bp, Artificial Sequence
  Description of Artificial Sequence: Synthetic oligonucleotide
  Target: LAMA2; (-) strand; PAM type: YTN; PAM sequence: CTC
ccacaatttcttttctcaac

SEQ ID NO: 253200 - DNA, 20 bp, Artificial Sequence
  Description of Artificial Sequence: Synthetic oligonucleotide
  Target: LAMA2; (-) strand; PAM type: YTN; PAM sequence: TTC
ctcccacaatttcttttctc

SEQ ID NO: 253201 - DNA, 20 bp, Artificial Sequence
  Description of Artificial Sequence: Synthetic oligonucleotide
  Target: LAMA2; (-) strand; PAM type: YTN; PAM sequence: TTT
cctcccacaatttcttttct

SEQ ID NO: 253202 - DNA, 20 bp, Artificial Sequence
  Description of Artificial Sequence: Synthetic oligonucleotide
  Target: LAMA2; (-) strand; PAM type: YTN; PAM sequence: TTT
tcctcccacaatttcttttc

SEQ ID NO: 253203 - DNA, 20 bp, Artificial Sequence
  Description of Artificial Sequence: Synthetic oligonucleotide
  Target: LAMA2; (-) strand; PAM type: YTN; PAM sequence: CTT
ttcctcccacaatttctttt

SEQ ID NO: 253204 - DNA, 20 bp, Artificial Sequence
  Description of Artificial Sequence: Synthetic oligonucleotide
  Target: LAMA2; (-) strand; PAM type: YTN; PAM sequence: CTC
cttttcctcccacaatttct

SEQ ID NO: 253205 - DNA, 20 bp, Artificial Sequence
  Description of Artificial Sequence: Synthetic oligonucleotide
  Target: LAMA2; (-) strand; PAM type: YTN; PAM sequence: CTG
actccttttcctcccacaat

SEQ ID NO: 253206 - DNA, 20 bp, Artificial Sequence
  Description of Artificial Sequence: Synthetic oligonucleotide
  Target: LAMA2; (-) strand; PAM type: YTN; PAM sequence: CTA
gctgactccttttcctccca

SEQ ID NO: 253207 - DNA, 20 bp, Artificial Sequence
  Description of Artificial Sequence: Synthetic oligonucleotide
  Target: LAMA2; (-) strand; PAM type: YTN; PAM sequence: TTG
ggcctagctgactccttttc

SEQ ID NO: 253208 - DNA, 20 bp, Artificial Sequence
  Description of Artificial Sequence: Synthetic oligonucleotide
  Target: LAMA2; (-) strand; PAM type: YTN; PAM sequence: CTT
gggcctagctgactcctttt

SEQ ID NO: 253209 - DNA, 20 bp, Artificial Sequence
  Description of Artificial Sequence: Synthetic oligonucleotide
  Target: LAMA2; (-) strand; PAM type: YTN; PAM sequence: TTC
atcagccttgggcctagctg

SEQ ID NO: 253210 - DNA, 20 bp, Artificial Sequence
  Description of Artificial Sequence: Synthetic oligonucleotide
  Target: LAMA2; (-) strand; PAM type: YTN; PAM sequence: TTT
catcagccttgggcctagct

SEQ ID NO: 253211 - DNA, 20 bp, Artificial Sequence
  Description of Artificial Sequence: Synthetic oligonucleotide
  Target: LAMA2; (-) strand; PAM type: YTN; PAM sequence: CTT
tcatcagccttgggcctagc

SEQ ID NO: 253212 - DNA, 20 bp, Artificial Sequence
  Description of Artificial Sequence: Synthetic oligonucleotide
  Target: LAMA2; (-) strand; PAM type: YTN; PAM sequence: TTA
tccaacctttcatcagcctt

SEQ ID NO: 253213 - DNA, 20 bp, Artificial Sequence
  Description of Artificial Sequence: Synthetic oligonucleotide
  Target: LAMA2; (-) strand; PAM type: YTN; PAM sequence: TTT
atccaacctttcatcagcct

SEQ ID NO: 253214 - DNA, 20 bp, Artificial Sequence
  Description of Artificial Sequence: Synthetic oligonucleotide
  Target: LAMA2; (-) strand; PAM type: YTN; PAM sequence: TTT
tatccaacctttcatcagcc

SEQ ID NO: 253215 - DNA, 20 bp, Artificial Sequence
  Description of Artificial Sequence: Synthetic oligonucleotide
  Target: LAMA2; (-) strand; PAM type: YTN; PAM sequence: TTG
cattttatccaacctttcat

SEQ ID NO: 253216 - DNA, 20 bp, Artificial Sequence
  Description of Artificial Sequence: Synthetic oligonucleotide
  Target: LAMA2; (-) strand; PAM type: YTN; PAM sequence: CTG
caattgcattttatccaacc

SEQ ID NO: 253217 - DNA, 20 bp, Artificial Sequence
  Description of Artificial Sequence: Synthetic oligonucleotide
  Target: LAMA2; (-) strand; PAM type: YTN; PAM sequence: TTC
tgcaattgcattttatccaa

SEQ ID NO: 253218 - DNA, 20 bp, Artificial Sequence
  Description of Artificial Sequence: Synthetic oligonucleotide
  Target: LAMA2; (-) strand; PAM type: YTN; PAM sequence: TTC
gatggacaattctgcaattg

SEQ ID NO: 253219 - DNA, 20 bp, Artificial Sequence
  Description of Artificial Sequence: Synthetic oligonucleotide
  Target: LAMA2; (-) strand; PAM type: YTN; PAM sequence: TTC
catgcagccaaattcgatgg

SEQ ID NO: 253220 - DNA, 20 bp, Artificial Sequence
  Description of Artificial Sequence: Synthetic oligonucleotide
  Target: LAMA2; (-) strand; PAM type: YTN; PAM sequence: TTG
tcaccaaattccatgcagcc

SEQ ID NO: 253221 - DNA, 20 bp, Artificial Sequence
  Description of Artificial Sequence: Synthetic oligonucleotide
  Target: LAMA2; (-) strand; PAM type: YTN; PAM sequence: CTT
gtcaccaaattccatgcagc

SEQ ID NO: 253222 - DNA, 20 bp, Artificial Sequence
  Description of Artificial Sequence: Synthetic oligonucleotide
  Target: LAMA2; (-) strand; PAM type: YTN; PAM sequence: TTG
tccttgtcaccaaattccat

SEQ ID NO: 253223 - DNA, 20 bp, Artificial Sequence
  Description of Artificial Sequence: Synthetic oligonucleotide
  Target: LAMA2; (-) strand; PAM type: YTN; PAM sequence: CTT
gtccttgtcaccaaattcca

SEQ ID NO: 253224 - DNA, 20 bp, Artificial Sequence
  Description of Artificial Sequence: Synthetic oligonucleotide
  Target: LAMA2; (-) strand; PAM type: YTN; PAM sequence: CTC
ttgtccttgtcaccaaattc

SEQ ID NO: 253225 - DNA, 20 bp, Artificial Sequence
  Description of Artificial Sequence: Synthetic oligonucleotide
  Target: LAMA2; (-) strand; PAM type: YTN; PAM sequence: CTG
ctcttgtccttgtcaccaaa

SEQ ID NO: 253226 - DNA, 20 bp, Artificial Sequence
  Description of Artificial Sequence: Synthetic oligonucleotide
  Target: LAMA2; (-) strand; PAM type: YTN; PAM sequence: TTA
aaactgctcttgtccttgtc

SEQ ID NO: 253227 - DNA, 20 bp, Artificial Sequence
  Description of Artificial Sequence: Synthetic oligonucleotide
  Target: LAMA2; (-) strand; PAM type: YTN; PAM sequence: CTC
aattaaaactgctcttgtcc

SEQ ID NO: 253228 - DNA, 20 bp, Artificial Sequence
  Description of Artificial Sequence: Synthetic oligonucleotide
  Target: LAMA2; (-) strand; PAM type: YTN; PAM sequence: CTC
tcaattaaaactgctcttgt

SEQ ID NO: 253229 - DNA, 20 bp, Artificial Sequence
  Description of Artificial Sequence: Synthetic oligonucleotide
  Target: LAMA2; (-) strand; PAM type: YTN; PAM sequence: TTG
tgtcaccacctctcaattaa

SEQ ID NO: 253230 - DNA, 20 bp, Artificial Sequence
  Description of Artificial Sequence: Synthetic oligonucleotide
  Target: LAMA2; (-) strand; PAM type: YTN; PAM sequence: TTT
gtgtcaccacctctcaatta

SEQ ID NO: 253231 - DNA, 20 bp, Artificial Sequence
  Description of Artificial Sequence: Synthetic oligonucleotide
  Target: LAMA2; (-) strand; PAM type: YTN; PAM sequence: TTT
tgtgtcaccacctctcaatt

SEQ ID NO: 253232 - DNA, 20 bp, Artificial Sequence
  Description of Artificial Sequence: Synthetic oligonucleotide
  Target: LAMA2; (-) strand; PAM type: YTN; PAM sequence: CTG
ttttgtgtcaccacctctca

SEQ ID NO: 253233 - DNA, 20 bp, Artificial Sequence
  Description of Artificial Sequence: Synthetic oligonucleotide
  Target: LAMA2; (-) strand; PAM type: YTN; PAM sequence: CTA
atctgttttgtgtcaccacc

SEQ ID NO: 253234 - DNA, 20 bp, Artificial Sequence
  Description of Artificial Sequence: Synthetic oligonucleotide
  Target: LAMA2; (-) strand; PAM type: YTN; PAM sequence: TTC
taatctgttttgtgtcacca

SEQ ID NO: 253235 - DNA, 20 bp, Artificial Sequence
  Description of Artificial Sequence: Synthetic oligonucleotide
  Target: LAMA2; (-) strand; PAM type: YTN; PAM sequence: TTC
cattctaatctgttttgtgt

SEQ ID NO: 253236 - DNA, 20 bp, Artificial Sequence
  Description of Artificial Sequence: Synthetic oligonucleotide
  Target: LAMA2; (-) strand; PAM type: YTN; PAM sequence: TTC
attccattctaatctgtttt

SEQ ID NO: 253237 - DNA, 20 bp, Artificial Sequence
  Description of Artificial Sequence: Synthetic oligonucleotide
  Target: LAMA2; (-) strand; PAM type: YTN; PAM sequence: CTT
cattccattctaatctgttt

SEQ ID NO: 253238 - DNA, 20 bp, Artificial Sequence
  Description of Artificial Sequence: Synthetic oligonucleotide
  Target: LAMA2; (-) strand; PAM type: YTN; PAM sequence: TTC
acacttcattccattctaat

SEQ ID NO: 253239 - DNA, 20 bp, Artificial Sequence
  Description of Artificial Sequence: Synthetic oligonucleotide
  Target: LAMA2; (-) strand; PAM type: YTN; PAM sequence: TTT
cacacttcattccattctaa

SEQ ID NO: 253240 - DNA, 20 bp, Artificial Sequence
  Description of Artificial Sequence: Synthetic oligonucleotide
  Target: LAMA2; (-) strand; PAM type: YTN; PAM sequence: TTT
tcacacttcattccattcta

SEQ ID NO: 253241 - DNA, 20 bp, Artificial Sequence
  Description of Artificial Sequence: Synthetic oligonucleotide
  Target: LAMA2; (-) strand; PAM type: YTN; PAM sequence: TTT
ttcacacttcattccattct

SEQ ID NO: 253242 - DNA, 20 bp, Artificial Sequence
  Description of Artificial Sequence: Synthetic oligonucleotide
  Target: LAMA2; (-) strand; PAM type: YTN; PAM sequence: CTT
tttcacacttcattccattc

SEQ ID NO: 253243 - DNA, 20 bp, Artificial Sequence
  Description of Artificial Sequence: Synthetic oligonucleotide
  Target: LAMA2; (-) strand; PAM type: YTN; PAM sequence: CTC
tttttcacacttcattccat

SEQ ID NO: 253244 - DNA, 20 bp, Artificial Sequence
  Description of Artificial Sequence: Synthetic oligonucleotide
  Target: LAMA2; (-) strand; PAM type: YTN; PAM sequence: CTC
acctctttttcacacttcat

SEQ ID NO: 253245 - DNA, 20 bp, Artificial Sequence
  Description of Artificial Sequence: Synthetic oligonucleotide
  Target: LAMA2; (-) strand; PAM type: YTN; PAM sequence: TTC
ctcacctctttttcacactt

SEQ ID NO: 253246 - DNA, 20 bp, Artificial Sequence
  Description of Artificial Sequence: Synthetic oligonucleotide
  Target: LAMA2; (-) strand; PAM type: YTN; PAM sequence: TTA
tattcctcacctctttttca

SEQ ID NO: 253247 - DNA, 20 bp, Artificial Sequence
  Description of Artificial Sequence: Synthetic oligonucleotide
  Target: LAMA2; (-) strand; PAM type: YTN; PAM sequence: TTA
acaagtattatattcctcac

SEQ ID NO: 253248 - DNA, 20 bp, Artificial Sequence
  Description of Artificial Sequence: Synthetic oligonucleotide
  Target: LAMA2; (-) strand; PAM type: YTN; PAM sequence: CTT
aacaagtattatattcctca

SEQ ID NO: 253249 - DNA, 20 bp, Artificial Sequence
  Description of Artificial Sequence: Synthetic oligonucleotide
  Target: LAMA2; (-) strand; PAM type: YTN; PAM sequence: CTC
ttaacaagtattatattcct

SEQ ID NO: 253250 - DNA, 20 bp, Artificial Sequence
  Description of Artificial Sequence: Synthetic oligonucleotide
  Target: LAMA2; (-) strand; PAM type: YTN; PAM sequence: CTA
ctcttaacaagtattatatt

SEQ ID NO: 253251 - DNA, 20 bp, Artificial Sequence
  Description of Artificial Sequence: Synthetic oligonucleotide
  Target: LAMA2; (-) strand; PAM type: YTN; PAM sequence: TTC
agtaacactactcttaacaa

SEQ ID NO: 253252 - DNA, 20 bp, Artificial Sequence
  Description of Artificial Sequence: Synthetic oligonucleotide
  Target: LAMA2; (-) strand; PAM type: YTN; PAM sequence: TTT
cagtaacactactcttaaca

SEQ ID NO: 253253 - DNA, 20 bp, Artificial Sequence
  Description of Artificial Sequence: Synthetic oligonucleotide
  Target: LAMA2; (-) strand; PAM type: YTN; PAM sequence: TTT
tcagtaacactactcttaac

SEQ ID NO: 253254 - DNA, 20 bp, Artificial Sequence
  Description of Artificial Sequence: Synthetic oligonucleotide
  Target: LAMA2; (-) strand; PAM type: YTN; PAM sequence: CTT
ttcagtaacactactcttaa

SEQ ID NO: 253255 - DNA, 20 bp, Artificial Sequence
  Description of Artificial Sequence: Synthetic oligonucleotide
  Target: LAMA2; (-) strand; PAM type: YTN; PAM sequence: TTC
ttttcagtaacactactctt

SEQ ID NO: 253256 - DNA, 20 bp, Artificial Sequence
  Description of Artificial Sequence: Synthetic oligonucleotide
  Target: LAMA2; (-) strand; PAM type: YTN; PAM sequence: TTT
cttttcagtaacactactct

SEQ ID NO: 253257 - DNA, 20 bp, Artificial Sequence
  Description of Artificial Sequence: Synthetic oligonucleotide
  Target: LAMA2; (-) strand; PAM type: YTN; PAM sequence: TTT
tcttttcagtaacactactc

SEQ ID NO: 253258 - DNA, 20 bp, Artificial Sequence
  Description of Artificial Sequence: Synthetic oligonucleotide
  Target: LAMA2; (-) strand; PAM type: YTN; PAM sequence: TTT
ttcttttcagtaacactact

SEQ ID NO: 253259 - DNA, 20 bp, Artificial Sequence
  Description of Artificial Sequence: Synthetic oligonucleotide
  Target: LAMA2; (-) strand; PAM type: YTN; PAM sequence: CTA
tgtttttcttttcagtaaca

SEQ ID NO: 253260 - DNA, 20 bp, Artificial Sequence
  Description of Artificial Sequence: Synthetic oligonucleotide
  Target: LAMA2; (-) strand; PAM type: YTN; PAM sequence: CTA
gtcatctatgtttttctttt

SEQ ID NO: 253261 - DNA, 20 bp, Artificial Sequence
  Description of Artificial Sequence: Synthetic oligonucleotide
  Target: LAMA2; (-) strand; PAM type: YTN; PAM sequence: TTC
tagtcatctatgtttttctt

SEQ ID NO: 253262 - DNA, 20 bp, Artificial Sequence
  Description of Artificial Sequence: Synthetic oligonucleotide
  Target: LAMA2; (-) strand; PAM type: YTN; PAM sequence: TTT
ctagtcatctatgtttttct

SEQ ID NO: 253263 - DNA, 20 bp, Artificial Sequence
  Description of Artificial Sequence: Synthetic oligonucleotide
  Target: LAMA2; (-) strand; PAM type: YTN; PAM sequence: TTT
tctagtcatctatgtttttc

SEQ ID NO: 253264 - DNA, 20 bp, Artificial Sequence
  Description of Artificial Sequence: Synthetic oligonucleotide
  Target: LAMA2; (-) strand; PAM type: YTN; PAM sequence: CTT
ttctagtcatctatgttttt

SEQ ID NO: 253265 - DNA, 20 bp, Artificial Sequence
  Description of Artificial Sequence: Synthetic oligonucleotide
  Target: LAMA2; (-) strand; PAM type: YTN; PAM sequence: CTC
atataacttttctagtcatc

SEQ ID NO: 253266 - DNA, 20 bp, Artificial Sequence
  Description of Artificial Sequence: Synthetic oligonucleotide
  Target: LAMA2; (-) strand; PAM type: YTN; PAM sequence: TTA
gcctcatataacttttctag

SEQ ID NO: 253267 - DNA, 20 bp, Artificial Sequence
  Description of Artificial Sequence: Synthetic oligonucleotide
  Target: LAMA2; (-) strand; PAM type: YTN; PAM sequence: CTT
agcctcatataacttttcta

SEQ ID NO: 253268 - DNA, 20 bp, Artificial Sequence
  Description of Artificial Sequence: Synthetic oligonucleotide
  Target: LAMA2; (-) strand; PAM type: YTN; PAM sequence: CTC
ttagcctcatataacttttc

SEQ ID NO: 253269 - DNA, 20 bp, Artificial Sequence
  Description of Artificial Sequence: Synthetic oligonucleotide
  Target: LAMA2; (-) strand; PAM type: YTN; PAM sequence: CTG
tcctcttagcctcatataac

SEQ ID NO: 253270 - DNA, 20 bp, Artificial Sequence
  Description of Artificial Sequence: Synthetic oligonucleotide
  Target: LAMA2; (-) strand; PAM type: YTN; PAM sequence: CTC
catcaaaaataaacaaaaca

SEQ ID NO: 253271 - DNA, 20 bp, Artificial Sequence
  Description of Artificial Sequence: Synthetic oligonucleotide
  Target: LAMA2; (-) strand; PAM type: YTN; PAM sequence: CTA
gtgtctccatcaaaaataaa

SEQ ID NO: 253272 - DNA, 20 bp, Artificial Sequence
  Description of Artificial Sequence: Synthetic oligonucleotide
  Target: LAMA2; (-) strand; PAM type: YTN; PAM sequence: CTA
tcagcacaaaaaaatatgat

SEQ ID NO: 253273 - DNA, 20 bp, Artificial Sequence
  Description of Artificial Sequence: Synthetic oligonucleotide
  Target: LAMA2; (-) strand; PAM type: YTN; PAM sequence: TTA
ctatcagcacaaaaaaatat

SEQ ID NO: 253274 - DNA, 20 bp, Artificial Sequence
  Description of Artificial Sequence: Synthetic oligonucleotide
  Target: LAMA2; (-) strand; PAM type: YTN; PAM sequence: CTG
ggtcattactatcagcacaa

SEQ ID NO: 253275 - DNA, 20 bp, Artificial Sequence
  Description of Artificial Sequence: Synthetic oligonucleotide
  Target: LAMA2; (-) strand; PAM type: YTN; PAM sequence: CTA
ctgggtcattactatcagca

SEQ ID NO: 253276 - DNA, 20 bp, Artificial Sequence
  Description of Artificial Sequence: Synthetic oligonucleotide
  Target: LAMA2; (-) strand; PAM type: YTN; PAM sequence: TTC
tactgggtcattactatcag

SEQ ID NO: 253277 - DNA, 20 bp, Artificial Sequence
  Description of Artificial Sequence: Synthetic oligonucleotide
  Target: LAMA2; (-) strand; PAM type: YTN; PAM sequence: CTT
ctactgggtcattactatca

SEQ ID NO: 253278 - DNA, 20 bp, Artificial Sequence
  Description of Artificial Sequence: Synthetic oligonucleotide
  Target: LAMA2; (-) strand; PAM type: YTN; PAM sequence: TTC
ccttctactgggtcattact

SEQ ID NO: 253279 - DNA, 20 bp, Artificial Sequence
  Description of Artificial Sequence: Synthetic oligonucleotide
  Target: LAMA2; (-) strand; PAM type: YTN; PAM sequence: TTT
cccttctactgggtcattac

SEQ ID NO: 253280 - DNA, 20 bp, Artificial Sequence
  Description of Artificial Sequence: Synthetic oligonucleotide
  Target: LAMA2; (-) strand; PAM type: YTN; PAM sequence: CTT
tcccttctactgggtcatta

SEQ ID NO: 253281 - DNA, 20 bp, Artificial Sequence
  Description of Artificial Sequence: Synthetic oligonucleotide
  Target: LAMA2; (-) strand; PAM type: YTN; PAM sequence: TTA
gtaataactttcccttctac

SEQ ID NO: 253282 - DNA, 20 bp, Artificial Sequence
  Description of Artificial Sequence: Synthetic oligonucleotide
  Target: LAMA2; (-) strand; PAM type: YTN; PAM sequence: CTG
atggattagtaataactttc

SEQ ID NO: 253283 - DNA, 20 bp, Artificial Sequence
  Description of Artificial Sequence: Synthetic oligonucleotide
  Target: LAMA2; (-) strand; PAM type: YTN; PAM sequence: CTC
tgatggattagtaataactt

SEQ ID NO: 253284 - DNA, 20 bp, Artificial Sequence
  Description of Artificial Sequence: Synthetic oligonucleotide
  Target: LAMA2; (-) strand; PAM type: YTN; PAM sequence: CTC
tctgatggattagtaataac

SEQ ID NO: 253285 - DNA, 20 bp, Artificial Sequence
  Description of Artificial Sequence: Synthetic oligonucleotide
  Target: LAMA2; (-) strand; PAM type: YTN; PAM sequence: CTC
tctctgatggattagtaata

SEQ ID NO: 253286 - DNA, 20 bp, Artificial Sequence
  Description of Artificial Sequence: Synthetic oligonucleotide
  Target: LAMA2; (-) strand; PAM type: YTN; PAM sequence: TTC
actctctctgatggattagt

SEQ ID NO: 253287 - DNA, 20 bp, Artificial Sequence
  Description of Artificial Sequence: Synthetic oligonucleotide
  Target: LAMA2; (-) strand; PAM type: YTN; PAM sequence: CTC
aatattcactctctctgatg

SEQ ID NO: 253288 - DNA, 20 bp, Artificial Sequence
  Description of Artificial Sequence: Synthetic oligonucleotide
  Target: LAMA2; (-) strand; PAM type: YTN; PAM sequence: TTC
tcaatattcactctctctga

SEQ ID NO: 253289 - DNA, 20 bp, Artificial Sequence
  Description of Artificial Sequence: Synthetic oligonucleotide
  Target: LAMA2; (-) strand; PAM type: YTN; PAM sequence: CTT
ctcaatattcactctctctg

SEQ ID NO: 253290 - DNA, 20 bp, Artificial Sequence
  Description of Artificial Sequence: Synthetic oligonucleotide
  Target: LAMA2; (-) strand; PAM type: YTN; PAM sequence: TTA
tcttctcaatattcactctc

SEQ ID NO: 253291 - DNA, 20 bp, Artificial Sequence
  Description of Artificial Sequence: Synthetic oligonucleotide
  Target: LAMA2; (-) strand; PAM type: YTN; PAM sequence: CTG
ttatcttctcaatattcact

SEQ ID NO: 253292 - DNA, 20 bp, Artificial Sequence
  Description of Artificial Sequence: Synthetic oligonucleotide
  Target: LAMA2; (-) strand; PAM type: YTN; PAM sequence: TTC
cagcatctgttatcttctca

SEQ ID NO: 253293 - DNA, 20 bp, Artificial Sequence
  Description of Artificial Sequence: Synthetic oligonucleotide
  Target: LAMA2; (-) strand; PAM type: YTN; PAM sequence: CTG
attccagcatctgttatctt

SEQ ID NO: 253294 - DNA, 20 bp, Artificial Sequence
  Description of Artificial Sequence: Synthetic oligonucleotide
  Target: LAMA2; (-) strand; PAM type: YTN; PAM sequence: TTG
tcatctgattccagcatctg

SEQ ID NO: 253295 - DNA, 20 bp, Artificial Sequence
  Description of Artificial Sequence: Synthetic oligonucleotide
  Target: LAMA2; (-) strand; PAM type: YTN; PAM sequence: CTT
gtcatctgattccagcatct

SEQ ID NO: 253296 - DNA, 20 bp, Artificial Sequence
  Description of Artificial Sequence: Synthetic oligonucleotide
  Target: LAMA2; (-) strand; PAM type: YTN; PAM sequence: CTC
cacttgtcatctgattccag

SEQ ID NO: 253297 - DNA, 20 bp, Artificial Sequence
  Description of Artificial Sequence: Synthetic oligonucleotide
  Target: LAMA2; (-) strand; PAM type: YTN; PAM sequence: TTA
ctccacttgtcatctgattc

SEQ ID NO: 253298 - DNA, 20 bp, Artificial Sequence
  Description of Artificial Sequence: Synthetic oligonucleotide
  Target: LAMA2; (-) strand; PAM type: YTN; PAM sequence: CTA
aagaaatattactccacttg

SEQ ID NO: 253299 - DNA, 20 bp, Artificial Sequence
  Description of Artificial Sequence: Synthetic oligonucleotide
  Target: LAMA2; (-) strand; PAM type: YTN; PAM sequence: CTC
ctaaagaaatattactccac

SEQ ID NO: 253300 - DNA, 20 bp, Artificial Sequence
  Description of Artificial Sequence: Synthetic oligonucleotide
  Target: LAMA2; (-) strand; PAM type: YTN; PAM sequence: TTC
ctcctaaagaaatattactc

SEQ ID NO: 253301 - DNA, 20 bp, Artificial Sequence
  Description of Artificial Sequence: Synthetic oligonucleotide
  Target: LAMA2; (-) strand; PAM type: YTN; PAM sequence: CTT
cctcctaaagaaatattact

SEQ ID NO: 253302 - DNA, 20 bp, Artificial Sequence
  Description of Artificial Sequence: Synthetic oligonucleotide
  Target: LAMA2; (-) strand; PAM type: YTN; PAM sequence: TTC
caaacaagtgatgtggggaa

SEQ ID NO: 253303 - DNA, 20 bp, Artificial Sequence
  Description of Artificial Sequence: Synthetic oligonucleotide
  Target: LAMA2; (-) strand; PAM type: YTN; PAM sequence: TTC
ccattccaaacaagtgatgt

SEQ ID NO: 253304 - DNA, 20 bp, Artificial Sequence
  Description of Artificial Sequence: Synthetic oligonucleotide
  Target: LAMA2; (-) strand; PAM type: YTN; PAM sequence: TTG
ccatattcccattccaaaca

SEQ ID NO: 253305 - DNA, 20 bp, Artificial Sequence
  Description of Artificial Sequence: Synthetic oligonucleotide
  Target: LAMA2; (-) strand; PAM type: YTN; PAM sequence: TTG
ttgccatattcccattccaa

SEQ ID NO: 253306 - DNA, 20 bp, Artificial Sequence
  Description of Artificial Sequence: Synthetic oligonucleotide
  Target: LAMA2; (-) strand; PAM type: YTN; PAM sequence: CTT
gttgccatattcccattcca

SEQ ID NO: 253307 - DNA, 20 bp, Artificial Sequence
  Description of Artificial Sequence: Synthetic oligonucleotide
  Target: LAMA2; (-) strand; PAM type: YTN; PAM sequence: CTC
caaaccttgttgccatattc

SEQ ID NO: 253308 - DNA, 20 bp, Artificial Sequence
  Description of Artificial Sequence: Synthetic oligonucleotide
  Target: LAMA2; (-) strand; PAM type: YTN; PAM sequence: CTA
agcatatatctccaaacctt

SEQ ID NO: 253309 - DNA, 20 bp, Artificial Sequence
  Description of Artificial Sequence: Synthetic oligonucleotide
  Target: LAMA2; (-) strand; PAM type: YTN; PAM sequence: CTA
acaagtccagagatctaagc

SEQ ID NO: 253310 - DNA, 20 bp, Artificial Sequence
  Description of Artificial Sequence: Synthetic oligonucleotide
  Target: LAMA2; (-) strand; PAM type: YTN; PAM sequence: TTG
cactaacaagtccagagatc

SEQ ID NO: 253311 - DNA, 20 bp, Artificial Sequence
  Description of Artificial Sequence: Synthetic oligonucleotide
  Target: LAMA2; (-) strand; PAM type: YTN; PAM sequence: TTT
gcactaacaagtccagagat

SEQ ID NO: 253312 - DNA, 20 bp, Artificial Sequence
  Description of Artificial Sequence: Synthetic oligonucleotide
  Target: LAMA2; (-) strand; PAM type: YTN; PAM sequence: CTT
tgcactaacaagtccagaga

SEQ ID NO: 253313 - DNA, 20 bp, Artificial Sequence
  Description of Artificial Sequence: Synthetic oligonucleotide
  Target: LAMA2; (-) strand; PAM type: YTN; PAM sequence: CTG
cctttgcactaacaagtcca

SEQ ID NO: 253314 - DNA, 20 bp, Artificial Sequence
  Description of Artificial Sequence: Synthetic oligonucleotide
  Target: LAMA2; (-) strand; PAM type: YTN; PAM sequence: TTA
aagctgcctttgcactaaca

SEQ ID NO: 253315 - DNA, 20 bp, Artificial Sequence
  Description of Artificial Sequence: Synthetic oligonucleotide
  Target: LAMA2; (-) strand; PAM type: YTN; PAM sequence: CTC
acagaaaaaaattaaagctg

SEQ ID NO: 253316 - DNA, 20 bp, Artificial Sequence
  Description of Artificial Sequence: Synthetic oligonucleotide
  Target: LAMA2; (-) strand; PAM type: YTN; PAM sequence: TTA
ctcacagaaaaaaattaaag

SEQ ID NO: 253317 - DNA, 20 bp, Artificial Sequence
  Description of Artificial Sequence: Synthetic oligonucleotide
  Target: LAMA2; (-) strand; PAM type: YTN; PAM sequence: TTA
ttactcacagaaaaaaatta

SEQ ID NO: 253318 - DNA, 20 bp, Artificial Sequence
  Description of Artificial Sequence: Synthetic oligonucleotide
  Target: LAMA2; (-) strand; PAM type: YTN; PAM sequence: CTT
attactcacagaaaaaaatt

SEQ ID NO: 253319 - DNA, 20 bp, Artificial Sequence
  Description of Artificial Sequence: Synthetic oligonucleotide
  Target: LAMA2; (-) strand; PAM type: YTN; PAM sequence: TTA
acttattactcacagaaaaa

SEQ ID NO: 253320 - DNA, 20 bp, Artificial Sequence
  Description of Artificial Sequence: Synthetic oligonucleotide
  Target: LAMA2; (-) strand; PAM type: YTN; PAM sequence: TTT
aacttattactcacagaaaa

SEQ ID NO: 253321 - DNA, 20 bp, Artificial Sequence
  Description of Artificial Sequence: Synthetic oligonucleotide
  Target: LAMA2; (-) strand; PAM type: YTN; PAM sequence: TTT
taacttattactcacagaaa

SEQ ID NO: 253322 - DNA, 20 bp, Artificial Sequence
  Description of Artificial Sequence: Synthetic oligonucleotide
  Target: LAMA2; (-) strand; PAM type: YTN; PAM sequence: TTA
gccagtgattttaacttatt

SEQ ID NO: 253323 - DNA, 20 bp, Artificial Sequence
  Description of Artificial Sequence: Synthetic oligonucleotide
  Target: LAMA2; (-) strand; PAM type: YTN; PAM sequence: TTT
agccagtgattttaacttat

SEQ ID NO: 253324 - DNA, 20 bp, Artificial Sequence
  Description of Artificial Sequence: Synthetic oligonucleotide
  Target: LAMA2; (-) strand; PAM type: YTN; PAM sequence: TTT
tagccagtgattttaactta

SEQ ID NO: 253325 - DNA, 20 bp, Artificial Sequence
  Description of Artificial Sequence: Synthetic oligonucleotide
  Target: LAMA2; (-) strand; PAM type: YTN; PAM sequence: CTT
ttagccagtgattttaactt

SEQ ID NO: 253326 - DNA, 20 bp, Artificial Sequence
  Description of Artificial Sequence: Synthetic oligonucleotide
  Target: LAMA2; (-) strand; PAM type: YTN; PAM sequence: CTC
ttttagccagtgattttaac

SEQ ID NO: 253327 - DNA, 20 bp, Artificial Sequence
  Description of Artificial Sequence: Synthetic oligonucleotide
  Target: LAMA2; (-) strand; PAM type: YTN; PAM sequence: CTC
tcttttagccagtgatttta

SEQ ID NO: 253328 - DNA, 20 bp, Artificial Sequence
  Description of Artificial Sequence: Synthetic oligonucleotide
  Target: LAMA2; (-) strand; PAM type: YTN; PAM sequence: TTA
cacctctcttttagccagtg

SEQ ID NO: 253329 - DNA, 20 bp, Artificial Sequence
  Description of Artificial Sequence: Synthetic oligonucleotide
  Target: LAMA2; (-) strand; PAM type: YTN; PAM sequence: CTT
acacctctcttttagccagt

SEQ ID NO: 253330 - DNA, 20 bp, Artificial Sequence
  Description of Artificial Sequence: Synthetic oligonucleotide
  Target: LAMA2; (-) strand; PAM type: YTN; PAM sequence: CTC
cttacacctctcttttagcc

SEQ ID NO: 253331 - DNA, 20 bp, Artificial Sequence
  Description of Artificial Sequence: Synthetic oligonucleotide
  Target: LAMA2; (-) strand; PAM type: YTN; PAM sequence: TTC
ccaactccttacacctctct

SEQ ID NO: 253332 - DNA, 20 bp, Artificial Sequence
  Description of Artificial Sequence: Synthetic oligonucleotide
  Target: LAMA2; (-) strand; PAM type: YTN; PAM sequence: CTT
cccaactccttacacctctc

SEQ ID NO: 253333 - DNA, 20 bp, Artificial Sequence
  Description of Artificial Sequence: Synthetic oligonucleotide
  Target: LAMA2; (-) strand; PAM type: YTN; PAM sequence: TTC
aaacttcccaactccttaca

SEQ ID NO: 253334 - DNA, 20 bp, Artificial Sequence
  Description of Artificial Sequence: Synthetic oligonucleotide
  Target: LAMA2; (-) strand; PAM type: YTN; PAM sequence: CTT
caaacttcccaactccttac

SEQ ID NO: 253335 - DNA, 20 bp, Artificial Sequence
  Description of Artificial Sequence: Synthetic oligonucleotide
  Target: LAMA2; (-) strand; PAM type: YTN; PAM sequence: TTC
ttcaaacttcccaactcctt

SEQ ID NO: 253336 - DNA, 20 bp, Artificial Sequence
  Description of Artificial Sequence: Synthetic oligonucleotide
  Target: LAMA2; (-) strand; PAM type: YTN; PAM sequence: TTT
cttcaaacttcccaactcct

SEQ ID NO: 253337 - DNA, 20 bp, Artificial Sequence
  Description of Artificial Sequence: Synthetic oligonucleotide
  Target: LAMA2; (-) strand; PAM type: YTN; PAM sequence: CTT
tcttcaaacttcccaactcc

SEQ ID NO: 253338 - DNA, 20 bp, Artificial Sequence
  Description of Artificial Sequence: Synthetic oligonucleotide
  Target: LAMA2; (-) strand; PAM type: YTN; PAM sequence: TTC
tttcttcaaacttcccaact

SEQ ID NO: 253339 - DNA, 20 bp, Artificial Sequence
  Description of Artificial Sequence: Synthetic oligonucleotide
  Target: LAMA2; (-) strand; PAM type: YTN; PAM sequence: CTT
ctttcttcaaacttcccaac

SEQ ID NO: 253340 - DNA, 20 bp, Artificial Sequence
  Description of Artificial Sequence: Synthetic oligonucleotide
  Target: LAMA2; (-) strand; PAM type: YTN; PAM sequence: CTC
ataccacgtcttctttcttc

SEQ ID NO: 253341 - DNA, 20 bp, Artificial Sequence
  Description of Artificial Sequence: Synthetic oligonucleotide
  Target: LAMA2; (-) strand; PAM type: YTN; PAM sequence: CTG
caaatgcagtactcatacca

SEQ ID NO: 253342 - DNA, 20 bp, Artificial Sequence
  Description of Artificial Sequence: Synthetic oligonucleotide
  Target: LAMA2; (-) strand; PAM type: YTN; PAM sequence: CTC
tgcaaatgcagtactcatac

SEQ ID NO: 253343 - DNA, 20 bp, Artificial Sequence
  Description of Artificial Sequence: Synthetic oligonucleotide
  Target: LAMA2; (-) strand; PAM type: YTN; PAM sequence: TTA
atactctgcaaatgcagtac

SEQ ID NO: 253344 - DNA, 20 bp, Artificial Sequence
  Description of Artificial Sequence: Synthetic oligonucleotide
  Target: LAMA2; (-) strand; PAM type: YTN; PAM sequence: TTT
aatactctgcaaatgcagta

SEQ ID NO: 253345 - DNA, 20 bp, Artificial Sequence
  Description of Artificial Sequence: Synthetic oligonucleotide
  Target: LAMA2; (-) strand; PAM type: YTN; PAM sequence: TTT
taatactctgcaaatgcagt

SEQ ID NO: 253346 - DNA, 20 bp, Artificial Sequence
  Description of Artificial Sequence: Synthetic oligonucleotide
  Target: LAMA2; (-) strand; PAM type: YTN; PAM sequence: TTG
ttttaatactctgcaaatgc

SEQ ID NO: 253347 - DNA, 20 bp, Artificial Sequence
  Description of Artificial Sequence: Synthetic oligonucleotide
  Target: LAMA2; (-) strand; PAM type: YTN; PAM sequence: TTT
gttttaatactctgcaaatg

SEQ ID NO: 253348 - DNA, 20 bp, Artificial Sequence
  Description of Artificial Sequence: Synthetic oligonucleotide
  Target: LAMA2; (-) strand; PAM type: YTN; PAM sequence: TTT
tgttttaatactctgcaaat

SEQ ID NO: 253349 - DNA, 20 bp, Artificial Sequence
  Description of Artificial Sequence: Synthetic oligonucleotide
  Target: LAMA2; (-) strand; PAM type: YTN; PAM sequence: TTG
ttttgttttaatactctgca

SEQ ID NO: 253350 - DNA, 20 bp, Artificial Sequence
  Description of Artificial Sequence: Synthetic oligonucleotide
  Target: LAMA2; (-) strand; PAM type: YTN; PAM sequence: TTT
gttttgttttaatactctgc

SEQ ID NO: 253351 - DNA, 20 bp, Artificial Sequence
  Description of Artificial Sequence: Synthetic oligonucleotide
  Target: LAMA2; (-) strand; PAM type: YTN; PAM sequence: TTT
tgttttgttttaatactctg

SEQ ID NO: 253352 - DNA, 20 bp, Artificial Sequence
  Description of Artificial Sequence: Synthetic oligonucleotide
  Target: LAMA2; (-) strand; PAM type: YTN; PAM sequence: TTT
ttgttttgttttaatactct

SEQ ID NO: 253353 - DNA, 20 bp, Artificial Sequence
  Description of Artificial Sequence: Synthetic oligonucleotide
  Target: LAMA2; (-) strand; PAM type: YTN; PAM sequence: TTT
tttgttttgttttaatactc

SEQ ID NO: 253354 - DNA, 20 bp, Artificial Sequence
  Description of Artificial Sequence: Synthetic oligonucleotide
  Target: LAMA2; (-) strand; PAM type: YTN; PAM sequence: TTT
ttttgttttgttttaatact

SEQ ID NO: 253355 - DNA, 20 bp, Artificial Sequence
  Description of Artificial Sequence: Synthetic oligonucleotide
  Target: LAMA2; (-) strand; PAM type: YTN; PAM sequence: TTA
ataagtttttttgttttgtt

SEQ ID NO: 253356 - DNA, 20 bp, Artificial Sequence
  Description of Artificial Sequence: Synthetic oligonucleotide
  Target: LAMA2; (-) strand; PAM type: YTN; PAM sequence: CTT
aataagtttttttgttttgt

SEQ ID NO: 253357 - DNA, 20 bp, Artificial Sequence
  Description of Artificial Sequence: Synthetic oligonucleotide
  Target: LAMA2; (-) strand; PAM type: YTN; PAM sequence: TTC
cttaataagtttttttgttt

SEQ ID NO: 253358 - DNA, 20 bp, Artificial Sequence
  Description of Artificial Sequence: Synthetic oligonucleotide
  Target: LAMA2; (-) strand; PAM type: YTN; PAM sequence: TTT
ccttaataagtttttttgtt

SEQ ID NO: 253359 - DNA, 20 bp, Artificial Sequence
  Description of Artificial Sequence: Synthetic oligonucleotide
  Target: LAMA2; (-) strand; PAM type: YTN; PAM sequence: TTT
tccttaataagtttttttgt

SEQ ID NO: 253360 - DNA, 20 bp, Artificial Sequence
  Description of Artificial Sequence: Synthetic oligonucleotide
  Target: LAMA2; (-) strand; PAM type: YTN; PAM sequence: TTC
atgaagttttccttaataag

SEQ ID NO: 253361 - DNA, 20 bp, Artificial Sequence
  Description of Artificial Sequence: Synthetic oligonucleotide
  Target: LAMA2; (-) strand; PAM type: YTN; PAM sequence: TTC
agacagatattcatgaagtt

SEQ ID NO: 253362 - DNA, 20 bp, Artificial Sequence
  Description of Artificial Sequence: Synthetic oligonucleotide
  Target: LAMA2; (-) strand; PAM type: YTN; PAM sequence: TTT
cagacagatattcatgaagt

SEQ ID NO: 253363 - DNA, 20 bp, Artificial Sequence
  Description of Artificial Sequence: Synthetic oligonucleotide
  Target: LAMA2; (-) strand; PAM type: YTN; PAM sequence: TTT
tcagacagatattcatgaag

SEQ ID NO: 253364 - DNA, 20 bp, Artificial Sequence
  Description of Artificial Sequence: Synthetic oligonucleotide
  Target: LAMA2; (-) strand; PAM type: YTN; PAM sequence: CTG
ttttcagacagatattcatg

SEQ ID NO: 253365 - DNA, 20 bp, Artificial Sequence
  Description of Artificial Sequence: Synthetic oligonucleotide
  Target: LAMA2; (-) strand; PAM type: YTN; PAM sequence: CTA
ctgttttcagacagatattc

SEQ ID NO: 253366 - DNA, 20 bp, Artificial Sequence
  Description of Artificial Sequence: Synthetic oligonucleotide
  Target: LAMA2; (-) strand; PAM type: YTN; PAM sequence: CTA
atctactgttttcagacaga

SEQ ID NO: 253367 - DNA, 20 bp, Artificial Sequence
  Description of Artificial Sequence: Synthetic oligonucleotide
  Target: LAMA2; (-) strand; PAM type: YTN; PAM sequence: TTG
agaaaagggagagaactaat

SEQ ID NO: 253368 - DNA, 20 bp, Artificial Sequence
  Description of Artificial Sequence: Synthetic oligonucleotide
  Target: LAMA2; (-) strand; PAM type: YTN; PAM sequence: TTA
aggatgttgagaaaagggag

SEQ ID NO: 253369 - DNA, 20 bp, Artificial Sequence
  Description of Artificial Sequence: Synthetic oligonucleotide
  Target: LAMA2; (-) strand; PAM type: YTN; PAM sequence: TTC
ataagggggtagaaattaag

SEQ ID NO: 253370 - DNA, 20 bp, Artificial Sequence
  Description of Artificial Sequence: Synthetic oligonucleotide
  Target: LAMA2; (-) strand; PAM type: YTN; PAM sequence: CTA
catattcataagggggtaga

SEQ ID NO: 253371 - DNA, 20 bp, Artificial Sequence
  Description of Artificial Sequence: Synthetic oligonucleotide
  Target: LAMA2; (-) strand; PAM type: YTN; PAM sequence: CTG
gtgaagctacatattcataa

SEQ ID NO: 253372 - DNA, 20 bp, Artificial Sequence
  Description of Artificial Sequence: Synthetic oligonucleotide
  Target: LAMA2; (-) strand; PAM type: YTN; PAM sequence: TTA
aaagctggtgaagctacata

SEQ ID NO: 253373 - DNA, 20 bp, Artificial Sequence
  Description of Artificial Sequence: Synthetic oligonucleotide
  Target: LAMA2; (-) strand; PAM type: YTN; PAM sequence: TTT
aaaagctggtgaagctacat

SEQ ID NO: 253374 - DNA, 20 bp, Artificial Sequence
  Description of Artificial Sequence: Synthetic oligonucleotide
  Target: LAMA2; (-) strand; PAM type: YTN; PAM sequence: TTT
taaaagctggtgaagctaca

SEQ ID NO: 253375 - DNA, 20 bp, Artificial Sequence
  Description of Artificial Sequence: Synthetic oligonucleotide
  Target: LAMA2; (-) strand; PAM type: YTN; PAM sequence: TTT
ttaaaagctggtgaagctac

SEQ ID NO: 253376 - DNA, 20 bp, Artificial Sequence
  Description of Artificial Sequence: Synthetic oligonucleotide
  Target: LAMA2; (-) strand; PAM type: YTN; PAM sequence: CTG
taatatacatttttaaaagc

SEQ ID NO: 253377 - DNA, 20 bp, Artificial Sequence
  Description of Artificial Sequence: Synthetic oligonucleotide
  Target: LAMA2; (-) strand; PAM type: YTN; PAM sequence: TTC
tgtaatatacatttttaaaa

SEQ ID NO: 253378 - DNA, 20 bp, Artificial Sequence
  Description of Artificial Sequence: Synthetic oligonucleotide
  Target: LAMA2; (-) strand; PAM type: YTN; PAM sequence: CTT
ctgtaatatacatttttaaa

SEQ ID NO: 253379 - DNA, 20 bp, Artificial Sequence
  Description of Artificial Sequence: Synthetic oligonucleotide
  Target: LAMA2; (-) strand; PAM type: YTN; PAM sequence: TTC
cttctgtaatatacattttt

SEQ ID NO: 253380 - DNA, 20 bp, Artificial Sequence
  Description of Artificial Sequence: Synthetic oligonucleotide
  Target: LAMA2; (-) strand; PAM type: YTN; PAM sequence: TTT
ccttctgtaatatacatttt

SEQ ID NO: 253381 - DNA, 20 bp, Artificial Sequence
  Description of Artificial Sequence: Synthetic oligonucleotide
  Target: LAMA2; (-) strand; PAM type: YTN; PAM sequence: TTA
tagaagtgatttccttctgt

SEQ ID NO: 253382 - DNA, 20 bp, Artificial Sequence
  Description of Artificial Sequence: Synthetic oligonucleotide
  Target: LAMA2; (-) strand; PAM type: YTN; PAM sequence: TTC
attatagaagtgatttcctt

SEQ ID NO: 253383 - DNA, 20 bp, Artificial Sequence
  Description of Artificial Sequence: Synthetic oligonucleotide
  Target: LAMA2; (-) strand; PAM type: YTN; PAM sequence: CTA
gattcattatagaagtgatt

SEQ ID NO: 253384 - DNA, 20 bp, Artificial Sequence
  Description of Artificial Sequence: Synthetic oligonucleotide
  Target: LAMA2; (-) strand; PAM type: YTN; PAM sequence: CTC
cctagattcattatagaagt

SEQ ID NO: 253385 - DNA, 20 bp, Artificial Sequence
  Description of Artificial Sequence: Synthetic oligonucleotide
  Target: LAMA2; (-) strand; PAM type: YTN; PAM sequence: TTG
cctccctagattcattatag

SEQ ID NO: 253386 - DNA, 20 bp, Artificial Sequence
  Description of Artificial Sequence: Synthetic oligonucleotide
  Target: LAMA2; (-) strand; PAM type: YTN; PAM sequence: TTT
gcctccctagattcattata

SEQ ID NO: 253387 - DNA, 20 bp, Artificial Sequence
  Description of Artificial Sequence: Synthetic oligonucleotide
  Target: LAMA2; (-) strand; PAM type: YTN; PAM sequence: TTT
tgcctccctagattcattat

SEQ ID NO: 253388 - DNA, 20 bp, Artificial Sequence
  Description of Artificial Sequence: Synthetic oligonucleotide
  Target: LAMA2; (-) strand; PAM type: YTN; PAM sequence: TTT
ttgcctccctagattcatta

SEQ ID NO: 253389 - DNA, 20 bp, Artificial Sequence
  Description of Artificial Sequence: Synthetic oligonucleotide
  Target: LAMA2; (-) strand; PAM type: YTN; PAM sequence: TTT
tttgcctccctagattcatt

SEQ ID NO: 253390 - DNA, 20 bp, Artificial Sequence
  Description of Artificial Sequence: Synthetic oligonucleotide
  Target: LAMA2; (-) strand; PAM type: YTN; PAM sequence: TTA
cattttttgcctccctagat

SEQ ID NO: 253391 - DNA, 20 bp, Artificial Sequence
  Description of Artificial Sequence: Synthetic oligonucleotide
  Target: LAMA2; (-) strand; PAM type: YTN; PAM sequence: CTC
cccattacattttttgcctc

SEQ ID NO: 253392 - DNA, 20 bp, Artificial Sequence
  Description of Artificial Sequence: Synthetic oligonucleotide
  Target: LAMA2; (-) strand; PAM type: YTN; PAM sequence: TTC
tccccattacattttttgcc

SEQ ID NO: 253393 - DNA, 20 bp, Artificial Sequence
  Description of Artificial Sequence: Synthetic oligonucleotide
  Target: LAMA2; (-) strand; PAM type: YTN; PAM sequence: TTT
ctccccattacattttttgc

SEQ ID NO: 253394 - DNA, 20 bp, Artificial Sequence
  Description of Artificial Sequence: Synthetic oligonucleotide
  Target: LAMA2; (-) strand; PAM type: YTN; PAM sequence: TTC
ccatttctccccattacatt

SEQ ID NO: 253395 - DNA, 20 bp, Artificial Sequence
  Description of Artificial Sequence: Synthetic oligonucleotide
  Target: LAMA2; (-) strand; PAM type: YTN; PAM sequence: CTT
cccatttctccccattacat

SEQ ID NO: 253396 - DNA, 20 bp, Artificial Sequence
  Description of Artificial Sequence: Synthetic oligonucleotide
  Target: LAMA2; (-) strand; PAM type: YTN; PAM sequence: TTA
aatcccttcccatttctccc

SEQ ID NO: 253397 - DNA, 20 bp, Artificial Sequence
  Description of Artificial Sequence: Synthetic oligonucleotide
  Target: LAMA2; (-) strand; PAM type: YTN; PAM sequence: CTC
ccaattaaatcccttcccat

SEQ ID NO: 253398 - DNA, 20 bp, Artificial Sequence
  Description of Artificial Sequence: Synthetic oligonucleotide
  Target: LAMA2; (-) strand; PAM type: YTN; PAM sequence: TTC
tcccaattaaatcccttccc

SEQ ID NO: 253399 - DNA, 20 bp, Artificial Sequence
  Description of Artificial Sequence: Synthetic oligonucleotide
  Target: LAMA2; (-) strand; PAM type: YTN; PAM sequence: TTT
ctcccaattaaatcccttcc

SEQ ID NO: 253400 - DNA, 20 bp, Artificial Sequence
  Description of Artificial Sequence: Synthetic oligonucleotide
  Target: LAMA2; (-) strand; PAM type: YTN; PAM sequence: TTC
catttctcccaattaaatcc

SEQ ID NO: 253401 - DNA, 20 bp, Artificial Sequence
  Description of Artificial Sequence: Synthetic oligonucleotide
  Target: LAMA2; (-) strand; PAM type: YTN; PAM sequence: TTT
ccatttctcccaattaaatc

SEQ ID NO: 253402 - DNA, 20 bp, Artificial Sequence
  Description of Artificial Sequence: Synthetic oligonucleotide
  Target: LAMA2; (-) strand; PAM type: YTN; PAM sequence: TTC
cgtttccatttctcccaatt

SEQ ID NO: 253403 - DNA, 20 bp, Artificial Sequence
  Description of Artificial Sequence: Synthetic oligonucleotide
  Target: LAMA2; (-) strand; PAM type: YTN; PAM sequence: CTG
ttccgtttccatttctccca

SEQ ID NO: 253404 - DNA, 20 bp, Artificial Sequence
  Description of Artificial Sequence: Synthetic oligonucleotide
  Target: LAMA2; (-) strand; PAM type: YTN; PAM sequence: CTA
tcctgttccgtttccatttc

SEQ ID NO: 253405 - DNA, 20 bp, Artificial Sequence
  Description of Artificial Sequence: Synthetic oligonucleotide
  Target: LAMA2; (-) strand; PAM type: YTN; PAM sequence: TTC
tatcctgttccgtttccatt

SEQ ID NO: 253406 - DNA, 20 bp, Artificial Sequence
  Description of Artificial Sequence: Synthetic oligonucleotide
  Target: LAMA2; (-) strand; PAM type: YTN; PAM sequence: TTT
ctatcctgttccgtttccat

SEQ ID NO: 253407 - DNA, 20 bp, Artificial Sequence
  Description of Artificial Sequence: Synthetic oligonucleotide
  Target: LAMA2; (-) strand; PAM type: YTN; PAM sequence: TTG
tcaaatttctatcctgttcc

SEQ ID NO: 253408 - DNA, 20 bp, Artificial Sequence
  Description of Artificial Sequence: Synthetic oligonucleotide
  Target: LAMA2; (-) strand; PAM type: YTN; PAM sequence: TTC
aacccccacaaccaacccaa

SEQ ID NO: 253409 - DNA, 20 bp, Artificial Sequence
  Description of Artificial Sequence: Synthetic oligonucleotide
  Target: LAMA2; (-) strand; PAM type: YTN; PAM sequence: TTT
caacccccacaaccaaccca

SEQ ID NO: 253410 - DNA, 20 bp, Artificial Sequence
  Description of Artificial Sequence: Synthetic oligonucleotide
  Target: LAMA2; (-) strand; PAM type: YTN; PAM sequence: TTT
tcaacccccacaaccaaccc

SEQ ID NO: 253411 - DNA, 20 bp, Artificial Sequence
  Description of Artificial Sequence: Synthetic oligonucleotide
  Target: LAMA2; (-) strand; PAM type: YTN; PAM sequence: TTT
ttcaacccccacaaccaacc

SEQ ID NO: 253412 - DNA, 20 bp, Artificial Sequence
  Description of Artificial Sequence: Synthetic oligonucleotide
  Target: LAMA2; (-) strand; PAM type: YTN; PAM sequence: CTC
atttttcaacccccacaacc

SEQ ID NO: 253413 - DNA, 20 bp, Artificial Sequence
  Description of Artificial Sequence: Synthetic oligonucleotide
  Target: LAMA2; (-) strand; PAM type: YTN; PAM sequence: TTC
tcatttttcaacccccacaa

SEQ ID NO: 253414 - DNA, 20 bp, Artificial Sequence
  Description of Artificial Sequence: Synthetic oligonucleotide
  Target: LAMA2; (-) strand; PAM type: YTN; PAM sequence: CTG
tgtccatgtgttctcatttt

SEQ ID NO: 253415 - DNA, 20 bp, Artificial Sequence
  Description of Artificial Sequence: Synthetic oligonucleotide
  Target: LAMA2; (-) strand; PAM type: YTN; PAM sequence: CTC
cctgtgtccatgtgttctca

SEQ ID NO: 253416 - DNA, 20 bp, Artificial Sequence
  Description of Artificial Sequence: Synthetic oligonucleotide
  Target: LAMA2; (-) strand; PAM type: YTN; PAM sequence: TTC
ccctccctgtgtccatgtgt

SEQ ID NO: 253417 - DNA, 20 bp, Artificial Sequence
  Description of Artificial Sequence: Synthetic oligonucleotide
  Target: LAMA2; (-) strand; PAM type: YTN; PAM sequence: CTC
cgacaggccccagtgtataa

SEQ ID NO: 253418 - DNA, 20 bp, Artificial Sequence
  Description of Artificial Sequence: Synthetic oligonucleotide
  Target: LAMA2; (-) strand; PAM type: YTN; PAM sequence: CTA
gccccccaccctccgacagg

SEQ ID NO: 253419 - DNA, 20 bp, Artificial Sequence
  Description of Artificial Sequence: Synthetic oligonucleotide
  Target: LAMA2; (-) strand; PAM type: YTN; PAM sequence: TTC
ccctagccccccaccctccg

SEQ ID NO: 253420 - DNA, 20 bp, Artificial Sequence
  Description of Artificial Sequence: Synthetic oligonucleotide
  Target: LAMA2; (-) strand; PAM type: YTN; PAM sequence: CTT
cccctagccccccaccctcc

SEQ ID NO: 253421 - DNA, 20 bp, Artificial Sequence
  Description of Artificial Sequence: Synthetic oligonucleotide
  Target: LAMA2; (-) strand; PAM type: YTN; PAM sequence: CTA
tccttcccctagccccccac

SEQ ID NO: 253422 - DNA, 20 bp, Artificial Sequence
  Description of Artificial Sequence: Synthetic oligonucleotide
  Target: LAMA2; (-) strand; PAM type: YTN; PAM sequence: CTA
atgctatccttcccctagcc

SEQ ID NO: 253423 - DNA, 20 bp, Artificial Sequence
  Description of Artificial Sequence: Synthetic oligonucleotide
  Target: LAMA2; (-) strand; PAM type: YTN; PAM sequence: CTC
ctaatgctatccttccccta

SEQ ID NO: 253424 - DNA, 20 bp, Artificial Sequence
  Description of Artificial Sequence: Synthetic oligonucleotide
  Target: LAMA2; (-) strand; PAM type: YTN; PAM sequence: TTC
tcctaatgctatccttcccc

SEQ ID NO: 253425 - DNA, 20 bp, Artificial Sequence
  Description of Artificial Sequence: Synthetic oligonucleotide
  Target: LAMA2; (-) strand; PAM type: YTN; PAM sequence: TTT
ctcctaatgctatccttccc

SEQ ID NO: 253426 - DNA, 20 bp, Artificial Sequence
  Description of Artificial Sequence: Synthetic oligonucleotide
  Target: LAMA2; (-) strand; PAM type: YTN; PAM sequence: TTA
gatatttctcctaatgctat

SEQ ID NO: 253427 - DNA, 20 bp, Artificial Sequence
  Description of Artificial Sequence: Synthetic oligonucleotide
  Target: LAMA2; (-) strand; PAM type: YTN; PAM sequence: CTA
cattagatatttctcctaat

SEQ ID NO: 253428 - DNA, 20 bp, Artificial Sequence
  Description of Artificial Sequence: Synthetic oligonucleotide
  Target: LAMA2; (-) strand; PAM type: YTN; PAM sequence: CTG
aacccatcaacccatcatct

SEQ ID NO: 253429 - DNA, 20 bp, Artificial Sequence
  Description of Artificial Sequence: Synthetic oligonucleotide
  Target: LAMA2; (-) strand; PAM type: YTN; PAM sequence: TTC
ctgaacccatcaacccatca

SEQ ID NO: 253430 - DNA, 20 bp, Artificial Sequence
  Description of Artificial Sequence: Synthetic oligonucleotide
  Target: LAMA2; (-) strand; PAM type: YTN; PAM sequence: TTT
cctgaacccatcaacccatc

SEQ ID NO: 253431 - DNA, 20 bp, Artificial Sequence
  Description of Artificial Sequence: Synthetic oligonucleotide
  Target: LAMA2; (-) strand; PAM type: YTN; PAM sequence: TTA
cataggtatacacgtgccat

SEQ ID NO: 253432 - DNA, 20 bp, Artificial Sequence
  Description of Artificial Sequence: Synthetic oligonucleotide
  Target: LAMA2; (-) strand; PAM type: YTN; PAM sequence: TTG
ttacataggtatacacgtgc

SEQ ID NO: 253433 - DNA, 20 bp, Artificial Sequence
  Description of Artificial Sequence: Synthetic oligonucleotide
  Target: LAMA2; (-) strand; PAM type: YTN; PAM sequence: TTT
gttacataggtatacacgtg

SEQ ID NO: 253434 - DNA, 20 bp, Artificial Sequence
  Description of Artificial Sequence: Synthetic oligonucleotide
  Target: LAMA2; (-) strand; PAM type: YTN; PAM sequence: CTG
ggatacatgtgcagaacgtg

SEQ ID NO: 253435 - DNA, 20 bp, Artificial Sequence
  Description of Artificial Sequence: Synthetic oligonucleotide
  Target: LAMA2; (-) strand; PAM type: YTN; PAM sequence: TTC
tgggatacatgtgcagaacg

SEQ ID NO: 253436 - DNA, 20 bp, Artificial Sequence
  Description of Artificial Sequence: Synthetic oligonucleotide
  Target: LAMA2; (-) strand; PAM type: YTN; PAM sequence: TTA
agttctgggatacatgtgca

SEQ ID NO: 253437 - DNA, 20 bp, Artificial Sequence
  Description of Artificial Sequence: Synthetic oligonucleotide
  Target: LAMA2; (-) strand; PAM type: YTN; PAM sequence: TTT
aagttctgggatacatgtgc

SEQ ID NO: 253438 - DNA, 20 bp, Artificial Sequence
  Description of Artificial Sequence: Synthetic oligonucleotide
  Target: LAMA2; (-) strand; PAM type: YTN; PAM sequence: CTT
taagttctgggatacatgtg

SEQ ID NO: 253439 - DNA, 20 bp, Artificial Sequence
  Description of Artificial Sequence: Synthetic oligonucleotide
  Target: LAMA2; (-) strand; PAM type: YTN; PAM sequence: TTA
tactttaagttctgggatac

SEQ ID NO: 253440 - DNA, 20 bp, Artificial Sequence
  Description of Artificial Sequence: Synthetic oligonucleotide
  Target: LAMA2; (-) strand; PAM type: YTN; PAM sequence: TTA
ttatactttaagttctggga

SEQ ID NO: 253441 - DNA, 20 bp, Artificial Sequence
  Description of Artificial Sequence: Synthetic oligonucleotide
  Target: LAMA2; (-) strand; PAM type: YTN; PAM sequence: TTA
ttattatactttaagttctg

SEQ ID NO: 253442 - DNA, 20 bp, Artificial Sequence
  Description of Artificial Sequence: Synthetic oligonucleotide
  Target: LAMA2; (-) strand; PAM type: YTN; PAM sequence: TTC
aaaattattattatacttta

SEQ ID NO: 253443 - DNA, 20 bp, Artificial Sequence
  Description of Artificial Sequence: Synthetic oligonucleotide
  Target: LAMA2; (-) strand; PAM type: YTN; PAM sequence: TTT
caaaattattattatacttt

SEQ ID NO: 253444 - DNA, 20 bp, Artificial Sequence
  Description of Artificial Sequence: Synthetic oligonucleotide
  Target: LAMA2; (-) strand; PAM type: YTN; PAM sequence: TTT
tcaaaattattattatactt

SEQ ID NO: 253445 - DNA, 20 bp, Artificial Sequence
  Description of Artificial Sequence: Synthetic oligonucleotide
  Target: LAMA2; (-) strand; PAM type: YTN; PAM sequence: TTG
ttttcaaaattattattata

SEQ ID NO: 253446 - DNA, 20 bp, Artificial Sequence
  Description of Artificial Sequence: Synthetic oligonucleotide
  Target: LAMA2; (-) strand; PAM type: YTN; PAM sequence: TTT
gttttcaaaattattattat

SEQ ID NO: 253447 - DNA, 20 bp, Artificial Sequence
  Description of Artificial Sequence: Synthetic oligonucleotide
  Target: LAMA2; (-) strand; PAM type: YTN; PAM sequence: TTG
aacagtaccaaaaaaagtgt

SEQ ID NO: 253448 - DNA, 20 bp, Artificial Sequence
  Description of Artificial Sequence: Synthetic oligonucleotide
  Target: LAMA2; (-) strand; PAM type: YTN; PAM sequence: TTT
gaacagtaccaaaaaaagtg

SEQ ID NO: 253449 - DNA, 20 bp, Artificial Sequence
  Description of Artificial Sequence: Synthetic oligonucleotide
  Target: LAMA2; (-) strand; PAM type: YTN; PAM sequence: TTA
atttgaacagtaccaaaaaa

SEQ ID NO: 253450 - DNA, 20 bp, Artificial Sequence
  Description of Artificial Sequence: Synthetic oligonucleotide
  Target: LAMA2; (-) strand; PAM type: YTN; PAM sequence: CTT
aatttgaacagtaccaaaaa

SEQ ID NO: 253451 - DNA, 20 bp, Artificial Sequence
  Description of Artificial Sequence: Synthetic oligonucleotide
  Target: LAMA2; (-) strand; PAM type: YTN; PAM sequence: TTC
cccttaatttgaacagtacc

SEQ ID NO: 253452 - DNA, 20 bp, Artificial Sequence
  Description of Artificial Sequence: Synthetic oligonucleotide
  Target: LAMA2; (-) strand; PAM type: YTN; PAM sequence: TTT
ccccttaatttgaacagtac

SEQ ID NO: 253453 - DNA, 20 bp, Artificial Sequence
  Description of Artificial Sequence: Synthetic oligonucleotide
  Target: LAMA2; (-) strand; PAM type: YTN; PAM sequence: CTT
tccccttaatttgaacagta

SEQ ID NO: 253454 - DNA, 20 bp, Artificial Sequence
  Description of Artificial Sequence: Synthetic oligonucleotide
  Target: LAMA2; (-) strand; PAM type: YTN; PAM sequence: CTG
aaaataaaataaaatgaact

SEQ ID NO: 253455 - DNA, 20 bp, Artificial Sequence
  Description of Artificial Sequence: Synthetic oligonucleotide
  Target: LAMA2; (-) strand; PAM type: YTN; PAM sequence: TTA
tatctgaaaataaaataaaa

SEQ ID NO: 253456 - DNA, 20 bp, Artificial Sequence
  Description of Artificial Sequence: Synthetic oligonucleotide
  Target: LAMA2; (-) strand; PAM type: YTN; PAM sequence: TTT
atatctgaaaataaaataaa

SEQ ID NO: 253457 - DNA, 20 bp, Artificial Sequence
  Description of Artificial Sequence: Synthetic oligonucleotide
  Target: LAMA2; (-) strand; PAM type: YTN; PAM sequence: CTT
tatatctgaaaataaaataa

SEQ ID NO: 253458 - DNA, 20 bp, Artificial Sequence
  Description of Artificial Sequence: Synthetic oligonucleotide
  Target: LAMA2; (-) strand; PAM type: YTN; PAM sequence: CTG
atactttatatctgaaaata

SEQ ID NO: 253459 - DNA, 20 bp, Artificial Sequence
  Description of Artificial Sequence: Synthetic oligonucleotide
  Target: LAMA2; (-) strand; PAM type: YTN; PAM sequence: TTA
tgtactgatactttatatct

SEQ ID NO: 253460 - DNA, 20 bp, Artificial Sequence
  Description of Artificial Sequence: Synthetic oligonucleotide
  Target: LAMA2; (-) strand; PAM type: YTN; PAM sequence: TTT
atgtactgatactttatatc

SEQ ID NO: 253461 - DNA, 20 bp, Artificial Sequence
  Description of Artificial Sequence: Synthetic oligonucleotide
  Target: LAMA2; (-) strand; PAM type: YTN; PAM sequence: TTG
aacatcaataatgaacacat

SEQ ID NO: 253462 - DNA, 20 bp, Artificial Sequence
  Description of Artificial Sequence: Synthetic oligonucleotide
  Target: LAMA2; (-) strand; PAM type: YTN; PAM sequence: TTT
gaacatcaataatgaacaca

SEQ ID NO: 253463 - DNA, 20 bp, Artificial Sequence
  Description of Artificial Sequence: Synthetic oligonucleotide
  Target: LAMA2; (-) strand; PAM type: YTN; PAM sequence: CTC
aaatttgaacatcaataatg

SEQ ID NO: 253464 - DNA, 20 bp, Artificial Sequence
  Description of Artificial Sequence: Synthetic oligonucleotide
  Target: LAMA2; (-) strand; PAM type: YTN; PAM sequence: CTC
tcaaatttgaacatcaataa

SEQ ID NO: 253465 - DNA, 20 bp, Artificial Sequence
  Description of Artificial Sequence: Synthetic oligonucleotide
  Target: LAMA2; (-) strand; PAM type: YTN; PAM sequence: CTC
aggatatgaggactctcaaa

SEQ ID NO: 253466 - DNA, 20 bp, Artificial Sequence
  Description of Artificial Sequence: Synthetic oligonucleotide
  Target: LAMA2; (-) strand; PAM type: YTN; PAM sequence: CTG
cctcaggatatgaggactct

SEQ ID NO: 253467 - DNA, 20 bp, Artificial Sequence
  Description of Artificial Sequence: Synthetic oligonucleotide
  Target: LAMA2; (-) strand; PAM type: YTN; PAM sequence: TTC
tgcctcaggatatgaggact

SEQ ID NO: 253468 - DNA, 20 bp, Artificial Sequence
  Description of Artificial Sequence: Synthetic oligonucleotide
  Target: LAMA2; (-) strand; PAM type: YTN; PAM sequence: CTT
ctgcctcaggatatgaggac

SEQ ID NO: 253469 - DNA, 20 bp, Artificial Sequence
  Description of Artificial Sequence: Synthetic oligonucleotide
  Target: LAMA2; (-) strand; PAM type: YTN; PAM sequence: TTC
cttctgcctcaggatatgag

SEQ ID NO: 253470 - DNA, 20 bp, Artificial Sequence
  Description of Artificial Sequence: Synthetic oligonucleotide
  Target: LAMA2; (-) strand; PAM type: YTN; PAM sequence: CTC
cgtggaaatgttccttctgc

SEQ ID NO: 253471 - DNA, 20 bp, Artificial Sequence
  Description of Artificial Sequence: Synthetic oligonucleotide
  Target: LAMA2; (-) strand; PAM type: YTN; PAM sequence: TTA
tgctccgtggaaatgttcct

SEQ ID NO: 253472 - DNA, 20 bp, Artificial Sequence
  Description of Artificial Sequence: Synthetic oligonucleotide
  Target: LAMA2; (-) strand; PAM type: YTN; PAM sequence: TTG
tgttatgctccgtggaaatg

SEQ ID NO: 253473 - DNA, 20 bp, Artificial Sequence
  Description of Artificial Sequence: Synthetic oligonucleotide
  Target: LAMA2; (-) strand; PAM type: YTN; PAM sequence: CTG
aagtaataaaggatatagaa

SEQ ID NO: 253474 - DNA, 20 bp, Artificial Sequence
  Description of Artificial Sequence: Synthetic oligonucleotide
  Target: LAMA2; (-) strand; PAM type: YTN; PAM sequence: TTG
aaaaagaaaacagaagagaa

SEQ ID NO: 253475 - DNA, 20 bp, Artificial Sequence
  Description of Artificial Sequence: Synthetic oligonucleotide
  Target: LAMA2; (-) strand; PAM type: YTN; PAM sequence: TTC
cagttgaaaaagaaaacaga

SEQ ID NO: 253476 - DNA, 20 bp, Artificial Sequence
  Description of Artificial Sequence: Synthetic oligonucleotide
  Target: LAMA2; (-) strand; PAM type: YTN; PAM sequence: TTT
ccagttgaaaaagaaaacag

SEQ ID NO: 253477 - DNA, 20 bp, Artificial Sequence
  Description of Artificial Sequence: Synthetic oligonucleotide
  Target: LAMA2; (-) strand; PAM type: YTN; PAM sequence: TTT
tccagttgaaaaagaaaaca

SEQ ID NO: 253478 - DNA, 20 bp, Artificial Sequence
  Description of Artificial Sequence: Synthetic oligonucleotide
  Target: LAMA2; (-) strand; PAM type: YTN; PAM sequence: CTT
ttccagttgaaaaagaaaac

SEQ ID NO: 253479 - DNA, 20 bp, Artificial Sequence
  Description of Artificial Sequence: Synthetic oligonucleotide
  Target: LAMA2; (-) strand; PAM type: YTN; PAM sequence: TTC
ttttccagttgaaaaagaaa

SEQ ID NO: 253480 - DNA, 20 bp, Artificial Sequence
  Description of Artificial Sequence: Synthetic oligonucleotide
  Target: LAMA2; (-) strand; PAM type: YTN; PAM sequence: CTT
cttttccagttgaaaaagaa

SEQ ID NO: 253481 - DNA, 20 bp, Artificial Sequence
  Description of Artificial Sequence: Synthetic oligonucleotide
  Target: LAMA2; (-) strand; PAM type: YTN; PAM sequence: CTG
gatggtcgagtacaacatca

SEQ ID NO: 253482 - DNA, 20 bp, Artificial Sequence
  Description of Artificial Sequence: Synthetic oligonucleotide
  Target: LAMA2; (-) strand; PAM type: YTN; PAM sequence: TTC
tggatggtcgagtacaacat

SEQ ID NO: 253483 - DNA, 20 bp, Artificial Sequence
  Description of Artificial Sequence: Synthetic oligonucleotide
  Target: LAMA2; (-) strand; PAM type: YTN; PAM sequence: TTT
ctggatggtcgagtacaaca

SEQ ID NO: 253484 - DNA, 20 bp, Artificial Sequence
  Description of Artificial Sequence: Synthetic oligonucleotide
  Target: LAMA2; (-) strand; PAM type: YTN; PAM sequence: CTA
tatttctggatggtcgagta

SEQ ID NO: 253485 - DNA, 20 bp, Artificial Sequence
  Description of Artificial Sequence: Synthetic oligonucleotide
  Target: LAMA2; (-) strand; PAM type: YTN; PAM sequence: TTA
ctatatttctggatggtcga

SEQ ID NO: 253486 - DNA, 20 bp, Artificial Sequence
  Description of Artificial Sequence: Synthetic oligonucleotide
  Target: LAMA2; (-) strand; PAM type: YTN; PAM sequence: TTT
actatatttctggatggtcg

SEQ ID NO: 253487 - DNA, 20 bp, Artificial Sequence
  Description of Artificial Sequence: Synthetic oligonucleotide
  Target: LAMA2; (-) strand; PAM type: YTN; PAM sequence: TTA
tttactatatttctggatgg

SEQ ID NO: 253488 - DNA, 20 bp, Artificial Sequence
  Description of Artificial Sequence: Synthetic oligonucleotide
  Target: LAMA2; (-) strand; PAM type: YTN; PAM sequence: TTG
tgggttatttactatatttc

SEQ ID NO: 253489 - DNA, 20 bp, Artificial Sequence
  Description of Artificial Sequence: Synthetic oligonucleotide
  Target: LAMA2; (-) strand; PAM type: YTN; PAM sequence: CTT
gtgggttatttactatattt

SEQ ID NO: 253490 - DNA, 20 bp, Artificial Sequence
  Description of Artificial Sequence: Synthetic oligonucleotide
  Target: LAMA2; (-) strand; PAM type: YTN; PAM sequence: TTG
catcttgtgggttatttact

SEQ ID NO: 253491 - DNA, 20 bp, Artificial Sequence
  Description of Artificial Sequence: Synthetic oligonucleotide
  Target: LAMA2; (-) strand; PAM type: YTN; PAM sequence: CTC
cagtgaaattgcatcttgtg

SEQ ID NO: 253492 - DNA, 20 bp, Artificial Sequence
  Description of Artificial Sequence: Synthetic oligonucleotide
  Target: LAMA2; (-) strand; PAM type: YTN; PAM sequence: TTA
tgatcaccctccagtgaaat

SEQ ID NO: 253493 - DNA, 20 bp, Artificial Sequence
  Description of Artificial Sequence: Synthetic oligonucleotide
  Target: LAMA2; (-) strand; PAM type: YTN; PAM sequence: CTT
atgatcaccctccagtgaaa

SEQ ID NO: 253494 - DNA, 20 bp, Artificial Sequence
  Description of Artificial Sequence: Synthetic oligonucleotide
  Target: LAMA2; (-) strand; PAM type: YTN; PAM sequence: CTA
agagcttatgatcaccctcc

SEQ ID NO: 253495 - DNA, 20 bp, Artificial Sequence
  Description of Artificial Sequence: Synthetic oligonucleotide
  Target: LAMA2; (-) strand; PAM type: YTN; PAM sequence: CTC
taagagcttatgatcaccct

SEQ ID NO: 253496 - DNA, 20 bp, Artificial Sequence
  Description of Artificial Sequence: Synthetic oligonucleotide
  Target: LAMA2; (-) strand; PAM type: YTN; PAM sequence: CTG
ccctctaagagcttatgatc

SEQ ID NO: 253497 - DNA, 20 bp, Artificial Sequence
  Description of Artificial Sequence: Synthetic oligonucleotide
  Target: LAMA2; (-) strand; PAM type: YTN; PAM sequence: CTG
ctgccctctaagagcttatg

SEQ ID NO: 253498 - DNA, 20 bp, Artificial Sequence
  Description of Artificial Sequence: Synthetic oligonucleotide
  Target: LAMA2; (-) strand; PAM type: YTN; PAM sequence: CTA
caaaatggatgagatgcaaa

SEQ ID NO: 253499 - DNA, 20 bp, Artificial Sequence
  Description of Artificial Sequence: Synthetic oligonucleotide
  Target: LAMA2; (-) strand; PAM type: YTN; PAM sequence: TTA
ctacaaaatggatgagatgc

SEQ ID NO: 253500 - DNA, 20 bp, Artificial Sequence
  Description of Artificial Sequence: Synthetic oligonucleotide
  Target: LAMA2; (-) strand; PAM type: YTN; PAM sequence: CTG
tggggattactacaaaatgg

SEQ ID NO: 253501 - DNA, 20 bp, Artificial Sequence
  Description of Artificial Sequence: Synthetic oligonucleotide
  Target: LAMA2; (-) strand; PAM type: YTN; PAM sequence: TTC
catctgtggggattactaca

SEQ ID NO: 253502 - DNA, 20 bp, Artificial Sequence
  Description of Artificial Sequence: Synthetic oligonucleotide
  Target: LAMA2; (-) strand; PAM type: YTN; PAM sequence: TTT
ccatctgtggggattactac

SEQ ID NO: 253503 - DNA, 20 bp, Artificial Sequence
  Description of Artificial Sequence: Synthetic oligonucleotide
  Target: LAMA2; (-) strand; PAM type: YTN; PAM sequence: TTT
tccatctgtggggattacta

SEQ ID NO: 253504 - DNA, 20 bp, Artificial Sequence
  Description of Artificial Sequence: Synthetic oligonucleotide
  Target: LAMA2; (-) strand; PAM type: YTN; PAM sequence: TTA
agttttccatctgtggggat

SEQ ID NO: 253505 - DNA, 20 bp, Artificial Sequence
  Description of Artificial Sequence: Synthetic oligonucleotide
  Target: LAMA2; (-) strand; PAM type: YTN; PAM sequence: TTA
attaagttttccatctgtgg

SEQ ID NO: 253506 - DNA, 20 bp, Artificial Sequence
  Description of Artificial Sequence: Synthetic oligonucleotide
  Target: LAMA2; (-) strand; PAM type: YTN; PAM sequence: CTT
aattaagttttccatctgtg

SEQ ID NO: 253507 - DNA, 20 bp, Artificial Sequence
  Description of Artificial Sequence: Synthetic oligonucleotide
  Target: LAMA2; (-) strand; PAM type: YTN; PAM sequence: TTC
cccatcatccttaattaagt

SEQ ID NO: 253508 - DNA, 20 bp, Artificial Sequence
  Description of Artificial Sequence: Synthetic oligonucleotide
  Target: LAMA2; (-) strand; PAM type: YTN; PAM sequence: CTA
agttccccatcatccttaat

SEQ ID NO: 253509 - DNA, 20 bp, Artificial Sequence
  Description of Artificial Sequence: Synthetic oligonucleotide
  Target: LAMA2; (-) strand; PAM type: YTN; PAM sequence: CTC
taagttccccatcatcctta

SEQ ID NO: 253510 - DNA, 20 bp, Artificial Sequence
  Description of Artificial Sequence: Synthetic oligonucleotide
  Target: LAMA2; (-) strand; PAM type: YTN; PAM sequence: CTG
ctctaagttccccatcatcc

SEQ ID NO: 253511 - DNA, 20 bp, Artificial Sequence
  Description of Artificial Sequence: Synthetic oligonucleotide
  Target: LAMA2; (-) strand; PAM type: YTN; PAM sequence: CTG
tgtcagtgcctgctctaagt

SEQ ID NO: 253512 - DNA, 20 bp, Artificial Sequence
  Description of Artificial Sequence: Synthetic oligonucleotide
  Target: LAMA2; (-) strand; PAM type: YTN; PAM sequence: TTC
cctgtgtcagtgcctgctct

SEQ ID NO: 253513 - DNA, 20 bp, Artificial Sequence
  Description of Artificial Sequence: Synthetic oligonucleotide
  Target: LAMA2; (-) strand; PAM type: YTN; PAM sequence: TTA
gattccctgtgtcagtgcct

SEQ ID NO: 253514 - DNA, 20 bp, Artificial Sequence
  Description of Artificial Sequence: Synthetic oligonucleotide
  Target: LAMA2; (-) strand; PAM type: YTN; PAM sequence: CTT
agattccctgtgtcagtgcc

SEQ ID NO: 253515 - DNA, 20 bp, Artificial Sequence
  Description of Artificial Sequence: Synthetic oligonucleotide
  Target: LAMA2; (-) strand; PAM type: YTN; PAM sequence: TTA
gtcttagattccctgtgtca

SEQ ID NO: 253516 - DNA, 20 bp, Artificial Sequence
  Description of Artificial Sequence: Synthetic oligonucleotide
  Target: LAMA2; (-) strand; PAM type: YTN; PAM sequence: TTT
agtcttagattccctgtgtc

SEQ ID NO: 253517 - DNA, 20 bp, Artificial Sequence
  Description of Artificial Sequence: Synthetic oligonucleotide
  Target: LAMA2; (-) strand; PAM type: YTN; PAM sequence: TTT
tagtcttagattccctgtgt

SEQ ID NO: 253518 - DNA, 20 bp, Artificial Sequence
  Description of Artificial Sequence: Synthetic oligonucleotide
  Target: LAMA2; (-) strand; PAM type: YTN; PAM sequence: TTA
aaacagggtattttagtctt

SEQ ID NO: 253519 - DNA, 20 bp, Artificial Sequence
  Description of Artificial Sequence: Synthetic oligonucleotide
  Target: LAMA2; (-) strand; PAM type: YTN; PAM sequence: CTG
attaaaacagggtattttag

SEQ ID NO: 253520 - DNA, 20 bp, Artificial Sequence
  Description of Artificial Sequence: Synthetic oligonucleotide
  Target: LAMA2; (-) strand; PAM type: YTN; PAM sequence: TTC
tgattaaaacagggtatttt

SEQ ID NO: 253521 - DNA, 20 bp, Artificial Sequence
  Description of Artificial Sequence: Synthetic oligonucleotide
  Target: LAMA2; (-) strand; PAM type: YTN; PAM sequence: CTG
aattctgattaaaacagggt

SEQ ID NO: 253522 - DNA, 20 bp, Artificial Sequence
  Description of Artificial Sequence: Synthetic oligonucleotide
  Target: LAMA2; (-) strand; PAM type: YTN; PAM sequence: TTA
tataaaaactgaattctgat

SEQ ID NO: 253523 - DNA, 20 bp, Artificial Sequence
  Description of Artificial Sequence: Synthetic oligonucleotide
  Target: LAMA2; (-) strand; PAM type: YTN; PAM sequence: TTA
ttatataaaaactgaattct

SEQ ID NO: 253524 - DNA, 20 bp, Artificial Sequence
  Description of Artificial Sequence: Synthetic oligonucleotide
  Target: LAMA2; (-) strand; PAM type: YTN; PAM sequence: TTT
attatataaaaactgaattc

SEQ ID NO: 253525 - DNA, 20 bp, Artificial Sequence
  Description of Artificial Sequence: Synthetic oligonucleotide
  Target: LAMA2; (-) strand; PAM type: YTN; PAM sequence: CTT
tattatataaaaactgaatt

SEQ ID NO: 253526 - DNA, 20 bp, Artificial Sequence
  Description of Artificial Sequence: Synthetic oligonucleotide
  Target: LAMA2; (-) strand; PAM type: YTN; PAM sequence: TTA
aaatgtgaaacactttatta

SEQ ID NO: 253527 - DNA, 20 bp, Artificial Sequence
  Description of Artificial Sequence: Synthetic oligonucleotide
  Target: LAMA2; (-) strand; PAM type: YTN; PAM sequence: TTT
aaaatgtgaaacactttatt

SEQ ID NO: 253528 - DNA, 20 bp, Artificial Sequence
  Description of Artificial Sequence: Synthetic oligonucleotide
  Target: LAMA2; (-) strand; PAM type: YTN; PAM sequence: TTG
tttaaaatgtgaaacacttt

SEQ ID NO: 253529 - DNA, 20 bp, Artificial Sequence
  Description of Artificial Sequence: Synthetic oligonucleotide
  Target: LAMA2; (-) strand; PAM type: YTN; PAM sequence: CTT
gtttaaaatgtgaaacactt

SEQ ID NO: 253530 - DNA, 20 bp, Artificial Sequence
  Description of Artificial Sequence: Synthetic oligonucleotide
  Target: LAMA2; (-) strand; PAM type: YTN; PAM sequence: TTC
cttgtttaaaatgtgaaaca

SEQ ID NO: 253531 - DNA, 20 bp, Artificial Sequence
  Description of Artificial Sequence: Synthetic oligonucleotide
  Target: LAMA2; (-) strand; PAM type: YTN; PAM sequence: TTC
attccttgtttaaaatgtga

SEQ ID NO: 253532 - DNA, 20 bp, Artificial Sequence
  Description of Artificial Sequence: Synthetic oligonucleotide
  Target: LAMA2; (-) strand; PAM type: YTN; PAM sequence: TTT
cattccttgtttaaaatgtg

SEQ ID NO: 253533 - DNA, 20 bp, Artificial Sequence
  Description of Artificial Sequence: Synthetic oligonucleotide
  Target: LAMA2; (-) strand; PAM type: YTN; PAM sequence: TTT
tcattccttgtttaaaatgt

SEQ ID NO: 253534 - DNA, 20 bp, Artificial Sequence
  Description of Artificial Sequence: Synthetic oligonucleotide
  Target: LAMA2; (-) strand; PAM type: YTN; PAM sequence: TTT
ttcattccttgtttaaaatg

SEQ ID NO: 253535 - DNA, 20 bp, Artificial Sequence
  Description of Artificial Sequence: Synthetic oligonucleotide
  Target: LAMA2; (-) strand; PAM type: YTN; PAM sequence: TTG
tatttttcattccttgttta

SEQ ID NO: 253536 - DNA, 20 bp, Artificial Sequence
  Description of Artificial Sequence: Synthetic oligonucleotide
  Target: LAMA2; (-) strand; PAM type: YTN; PAM sequence: CTT
gtatttttcattccttgttt

SEQ ID NO: 253537 - DNA, 20 bp, Artificial Sequence
  Description of Artificial Sequence: Synthetic oligonucleotide
  Target: LAMA2; (-) strand; PAM type: YTN; PAM sequence: TTG
cttgtatttttcattccttg

SEQ ID NO: 253538 - DNA, 20 bp, Artificial Sequence
  Description of Artificial Sequence: Synthetic oligonucleotide
  Target: LAMA2; (-) strand; PAM type: YTN; PAM sequence: TTT
gcttgtatttttcattcctt

SEQ ID NO: 253539 - DNA, 20 bp, Artificial Sequence
  Description of Artificial Sequence: Synthetic oligonucleotide
  Target: LAMA2; (-) strand; PAM type: YTN; PAM sequence: CTT
tgcttgtatttttcattcct

SEQ ID NO: 253540 - DNA, 20 bp, Artificial Sequence
  Description of Artificial Sequence: Synthetic oligonucleotide
  Target: LAMA2; (-) strand; PAM type: YTN; PAM sequence: CTG
taactttgcttgtatttttc

SEQ ID NO: 253541 - DNA, 20 bp, Artificial Sequence
  Description of Artificial Sequence: Synthetic oligonucleotide
  Target: LAMA2; (-) strand; PAM type: YTN; PAM sequence: TTC
tgtaactttgcttgtatttt

SEQ ID NO: 253542 - DNA, 20 bp, Artificial Sequence
  Description of Artificial Sequence: Synthetic oligonucleotide
  Target: LAMA2; (-) strand; PAM type: YTN; PAM sequence: CTT
ctgtaactttgcttgtattt

SEQ ID NO: 253543 - DNA, 20 bp, Artificial Sequence
  Description of Artificial Sequence: Synthetic oligonucleotide
  Target: LAMA2; (-) strand; PAM type: YTN; PAM sequence: TTC
ttctgtaactttgcttgtat

SEQ ID NO: 253544 - DNA, 20 bp, Artificial Sequence
  Description of Artificial Sequence: Synthetic oligonucleotide
  Target: LAMA2; (-) strand; PAM type: YTN; PAM sequence: TTA
tggcattcttctgtaacttt

SEQ ID NO: 253545 - DNA, 20 bp, Artificial Sequence
  Description of Artificial Sequence: Synthetic oligonucleotide
  Target: LAMA2; (-) strand; PAM type: YTN; PAM sequence: TTT
atggcattcttctgtaactt

SEQ ID NO: 253546 - DNA, 20 bp, Artificial Sequence
  Description of Artificial Sequence: Synthetic oligonucleotide
  Target: LAMA2; (-) strand; PAM type: YTN; PAM sequence: TTT
tatggcattcttctgtaact

SEQ ID NO: 253547 - DNA, 20 bp, Artificial Sequence
  Description of Artificial Sequence: Synthetic oligonucleotide
  Target: LAMA2; (-) strand; PAM type: YTN; PAM sequence: TTA
ttttatggcattcttctgta

SEQ ID NO: 253548 - DNA, 20 bp, Artificial Sequence
  Description of Artificial Sequence: Synthetic oligonucleotide
  Target: LAMA2; (-) strand; PAM type: YTN; PAM sequence: CTT
attttatggcattcttctgt

SEQ ID NO: 253549 - DNA, 20 bp, Artificial Sequence
  Description of Artificial Sequence: Synthetic oligonucleotide
  Target: LAMA2; (-) strand; PAM type: YTN; PAM sequence: TTG
atagcttattttatggcatt

SEQ ID NO: 253550 - DNA, 20 bp, Artificial Sequence
  Description of Artificial Sequence: Synthetic oligonucleotide
  Target: LAMA2; (-) strand; PAM type: YTN; PAM sequence: CTT
gatagcttattttatggcat

SEQ ID NO: 253551 - DNA, 20 bp, Artificial Sequence
  Description of Artificial Sequence: Synthetic oligonucleotide
  Target: LAMA2; (-) strand; PAM type: YTN; PAM sequence: TTC
ttgatagcttattttatggc

SEQ ID NO: 253552 - DNA, 20 bp, Artificial Sequence
  Description of Artificial Sequence: Synthetic oligonucleotide
  Target: LAMA2; (-) strand; PAM type: YTN; PAM sequence: CTC
acattcttgatagcttattt

SEQ ID NO: 253553 - DNA, 20 bp, Artificial Sequence
  Description of Artificial Sequence: Synthetic oligonucleotide
  Target: LAMA2; (-) strand; PAM type: YTN; PAM sequence: TTC
tcacattcttgatagcttat

SEQ ID NO: 253554 - DNA, 20 bp, Artificial Sequence
  Description of Artificial Sequence: Synthetic oligonucleotide
  Target: LAMA2; (-) strand; PAM type: YTN; PAM sequence: TTT
ctcacattcttgatagctta

SEQ ID NO: 253555 - DNA, 20 bp, Artificial Sequence
  Description of Artificial Sequence: Synthetic oligonucleotide
  Target: LAMA2; (-) strand; PAM type: YTN; PAM sequence: TTA
tttctcacattcttgatagc

SEQ ID NO: 253556 - DNA, 20 bp, Artificial Sequence
  Description of Artificial Sequence: Synthetic oligonucleotide
  Target: LAMA2; (-) strand; PAM type: YTN; PAM sequence: TTT
atttctcacattcttgatag

SEQ ID NO: 253557 - DNA, 20 bp, Artificial Sequence
  Description of Artificial Sequence: Synthetic oligonucleotide
  Target: LAMA2; (-) strand; PAM type: YTN; PAM sequence: TTA
tgatttatttctcacattct

SEQ ID NO: 253558 - DNA, 20 bp, Artificial Sequence
  Description of Artificial Sequence: Synthetic oligonucleotide
  Target: LAMA2; (-) strand; PAM type: YTN; PAM sequence: TTT
atgatttatttctcacattc

SEQ ID NO: 253559 - DNA, 20 bp, Artificial Sequence
  Description of Artificial Sequence: Synthetic oligonucleotide
  Target: LAMA2; (-) strand; PAM type: YTN; PAM sequence: TTA
cacaaaaagtttatgattta

SEQ ID NO: 253560 - DNA, 20 bp, Artificial Sequence
  Description of Artificial Sequence: Synthetic oligonucleotide
  Target: LAMA2; (-) strand; PAM type: YTN; PAM sequence: TTT
acacaaaaagtttatgattt

SEQ ID NO: 253561 - DNA, 20 bp, Artificial Sequence
  Description of Artificial Sequence: Synthetic oligonucleotide
  Target: LAMA2; (-) strand; PAM type: YTN; PAM sequence: CTC
aaatttacacaaaaagttta

SEQ ID NO: 253562 - DNA, 20 bp, Artificial Sequence
  Description of Artificial Sequence: Synthetic oligonucleotide
  Target: LAMA2; (-) strand; PAM type: YTN; PAM sequence: TTC
tcaaatttacacaaaaagtt

SEQ ID NO: 253563 - DNA, 20 bp, Artificial Sequence
  Description of Artificial Sequence: Synthetic oligonucleotide
  Target: LAMA2; (-) strand; PAM type: YTN; PAM sequence: TTT
ctcaaatttacacaaaaagt

SEQ ID NO: 253564 - DNA, 20 bp, Artificial Sequence
  Description of Artificial Sequence: Synthetic oligonucleotide
  Target: LAMA2; (-) strand; PAM type: YTN; PAM sequence: CTT
tctcaaatttacacaaaaag

SEQ ID NO: 253565 - DNA, 20 bp, Artificial Sequence
  Description of Artificial Sequence: Synthetic oligonucleotide
  Target: LAMA2; (-) strand; PAM type: YTN; PAM sequence: TTA
tgctttctcaaatttacaca

SEQ ID NO: 253566 - DNA, 20 bp, Artificial Sequence
  Description of Artificial Sequence: Synthetic oligonucleotide
  Target: LAMA2; (-) strand; PAM type: YTN; PAM sequence: CTA
ttatgctttctcaaatttac

SEQ ID NO: 253567 - DNA, 20 bp, Artificial Sequence
  Description of Artificial Sequence: Synthetic oligonucleotide
  Target: LAMA2; (-) strand; PAM type: YTN; PAM sequence: CTC
catcctattatgctttctca

SEQ ID NO: 253568 - DNA, 20 bp, Artificial Sequence
  Description of Artificial Sequence: Synthetic oligonucleotide
  Target: LAMA2; (-) strand; PAM type: YTN; PAM sequence: TTC
ctccatcctattatgctttc

SEQ ID NO: 253569 - DNA, 20 bp, Artificial Sequence
  Description of Artificial Sequence: Synthetic oligonucleotide
  Target: LAMA2; (-) strand; PAM type: YTN; PAM sequence: TTT
cctccatcctattatgcttt

SEQ ID NO: 253570 - DNA, 20 bp, Artificial Sequence
  Description of Artificial Sequence: Synthetic oligonucleotide
  Target: LAMA2; (-) strand; PAM type: YTN; PAM sequence: CTA
aatttcctccatcctattat

SEQ ID NO: 253571 - DNA, 20 bp, Artificial Sequence
  Description of Artificial Sequence: Synthetic oligonucleotide
  Target: LAMA2; (-) strand; PAM type: YTN; PAM sequence: TTC
atgctaaatttcctccatcc

SEQ ID NO: 253572 - DNA, 20 bp, Artificial Sequence
  Description of Artificial Sequence: Synthetic oligonucleotide
  Target: LAMA2; (-) strand; PAM type: YTN; PAM sequence: TTT
catgctaaatttcctccatc

SEQ ID NO: 253573 - DNA, 20 bp, Artificial Sequence
  Description of Artificial Sequence: Synthetic oligonucleotide
  Target: LAMA2; (-) strand; PAM type: YTN; PAM sequence: TTC
atgtatttcatgctaaattt

SEQ ID NO: 253574 - DNA, 20 bp, Artificial Sequence
  Description of Artificial Sequence: Synthetic oligonucleotide
  Target: LAMA2; (-) strand; PAM type: YTN; PAM sequence: CTA
cacatatataattcatgtat

SEQ ID NO: 253575 - DNA, 20 bp, Artificial Sequence
  Description of Artificial Sequence: Synthetic oligonucleotide
  Target: LAMA2; (-) strand; PAM type: YTN; PAM sequence: TTC
tacacatatataattcatgt

SEQ ID NO: 253576 - DNA, 20 bp, Artificial Sequence
  Description of Artificial Sequence: Synthetic oligonucleotide
  Target: LAMA2; (-) strand; PAM type: YTN; PAM sequence: TTT
ctacacatatataattcatg

SEQ ID NO: 253577 - DNA, 20 bp, Artificial Sequence
  Description of Artificial Sequence: Synthetic oligonucleotide
  Target: LAMA2; (-) strand; PAM type: YTN; PAM sequence: CTA
atttctacacatatataatt

SEQ ID NO: 253578 - DNA, 20 bp, Artificial Sequence
  Description of Artificial Sequence: Synthetic oligonucleotide
  Target: LAMA2; (-) strand; PAM type: YTN; PAM sequence: TTG
accacatacacagctaattt

SEQ ID NO: 253579 - DNA, 20 bp, Artificial Sequence
  Description of Artificial Sequence: Synthetic oligonucleotide
  Target: LAMA2; (-) strand; PAM type: YTN; PAM sequence: TTT
gaccacatacacagctaatt

SEQ ID NO: 253580 - DNA, 20 bp, Artificial Sequence
  Description of Artificial Sequence: Synthetic oligonucleotide
  Target: LAMA2; (-) strand; PAM type: YTN; PAM sequence: TTA
tatttgaccacatacacagc

SEQ ID NO: 253581 - DNA, 20 bp, Artificial Sequence
  Description of Artificial Sequence: Synthetic oligonucleotide
  Target: LAMA2; (-) strand; PAM type: YTN; PAM sequence: CTT
atatttgaccacatacacag

SEQ ID NO: 253582 - DNA, 20 bp, Artificial Sequence
  Description of Artificial Sequence: Synthetic oligonucleotide
  Target: LAMA2; (-) strand; PAM type: YTN; PAM sequence: TTG
gaagaaaggcagcacccaca

SEQ ID NO: 253583 - DNA, 20 bp, Artificial Sequence
  Description of Artificial Sequence: Synthetic oligonucleotide
  Target: LAMA2; (-) strand; PAM type: YTN; PAM sequence: TTT
ggaagaaaggcagcacccac

SEQ ID NO: 253584 - DNA, 20 bp, Artificial Sequence
  Description of Artificial Sequence: Synthetic oligonucleotide
  Target: LAMA2; (-) strand; PAM type: YTN; PAM sequence: TTG
acatgatttggaagaaaggc

SEQ ID NO: 253585 - DNA, 20 bp, Artificial Sequence
  Description of Artificial Sequence: Synthetic oligonucleotide
  Target: LAMA2; (-) strand; PAM type: YTN; PAM sequence: TTT
gacatgatttggaagaaagg

SEQ ID NO: 253586 - DNA, 20 bp, Artificial Sequence
  Description of Artificial Sequence: Synthetic oligonucleotide
  Target: LAMA2; (-) strand; PAM type: YTN; PAM sequence: CTT
tgacatgatttggaagaaag

SEQ ID NO: 253587 - DNA, 20 bp, Artificial Sequence
  Description of Artificial Sequence: Synthetic oligonucleotide
  Target: LAMA2; (-) strand; PAM type: YTN; PAM sequence: TTC
cagaaaatctttgacatgat

SEQ ID NO: 253588 - DNA, 20 bp, Artificial Sequence
  Description of Artificial Sequence: Synthetic oligonucleotide
  Target: LAMA2; (-) strand; PAM type: YTN; PAM sequence: TTT
ccagaaaatctttgacatga

SEQ ID NO: 253589 - DNA, 20 bp, Artificial Sequence
  Description of Artificial Sequence: Synthetic oligonucleotide
  Target: LAMA2; (-) strand; PAM type: YTN; PAM sequence: TTA
acgtcatcatttccagaaaa

SEQ ID NO: 253590 - DNA, 20 bp, Artificial Sequence
  Description of Artificial Sequence: Synthetic oligonucleotide
  Target: LAMA2; (-) strand; PAM type: YTN; PAM sequence: CTT
aacgtcatcatttccagaaa

SEQ ID NO: 253591 - DNA, 20 bp, Artificial Sequence
  Description of Artificial Sequence: Synthetic oligonucleotide
  Target: LAMA2; (-) strand; PAM type: YTN; PAM sequence: TTG
cccttaacgtcatcatttcc

SEQ ID NO: 253592 - DNA, 20 bp, Artificial Sequence
  Description of Artificial Sequence: Synthetic oligonucleotide
  Target: LAMA2; (-) strand; PAM type: YTN; PAM sequence: CTA
attgcccttaacgtcatcat

SEQ ID NO: 253593 - DNA, 20 bp, Artificial Sequence
  Description of Artificial Sequence: Synthetic oligonucleotide
  Target: LAMA2; (-) strand; PAM type: YTN; PAM sequence: TTG
cccatatactaattgccctt

SEQ ID NO: 253594 - DNA, 20 bp, Artificial Sequence
  Description of Artificial Sequence: Synthetic oligonucleotide
  Target: LAMA2; (-) strand; PAM type: YTN; PAM sequence: CTT
gcccatatactaattgccct

SEQ ID NO: 253595 - DNA, 20 bp, Artificial Sequence
  Description of Artificial Sequence: Synthetic oligonucleotide
  Target: LAMA2; (-) strand; PAM type: YTN; PAM sequence: TTC
acttgcccatatactaattg

SEQ ID NO: 253596 - DNA, 20 bp, Artificial Sequence
  Description of Artificial Sequence: Synthetic oligonucleotide
  Target: LAMA2; (-) strand; PAM type: YTN; PAM sequence: CTG
gaatgtgttcacttgcccat

SEQ ID NO: 253597 - DNA, 20 bp, Artificial Sequence
  Description of Artificial Sequence: Synthetic oligonucleotide
  Target: LAMA2; (-) strand; PAM type: YTN; PAM sequence: CTC
tggaatgtgttcacttgccc

SEQ ID NO: 253598 - DNA, 20 bp, Artificial Sequence
  Description of Artificial Sequence: Synthetic oligonucleotide
  Target: LAMA2; (-) strand; PAM type: YTN; PAM sequence: TTC
tctggaatgtgttcacttgc

SEQ ID NO: 253599 - DNA, 20 bp, Artificial Sequence
  Description of Artificial Sequence: Synthetic oligonucleotide
  Target: LAMA2; (-) strand; PAM type: YTN; PAM sequence: TTG
attctctggaatgtgttcac

SEQ ID NO: 253600 - DNA, 20 bp, Artificial Sequence
  Description of Artificial Sequence: Synthetic oligonucleotide
  Target: LAMA2; (-) strand; PAM type: YTN; PAM sequence: TTT
gattctctggaatgtgttca

SEQ ID NO: 253601 - DNA, 20 bp, Artificial Sequence
  Description of Artificial Sequence: Synthetic oligonucleotide
  Target: LAMA2; (-) strand; PAM type: YTN; PAM sequence: TTT
tgattctctggaatgtgttc

SEQ ID NO: 253602 - DNA, 20 bp, Artificial Sequence
  Description of Artificial Sequence: Synthetic oligonucleotide
  Target: LAMA2; (-) strand; PAM type: YTN; PAM sequence: CTA
agagagtacccgatgtcatc

SEQ ID NO: 253603 - DNA, 20 bp, Artificial Sequence
  Description of Artificial Sequence: Synthetic oligonucleotide
  Target: LAMA2; (-) strand; PAM type: YTN; PAM sequence: TTA
gcctaagagagtacccgatg

SEQ ID NO: 253604 - DNA, 20 bp, Artificial Sequence
  Description of Artificial Sequence: Synthetic oligonucleotide
  Target: LAMA2; (-) strand; PAM type: YTN; PAM sequence: CTT
agcctaagagagtacccgat

SEQ ID NO: 253605 - DNA, 20 bp, Artificial Sequence
  Description of Artificial Sequence: Synthetic oligonucleotide
  Target: LAMA2; (-) strand; PAM type: YTN; PAM sequence: CTC
atcatatagtcttagcctaa

SEQ ID NO: 253606 - DNA, 20 bp, Artificial Sequence
  Description of Artificial Sequence: Synthetic oligonucleotide
  Target: LAMA2; (-) strand; PAM type: YTN; PAM sequence: CTG
atataaaaggactcatcata

SEQ ID NO: 253607 - DNA, 20 bp, Artificial Sequence
  Description of Artificial Sequence: Synthetic oligonucleotide
  Target: LAMA2; (-) strand; PAM type: YTN; PAM sequence: CTG
taaaaaaggcagctgatata

SEQ ID NO: 253608 - DNA, 20 bp, Artificial Sequence
  Description of Artificial Sequence: Synthetic oligonucleotide
  Target: LAMA2; (-) strand; PAM type: YTN; PAM sequence: CTC
aaagaaaaaagcacagacag

SEQ ID NO: 253609 - DNA, 20 bp, Artificial Sequence
  Description of Artificial Sequence: Synthetic oligonucleotide
  Target: LAMA2; (-) strand; PAM type: YTN; PAM sequence: TTG
aaatgtgacagtctcaaaga

SEQ ID NO: 253610 - DNA, 20 bp, Artificial Sequence
  Description of Artificial Sequence: Synthetic oligonucleotide
  Target: LAMA2; (-) strand; PAM type: YTN; PAM sequence: CTG
aaatggtaaaataaagcaga

SEQ ID NO: 253611 - DNA, 20 bp, Artificial Sequence
  Description of Artificial Sequence: Synthetic oligonucleotide
  Target: LAMA2; (-) strand; PAM type: YTN; PAM sequence: TTC
tgaaatggtaaaataaagca

SEQ ID NO: 253612 - DNA, 20 bp, Artificial Sequence
  Description of Artificial Sequence: Synthetic oligonucleotide
  Target: LAMA2; (-) strand; PAM type: YTN; PAM sequence: CTT
ctgaaatggtaaaataaagc

SEQ ID NO: 253613 - DNA, 20 bp, Artificial Sequence
  Description of Artificial Sequence: Synthetic oligonucleotide
  Target: LAMA2; (-) strand; PAM type: YTN; PAM sequence: TTC
ttctgaaatggtaaaataaa

SEQ ID NO: 253614 - DNA, 20 bp, Artificial Sequence
  Description of Artificial Sequence: Synthetic oligonucleotide
  Target: LAMA2; (-) strand; PAM type: YTN; PAM sequence: TTT
cttctgaaatggtaaaataa

SEQ ID NO: 253615 - DNA, 20 bp, Artificial Sequence
  Description of Artificial Sequence: Synthetic oligonucleotide
  Target: LAMA2; (-) strand; PAM type: YTN; PAM sequence: TTG
gtgtttcttctgaaatggta

SEQ ID NO: 253616 - DNA, 20 bp, Artificial Sequence
  Description of Artificial Sequence: Synthetic oligonucleotide
  Target: LAMA2; (-) strand; PAM type: YTN; PAM sequence: CTT
ggtgtttcttctgaaatggt

SEQ ID NO: 253617 - DNA, 20 bp, Artificial Sequence
  Description of Artificial Sequence: Synthetic oligonucleotide
  Target: LAMA2; (-) strand; PAM type: YTN; PAM sequence: TTA
gcttggtgtttcttctgaaa

SEQ ID NO: 253618 - DNA, 20 bp, Artificial Sequence
  Description of Artificial Sequence: Synthetic oligonucleotide
  Target: LAMA2; (-) strand; PAM type: YTN; PAM sequence: TTA
gaggaagcattagcttggtg

SEQ ID NO: 253619 - DNA, 20 bp, Artificial Sequence
  Description of Artificial Sequence: Synthetic oligonucleotide
  Target: LAMA2; (-) strand; PAM type: YTN; PAM sequence: TTG
gcaggtatgagattagagga

SEQ ID NO: 253620 - DNA, 20 bp, Artificial Sequence
  Description of Artificial Sequence: Synthetic oligonucleotide
  Target: LAMA2; (-) strand; PAM type: YTN; PAM sequence: TTA
ttggcaggtatgagattaga

SEQ ID NO: 253621 - DNA, 20 bp, Artificial Sequence
  Description of Artificial Sequence: Synthetic oligonucleotide
  Target: LAMA2; (-) strand; PAM type: YTN; PAM sequence: TTA
gtgttattggcaggtatgag

SEQ ID NO: 253622 - DNA, 20 bp, Artificial Sequence
  Description of Artificial Sequence: Synthetic oligonucleotide
  Target: LAMA2; (-) strand; PAM type: YTN; PAM sequence: CTT
agtgttattggcaggtatga

SEQ ID NO: 253623 - DNA, 20 bp, Artificial Sequence
  Description of Artificial Sequence: Synthetic oligonucleotide
  Target: LAMA2; (-) strand; PAM type: YTN; PAM sequence: CTG
accttagtgttattggcagg

SEQ ID NO: 253624 - DNA, 20 bp, Artificial Sequence
  Description of Artificial Sequence: Synthetic oligonucleotide
  Target: LAMA2; (-) strand; PAM type: YTN; PAM sequence: TTG
cactgaccttagtgttattg

SEQ ID NO: 253625 - DNA, 20 bp, Artificial Sequence
  Description of Artificial Sequence: Synthetic oligonucleotide
  Target: LAMA2; (-) strand; PAM type: YTN; PAM sequence: TTT
gcactgaccttagtgttatt

SEQ ID NO: 253626 - DNA, 20 bp, Artificial Sequence
  Description of Artificial Sequence: Synthetic oligonucleotide
  Target: LAMA2; (-) strand; PAM type: YTN; PAM sequence: CTT
tgcactgaccttagtgttat

SEQ ID NO: 253627 - DNA, 20 bp, Artificial Sequence
  Description of Artificial Sequence: Synthetic oligonucleotide
  Target: LAMA2; (-) strand; PAM type: YTN; PAM sequence: CTG
gggctttgcactgaccttag

SEQ ID NO: 253628 - DNA, 20 bp, Artificial Sequence
  Description of Artificial Sequence: Synthetic oligonucleotide
  Target: LAMA2; (-) strand; PAM type: YTN; PAM sequence: CTG
acactggggctttgcactga

SEQ ID NO: 253629 - DNA, 20 bp, Artificial Sequence
  Description of Artificial Sequence: Synthetic oligonucleotide
  Target: LAMA2; (-) strand; PAM type: YTN; PAM sequence: CTC
ctgacactggggctttgcac

SEQ ID NO: 253630 - DNA, 20 bp, Artificial Sequence
  Description of Artificial Sequence: Synthetic oligonucleotide
  Target: LAMA2; (-) strand; PAM type: YTN; PAM sequence: TTC
ctcctgacactggggctttg

SEQ ID NO: 253631 - DNA, 20 bp, Artificial Sequence
  Description of Artificial Sequence: Synthetic oligonucleotide
  Target: LAMA2; (-) strand; PAM type: YTN; PAM sequence: CTA
ttcctcctgacactggggct

SEQ ID NO: 253632 - DNA, 20 bp, Artificial Sequence
  Description of Artificial Sequence: Synthetic oligonucleotide
  Target: LAMA2; (-) strand; PAM type: YTN; PAM sequence: TTG
caacagagctattcctcctg

SEQ ID NO: 253633 - DNA, 20 bp, Artificial Sequence
  Description of Artificial Sequence: Synthetic oligonucleotide
  Target: LAMA2; (-) strand; PAM type: YTN; PAM sequence: TTG
aaacattgcaacagagctat

SEQ ID NO: 253634 - DNA, 20 bp, Artificial Sequence
  Description of Artificial Sequence: Synthetic oligonucleotide
  Target: LAMA2; (-) strand; PAM type: YTN; PAM sequence: TTA
ttgaaacattgcaacagagc

SEQ ID NO: 253635 - DNA, 20 bp, Artificial Sequence
  Description of Artificial Sequence: Synthetic oligonucleotide
  Target: LAMA2; (-) strand; PAM type: YTN; PAM sequence: TTG
ccattattgaaacattgcaa

SEQ ID NO: 253636 - DNA, 20 bp, Artificial Sequence
  Description of Artificial Sequence: Synthetic oligonucleotide
  Target: LAMA2; (-) strand; PAM type: YTN; PAM sequence: TTG
tcaaagcattgccattattg

SEQ ID NO: 253637 - DNA, 20 bp, Artificial Sequence
  Description of Artificial Sequence: Synthetic oligonucleotide
  Target: LAMA2; (-) strand; PAM type: YTN; PAM sequence: CTT
gtcaaagcattgccattatt

SEQ ID NO: 253638 - DNA, 20 bp, Artificial Sequence
  Description of Artificial Sequence: Synthetic oligonucleotide
  Target: LAMA2; (-) strand; PAM type: YTN; PAM sequence: CTC
atcaaatgtgcttgtcaaag

SEQ ID NO: 253639 - DNA, 20 bp, Artificial Sequence
  Description of Artificial Sequence: Synthetic oligonucleotide
  Target: LAMA2; (-) strand; PAM type: YTN; PAM sequence: CTG
ataacagaaaataacaggta

SEQ ID NO: 253640 - DNA, 20 bp, Artificial Sequence
  Description of Artificial Sequence: Synthetic oligonucleotide
  Target: LAMA2; (-) strand; PAM type: YTN; PAM sequence: TTC
tgataacagaaaataacagg

SEQ ID NO: 253641 - DNA, 20 bp, Artificial Sequence
  Description of Artificial Sequence: Synthetic oligonucleotide
  Target: LAMA2; (-) strand; PAM type: YTN; PAM sequence: TTT
ctgataacagaaaataacag

SEQ ID NO: 253642 - DNA, 20 bp, Artificial Sequence
  Description of Artificial Sequence: Synthetic oligonucleotide
  Target: LAMA2; (-) strand; PAM type: YTN; PAM sequence: TTT
tctgataacagaaaataaca

SEQ ID NO: 253643 - DNA, 20 bp, Artificial Sequence
  Description of Artificial Sequence: Synthetic oligonucleotide
  Target: LAMA2; (-) strand; PAM type: YTN; PAM sequence: TTG
ttttctgataacagaaaata

SEQ ID NO: 253644 - DNA, 20 bp, Artificial Sequence
  Description of Artificial Sequence: Synthetic oligonucleotide
  Target: LAMA2; (-) strand; PAM type: YTN; PAM sequence: TTT
gttttctgataacagaaaat

SEQ ID NO: 253645 - DNA, 20 bp, Artificial Sequence
  Description of Artificial Sequence: Synthetic oligonucleotide
  Target: LAMA2; (-) strand; PAM type: YTN; PAM sequence: TTG
tgtttgttttctgataacag

SEQ ID NO: 253646 - DNA, 20 bp, Artificial Sequence
  Description of Artificial Sequence: Synthetic oligonucleotide
  Target: LAMA2; (-) strand; PAM type: YTN; PAM sequence: TTT
gtgtttgttttctgataaca

SEQ ID NO: 253647 - DNA, 20 bp, Artificial Sequence
  Description of Artificial Sequence: Synthetic oligonucleotide
  Target: LAMA2; (-) strand; PAM type: YTN; PAM sequence: TTG
tttgtgtttgttttctgata

SEQ ID NO: 253648 - DNA, 20 bp, Artificial Sequence
  Description of Artificial Sequence: Synthetic oligonucleotide
  Target: LAMA2; (-) strand; PAM type: YTN; PAM sequence: TTT
gtttgtgtttgttttctgat

SEQ ID NO: 253649 - DNA, 20 bp, Artificial Sequence
  Description of Artificial Sequence: Synthetic oligonucleotide
  Target: LAMA2; (-) strand; PAM type: YTN; PAM sequence: TTG
tttgtttgtgtttgttttct

SEQ ID NO: 253650 - DNA, 20 bp, Artificial Sequence
  Description of Artificial Sequence: Synthetic oligonucleotide
  Target: LAMA2; (-) strand; PAM type: YTN; PAM sequence: TTT
gtttgtttgtgtttgttttc

SEQ ID NO: 253651 - DNA, 20 bp, Artificial Sequence
  Description of Artificial Sequence: Synthetic oligonucleotide
  Target: LAMA2; (-) strand; PAM type: YTN; PAM sequence: TTT
tgtttgtttgtgtttgtttt

SEQ ID NO: 253652 - DNA, 20 bp, Artificial Sequence
  Description of Artificial Sequence: Synthetic oligonucleotide
  Target: LAMA2; (-) strand; PAM type: YTN; PAM sequence: TTT
ttgtttgtttgtgtttgttt

SEQ ID NO: 253653 - DNA, 20 bp, Artificial Sequence
  Description of Artificial Sequence: Synthetic oligonucleotide
  Target: LAMA2; (-) strand; PAM type: YTN; PAM sequence: TTA
aaacaaaaaggtgtttttgt

SEQ ID NO: 253654 - DNA, 20 bp, Artificial Sequence
  Description of Artificial Sequence: Synthetic oligonucleotide
  Target: LAMA2; (-) strand; PAM type: YTN; PAM sequence: TTG
gagattaaaacaaaaaggtg

SEQ ID NO: 253655 - DNA, 20 bp, Artificial Sequence
  Description of Artificial Sequence: Synthetic oligonucleotide
  Target: LAMA2; (-) strand; PAM type: YTN; PAM sequence: CTT
ggagattaaaacaaaaaggt

SEQ ID NO: 253656 - DNA, 20 bp, Artificial Sequence
  Description of Artificial Sequence: Synthetic oligonucleotide
  Target: LAMA2; (-) strand; PAM type: YTN; PAM sequence: TTA
gtcagtcttggagattaaaa

SEQ ID NO: 253657 - DNA, 20 bp, Artificial Sequence
  Description of Artificial Sequence: Synthetic oligonucleotide
  Target: LAMA2; (-) strand; PAM type: YTN; PAM sequence: TTT
agtcagtcttggagattaaa

SEQ ID NO: 253658 - DNA, 20 bp, Artificial Sequence
  Description of Artificial Sequence: Synthetic oligonucleotide
  Target: LAMA2; (-) strand; PAM type: YTN; PAM sequence: CTT
tagtcagtcttggagattaa

SEQ ID NO: 253659 - DNA, 20 bp, Artificial Sequence
  Description of Artificial Sequence: Synthetic oligonucleotide
  Target: LAMA2; (-) strand; PAM type: YTN; PAM sequence: CTG
agagaaagataaggctttag

SEQ ID NO: 253660 - DNA, 20 bp, Artificial Sequence
  Description of Artificial Sequence: Synthetic oligonucleotide
  Target: LAMA2; (-) strand; PAM type: YTN; PAM sequence: CTA
ggccaacaagactgagagaa

SEQ ID NO: 253661 - DNA, 20 bp, Artificial Sequence
  Description of Artificial Sequence: Synthetic oligonucleotide
  Target: LAMA2; (-) strand; PAM type: YTN; PAM sequence: CTG
tgcctaggccaacaagactg

SEQ ID NO: 253662 - DNA, 20 bp, Artificial Sequence
  Description of Artificial Sequence: Synthetic oligonucleotide
  Target: LAMA2; (-) strand; PAM type: YTN; PAM sequence: CTC
gcctgtgcctaggccaacaa

SEQ ID NO: 253663 - DNA, 20 bp, Artificial Sequence
  Description of Artificial Sequence: Synthetic oligonucleotide
  Target: LAMA2; (-) strand; PAM type: YTN; PAM sequence: TTA
actcgcctgtgcctaggcca

SEQ ID NO: 253664 - DNA, 20 bp, Artificial Sequence
  Description of Artificial Sequence: Synthetic oligonucleotide
  Target: LAMA2; (-) strand; PAM type: YTN; PAM sequence: CTC
acagatgccaccaaaaatag

SEQ ID NO: 253665 - DNA, 20 bp, Artificial Sequence
  Description of Artificial Sequence: Synthetic oligonucleotide
  Target: LAMA2; (-) strand; PAM type: YTN; PAM sequence: CTG
acatggctcacagatgccac

SEQ ID NO: 253666 - DNA, 20 bp, Artificial Sequence
  Description of Artificial Sequence: Synthetic oligonucleotide
  Target: LAMA2; (-) strand; PAM type: YTN; PAM sequence: CTC
cgcatgaccaaagcactgac

SEQ ID NO: 253667 - DNA, 20 bp, Artificial Sequence
  Description of Artificial Sequence: Synthetic oligonucleotide
  Target: LAMA2; (-) strand; PAM type: YTN; PAM sequence: CTC
cagtgacgtcatcacaggac

SEQ ID NO: 253668 - DNA, 20 bp, Artificial Sequence
  Description of Artificial Sequence: Synthetic oligonucleotide
  Target: LAMA2; (-) strand; PAM type: YTN; PAM sequence: TTC
tccagtgacgtcatcacagg

SEQ ID NO: 253669 - DNA, 20 bp, Artificial Sequence
  Description of Artificial Sequence: Synthetic oligonucleotide
  Target: LAMA2; (-) strand; PAM type: YTN; PAM sequence: TTA
ccaggcattctccagtgacg

SEQ ID NO: 253670 - DNA, 20 bp, Artificial Sequence
  Description of Artificial Sequence: Synthetic oligonucleotide
  Target: LAMA2; (-) strand; PAM type: YTN; PAM sequence: CTT
accaggcattctccagtgac

SEQ ID NO: 253671 - DNA, 20 bp, Artificial Sequence
  Description of Artificial Sequence: Synthetic oligonucleotide
  Target: LAMA2; (-) strand; PAM type: YTN; PAM sequence: TTG
tcaatcagcatccccaaaga

SEQ ID NO: 253672 - DNA, 20 bp, Artificial Sequence
  Description of Artificial Sequence: Synthetic oligonucleotide
  Target: LAMA2; (-) strand; PAM type: YTN; PAM sequence: CTT
gtcaatcagcatccccaaag

SEQ ID NO: 253673 - DNA, 20 bp, Artificial Sequence
  Description of Artificial Sequence: Synthetic oligonucleotide
  Target: LAMA2; (-) strand; PAM type: YTN; PAM sequence: TTC
agccttgtcaatcagcatcc

SEQ ID NO: 253674 - DNA, 20 bp, Artificial Sequence
  Description of Artificial Sequence: Synthetic oligonucleotide
  Target: LAMA2; (-) strand; PAM type: YTN; PAM sequence: TTT
cagccttgtcaatcagcatc

SEQ ID NO: 253675 - DNA, 20 bp, Artificial Sequence
  Description of Artificial Sequence: Synthetic oligonucleotide
  Target: LAMA2; (-) strand; PAM type: YTN; PAM sequence: CTG
tcgaggtgatttcagccttg

SEQ ID NO: 253676 - DNA, 20 bp, Artificial Sequence
  Description of Artificial Sequence: Synthetic oligonucleotide
  Target: LAMA2; (-) strand; PAM type: YTN; PAM sequence: TTG
tagcatctgtcgaggtgatt

SEQ ID NO: 253677 - DNA, 20 bp, Artificial Sequence
  Description of Artificial Sequence: Synthetic oligonucleotide
  Target: LAMA2; (-) strand; PAM type: YTN; PAM sequence: CTG
aattgtagcatctgtcgagg

SEQ ID NO: 253678 - DNA, 20 bp, Artificial Sequence
  Description of Artificial Sequence: Synthetic oligonucleotide
  Target: LAMA2; (-) strand; PAM type: YTN; PAM sequence: TTA
aggtccccagggtagtagct

SEQ ID NO: 253679 - DNA, 20 bp, Artificial Sequence
  Description of Artificial Sequence: Synthetic oligonucleotide
  Target: LAMA2; (-) strand; PAM type: YTN; PAM sequence: TTT
aaggtccccagggtagtagc

SEQ ID NO: 253680 - DNA, 20 bp, Artificial Sequence
  Description of Artificial Sequence: Synthetic oligonucleotide
  Target: LAMA2; (-) strand; PAM type: YTN; PAM sequence: CTC
aagtgtttaaggtccccagg

SEQ ID NO: 253681 - DNA, 20 bp, Artificial Sequence
  Description of Artificial Sequence: Synthetic oligonucleotide
  Target: LAMA2; (-) strand; PAM type: YTN; PAM sequence: TTG
actcaagtgtttaaggtccc

SEQ ID NO: 253682 - DNA, 20 bp, Artificial Sequence
  Description of Artificial Sequence: Synthetic oligonucleotide
  Target: LAMA2; (-) strand; PAM type: YTN; PAM sequence: CTT
gactcaagtgtttaaggtcc

SEQ ID NO: 253683 - DNA, 20 bp, Artificial Sequence
  Description of Artificial Sequence: Synthetic oligonucleotide
  Target: LAMA2; (-) strand; PAM type: YTN; PAM sequence: TTC
ttgactcaagtgtttaaggt

SEQ ID NO: 253684 - DNA, 20 bp, Artificial Sequence
  Description of Artificial Sequence: Synthetic oligonucleotide
  Target: LAMA2; (-) strand; PAM type: YTN; PAM sequence: CTT
cttgactcaagtgtttaagg

SEQ ID NO: 253685 - DNA, 20 bp, Artificial Sequence
  Description of Artificial Sequence: Synthetic oligonucleotide
  Target: LAMA2; (-) strand; PAM type: YTN; PAM sequence: TTG
tcaaagcacttcttgactca

SEQ ID NO: 253686 - DNA, 20 bp, Artificial Sequence
  Description of Artificial Sequence: Synthetic oligonucleotide
  Target: LAMA2; (-) strand; PAM type: YTN; PAM sequence: TTT
gtcaaagcacttcttgactc

SEQ ID NO: 253687 - DNA, 20 bp, Artificial Sequence
  Description of Artificial Sequence: Synthetic oligonucleotide
  Target: LAMA2; (-) strand; PAM type: YTN; PAM sequence: CTT
tgtcaaagcacttcttgact

SEQ ID NO: 253688 - DNA, 20 bp, Artificial Sequence
  Description of Artificial Sequence: Synthetic oligonucleotide
  Target: LAMA2; (-) strand; PAM type: YTN; PAM sequence: TTC
aatacaaagatctttgtcaa

SEQ ID NO: 253689 - DNA, 20 bp, Artificial Sequence
  Description of Artificial Sequence: Synthetic oligonucleotide
  Target: LAMA2; (-) strand; PAM type: YTN; PAM sequence: TTC
agttcaatacaaagatcttt

SEQ ID NO: 253690 - DNA, 20 bp, Artificial Sequence
  Description of Artificial Sequence: Synthetic oligonucleotide
  Target: LAMA2; (-) strand; PAM type: YTN; PAM sequence: TTC
caattcagttcaatacaaag

SEQ ID NO: 253691 - DNA, 20 bp, Artificial Sequence
  Description of Artificial Sequence: Synthetic oligonucleotide
  Target: LAMA2; (-) strand; PAM type: YTN; PAM sequence: CTC
agttccaattcagttcaata

SEQ ID NO: 253692 - DNA, 20 bp, Artificial Sequence
  Description of Artificial Sequence: Synthetic oligonucleotide
  Target: LAMA2; (-) strand; PAM type: YTN; PAM sequence: TTC
tcagttccaattcagttcaa

SEQ ID NO: 253693 - DNA, 20 bp, Artificial Sequence
  Description of Artificial Sequence: Synthetic oligonucleotide
  Target: LAMA2; (-) strand; PAM type: YTN; PAM sequence: TTA
gggagatcacatatgaaaga

SEQ ID NO: 253694 - DNA, 20 bp, Artificial Sequence
  Description of Artificial Sequence: Synthetic oligonucleotide
  Target: LAMA2; (-) strand; PAM type: YTN; PAM sequence: TTC
attagggagatcacatatga

SEQ ID NO: 253695 - DNA, 20 bp, Artificial Sequence
  Description of Artificial Sequence: Synthetic oligonucleotide
  Target: LAMA2; (-) strand; PAM type: YTN; PAM sequence: CTC
atattcattagggagatcac

SEQ ID NO: 253696 - DNA, 20 bp, Artificial Sequence
  Description of Artificial Sequence: Synthetic oligonucleotide
  Target: LAMA2; (-) strand; PAM type: YTN; PAM sequence: TTC
ctcatattcattagggagat

SEQ ID NO: 253697 - DNA, 20 bp, Artificial Sequence
  Description of Artificial Sequence: Synthetic oligonucleotide
  Target: LAMA2; (-) strand; PAM type: YTN; PAM sequence: CTT
cctcatattcattagggaga

SEQ ID NO: 253698 - DNA, 20 bp, Artificial Sequence
  Description of Artificial Sequence: Synthetic oligonucleotide
  Target: LAMA2; (-) strand; PAM type: YTN; PAM sequence: TTA
atatgaataaacacttcctc

SEQ ID NO: 253699 - DNA, 20 bp, Artificial Sequence
  Description of Artificial Sequence: Synthetic oligonucleotide
  Target: LAMA2; (-) strand; PAM type: YTN; PAM sequence: TTT
aatatgaataaacacttcct

SEQ ID NO: 253700 - DNA, 20 bp, Artificial Sequence
  Description of Artificial Sequence: Synthetic oligonucleotide
  Target: LAMA2; (-) strand; PAM type: YTN; PAM sequence: TTG
atttaatatgaataaacact

SEQ ID NO: 253701 - DNA, 20 bp, Artificial Sequence
  Description of Artificial Sequence: Synthetic oligonucleotide
  Target: LAMA2; (-) strand; PAM type: YTN; PAM sequence: CTT
gatttaatatgaataaacac

SEQ ID NO: 253702 - DNA, 20 bp, Artificial Sequence
  Description of Artificial Sequence: Synthetic oligonucleotide
  Target: LAMA2; (-) strand; PAM type: YTN; PAM sequence: TTC
ttgatttaatatgaataaac

SEQ ID NO: 253703 - DNA, 20 bp, Artificial Sequence
  Description of Artificial Sequence: Synthetic oligonucleotide
  Target: LAMA2; (-) strand; PAM type: YTN; PAM sequence: TTA
attcttgatttaatatgaat

SEQ ID NO: 253704 - DNA, 20 bp, Artificial Sequence
  Description of Artificial Sequence: Synthetic oligonucleotide
  Target: LAMA2; (-) strand; PAM type: YTN; PAM sequence: TTT
aattcttgatttaatatgaa

SEQ ID NO: 253705 - DNA, 20 bp, Artificial Sequence
  Description of Artificial Sequence: Synthetic oligonucleotide
  Target: LAMA2; (-) strand; PAM type: YTN; PAM sequence: CTA
atttaattcttgatttaata

SEQ ID NO: 253706 - DNA, 20 bp, Artificial Sequence
  Description of Artificial Sequence: Synthetic oligonucleotide
  Target: LAMA2; (-) strand; PAM type: YTN; PAM sequence: TTC
taatttaattcttgatttaa

SEQ ID NO: 253707 - DNA, 20 bp, Artificial Sequence
  Description of Artificial Sequence: Synthetic oligonucleotide
  Target: LAMA2; (-) strand; PAM type: YTN; PAM sequence: CTG
attctaatttaattcttgat

SEQ ID NO: 253708 - DNA, 20 bp, Artificial Sequence
  Description of Artificial Sequence: Synthetic oligonucleotide
  Target: LAMA2; (-) strand; PAM type: YTN; PAM sequence: TTA
taaaaatatatctgattcta

SEQ ID NO: 253709 - DNA, 20 bp, Artificial Sequence
  Description of Artificial Sequence: Synthetic oligonucleotide
  Target: LAMA2; (-) strand; PAM type: YTN; PAM sequence: CTT
ataaaaatatatctgattct

SEQ ID NO: 253710 - DNA, 20 bp, Artificial Sequence
  Description of Artificial Sequence: Synthetic oligonucleotide
  Target: LAMA2; (-) strand; PAM type: YTN; PAM sequence: TTA
tgccttataaaaatatatct

SEQ ID NO: 253711 - DNA, 20 bp, Artificial Sequence
  Description of Artificial Sequence: Synthetic oligonucleotide
  Target: LAMA2; (-) strand; PAM type: YTN; PAM sequence: TTC
caatcagaagttatgcctta

SEQ ID NO: 253712 - DNA, 20 bp, Artificial Sequence
  Description of Artificial Sequence: Synthetic oligonucleotide
  Target: LAMA2; (-) strand; PAM type: YTN; PAM sequence: CTT
ccaatcagaagttatgcctt

SEQ ID NO: 253713 - DNA, 20 bp, Artificial Sequence
  Description of Artificial Sequence: Synthetic oligonucleotide
  Target: LAMA2; (-) strand; PAM type: YTN; PAM sequence: TTA
tacttccaatcagaagttat

SEQ ID NO: 253714 - DNA, 20 bp, Artificial Sequence
  Description of Artificial Sequence: Synthetic oligonucleotide
  Target: LAMA2; (-) strand; PAM type: YTN; PAM sequence: TTC
atggtagttatacttccaat

SEQ ID NO: 253715 - DNA, 20 bp, Artificial Sequence
  Description of Artificial Sequence: Synthetic oligonucleotide
  Target: LAMA2; (-) strand; PAM type: YTN; PAM sequence: TTA
tggaagaaagtgaaaccata

SEQ ID NO: 253716 - DNA, 20 bp, Artificial Sequence
  Description of Artificial Sequence: Synthetic oligonucleotide
  Target: LAMA2; (-) strand; PAM type: YTN; PAM sequence: TTT
atggaagaaagtgaaaccat

SEQ ID NO: 253717 - DNA, 20 bp, Artificial Sequence
  Description of Artificial Sequence: Synthetic oligonucleotide
  Target: LAMA2; (-) strand; PAM type: YTN; PAM sequence: TTC
atagatttatggaagaaagt

SEQ ID NO: 253718 - DNA, 20 bp, Artificial Sequence
  Description of Artificial Sequence: Synthetic oligonucleotide
  Target: LAMA2; (-) strand; PAM type: YTN; PAM sequence: TTT
catagatttatggaagaaag

SEQ ID NO: 253719 - DNA, 20 bp, Artificial Sequence
  Description of Artificial Sequence: Synthetic oligonucleotide
  Target: LAMA2; (-) strand; PAM type: YTN; PAM sequence: TTT
tcatagatttatggaagaaa

SEQ ID NO: 253720 - DNA, 20 bp, Artificial Sequence
  Description of Artificial Sequence: Synthetic oligonucleotide
  Target: LAMA2; (-) strand; PAM type: YTN; PAM sequence: CTT
ttcatagatttatggaagaa

SEQ ID NO: 253721 - DNA, 20 bp, Artificial Sequence
  Description of Artificial Sequence: Synthetic oligonucleotide
  Target: LAMA2; (-) strand; PAM type: YTN; PAM sequence: CTG
tacttttcatagatttatgg

SEQ ID NO: 253722 - DNA, 20 bp, Artificial Sequence
  Description of Artificial Sequence: Synthetic oligonucleotide
  Target: LAMA2; (-) strand; PAM type: YTN; PAM sequence: TTA
aaagtacactgtacttttca

SEQ ID NO: 253723 - DNA, 20 bp, Artificial Sequence
  Description of Artificial Sequence: Synthetic oligonucleotide
  Target: LAMA2; (-) strand; PAM type: YTN; PAM sequence: TTT
aaaagtacactgtacttttc

SEQ ID NO: 253724 - DNA, 20 bp, Artificial Sequence
  Description of Artificial Sequence: Synthetic oligonucleotide
  Target: LAMA2; (-) strand; PAM type: YTN; PAM sequence: TTT
taaaagtacactgtactttt

SEQ ID NO: 253725 - DNA, 20 bp, Artificial Sequence
  Description of Artificial Sequence: Synthetic oligonucleotide
  Target: LAMA2; (-) strand; PAM type: YTN; PAM sequence: CTA
ttttaaaagtacactgtact

SEQ ID NO: 253726 - DNA, 20 bp, Artificial Sequence
  Description of Artificial Sequence: Synthetic oligonucleotide
  Target: LAMA2; (-) strand; PAM type: YTN; PAM sequence: TTC
tattttaaaagtacactgta

SEQ ID NO: 253727 - DNA, 20 bp, Artificial Sequence
  Description of Artificial Sequence: Synthetic oligonucleotide
  Target: LAMA2; (-) strand; PAM type: YTN; PAM sequence: TTT
ctattttaaaagtacactgt

SEQ ID NO: 253728 - DNA, 20 bp, Artificial Sequence
  Description of Artificial Sequence: Synthetic oligonucleotide
  Target: LAMA2; (-) strand; PAM type: YTN; PAM sequence: TTT
tctattttaaaagtacactg

SEQ ID NO: 253729 - DNA, 20 bp, Artificial Sequence
  Description of Artificial Sequence: Synthetic oligonucleotide
  Target: LAMA2; (-) strand; PAM type: YTN; PAM sequence: TTA
ttttctattttaaaagtaca

SEQ ID NO: 253730 - DNA, 20 bp, Artificial Sequence
  Description of Artificial Sequence: Synthetic oligonucleotide
  Target: LAMA2; (-) strand; PAM type: YTN; PAM sequence: TTA
tggggatataaattattttc

SEQ ID NO: 253731 - DNA, 20 bp, Artificial Sequence
  Description of Artificial Sequence: Synthetic oligonucleotide
  Target: LAMA2; (-) strand; PAM type: YTN; PAM sequence: TTC
atattatggggatataaatt

SEQ ID NO: 253732 - DNA, 20 bp, Artificial Sequence
  Description of Artificial Sequence: Synthetic oligonucleotide
  Target: LAMA2; (-) strand; PAM type: YTN; PAM sequence: TTT
catattatggggatataaat

SEQ ID NO: 253733 - DNA, 20 bp, Artificial Sequence
  Description of Artificial Sequence: Synthetic oligonucleotide
  Target: LAMA2; (-) strand; PAM type: YTN; PAM sequence: TTT
tcatattatggggatataaa

SEQ ID NO: 253734 - DNA, 20 bp, Artificial Sequence
  Description of Artificial Sequence: Synthetic oligonucleotide
  Target: LAMA2; (-) strand; PAM type: YTN; PAM sequence: CTT
ttcatattatggggatataa

SEQ ID NO: 253735 - DNA, 20 bp, Artificial Sequence
  Description of Artificial Sequence: Synthetic oligonucleotide
  Target: LAMA2; (-) strand; PAM type: YTN; PAM sequence: TTA
cacttttcatattatgggga

SEQ ID NO: 253736 - DNA, 20 bp, Artificial Sequence
  Description of Artificial Sequence: Synthetic oligonucleotide
  Target: LAMA2; (-) strand; PAM type: YTN; PAM sequence: TTT
acacttttcatattatgggg

SEQ ID NO: 253737 - DNA, 20 bp, Artificial Sequence
  Description of Artificial Sequence: Synthetic oligonucleotide
  Target: LAMA2; (-) strand; PAM type: YTN; PAM sequence: TTT
tacacttttcatattatggg

SEQ ID NO: 253738 - DNA, 20 bp, Artificial Sequence
  Description of Artificial Sequence: Synthetic oligonucleotide
  Target: LAMA2; (-) strand; PAM type: YTN; PAM sequence: TTA
tattttacacttttcatatt

SEQ ID NO: 253739 - DNA, 20 bp, Artificial Sequence
  Description of Artificial Sequence: Synthetic oligonucleotide
  Target: LAMA2; (-) strand; PAM type: YTN; PAM sequence: CTA
taaaggttatattttacact

SEQ ID NO: 253740 - DNA, 20 bp, Artificial Sequence
  Description of Artificial Sequence: Synthetic oligonucleotide
  Target: LAMA2; (-) strand; PAM type: YTN; PAM sequence: TTA
ctataaaggttatattttac

SEQ ID NO: 253741 - DNA, 20 bp, Artificial Sequence
  Description of Artificial Sequence: Synthetic oligonucleotide
  Target: LAMA2; (-) strand; PAM type: YTN; PAM sequence: TTT
actataaaggttatatttta

SEQ ID NO: 253742 - DNA, 20 bp, Artificial Sequence
  Description of Artificial Sequence: Synthetic oligonucleotide
  Target: LAMA2; (-) strand; PAM type: YTN; PAM sequence: TTA
tgtttactataaaggttata

SEQ ID NO: 253743 - DNA, 20 bp, Artificial Sequence
  Description of Artificial Sequence: Synthetic oligonucleotide
  Target: LAMA2; (-) strand; PAM type: YTN; PAM sequence: TTA
attatgtttactataaaggt

SEQ ID NO: 253744 - DNA, 20 bp, Artificial Sequence
  Description of Artificial Sequence: Synthetic oligonucleotide
  Target: LAMA2; (-) strand; PAM type: YTN; PAM sequence: CTT
aattatgtttactataaagg

SEQ ID NO: 253745 - DNA, 20 bp, Artificial Sequence
  Description of Artificial Sequence: Synthetic oligonucleotide
  Target: LAMA2; (-) strand; PAM type: YTN; PAM sequence: TTC
aacatgaagaaaacttaatt

SEQ ID NO: 253746 - DNA, 20 bp, Artificial Sequence
  Description of Artificial Sequence: Synthetic oligonucleotide
  Target: LAMA2; (-) strand; PAM type: YTN; PAM sequence: TTT
caacatgaagaaaacttaat

SEQ ID NO: 253747 - DNA, 20 bp, Artificial Sequence
  Description of Artificial Sequence: Synthetic oligonucleotide
  Target: LAMA2; (-) strand; PAM type: YTN; PAM sequence: TTT
tcaacatgaagaaaacttaa

SEQ ID NO: 253748 - DNA, 20 bp, Artificial Sequence
  Description of Artificial Sequence: Synthetic oligonucleotide
  Target: LAMA2; (-) strand; PAM type: YTN; PAM sequence: TTC
attttcaacatgaagaaaac

SEQ ID NO: 253749 - DNA, 20 bp, Artificial Sequence
  Description of Artificial Sequence: Synthetic oligonucleotide
  Target: LAMA2; (-) strand; PAM type: YTN; PAM sequence: TTT
cattttcaacatgaagaaaa

SEQ ID NO: 253750 - DNA, 20 bp, Artificial Sequence
  Description of Artificial Sequence: Synthetic oligonucleotide
  Target: LAMA2; (-) strand; PAM type: YTN; PAM sequence: TTT
tcattttcaacatgaagaaa

SEQ ID NO: 253751 - DNA, 20 bp, Artificial Sequence
  Description of Artificial Sequence: Synthetic oligonucleotide
  Target: LAMA2; (-) strand; PAM type: YTN; PAM sequence: TTA
aataaaaatatgtagtatgt

SEQ ID NO: 253752 - DNA, 20 bp, Artificial Sequence
  Description of Artificial Sequence: Synthetic oligonucleotide
  Target: LAMA2; (-) strand; PAM type: YTN; PAM sequence: TTT
aaataaaaatatgtagtatg

SEQ ID NO: 253753 - DNA, 20 bp, Artificial Sequence
  Description of Artificial Sequence: Synthetic oligonucleotide
  Target: LAMA2; (-) strand; PAM type: YTN; PAM sequence: TTT
taaataaaaatatgtagtat

SEQ ID NO: 253754 - DNA, 20 bp, Artificial Sequence
  Description of Artificial Sequence: Synthetic oligonucleotide
  Target: LAMA2; (-) strand; PAM type: YTN; PAM sequence: TTA
tgaacattttaaataaaaat

SEQ ID NO: 253755 - DNA, 20 bp, Artificial Sequence
  Description of Artificial Sequence: Synthetic oligonucleotide
  Target: LAMA2; (-) strand; PAM type: YTN; PAM sequence: TTA
aattatgaacattttaaata

SEQ ID NO: 253756 - DNA, 20 bp, Artificial Sequence
  Description of Artificial Sequence: Synthetic oligonucleotide
  Target: LAMA2; (-) strand; PAM type: YTN; PAM sequence: TTA
gttaaattatgaacatttta

SEQ ID NO: 253757 - DNA, 20 bp, Artificial Sequence
  Description of Artificial Sequence: Synthetic oligonucleotide
  Target: LAMA2; (-) strand; PAM type: YTN; PAM sequence: TTT
agttaaattatgaacatttt

SEQ ID NO: 253758 - DNA, 20 bp, Artificial Sequence
  Description of Artificial Sequence: Synthetic oligonucleotide
  Target: LAMA2; (-) strand; PAM type: YTN; PAM sequence: CTA
tgcatttagttaaattatga

SEQ ID NO: 253759 - DNA, 20 bp, Artificial Sequence
  Description of Artificial Sequence: Synthetic oligonucleotide
  Target: LAMA2; (-) strand; PAM type: YTN; PAM sequence: CTA
caaatgacactatgcattta

SEQ ID NO: 253760 - DNA, 20 bp, Artificial Sequence
  Description of Artificial Sequence: Synthetic oligonucleotide
  Target: LAMA2; (-) strand; PAM type: YTN; PAM sequence: TTA
atctacaaatgacactatgc

SEQ ID NO: 253761 - DNA, 20 bp, Artificial Sequence
  Description of Artificial Sequence: Synthetic oligonucleotide
  Target: LAMA2; (-) strand; PAM type: YTN; PAM sequence: TTT
aatctacaaatgacactatg

SEQ ID NO: 253762 - DNA, 20 bp, Artificial Sequence
  Description of Artificial Sequence: Synthetic oligonucleotide
  Target: LAMA2; (-) strand; PAM type: YTN; PAM sequence: TTT
taatctacaaatgacactat

SEQ ID NO: 253763 - DNA, 20 bp, Artificial Sequence
  Description of Artificial Sequence: Synthetic oligonucleotide
  Target: LAMA2; (-) strand; PAM type: YTN; PAM sequence: TTT
ttaatctacaaatgacacta

SEQ ID NO: 253764 - DNA, 20 bp, Artificial Sequence
  Description of Artificial Sequence: Synthetic oligonucleotide
  Target: LAMA2; (-) strand; PAM type: YTN; PAM sequence: TTA
tttttaatctacaaatgaca

SEQ ID NO: 253765 - DNA, 20 bp, Artificial Sequence
  Description of Artificial Sequence: Synthetic oligonucleotide
  Target: LAMA2; (-) strand; PAM type: YTN; PAM sequence: TTT
atttttaatctacaaatgac

SEQ ID NO: 253766 - DNA, 20 bp, Artificial Sequence
  Description of Artificial Sequence: Synthetic oligonucleotide
  Target: LAMA2; (-) strand; PAM type: YTN; PAM sequence: TTT
tatttttaatctacaaatga

SEQ ID NO: 253767 - DNA, 20 bp, Artificial Sequence
  Description of Artificial Sequence: Synthetic oligonucleotide
  Target: LAMA2; (-) strand; PAM type: YTN; PAM sequence: TTT
ttatttttaatctacaaatg

SEQ ID NO: 253768 - DNA, 20 bp, Artificial Sequence
  Description of Artificial Sequence: Synthetic oligonucleotide
  Target: LAMA2; (-) strand; PAM type: YTN; PAM sequence: TTG
tttttatttttaatctacaa

SEQ ID NO: 253769 - DNA, 20 bp, Artificial Sequence
  Description of Artificial Sequence: Synthetic oligonucleotide
  Target: LAMA2; (-) strand; PAM type: YTN; PAM sequence: TTA
catattgtttttatttttaa

SEQ ID NO: 253770 - DNA, 20 bp, Artificial Sequence
  Description of Artificial Sequence: Synthetic oligonucleotide
  Target: LAMA2; (-) strand; PAM type: YTN; PAM sequence: CTG
gtgaatatgtattacatatt

SEQ ID NO: 253771 - DNA, 20 bp, Artificial Sequence
  Description of Artificial Sequence: Synthetic oligonucleotide
  Target: LAMA2; (-) strand; PAM type: YTN; PAM sequence: CTC
tggtgaatatgtattacata

SEQ ID NO: 253772 - DNA, 20 bp, Artificial Sequence
  Description of Artificial Sequence: Synthetic oligonucleotide
  Target: LAMA2; (-) strand; PAM type: YTN; PAM sequence: TTG
caaaggagaagcagctctgg

SEQ ID NO: 253773 - DNA, 20 bp, Artificial Sequence
  Description of Artificial Sequence: Synthetic oligonucleotide
  Target: LAMA2; (-) strand; PAM type: YTN; PAM sequence: TTA
attgcaaaggagaagcagct

SEQ ID NO: 253774 - DNA, 20 bp, Artificial Sequence
  Description of Artificial Sequence: Synthetic oligonucleotide
  Target: LAMA2; (-) strand; PAM type: YTN; PAM sequence: CTT
aattgcaaaggagaagcagc

SEQ ID NO: 253775 - DNA, 20 bp, Artificial Sequence
  Description of Artificial Sequence: Synthetic oligonucleotide
  Target: LAMA2; (-) strand; PAM type: YTN; PAM sequence: TTA
gacttaattgcaaaggagaa

SEQ ID NO: 253776 - DNA, 20 bp, Artificial Sequence
  Description of Artificial Sequence: Synthetic oligonucleotide
  Target: LAMA2; (-) strand; PAM type: YTN; PAM sequence: CTT
agacttaattgcaaaggaga

SEQ ID NO: 253777 - DNA, 20 bp, Artificial Sequence
  Description of Artificial Sequence: Synthetic oligonucleotide
  Target: LAMA2; (-) strand; PAM type: YTN; PAM sequence: TTA
aagcttagacttaattgcaa

SEQ ID NO: 253778 - DNA, 20 bp, Artificial Sequence
  Description of Artificial Sequence: Synthetic oligonucleotide
  Target: LAMA2; (-) strand; PAM type: YTN; PAM sequence: CTG
gttaaagcttagacttaatt

SEQ ID NO: 253779 - DNA, 20 bp, Artificial Sequence
  Description of Artificial Sequence: Synthetic oligonucleotide
  Target: LAMA2; (-) strand; PAM type: YTN; PAM sequence: TTC
tggttaaagcttagacttaa

SEQ ID NO: 253780 - DNA, 20 bp, Artificial Sequence
  Description of Artificial Sequence: Synthetic oligonucleotide
  Target: LAMA2; (-) strand; PAM type: YTN; PAM sequence: TTT
ctggttaaagcttagactta

SEQ ID NO: 253781 - DNA, 20 bp, Artificial Sequence
  Description of Artificial Sequence: Synthetic oligonucleotide
  Target: LAMA2; (-) strand; PAM type: YTN; PAM sequence: TTT
tctggttaaagcttagactt

SEQ ID NO: 253782 - DNA, 20 bp, Artificial Sequence
  Description of Artificial Sequence: Synthetic oligonucleotide
  Target: LAMA2; (-) strand; PAM type: YTN; PAM sequence: CTA
ttttctggttaaagcttaga

SEQ ID NO: 253783 - DNA, 20 bp, Artificial Sequence
  Description of Artificial Sequence: Synthetic oligonucleotide
  Target: LAMA2; (-) strand; PAM type: YTN; PAM sequence: TTG
taaagcctattttctggtta

SEQ ID NO: 253784 - DNA, 20 bp, Artificial Sequence
  Description of Artificial Sequence: Synthetic oligonucleotide
  Target: LAMA2; (-) strand; PAM type: YTN; PAM sequence: TTT
gtaaagcctattttctggtt

SEQ ID NO: 253785 - DNA, 20 bp, Artificial Sequence
  Description of Artificial Sequence: Synthetic oligonucleotide
  Target: LAMA2; (-) strand; PAM type: YTN; PAM sequence: CTT
tgtaaagcctattttctggt

SEQ ID NO: 253786 - DNA, 20 bp, Artificial Sequence
  Description of Artificial Sequence: Synthetic oligonucleotide
  Target: LAMA2; (-) strand; PAM type: YTN; PAM sequence: TTG
cactttgtaaagcctatttt

SEQ ID NO: 253787 - DNA, 20 bp, Artificial Sequence
  Description of Artificial Sequence: Synthetic oligonucleotide
  Target: LAMA2; (-) strand; PAM type: YTN; PAM sequence: TTT
gcactttgtaaagcctattt

SEQ ID NO: 253788 - DNA, 20 bp, Artificial Sequence
  Description of Artificial Sequence: Synthetic oligonucleotide
  Target: LAMA2; (-) strand; PAM type: YTN; PAM sequence: CTT
tgcactttgtaaagcctatt

SEQ ID NO: 253789 - DNA, 20 bp, Artificial Sequence
  Description of Artificial Sequence: Synthetic oligonucleotide
  Target: LAMA2; (-) strand; PAM type: YTN; PAM sequence: TTA
gcaggatggaaagtgctttg

SEQ ID NO: 253790 - DNA, 20 bp, Artificial Sequence
  Description of Artificial Sequence: Synthetic oligonucleotide
  Target: LAMA2; (-) strand; PAM type: YTN; PAM sequence: CTT
agcaggatggaaagtgcttt

SEQ ID NO: 253791 - DNA, 20 bp, Artificial Sequence
  Description of Artificial Sequence: Synthetic oligonucleotide
  Target: LAMA2; (-) strand; PAM type: YTN; PAM sequence: TTC
ttagcaggatggaaagtgct

SEQ ID NO: 253792 - DNA, 20 bp, Artificial Sequence
  Description of Artificial Sequence: Synthetic oligonucleotide
  Target: LAMA2; (-) strand; PAM type: YTN; PAM sequence: TTT
cttagcaggatggaaagtgc

SEQ ID NO: 253793 - DNA, 20 bp, Artificial Sequence
  Description of Artificial Sequence: Synthetic oligonucleotide
  Target: LAMA2; (-) strand; PAM type: YTN; PAM sequence: CTA
aggtttcttagcaggatgga

SEQ ID NO: 253794 - DNA, 20 bp, Artificial Sequence
  Description of Artificial Sequence: Synthetic oligonucleotide
  Target: LAMA2; (-) strand; PAM type: YTN; PAM sequence: CTC
caatcctaaggtttcttagc

SEQ ID NO: 253795 - DNA, 20 bp, Artificial Sequence
  Description of Artificial Sequence: Synthetic oligonucleotide
  Target: LAMA2; (-) strand; PAM type: YTN; PAM sequence: TTC
tccaatcctaaggtttctta

SEQ ID NO: 253796 - DNA, 20 bp, Artificial Sequence
  Description of Artificial Sequence: Synthetic oligonucleotide
  Target: LAMA2; (-) strand; PAM type: YTN; PAM sequence: TTC
agtgtaattctccaatccta

SEQ ID NO: 253797 - DNA, 20 bp, Artificial Sequence
  Description of Artificial Sequence: Synthetic oligonucleotide
  Target: LAMA2; (-) strand; PAM type: YTN; PAM sequence: CTA
ttcagtgtaattctccaatc

SEQ ID NO: 253798 - DNA, 20 bp, Artificial Sequence
  Description of Artificial Sequence: Synthetic oligonucleotide
  Target: LAMA2; (-) strand; PAM type: YTN; PAM sequence: TTA
atcagaatggtctattcagt

SEQ ID NO: 253799 - DNA, 20 bp, Artificial Sequence
  Description of Artificial Sequence: Synthetic oligonucleotide
  Target: LAMA2; (-) strand; PAM type: YTN; PAM sequence: TTG
agttaatcagaatggtctat

SEQ ID NO: 253800 - DNA, 20 bp, Artificial Sequence
  Description of Artificial Sequence: Synthetic oligonucleotide
  Target: LAMA2; (-) strand; PAM type: YTN; PAM sequence: CTT
gagttaatcagaatggtcta

SEQ ID NO: 253801 - DNA, 20 bp, Artificial Sequence
  Description of Artificial Sequence: Synthetic oligonucleotide
  Target: LAMA2; (-) strand; PAM type: YTN; PAM sequence: CTA
atgtgcccttgagttaatca

SEQ ID NO: 253802 - DNA, 20 bp, Artificial Sequence
  Description of Artificial Sequence: Synthetic oligonucleotide
  Target: LAMA2; (-) strand; PAM type: YTN; PAM sequence: TTC
atgccatgtcagacaatata

SEQ ID NO: 253803 - DNA, 20 bp, Artificial Sequence
  Description of Artificial Sequence: Synthetic oligonucleotide
  Target: LAMA2; (-) strand; PAM type: YTN; PAM sequence: CTT
catgccatgtcagacaatat

SEQ ID NO: 253804 - DNA, 20 bp, Artificial Sequence
  Description of Artificial Sequence: Synthetic oligonucleotide
  Target: LAMA2; (-) strand; PAM type: YTN; PAM sequence: TTC
aagcttcatgccatgtcaga

SEQ ID NO: 253805 - DNA, 20 bp, Artificial Sequence
  Description of Artificial Sequence: Synthetic oligonucleotide
  Target: LAMA2; (-) strand; PAM type: YTN; PAM sequence: TTT
caagcttcatgccatgtcag

SEQ ID NO: 253806 - DNA, 20 bp, Artificial Sequence
  Description of Artificial Sequence: Synthetic oligonucleotide
  Target: LAMA2; (-) strand; PAM type: YTN; PAM sequence: TTG
tttcaagcttcatgccatgt

SEQ ID NO: 253807 - DNA, 20 bp, Artificial Sequence
  Description of Artificial Sequence: Synthetic oligonucleotide
  Target: LAMA2; (-) strand; PAM type: YTN; PAM sequence: CTA
atgaaaggagaagtgttgtt

SEQ ID NO: 253808 - DNA, 20 bp, Artificial Sequence
  Description of Artificial Sequence: Synthetic oligonucleotide
  Target: LAMA2; (-) strand; PAM type: YTN; PAM sequence: CTG
caagactaatgaaaggagaa

SEQ ID NO: 253809 - DNA, 20 bp, Artificial Sequence
  Description of Artificial Sequence: Synthetic oligonucleotide
  Target: LAMA2; (-) strand; PAM type: YTN; PAM sequence: TTC
tgcaagactaatgaaaggag

SEQ ID NO: 253810 - DNA, 20 bp, Artificial Sequence
  Description of Artificial Sequence: Synthetic oligonucleotide
  Target: LAMA2; (-) strand; PAM type: YTN; PAM sequence: TTT
ctgcaagactaatgaaagga

SEQ ID NO: 253811 - DNA, 20 bp, Artificial Sequence
  Description of Artificial Sequence: Synthetic oligonucleotide
  Target: LAMA2; (-) strand; PAM type: YTN; PAM sequence: TTG
tgtttctgcaagactaatga

SEQ ID NO: 253812 - DNA, 20 bp, Artificial Sequence
  Description of Artificial Sequence: Synthetic oligonucleotide
  Target: LAMA2; (-) strand; PAM type: YTN; PAM sequence: TTA
aattgtgtttctgcaagact

SEQ ID NO: 253813 - DNA, 20 bp, Artificial Sequence
  Description of Artificial Sequence: Synthetic oligonucleotide
  Target: LAMA2; (-) strand; PAM type: YTN; PAM sequence: TTT
aaattgtgtttctgcaagac

SEQ ID NO: 253814 - DNA, 20 bp, Artificial Sequence
  Description of Artificial Sequence: Synthetic oligonucleotide
  Target: LAMA2; (-) strand; PAM type: YTN; PAM sequence: TTT
taaattgtgtttctgcaaga

SEQ ID NO: 253815 - DNA, 20 bp, Artificial Sequence
  Description of Artificial Sequence: Synthetic oligonucleotide
  Target: LAMA2; (-) strand; PAM type: YTN; PAM sequence: TTG
gcaccattttaaattgtgtt

SEQ ID NO: 253816 - DNA, 20 bp, Artificial Sequence
  Description of Artificial Sequence: Synthetic oligonucleotide
  Target: LAMA2; (-) strand; PAM type: YTN; PAM sequence: TTA
attggcaccattttaaattg

SEQ ID NO: 253817 - DNA, 20 bp, Artificial Sequence
  Description of Artificial Sequence: Synthetic oligonucleotide
  Target: LAMA2; (-) strand; PAM type: YTN; PAM sequence: CTT
aattggcaccattttaaatt

SEQ ID NO: 253818 - DNA, 20 bp, Artificial Sequence
  Description of Artificial Sequence: Synthetic oligonucleotide
  Target: LAMA2; (-) strand; PAM type: YTN; PAM sequence: CTC
cttaattggcaccattttaa

SEQ ID NO: 253819 - DNA, 20 bp, Artificial Sequence
  Description of Artificial Sequence: Synthetic oligonucleotide
  Target: LAMA2; (-) strand; PAM type: YTN; PAM sequence: TTC
agggaaatgagagtataata

SEQ ID NO: 253820 - DNA, 20 bp, Artificial Sequence
  Description of Artificial Sequence: Synthetic oligonucleotide
  Target: LAMA2; (-) strand; PAM type: YTN; PAM sequence: CTT
cagggaaatgagagtataat

SEQ ID NO: 253821 - DNA, 20 bp, Artificial Sequence
  Description of Artificial Sequence: Synthetic oligonucleotide
  Target: LAMA2; (-) strand; PAM type: YTN; PAM sequence: TTC
ttcagggaaatgagagtata

SEQ ID NO: 253822 - DNA, 20 bp, Artificial Sequence
  Description of Artificial Sequence: Synthetic oligonucleotide
  Target: LAMA2; (-) strand; PAM type: YTN; PAM sequence: TTA
aattcttcagggaaatgaga

SEQ ID NO: 253823 - DNA, 20 bp, Artificial Sequence
  Description of Artificial Sequence: Synthetic oligonucleotide
  Target: LAMA2; (-) strand; PAM type: YTN; PAM sequence: CTT
aaattcttcagggaaatgag

SEQ ID NO: 253824 - DNA, 20 bp, Artificial Sequence
  Description of Artificial Sequence: Synthetic oligonucleotide
  Target: LAMA2; (-) strand; PAM type: YTN; PAM sequence: TTA
caggtaacagaatccgcctt

SEQ ID NO: 253825 - DNA, 20 bp, Artificial Sequence
  Description of Artificial Sequence: Synthetic oligonucleotide
  Target: LAMA2; (-) strand; PAM type: YTN; PAM sequence: TTA
agaattacaggtaacagaat

SEQ ID NO: 253826 - DNA, 20 bp, Artificial Sequence
  Description of Artificial Sequence: Synthetic oligonucleotide
  Target: LAMA2; (-) strand; PAM type: YTN; PAM sequence: TTA
agtagaagagaaatggggga

SEQ ID NO: 253827 - DNA, 20 bp, Artificial Sequence
  Description of Artificial Sequence: Synthetic oligonucleotide
  Target: LAMA2; (-) strand; PAM type: YTN; PAM sequence: TTT
aagtagaagagaaatggggg

SEQ ID NO: 253828 - DNA, 20 bp, Artificial Sequence
  Description of Artificial Sequence: Synthetic oligonucleotide
  Target: LAMA2; (-) strand; PAM type: YTN; PAM sequence: TTT
taagtagaagagaaatgggg

SEQ ID NO: 253829 - DNA, 20 bp, Artificial Sequence
  Description of Artificial Sequence: Synthetic oligonucleotide
  Target: LAMA2; (-) strand; PAM type: YTN; PAM sequence: CTT
ttaagtagaagagaaatggg

SEQ ID NO: 253830 - DNA, 20 bp, Artificial Sequence
  Description of Artificial Sequence: Synthetic oligonucleotide
  Target: LAMA2; (-) strand; PAM type: YTN; PAM sequence: TTC
ccagaagcttttaagtagaa

SEQ ID NO: 253831 - DNA, 20 bp, Artificial Sequence
  Description of Artificial Sequence: Synthetic oligonucleotide
  Target: LAMA2; (-) strand; PAM type: YTN; PAM sequence: TTT
cccagaagcttttaagtaga

SEQ ID NO: 253832 - DNA, 20 bp, Artificial Sequence
  Description of Artificial Sequence: Synthetic oligonucleotide
  Target: LAMA2; (-) strand; PAM type: YTN; PAM sequence: TTT
tcccagaagcttttaagtag

SEQ ID NO: 253833 - DNA, 20 bp, Artificial Sequence
  Description of Artificial Sequence: Synthetic oligonucleotide
  Target: LAMA2; (-) strand; PAM type: YTN; PAM sequence: TTT
ttcccagaagcttttaagta

SEQ ID NO: 253834 - DNA, 20 bp, Artificial Sequence
  Description of Artificial Sequence: Synthetic oligonucleotide
  Target: LAMA2; (-) strand; PAM type: YTN; PAM sequence: TTG
gatttttcccagaagctttt

SEQ ID NO: 253835 - DNA, 20 bp, Artificial Sequence
  Description of Artificial Sequence: Synthetic oligonucleotide
  Target: LAMA2; (-) strand; PAM type: YTN; PAM sequence: TTT
ggatttttcccagaagcttt

SEQ ID NO: 253836 - DNA, 20 bp, Artificial Sequence
  Description of Artificial Sequence: Synthetic oligonucleotide
  Target: LAMA2; (-) strand; PAM type: YTN; PAM sequence: TTT
tggatttttcccagaagctt

SEQ ID NO: 253837 - DNA, 20 bp, Artificial Sequence
  Description of Artificial Sequence: Synthetic oligonucleotide
  Target: LAMA2; (-) strand; PAM type: YTN; PAM sequence: TTC
attttggatttttcccagaa

SEQ ID NO: 253838 - DNA, 20 bp, Artificial Sequence
  Description of Artificial Sequence: Synthetic oligonucleotide
  Target: LAMA2; (-) strand; PAM type: YTN; PAM sequence: TTT
cattttggatttttcccaga

SEQ ID NO: 253839 - DNA, 20 bp, Artificial Sequence
  Description of Artificial Sequence: Synthetic oligonucleotide
  Target: LAMA2; (-) strand; PAM type: YTN; PAM sequence: TTT
tcattttggatttttcccag

SEQ ID NO: 253840 - DNA, 20 bp, Artificial Sequence
  Description of Artificial Sequence: Synthetic oligonucleotide
  Target: LAMA2; (-) strand; PAM type: YTN; PAM sequence: CTG
aattttcattttggattttt

SEQ ID NO: 253841 - DNA, 20 bp, Artificial Sequence
  Description of Artificial Sequence: Synthetic oligonucleotide
  Target: LAMA2; (-) strand; PAM type: YTN; PAM sequence: CTG
aaacaaaagccctgaatttt

SEQ ID NO: 253842 - DNA, 20 bp, Artificial Sequence
  Description of Artificial Sequence: Synthetic oligonucleotide
  Target: LAMA2; (-) strand; PAM type: YTN; PAM sequence: TTA
cactgaaacaaaagccctga

SEQ ID NO: 253843 - DNA, 20 bp, Artificial Sequence
  Description of Artificial Sequence: Synthetic oligonucleotide
  Target: LAMA2; (-) strand; PAM type: YTN; PAM sequence: CTA
aatgccaaattacactgaaa

SEQ ID NO: 253844 - DNA, 20 bp, Artificial Sequence
  Description of Artificial Sequence: Synthetic oligonucleotide
  Target: LAMA2; (-) strand; PAM type: YTN; PAM sequence: TTA
tatagagaaaagggaaagag

SEQ ID NO: 253845 - DNA, 20 bp, Artificial Sequence
  Description of Artificial Sequence: Synthetic oligonucleotide
  Target: LAMA2; (-) strand; PAM type: YTN; PAM sequence: CTT
atatagagaaaagggaaaga

SEQ ID NO: 253846 - DNA, 20 bp, Artificial Sequence
  Description of Artificial Sequence: Synthetic oligonucleotide
  Target: LAMA2; (-) strand; PAM type: YTN; PAM sequence: TTA
aacaaaatcttatatagaga

SEQ ID NO: 253847 - DNA, 20 bp, Artificial Sequence
  Description of Artificial Sequence: Synthetic oligonucleotide
  Target: LAMA2; (-) strand; PAM type: YTN; PAM sequence: TTC
ataatgcaatgcaattaaac

SEQ ID NO: 253848 - DNA, 20 bp, Artificial Sequence
  Description of Artificial Sequence: Synthetic oligonucleotide
  Target: LAMA2; (-) strand; PAM type: YTN; PAM sequence: CTT
cataatgcaatgcaattaaa

SEQ ID NO: 253849 - DNA, 20 bp, Artificial Sequence
  Description of Artificial Sequence: Synthetic oligonucleotide
  Target: LAMA2; (-) strand; PAM type: YTN; PAM sequence: CTC
atgcttcataatgcaatgca

SEQ ID NO: 253850 - DNA, 20 bp, Artificial Sequence
  Description of Artificial Sequence: Synthetic oligonucleotide
  Target: LAMA2; (-) strand; PAM type: YTN; PAM sequence: CTC
tcatgcttcataatgcaatg

SEQ ID NO: 253851 - DNA, 20 bp, Artificial Sequence
  Description of Artificial Sequence: Synthetic oligonucleotide
  Target: LAMA2; (-) strand; PAM type: YTN; PAM sequence: TTA
aggctctcatgcttcataat

SEQ ID NO: 253852 - DNA, 20 bp, Artificial Sequence
  Description of Artificial Sequence: Synthetic oligonucleotide
  Target: LAMA2; (-) strand; PAM type: YTN; PAM sequence: CTG
atccacaaattaaggctctc

SEQ ID NO: 253853 - DNA, 20 bp, Artificial Sequence
  Description of Artificial Sequence: Synthetic oligonucleotide
  Target: LAMA2; (-) strand; PAM type: YTN; PAM sequence: TTC
aaaaatccactgatccacaa

SEQ ID NO: 253854 - DNA, 20 bp, Artificial Sequence
  Description of Artificial Sequence: Synthetic oligonucleotide
  Target: LAMA2; (-) strand; PAM type: YTN; PAM sequence: TTT
caaaaatccactgatccaca

SEQ ID NO: 253855 - DNA, 20 bp, Artificial Sequence
  Description of Artificial Sequence: Synthetic oligonucleotide
  Target: LAMA2; (-) strand; PAM type: YTN; PAM sequence: TTC
ataaaaatgtcatttcaaaa

SEQ ID NO: 253856 - DNA, 20 bp, Artificial Sequence
  Description of Artificial Sequence: Synthetic oligonucleotide
  Target: LAMA2; (-) strand; PAM type: YTN; PAM sequence: CTA
ttcataaaaatgtcatttca

SEQ ID NO: 253857 - DNA, 20 bp, Artificial Sequence
  Description of Artificial Sequence: Synthetic oligonucleotide
  Target: LAMA2; (-) strand; PAM type: YTN; PAM sequence: TTC
tattcataaaaatgtcattt

SEQ ID NO: 253858 - DNA, 20 bp, Artificial Sequence
  Description of Artificial Sequence: Synthetic oligonucleotide
  Target: LAMA2; (-) strand; PAM type: YTN; PAM sequence: TTT
ctattcataaaaatgtcatt

SEQ ID NO: 253859 - DNA, 20 bp, Artificial Sequence
  Description of Artificial Sequence: Synthetic oligonucleotide
  Target: LAMA2; (-) strand; PAM type: YTN; PAM sequence: CTT
tctattcataaaaatgtcat

SEQ ID NO: 253860 - DNA, 20 bp, Artificial Sequence
  Description of Artificial Sequence: Synthetic oligonucleotide
  Target: LAMA2; (-) strand; PAM type: YTN; PAM sequence: TTA
gtctttctattcataaaaat

SEQ ID NO: 253861 - DNA, 20 bp, Artificial Sequence
  Description of Artificial Sequence: Synthetic oligonucleotide
  Target: LAMA2; (-) strand; PAM type: YTN; PAM sequence: CTT
agtctttctattcataaaaa

SEQ ID NO: 253862 - DNA, 20 bp, Artificial Sequence
  Description of Artificial Sequence: Synthetic oligonucleotide
  Target: LAMA2; (-) strand; PAM type: YTN; PAM sequence: TTA
aaatgaaaatcacttagtct

SEQ ID NO: 253863 - DNA, 20 bp, Artificial Sequence
  Description of Artificial Sequence: Synthetic oligonucleotide
  Target: LAMA2; (-) strand; PAM type: YTN; PAM sequence: TTA
tggcataattaaaatgaaaa

SEQ ID NO: 253864 - DNA, 20 bp, Artificial Sequence
  Description of Artificial Sequence: Synthetic oligonucleotide
  Target: LAMA2; (-) strand; PAM type: YTN; PAM sequence: CTT
atggcataattaaaatgaaa

SEQ ID NO: 253865 - DNA, 20 bp, Artificial Sequence
  Description of Artificial Sequence: Synthetic oligonucleotide
  Target: LAMA2; (-) strand; PAM type: YTN; PAM sequence: TTA
aaagacttatggcataatta

SEQ ID NO: 253866 - DNA, 20 bp, Artificial Sequence
  Description of Artificial Sequence: Synthetic oligonucleotide
  Target: LAMA2; (-) strand; PAM type: YTN; PAM sequence: TTT
aaaagacttatggcataatt

SEQ ID NO: 253867 - DNA, 20 bp, Artificial Sequence
  Description of Artificial Sequence: Synthetic oligonucleotide
  Target: LAMA2; (-) strand; PAM type: YTN; PAM sequence: TTT
taaaagacttatggcataat

SEQ ID NO: 253868 - DNA, 20 bp, Artificial Sequence
  Description of Artificial Sequence: Synthetic oligonucleotide
  Target: LAMA2; (-) strand; PAM type: YTN; PAM sequence: TTC
ccaaagtacattttaaaaga

SEQ ID NO: 253869 - DNA, 20 bp, Artificial Sequence
  Description of Artificial Sequence: Synthetic oligonucleotide
  Target: LAMA2; (-) strand; PAM type: YTN; PAM sequence: TTT
cccaaagtacattttaaaag

SEQ ID NO: 253870 - DNA, 20 bp, Artificial Sequence
  Description of Artificial Sequence: Synthetic oligonucleotide
  Target: LAMA2; (-) strand; PAM type: YTN; PAM sequence: TTT
tcccaaagtacattttaaaa

SEQ ID NO: 253871 - DNA, 20 bp, Artificial Sequence
  Description of Artificial Sequence: Synthetic oligonucleotide
  Target: LAMA2; (-) strand; PAM type: YTN; PAM sequence: TTT
ttcccaaagtacattttaaa

SEQ ID NO: 253872 - DNA, 20 bp, Artificial Sequence
  Description of Artificial Sequence: Synthetic oligonucleotide
  Target: LAMA2; (-) strand; PAM type: YTN; PAM sequence: TTA
aaggtaacccaatatttttc

SEQ ID NO: 253873 - DNA, 20 bp, Artificial Sequence
  Description of Artificial Sequence: Synthetic oligonucleotide
  Target: LAMA2; (-) strand; PAM type: YTN; PAM sequence: TTT
aaaggtaacccaatattttt

SEQ ID NO: 253874 - DNA, 20 bp, Artificial Sequence
  Description of Artificial Sequence: Synthetic oligonucleotide
  Target: LAMA2; (-) strand; PAM type: YTN; PAM sequence: TTA
gtgaagtgtttaaaggtaac

SEQ ID NO: 253875 - DNA, 20 bp, Artificial Sequence
  Description of Artificial Sequence: Synthetic oligonucleotide
  Target: LAMA2; (-) strand; PAM type: YTN; PAM sequence: CTG
catgttagtgaagtgtttaa

SEQ ID NO: 253876 - DNA, 20 bp, Artificial Sequence
  Description of Artificial Sequence: Synthetic oligonucleotide
  Target: LAMA2; (-) strand; PAM type: YTN; PAM sequence: CTA
ctgcatgttagtgaagtgtt

SEQ ID NO: 253877 - DNA, 20 bp, Artificial Sequence
  Description of Artificial Sequence: Synthetic oligonucleotide
  Target: LAMA2; (-) strand; PAM type: YTN; PAM sequence: TTC
ctactgcatgttagtgaagt

SEQ ID NO: 253878 - DNA, 20 bp, Artificial Sequence
  Description of Artificial Sequence: Synthetic oligonucleotide
  Target: LAMA2; (-) strand; PAM type: YTN; PAM sequence: TTT
cctactgcatgttagtgaag

SEQ ID NO: 253879 - DNA, 20 bp, Artificial Sequence
  Description of Artificial Sequence: Synthetic oligonucleotide
  Target: LAMA2; (-) strand; PAM type: YTN; PAM sequence: TTA
tttcctactgcatgttagtg

SEQ ID NO: 253880 - DNA, 20 bp, Artificial Sequence
  Description of Artificial Sequence: Synthetic oligonucleotide
  Target: LAMA2; (-) strand; PAM type: YTN; PAM sequence: CTG
agtattatttcctactgcat

SEQ ID NO: 253881 - DNA, 20 bp, Artificial Sequence
  Description of Artificial Sequence: Synthetic oligonucleotide
  Target: LAMA2; (-) strand; PAM type: YTN; PAM sequence: TTG
ggctgagtattatttcctac

SEQ ID NO: 253882 - DNA, 20 bp, Artificial Sequence
  Description of Artificial Sequence: Synthetic oligonucleotide
  Target: LAMA2; (-) strand; PAM type: YTN; PAM sequence: TTT
gggctgagtattatttccta

SEQ ID NO: 253883 - DNA, 20 bp, Artificial Sequence
  Description of Artificial Sequence: Synthetic oligonucleotide
  Target: LAMA2; (-) strand; PAM type: YTN; PAM sequence: TTT
tgggctgagtattatttcct

SEQ ID NO: 253884 - DNA, 20 bp, Artificial Sequence
  Description of Artificial Sequence: Synthetic oligonucleotide
  Target: LAMA2; (-) strand; PAM type: YTN; PAM sequence: TTC
catgtcagttttgggctgag

SEQ ID NO: 253885 - DNA, 20 bp, Artificial Sequence
  Description of Artificial Sequence: Synthetic oligonucleotide
  Target: LAMA2; (-) strand; PAM type: YTN; PAM sequence: TTA
gggtaagtaaaacaattcca

SEQ ID NO: 253886 - DNA, 20 bp, Artificial Sequence
  Description of Artificial Sequence: Synthetic oligonucleotide
  Target: LAMA2; (-) strand; PAM type: YTN; PAM sequence: CTT
agggtaagtaaaacaattcc

SEQ ID NO: 253887 - DNA, 20 bp, Artificial Sequence
  Description of Artificial Sequence: Synthetic oligonucleotide
  Target: LAMA2; (-) strand; PAM type: YTN; PAM sequence: TTC
ttagggtaagtaaaacaatt

SEQ ID NO: 253888 - DNA, 20 bp, Artificial Sequence
  Description of Artificial Sequence: Synthetic oligonucleotide
  Target: LAMA2; (-) strand; PAM type: YTN; PAM sequence: CTT
cttagggtaagtaaaacaat

SEQ ID NO: 253889 - DNA, 20 bp, Artificial Sequence
  Description of Artificial Sequence: Synthetic oligonucleotide
  Target: LAMA2; (-) strand; PAM type: YTN; PAM sequence: TTG
tcttcttagggtaagtaaaa

SEQ ID NO: 253890 - DNA, 20 bp, Artificial Sequence
  Description of Artificial Sequence: Synthetic oligonucleotide
  Target: LAMA2; (-) strand; PAM type: YTN; PAM sequence: TTT
gtcttcttagggtaagtaaa

SEQ ID NO: 253891 - DNA, 20 bp, Artificial Sequence
  Description of Artificial Sequence: Synthetic oligonucleotide
  Target: LAMA2; (-) strand; PAM type: YTN; PAM sequence: TTT
tgtcttcttagggtaagtaa

SEQ ID NO: 253892 - DNA, 20 bp, Artificial Sequence
  Description of Artificial Sequence: Synthetic oligonucleotide
  Target: LAMA2; (-) strand; PAM type: YTN; PAM sequence: TTT
ttgtcttcttagggtaagta

SEQ ID NO: 253893 - DNA, 20 bp, Artificial Sequence
  Description of Artificial Sequence: Synthetic oligonucleotide
  Target: LAMA2; (-) strand; PAM type: YTN; PAM sequence: TTA
tttttgtcttcttagggtaa

SEQ ID NO: 253894 - DNA, 20 bp, Artificial Sequence
  Description of Artificial Sequence: Synthetic oligonucleotide
  Target: LAMA2; (-) strand; PAM type: YTN; PAM sequence: CTT
atttttgtcttcttagggta

SEQ ID NO: 253895 - DNA, 20 bp, Artificial Sequence
  Description of Artificial Sequence: Synthetic oligonucleotide
  Target: LAMA2; (-) strand; PAM type: YTN; PAM sequence: TTA
tgacatacttatttttgtct

SEQ ID NO: 253896 - DNA, 20 bp, Artificial Sequence
  Description of Artificial Sequence: Synthetic oligonucleotide
  Target: LAMA2; (-) strand; PAM type: YTN; PAM sequence: TTG
gtattatgacatacttattt

SEQ ID NO: 253897 - DNA, 20 bp, Artificial Sequence
  Description of Artificial Sequence: Synthetic oligonucleotide
  Target: LAMA2; (-) strand; PAM type: YTN; PAM sequence: TTT
ggtattatgacatacttatt

SEQ ID NO: 253898 - DNA, 20 bp, Artificial Sequence
  Description of Artificial Sequence: Synthetic oligonucleotide
  Target: LAMA2; (-) strand; PAM type: YTN; PAM sequence: CTA
tatggaacatcatgagtttg

SEQ ID NO: 253899 - DNA, 20 bp, Artificial Sequence
  Description of Artificial Sequence: Synthetic oligonucleotide
  Target: LAMA2; (-) strand; PAM type: YTN; PAM sequence: TTC
atgaaatatgactatatgga

SEQ ID NO: 253900 - DNA, 20 bp, Artificial Sequence
  Description of Artificial Sequence: Synthetic oligonucleotide
  Target: LAMA2; (-) strand; PAM type: YTN; PAM sequence: CTA
atgaattcatgaaatatgac

SEQ ID NO: 253901 - DNA, 20 bp, Artificial Sequence
  Description of Artificial Sequence: Synthetic oligonucleotide
  Target: LAMA2; (-) strand; PAM type: YTN; PAM sequence: TTA
tcctaatgaattcatgaaat

SEQ ID NO: 253902 - DNA, 20 bp, Artificial Sequence
  Description of Artificial Sequence: Synthetic oligonucleotide
  Target: LAMA2; (-) strand; PAM type: YTN; PAM sequence: TTT
atcctaatgaattcatgaaa

SEQ ID NO: 253903 - DNA, 20 bp, Artificial Sequence
  Description of Artificial Sequence: Synthetic oligonucleotide
  Target: LAMA2; (-) strand; PAM type: YTN; PAM sequence: TTT
tatcctaatgaattcatgaa

SEQ ID NO: 253904 - DNA, 20 bp, Artificial Sequence
  Description of Artificial Sequence: Synthetic oligonucleotide
  Target: LAMA2; (-) strand; PAM type: YTN; PAM sequence: TTG
attttatcctaatgaattca

SEQ ID NO: 253905 - DNA, 20 bp, Artificial Sequence
  Description of Artificial Sequence: Synthetic oligonucleotide
  Target: LAMA2; (-) strand; PAM type: YTN; PAM sequence: TTT
gattttatcctaatgaattc

SEQ ID NO: 253906 - DNA, 20 bp, Artificial Sequence
  Description of Artificial Sequence: Synthetic oligonucleotide
  Target: LAMA2; (-) strand; PAM type: YTN; PAM sequence: TTG
atttgattttatcctaatga

SEQ ID NO: 253907 - DNA, 20 bp, Artificial Sequence
  Description of Artificial Sequence: Synthetic oligonucleotide
  Target: LAMA2; (-) strand; PAM type: YTN; PAM sequence: TTT
gatttgattttatcctaatg

SEQ ID NO: 253908 - DNA, 20 bp, Artificial Sequence
  Description of Artificial Sequence: Synthetic oligonucleotide
  Target: LAMA2; (-) strand; PAM type: YTN; PAM sequence: TTC
agcatgaaaatttgatttga

SEQ ID NO: 253909 - DNA, 20 bp, Artificial Sequence
  Description of Artificial Sequence: Synthetic oligonucleotide
  Target: LAMA2; (-) strand; PAM type: YTN; PAM sequence: CTA
atgaattcagcatgaaaatt

SEQ ID NO: 253910 - DNA, 20 bp, Artificial Sequence
  Description of Artificial Sequence: Synthetic oligonucleotide
  Target: LAMA2; (-) strand; PAM type: YTN; PAM sequence: TTC
atcctaatgaattcagcatg

SEQ ID NO: 253911 - DNA, 20 bp, Artificial Sequence
  Description of Artificial Sequence: Synthetic oligonucleotide
  Target: LAMA2; (-) strand; PAM type: YTN; PAM sequence: TTT
catcctaatgaattcagcat

SEQ ID NO: 253912 - DNA, 20 bp, Artificial Sequence
  Description of Artificial Sequence: Synthetic oligonucleotide
  Target: LAMA2; (-) strand; PAM type: YTN; PAM sequence: CTT
tcatcctaatgaattcagca

SEQ ID NO: 253913 - DNA, 20 bp, Artificial Sequence
  Description of Artificial Sequence: Synthetic oligonucleotide
  Target: LAMA2; (-) strand; PAM type: YTN; PAM sequence: TTG
ctttcatcctaatgaattca

SEQ ID NO: 253914 - DNA, 20 bp, Artificial Sequence
  Description of Artificial Sequence: Synthetic oligonucleotide
  Target: LAMA2; (-) strand; PAM type: YTN; PAM sequence: TTT
gctttcatcctaatgaattc

SEQ ID NO: 253915 - DNA, 20 bp, Artificial Sequence
  Description of Artificial Sequence: Synthetic oligonucleotide
  Target: LAMA2; (-) strand; PAM type: YTN; PAM sequence: CTA
atttgctttcatcctaatga

SEQ ID NO: 253916 - DNA, 20 bp, Artificial Sequence
  Description of Artificial Sequence: Synthetic oligonucleotide
  Target: LAMA2; (-) strand; PAM type: YTN; PAM sequence: TTA
gaaatatcacatcaacaaat

SEQ ID NO: 253917 - DNA, 20 bp, Artificial Sequence
  Description of Artificial Sequence: Synthetic oligonucleotide
  Target: LAMA2; (-) strand; PAM type: YTN; PAM sequence: TTT
agaaatatcacatcaacaaa

SEQ ID NO: 253918 - DNA, 20 bp, Artificial Sequence
  Description of Artificial Sequence: Synthetic oligonucleotide
  Target: LAMA2; (-) strand; PAM type: YTN; PAM sequence: TTT
tagaaatatcacatcaacaa

SEQ ID NO: 253919 - DNA, 20 bp, Artificial Sequence
  Description of Artificial Sequence: Synthetic oligonucleotide
  Target: LAMA2; (-) strand; PAM type: YTN; PAM sequence: CTA
gttttagaaatatcacatca

SEQ ID NO: 253920 - DNA, 20 bp, Artificial Sequence
  Description of Artificial Sequence: Synthetic oligonucleotide
  Target: LAMA2; (-) strand; PAM type: YTN; PAM sequence: TTC
tagttttagaaatatcacat

SEQ ID NO: 253921 - DNA, 20 bp, Artificial Sequence
  Description of Artificial Sequence: Synthetic oligonucleotide
  Target: LAMA2; (-) strand; PAM type: YTN; PAM sequence: CTT
ctagttttagaaatatcaca

SEQ ID NO: 253922 - DNA, 20 bp, Artificial Sequence
  Description of Artificial Sequence: Synthetic oligonucleotide
  Target: LAMA2; (-) strand; PAM type: YTN; PAM sequence: TTA
aaaaaggcttctagttttag

SEQ ID NO: 253923 - DNA, 20 bp, Artificial Sequence
  Description of Artificial Sequence: Synthetic oligonucleotide
  Target: LAMA2; (-) strand; PAM type: YTN; PAM sequence: TTA
gttaaaaaaggcttctagtt

SEQ ID NO: 253924 - DNA, 20 bp, Artificial Sequence
  Description of Artificial Sequence: Synthetic oligonucleotide
  Target: LAMA2; (-) strand; PAM type: YTN; PAM sequence: TTA
ttagttaaaaaaggcttcta

SEQ ID NO: 253925 - DNA, 20 bp, Artificial Sequence
  Description of Artificial Sequence: Synthetic oligonucleotide
  Target: LAMA2; (-) strand; PAM type: YTN; PAM sequence: TTT
attagttaaaaaaggcttct

SEQ ID NO: 253926 - DNA, 20 bp, Artificial Sequence
  Description of Artificial Sequence: Synthetic oligonucleotide
  Target: LAMA2; (-) strand; PAM type: YTN; PAM sequence: TTT
tattagttaaaaaaggcttc

SEQ ID NO: 253927 - DNA, 20 bp, Artificial Sequence
  Description of Artificial Sequence: Synthetic oligonucleotide
  Target: LAMA2; (-) strand; PAM type: YTN; PAM sequence: CTG
ttttattagttaaaaaaggc

SEQ ID NO: 253928 - DNA, 20 bp, Artificial Sequence
  Description of Artificial Sequence: Synthetic oligonucleotide
  Target: LAMA2; (-) strand; PAM type: YTN; PAM sequence: CTG
aatgacactgttttattagt

SEQ ID NO: 253929 - DNA, 20 bp, Artificial Sequence
  Description of Artificial Sequence: Synthetic oligonucleotide
  Target: LAMA2; (-) strand; PAM type: YTN; PAM sequence: TTA
tgctgaatgacactgtttta

SEQ ID NO: 253930 - DNA, 20 bp, Artificial Sequence
  Description of Artificial Sequence: Synthetic oligonucleotide
  Target: LAMA2; (-) strand; PAM type: YTN; PAM sequence: CTC
aaaattatgctgaatgacac

SEQ ID NO: 253931 - DNA, 20 bp, Artificial Sequence
  Description of Artificial Sequence: Synthetic oligonucleotide
  Target: LAMA2; (-) strand; PAM type: YTN; PAM sequence: CTC
tcaaaattatgctgaatgac

SEQ ID NO: 253932 - DNA, 20 bp, Artificial Sequence
  Description of Artificial Sequence: Synthetic oligonucleotide
  Target: LAMA2; (-) strand; PAM type: YTN; PAM sequence: TTC
tctcaaaattatgctgaatg

SEQ ID NO: 253933 - DNA, 20 bp, Artificial Sequence
  Description of Artificial Sequence: Synthetic oligonucleotide
  Target: LAMA2; (-) strand; PAM type: YTN; PAM sequence: CTT
ctctcaaaattatgctgaat

SEQ ID NO: 253934 - DNA, 20 bp, Artificial Sequence
  Description of Artificial Sequence: Synthetic oligonucleotide
  Target: LAMA2; (-) strand; PAM type: YTN; PAM sequence: TTC
cttctctcaaaattatgctg

SEQ ID NO: 253935 - DNA, 20 bp, Artificial Sequence
  Description of Artificial Sequence: Synthetic oligonucleotide
  Target: LAMA2; (-) strand; PAM type: YTN; PAM sequence: CTT
ccttctctcaaaattatgct

SEQ ID NO: 253936 - DNA, 20 bp, Artificial Sequence
  Description of Artificial Sequence: Synthetic oligonucleotide
  Target: LAMA2; (-) strand; PAM type: YTN; PAM sequence: CTC
ccttccttctctcaaaatta

SEQ ID NO: 253937 - DNA, 20 bp, Artificial Sequence
  Description of Artificial Sequence: Synthetic oligonucleotide
  Target: LAMA2; (-) strand; PAM type: YTN; PAM sequence: CTC
tcccttccttctctcaaaat

SEQ ID NO: 253938 - DNA, 20 bp, Artificial Sequence
  Description of Artificial Sequence: Synthetic oligonucleotide
  Target: LAMA2; (-) strand; PAM type: YTN; PAM sequence: TTC
tctcccttccttctctcaaa

SEQ ID NO: 253939 - DNA, 20 bp, Artificial Sequence
  Description of Artificial Sequence: Synthetic oligonucleotide
  Target: LAMA2; (-) strand; PAM type: YTN; PAM sequence: CTG
ttctctcccttccttctctc

SEQ ID NO: 253940 - DNA, 20 bp, Artificial Sequence
  Description of Artificial Sequence: Synthetic oligonucleotide
  Target: LAMA2; (-) strand; PAM type: YTN; PAM sequence: TTA
gtagggtctgttctctccct

SEQ ID NO: 253941 - DNA, 20 bp, Artificial Sequence
  Description of Artificial Sequence: Synthetic oligonucleotide
  Target: LAMA2; (-) strand; PAM type: YTN; PAM sequence: CTA
ggcatcattagtagggtctg

SEQ ID NO: 253942 - DNA, 20 bp, Artificial Sequence
  Description of Artificial Sequence: Synthetic oligonucleotide
  Target: LAMA2; (-) strand; PAM type: YTN; PAM sequence: TTC
atgaaacaaaatcagtaaac

SEQ ID NO: 253943 - DNA, 20 bp, Artificial Sequence
  Description of Artificial Sequence: Synthetic oligonucleotide
  Target: LAMA2; (-) strand; PAM type: YTN; PAM sequence: CTG
ttcatgaaacaaaatcagta

SEQ ID NO: 253944 - DNA, 20 bp, Artificial Sequence
  Description of Artificial Sequence: Synthetic oligonucleotide
  Target: LAMA2; (-) strand; PAM type: YTN; PAM sequence: CTC
cctgttcatgaaacaaaatc

SEQ ID NO: 253945 - DNA, 20 bp, Artificial Sequence
  Description of Artificial Sequence: Synthetic oligonucleotide
  Target: LAMA2; (-) strand; PAM type: YTN; PAM sequence: CTA
tctccctgttcatgaaacaa

SEQ ID NO: 253946 - DNA, 20 bp, Artificial Sequence
  Description of Artificial Sequence: Synthetic oligonucleotide
  Target: LAMA2; (-) strand; PAM type: YTN; PAM sequence: CTC
ctatctccctgttcatgaaa

SEQ ID NO: 253947 - DNA, 20 bp, Artificial Sequence
  Description of Artificial Sequence: Synthetic oligonucleotide
  Target: LAMA2; (-) strand; PAM type: YTN; PAM sequence: TTG
aaggagacctcctatctccc

SEQ ID NO: 253948 - DNA, 20 bp, Artificial Sequence
  Description of Artificial Sequence: Synthetic oligonucleotide
  Target: LAMA2; (-) strand; PAM type: YTN; PAM sequence: TTT
gaaggagacctcctatctcc

SEQ ID NO: 253949 - DNA, 20 bp, Artificial Sequence
  Description of Artificial Sequence: Synthetic oligonucleotide
  Target: LAMA2; (-) strand; PAM type: YTN; PAM sequence: TTA
tttgaaggagacctcctatc

SEQ ID NO: 253950 - DNA, 20 bp, Artificial Sequence
  Description of Artificial Sequence: Synthetic oligonucleotide
  Target: LAMA2; (-) strand; PAM type: YTN; PAM sequence: CTG
ttatttgaaggagacctcct

SEQ ID NO: 253951 - DNA, 20 bp, Artificial Sequence
  Description of Artificial Sequence: Synthetic oligonucleotide
  Target: LAMA2; (-) strand; PAM type: YTN; PAM sequence: CTC
tgttatttgaaggagacctc

SEQ ID NO: 253952 - DNA, 20 bp, Artificial Sequence
  Description of Artificial Sequence: Synthetic oligonucleotide
  Target: LAMA2; (-) strand; PAM type: YTN; PAM sequence: CTC
aagatcgctctgttatttga

SEQ ID NO: 253953 - DNA, 20 bp, Artificial Sequence
  Description of Artificial Sequence: Synthetic oligonucleotide
  Target: LAMA2; (-) strand; PAM type: YTN; PAM sequence: TTC
ctcaagatcgctctgttatt

SEQ ID NO: 253954 - DNA, 20 bp, Artificial Sequence
  Description of Artificial Sequence: Synthetic oligonucleotide
  Target: LAMA2; (-) strand; PAM type: YTN; PAM sequence: TTT
cctcaagatcgctctgttat

SEQ ID NO: 253955 - DNA, 20 bp, Artificial Sequence
  Description of Artificial Sequence: Synthetic oligonucleotide
  Target: LAMA2; (-) strand; PAM type: YTN; PAM sequence: CTG
tttcctcaagatcgctctgt

SEQ ID NO: 253956 - DNA, 20 bp, Artificial Sequence
  Description of Artificial Sequence: Synthetic oligonucleotide
  Target: LAMA2; (-) strand; PAM type: YTN; PAM sequence: TTA
tcatcaagatgtccactgtt

SEQ ID NO: 253957 - DNA, 20 bp, Artificial Sequence
  Description of Artificial Sequence: Synthetic oligonucleotide
  Target: LAMA2; (-) strand; PAM type: YTN; PAM sequence: TTT
atcatcaagatgtccactgt

SEQ ID NO: 253958 - DNA, 20 bp, Artificial Sequence
  Description of Artificial Sequence: Synthetic oligonucleotide
  Target: LAMA2; (-) strand; PAM type: YTN; PAM sequence: CTT
tatcatcaagatgtccactg

SEQ ID NO: 253959 - DNA, 20 bp, Artificial Sequence
  Description of Artificial Sequence: Synthetic oligonucleotide
  Target: LAMA2; (-) strand; PAM type: YTN; PAM sequence: CTG
tctttatcatcaagatgtcc

SEQ ID NO: 253960 - DNA, 20 bp, Artificial Sequence
  Description of Artificial Sequence: Synthetic oligonucleotide
  Target: LAMA2; (-) strand; PAM type: YTN; PAM sequence: TTC
tgtctttatcatcaagatgt

SEQ ID NO: 253961 - DNA, 20 bp, Artificial Sequence
  Description of Artificial Sequence: Synthetic oligonucleotide
  Target: LAMA2; (-) strand; PAM type: YTN; PAM sequence: TTC
aggaaacaccagattctgtc

SEQ ID NO: 253962 - DNA, 20 bp, Artificial Sequence
  Description of Artificial Sequence: Synthetic oligonucleotide
  Target: LAMA2; (-) strand; PAM type: YTN; PAM sequence: CTA
tgatggaaaattcaggaaac

SEQ ID NO: 253963 - DNA, 20 bp, Artificial Sequence
  Description of Artificial Sequence: Synthetic oligonucleotide
  Target: LAMA2; (-) strand; PAM type: YTN; PAM sequence: CTA
gctatgatggaaaattcagg

SEQ ID NO: 253964 - DNA, 20 bp, Artificial Sequence
  Description of Artificial Sequence: Synthetic oligonucleotide
  Target: LAMA2; (-) strand; PAM type: YTN; PAM sequence: TTA
ctagctatgatggaaaattc

SEQ ID NO: 253965 - DNA, 20 bp, Artificial Sequence
  Description of Artificial Sequence: Synthetic oligonucleotide
  Target: LAMA2; (-) strand; PAM type: YTN; PAM sequence: TTT
actagctatgatggaaaatt

SEQ ID NO: 253966 - DNA, 20 bp, Artificial Sequence
  Description of Artificial Sequence: Synthetic oligonucleotide
  Target: LAMA2; (-) strand; PAM type: YTN; PAM sequence: CTA
tttactagctatgatggaaa

SEQ ID NO: 253967 - DNA, 20 bp, Artificial Sequence
  Description of Artificial Sequence: Synthetic oligonucleotide
  Target: LAMA2; (-) strand; PAM type: YTN; PAM sequence: CTA
catgatcacctatttactag

SEQ ID NO: 253968 - DNA, 20 bp, Artificial Sequence
  Description of Artificial Sequence: Synthetic oligonucleotide
  Target: LAMA2; (-) strand; PAM type: YTN; PAM sequence: TTG
aaagtcagtatatcctacat

SEQ ID NO: 253969 - DNA, 20 bp, Artificial Sequence
  Description of Artificial Sequence: Synthetic oligonucleotide
  Target: LAMA2; (-) strand; PAM type: YTN; PAM sequence: CTT
gaaagtcagtatatcctaca

SEQ ID NO: 253970 - DNA, 20 bp, Artificial Sequence
  Description of Artificial Sequence: Synthetic oligonucleotide
  Target: LAMA2; (-) strand; PAM type: YTN; PAM sequence: TTG
gagaaagggcacttgaaagt

SEQ ID NO: 253971 - DNA, 20 bp, Artificial Sequence
  Description of Artificial Sequence: Synthetic oligonucleotide
  Target: LAMA2; (-) strand; PAM type: YTN; PAM sequence: TTT
ggagaaagggcacttgaaag

SEQ ID NO: 253972 - DNA, 20 bp, Artificial Sequence
  Description of Artificial Sequence: Synthetic oligonucleotide
  Target: LAMA2; (-) strand; PAM type: YTN; PAM sequence: TTT
tggagaaagggcacttgaaa

SEQ ID NO: 253973 - DNA, 20 bp, Artificial Sequence
  Description of Artificial Sequence: Synthetic oligonucleotide
  Target: LAMA2; (-) strand; PAM type: YTN; PAM sequence: TTA
tcaatacaattttggagaaa

SEQ ID NO: 253974 - DNA, 20 bp, Artificial Sequence
  Description of Artificial Sequence: Synthetic oligonucleotide
  Target: LAMA2; (-) strand; PAM type: YTN; PAM sequence: TTA
gttatcaatacaattttgga

SEQ ID NO: 253975 - DNA, 20 bp, Artificial Sequence
  Description of Artificial Sequence: Synthetic oligonucleotide
  Target: LAMA2; (-) strand; PAM type: YTN; PAM sequence: CTT
agttatcaatacaattttgg

SEQ ID NO: 253976 - DNA, 20 bp, Artificial Sequence
  Description of Artificial Sequence: Synthetic oligonucleotide
  Target: LAMA2; (-) strand; PAM type: YTN; PAM sequence: CTC
aaaatggaatatcagcactt

SEQ ID NO: 253977 - DNA, 20 bp, Artificial Sequence
  Description of Artificial Sequence: Synthetic oligonucleotide
  Target: LAMA2; (-) strand; PAM type: YTN; PAM sequence: TTG
tatcagaacccatatactca

SEQ ID NO: 253978 - DNA, 20 bp, Artificial Sequence
  Description of Artificial Sequence: Synthetic oligonucleotide
  Target: LAMA2; (-) strand; PAM type: YTN; PAM sequence: TTG
tgtattgtatcagaacccat

SEQ ID NO: 253979 - DNA, 20 bp, Artificial Sequence
  Description of Artificial Sequence: Synthetic oligonucleotide
  Target: LAMA2; (-) strand; PAM type: YTN; PAM sequence: TTT
gtgtattgtatcagaaccca

SEQ ID NO: 253980 - DNA, 20 bp, Artificial Sequence
  Description of Artificial Sequence: Synthetic oligonucleotide
  Target: LAMA2; (-) strand; PAM type: YTN; PAM sequence: CTT
tgtgtattgtatcagaaccc

SEQ ID NO: 253981 - DNA, 20 bp, Artificial Sequence
  Description of Artificial Sequence: Synthetic oligonucleotide
  Target: LAMA2; (-) strand; PAM type: YTN; PAM sequence: CTC
tttgtgtattgtatcagaac

SEQ ID NO: 253982 - DNA, 20 bp, Artificial Sequence
  Description of Artificial Sequence: Synthetic oligonucleotide
  Target: LAMA2; (-) strand; PAM type: YTN; PAM sequence: CTC
ctctttgtgtattgtatcag

SEQ ID NO: 253983 - DNA, 20 bp, Artificial Sequence
  Description of Artificial Sequence: Synthetic oligonucleotide
  Target: LAMA2; (-) strand; PAM type: YTN; PAM sequence: TTC
tcctctttgtgtattgtatc

SEQ ID NO: 253984 - DNA, 20 bp, Artificial Sequence
  Description of Artificial Sequence: Synthetic oligonucleotide
  Target: LAMA2; (-) strand; PAM type: YTN; PAM sequence: TTC
aaatattctcctctttgtgt

SEQ ID NO: 253985 - DNA, 20 bp, Artificial Sequence
  Description of Artificial Sequence: Synthetic oligonucleotide
  Target: LAMA2; (-) strand; PAM type: YTN; PAM sequence: TTG
atgagcaacattcaaatatt

SEQ ID NO: 253986 - DNA, 20 bp, Artificial Sequence
  Description of Artificial Sequence: Synthetic oligonucleotide
  Target: LAMA2; (-) strand; PAM type: YTN; PAM sequence: CTT
gatgagcaacattcaaatat

SEQ ID NO: 253987 - DNA, 20 bp, Artificial Sequence
  Description of Artificial Sequence: Synthetic oligonucleotide
  Target: LAMA2; (-) strand; PAM type: YTN; PAM sequence: CTG
aacagtaagaatgcccttga

SEQ ID NO: 253988 - DNA, 20 bp, Artificial Sequence
  Description of Artificial Sequence: Synthetic oligonucleotide
  Target: LAMA2; (-) strand; PAM type: YTN; PAM sequence: CTA
aaatgcagggtcagctgaac

SEQ ID NO: 253989 - DNA, 20 bp, Artificial Sequence
  Description of Artificial Sequence: Synthetic oligonucleotide
  Target: LAMA2; (-) strand; PAM type: YTN; PAM sequence: TTA
aaaccatgaaaaataaacaa

SEQ ID NO: 253990 - DNA, 20 bp, Artificial Sequence
  Description of Artificial Sequence: Synthetic oligonucleotide
  Target: LAMA2; (-) strand; PAM type: YTN; PAM sequence: CTG
ggttaaaaccatgaaaaata

SEQ ID NO: 253991 - DNA, 20 bp, Artificial Sequence
  Description of Artificial Sequence: Synthetic oligonucleotide
  Target: LAMA2; (-) strand; PAM type: YTN; PAM sequence: TTA
atgctgggttaaaaccatga

SEQ ID NO: 253992 - DNA, 20 bp, Artificial Sequence
  Description of Artificial Sequence: Synthetic oligonucleotide
  Target: LAMA2; (-) strand; PAM type: YTN; PAM sequence: CTT
aatgctgggttaaaaccatg

SEQ ID NO: 253993 - DNA, 20 bp, Artificial Sequence
  Description of Artificial Sequence: Synthetic oligonucleotide
  Target: LAMA2; (-) strand; PAM type: YTN; PAM sequence: CTA
cttaatgctgggttaaaacc

SEQ ID NO: 253994 - DNA, 20 bp, Artificial Sequence
  Description of Artificial Sequence: Synthetic oligonucleotide
  Target: LAMA2; (-) strand; PAM type: YTN; PAM sequence: CTA
aaaaccatgctacttaatgc

SEQ ID NO: 253995 - DNA, 20 bp, Artificial Sequence
  Description of Artificial Sequence: Synthetic oligonucleotide
  Target: LAMA2; (-) strand; PAM type: YTN; PAM sequence: TTC
atgctaaaaaccatgctact

SEQ ID NO: 253996 - DNA, 20 bp, Artificial Sequence
  Description of Artificial Sequence: Synthetic oligonucleotide
  Target: LAMA2; (-) strand; PAM type: YTN; PAM sequence: TTT
catgctaaaaaccatgctac

SEQ ID NO: 253997 - DNA, 20 bp, Artificial Sequence
  Description of Artificial Sequence: Synthetic oligonucleotide
  Target: LAMA2; (-) strand; PAM type: YTN; PAM sequence: TTT
tcatgctaaaaaccatgcta

SEQ ID NO: 253998 - DNA, 20 bp, Artificial Sequence
  Description of Artificial Sequence: Synthetic oligonucleotide
  Target: LAMA2; (-) strand; PAM type: YTN; PAM sequence: TTT
ttcatgctaaaaaccatgct

SEQ ID NO: 253999 - DNA, 20 bp, Artificial Sequence
  Description of Artificial Sequence: Synthetic oligonucleotide
  Target: LAMA2; (-) strand; PAM type: YTN; PAM sequence: TTA
tttttcatgctaaaaaccat

SEQ ID NO: 254000 - DNA, 20 bp, Artificial Sequence
  Description of Artificial Sequence: Synthetic oligonucleotide
  Target: LAMA2; (-) strand; PAM type: YTN; PAM sequence: TTT
atttttcatgctaaaaacca

SEQ ID NO: 254001 - DNA, 20 bp, Artificial Sequence
  Description of Artificial Sequence: Synthetic oligonucleotide
  Target: LAMA2; (-) strand; PAM type: YTN; PAM sequence: TTA
taaatttatttttcatgcta

SEQ ID NO: 254002 - DNA, 20 bp, Artificial Sequence
  Description of Artificial Sequence: Synthetic oligonucleotide
  Target: LAMA2; (-) strand; PAM type: YTN; PAM sequence: TTT
ataaatttatttttcatgct

SEQ ID NO: 254003 - DNA, 20 bp, Artificial Sequence
  Description of Artificial Sequence: Synthetic oligonucleotide
  Target: LAMA2; (-) strand; PAM type: YTN; PAM sequence: TTA
taaatttataaatttatttt

SEQ ID NO: 254004 - DNA, 20 bp, Artificial Sequence
  Description of Artificial Sequence: Synthetic oligonucleotide
  Target: LAMA2; (-) strand; PAM type: YTN; PAM sequence: TTT
ataaatttataaatttattt

SEQ ID NO: 254005 - DNA, 20 bp, Artificial Sequence
  Description of Artificial Sequence: Synthetic oligonucleotide
  Target: LAMA2; (-) strand; PAM type: YTN; PAM sequence: CTT
tataaatttataaatttatt

SEQ ID NO: 254006 - DNA, 20 bp, Artificial Sequence
  Description of Artificial Sequence: Synthetic oligonucleotide
  Target: LAMA2; (-) strand; PAM type: YTN; PAM sequence: TTA
agctttataaatttataaat

SEQ ID NO: 254007 - DNA, 20 bp, Artificial Sequence
  Description of Artificial Sequence: Synthetic oligonucleotide
  Target: LAMA2; (-) strand; PAM type: YTN; PAM sequence: TTA
aagcaagttaagctttataa

SEQ ID NO: 254008 - DNA, 20 bp, Artificial Sequence
  Description of Artificial Sequence: Synthetic oligonucleotide
  Target: LAMA2; (-) strand; PAM type: YTN; PAM sequence: TTT
aaagcaagttaagctttata

SEQ ID NO: 254009 - DNA, 20 bp, Artificial Sequence
  Description of Artificial Sequence: Synthetic oligonucleotide
  Target: LAMA2; (-) strand; PAM type: YTN; PAM sequence: TTT
taaagcaagttaagctttat

SEQ ID NO: 254010 - DNA, 20 bp, Artificial Sequence
  Description of Artificial Sequence: Synthetic oligonucleotide
  Target: LAMA2; (-) strand; PAM type: YTN; PAM sequence: TTA
taatcaaattttaaagcaag

SEQ ID NO: 254011 - DNA, 20 bp, Artificial Sequence
  Description of Artificial Sequence: Synthetic oligonucleotide
  Target: LAMA2; (-) strand; PAM type: YTN; PAM sequence: TTT
ataatcaaattttaaagcaa

SEQ ID NO: 254012 - DNA, 20 bp, Artificial Sequence
  Description of Artificial Sequence: Synthetic oligonucleotide
  Target: LAMA2; (-) strand; PAM type: YTN; PAM sequence: TTC
agataatttataatcaaatt

SEQ ID NO: 254013 - DNA, 20 bp, Artificial Sequence
  Description of Artificial Sequence: Synthetic oligonucleotide
  Target: LAMA2; (-) strand; PAM type: YTN; PAM sequence: TTT
cagataatttataatcaaat

SEQ ID NO: 254014 - DNA, 20 bp, Artificial Sequence
  Description of Artificial Sequence: Synthetic oligonucleotide
  Target: LAMA2; (-) strand; PAM type: YTN; PAM sequence: TTT
tcagataatttataatcaaa

SEQ ID NO: 254015 - DNA, 20 bp, Artificial Sequence
  Description of Artificial Sequence: Synthetic oligonucleotide
  Target: LAMA2; (-) strand; PAM type: YTN; PAM sequence: TTT
ttcagataatttataatcaa

SEQ ID NO: 254016 - DNA, 20 bp, Artificial Sequence
  Description of Artificial Sequence: Synthetic oligonucleotide
  Target: LAMA2; (-) strand; PAM type: YTN; PAM sequence: CTG
gtgccaaaaatatttttcag

SEQ ID NO: 254017 - DNA, 20 bp, Artificial Sequence
  Description of Artificial Sequence: Synthetic oligonucleotide
  Target: LAMA2; (-) strand; PAM type: YTN; PAM sequence: TTC
tggtgccaaaaatatttttc

SEQ ID NO: 254018 - DNA, 20 bp, Artificial Sequence
  Description of Artificial Sequence: Synthetic oligonucleotide
  Target: LAMA2; (-) strand; PAM type: YTN; PAM sequence: TTG
ttctggtgccaaaaatattt

SEQ ID NO: 254019 - DNA, 20 bp, Artificial Sequence
  Description of Artificial Sequence: Synthetic oligonucleotide
  Target: LAMA2; (-) strand; PAM type: YTN; PAM sequence: TTT
gttctggtgccaaaaatatt

SEQ ID NO: 254020 - DNA, 20 bp, Artificial Sequence
  Description of Artificial Sequence: Synthetic oligonucleotide
  Target: LAMA2; (-) strand; PAM type: YTN; PAM sequence: TTT
tgttctggtgccaaaaatat

SEQ ID NO: 254021 - DNA, 20 bp, Artificial Sequence
  Description of Artificial Sequence: Synthetic oligonucleotide
  Target: LAMA2; (-) strand; PAM type: YTN; PAM sequence: TTA
gattttgttctggtgccaaa

SEQ ID NO: 254022 - DNA, 20 bp, Artificial Sequence
  Description of Artificial Sequence: Synthetic oligonucleotide
  Target: LAMA2; (-) strand; PAM type: YTN; PAM sequence: TTT
agattttgttctggtgccaa

SEQ ID NO: 254023 - DNA, 20 bp, Artificial Sequence
  Description of Artificial Sequence: Synthetic oligonucleotide
  Target: LAMA2; (-) strand; PAM type: YTN; PAM sequence: TTG
cagaagtttagattttgttc

SEQ ID NO: 254024 - DNA, 20 bp, Artificial Sequence
  Description of Artificial Sequence: Synthetic oligonucleotide
  Target: LAMA2; (-) strand; PAM type: YTN; PAM sequence: CTA
ttgcagaagtttagattttg

SEQ ID NO: 254025 - DNA, 20 bp, Artificial Sequence
  Description of Artificial Sequence: Synthetic oligonucleotide
  Target: LAMA2; (-) strand; PAM type: YTN; PAM sequence: CTA
cactattgcagaagtttaga

SEQ ID NO: 254026 - DNA, 20 bp, Artificial Sequence
  Description of Artificial Sequence: Synthetic oligonucleotide
  Target: LAMA2; (-) strand; PAM type: YTN; PAM sequence: TTA
aatatagacctacactattg

SEQ ID NO: 254027 - DNA, 20 bp, Artificial Sequence
  Description of Artificial Sequence: Synthetic oligonucleotide
  Target: LAMA2; (-) strand; PAM type: YTN; PAM sequence: TTT
aaatatagacctacactatt

SEQ ID NO: 254028 - DNA, 20 bp, Artificial Sequence
  Description of Artificial Sequence: Synthetic oligonucleotide
  Target: LAMA2; (-) strand; PAM type: YTN; PAM sequence: TTT
taaatatagacctacactat

SEQ ID NO: 254029 - DNA, 20 bp, Artificial Sequence
  Description of Artificial Sequence: Synthetic oligonucleotide
  Target: LAMA2; (-) strand; PAM type: YTN; PAM sequence: CTT
ttaaatatagacctacacta

SEQ ID NO: 254030 - DNA, 20 bp, Artificial Sequence
  Description of Artificial Sequence: Synthetic oligonucleotide
  Target: LAMA2; (-) strand; PAM type: YTN; PAM sequence: TTA
aaatgtcttttaaatataga

SEQ ID NO: 254031 - DNA, 20 bp, Artificial Sequence
  Description of Artificial Sequence: Synthetic oligonucleotide
  Target: LAMA2; (-) strand; PAM type: YTN; PAM sequence: TTG
agttaaaatgtcttttaaat

SEQ ID NO: 254032 - DNA, 20 bp, Artificial Sequence
  Description of Artificial Sequence: Synthetic oligonucleotide
  Target: LAMA2; (-) strand; PAM type: YTN; PAM sequence: TTT
gagttaaaatgtcttttaaa

SEQ ID NO: 254033 - DNA, 20 bp, Artificial Sequence
  Description of Artificial Sequence: Synthetic oligonucleotide
  Target: LAMA2; (-) strand; PAM type: YTN; PAM sequence: CTT
tgagttaaaatgtcttttaa

SEQ ID NO: 254034 - DNA, 20 bp, Artificial Sequence
  Description of Artificial Sequence: Synthetic oligonucleotide
  Target: LAMA2; (-) strand; PAM type: YTN; PAM sequence: TTC
aaatggactttgagttaaaa

SEQ ID NO: 254035 - DNA, 20 bp, Artificial Sequence
  Description of Artificial Sequence: Synthetic oligonucleotide
  Target: LAMA2; (-) strand; PAM type: YTN; PAM sequence: CTT
caaatggactttgagttaaa

SEQ ID NO: 254036 - DNA, 20 bp, Artificial Sequence
  Description of Artificial Sequence: Synthetic oligonucleotide
  Target: LAMA2; (-) strand; PAM type: YTN; PAM sequence: TTA
cttcaaatggactttgagtt

SEQ ID NO: 254037 - DNA, 20 bp, Artificial Sequence
  Description of Artificial Sequence: Synthetic oligonucleotide
  Target: LAMA2; (-) strand; PAM type: YTN; PAM sequence: CTT
acttcaaatggactttgagt

SEQ ID NO: 254038 - DNA, 20 bp, Artificial Sequence
  Description of Artificial Sequence: Synthetic oligonucleotide
  Target: LAMA2; (-) strand; PAM type: YTN; PAM sequence: CTG
gcttacttcaaatggacttt

SEQ ID NO: 254039 - DNA, 20 bp, Artificial Sequence
  Description of Artificial Sequence: Synthetic oligonucleotide
  Target: LAMA2; (-) strand; PAM type: YTN; PAM sequence: TTC
ctggcttacttcaaatggac

SEQ ID NO: 254040 - DNA, 20 bp, Artificial Sequence
  Description of Artificial Sequence: Synthetic oligonucleotide
  Target: LAMA2; (-) strand; PAM type: YTN; PAM sequence: CTT
cctggcttacttcaaatgga

SEQ ID NO: 254041 - DNA, 20 bp, Artificial Sequence
  Description of Artificial Sequence: Synthetic oligonucleotide
  Target: LAMA2; (-) strand; PAM type: YTN; PAM sequence: TTG
aatacttcctggcttacttc

SEQ ID NO: 254042 - DNA, 20 bp, Artificial Sequence
  Description of Artificial Sequence: Synthetic oligonucleotide
  Target: LAMA2; (-) strand; PAM type: YTN; PAM sequence: TTC
ccatgtgacattgaatactt

SEQ ID NO: 254043 - DNA, 20 bp, Artificial Sequence
  Description of Artificial Sequence: Synthetic oligonucleotide
  Target: LAMA2; (-) strand; PAM type: YTN; PAM sequence: CTT
cccatgtgacattgaatact

SEQ ID NO: 254044 - DNA, 20 bp, Artificial Sequence
  Description of Artificial Sequence: Synthetic oligonucleotide
  Target: LAMA2; (-) strand; PAM type: YTN; PAM sequence: CTA
tgagaagaagcaagcatgaa

SEQ ID NO: 254045 - DNA, 20 bp, Artificial Sequence
  Description of Artificial Sequence: Synthetic oligonucleotide
  Target: LAMA2; (-) strand; PAM type: YTN; PAM sequence: TTA
cataccacaagaactatgag

SEQ ID NO: 254046 - DNA, 20 bp, Artificial Sequence
  Description of Artificial Sequence: Synthetic oligonucleotide
  Target: LAMA2; (-) strand; PAM type: YTN; PAM sequence: CTC
acattacataccacaagaac

SEQ ID NO: 254047 - DNA, 20 bp, Artificial Sequence
  Description of Artificial Sequence: Synthetic oligonucleotide
  Target: LAMA2; (-) strand; PAM type: YTN; PAM sequence: TTG
ctcacattacataccacaag

SEQ ID NO: 254048 - DNA, 20 bp, Artificial Sequence
  Description of Artificial Sequence: Synthetic oligonucleotide
  Target: LAMA2; (-) strand; PAM type: YTN; PAM sequence: TTT
gctcacattacataccacaa

SEQ ID NO: 254049 - DNA, 20 bp, Artificial Sequence
  Description of Artificial Sequence: Synthetic oligonucleotide
  Target: LAMA2; (-) strand; PAM type: YTN; PAM sequence: TTT
tgctcacattacataccaca

SEQ ID NO: 254050 - DNA, 20 bp, Artificial Sequence
  Description of Artificial Sequence: Synthetic oligonucleotide
  Target: LAMA2; (-) strand; PAM type: YTN; PAM sequence: TTA
caaaattttgctcacattac

SEQ ID NO: 254051 - DNA, 20 bp, Artificial Sequence
  Description of Artificial Sequence: Synthetic oligonucleotide
  Target: LAMA2; (-) strand; PAM type: YTN; PAM sequence: TTT
acaaaattttgctcacatta

SEQ ID NO: 254052 - DNA, 20 bp, Artificial Sequence
  Description of Artificial Sequence: Synthetic oligonucleotide
  Target: LAMA2; (-) strand; PAM type: YTN; PAM sequence: CTT
tacaaaattttgctcacatt

SEQ ID NO: 254053 - DNA, 20 bp, Artificial Sequence
  Description of Artificial Sequence: Synthetic oligonucleotide
  Target: LAMA2; (-) strand; PAM type: YTN; PAM sequence: TTA
cgaaagtgctttacaaaatt

SEQ ID NO: 254054 - DNA, 20 bp, Artificial Sequence
  Description of Artificial Sequence: Synthetic oligonucleotide
  Target: LAMA2; (-) strand; PAM type: YTN; PAM sequence: CTG
ttacgaaagtgctttacaaa

SEQ ID NO: 254055 - DNA, 20 bp, Artificial Sequence
  Description of Artificial Sequence: Synthetic oligonucleotide
  Target: LAMA2; (-) strand; PAM type: YTN; PAM sequence: TTA
caggtgtcctgttacgaaag

SEQ ID NO: 254056 - DNA, 20 bp, Artificial Sequence
  Description of Artificial Sequence: Synthetic oligonucleotide
  Target: LAMA2; (-) strand; PAM type: YTN; PAM sequence: TTT
acaggtgtcctgttacgaaa

SEQ ID NO: 254057 - DNA, 20 bp, Artificial Sequence
  Description of Artificial Sequence: Synthetic oligonucleotide
  Target: LAMA2; (-) strand; PAM type: YTN; PAM sequence: TTT
tacaggtgtcctgttacgaa

SEQ ID NO: 254058 - DNA, 20 bp, Artificial Sequence
  Description of Artificial Sequence: Synthetic oligonucleotide
  Target: LAMA2; (-) strand; PAM type: YTN; PAM sequence: TTT
ttacaggtgtcctgttacga

SEQ ID NO: 254059 - DNA, 20 bp, Artificial Sequence
  Description of Artificial Sequence: Synthetic oligonucleotide
  Target: LAMA2; (-) strand; PAM type: YTN; PAM sequence: TTA
tttttacaggtgtcctgtta

SEQ ID NO: 254060 - DNA, 20 bp, Artificial Sequence
  Description of Artificial Sequence: Synthetic oligonucleotide
  Target: LAMA2; (-) strand; PAM type: YTN; PAM sequence: TTG
gttatttttacaggtgtcct

SEQ ID NO: 254061 - DNA, 20 bp, Artificial Sequence
  Description of Artificial Sequence: Synthetic oligonucleotide
  Target: LAMA2; (-) strand; PAM type: YTN; PAM sequence: CTG
atggattggttatttttaca

SEQ ID NO: 254062 - DNA, 20 bp, Artificial Sequence
  Description of Artificial Sequence: Synthetic oligonucleotide
  Target: LAMA2; (-) strand; PAM type: YTN; PAM sequence: CTC
tgatggattggttattttta

SEQ ID NO: 254063 - DNA, 20 bp, Artificial Sequence
  Description of Artificial Sequence: Synthetic oligonucleotide
  Target: LAMA2; (-) strand; PAM type: YTN; PAM sequence: TTC
actctgatggattggttatt

SEQ ID NO: 254064 - DNA, 20 bp, Artificial Sequence
  Description of Artificial Sequence: Synthetic oligonucleotide
  Target: LAMA2; (-) strand; PAM type: YTN; PAM sequence: CTT
cactctgatggattggttat

SEQ ID NO: 254065 - DNA, 20 bp, Artificial Sequence
  Description of Artificial Sequence: Synthetic oligonucleotide
  Target: LAMA2; (-) strand; PAM type: YTN; PAM sequence: CTA
tataatggaaataaaaaaaa

SEQ ID NO: 254066 - DNA, 20 bp, Artificial Sequence
  Description of Artificial Sequence: Synthetic oligonucleotide
  Target: LAMA2; (-) strand; PAM type: YTN; PAM sequence: CTG
catcagacaacctatataat

SEQ ID NO: 254067 - DNA, 20 bp, Artificial Sequence
  Description of Artificial Sequence: Synthetic oligonucleotide
  Target: LAMA2; (-) strand; PAM type: YTN; PAM sequence: TTG
tagtggaaaccagaaaactg

SEQ ID NO: 254068 - DNA, 20 bp, Artificial Sequence
  Description of Artificial Sequence: Synthetic oligonucleotide
  Target: LAMA2; (-) strand; PAM type: YTN; PAM sequence: TTT
gtagtggaaaccagaaaact

SEQ ID NO: 254069 - DNA, 20 bp, Artificial Sequence
  Description of Artificial Sequence: Synthetic oligonucleotide
  Target: LAMA2; (-) strand; PAM type: YTN; PAM sequence: TTT
tgtagtggaaaccagaaaac

SEQ ID NO: 254070 - DNA, 20 bp, Artificial Sequence
  Description of Artificial Sequence: Synthetic oligonucleotide
  Target: LAMA2; (-) strand; PAM type: YTN; PAM sequence: TTT
ttgtagtggaaaccagaaaa

SEQ ID NO: 254071 - DNA, 20 bp, Artificial Sequence
  Description of Artificial Sequence: Synthetic oligonucleotide
  Target: LAMA2; (-) strand; PAM type: YTN; PAM sequence: CTC
aagtatttttgtagtggaaa

SEQ ID NO: 254072 - DNA, 20 bp, Artificial Sequence
  Description of Artificial Sequence: Synthetic oligonucleotide
  Target: LAMA2; (-) strand; PAM type: YTN; PAM sequence: TTA
aaactcaagtatttttgtag

SEQ ID NO: 254073 - DNA, 20 bp, Artificial Sequence
  Description of Artificial Sequence: Synthetic oligonucleotide
  Target: LAMA2; (-) strand; PAM type: YTN; PAM sequence: CTT
aaaactcaagtatttttgta

SEQ ID NO: 254074 - DNA, 20 bp, Artificial Sequence
  Description of Artificial Sequence: Synthetic oligonucleotide
  Target: LAMA2; (-) strand; PAM type: YTN; PAM sequence: TTC
atcaaataaaaatcatctta

SEQ ID NO: 254075 - DNA, 20 bp, Artificial Sequence
  Description of Artificial Sequence: Synthetic oligonucleotide
  Target: LAMA2; (-) strand; PAM type: YTN; PAM sequence: TTT
catcaaataaaaatcatctt

SEQ ID NO: 254076 - DNA, 20 bp, Artificial Sequence
  Description of Artificial Sequence: Synthetic oligonucleotide
  Target: LAMA2; (-) strand; PAM type: YTN; PAM sequence: CTA
atgtcacgtttcatcaaata

SEQ ID NO: 254077 - DNA, 20 bp, Artificial Sequence
  Description of Artificial Sequence: Synthetic oligonucleotide
  Target: LAMA2; (-) strand; PAM type: YTN; PAM sequence: TTC
taatgtcacgtttcatcaaa

SEQ ID NO: 254078 - DNA, 20 bp, Artificial Sequence
  Description of Artificial Sequence: Synthetic oligonucleotide
  Target: LAMA2; (-) strand; PAM type: YTN; PAM sequence: TTT
ctaatgtcacgtttcatcaa

SEQ ID NO: 254079 - DNA, 20 bp, Artificial Sequence
  Description of Artificial Sequence: Synthetic oligonucleotide
  Target: LAMA2; (-) strand; PAM type: YTN; PAM sequence: TTT
tctaatgtcacgtttcatca

SEQ ID NO: 254080 - DNA, 20 bp, Artificial Sequence
  Description of Artificial Sequence: Synthetic oligonucleotide
  Target: LAMA2; (-) strand; PAM type: YTN; PAM sequence: TTA
cattttctaatgtcacgttt

SEQ ID NO: 254081 - DNA, 20 bp, Artificial Sequence
  Description of Artificial Sequence: Synthetic oligonucleotide
  Target: LAMA2; (-) strand; PAM type: YTN; PAM sequence: CTT
acattttctaatgtcacgtt

SEQ ID NO: 254082 - DNA, 20 bp, Artificial Sequence
  Description of Artificial Sequence: Synthetic oligonucleotide
  Target: LAMA2; (-) strand; PAM type: YTN; PAM sequence: TTC
ttacattttctaatgtcacg

SEQ ID NO: 254083 - DNA, 20 bp, Artificial Sequence
  Description of Artificial Sequence: Synthetic oligonucleotide
  Target: LAMA2; (-) strand; PAM type: YTN; PAM sequence: TTA
aaagacaaataacatgtagt

SEQ ID NO: 254084 - DNA, 20 bp, Artificial Sequence
  Description of Artificial Sequence: Synthetic oligonucleotide
  Target: LAMA2; (-) strand; PAM type: YTN; PAM sequence: TTT
aaaagacaaataacatgtag

SEQ ID NO: 254085 - DNA, 20 bp, Artificial Sequence
  Description of Artificial Sequence: Synthetic oligonucleotide
  Target: LAMA2; (-) strand; PAM type: YTN; PAM sequence: TTG
atttaaaagacaaataacat

SEQ ID NO: 254086 - DNA, 20 bp, Artificial Sequence
  Description of Artificial Sequence: Synthetic oligonucleotide
  Target: LAMA2; (-) strand; PAM type: YTN; PAM sequence: TTA
ttgatttaaaagacaaataa

SEQ ID NO: 254087 - DNA, 20 bp, Artificial Sequence
  Description of Artificial Sequence: Synthetic oligonucleotide
  Target: LAMA2; (-) strand; PAM type: YTN; PAM sequence: TTC
caattattgatttaaaagac

SEQ ID NO: 254088 - DNA, 20 bp, Artificial Sequence
  Description of Artificial Sequence: Synthetic oligonucleotide
  Target: LAMA2; (-) strand; PAM type: YTN; PAM sequence: TTT
ccaattattgatttaaaaga

SEQ ID NO: 254089 - DNA, 20 bp, Artificial Sequence
  Description of Artificial Sequence: Synthetic oligonucleotide
  Target: LAMA2; (-) strand; PAM type: YTN; PAM sequence: TTA
tttccaattattgatttaaa

SEQ ID NO: 254090 - DNA, 20 bp, Artificial Sequence
  Description of Artificial Sequence: Synthetic oligonucleotide
  Target: LAMA2; (-) strand; PAM type: YTN; PAM sequence: TTT
atttccaattattgatttaa

SEQ ID NO: 254091 - DNA, 20 bp, Artificial Sequence
  Description of Artificial Sequence: Synthetic oligonucleotide
  Target: LAMA2; (-) strand; PAM type: YTN; PAM sequence: TTT
tatttccaattattgattta

SEQ ID NO: 254092 - DNA, 20 bp, Artificial Sequence
  Description of Artificial Sequence: Synthetic oligonucleotide
  Target: LAMA2; (-) strand; PAM type: YTN; PAM sequence: TTT
ttatttccaattattgattt

SEQ ID NO: 254093 - DNA, 20 bp, Artificial Sequence
  Description of Artificial Sequence: Synthetic oligonucleotide
  Target: LAMA2; (-) strand; PAM type: YTN; PAM sequence: TTT
tttatttccaattattgatt

SEQ ID NO: 254094 - DNA, 20 bp, Artificial Sequence
  Description of Artificial Sequence: Synthetic oligonucleotide
  Target: LAMA2; (-) strand; PAM type: YTN; PAM sequence: TTG
agagggttttttatttccaa

SEQ ID NO: 254095 - DNA, 20 bp, Artificial Sequence
  Description of Artificial Sequence: Synthetic oligonucleotide
  Target: LAMA2; (-) strand; PAM type: YTN; PAM sequence: TTG
cataattgagagggtttttt

SEQ ID NO: 254096 - DNA, 20 bp, Artificial Sequence
  Description of Artificial Sequence: Synthetic oligonucleotide
  Target: LAMA2; (-) strand; PAM type: YTN; PAM sequence: CTT
gcataattgagagggttttt

SEQ ID NO: 254097 - DNA, 20 bp, Artificial Sequence
  Description of Artificial Sequence: Synthetic oligonucleotide
  Target: LAMA2; (-) strand; PAM type: YTN; PAM sequence: CTG
aaaatcttgcataattgaga

SEQ ID NO: 254098 - DNA, 20 bp, Artificial Sequence
  Description of Artificial Sequence: Synthetic oligonucleotide
  Target: LAMA2; (-) strand; PAM type: YTN; PAM sequence: TTC
aactgaaaatcttgcataat

SEQ ID NO: 254099 - DNA, 20 bp, Artificial Sequence
  Description of Artificial Sequence: Synthetic oligonucleotide
  Target: LAMA2; (-) strand; PAM type: YTN; PAM sequence: CTA
acattcaactgaaaatcttg

SEQ ID NO: 254100 - DNA, 20 bp, Artificial Sequence
  Description of Artificial Sequence: Synthetic oligonucleotide
  Target: LAMA2; (-) strand; PAM type: YTN; PAM sequence: TTC
taacattcaactgaaaatct

SEQ ID NO: 254101 - DNA, 20 bp, Artificial Sequence
  Description of Artificial Sequence: Synthetic oligonucleotide
  Target: LAMA2; (-) strand; PAM type: YTN; PAM sequence: TTT
ctaacattcaactgaaaatc

SEQ ID NO: 254102 - DNA, 20 bp, Artificial Sequence
  Description of Artificial Sequence: Synthetic oligonucleotide
  Target: LAMA2; (-) strand; PAM type: YTN; PAM sequence: TTG
aaaatggtatttctaacatt

SEQ ID NO: 254103 - DNA, 20 bp, Artificial Sequence
  Description of Artificial Sequence: Synthetic oligonucleotide
  Target: LAMA2; (-) strand; PAM type: YTN; PAM sequence: TTA
aacatgttgaaaatggtatt

SEQ ID NO: 254104 - DNA, 20 bp, Artificial Sequence
  Description of Artificial Sequence: Synthetic oligonucleotide
  Target: LAMA2; (-) strand; PAM type: YTN; PAM sequence: CTT
aaacatgttgaaaatggtat

SEQ ID NO: 254105 - DNA, 20 bp, Artificial Sequence
  Description of Artificial Sequence: Synthetic oligonucleotide
  Target: LAMA2; (-) strand; PAM type: YTN; PAM sequence: TTG
ccttaaacatgttgaaaatg

SEQ ID NO: 254106 - DNA, 20 bp, Artificial Sequence
  Description of Artificial Sequence: Synthetic oligonucleotide
  Target: LAMA2; (-) strand; PAM type: YTN; PAM sequence: TTT
gccttaaacatgttgaaaat

SEQ ID NO: 254107 - DNA, 20 bp, Artificial Sequence
  Description of Artificial Sequence: Synthetic oligonucleotide
  Target: LAMA2; (-) strand; PAM type: YTN; PAM sequence: TTT
tgccttaaacatgttgaaaa

SEQ ID NO: 254108 - DNA, 20 bp, Artificial Sequence
  Description of Artificial Sequence: Synthetic oligonucleotide
  Target: LAMA2; (-) strand; PAM type: YTN; PAM sequence: TTA
attttgccttaaacatgttg

SEQ ID NO: 254109 - DNA, 20 bp, Artificial Sequence
  Description of Artificial Sequence: Synthetic oligonucleotide
  Target: LAMA2; (-) strand; PAM type: YTN; PAM sequence: TTG
aatcaaaaattaattttgcc

SEQ ID NO: 254110 - DNA, 20 bp, Artificial Sequence
  Description of Artificial Sequence: Synthetic oligonucleotide
  Target: LAMA2; (-) strand; PAM type: YTN; PAM sequence: TTA
aaaaattgaatcaaaaatta

SEQ ID NO: 254111 - DNA, 20 bp, Artificial Sequence
  Description of Artificial Sequence: Synthetic oligonucleotide
  Target: LAMA2; (-) strand; PAM type: YTN; PAM sequence: TTT
aaaaaattgaatcaaaaatt

SEQ ID NO: 254112 - DNA, 20 bp, Artificial Sequence
  Description of Artificial Sequence: Synthetic oligonucleotide
  Target: LAMA2; (-) strand; PAM type: YTN; PAM sequence: TTT
taaaaaattgaatcaaaaat

SEQ ID NO: 254113 - DNA, 20 bp, Artificial Sequence
  Description of Artificial Sequence: Synthetic oligonucleotide
  Target: LAMA2; (-) strand; PAM type: YTN; PAM sequence: TTA
agggttttaaaaaattgaat

SEQ ID NO: 254114 - DNA, 20 bp, Artificial Sequence
  Description of Artificial Sequence: Synthetic oligonucleotide
  Target: LAMA2; (-) strand; PAM type: YTN; PAM sequence: CTT
aagggttttaaaaaattgaa

SEQ ID NO: 254115 - DNA, 20 bp, Artificial Sequence
  Description of Artificial Sequence: Synthetic oligonucleotide
  Target: LAMA2; (-) strand; PAM type: YTN; PAM sequence: TTC
aaatacttaagggttttaaa

SEQ ID NO: 254116 - DNA, 20 bp, Artificial Sequence
  Description of Artificial Sequence: Synthetic oligonucleotide
  Target: LAMA2; (-) strand; PAM type: YTN; PAM sequence: CTT
caaatacttaagggttttaa

SEQ ID NO: 254117 - DNA, 20 bp, Artificial Sequence
  Description of Artificial Sequence: Synthetic oligonucleotide
  Target: LAMA2; (-) strand; PAM type: YTN; PAM sequence: TTA
tgtcttcaaatacttaaggg

SEQ ID NO: 254118 - DNA, 20 bp, Artificial Sequence
  Description of Artificial Sequence: Synthetic oligonucleotide
  Target: LAMA2; (-) strand; PAM type: YTN; PAM sequence: CTA
aaattatgtcttcaaatact

SEQ ID NO: 254119 - DNA, 20 bp, Artificial Sequence
  Description of Artificial Sequence: Synthetic oligonucleotide
  Target: LAMA2; (-) strand; PAM type: YTN; PAM sequence: CTG
atacaactaaaattatgtct

SEQ ID NO: 254120 - DNA, 20 bp, Artificial Sequence
  Description of Artificial Sequence: Synthetic oligonucleotide
  Target: LAMA2; (-) strand; PAM type: YTN; PAM sequence: CTC
actgatacaactaaaattat

SEQ ID NO: 254121 - DNA, 20 bp, Artificial Sequence
  Description of Artificial Sequence: Synthetic oligonucleotide
  Target: LAMA2; (-) strand; PAM type: YTN; PAM sequence: TTA
tctcactgatacaactaaaa

SEQ ID NO: 254122 - DNA, 20 bp, Artificial Sequence
  Description of Artificial Sequence: Synthetic oligonucleotide
  Target: LAMA2; (-) strand; PAM type: YTN; PAM sequence: TTG
catgttatctcactgataca

SEQ ID NO: 254123 - DNA, 20 bp, Artificial Sequence
  Description of Artificial Sequence: Synthetic oligonucleotide
  Target: LAMA2; (-) strand; PAM type: YTN; PAM sequence: TTT
gcatgttatctcactgatac

SEQ ID NO: 254124 - DNA, 20 bp, Artificial Sequence
  Description of Artificial Sequence: Synthetic oligonucleotide
  Target: LAMA2; (-) strand; PAM type: YTN; PAM sequence: TTA
tttgcatgttatctcactga

SEQ ID NO: 254125 - DNA, 20 bp, Artificial Sequence
  Description of Artificial Sequence: Synthetic oligonucleotide
  Target: LAMA2; (-) strand; PAM type: YTN; PAM sequence: TTG
taaaattatttgcatgttat

SEQ ID NO: 254126 - DNA, 20 bp, Artificial Sequence
  Description of Artificial Sequence: Synthetic oligonucleotide
  Target: LAMA2; (-) strand; PAM type: YTN; PAM sequence: TTT
gtaaaattatttgcatgtta

SEQ ID NO: 254127 - DNA, 20 bp, Artificial Sequence
  Description of Artificial Sequence: Synthetic oligonucleotide
  Target: LAMA2; (-) strand; PAM type: YTN; PAM sequence: TTT
tgtaaaattatttgcatgtt

SEQ ID NO: 254128 - DNA, 20 bp, Artificial Sequence
  Description of Artificial Sequence: Synthetic oligonucleotide
  Target: LAMA2; (-) strand; PAM type: YTN; PAM sequence: TTT
ttgtaaaattatttgcatgt

SEQ ID NO: 254129 - DNA, 20 bp, Artificial Sequence
  Description of Artificial Sequence: Synthetic oligonucleotide
  Target: LAMA2; (-) strand; PAM type: YTN; PAM sequence: TTT
tttgtaaaattatttgcatg

SEQ ID NO: 254130 - DNA, 20 bp, Artificial Sequence
  Description of Artificial Sequence: Synthetic oligonucleotide
  Target: LAMA2; (-) strand; PAM type: YTN; PAM sequence: TTT
ttttgtaaaattatttgcat

SEQ ID NO: 254131 - DNA, 20 bp, Artificial Sequence
  Description of Artificial Sequence: Synthetic oligonucleotide
  Target: LAMA2; (-) strand; PAM type: YTN; PAM sequence: TTG
tttttttgtaaaattatttg

SEQ ID NO: 254132 - DNA, 20 bp, Artificial Sequence
  Description of Artificial Sequence: Synthetic oligonucleotide
  Target: LAMA2; (-) strand; PAM type: YTN; PAM sequence: CTT
gtttttttgtaaaattattt

SEQ ID NO: 254133 - DNA, 20 bp, Artificial Sequence
  Description of Artificial Sequence: Synthetic oligonucleotide
  Target: LAMA2; (-) strand; PAM type: YTN; PAM sequence: TTG
cttgtttttttgtaaaatta

SEQ ID NO: 254134 - DNA, 20 bp, Artificial Sequence
  Description of Artificial Sequence: Synthetic oligonucleotide
  Target: LAMA2; (-) strand; PAM type: YTN; PAM sequence: CTG
aagaattgcttgtttttttg

SEQ ID NO: 254135 - DNA, 20 bp, Artificial Sequence
  Description of Artificial Sequence: Synthetic oligonucleotide
  Target: LAMA2; (-) strand; PAM type: YTN; PAM sequence: TTA
ctgaagaattgcttgttttt

SEQ ID NO: 254136 - DNA, 20 bp, Artificial Sequence
  Description of Artificial Sequence: Synthetic oligonucleotide
  Target: LAMA2; (-) strand; PAM type: YTN; PAM sequence: CTA
ttactgaagaattgcttgtt

SEQ ID NO: 254137 - DNA, 20 bp, Artificial Sequence
  Description of Artificial Sequence: Synthetic oligonucleotide
  Target: LAMA2; (-) strand; PAM type: YTN; PAM sequence: CTA
agctattactgaagaattgc

SEQ ID NO: 254138 - DNA, 20 bp, Artificial Sequence
  Description of Artificial Sequence: Synthetic oligonucleotide
  Target: LAMA2; (-) strand; PAM type: YTN; PAM sequence: CTA
aactaagctattactgaaga

SEQ ID NO: 254139 - DNA, 20 bp, Artificial Sequence
  Description of Artificial Sequence: Synthetic oligonucleotide
  Target: LAMA2; (-) strand; PAM type: YTN; PAM sequence: TTA
gctaaactaagctattactg

SEQ ID NO: 254140 - DNA, 20 bp, Artificial Sequence
  Description of Artificial Sequence: Synthetic oligonucleotide
  Target: LAMA2; (-) strand; PAM type: YTN; PAM sequence: TTT
agctaaactaagctattact

SEQ ID NO: 254141 - DNA, 20 bp, Artificial Sequence
  Description of Artificial Sequence: Synthetic oligonucleotide
  Target: LAMA2; (-) strand; PAM type: YTN; PAM sequence: TTA
agtttagctaaactaagcta

SEQ ID NO: 254142 - DNA, 20 bp, Artificial Sequence
  Description of Artificial Sequence: Synthetic oligonucleotide
  Target: LAMA2; (-) strand; PAM type: YTN; PAM sequence: TTT
aagtttagctaaactaagct

SEQ ID NO: 254143 - DNA, 20 bp, Artificial Sequence
  Description of Artificial Sequence: Synthetic oligonucleotide
  Target: LAMA2; (-) strand; PAM type: YTN; PAM sequence: TTT
taagtttagctaaactaagc

SEQ ID NO: 254144 - DNA, 20 bp, Artificial Sequence
  Description of Artificial Sequence: Synthetic oligonucleotide
  Target: LAMA2; (-) strand; PAM type: YTN; PAM sequence: TTT
ttaagtttagctaaactaag

SEQ ID NO: 254145 - DNA, 20 bp, Artificial Sequence
  Description of Artificial Sequence: Synthetic oligonucleotide
  Target: LAMA2; (-) strand; PAM type: YTN; PAM sequence: TTC
aatttttaagtttagctaaa

SEQ ID NO: 254146 - DNA, 20 bp, Artificial Sequence
  Description of Artificial Sequence: Synthetic oligonucleotide
  Target: LAMA2; (-) strand; PAM type: YTN; PAM sequence: TTT
caatttttaagtttagctaa

SEQ ID NO: 254147 - DNA, 20 bp, Artificial Sequence
  Description of Artificial Sequence: Synthetic oligonucleotide
  Target: LAMA2; (-) strand; PAM type: YTN; PAM sequence: CTT
tcaatttttaagtttagcta

SEQ ID NO: 254148 - DNA, 20 bp, Artificial Sequence
  Description of Artificial Sequence: Synthetic oligonucleotide
  Target: LAMA2; (-) strand; PAM type: YTN; PAM sequence: TTC
ctttcaatttttaagtttag

SEQ ID NO: 254149 - DNA, 20 bp, Artificial Sequence
  Description of Artificial Sequence: Synthetic oligonucleotide
  Target: LAMA2; (-) strand; PAM type: YTN; PAM sequence: CTT
cctttcaatttttaagttta

SEQ ID NO: 254150 - DNA, 20 bp, Artificial Sequence
  Description of Artificial Sequence: Synthetic oligonucleotide
  Target: LAMA2; (-) strand; PAM type: YTN; PAM sequence: TTA
cttcctttcaatttttaagt

SEQ ID NO: 254151 - DNA, 20 bp, Artificial Sequence
  Description of Artificial Sequence: Synthetic oligonucleotide
  Target: LAMA2; (-) strand; PAM type: YTN; PAM sequence: TTT
acttcctttcaatttttaag

SEQ ID NO: 254152 - DNA, 20 bp, Artificial Sequence
  Description of Artificial Sequence: Synthetic oligonucleotide
  Target: LAMA2; (-) strand; PAM type: YTN; PAM sequence: TTT
tacttcctttcaatttttaa

SEQ ID NO: 254153 - DNA, 20 bp, Artificial Sequence
  Description of Artificial Sequence: Synthetic oligonucleotide
  Target: LAMA2; (-) strand; PAM type: YTN; PAM sequence: TTG
ttttacttcctttcaatttt

SEQ ID NO: 254154 - DNA, 20 bp, Artificial Sequence
  Description of Artificial Sequence: Synthetic oligonucleotide
  Target: LAMA2; (-) strand; PAM type: YTN; PAM sequence: TTT
gttttacttcctttcaattt

SEQ ID NO: 254155 - DNA, 20 bp, Artificial Sequence
  Description of Artificial Sequence: Synthetic oligonucleotide
  Target: LAMA2; (-) strand; PAM type: YTN; PAM sequence: TTT
tgttttacttcctttcaatt

SEQ ID NO: 254156 - DNA, 20 bp, Artificial Sequence
  Description of Artificial Sequence: Synthetic oligonucleotide
  Target: LAMA2; (-) strand; PAM type: YTN; PAM sequence: TTT
ttgttttacttcctttcaat

SEQ ID NO: 254157 - DNA, 20 bp, Artificial Sequence
  Description of Artificial Sequence: Synthetic oligonucleotide
  Target: LAMA2; (-) strand; PAM type: YTN; PAM sequence: TTG
atttttgttttacttccttt

SEQ ID NO: 254158 - DNA, 20 bp, Artificial Sequence
  Description of Artificial Sequence: Synthetic oligonucleotide
  Target: LAMA2; (-) strand; PAM type: YTN; PAM sequence: TTT
gatttttgttttacttcctt

SEQ ID NO: 254159 - DNA, 20 bp, Artificial Sequence
  Description of Artificial Sequence: Synthetic oligonucleotide
  Target: LAMA2; (-) strand; PAM type: YTN; PAM sequence: TTC
cccgatttgatttttgtttt

SEQ ID NO: 254160 - DNA, 20 bp, Artificial Sequence
  Description of Artificial Sequence: Synthetic oligonucleotide
  Target: LAMA2; (-) strand; PAM type: YTN; PAM sequence: TTT
ccccgatttgatttttgttt

SEQ ID NO: 254161 - DNA, 20 bp, Artificial Sequence
  Description of Artificial Sequence: Synthetic oligonucleotide
  Target: LAMA2; (-) strand; PAM type: YTN; PAM sequence: TTT
tccccgatttgatttttgtt

SEQ ID NO: 254162 - DNA, 20 bp, Artificial Sequence
  Description of Artificial Sequence: Synthetic oligonucleotide
  Target: LAMA2; (-) strand; PAM type: YTN; PAM sequence: TTT
ttccccgatttgatttttgt

SEQ ID NO: 254163 - DNA, 20 bp, Artificial Sequence
  Description of Artificial Sequence: Synthetic oligonucleotide
  Target: LAMA2; (-) strand; PAM type: YTN; PAM sequence: TTT
tttccccgatttgatttttg

SEQ ID NO: 254164 - DNA, 20 bp, Artificial Sequence
  Description of Artificial Sequence: Synthetic oligonucleotide
  Target: LAMA2; (-) strand; PAM type: YTN; PAM sequence: TTG
aagaaagattttttccccga

SEQ ID NO: 254165 - DNA, 20 bp, Artificial Sequence
  Description of Artificial Sequence: Synthetic oligonucleotide
  Target: LAMA2; (-) strand; PAM type: YTN; PAM sequence: TTT
gaagaaagattttttccccg

SEQ ID NO: 254166 - DNA, 20 bp, Artificial Sequence
  Description of Artificial Sequence: Synthetic oligonucleotide
  Target: LAMA2; (-) strand; PAM type: YTN; PAM sequence: TTA
atgtgcaaaacatggatcca

SEQ ID NO: 254167 - DNA, 20 bp, Artificial Sequence
  Description of Artificial Sequence: Synthetic oligonucleotide
  Target: LAMA2; (-) strand; PAM type: YTN; PAM sequence: TTT
aatgtgcaaaacatggatcc

SEQ ID NO: 254168 - DNA, 20 bp, Artificial Sequence
  Description of Artificial Sequence: Synthetic oligonucleotide
  Target: LAMA2; (-) strand; PAM type: YTN; PAM sequence: TTG
ggatttaatgtgcaaaacat

SEQ ID NO: 254169 - DNA, 20 bp, Artificial Sequence
  Description of Artificial Sequence: Synthetic oligonucleotide
  Target: LAMA2; (-) strand; PAM type: YTN; PAM sequence: TTA
ataatgcagtatattgggat

SEQ ID NO: 254170 - DNA, 20 bp, Artificial Sequence
  Description of Artificial Sequence: Synthetic oligonucleotide
  Target: LAMA2; (-) strand; PAM type: YTN; PAM sequence: CTT
aataatgcagtatattggga

SEQ ID NO: 254171 - DNA, 20 bp, Artificial Sequence
  Description of Artificial Sequence: Synthetic oligonucleotide
  Target: LAMA2; (-) strand; PAM type: YTN; PAM sequence: TTG
ccttaataatgcagtatatt

SEQ ID NO: 254172 - DNA, 20 bp, Artificial Sequence
  Description of Artificial Sequence: Synthetic oligonucleotide
  Target: LAMA2; (-) strand; PAM type: YTN; PAM sequence: CTA
tgaatagttgccttaataat

SEQ ID NO: 254173 - DNA, 20 bp, Artificial Sequence
  Description of Artificial Sequence: Synthetic oligonucleotide
  Target: LAMA2; (-) strand; PAM type: YTN; PAM sequence: TTC
actatgaatagttgccttaa

SEQ ID NO: 254174 - DNA, 20 bp, Artificial Sequence
  Description of Artificial Sequence: Synthetic oligonucleotide
  Target: LAMA2; (-) strand; PAM type: YTN; PAM sequence: CTT
cactatgaatagttgcctta

SEQ ID NO: 254175 - DNA, 20 bp, Artificial Sequence
  Description of Artificial Sequence: Synthetic oligonucleotide
  Target: LAMA2; (-) strand; PAM type: YTN; PAM sequence: TTA
aggtcagcttcactatgaat

SEQ ID NO: 254176 - DNA, 20 bp, Artificial Sequence
  Description of Artificial Sequence: Synthetic oligonucleotide
  Target: LAMA2; (-) strand; PAM type: YTN; PAM sequence: TTA
aaagatagcattaaggtcag

SEQ ID NO: 254177 - DNA, 20 bp, Artificial Sequence
  Description of Artificial Sequence: Synthetic oligonucleotide
  Target: LAMA2; (-) strand; PAM type: YTN; PAM sequence: TTT
aaaagatagcattaaggtca

SEQ ID NO: 254178 - DNA, 20 bp, Artificial Sequence
  Description of Artificial Sequence: Synthetic oligonucleotide
  Target: LAMA2; (-) strand; PAM type: YTN; PAM sequence: TTT
taaaagatagcattaaggtc

SEQ ID NO: 254179 - DNA, 20 bp, Artificial Sequence
  Description of Artificial Sequence: Synthetic oligonucleotide
  Target: LAMA2; (-) strand; PAM type: YTN; PAM sequence: TTT
ttaaaagatagcattaaggt

SEQ ID NO: 254180 - DNA, 20 bp, Artificial Sequence
  Description of Artificial Sequence: Synthetic oligonucleotide
  Target: LAMA2; (-) strand; PAM type: YTN; PAM sequence: CTT
tttaaaagatagcattaagg

SEQ ID NO: 254181 - DNA, 20 bp, Artificial Sequence
  Description of Artificial Sequence: Synthetic oligonucleotide
  Target: LAMA2; (-) strand; PAM type: YTN; PAM sequence: TTA
acaaaactttttaaaagata

SEQ ID NO: 254182 - DNA, 20 bp, Artificial Sequence
  Description of Artificial Sequence: Synthetic oligonucleotide
  Target: LAMA2; (-) strand; PAM type: YTN; PAM sequence: TTT
aacaaaactttttaaaagat

SEQ ID NO: 254183 - DNA, 20 bp, Artificial Sequence
  Description of Artificial Sequence: Synthetic oligonucleotide
  Target: LAMA2; (-) strand; PAM type: YTN; PAM sequence: TTT
taacaaaactttttaaaaga

SEQ ID NO: 254184 - DNA, 20 bp, Artificial Sequence
  Description of Artificial Sequence: Synthetic oligonucleotide
  Target: LAMA2; (-) strand; PAM type: YTN; PAM sequence: TTT
ttaacaaaactttttaaaag

SEQ ID NO: 254185 - DNA, 20 bp, Artificial Sequence
  Description of Artificial Sequence: Synthetic oligonucleotide
  Target: LAMA2; (-) strand; PAM type: YTN; PAM sequence: TTA
tttttaacaaaactttttaa

SEQ ID NO: 254186 - DNA, 20 bp, Artificial Sequence
  Description of Artificial Sequence: Synthetic oligonucleotide
  Target: LAMA2; (-) strand; PAM type: YTN; PAM sequence: TTT
atttttaacaaaacttttta

SEQ ID NO: 254187 - DNA, 20 bp, Artificial Sequence
  Description of Artificial Sequence: Synthetic oligonucleotide
  Target: LAMA2; (-) strand; PAM type: YTN; PAM sequence: CTC
aaatttatttttaacaaaac

SEQ ID NO: 254188 - DNA, 20 bp, Artificial Sequence
  Description of Artificial Sequence: Synthetic oligonucleotide
  Target: LAMA2; (-) strand; PAM type: YTN; PAM sequence: TTC
tcaaatttatttttaacaaa

SEQ ID NO: 254189 - DNA, 20 bp, Artificial Sequence
  Description of Artificial Sequence: Synthetic oligonucleotide
  Target: LAMA2; (-) strand; PAM type: YTN; PAM sequence: TTT
ctcaaatttatttttaacaa

SEQ ID NO: 254190 - DNA, 20 bp, Artificial Sequence
  Description of Artificial Sequence: Synthetic oligonucleotide
  Target: LAMA2; (-) strand; PAM type: YTN; PAM sequence: CTT
tctcaaatttatttttaaca

SEQ ID NO: 254191 - DNA, 20 bp, Artificial Sequence
  Description of Artificial Sequence: Synthetic oligonucleotide
  Target: LAMA2; (-) strand; PAM type: YTN; PAM sequence: TTC
tttctcaaatttatttttaa

SEQ ID NO: 254192 - DNA, 20 bp, Artificial Sequence
  Description of Artificial Sequence: Synthetic oligonucleotide
  Target: LAMA2; (-) strand; PAM type: YTN; PAM sequence: TTA
aaattctttctcaaatttat

SEQ ID NO: 254193 - DNA, 20 bp, Artificial Sequence
  Description of Artificial Sequence: Synthetic oligonucleotide
  Target: LAMA2; (-) strand; PAM type: YTN; PAM sequence: TTT
aaaattctttctcaaattta

SEQ ID NO: 254194 - DNA, 20 bp, Artificial Sequence
  Description of Artificial Sequence: Synthetic oligonucleotide
  Target: LAMA2; (-) strand; PAM type: YTN; PAM sequence: TTA
tttaaaattctttctcaaat

SEQ ID NO: 254195 - DNA, 20 bp, Artificial Sequence
  Description of Artificial Sequence: Synthetic oligonucleotide
  Target: LAMA2; (-) strand; PAM type: YTN; PAM sequence: CTA
agttatttaaaattctttct

SEQ ID NO: 254196 - DNA, 20 bp, Artificial Sequence
  Description of Artificial Sequence: Synthetic oligonucleotide
  Target: LAMA2; (-) strand; PAM type: YTN; PAM sequence: CTC
taagttatttaaaattcttt

SEQ ID NO: 254197 - DNA, 20 bp, Artificial Sequence
  Description of Artificial Sequence: Synthetic oligonucleotide
  Target: LAMA2; (-) strand; PAM type: YTN; PAM sequence: TTC
tctaagttatttaaaattct

SEQ ID NO: 254198 - DNA, 20 bp, Artificial Sequence
  Description of Artificial Sequence: Synthetic oligonucleotide
  Target: LAMA2; (-) strand; PAM type: YTN; PAM sequence: TTT
ctctaagttatttaaaattc

SEQ ID NO: 254199 - DNA, 20 bp, Artificial Sequence
  Description of Artificial Sequence: Synthetic oligonucleotide
  Target: LAMA2; (-) strand; PAM type: YTN; PAM sequence: TTT
tctctaagttatttaaaatt

SEQ ID NO: 254200 - DNA, 20 bp, Artificial Sequence
  Description of Artificial Sequence: Synthetic oligonucleotide
  Target: LAMA2; (-) strand; PAM type: YTN; PAM sequence: CTT
ttctctaagttatttaaaat

SEQ ID NO: 254201 - DNA, 20 bp, Artificial Sequence
  Description of Artificial Sequence: Synthetic oligonucleotide
  Target: LAMA2; (-) strand; PAM type: YTN; PAM sequence: TTG
aaaacaggcttttctctaag

SEQ ID NO: 254202 - DNA, 20 bp, Artificial Sequence
  Description of Artificial Sequence: Synthetic oligonucleotide
  Target: LAMA2; (-) strand; PAM type: YTN; PAM sequence: TTT
gaaaacaggcttttctctaa

SEQ ID NO: 254203 - DNA, 20 bp, Artificial Sequence
  Description of Artificial Sequence: Synthetic oligonucleotide
  Target: LAMA2; (-) strand; PAM type: YTN; PAM sequence: CTG
gtgatatttgaaaacaggct

SEQ ID NO: 254204 - DNA, 20 bp, Artificial Sequence
  Description of Artificial Sequence: Synthetic oligonucleotide
  Target: LAMA2; (-) strand; PAM type: YTN; PAM sequence: CTG
tagtaactggtgatatttga

SEQ ID NO: 254205 - DNA, 20 bp, Artificial Sequence
  Description of Artificial Sequence: Synthetic oligonucleotide
  Target: LAMA2; (-) strand; PAM type: YTN; PAM sequence: TTC
tgtagtaactggtgatattt

SEQ ID NO: 254206 - DNA, 20 bp, Artificial Sequence
  Description of Artificial Sequence: Synthetic oligonucleotide
  Target: LAMA2; (-) strand; PAM type: YTN; PAM sequence: TTT
ctgtagtaactggtgatatt

SEQ ID NO: 254207 - DNA, 20 bp, Artificial Sequence
  Description of Artificial Sequence: Synthetic oligonucleotide
  Target: LAMA2; (-) strand; PAM type: YTN; PAM sequence: CTA
aatgtggatatgtatttctg

SEQ ID NO: 254208 - DNA, 20 bp, Artificial Sequence
  Description of Artificial Sequence: Synthetic oligonucleotide
  Target: LAMA2; (-) strand; PAM type: YTN; PAM sequence: TTC
atcaactaaatgtggatatg

SEQ ID NO: 254209 - DNA, 20 bp, Artificial Sequence
  Description of Artificial Sequence: Synthetic oligonucleotide
  Target: LAMA2; (-) strand; PAM type: YTN; PAM sequence: TTT
catcaactaaatgtggatat

SEQ ID NO: 254210 - DNA, 20 bp, Artificial Sequence
  Description of Artificial Sequence: Synthetic oligonucleotide
  Target: LAMA2; (-) strand; PAM type: YTN; PAM sequence: TTA
aacatcacgtgccaatttca

SEQ ID NO: 254211 - DNA, 20 bp, Artificial Sequence
  Description of Artificial Sequence: Synthetic oligonucleotide
  Target: LAMA2; (-) strand; PAM type: YTN; PAM sequence: TTT
aaacatcacgtgccaatttc

SEQ ID NO: 254212 - DNA, 20 bp, Artificial Sequence
  Description of Artificial Sequence: Synthetic oligonucleotide
  Target: LAMA2; (-) strand; PAM type: YTN; PAM sequence: TTT
taaacatcacgtgccaattt

SEQ ID NO: 254213 - DNA, 20 bp, Artificial Sequence
  Description of Artificial Sequence: Synthetic oligonucleotide
  Target: LAMA2; (-) strand; PAM type: YTN; PAM sequence: TTG
aaaaattttaaacatcacgt

SEQ ID NO: 254214 - DNA, 20 bp, Artificial Sequence
  Description of Artificial Sequence: Synthetic oligonucleotide
  Target: LAMA2; (-) strand; PAM type: YTN; PAM sequence: TTA
aacatggagaaaattgaaaa

SEQ ID NO: 254215 - DNA, 20 bp, Artificial Sequence
  Description of Artificial Sequence: Synthetic oligonucleotide
  Target: LAMA2; (-) strand; PAM type: YTN; PAM sequence: CTC
ataattaaacatggagaaaa

SEQ ID NO: 254216 - DNA, 20 bp, Artificial Sequence
  Description of Artificial Sequence: Synthetic oligonucleotide
  Target: LAMA2; (-) strand; PAM type: YTN; PAM sequence: TTG
actcataattaaacatggag

SEQ ID NO: 254217 - DNA, 20 bp, Artificial Sequence
  Description of Artificial Sequence: Synthetic oligonucleotide
  Target: LAMA2; (-) strand; PAM type: YTN; PAM sequence: CTT
gactcataattaaacatgga

SEQ ID NO: 254218 - DNA, 20 bp, Artificial Sequence
  Description of Artificial Sequence: Synthetic oligonucleotide
  Target: LAMA2; (-) strand; PAM type: YTN; PAM sequence: TTG
cttgactcataattaaacat

SEQ ID NO: 254219 - DNA, 20 bp, Artificial Sequence
  Description of Artificial Sequence: Synthetic oligonucleotide
  Target: LAMA2; (-) strand; PAM type: YTN; PAM sequence: CTT
gcttgactcataattaaaca

SEQ ID NO: 254220 - DNA, 20 bp, Artificial Sequence
  Description of Artificial Sequence: Synthetic oligonucleotide
  Target: LAMA2; (-) strand; PAM type: YTN; PAM sequence: CTG
tgagaagcttgcttgactca

SEQ ID NO: 254221 - DNA, 20 bp, Artificial Sequence
  Description of Artificial Sequence: Synthetic oligonucleotide
  Target: LAMA2; (-) strand; PAM type: YTN; PAM sequence: TTA
catctgtgagaagcttgctt

SEQ ID NO: 254222 - DNA, 20 bp, Artificial Sequence
  Description of Artificial Sequence: Synthetic oligonucleotide
  Target: LAMA2; (-) strand; PAM type: YTN; PAM sequence: CTG
tattacatctgtgagaagct

SEQ ID NO: 254223 - DNA, 20 bp, Artificial Sequence
  Description of Artificial Sequence: Synthetic oligonucleotide
  Target: LAMA2; (-) strand; PAM type: YTN; PAM sequence: CTA
ctgtattacatctgtgagaa

SEQ ID NO: 254224 - DNA, 20 bp, Artificial Sequence
  Description of Artificial Sequence: Synthetic oligonucleotide
  Target: LAMA2; (-) strand; PAM type: YTN; PAM sequence: TTG
gacaatgcactactgtatta

SEQ ID NO: 254225 - DNA, 20 bp, Artificial Sequence
  Description of Artificial Sequence: Synthetic oligonucleotide
  Target: LAMA2; (-) strand; PAM type: YTN; PAM sequence: TTT
ggacaatgcactactgtatt

SEQ ID NO: 254226 - DNA, 20 bp, Artificial Sequence
  Description of Artificial Sequence: Synthetic oligonucleotide
  Target: LAMA2; (-) strand; PAM type: YTN; PAM sequence: CTG
atggtttggacaatgcacta

SEQ ID NO: 254227 - DNA, 20 bp, Artificial Sequence
  Description of Artificial Sequence: Synthetic oligonucleotide
  Target: LAMA2; (-) strand; PAM type: YTN; PAM sequence: CTC
tgatggtttggacaatgcac

SEQ ID NO: 254228 - DNA, 20 bp, Artificial Sequence
  Description of Artificial Sequence: Synthetic oligonucleotide
  Target: LAMA2; (-) strand; PAM type: YTN; PAM sequence: CTC
agtggactctgatggtttgg

SEQ ID NO: 254229 - DNA, 20 bp, Artificial Sequence
  Description of Artificial Sequence: Synthetic oligonucleotide
  Target: LAMA2; (-) strand; PAM type: YTN; PAM sequence: TTG
gcctcagtggactctgatgg

SEQ ID NO: 254230 - DNA, 20 bp, Artificial Sequence
  Description of Artificial Sequence: Synthetic oligonucleotide
  Target: LAMA2; (-) strand; PAM type: YTN; PAM sequence: TTT
ggcctcagtggactctgatg

SEQ ID NO: 254231 - DNA, 20 bp, Artificial Sequence
  Description of Artificial Sequence: Synthetic oligonucleotide
  Target: LAMA2; (-) strand; PAM type: YTN; PAM sequence: TTT
tggcctcagtggactctgat

SEQ ID NO: 254232 - DNA, 20 bp, Artificial Sequence
  Description of Artificial Sequence: Synthetic oligonucleotide
  Target: LAMA2; (-) strand; PAM type: YTN; PAM sequence: CTC
agacatgaattttggcctca

SEQ ID NO: 254233 - DNA, 20 bp, Artificial Sequence
  Description of Artificial Sequence: Synthetic oligonucleotide
  Target: LAMA2; (-) strand; PAM type: YTN; PAM sequence: TTA
gctcagacatgaattttggc

SEQ ID NO: 254234 - DNA, 20 bp, Artificial Sequence
  Description of Artificial Sequence: Synthetic oligonucleotide
  Target: LAMA2; (-) strand; PAM type: YTN; PAM sequence: CTT
agctcagacatgaattttgg

SEQ ID NO: 254235 - DNA, 20 bp, Artificial Sequence
  Description of Artificial Sequence: Synthetic oligonucleotide
  Target: LAMA2; (-) strand; PAM type: YTN; PAM sequence: CTC
ttagctcagacatgaatttt

SEQ ID NO: 254236 - DNA, 20 bp, Artificial Sequence
  Description of Artificial Sequence: Synthetic oligonucleotide
  Target: LAMA2; (-) strand; PAM type: YTN; PAM sequence: CTA
tggcctcttagctcagacat

SEQ ID NO: 254237 - DNA, 20 bp, Artificial Sequence
  Description of Artificial Sequence: Synthetic oligonucleotide
  Target: LAMA2; (-) strand; PAM type: YTN; PAM sequence: CTC
cggggctatggcctcttagc

SEQ ID NO: 254238 - DNA, 20 bp, Artificial Sequence
  Description of Artificial Sequence: Synthetic oligonucleotide
  Target: LAMA2; (-) strand; PAM type: YTN; PAM sequence: CTA
atcatagaaatcctccgggg

SEQ ID NO: 254239 - DNA, 20 bp, Artificial Sequence
  Description of Artificial Sequence: Synthetic oligonucleotide
  Target: LAMA2; (-) strand; PAM type: YTN; PAM sequence: CTG
tggctaatcatagaaatcct

SEQ ID NO: 254240 - DNA, 20 bp, Artificial Sequence
  Description of Artificial Sequence: Synthetic oligonucleotide
  Target: LAMA2; (-) strand; PAM type: YTN; PAM sequence: TTA
atgggaactgtggctaatca

SEQ ID NO: 254241 - DNA, 20 bp, Artificial Sequence
  Description of Artificial Sequence: Synthetic oligonucleotide
  Target: LAMA2; (-) strand; PAM type: YTN; PAM sequence: TTT
aatgggaactgtggctaatc

SEQ ID NO: 254242 - DNA, 20 bp, Artificial Sequence
  Description of Artificial Sequence: Synthetic oligonucleotide
  Target: LAMA2; (-) strand; PAM type: YTN; PAM sequence: CTG
atttaatgggaactgtggct

SEQ ID NO: 254243 - DNA, 20 bp, Artificial Sequence
  Description of Artificial Sequence: Synthetic oligonucleotide
  Target: LAMA2; (-) strand; PAM type: YTN; PAM sequence: TTG
ctgatttaatgggaactgtg

SEQ ID NO: 254244 - DNA, 20 bp, Artificial Sequence
  Description of Artificial Sequence: Synthetic oligonucleotide
  Target: LAMA2; (-) strand; PAM type: YTN; PAM sequence: TTG
aaattgctgatttaatggga

SEQ ID NO: 254245 - DNA, 20 bp, Artificial Sequence
  Description of Artificial Sequence: Synthetic oligonucleotide
  Target: LAMA2; (-) strand; PAM type: YTN; PAM sequence: CTT
gaaattgctgatttaatggg

SEQ ID NO: 254246 - DNA, 20 bp, Artificial Sequence
  Description of Artificial Sequence: Synthetic oligonucleotide
  Target: LAMA2; (-) strand; PAM type: YTN; PAM sequence: TTC
agcttgaaattgctgattta

SEQ ID NO: 254247 - DNA, 20 bp, Artificial Sequence
  Description of Artificial Sequence: Synthetic oligonucleotide
  Target: LAMA2; (-) strand; PAM type: YTN; PAM sequence: TTG
ttcagcttgaaattgctgat

SEQ ID NO: 254248 - DNA, 20 bp, Artificial Sequence
  Description of Artificial Sequence: Synthetic oligonucleotide
  Target: LAMA2; (-) strand; PAM type: YTN; PAM sequence: CTA
ggtaaaaatcaattgttcag

SEQ ID NO: 254249 - DNA, 20 bp, Artificial Sequence
  Description of Artificial Sequence: Synthetic oligonucleotide
  Target: LAMA2; (-) strand; PAM type: YTN; PAM sequence: TTC
taggtaaaaatcaattgttc

SEQ ID NO: 254250 - DNA, 20 bp, Artificial Sequence
  Description of Artificial Sequence: Synthetic oligonucleotide
  Target: LAMA2; (-) strand; PAM type: YTN; PAM sequence: CTG
attctaggtaaaaatcaatt

SEQ ID NO: 254251 - DNA, 20 bp, Artificial Sequence
  Description of Artificial Sequence: Synthetic oligonucleotide
  Target: LAMA2; (-) strand; PAM type: YTN; PAM sequence: TTG
tagctgattctaggtaaaaa

SEQ ID NO: 254252 - DNA, 20 bp, Artificial Sequence
  Description of Artificial Sequence: Synthetic oligonucleotide
  Target: LAMA2; (-) strand; PAM type: YTN; PAM sequence: TTA
atggaaattgtagctgattc

SEQ ID NO: 254253 - DNA, 20 bp, Artificial Sequence
  Description of Artificial Sequence: Synthetic oligonucleotide
  Target: LAMA2; (-) strand; PAM type: YTN; PAM sequence: TTT
aatggaaattgtagctgatt

SEQ ID NO: 254254 - DNA, 20 bp, Artificial Sequence
  Description of Artificial Sequence: Synthetic oligonucleotide
  Target: LAMA2; (-) strand; PAM type: YTN; PAM sequence: CTA
ataacatatgtttaatggaa

SEQ ID NO: 254255 - DNA, 20 bp, Artificial Sequence
  Description of Artificial Sequence: Synthetic oligonucleotide
  Target: LAMA2; (-) strand; PAM type: YTN; PAM sequence: TTG
cgtgtgtgtgtgtgtgtgtg

SEQ ID NO: 254256 - DNA, 20 bp, Artificial Sequence
  Description of Artificial Sequence: Synthetic oligonucleotide
  Target: LAMA2; (-) strand; PAM type: YTN; PAM sequence: TTA
agaaaatacatgatattgcg

SEQ ID NO: 254257 - DNA, 20 bp, Artificial Sequence
  Description of Artificial Sequence: Synthetic oligonucleotide
  Target: LAMA2; (-) strand; PAM type: YTN; PAM sequence: CTT
aagaaaatacatgatattgc

SEQ ID NO: 254258 - DNA, 20 bp, Artificial Sequence
  Description of Artificial Sequence: Synthetic oligonucleotide
  Target: LAMA2; (-) strand; PAM type: YTN; PAM sequence: TTC
cttaagaaaatacatgatat

SEQ ID NO: 254259 - DNA, 20 bp, Artificial Sequence
  Description of Artificial Sequence: Synthetic oligonucleotide
  Target: LAMA2; (-) strand; PAM type: YTN; PAM sequence: TTT
ccttaagaaaatacatgata

SEQ ID NO: 254260 - DNA, 20 bp, Artificial Sequence
  Description of Artificial Sequence: Synthetic oligonucleotide
  Target: LAMA2; (-) strand; PAM type: YTN; PAM sequence: TTT
tccttaagaaaatacatgat

SEQ ID NO: 254261 - DNA, 20 bp, Artificial Sequence
  Description of Artificial Sequence: Synthetic oligonucleotide
  Target: LAMA2; (-) strand; PAM type: YTN; PAM sequence: TTA
ttttccttaagaaaatacat

SEQ ID NO: 254262 - DNA, 20 bp, Artificial Sequence
  Description of Artificial Sequence: Synthetic oligonucleotide
  Target: LAMA2; (-) strand; PAM type: YTN; PAM sequence: TTT
attttccttaagaaaataca

SEQ ID NO: 254263 - DNA, 20 bp, Artificial Sequence
  Description of Artificial Sequence: Synthetic oligonucleotide
  Target: LAMA2; (-) strand; PAM type: YTN; PAM sequence: CTT
tattttccttaagaaaatac

SEQ ID NO: 254264 - DNA, 20 bp, Artificial Sequence
  Description of Artificial Sequence: Synthetic oligonucleotide
  Target: LAMA2; (-) strand; PAM type: YTN; PAM sequence: TTC
tttattttccttaagaaaat

SEQ ID NO: 254265 - DNA, 20 bp, Artificial Sequence
  Description of Artificial Sequence: Synthetic oligonucleotide
  Target: LAMA2; (-) strand; PAM type: YTN; PAM sequence: TTT
ctttattttccttaagaaaa

SEQ ID NO: 254266 - DNA, 20 bp, Artificial Sequence
  Description of Artificial Sequence: Synthetic oligonucleotide
  Target: LAMA2; (-) strand; PAM type: YTN; PAM sequence: TTT
tctttattttccttaagaaa

SEQ ID NO: 254267 - DNA, 20 bp, Artificial Sequence
  Description of Artificial Sequence: Synthetic oligonucleotide
  Target: LAMA2; (-) strand; PAM type: YTN; PAM sequence: TTT
ttctttattttccttaagaa

SEQ ID NO: 254268 - DNA, 20 bp, Artificial Sequence
  Description of Artificial Sequence: Synthetic oligonucleotide
  Target: LAMA2; (-) strand; PAM type: YTN; PAM sequence: TTT
tttctttattttccttaaga

SEQ ID NO: 254269 - DNA, 20 bp, Artificial Sequence
  Description of Artificial Sequence: Synthetic oligonucleotide
  Target: LAMA2; (-) strand; PAM type: YTN; PAM sequence: TTC
attttttctttattttcctt

SEQ ID NO: 254270 - DNA, 20 bp, Artificial Sequence
  Description of Artificial Sequence: Synthetic oligonucleotide
  Target: LAMA2; (-) strand; PAM type: YTN; PAM sequence: CTT
cattttttctttattttcct

SEQ ID NO: 254271 - DNA, 20 bp, Artificial Sequence
  Description of Artificial Sequence: Synthetic oligonucleotide
  Target: LAMA2; (-) strand; PAM type: YTN; PAM sequence: TTA
cttcattttttctttatttt

SEQ ID NO: 254272 - DNA, 20 bp, Artificial Sequence
  Description of Artificial Sequence: Synthetic oligonucleotide
  Target: LAMA2; (-) strand; PAM type: YTN; PAM sequence: CTT
acttcattttttctttattt

SEQ ID NO: 254273 - DNA, 20 bp, Artificial Sequence
  Description of Artificial Sequence: Synthetic oligonucleotide
  Target: LAMA2; (-) strand; PAM type: YTN; PAM sequence: TTA
tgcaaatcttacttcatttt

SEQ ID NO: 254274 - DNA, 20 bp, Artificial Sequence
  Description of Artificial Sequence: Synthetic oligonucleotide
  Target: LAMA2; (-) strand; PAM type: YTN; PAM sequence: TTC
attatgcaaatcttacttca

SEQ ID NO: 254275 - DNA, 20 bp, Artificial Sequence
  Description of Artificial Sequence: Synthetic oligonucleotide
  Target: LAMA2; (-) strand; PAM type: YTN; PAM sequence: TTT
cattatgcaaatcttacttc

SEQ ID NO: 254276 - DNA, 20 bp, Artificial Sequence
  Description of Artificial Sequence: Synthetic oligonucleotide
  Target: LAMA2; (-) strand; PAM type: YTN; PAM sequence: TTT
tcattatgcaaatcttactt

SEQ ID NO: 254277 - DNA, 20 bp, Artificial Sequence
  Description of Artificial Sequence: Synthetic oligonucleotide
  Target: LAMA2; (-) strand; PAM type: YTN; PAM sequence: TTT
ttcattatgcaaatcttact

SEQ ID NO: 254278 - DNA, 20 bp, Artificial Sequence
  Description of Artificial Sequence: Synthetic oligonucleotide
  Target: LAMA2; (-) strand; PAM type: YTN; PAM sequence: TTA
atgtttttcattatgcaaat

SEQ ID NO: 254279 - DNA, 20 bp, Artificial Sequence
  Description of Artificial Sequence: Synthetic oligonucleotide
  Target: LAMA2; (-) strand; PAM type: YTN; PAM sequence: TTT
aatgtttttcattatgcaaa

SEQ ID NO: 254280 - DNA, 20 bp, Artificial Sequence
  Description of Artificial Sequence: Synthetic oligonucleotide
  Target: LAMA2; (-) strand; PAM type: YTN; PAM sequence: TTT
taatgtttttcattatgcaa

SEQ ID NO: 254281 - DNA, 20 bp, Artificial Sequence
  Description of Artificial Sequence: Synthetic oligonucleotide
  Target: LAMA2; (-) strand; PAM type: YTN; PAM sequence: TTC
attttaatgtttttcattat

SEQ ID NO: 254282 - DNA, 20 bp, Artificial Sequence
  Description of Artificial Sequence: Synthetic oligonucleotide
  Target: LAMA2; (-) strand; PAM type: YTN; PAM sequence: TTG
aaattcattttaatgttttt

SEQ ID NO: 254283 - DNA, 20 bp, Artificial Sequence
  Description of Artificial Sequence: Synthetic oligonucleotide
  Target: LAMA2; (-) strand; PAM type: YTN; PAM sequence: TTA
caaaaagatgattgaaattc

SEQ ID NO: 254284 - DNA, 20 bp, Artificial Sequence
  Description of Artificial Sequence: Synthetic oligonucleotide
  Target: LAMA2; (-) strand; PAM type: YTN; PAM sequence: CTT
acaaaaagatgattgaaatt

SEQ ID NO: 254285 - DNA, 20 bp, Artificial Sequence
  Description of Artificial Sequence: Synthetic oligonucleotide
  Target: LAMA2; (-) strand; PAM type: YTN; PAM sequence: TTC
agcatatgcatacttacaaa

SEQ ID NO: 254286 - DNA, 20 bp, Artificial Sequence
  Description of Artificial Sequence: Synthetic oligonucleotide
  Target: LAMA2; (-) strand; PAM type: YTN; PAM sequence: TTT
cagcatatgcatacttacaa

SEQ ID NO: 254287 - DNA, 20 bp, Artificial Sequence
  Description of Artificial Sequence: Synthetic oligonucleotide
  Target: LAMA2; (-) strand; PAM type: YTN; PAM sequence: TTA
taaacaacacagtagtttca

SEQ ID NO: 254288 - DNA, 20 bp, Artificial Sequence
  Description of Artificial Sequence: Synthetic oligonucleotide
  Target: LAMA2; (-) strand; PAM type: YTN; PAM sequence: CTT
ataaacaacacagtagtttc

SEQ ID NO: 254289 - DNA, 20 bp, Artificial Sequence
  Description of Artificial Sequence: Synthetic oligonucleotide
  Target: LAMA2; (-) strand; PAM type: YTN; PAM sequence: CTA
gcttataaacaacacagtag

SEQ ID NO: 254290 - DNA, 20 bp, Artificial Sequence
  Description of Artificial Sequence: Synthetic oligonucleotide
  Target: LAMA2; (-) strand; PAM type: YTN; PAM sequence: TTA
atatctagcttataaacaac

SEQ ID NO: 254291 - DNA, 20 bp, Artificial Sequence
  Description of Artificial Sequence: Synthetic oligonucleotide
  Target: LAMA2; (-) strand; PAM type: YTN; PAM sequence: TTT
aatatctagcttataaacaa

SEQ ID NO: 254292 - DNA, 20 bp, Artificial Sequence
  Description of Artificial Sequence: Synthetic oligonucleotide
  Target: LAMA2; (-) strand; PAM type: YTN; PAM sequence: TTA
atttaatatctagcttataa

SEQ ID NO: 254293 - DNA, 20 bp, Artificial Sequence
  Description of Artificial Sequence: Synthetic oligonucleotide
  Target: LAMA2; (-) strand; PAM type: YTN; PAM sequence: TTG
aaagttaatttaatatctag

SEQ ID NO: 254294 - DNA, 20 bp, Artificial Sequence
  Description of Artificial Sequence: Synthetic oligonucleotide
  Target: LAMA2; (-) strand; PAM type: YTN; PAM sequence: TTA
cagcagagaaatagcattga

SEQ ID NO: 254295 - DNA, 20 bp, Artificial Sequence
  Description of Artificial Sequence: Synthetic oligonucleotide
  Target: LAMA2; (-) strand; PAM type: YTN; PAM sequence: TTT
acagcagagaaatagcattg

SEQ ID NO: 254296 - DNA, 20 bp, Artificial Sequence
  Description of Artificial Sequence: Synthetic oligonucleotide
  Target: LAMA2; (-) strand; PAM type: YTN; PAM sequence: TTT
tacagcagagaaatagcatt

SEQ ID NO: 254297 - DNA, 20 bp, Artificial Sequence
  Description of Artificial Sequence: Synthetic oligonucleotide
  Target: LAMA2; (-) strand; PAM type: YTN; PAM sequence: TTA
aatggtcaattttacagcag

SEQ ID NO: 254298 - DNA, 20 bp, Artificial Sequence
  Description of Artificial Sequence: Synthetic oligonucleotide
  Target: LAMA2; (-) strand; PAM type: YTN; PAM sequence: TTC
catgttaaatggtcaatttt

SEQ ID NO: 254299 - DNA, 20 bp, Artificial Sequence
  Description of Artificial Sequence: Synthetic oligonucleotide
  Target: LAMA2; (-) strand; PAM type: YTN; PAM sequence: TTT
ccatgttaaatggtcaattt

SEQ ID NO: 254300 - DNA, 20 bp, Artificial Sequence
  Description of Artificial Sequence: Synthetic oligonucleotide
  Target: LAMA2; (-) strand; PAM type: YTN; PAM sequence: TTT
tccatgttaaatggtcaatt

SEQ ID NO: 254301 - DNA, 20 bp, Artificial Sequence
  Description of Artificial Sequence: Synthetic oligonucleotide
  Target: LAMA2; (-) strand; PAM type: YTN; PAM sequence: TTT
ttccatgttaaatggtcaat

SEQ ID NO: 254302 - DNA, 20 bp, Artificial Sequence
  Description of Artificial Sequence: Synthetic oligonucleotide
  Target: LAMA2; (-) strand; PAM type: YTN; PAM sequence: CTG
ccagcaagaataatttttcc

SEQ ID NO: 254303 - DNA, 20 bp, Artificial Sequence
  Description of Artificial Sequence: Synthetic oligonucleotide
  Target: LAMA2; (-) strand; PAM type: YTN; PAM sequence: CTC
cctgccagcaagaataattt

SEQ ID NO: 254304 - DNA, 20 bp, Artificial Sequence
  Description of Artificial Sequence: Synthetic oligonucleotide
  Target: LAMA2; (-) strand; PAM type: YTN; PAM sequence: CTG
ctccctgccagcaagaataa

SEQ ID NO: 254305 - DNA, 20 bp, Artificial Sequence
  Description of Artificial Sequence: Synthetic oligonucleotide
  Target: LAMA2; (-) strand; PAM type: YTN; PAM sequence: TTA
gtctgctccctgccagcaag

SEQ ID NO: 254306 - DNA, 20 bp, Artificial Sequence
  Description of Artificial Sequence: Synthetic oligonucleotide
  Target: LAMA2; (-) strand; PAM type: YTN; PAM sequence: CTA
cgaagtcattagtctgctcc

SEQ ID NO: 254307 - DNA, 20 bp, Artificial Sequence
  Description of Artificial Sequence: Synthetic oligonucleotide
  Target: LAMA2; (-) strand; PAM type: YTN; PAM sequence: TTG
ccaaaaataggtctacgaag

SEQ ID NO: 254308 - DNA, 20 bp, Artificial Sequence
  Description of Artificial Sequence: Synthetic oligonucleotide
  Target: LAMA2; (-) strand; PAM type: YTN; PAM sequence: TTG
gtgtcagggatcaacatgtt

SEQ ID NO: 254309 - DNA, 20 bp, Artificial Sequence
  Description of Artificial Sequence: Synthetic oligonucleotide
  Target: LAMA2; (-) strand; PAM type: YTN; PAM sequence: TTT
ggtgtcagggatcaacatgt

SEQ ID NO: 254310 - DNA, 20 bp, Artificial Sequence
  Description of Artificial Sequence: Synthetic oligonucleotide
  Target: LAMA2; (-) strand; PAM type: YTN; PAM sequence: TTT
tggtgtcagggatcaacatg

SEQ ID NO: 254311 - DNA, 20 bp, Artificial Sequence
  Description of Artificial Sequence: Synthetic oligonucleotide
  Target: LAMA2; (-) strand; PAM type: YTN; PAM sequence: TTA
ttttggtgtcagggatcaac

SEQ ID NO: 254312 - DNA, 20 bp, Artificial Sequence
  Description of Artificial Sequence: Synthetic oligonucleotide
  Target: LAMA2; (-) strand; PAM type: YTN; PAM sequence: TTA
ttattttggtgtcagggatc

SEQ ID NO: 254313 - DNA, 20 bp, Artificial Sequence
  Description of Artificial Sequence: Synthetic oligonucleotide
  Target: LAMA2; (-) strand; PAM type: YTN; PAM sequence: TTT
attattttggtgtcagggat

SEQ ID NO: 254314 - DNA, 20 bp, Artificial Sequence
  Description of Artificial Sequence: Synthetic oligonucleotide
  Target: LAMA2; (-) strand; PAM type: YTN; PAM sequence: CTG
agaaagaaatgagcatcaga

SEQ ID NO: 254315 - DNA, 20 bp, Artificial Sequence
  Description of Artificial Sequence: Synthetic oligonucleotide
  Target: LAMA2; (-) strand; PAM type: YTN; PAM sequence: TTC
tgagaaagaaatgagcatca

SEQ ID NO: 254316 - DNA, 20 bp, Artificial Sequence
  Description of Artificial Sequence: Synthetic oligonucleotide
  Target: LAMA2; (-) strand; PAM type: YTN; PAM sequence: TTA
cagttctgagaaagaaatga

SEQ ID NO: 254317 - DNA, 20 bp, Artificial Sequence
  Description of Artificial Sequence: Synthetic oligonucleotide
  Target: LAMA2; (-) strand; PAM type: YTN; PAM sequence: CTT
acagttctgagaaagaaatg

SEQ ID NO: 254318 - DNA, 20 bp, Artificial Sequence
  Description of Artificial Sequence: Synthetic oligonucleotide
  Target: LAMA2; (-) strand; PAM type: YTN; PAM sequence: CTG
tgtgatccttacagttctga

SEQ ID NO: 254319 - DNA, 20 bp, Artificial Sequence
  Description of Artificial Sequence: Synthetic oligonucleotide
  Target: LAMA2; (-) strand; PAM type: YTN; PAM sequence: TTA
tcacaatatgggccacctgt

SEQ ID NO: 254320 - DNA, 20 bp, Artificial Sequence
  Description of Artificial Sequence: Synthetic oligonucleotide
  Target: LAMA2; (-) strand; PAM type: YTN; PAM sequence: TTT
atcacaatatgggccacctg

SEQ ID NO: 254321 - DNA, 20 bp, Artificial Sequence
  Description of Artificial Sequence: Synthetic oligonucleotide
  Target: LAMA2; (-) strand; PAM type: YTN; PAM sequence: CTC
gccatagaaaccaggaagac

SEQ ID NO: 254322 - DNA, 20 bp, Artificial Sequence
  Description of Artificial Sequence: Synthetic oligonucleotide
  Target: LAMA2; (-) strand; PAM type: YTN; PAM sequence: TTA
gtaggctcgccatagaaacc

SEQ ID NO: 254323 - DNA, 20 bp, Artificial Sequence
  Description of Artificial Sequence: Synthetic oligonucleotide
  Target: LAMA2; (-) strand; PAM type: YTN; PAM sequence: TTT
agtaggctcgccatagaaac

SEQ ID NO: 254324 - DNA, 20 bp, Artificial Sequence
  Description of Artificial Sequence: Synthetic oligonucleotide
  Target: LAMA2; (-) strand; PAM type: YTN; PAM sequence: CTT
tagtaggctcgccatagaaa

SEQ ID NO: 254325 - DNA, 20 bp, Artificial Sequence
  Description of Artificial Sequence: Synthetic oligonucleotide
  Target: LAMA2; (-) strand; PAM type: YTN; PAM sequence: TTC
ctttagtaggctcgccatag

SEQ ID NO: 254326 - DNA, 20 bp, Artificial Sequence
  Description of Artificial Sequence: Synthetic oligonucleotide
  Target: LAMA2; (-) strand; PAM type: YTN; PAM sequence: TTC
agaggttcctttagtaggct

SEQ ID NO: 254327 - DNA, 20 bp, Artificial Sequence
  Description of Artificial Sequence: Synthetic oligonucleotide
  Target: LAMA2; (-) strand; PAM type: YTN; PAM sequence: CTT
cagaggttcctttagtaggc

SEQ ID NO: 254328 - DNA, 20 bp, Artificial Sequence
  Description of Artificial Sequence: Synthetic oligonucleotide
  Target: LAMA2; (-) strand; PAM type: YTN; PAM sequence: TTG
acagtcttcagaggttcctt

SEQ ID NO: 254329 - DNA, 20 bp, Artificial Sequence
  Description of Artificial Sequence: Synthetic oligonucleotide
  Target: LAMA2; (-) strand; PAM type: YTN; PAM sequence: TTG
agtggacaggcacagggttg

SEQ ID NO: 254330 - DNA, 20 bp, Artificial Sequence
  Description of Artificial Sequence: Synthetic oligonucleotide
  Target: LAMA2; (-) strand; PAM type: YTN; PAM sequence: TTG
gatgggatattgagtggaca

SEQ ID NO: 254331 - DNA, 20 bp, Artificial Sequence
  Description of Artificial Sequence: Synthetic oligonucleotide
  Target: LAMA2; (-) strand; PAM type: YTN; PAM sequence: TTA
ttggatgggatattgagtgg

SEQ ID NO: 254332 - DNA, 20 bp, Artificial Sequence
  Description of Artificial Sequence: Synthetic oligonucleotide
  Target: LAMA2; (-) strand; PAM type: YTN; PAM sequence: CTT
attggatgggatattgagtg

SEQ ID NO: 254333 - DNA, 20 bp, Artificial Sequence
  Description of Artificial Sequence: Synthetic oligonucleotide
  Target: LAMA2; (-) strand; PAM type: YTN; PAM sequence: TTA
cttattggatgggatattga

SEQ ID NO: 254334 - DNA, 20 bp, Artificial Sequence
  Description of Artificial Sequence: Synthetic oligonucleotide
  Target: LAMA2; (-) strand; PAM type: YTN; PAM sequence: CTT
acttattggatgggatattg

SEQ ID NO: 254335 - DNA, 20 bp, Artificial Sequence
  Description of Artificial Sequence: Synthetic oligonucleotide
  Target: LAMA2; (-) strand; PAM type: YTN; PAM sequence: TTA
cttacttattggatgggata

SEQ ID NO: 254336 - DNA, 20 bp, Artificial Sequence
  Description of Artificial Sequence: Synthetic oligonucleotide
  Target: LAMA2; (-) strand; PAM type: YTN; PAM sequence: TTG
ttacttacttattggatggg

SEQ ID NO: 254337 - DNA, 20 bp, Artificial Sequence
  Description of Artificial Sequence: Synthetic oligonucleotide
  Target: LAMA2; (-) strand; PAM type: YTN; PAM sequence: TTT
gttacttacttattggatgg

SEQ ID NO: 254338 - DNA, 20 bp, Artificial Sequence
  Description of Artificial Sequence: Synthetic oligonucleotide
  Target: LAMA2; (-) strand; PAM type: YTN; PAM sequence: TTC
atggggtaagtttgttactt

SEQ ID NO: 254339 - DNA, 20 bp, Artificial Sequence
  Description of Artificial Sequence: Synthetic oligonucleotide
  Target: LAMA2; (-) strand; PAM type: YTN; PAM sequence: TTA
ttcatggggtaagtttgtta

SEQ ID NO: 254340 - DNA, 20 bp, Artificial Sequence
  Description of Artificial Sequence: Synthetic oligonucleotide
  Target: LAMA2; (-) strand; PAM type: YTN; PAM sequence: CTT
attcatggggtaagtttgtt

SEQ ID NO: 254341 - DNA, 20 bp, Artificial Sequence
  Description of Artificial Sequence: Synthetic oligonucleotide
  Target: LAMA2; (-) strand; PAM type: YTN; PAM sequence: CTG
agcttattcatggggtaagt

SEQ ID NO: 254342 - DNA, 20 bp, Artificial Sequence
  Description of Artificial Sequence: Synthetic oligonucleotide
  Target: LAMA2; (-) strand; PAM type: YTN; PAM sequence: TTG
cagaaatggatgctgagctt

SEQ ID NO: 254343 - DNA, 20 bp, Artificial Sequence
  Description of Artificial Sequence: Synthetic oligonucleotide
  Target: LAMA2; (-) strand; PAM type: YTN; PAM sequence: CTT
gcagaaatggatgctgagct

SEQ ID NO: 254344 - DNA, 20 bp, Artificial Sequence
  Description of Artificial Sequence: Synthetic oligonucleotide
  Target: LAMA2; (-) strand; PAM type: YTN; PAM sequence: CTA
tgaaaagtgtacttgcagaa

SEQ ID NO: 254345 - DNA, 20 bp, Artificial Sequence
  Description of Artificial Sequence: Synthetic oligonucleotide
  Target: LAMA2; (-) strand; PAM type: YTN; PAM sequence: TTG
ctatgaaaagtgtacttgca

SEQ ID NO: 254346 - DNA, 20 bp, Artificial Sequence
  Description of Artificial Sequence: Synthetic oligonucleotide
  Target: LAMA2; (-) strand; PAM type: YTN; PAM sequence: TTT
gctatgaaaagtgtacttgc

SEQ ID NO: 254347 - DNA, 20 bp, Artificial Sequence
  Description of Artificial Sequence: Synthetic oligonucleotide
  Target: LAMA2; (-) strand; PAM type: YTN; PAM sequence: TTA
catgggataaaaggaagtgt

SEQ ID NO: 254348 - DNA, 20 bp, Artificial Sequence
  Description of Artificial Sequence: Synthetic oligonucleotide
  Target: LAMA2; (-) strand; PAM type: YTN; PAM sequence: TTT
acatgggataaaaggaagtg

SEQ ID NO: 254349 - DNA, 20 bp, Artificial Sequence
  Description of Artificial Sequence: Synthetic oligonucleotide
  Target: LAMA2; (-) strand; PAM type: YTN; PAM sequence: TTA
tttacatgggataaaaggaa

SEQ ID NO: 254350 - DNA, 20 bp, Artificial Sequence
  Description of Artificial Sequence: Synthetic oligonucleotide
  Target: LAMA2; (-) strand; PAM type: YTN; PAM sequence: TTT
atttacatgggataaaagga

SEQ ID NO: 254351 - DNA, 20 bp, Artificial Sequence
  Description of Artificial Sequence: Synthetic oligonucleotide
  Target: LAMA2; (-) strand; PAM type: YTN; PAM sequence: TTA
tttatttacatgggataaaa

SEQ ID NO: 254352 - DNA, 20 bp, Artificial Sequence
  Description of Artificial Sequence: Synthetic oligonucleotide
  Target: LAMA2; (-) strand; PAM type: YTN; PAM sequence: TTA
ttatttatttacatgggata

SEQ ID NO: 254353 - DNA, 20 bp, Artificial Sequence
  Description of Artificial Sequence: Synthetic oligonucleotide
  Target: LAMA2; (-) strand; PAM type: YTN; PAM sequence: TTT
attatttatttacatgggat

SEQ ID NO: 254354 - DNA, 20 bp, Artificial Sequence
  Description of Artificial Sequence: Synthetic oligonucleotide
  Target: LAMA2; (-) strand; PAM type: YTN; PAM sequence: CTG
tgtttattatttatttacat

SEQ ID NO: 254355 - DNA, 20 bp, Artificial Sequence
  Description of Artificial Sequence: Synthetic oligonucleotide
  Target: LAMA2; (-) strand; PAM type: YTN; PAM sequence: TTC
atgtctgtgtttattattta

SEQ ID NO: 254356 - DNA, 20 bp, Artificial Sequence
  Description of Artificial Sequence: Synthetic oligonucleotide
  Target: LAMA2; (-) strand; PAM type: YTN; PAM sequence: CTG
aaaaaattcatgtctgtgtt

SEQ ID NO: 254357 - DNA, 20 bp, Artificial Sequence
  Description of Artificial Sequence: Synthetic oligonucleotide
  Target: LAMA2; (-) strand; PAM type: YTN; PAM sequence: TTC
ctgaaaaaattcatgtctgt

SEQ ID NO: 254358 - DNA, 20 bp, Artificial Sequence
  Description of Artificial Sequence: Synthetic oligonucleotide
  Target: LAMA2; (-) strand; PAM type: YTN; PAM sequence: TTT
cctgaaaaaattcatgtctg

SEQ ID NO: 254359 - DNA, 20 bp, Artificial Sequence
  Description of Artificial Sequence: Synthetic oligonucleotide
  Target: LAMA2; (-) strand; PAM type: YTN; PAM sequence: TTT
tcctgaaaaaattcatgtct

SEQ ID NO: 254360 - DNA, 20 bp, Artificial Sequence
  Description of Artificial Sequence: Synthetic oligonucleotide
  Target: LAMA2; (-) strand; PAM type: YTN; PAM sequence: TTC
atataattttcctgaaaaaa

SEQ ID NO: 254361 - DNA, 20 bp, Artificial Sequence
  Description of Artificial Sequence: Synthetic oligonucleotide
  Target: LAMA2; (-) strand; PAM type: YTN; PAM sequence: TTG
aaaaaattcatataattttc

SEQ ID NO: 254362 - DNA, 20 bp, Artificial Sequence
  Description of Artificial Sequence: Synthetic oligonucleotide
  Target: LAMA2; (-) strand; PAM type: YTN; PAM sequence: TTT
gaaaaaattcatataatttt

SEQ ID NO: 254363 - DNA, 20 bp, Artificial Sequence
  Description of Artificial Sequence: Synthetic oligonucleotide
  Target: LAMA2; (-) strand; PAM type: YTN; PAM sequence: TTA
ggtttgaaaaaattcatata

SEQ ID NO: 254364 - DNA, 20 bp, Artificial Sequence
  Description of Artificial Sequence: Synthetic oligonucleotide
  Target: LAMA2; (-) strand; PAM type: YTN; PAM sequence: CTT
aggtttgaaaaaattcatat

SEQ ID NO: 254365 - DNA, 20 bp, Artificial Sequence
  Description of Artificial Sequence: Synthetic oligonucleotide
  Target: LAMA2; (-) strand; PAM type: YTN; PAM sequence: TTA
aatatcttaggtttgaaaaa

SEQ ID NO: 254366 - DNA, 20 bp, Artificial Sequence
  Description of Artificial Sequence: Synthetic oligonucleotide
  Target: LAMA2; (-) strand; PAM type: YTN; PAM sequence: TTT
aaatatcttaggtttgaaaa

SEQ ID NO: 254367 - DNA, 20 bp, Artificial Sequence
  Description of Artificial Sequence: Synthetic oligonucleotide
  Target: LAMA2; (-) strand; PAM type: YTN; PAM sequence: TTT
taaatatcttaggtttgaaa

SEQ ID NO: 254368 - DNA, 20 bp, Artificial Sequence
  Description of Artificial Sequence: Synthetic oligonucleotide
  Target: LAMA2; (-) strand; PAM type: YTN; PAM sequence: CTC
atagttttaaatatcttagg

SEQ ID NO: 254369 - DNA, 20 bp, Artificial Sequence
  Description of Artificial Sequence: Synthetic oligonucleotide
  Target: LAMA2; (-) strand; PAM type: YTN; PAM sequence: TTA
gaaatcctcatagttttaaa

SEQ ID NO: 254370 - DNA, 20 bp, Artificial Sequence
  Description of Artificial Sequence: Synthetic oligonucleotide
  Target: LAMA2; (-) strand; PAM type: YTN; PAM sequence: CTT
agaaatcctcatagttttaa

SEQ ID NO: 254371 - DNA, 20 bp, Artificial Sequence
  Description of Artificial Sequence: Synthetic oligonucleotide
  Target: LAMA2; (-) strand; PAM type: YTN; PAM sequence: TTC
ttagaaatcctcatagtttt

SEQ ID NO: 254372 - DNA, 20 bp, Artificial Sequence
  Description of Artificial Sequence: Synthetic oligonucleotide
  Target: LAMA2; (-) strand; PAM type: YTN; PAM sequence: TTA
caaattcttagaaatcctca

SEQ ID NO: 254373 - DNA, 20 bp, Artificial Sequence
  Description of Artificial Sequence: Synthetic oligonucleotide
  Target: LAMA2; (-) strand; PAM type: YTN; PAM sequence: CTA
aaaaaattacaaattcttag

SEQ ID NO: 254374 - DNA, 20 bp, Artificial Sequence
  Description of Artificial Sequence: Synthetic oligonucleotide
  Target: LAMA2; (-) strand; PAM type: YTN; PAM sequence: CTA
gagctaaaaaaattacaaat

SEQ ID NO: 254375 - DNA, 20 bp, Artificial Sequence
  Description of Artificial Sequence: Synthetic oligonucleotide
  Target: LAMA2; (-) strand; PAM type: YTN; PAM sequence: TTA
aatcaccaaaactagagcta

SEQ ID NO: 254376 - DNA, 20 bp, Artificial Sequence
  Description of Artificial Sequence: Synthetic oligonucleotide
  Target: LAMA2; (-) strand; PAM type: YTN; PAM sequence: TTA
gaaattaaatcaccaaaact

SEQ ID NO: 254377 - DNA, 20 bp, Artificial Sequence
  Description of Artificial Sequence: Synthetic oligonucleotide
  Target: LAMA2; (-) strand; PAM type: YTN; PAM sequence: CTT
agaaattaaatcaccaaaac

SEQ ID NO: 254378 - DNA, 20 bp, Artificial Sequence
  Description of Artificial Sequence: Synthetic oligonucleotide
  Target: LAMA2; (-) strand; PAM type: YTN; PAM sequence: CTC
ttagaaattaaatcaccaaa

SEQ ID NO: 254379 - DNA, 20 bp, Artificial Sequence
  Description of Artificial Sequence: Synthetic oligonucleotide
  Target: LAMA2; (-) strand; PAM type: YTN; PAM sequence: CTA
ctcttagaaattaaatcacc

SEQ ID NO: 254380 - DNA, 20 bp, Artificial Sequence
  Description of Artificial Sequence: Synthetic oligonucleotide
  Target: LAMA2; (-) strand; PAM type: YTN; PAM sequence: TTC
tactcttagaaattaaatca

SEQ ID NO: 254381 - DNA, 20 bp, Artificial Sequence
  Description of Artificial Sequence: Synthetic oligonucleotide
  Target: LAMA2; (-) strand; PAM type: YTN; PAM sequence: TTG
agttctactcttagaaatta

SEQ ID NO: 254382 - DNA, 20 bp, Artificial Sequence
  Description of Artificial Sequence: Synthetic oligonucleotide
  Target: LAMA2; (-) strand; PAM type: YTN; PAM sequence: TTT
gagttctactcttagaaatt

SEQ ID NO: 254383 - DNA, 20 bp, Artificial Sequence
  Description of Artificial Sequence: Synthetic oligonucleotide
  Target: LAMA2; (-) strand; PAM type: YTN; PAM sequence: CTA
tttgagttctactcttagaa

SEQ ID NO: 254384 - DNA, 20 bp, Artificial Sequence
  Description of Artificial Sequence: Synthetic oligonucleotide
  Target: LAMA2; (-) strand; PAM type: YTN; PAM sequence: TTC
tatttgagttctactcttag

SEQ ID NO: 254385 - DNA, 20 bp, Artificial Sequence
  Description of Artificial Sequence: Synthetic oligonucleotide
  Target: LAMA2; (-) strand; PAM type: YTN; PAM sequence: TTG
gtgtagaaattctatttgag

SEQ ID NO: 254386 - DNA, 20 bp, Artificial Sequence
  Description of Artificial Sequence: Synthetic oligonucleotide
  Target: LAMA2; (-) strand; PAM type: YTN; PAM sequence: TTG
gaattggtgtagaaattcta

SEQ ID NO: 254387 - DNA, 20 bp, Artificial Sequence
  Description of Artificial Sequence: Synthetic oligonucleotide
  Target: LAMA2; (-) strand; PAM type: YTN; PAM sequence: TTT
ggaattggtgtagaaattct

SEQ ID NO: 254388 - DNA, 20 bp, Artificial Sequence
  Description of Artificial Sequence: Synthetic oligonucleotide
  Target: LAMA2; (-) strand; PAM type: YTN; PAM sequence: CTT
tggaattggtgtagaaattc

SEQ ID NO: 254389 - DNA, 20 bp, Artificial Sequence
  Description of Artificial Sequence: Synthetic oligonucleotide
  Target: LAMA2; (-) strand; PAM type: YTN; PAM sequence: TTC
tttggaattggtgtagaaat

SEQ ID NO: 254390 - DNA, 20 bp, Artificial Sequence
  Description of Artificial Sequence: Synthetic oligonucleotide
  Target: LAMA2; (-) strand; PAM type: YTN; PAM sequence: TTA
tgttctttggaattggtgta

SEQ ID NO: 254391 - DNA, 20 bp, Artificial Sequence
  Description of Artificial Sequence: Synthetic oligonucleotide
  Target: LAMA2; (-) strand; PAM type: YTN; PAM sequence: TTT
atgttctttggaattggtgt

SEQ ID NO: 254392 - DNA, 20 bp, Artificial Sequence
  Description of Artificial Sequence: Synthetic oligonucleotide
  Target: LAMA2; (-) strand; PAM type: YTN; PAM sequence: TTG
tataaaatatttatgttctt

SEQ ID NO: 254393 - DNA, 20 bp, Artificial Sequence
  Description of Artificial Sequence: Synthetic oligonucleotide
  Target: LAMA2; (-) strand; PAM type: YTN; PAM sequence: TTT
gtataaaatatttatgttct

SEQ ID NO: 254394 - DNA, 20 bp, Artificial Sequence
  Description of Artificial Sequence: Synthetic oligonucleotide
  Target: LAMA2; (-) strand; PAM type: YTN; PAM sequence: CTG
tgtgtaggtgtgtacatgca

SEQ ID NO: 254395 - DNA, 20 bp, Artificial Sequence
  Description of Artificial Sequence: Synthetic oligonucleotide
  Target: LAMA2; (-) strand; PAM type: YTN; PAM sequence: TTA
aggtatgaagatgggtatgt

SEQ ID NO: 254396 - DNA, 20 bp, Artificial Sequence
  Description of Artificial Sequence: Synthetic oligonucleotide
  Target: LAMA2; (-) strand; PAM type: YTN; PAM sequence: TTA
ttaaggtatgaagatgggta

SEQ ID NO: 254397 - DNA, 20 bp, Artificial Sequence
  Description of Artificial Sequence: Synthetic oligonucleotide
  Target: LAMA2; (-) strand; PAM type: YTN; PAM sequence: TTT
attaaggtatgaagatgggt

SEQ ID NO: 254398 - DNA, 20 bp, Artificial Sequence
  Description of Artificial Sequence: Synthetic oligonucleotide
  Target: LAMA2; (-) strand; PAM type: YTN; PAM sequence: TTT
tattaaggtatgaagatggg

SEQ ID NO: 254399 - DNA, 20 bp, Artificial Sequence
  Description of Artificial Sequence: Synthetic oligonucleotide
  Target: LAMA2; (-) strand; PAM type: YTN; PAM sequence: CTT
ttattaaggtatgaagatgg

SEQ ID NO: 254400 - DNA, 20 bp, Artificial Sequence
  Description of Artificial Sequence: Synthetic oligonucleotide
  Target: LAMA2; (-) strand; PAM type: YTN; PAM sequence: TTA
tatccttttattaaggtatg

SEQ ID NO: 254401 - DNA, 20 bp, Artificial Sequence
  Description of Artificial Sequence: Synthetic oligonucleotide
  Target: LAMA2; (-) strand; PAM type: YTN; PAM sequence: TTT
atatccttttattaaggtat

SEQ ID NO: 254402 - DNA, 20 bp, Artificial Sequence
  Description of Artificial Sequence: Synthetic oligonucleotide
  Target: LAMA2; (-) strand; PAM type: YTN; PAM sequence: CTG
tatttatatccttttattaa

SEQ ID NO: 254403 - DNA, 20 bp, Artificial Sequence
  Description of Artificial Sequence: Synthetic oligonucleotide
  Target: LAMA2; (-) strand; PAM type: YTN; PAM sequence: TTA
gctgtatttatatcctttta

SEQ ID NO: 254404 - DNA, 20 bp, Artificial Sequence
  Description of Artificial Sequence: Synthetic oligonucleotide
  Target: LAMA2; (-) strand; PAM type: YTN; PAM sequence: TTC
acaaaaaaatagtgtatggg

SEQ ID NO: 254405 - DNA, 20 bp, Artificial Sequence
  Description of Artificial Sequence: Synthetic oligonucleotide
  Target: LAMA2; (-) strand; PAM type: YTN; PAM sequence: TTG
cccaagattcacaaaaaaat

SEQ ID NO: 254406 - DNA, 20 bp, Artificial Sequence
  Description of Artificial Sequence: Synthetic oligonucleotide
  Target: LAMA2; (-) strand; PAM type: YTN; PAM sequence: CTT
gcccaagattcacaaaaaaa

SEQ ID NO: 254407 - DNA, 20 bp, Artificial Sequence
  Description of Artificial Sequence: Synthetic oligonucleotide
  Target: LAMA2; (-) strand; PAM type: YTN; PAM sequence: TTA
cgacttgcccaagattcaca

SEQ ID NO: 254408 - DNA, 20 bp, Artificial Sequence
  Description of Artificial Sequence: Synthetic oligonucleotide
  Target: LAMA2; (-) strand; PAM type: YTN; PAM sequence: TTT
acgacttgcccaagattcac

SEQ ID NO: 254409 - DNA, 20 bp, Artificial Sequence
  Description of Artificial Sequence: Synthetic oligonucleotide
  Target: LAMA2; (-) strand; PAM type: YTN; PAM sequence: TTG
agaggtttacgacttgccca

SEQ ID NO: 254410 - DNA, 20 bp, Artificial Sequence
  Description of Artificial Sequence: Synthetic oligonucleotide
  Target: LAMA2; (-) strand; PAM type: YTN; PAM sequence: TTT
gagaggtttacgacttgccc

SEQ ID NO: 254411 - DNA, 20 bp, Artificial Sequence
  Description of Artificial Sequence: Synthetic oligonucleotide
  Target: LAMA2; (-) strand; PAM type: YTN; PAM sequence: TTT
tgagaggtttacgacttgcc

SEQ ID NO: 254412 - DNA, 20 bp, Artificial Sequence
  Description of Artificial Sequence: Synthetic oligonucleotide
  Target: LAMA2; (-) strand; PAM type: YTN; PAM sequence: TTT
ttgagaggtttacgacttgc

SEQ ID NO: 254413 - DNA, 20 bp, Artificial Sequence
  Description of Artificial Sequence: Synthetic oligonucleotide
  Target: LAMA2; (-) strand; PAM type: YTN; PAM sequence: CTT
tttgagaggtttacgacttg

SEQ ID NO: 254414 - DNA, 20 bp, Artificial Sequence
  Description of Artificial Sequence: Synthetic oligonucleotide
  Target: LAMA2; (-) strand; PAM type: YTN; PAM sequence: TTA
ctttttgagaggtttacgac

SEQ ID NO: 254415 - DNA, 20 bp, Artificial Sequence
  Description of Artificial Sequence: Synthetic oligonucleotide
  Target: LAMA2; (-) strand; PAM type: YTN; PAM sequence: TTT
actttttgagaggtttacga

SEQ ID NO: 254416 - DNA, 20 bp, Artificial Sequence
  Description of Artificial Sequence: Synthetic oligonucleotide
  Target: LAMA2; (-) strand; PAM type: YTN; PAM sequence: TTT
tactttttgagaggtttacg

SEQ ID NO: 254417 - DNA, 20 bp, Artificial Sequence
  Description of Artificial Sequence: Synthetic oligonucleotide
  Target: LAMA2; (-) strand; PAM type: YTN; PAM sequence: TTC
attttactttttgagaggtt

SEQ ID NO: 254418 - DNA, 20 bp, Artificial Sequence
  Description of Artificial Sequence: Synthetic oligonucleotide
  Target: LAMA2; (-) strand; PAM type: YTN; PAM sequence: CTT
cattttactttttgagaggt

SEQ ID NO: 254419 - DNA, 20 bp, Artificial Sequence
  Description of Artificial Sequence: Synthetic oligonucleotide
  Target: LAMA2; (-) strand; PAM type: YTN; PAM sequence: TTA
aatcagtcccttcattttac

SEQ ID NO: 254420 - DNA, 20 bp, Artificial Sequence
  Description of Artificial Sequence: Synthetic oligonucleotide
  Target: LAMA2; (-) strand; PAM type: YTN; PAM sequence: TTA
aaagtcagttaaatcagtcc

SEQ ID NO: 254421 - DNA, 20 bp, Artificial Sequence
  Description of Artificial Sequence: Synthetic oligonucleotide
  Target: LAMA2; (-) strand; PAM type: YTN; PAM sequence: CTT
aaaagtcagttaaatcagtc

SEQ ID NO: 254422 - DNA, 20 bp, Artificial Sequence
  Description of Artificial Sequence: Synthetic oligonucleotide
  Target: LAMA2; (-) strand; PAM type: YTN; PAM sequence: CTA
aaaagaagggatagaatggg

SEQ ID NO: 254423 - DNA, 20 bp, Artificial Sequence
  Description of Artificial Sequence: Synthetic oligonucleotide
  Target: LAMA2; (-) strand; PAM type: YTN; PAM sequence: TTC
taaaaagaagggatagaatg

SEQ ID NO: 254424 - DNA, 20 bp, Artificial Sequence
  Description of Artificial Sequence: Synthetic oligonucleotide
  Target: LAMA2; (-) strand; PAM type: YTN; PAM sequence: TTT
ctaaaaagaagggatagaat

SEQ ID NO: 254425 - DNA, 20 bp, Artificial Sequence
  Description of Artificial Sequence: Synthetic oligonucleotide
  Target: LAMA2; (-) strand; PAM type: YTN; PAM sequence: TTT
tctaaaaagaagggatagaa

SEQ ID NO: 254426 - DNA, 20 bp, Artificial Sequence
  Description of Artificial Sequence: Synthetic oligonucleotide
  Target: LAMA2; (-) strand; PAM type: YTN; PAM sequence: TTT
ttctaaaaagaagggataga

SEQ ID NO: 254427 - DNA, 20 bp, Artificial Sequence
  Description of Artificial Sequence: Synthetic oligonucleotide
  Target: LAMA2; (-) strand; PAM type: YTN; PAM sequence: CTA
ggtgaacaacgaatttttct

SEQ ID NO: 254428 - DNA, 20 bp, Artificial Sequence
  Description of Artificial Sequence: Synthetic oligonucleotide
  Target: LAMA2; (-) strand; PAM type: YTN; PAM sequence: TTC
taggtgaacaacgaattttt

SEQ ID NO: 254429 - DNA, 20 bp, Artificial Sequence
  Description of Artificial Sequence: Synthetic oligonucleotide
  Target: LAMA2; (-) strand; PAM type: YTN; PAM sequence: TTG
ttctaggtgaacaacgaatt

SEQ ID NO: 254430 - DNA, 20 bp, Artificial Sequence
  Description of Artificial Sequence: Synthetic oligonucleotide
  Target: LAMA2; (-) strand; PAM type: YTN; PAM sequence: CTA
agaggtggttgttctaggtg

SEQ ID NO: 254431 - DNA, 20 bp, Artificial Sequence
  Description of Artificial Sequence: Synthetic oligonucleotide
  Target: LAMA2; (-) strand; PAM type: YTN; PAM sequence: CTC
taagaggtggttgttctagg

SEQ ID NO: 254432 - DNA, 20 bp, Artificial Sequence
  Description of Artificial Sequence: Synthetic oligonucleotide
  Target: LAMA2; (-) strand; PAM type: YTN; PAM sequence: CTG
ctctaagaggtggttgttct

SEQ ID NO: 254433 - DNA, 20 bp, Artificial Sequence
  Description of Artificial Sequence: Synthetic oligonucleotide
  Target: LAMA2; (-) strand; PAM type: YTN; PAM sequence: TTA
aatctgctctaagaggtggt

SEQ ID NO: 254434 - DNA, 20 bp, Artificial Sequence
  Description of Artificial Sequence: Synthetic oligonucleotide
  Target: LAMA2; (-) strand; PAM type: YTN; PAM sequence: TTT
aaatctgctctaagaggtgg

SEQ ID NO: 254435 - DNA, 20 bp, Artificial Sequence
  Description of Artificial Sequence: Synthetic oligonucleotide
  Target: LAMA2; (-) strand; PAM type: YTN; PAM sequence: TTT
taaatctgctctaagaggtg

SEQ ID NO: 254436 - DNA, 20 bp, Artificial Sequence
  Description of Artificial Sequence: Synthetic oligonucleotide
  Target: LAMA2; (-) strand; PAM type: YTN; PAM sequence: TTT
ttaaatctgctctaagaggt

SEQ ID NO: 254437 - DNA, 20 bp, Artificial Sequence
  Description of Artificial Sequence: Synthetic oligonucleotide
  Target: LAMA2; (-) strand; PAM type: YTN; PAM sequence: TTT
tttaaatctgctctaagagg

SEQ ID NO: 254438 - DNA, 20 bp, Artificial Sequence
  Description of Artificial Sequence: Synthetic oligonucleotide
  Target: LAMA2; (-) strand; PAM type: YTN; PAM sequence: TTT
ttttaaatctgctctaagag

SEQ ID NO: 254439 - DNA, 20 bp, Artificial Sequence
  Description of Artificial Sequence: Synthetic oligonucleotide
  Target: LAMA2; (-) strand; PAM type: YTN; PAM sequence: TTG
tttttttaaatctgctctaa

SEQ ID NO: 254440 - DNA, 20 bp, Artificial Sequence
  Description of Artificial Sequence: Synthetic oligonucleotide
  Target: LAMA2; (-) strand; PAM type: YTN; PAM sequence: TTT
gtttttttaaatctgctcta

SEQ ID NO: 254441 - DNA, 20 bp, Artificial Sequence
  Description of Artificial Sequence: Synthetic oligonucleotide
  Target: LAMA2; (-) strand; PAM type: YTN; PAM sequence: TTG
tttgtttttttaaatctgct

SEQ ID NO: 254442 - DNA, 20 bp, Artificial Sequence
  Description of Artificial Sequence: Synthetic oligonucleotide
  Target: LAMA2; (-) strand; PAM type: YTN; PAM sequence: TTG
ttgtttgtttttttaaatct

SEQ ID NO: 254443 - DNA, 20 bp, Artificial Sequence
  Description of Artificial Sequence: Synthetic oligonucleotide
  Target: LAMA2; (-) strand; PAM type: YTN; PAM sequence: TTG
ttgttgtttgtttttttaaa

SEQ ID NO: 254444 - DNA, 20 bp, Artificial Sequence
  Description of Artificial Sequence: Synthetic oligonucleotide
  Target: LAMA2; (-) strand; PAM type: YTN; PAM sequence: CTT
gttgttgtttgtttttttaa

SEQ ID NO: 254445 - DNA, 20 bp, Artificial Sequence
  Description of Artificial Sequence: Synthetic oligonucleotide
  Target: LAMA2; (-) strand; PAM type: YTN; PAM sequence: TTC
ttgttgttgtttgttttttt

SEQ ID NO: 254446 - DNA, 20 bp, Artificial Sequence
  Description of Artificial Sequence: Synthetic oligonucleotide
  Target: LAMA2; (-) strand; PAM type: YTN; PAM sequence: TTT
cttgttgttgtttgtttttt

SEQ ID NO: 254447 - DNA, 20 bp, Artificial Sequence
  Description of Artificial Sequence: Synthetic oligonucleotide
  Target: LAMA2; (-) strand; PAM type: YTN; PAM sequence: CTT
tcttgttgttgtttgttttt

SEQ ID NO: 254448 - DNA, 20 bp, Artificial Sequence
  Description of Artificial Sequence: Synthetic oligonucleotide
  Target: LAMA2; (-) strand; PAM type: YTN; PAM sequence: TTC
tttcttgttgttgtttgttt

SEQ ID NO: 254449 - DNA, 20 bp, Artificial Sequence
  Description of Artificial Sequence: Synthetic oligonucleotide
  Target: LAMA2; (-) strand; PAM type: YTN; PAM sequence: CTA
aaaggtaaggaaatgaggaa

SEQ ID NO: 254450 - DNA, 20 bp, Artificial Sequence
  Description of Artificial Sequence: Synthetic oligonucleotide
  Target: LAMA2; (-) strand; PAM type: YTN; PAM sequence: CTC
taaaaggtaaggaaatgagg

SEQ ID NO: 254451 - DNA, 20 bp, Artificial Sequence
  Description of Artificial Sequence: Synthetic oligonucleotide
  Target: LAMA2; (-) strand; PAM type: YTN; PAM sequence: TTC
ctctaaaaggtaaggaaatg

SEQ ID NO: 254452 - DNA, 20 bp, Artificial Sequence
  Description of Artificial Sequence: Synthetic oligonucleotide
  Target: LAMA2; (-) strand; PAM type: YTN; PAM sequence: CTG
gatatagcattcctctaaaa

SEQ ID NO: 254453 - DNA, 20 bp, Artificial Sequence
  Description of Artificial Sequence: Synthetic oligonucleotide
  Target: LAMA2; (-) strand; PAM type: YTN; PAM sequence: TTC
aagcagctggatatagcatt

SEQ ID NO: 254454 - DNA, 20 bp, Artificial Sequence
  Description of Artificial Sequence: Synthetic oligonucleotide
  Target: LAMA2; (-) strand; PAM type: YTN; PAM sequence: CTG
agggaatgtgaattcaagca

SEQ ID NO: 254455 - DNA, 20 bp, Artificial Sequence
  Description of Artificial Sequence: Synthetic oligonucleotide
  Target: LAMA2; (-) strand; PAM type: YTN; PAM sequence: CTG
ccctgagggaatgtgaattc

SEQ ID NO: 254456 - DNA, 20 bp, Artificial Sequence
  Description of Artificial Sequence: Synthetic oligonucleotide
  Target: LAMA2; (-) strand; PAM type: YTN; PAM sequence: CTG
agagaggctgccctgaggga

SEQ ID NO: 254457 - DNA, 20 bp, Artificial Sequence
  Description of Artificial Sequence: Synthetic oligonucleotide
  Target: LAMA2; (-) strand; PAM type: YTN; PAM sequence: TTA
ctgagagaggctgccctgag

SEQ ID NO: 254458 - DNA, 20 bp, Artificial Sequence
  Description of Artificial Sequence: Synthetic oligonucleotide
  Target: LAMA2; (-) strand; PAM type: YTN; PAM sequence: TTT
actgagagaggctgccctga

SEQ ID NO: 254459 - DNA, 20 bp, Artificial Sequence
  Description of Artificial Sequence: Synthetic oligonucleotide
  Target: LAMA2; (-) strand; PAM type: YTN; PAM sequence: CTG
tttactgagagaggctgccc

SEQ ID NO: 254460 - DNA, 20 bp, Artificial Sequence
  Description of Artificial Sequence: Synthetic oligonucleotide
  Target: LAMA2; (-) strand; PAM type: YTN; PAM sequence: TTA
gctgtttactgagagaggct

SEQ ID NO: 254461 - DNA, 20 bp, Artificial Sequence
  Description of Artificial Sequence: Synthetic oligonucleotide
  Target: LAMA2; (-) strand; PAM type: YTN; PAM sequence: CTT
agctgtttactgagagaggc

SEQ ID NO: 254462 - DNA, 20 bp, Artificial Sequence
  Description of Artificial Sequence: Synthetic oligonucleotide
  Target: LAMA2; (-) strand; PAM type: YTN; PAM sequence: TTG
gggtgtgcttagctgtttac

SEQ ID NO: 254463 - DNA, 20 bp, Artificial Sequence
  Description of Artificial Sequence: Synthetic oligonucleotide
  Target: LAMA2; (-) strand; PAM type: YTN; PAM sequence: TTG
gttggggtgtgcttagctgt

SEQ ID NO: 254464 - DNA, 20 bp, Artificial Sequence
  Description of Artificial Sequence: Synthetic oligonucleotide
  Target: LAMA2; (-) strand; PAM type: YTN; PAM sequence: TTT
ggttggggtgtgcttagctg

SEQ ID NO: 254465 - DNA, 20 bp, Artificial Sequence
  Description of Artificial Sequence: Synthetic oligonucleotide
  Target: LAMA2; (-) strand; PAM type: YTN; PAM sequence: TTT
tggttggggtgtgcttagct

SEQ ID NO: 254466 - DNA, 20 bp, Artificial Sequence
  Description of Artificial Sequence: Synthetic oligonucleotide
  Target: LAMA2; (-) strand; PAM type: YTN; PAM sequence: TTT
ttggttggggtgtgcttagc

SEQ ID NO: 254467 - DNA, 20 bp, Artificial Sequence
  Description of Artificial Sequence: Synthetic oligonucleotide
  Target: LAMA2; (-) strand; PAM type: YTN; PAM sequence: TTA
aaaacaaaacaacatttttg

SEQ ID NO: 254468 - DNA, 20 bp, Artificial Sequence
  Description of Artificial Sequence: Synthetic oligonucleotide
  Target: LAMA2; (-) strand; PAM type: YTN; PAM sequence: TTT
aaaaacaaaacaacattttt

SEQ ID NO: 254469 - DNA, 20 bp, Artificial Sequence
  Description of Artificial Sequence: Synthetic oligonucleotide
  Target: LAMA2; (-) strand; PAM type: YTN; PAM sequence: CTC
aaaaaaaaaaaaaaaaaaaa

SEQ ID NO: 254470 - DNA, 20 bp, Artificial Sequence
  Description of Artificial Sequence: Synthetic oligonucleotide
  Target: LAMA2; (-) strand; PAM type: YTN; PAM sequence: CTG
tctcaaaaaaaaaaaaaaaa

SEQ ID NO: 254471 - DNA, 20 bp, Artificial Sequence
  Description of Artificial Sequence: Synthetic oligonucleotide
  Target: LAMA2; (-) strand; PAM type: YTN; PAM sequence: CTC
tgtctcaaaaaaaaaaaaaa

SEQ ID NO: 254472 - DNA, 20 bp, Artificial Sequence
  Description of Artificial Sequence: Synthetic oligonucleotide
  Target: LAMA2; (-) strand; PAM type: YTN; PAM sequence: CTG
ggcaacagagcgagactctg

SEQ ID NO: 254473 - DNA, 20 bp, Artificial Sequence
  Description of Artificial Sequence: Synthetic oligonucleotide
  Target: LAMA2; (-) strand; PAM type: YTN; PAM sequence: CTA
gcctgggcaacagagcgaga

SEQ ID NO: 254474 - DNA, 20 bp, Artificial Sequence
  Description of Artificial Sequence: Synthetic oligonucleotide
  Target: LAMA2; (-) strand; PAM type: YTN; PAM sequence: CTC
tagcctgggcaacagagcga

SEQ ID NO: 254475 - DNA, 20 bp, Artificial Sequence
  Description of Artificial Sequence: Synthetic oligonucleotide
  Target: LAMA2; (-) strand; PAM type: YTN; PAM sequence: CTG
cactctagcctgggcaacag

SEQ ID NO: 254476 - DNA, 20 bp, Artificial Sequence
  Description of Artificial Sequence: Synthetic oligonucleotide
  Target: LAMA2; (-) strand; PAM type: YTN; PAM sequence: TTG
caccactgcactctagcctg

SEQ ID NO: 254477 - DNA, 20 bp, Artificial Sequence
  Description of Artificial Sequence: Synthetic oligonucleotide
  Target: LAMA2; (-) strand; PAM type: YTN; PAM sequence: TTG
cagtgagccaagattgcacc

SEQ ID NO: 254478 - DNA, 20 bp, Artificial Sequence
  Description of Artificial Sequence: Synthetic oligonucleotide
  Target: LAMA2; (-) strand; PAM type: YTN; PAM sequence: CTT
gcagtgagccaagattgcac

SEQ ID NO: 254479 - DNA, 20 bp, Artificial Sequence
  Description of Artificial Sequence: Synthetic oligonucleotide
  Target: LAMA2; (-) strand; PAM type: YTN; PAM sequence: TTG
aacccgggaggcagagcttg

SEQ ID NO: 254480 - DNA, 20 bp, Artificial Sequence
  Description of Artificial Sequence: Synthetic oligonucleotide
  Target: LAMA2; (-) strand; PAM type: YTN; PAM sequence: CTT
gaacccgggaggcagagctt

SEQ ID NO: 254481 - DNA, 20 bp, Artificial Sequence
  Description of Artificial Sequence: Synthetic oligonucleotide
  Target: LAMA2; (-) strand; PAM type: YTN; PAM sequence: CTG
aggcaggagaatggcttgaa

SEQ ID NO: 254482 - DNA, 20 bp, Artificial Sequence
  Description of Artificial Sequence: Synthetic oligonucleotide
  Target: LAMA2; (-) strand; PAM type: YTN; PAM sequence: CTG
tagtccagctgaggcaggag

SEQ ID NO: 254483 - DNA, 20 bp, Artificial Sequence
  Description of Artificial Sequence: Synthetic oligonucleotide
  Target: LAMA2; (-) strand; PAM type: YTN; PAM sequence: TTC
aacacagcctgtagtccagc

SEQ ID NO: 254484 - DNA, 20 bp, Artificial Sequence
  Description of Artificial Sequence: Synthetic oligonucleotide
  Target: LAMA2; (-) strand; PAM type: YTN; PAM sequence: TTA
ttcaacacagcctgtagtcc

SEQ ID NO: 254485 - DNA, 20 bp, Artificial Sequence
  Description of Artificial Sequence: Synthetic oligonucleotide
  Target: LAMA2; (-) strand; PAM type: YTN; PAM sequence: TTT
attcaacacagcctgtagtc

SEQ ID NO: 254486 - DNA, 20 bp, Artificial Sequence
  Description of Artificial Sequence: Synthetic oligonucleotide
  Target: LAMA2; (-) strand; PAM type: YTN; PAM sequence: TTT
tattcaacacagcctgtagt

SEQ ID NO: 254487 - DNA, 20 bp, Artificial Sequence
  Description of Artificial Sequence: Synthetic oligonucleotide
  Target: LAMA2; (-) strand; PAM type: YTN; PAM sequence: TTT
ttattcaacacagcctgtag

SEQ ID NO: 254488 - DNA, 20 bp, Artificial Sequence
  Description of Artificial Sequence: Synthetic oligonucleotide
  Target: LAMA2; (-) strand; PAM type: YTN; PAM sequence: TTG
atttttattcaacacagcct

SEQ ID NO: 254489 - DNA, 20 bp, Artificial Sequence
  Description of Artificial Sequence: Synthetic oligonucleotide
  Target: LAMA2; (-) strand; PAM type: YTN; PAM sequence: TTG
ttgatttttattcaacacag

SEQ ID NO: 254490 - DNA, 20 bp, Artificial Sequence
  Description of Artificial Sequence: Synthetic oligonucleotide
  Target: LAMA2; (-) strand; PAM type: YTN; PAM sequence: TTG
agtaaaaattgttgattttt

SEQ ID NO: 254491 - DNA, 20 bp, Artificial Sequence
  Description of Artificial Sequence: Synthetic oligonucleotide
  Target: LAMA2; (-) strand; PAM type: YTN; PAM sequence: TTT
gagtaaaaattgttgatttt

SEQ ID NO: 254492 - DNA, 20 bp, Artificial Sequence
  Description of Artificial Sequence: Synthetic oligonucleotide
  Target: LAMA2; (-) strand; PAM type: YTN; PAM sequence: TTT
tgagtaaaaattgttgattt

SEQ ID NO: 254493 - DNA, 20 bp, Artificial Sequence
  Description of Artificial Sequence: Synthetic oligonucleotide
  Target: LAMA2; (-) strand; PAM type: YTN; PAM sequence: CTT
ttgagtaaaaattgttgatt

SEQ ID NO: 254494 - DNA, 20 bp, Artificial Sequence
  Description of Artificial Sequence: Synthetic oligonucleotide
  Target: LAMA2; (-) strand; PAM type: YTN; PAM sequence: TTA
taatcacttttgagtaaaaa

SEQ ID NO: 254495 - DNA, 20 bp, Artificial Sequence
  Description of Artificial Sequence: Synthetic oligonucleotide
  Target: LAMA2; (-) strand; PAM type: YTN; PAM sequence: TTT
ataatcacttttgagtaaaa

SEQ ID NO: 254496 - DNA, 20 bp, Artificial Sequence
  Description of Artificial Sequence: Synthetic oligonucleotide
  Target: LAMA2; (-) strand; PAM type: YTN; PAM sequence: TTA
tttataatcacttttgagta

SEQ ID NO: 254497 - DNA, 20 bp, Artificial Sequence
  Description of Artificial Sequence: Synthetic oligonucleotide
  Target: LAMA2; (-) strand; PAM type: YTN; PAM sequence: TTA
aaagtatagttatttataat

SEQ ID NO: 254498 - DNA, 20 bp, Artificial Sequence
  Description of Artificial Sequence: Synthetic oligonucleotide
  Target: LAMA2; (-) strand; PAM type: YTN; PAM sequence: TTT
aaaagtatagttatttataa

SEQ ID NO: 254499 - DNA, 20 bp, Artificial Sequence
  Description of Artificial Sequence: Synthetic oligonucleotide
  Target: LAMA2; (-) strand; PAM type: YTN; PAM sequence: TTA
tttaaaagtatagttattta

SEQ ID NO: 254500 - DNA, 20 bp, Artificial Sequence
  Description of Artificial Sequence: Synthetic oligonucleotide
  Target: LAMA2; (-) strand; PAM type: YTN; PAM sequence: TTT
atttaaaagtatagttattt

SEQ ID NO: 254501 - DNA, 20 bp, Artificial Sequence
  Description of Artificial Sequence: Synthetic oligonucleotide
  Target: LAMA2; (-) strand; PAM type: YTN; PAM sequence: TTT
tatttaaaagtatagttatt

SEQ ID NO: 254502 - DNA, 20 bp, Artificial Sequence
  Description of Artificial Sequence: Synthetic oligonucleotide
  Target: LAMA2; (-) strand; PAM type: YTN; PAM sequence: CTT
ttatttaaaagtatagttat

SEQ ID NO: 254503 - DNA, 20 bp, Artificial Sequence
  Description of Artificial Sequence: Synthetic oligonucleotide
  Target: LAMA2; (-) strand; PAM type: YTN; PAM sequence: TTC
cttttatttaaaagtatagt

SEQ ID NO: 254504 - DNA, 20 bp, Artificial Sequence
  Description of Artificial Sequence: Synthetic oligonucleotide
  Target: LAMA2; (-) strand; PAM type: YTN; PAM sequence: TTT
ccttttatttaaaagtatag

SEQ ID NO: 254505 - DNA, 20 bp, Artificial Sequence
  Description of Artificial Sequence: Synthetic oligonucleotide
  Target: LAMA2; (-) strand; PAM type: YTN; PAM sequence: TTC
agaaaataatttccttttat

SEQ ID NO: 254506 - DNA, 20 bp, Artificial Sequence
  Description of Artificial Sequence: Synthetic oligonucleotide
  Target: LAMA2; (-) strand; PAM type: YTN; PAM sequence: CTT
cagaaaataatttcctttta

SEQ ID NO: 254507 - DNA, 20 bp, Artificial Sequence
  Description of Artificial Sequence: Synthetic oligonucleotide
  Target: LAMA2; (-) strand; PAM type: YTN; PAM sequence: TTC
ttcagaaaataatttccttt

SEQ ID NO: 254508 - DNA, 20 bp, Artificial Sequence
  Description of Artificial Sequence: Synthetic oligonucleotide
  Target: LAMA2; (-) strand; PAM type: YTN; PAM sequence: TTA
agagagttcttcagaaaata

SEQ ID NO: 254509 - DNA, 20 bp, Artificial Sequence
  Description of Artificial Sequence: Synthetic oligonucleotide
  Target: LAMA2; (-) strand; PAM type: YTN; PAM sequence: TTT
aagagagttcttcagaaaat

SEQ ID NO: 254510 - DNA, 20 bp, Artificial Sequence
  Description of Artificial Sequence: Synthetic oligonucleotide
  Target: LAMA2; (-) strand; PAM type: YTN; PAM sequence: CTT
taagagagttcttcagaaaa

SEQ ID NO: 254511 - DNA, 20 bp, Artificial Sequence
  Description of Artificial Sequence: Synthetic oligonucleotide
  Target: LAMA2; (-) strand; PAM type: YTN; PAM sequence: CTC
acctttaagagagttcttca

SEQ ID NO: 254512 - DNA, 20 bp, Artificial Sequence
  Description of Artificial Sequence: Synthetic oligonucleotide
  Target: LAMA2; (-) strand; PAM type: YTN; PAM sequence: CTA
agctcacctttaagagagtt

SEQ ID NO: 254513 - DNA, 20 bp, Artificial Sequence
  Description of Artificial Sequence: Synthetic oligonucleotide
  Target: LAMA2; (-) strand; PAM type: YTN; PAM sequence: TTA
agcactaagctcacctttaa

SEQ ID NO: 254514 - DNA, 20 bp, Artificial Sequence
  Description of Artificial Sequence: Synthetic oligonucleotide
  Target: LAMA2; (-) strand; PAM type: YTN; PAM sequence: TTA
ttaagcactaagctcacctt

SEQ ID NO: 254515 - DNA, 20 bp, Artificial Sequence
  Description of Artificial Sequence: Synthetic oligonucleotide
  Target: LAMA2; (-) strand; PAM type: YTN; PAM sequence: CTT
attaagcactaagctcacct

SEQ ID NO: 254516 - DNA, 20 bp, Artificial Sequence
  Description of Artificial Sequence: Synthetic oligonucleotide
  Target: LAMA2; (-) strand; PAM type: YTN; PAM sequence: CTG
gaaagtgtacaatacgatat

SEQ ID NO: 254517 - DNA, 20 bp, Artificial Sequence
  Description of Artificial Sequence: Synthetic oligonucleotide
  Target: LAMA2; (-) strand; PAM type: YTN; PAM sequence: CTA
gagatagctggaaagtgtac

SEQ ID NO: 254518 - DNA, 20 bp, Artificial Sequence
  Description of Artificial Sequence: Synthetic oligonucleotide
  Target: LAMA2; (-) strand; PAM type: YTN; PAM sequence: TTG
tcacagtgcctagagatagc

SEQ ID NO: 254519 - DNA, 20 bp, Artificial Sequence
  Description of Artificial Sequence: Synthetic oligonucleotide
  Target: LAMA2; (-) strand; PAM type: YTN; PAM sequence: CTG
tcagtgttgtcacagtgcct

SEQ ID NO: 254520 - DNA, 20 bp, Artificial Sequence
  Description of Artificial Sequence: Synthetic oligonucleotide
  Target: LAMA2; (-) strand; PAM type: YTN; PAM sequence: CTC
tgtcagtgttgtcacagtgc

SEQ ID NO: 254521 - DNA, 20 bp, Artificial Sequence
  Description of Artificial Sequence: Synthetic oligonucleotide
  Target: LAMA2; (-) strand; PAM type: YTN; PAM sequence: TTG
ctctgtcagtgttgtcacag

SEQ ID NO: 254522 - DNA, 20 bp, Artificial Sequence
  Description of Artificial Sequence: Synthetic oligonucleotide
  Target: LAMA2; (-) strand; PAM type: YTN; PAM sequence: TTT
gctctgtcagtgttgtcaca

SEQ ID NO: 254523 - DNA, 20 bp, Artificial Sequence
  Description of Artificial Sequence: Synthetic oligonucleotide
  Target: LAMA2; (-) strand; PAM type: YTN; PAM sequence: TTT
tgctctgtcagtgttgtcac

SEQ ID NO: 254524 - DNA, 20 bp, Artificial Sequence
  Description of Artificial Sequence: Synthetic oligonucleotide
  Target: LAMA2; (-) strand; PAM type: YTN; PAM sequence: TTT
ttgctctgtcagtgttgtca

SEQ ID NO: 254525 - DNA, 20 bp, Artificial Sequence
  Description of Artificial Sequence: Synthetic oligonucleotide
  Target: LAMA2; (-) strand; PAM type: YTN; PAM sequence: TTG
aaaatttttgctctgtcagt

SEQ ID NO: 254526 - DNA, 20 bp, Artificial Sequence
  Description of Artificial Sequence: Synthetic oligonucleotide
  Target: LAMA2; (-) strand; PAM type: YTN; PAM sequence: TTA
aagatcattgaaaatttttg

SEQ ID NO: 254527 - DNA, 20 bp, Artificial Sequence
  Description of Artificial Sequence: Synthetic oligonucleotide
  Target: LAMA2; (-) strand; PAM type: YTN; PAM sequence: CTT
aaagatcattgaaaattttt

SEQ ID NO: 254528 - DNA, 20 bp, Artificial Sequence
  Description of Artificial Sequence: Synthetic oligonucleotide
  Target: LAMA2; (-) strand; PAM type: YTN; PAM sequence: TTC
ccttaaagatcattgaaaat

SEQ ID NO: 254529 - DNA, 20 bp, Artificial Sequence
  Description of Artificial Sequence: Synthetic oligonucleotide
  Target: LAMA2; (-) strand; PAM type: YTN; PAM sequence: TTT
cccttaaagatcattgaaaa

SEQ ID NO: 254530 - DNA, 20 bp, Artificial Sequence
  Description of Artificial Sequence: Synthetic oligonucleotide
  Target: LAMA2; (-) strand; PAM type: YTN; PAM sequence: CTG
acagatttcccttaaagatc

SEQ ID NO: 254531 - DNA, 20 bp, Artificial Sequence
  Description of Artificial Sequence: Synthetic oligonucleotide
  Target: LAMA2; (-) strand; PAM type: YTN; PAM sequence: CTA
tagctgacagatttccctta

SEQ ID NO: 254532 - DNA, 20 bp, Artificial Sequence
  Description of Artificial Sequence: Synthetic oligonucleotide
  Target: LAMA2; (-) strand; PAM type: YTN; PAM sequence: TTA
aaagactatagctgacagat

SEQ ID NO: 254533 - DNA, 20 bp, Artificial Sequence
  Description of Artificial Sequence: Synthetic oligonucleotide
  Target: LAMA2; (-) strand; PAM type: YTN; PAM sequence: CTA
cacattaaaagactatagct

SEQ ID NO: 254534 - DNA, 20 bp, Artificial Sequence
  Description of Artificial Sequence: Synthetic oligonucleotide
  Target: LAMA2; (-) strand; PAM type: YTN; PAM sequence: TTG
atcacatctacacattaaaa

SEQ ID NO: 254535 - DNA, 20 bp, Artificial Sequence
  Description of Artificial Sequence: Synthetic oligonucleotide
  Target: LAMA2; (-) strand; PAM type: YTN; PAM sequence: CTT
gatcacatctacacattaaa

SEQ ID NO: 254536 - DNA, 20 bp, Artificial Sequence
  Description of Artificial Sequence: Synthetic oligonucleotide
  Target: LAMA2; (-) strand; PAM type: YTN; PAM sequence: CTA
cttgatcacatctacacatt

SEQ ID NO: 254537 - DNA, 20 bp, Artificial Sequence
  Description of Artificial Sequence: Synthetic oligonucleotide
  Target: LAMA2; (-) strand; PAM type: YTN; PAM sequence: TTG
aagtatgacctacttgatca

SEQ ID NO: 254538 - DNA, 20 bp, Artificial Sequence
  Description of Artificial Sequence: Synthetic oligonucleotide
  Target: LAMA2; (-) strand; PAM type: YTN; PAM sequence: TTT
gaagtatgacctacttgatc

SEQ ID NO: 254539 - DNA, 20 bp, Artificial Sequence
  Description of Artificial Sequence: Synthetic oligonucleotide
  Target: LAMA2; (-) strand; PAM type: YTN; PAM sequence: CTG
ggtaagagtttgaagtatga

SEQ ID NO: 254540 - DNA, 20 bp, Artificial Sequence
  Description of Artificial Sequence: Synthetic oligonucleotide
  Target: LAMA2; (-) strand; PAM type: YTN; PAM sequence: TTC
tgggtaagagtttgaagtat

SEQ ID NO: 254541 - DNA, 20 bp, Artificial Sequence
  Description of Artificial Sequence: Synthetic oligonucleotide
  Target: LAMA2; (-) strand; PAM type: YTN; PAM sequence: TTA
ggcgcattctgggtaagagt

SEQ ID NO: 254542 - DNA, 20 bp, Artificial Sequence
  Description of Artificial Sequence: Synthetic oligonucleotide
  Target: LAMA2; (-) strand; PAM type: YTN; PAM sequence: TTA
attaggcgcattctgggtaa

SEQ ID NO: 254543 - DNA, 20 bp, Artificial Sequence
  Description of Artificial Sequence: Synthetic oligonucleotide
  Target: LAMA2; (-) strand; PAM type: YTN; PAM sequence: TTT
aattaggcgcattctgggta

SEQ ID NO: 254544 - DNA, 20 bp, Artificial Sequence
  Description of Artificial Sequence: Synthetic oligonucleotide
  Target: LAMA2; (-) strand; PAM type: YTN; PAM sequence: TTT
taattaggcgcattctgggt

SEQ ID NO: 254545 - DNA, 20 bp, Artificial Sequence
  Description of Artificial Sequence: Synthetic oligonucleotide
  Target: LAMA2; (-) strand; PAM type: YTN; PAM sequence: CTA
acaaaagaccattttaatta

SEQ ID NO: 254546 - DNA, 20 bp, Artificial Sequence
  Description of Artificial Sequence: Synthetic oligonucleotide
  Target: LAMA2; (-) strand; PAM type: YTN; PAM sequence: TTG
aatctaacaaaagaccattt

SEQ ID NO: 254547 - DNA, 20 bp, Artificial Sequence
  Description of Artificial Sequence: Synthetic oligonucleotide
  Target: LAMA2; (-) strand; PAM type: YTN; PAM sequence: TTC
attgaatctaacaaaagacc

SEQ ID NO: 254548 - DNA, 20 bp, Artificial Sequence
  Description of Artificial Sequence: Synthetic oligonucleotide
  Target: LAMA2; (-) strand; PAM type: YTN; PAM sequence: TTA
tagtattcattgaatctaac

SEQ ID NO: 254549 - DNA, 20 bp, Artificial Sequence
  Description of Artificial Sequence: Synthetic oligonucleotide
  Target: LAMA2; (-) strand; PAM type: YTN; PAM sequence: CTT
atagtattcattgaatctaa

SEQ ID NO: 254550 - DNA, 20 bp, Artificial Sequence
  Description of Artificial Sequence: Synthetic oligonucleotide
  Target: LAMA2; (-) strand; PAM type: YTN; PAM sequence: TTA
gcttatagtattcattgaat

SEQ ID NO: 254551 - DNA, 20 bp, Artificial Sequence
  Description of Artificial Sequence: Synthetic oligonucleotide
  Target: LAMA2; (-) strand; PAM type: YTN; PAM sequence: TTT
agcttatagtattcattgaa

SEQ ID NO: 254552 - DNA, 20 bp, Artificial Sequence
  Description of Artificial Sequence: Synthetic oligonucleotide
  Target: LAMA2; (-) strand; PAM type: YTN; PAM sequence: CTT
tagcttatagtattcattga

SEQ ID NO: 254553 - DNA, 20 bp, Artificial Sequence
  Description of Artificial Sequence: Synthetic oligonucleotide
  Target: LAMA2; (-) strand; PAM type: YTN; PAM sequence: CTC
aaagtctttagcttatagta

SEQ ID NO: 254554 - DNA, 20 bp, Artificial Sequence
  Description of Artificial Sequence: Synthetic oligonucleotide
  Target: LAMA2; (-) strand; PAM type: YTN; PAM sequence: TTA
tctcaaagtctttagcttat

SEQ ID NO: 254555 - DNA, 20 bp, Artificial Sequence
  Description of Artificial Sequence: Synthetic oligonucleotide
  Target: LAMA2; (-) strand; PAM type: YTN; PAM sequence: TTA
gaattatctcaaagtcttta

SEQ ID NO: 254556 - DNA, 20 bp, Artificial Sequence
  Description of Artificial Sequence: Synthetic oligonucleotide
  Target: LAMA2; (-) strand; PAM type: YTN; PAM sequence: TTA
atgttagaattatctcaaag

SEQ ID NO: 254557 - DNA, 20 bp, Artificial Sequence
  Description of Artificial Sequence: Synthetic oligonucleotide
  Target: LAMA2; (-) strand; PAM type: YTN; PAM sequence: CTT
aatgttagaattatctcaaa

SEQ ID NO: 254558 - DNA, 20 bp, Artificial Sequence
  Description of Artificial Sequence: Synthetic oligonucleotide
  Target: LAMA2; (-) strand; PAM type: YTN; PAM sequence: TTA
aacttaatgttagaattatc

SEQ ID NO: 254559 - DNA, 20 bp, Artificial Sequence
  Description of Artificial Sequence: Synthetic oligonucleotide
  Target: LAMA2; (-) strand; PAM type: YTN; PAM sequence: TTT
aaacttaatgttagaattat

SEQ ID NO: 254560 - DNA, 20 bp, Artificial Sequence
  Description of Artificial Sequence: Synthetic oligonucleotide
  Target: LAMA2; (-) strand; PAM type: YTN; PAM sequence: TTC
aaggagaacatttaaactta

SEQ ID NO: 254561 - DNA, 20 bp, Artificial Sequence
  Description of Artificial Sequence: Synthetic oligonucleotide
  Target: LAMA2; (-) strand; PAM type: YTN; PAM sequence: TTT
caaggagaacatttaaactt

SEQ ID NO: 254562 - DNA, 20 bp, Artificial Sequence
  Description of Artificial Sequence: Synthetic oligonucleotide
  Target: LAMA2; (-) strand; PAM type: YTN; PAM sequence: TTA
acagtaggaagcacagtttc

SEQ ID NO: 254563 - DNA, 20 bp, Artificial Sequence
  Description of Artificial Sequence: Synthetic oligonucleotide
  Target: LAMA2; (-) strand; PAM type: YTN; PAM sequence: TTC
atgtggattaacagtaggaa

SEQ ID NO: 254564 - DNA, 20 bp, Artificial Sequence
  Description of Artificial Sequence: Synthetic oligonucleotide
  Target: LAMA2; (-) strand; PAM type: YTN; PAM sequence: TTT
catgtggattaacagtagga

SEQ ID NO: 254565 - DNA, 20 bp, Artificial Sequence
  Description of Artificial Sequence: Synthetic oligonucleotide
  Target: LAMA2; (-) strand; PAM type: YTN; PAM sequence: TTG
ggaggataagcatttcatgt

SEQ ID NO: 254566 - DNA, 20 bp, Artificial Sequence
  Description of Artificial Sequence: Synthetic oligonucleotide
  Target: LAMA2; (-) strand; PAM type: YTN; PAM sequence: CTG
agtaaagaaggtcattggga

SEQ ID NO: 254567 - DNA, 20 bp, Artificial Sequence
  Description of Artificial Sequence: Synthetic oligonucleotide
  Target: LAMA2; (-) strand; PAM type: YTN; PAM sequence: TTC
tgagtaaagaaggtcattgg

SEQ ID NO: 254568 - DNA, 20 bp, Artificial Sequence
  Description of Artificial Sequence: Synthetic oligonucleotide
  Target: LAMA2; (-) strand; PAM type: YTN; PAM sequence: TTC
caaacaatgagtaaggtaaa

SEQ ID NO: 254569 - DNA, 20 bp, Artificial Sequence
  Description of Artificial Sequence: Synthetic oligonucleotide
  Target: LAMA2; (-) strand; PAM type: YTN; PAM sequence: TTT
ccaaacaatgagtaaggtaa

SEQ ID NO: 254570 - DNA, 20 bp, Artificial Sequence
  Description of Artificial Sequence: Synthetic oligonucleotide
  Target: LAMA2; (-) strand; PAM type: YTN; PAM sequence: TTT
tccaaacaatgagtaaggta

SEQ ID NO: 254571 - DNA, 20 bp, Artificial Sequence
  Description of Artificial Sequence: Synthetic oligonucleotide
  Target: LAMA2; (-) strand; PAM type: YTN; PAM sequence: CTT
ttccaaacaatgagtaaggt

SEQ ID NO: 254572 - DNA, 20 bp, Artificial Sequence
  Description of Artificial Sequence: Synthetic oligonucleotide
  Target: LAMA2; (-) strand; PAM type: YTN; PAM sequence: TTC
ttttccaaacaatgagtaag

SEQ ID NO: 254573 - DNA, 20 bp, Artificial Sequence
  Description of Artificial Sequence: Synthetic oligonucleotide
  Target: LAMA2; (-) strand; PAM type: YTN; PAM sequence: CTT
cttttccaaacaatgagtaa

SEQ ID NO: 254574 - DNA, 20 bp, Artificial Sequence
  Description of Artificial Sequence: Synthetic oligonucleotide
  Target: LAMA2; (-) strand; PAM type: YTN; PAM sequence: CTC
ttcttttccaaacaatgagt

SEQ ID NO: 254575 - DNA, 20 bp, Artificial Sequence
  Description of Artificial Sequence: Synthetic oligonucleotide
  Target: LAMA2; (-) strand; PAM type: YTN; PAM sequence: TTC
tcttcttttccaaacaatga

SEQ ID NO: 254576 - DNA, 20 bp, Artificial Sequence
  Description of Artificial Sequence: Synthetic oligonucleotide
  Target: LAMA2; (-) strand; PAM type: YTN; PAM sequence: TTT
ctcttcttttccaaacaatg

SEQ ID NO: 254577 - DNA, 20 bp, Artificial Sequence
  Description of Artificial Sequence: Synthetic oligonucleotide
  Target: LAMA2; (-) strand; PAM type: YTN; PAM sequence: CTT
tctcttcttttccaaacaat

SEQ ID NO: 254578 - DNA, 20 bp, Artificial Sequence
  Description of Artificial Sequence: Synthetic oligonucleotide
  Target: LAMA2; (-) strand; PAM type: YTN; PAM sequence: TTA
aatagtagtgctttctcttc

SEQ ID NO: 254579 - DNA, 20 bp, Artificial Sequence
  Description of Artificial Sequence: Synthetic oligonucleotide
  Target: LAMA2; (-) strand; PAM type: YTN; PAM sequence: TTA
ttaaatagtagtgctttctc

SEQ ID NO: 254580 - DNA, 20 bp, Artificial Sequence
  Description of Artificial Sequence: Synthetic oligonucleotide
  Target: LAMA2; (-) strand; PAM type: YTN; PAM sequence: TTT
attaaatagtagtgctttct

SEQ ID NO: 254581 - DNA, 20 bp, Artificial Sequence
  Description of Artificial Sequence: Synthetic oligonucleotide
  Target: LAMA2; (-) strand; PAM type: YTN; PAM sequence: TTT
tattaaatagtagtgctttc

SEQ ID NO: 254582 - DNA, 20 bp, Artificial Sequence
  Description of Artificial Sequence: Synthetic oligonucleotide
  Target: LAMA2; (-) strand; PAM type: YTN; PAM sequence: CTT
ttattaaatagtagtgcttt

SEQ ID NO: 254583 - DNA, 20 bp, Artificial Sequence
  Description of Artificial Sequence: Synthetic oligonucleotide
  Target: LAMA2; (-) strand; PAM type: YTN; PAM sequence: CTG
cttttattaaatagtagtgc

SEQ ID NO: 254584 - DNA, 20 bp, Artificial Sequence
  Description of Artificial Sequence: Synthetic oligonucleotide
  Target: LAMA2; (-) strand; PAM type: YTN; PAM sequence: CTA
gaatatagtagtctgctttt

SEQ ID NO: 254585 - DNA, 20 bp, Artificial Sequence
  Description of Artificial Sequence: Synthetic oligonucleotide
  Target: LAMA2; (-) strand; PAM type: YTN; PAM sequence: TTG
gcctagaatatagtagtctg

SEQ ID NO: 254586 - DNA, 20 bp, Artificial Sequence
  Description of Artificial Sequence: Synthetic oligonucleotide
  Target: LAMA2; (-) strand; PAM type: YTN; PAM sequence: TTT
ggcctagaatatagtagtct

SEQ ID NO: 254587 - DNA, 20 bp, Artificial Sequence
  Description of Artificial Sequence: Synthetic oligonucleotide
  Target: LAMA2; (-) strand; PAM type: YTN; PAM sequence: TTG
aaggtgaaataataccaaat

SEQ ID NO: 254588 - DNA, 20 bp, Artificial Sequence
  Description of Artificial Sequence: Synthetic oligonucleotide
  Target: LAMA2; (-) strand; PAM type: YTN; PAM sequence: TTA
tagttgaaggtgaaataata

SEQ ID NO: 254589 - DNA, 20 bp, Artificial Sequence
  Description of Artificial Sequence: Synthetic oligonucleotide
  Target: LAMA2; (-) strand; PAM type: YTN; PAM sequence: CTG
agttatagttgaaggtgaaa

SEQ ID NO: 254590 - DNA, 20 bp, Artificial Sequence
  Description of Artificial Sequence: Synthetic oligonucleotide
  Target: LAMA2; (-) strand; PAM type: YTN; PAM sequence: TTA
ctgagttatagttgaaggtg

SEQ ID NO: 254591 - DNA, 20 bp, Artificial Sequence
  Description of Artificial Sequence: Synthetic oligonucleotide
  Target: LAMA2; (-) strand; PAM type: YTN; PAM sequence: CTT
actgagttatagttgaaggt

SEQ ID NO: 254592 - DNA, 20 bp, Artificial Sequence
  Description of Artificial Sequence: Synthetic oligonucleotide
  Target: LAMA2; (-) strand; PAM type: YTN; PAM sequence: CTA
ccttactgagttatagttga

SEQ ID NO: 254593 - DNA, 20 bp, Artificial Sequence
  Description of Artificial Sequence: Synthetic oligonucleotide
  Target: LAMA2; (-) strand; PAM type: YTN; PAM sequence: CTA
tacaatgaggataataatat

SEQ ID NO: 254594 - DNA, 20 bp, Artificial Sequence
  Description of Artificial Sequence: Synthetic oligonucleotide
  Target: LAMA2; (-) strand; PAM type: YTN; PAM sequence: TTA
atctatacaatgaggataat

SEQ ID NO: 254595 - DNA, 20 bp, Artificial Sequence
  Description of Artificial Sequence: Synthetic oligonucleotide
  Target: LAMA2; (-) strand; PAM type: YTN; PAM sequence: CTT
aatctatacaatgaggataa

SEQ ID NO: 254596 - DNA, 20 bp, Artificial Sequence
  Description of Artificial Sequence: Synthetic oligonucleotide
  Target: LAMA2; (-) strand; PAM type: YTN; PAM sequence: TTC
ttaatctatacaatgaggat

SEQ ID NO: 254597 - DNA, 20 bp, Artificial Sequence
  Description of Artificial Sequence: Synthetic oligonucleotide
  Target: LAMA2; (-) strand; PAM type: YTN; PAM sequence: TTT
cttaatctatacaatgagga

SEQ ID NO: 254598 - DNA, 20 bp, Artificial Sequence
  Description of Artificial Sequence: Synthetic oligonucleotide
  Target: LAMA2; (-) strand; PAM type: YTN; PAM sequence: TTC
atttcttaatctatacaatg

SEQ ID NO: 254599 - DNA, 20 bp, Artificial Sequence
  Description of Artificial Sequence: Synthetic oligonucleotide
  Target: LAMA2; (-) strand; PAM type: YTN; PAM sequence: CTT
catttcttaatctatacaat

SEQ ID NO: 254600 - DNA, 20 bp, Artificial Sequence
  Description of Artificial Sequence: Synthetic oligonucleotide
  Target: LAMA2; (-) strand; PAM type: YTN; PAM sequence: CTA
atggccttcatttcttaatc

SEQ ID NO: 254601 - DNA, 20 bp, Artificial Sequence
  Description of Artificial Sequence: Synthetic oligonucleotide
  Target: LAMA2; (-) strand; PAM type: YTN; PAM sequence: CTA
ctaatggccttcatttctta

SEQ ID NO: 254602 - DNA, 20 bp, Artificial Sequence
  Description of Artificial Sequence: Synthetic oligonucleotide
  Target: LAMA2; (-) strand; PAM type: YTN; PAM sequence: TTC
tactaatggccttcatttct

SEQ ID NO: 254603 - DNA, 20 bp, Artificial Sequence
  Description of Artificial Sequence: Synthetic oligonucleotide
  Target: LAMA2; (-) strand; PAM type: YTN; PAM sequence: TTT
ctactaatggccttcatttc

SEQ ID NO: 254604 - DNA, 20 bp, Artificial Sequence
  Description of Artificial Sequence: Synthetic oligonucleotide
  Target: LAMA2; (-) strand; PAM type: YTN; PAM sequence: TTT
tctactaatggccttcattt

SEQ ID NO: 254605 - DNA, 20 bp, Artificial Sequence
  Description of Artificial Sequence: Synthetic oligonucleotide
  Target: LAMA2; (-) strand; PAM type: YTN; PAM sequence: TTT
ttctactaatggccttcatt

SEQ ID NO: 254606 - DNA, 20 bp, Artificial Sequence
  Description of Artificial Sequence: Synthetic oligonucleotide
  Target: LAMA2; (-) strand; PAM type: YTN; PAM sequence: TTG
gcatcataatgccatttttc

SEQ ID NO: 254607 - DNA, 20 bp, Artificial Sequence
  Description of Artificial Sequence: Synthetic oligonucleotide
  Target: LAMA2; (-) strand; PAM type: YTN; PAM sequence: CTC
cagaattggcatcataatgc

SEQ ID NO: 254608 - DNA, 20 bp, Artificial Sequence
  Description of Artificial Sequence: Synthetic oligonucleotide
  Target: LAMA2; (-) strand; PAM type: YTN; PAM sequence: CTG
gctccagaattggcatcata

SEQ ID NO: 254609 - DNA, 20 bp, Artificial Sequence
  Description of Artificial Sequence: Synthetic oligonucleotide
  Target: LAMA2; (-) strand; PAM type: YTN; PAM sequence: TTA
aaccaaagagtctggctcca

SEQ ID NO: 254610 - DNA, 20 bp, Artificial Sequence
  Description of Artificial Sequence: Synthetic oligonucleotide
  Target: LAMA2; (-) strand; PAM type: YTN; PAM sequence: TTT
aaaccaaagagtctggctcc

SEQ ID NO: 254611 - DNA, 20 bp, Artificial Sequence
  Description of Artificial Sequence: Synthetic oligonucleotide
  Target: LAMA2; (-) strand; PAM type: YTN; PAM sequence: CTG
gaaagtatggaacccagcat

SEQ ID NO: 254612 - DNA, 20 bp, Artificial Sequence
  Description of Artificial Sequence: Synthetic oligonucleotide
  Target: LAMA2; (-) strand; PAM type: YTN; PAM sequence: CTA
aagtggcacagctggaaagt

SEQ ID NO: 254613 - DNA, 20 bp, Artificial Sequence
  Description of Artificial Sequence: Synthetic oligonucleotide
  Target: LAMA2; (-) strand; PAM type: YTN; PAM sequence: TTG
cctaaagtggcacagctgga

SEQ ID NO: 254614 - DNA, 20 bp, Artificial Sequence
  Description of Artificial Sequence: Synthetic oligonucleotide
  Target: LAMA2; (-) strand; PAM type: YTN; PAM sequence: CTT
gcctaaagtggcacagctgg

SEQ ID NO: 254615 - DNA, 20 bp, Artificial Sequence
  Description of Artificial Sequence: Synthetic oligonucleotide
  Target: LAMA2; (-) strand; PAM type: YTN; PAM sequence: TTC
agtgacttgcctaaagtggc

SEQ ID NO: 254616 - DNA, 20 bp, Artificial Sequence
  Description of Artificial Sequence: Synthetic oligonucleotide
  Target: LAMA2; (-) strand; PAM type: YTN; PAM sequence: TTT
cagtgacttgcctaaagtgg

SEQ ID NO: 254617 - DNA, 20 bp, Artificial Sequence
  Description of Artificial Sequence: Synthetic oligonucleotide
  Target: LAMA2; (-) strand; PAM type: YTN; PAM sequence: TTG
aggcacagagagtttcagtg

SEQ ID NO: 254618 - DNA, 20 bp, Artificial Sequence
  Description of Artificial Sequence: Synthetic oligonucleotide
  Target: LAMA2; (-) strand; PAM type: YTN; PAM sequence: CTA
atgatgacaaaattgaggca

SEQ ID NO: 254619 - DNA, 20 bp, Artificial Sequence
  Description of Artificial Sequence: Synthetic oligonucleotide
  Target: LAMA2; (-) strand; PAM type: YTN; PAM sequence: TTA
taactaatgatgacaaaatt

SEQ ID NO: 254620 - DNA, 20 bp, Artificial Sequence
  Description of Artificial Sequence: Synthetic oligonucleotide
  Target: LAMA2; (-) strand; PAM type: YTN; PAM sequence: CTA
ttataactaatgatgacaaa

SEQ ID NO: 254621 - DNA, 20 bp, Artificial Sequence
  Description of Artificial Sequence: Synthetic oligonucleotide
  Target: LAMA2; (-) strand; PAM type: YTN; PAM sequence: CTA
tgagagtcctattataacta

SEQ ID NO: 254622 - DNA, 20 bp, Artificial Sequence
  Description of Artificial Sequence: Synthetic oligonucleotide
  Target: LAMA2; (-) strand; PAM type: YTN; PAM sequence: TTC
ccacatcaaccctatgagag

SEQ ID NO: 254623 - DNA, 20 bp, Artificial Sequence
  Description of Artificial Sequence: Synthetic oligonucleotide
  Target: LAMA2; (-) strand; PAM type: YTN; PAM sequence: TTT
cccacatcaaccctatgaga

SEQ ID NO: 254624 - DNA, 20 bp, Artificial Sequence
  Description of Artificial Sequence: Synthetic oligonucleotide
  Target: LAMA2; (-) strand; PAM type: YTN; PAM sequence: CTT
tcccacatcaaccctatgag

SEQ ID NO: 254625 - DNA, 20 bp, Artificial Sequence
  Description of Artificial Sequence: Synthetic oligonucleotide
  Target: LAMA2; (-) strand; PAM type: YTN; PAM sequence: TTA
tgtctttcccacatcaaccc

SEQ ID NO: 254626 - DNA, 20 bp, Artificial Sequence
  Description of Artificial Sequence: Synthetic oligonucleotide
  Target: LAMA2; (-) strand; PAM type: YTN; PAM sequence: TTA
attatgtctttcccacatca

SEQ ID NO: 254627 - DNA, 20 bp, Artificial Sequence
  Description of Artificial Sequence: Synthetic oligonucleotide
  Target: LAMA2; (-) strand; PAM type: YTN; PAM sequence: TTT
aattatgtctttcccacatc

SEQ ID NO: 254628 - DNA, 20 bp, Artificial Sequence
  Description of Artificial Sequence: Synthetic oligonucleotide
  Target: LAMA2; (-) strand; PAM type: YTN; PAM sequence: TTT
taattatgtctttcccacat

SEQ ID NO: 254629 - DNA, 20 bp, Artificial Sequence
  Description of Artificial Sequence: Synthetic oligonucleotide
  Target: LAMA2; (-) strand; PAM type: YTN; PAM sequence: TTA
cacattttaattatgtcttt

SEQ ID NO: 254630 - DNA, 20 bp, Artificial Sequence
  Description of Artificial Sequence: Synthetic oligonucleotide
  Target: LAMA2; (-) strand; PAM type: YTN; PAM sequence: TTT
acacattttaattatgtctt

SEQ ID NO: 254631 - DNA, 20 bp, Artificial Sequence
  Description of Artificial Sequence: Synthetic oligonucleotide
  Target: LAMA2; (-) strand; PAM type: YTN; PAM sequence: TTA
ggtggtttacacattttaat

SEQ ID NO: 254632 - DNA, 20 bp, Artificial Sequence
  Description of Artificial Sequence: Synthetic oligonucleotide
  Target: LAMA2; (-) strand; PAM type: YTN; PAM sequence: TTT
aggtggtttacacattttaa

SEQ ID NO: 254633 - DNA, 20 bp, Artificial Sequence
  Description of Artificial Sequence: Synthetic oligonucleotide
  Target: LAMA2; (-) strand; PAM type: YTN; PAM sequence: TTC
atcatatccagtcacagttt

SEQ ID NO: 254634 - DNA, 20 bp, Artificial Sequence
  Description of Artificial Sequence: Synthetic oligonucleotide
  Target: LAMA2; (-) strand; PAM type: YTN; PAM sequence: TTG
ggttcatcatatccagtcac

SEQ ID NO: 254635 - DNA, 20 bp, Artificial Sequence
  Description of Artificial Sequence: Synthetic oligonucleotide
  Target: LAMA2; (-) strand; PAM type: YTN; PAM sequence: TTA
gattgggttcatcatatcca

SEQ ID NO: 254636 - DNA, 20 bp, Artificial Sequence
  Description of Artificial Sequence: Synthetic oligonucleotide
  Target: LAMA2; (-) strand; PAM type: YTN; PAM sequence: CTT
agattgggttcatcatatcc

SEQ ID NO: 254637 - DNA, 20 bp, Artificial Sequence
  Description of Artificial Sequence: Synthetic oligonucleotide
  Target: LAMA2; (-) strand; PAM type: YTN; PAM sequence: CTC
ttagattgggttcatcatat

SEQ ID NO: 254638 - DNA, 20 bp, Artificial Sequence
  Description of Artificial Sequence: Synthetic oligonucleotide
  Target: LAMA2; (-) strand; PAM type: YTN; PAM sequence: TTA
ataacaatcagctcttagat

SEQ ID NO: 254639 - DNA, 20 bp, Artificial Sequence
  Description of Artificial Sequence: Synthetic oligonucleotide
  Target: LAMA2; (-) strand; PAM type: YTN; PAM sequence: CTG
agcaggttaataacaatcag

SEQ ID NO: 254640 - DNA, 20 bp, Artificial Sequence
  Description of Artificial Sequence: Synthetic oligonucleotide
  Target: LAMA2; (-) strand; PAM type: YTN; PAM sequence: CTC
tgagcaggttaataacaatc

SEQ ID NO: 254641 - DNA, 20 bp, Artificial Sequence
  Description of Artificial Sequence: Synthetic oligonucleotide
  Target: LAMA2; (-) strand; PAM type: YTN; PAM sequence: TTA
tgactctgagcaggttaata

SEQ ID NO: 254642 - DNA, 20 bp, Artificial Sequence
  Description of Artificial Sequence: Synthetic oligonucleotide
  Target: LAMA2; (-) strand; PAM type: YTN; PAM sequence: TTT
atgactctgagcaggttaat

SEQ ID NO: 254643 - DNA, 20 bp, Artificial Sequence
  Description of Artificial Sequence: Synthetic oligonucleotide
  Target: LAMA2; (-) strand; PAM type: YTN; PAM sequence: CTT
tatgactctgagcaggttaa

SEQ ID NO: 254644 - DNA, 20 bp, Artificial Sequence
  Description of Artificial Sequence: Synthetic oligonucleotide
  Target: LAMA2; (-) strand; PAM type: YTN; PAM sequence: TTA
atactttatgactctgagca

SEQ ID NO: 254645 - DNA, 20 bp, Artificial Sequence
  Description of Artificial Sequence: Synthetic oligonucleotide
  Target: LAMA2; (-) strand; PAM type: YTN; PAM sequence: TTT
aatactttatgactctgagc

SEQ ID NO: 254646 - DNA, 20 bp, Artificial Sequence
  Description of Artificial Sequence: Synthetic oligonucleotide
  Target: LAMA2; (-) strand; PAM type: YTN; PAM sequence: CTT
taatactttatgactctgag

SEQ ID NO: 254647 - DNA, 20 bp, Artificial Sequence
  Description of Artificial Sequence: Synthetic oligonucleotide
  Target: LAMA2; (-) strand; PAM type: YTN; PAM sequence: CTG
atactttaatactttatgac

SEQ ID NO: 254648 - DNA, 20 bp, Artificial Sequence
  Description of Artificial Sequence: Synthetic oligonucleotide
  Target: LAMA2; (-) strand; PAM type: YTN; PAM sequence: CTC
tgatactttaatactttatg

SEQ ID NO: 254649 - DNA, 20 bp, Artificial Sequence
  Description of Artificial Sequence: Synthetic oligonucleotide
  Target: LAMA2; (-) strand; PAM type: YTN; PAM sequence: TTC
caactctgatactttaatac

SEQ ID NO: 254650 - DNA, 20 bp, Artificial Sequence
  Description of Artificial Sequence: Synthetic oligonucleotide
  Target: LAMA2; (-) strand; PAM type: YTN; PAM sequence: CTA
aaattccaactctgatactt

SEQ ID NO: 254651 - DNA, 20 bp, Artificial Sequence
  Description of Artificial Sequence: Synthetic oligonucleotide
  Target: LAMA2; (-) strand; PAM type: YTN; PAM sequence: TTA
aaactaaaattccaactctg

SEQ ID NO: 254652 - DNA, 20 bp, Artificial Sequence
  Description of Artificial Sequence: Synthetic oligonucleotide
  Target: LAMA2; (-) strand; PAM type: YTN; PAM sequence: TTT
aaaactaaaattccaactct

SEQ ID NO: 254653 - DNA, 20 bp, Artificial Sequence
  Description of Artificial Sequence: Synthetic oligonucleotide
  Target: LAMA2; (-) strand; PAM type: YTN; PAM sequence: TTT
taaaactaaaattccaactc

SEQ ID NO: 254654 - DNA, 20 bp, Artificial Sequence
  Description of Artificial Sequence: Synthetic oligonucleotide
  Target: LAMA2; (-) strand; PAM type: YTN; PAM sequence: TTG
gaaagcacatggattttaaa

SEQ ID NO: 254655 - DNA, 20 bp, Artificial Sequence
  Description of Artificial Sequence: Synthetic oligonucleotide
  Target: LAMA2; (-) strand; PAM type: YTN; PAM sequence: TTT
ggaaagcacatggattttaa

SEQ ID NO: 254656 - DNA, 20 bp, Artificial Sequence
  Description of Artificial Sequence: Synthetic oligonucleotide
  Target: LAMA2; (-) strand; PAM type: YTN; PAM sequence: TTG
tagaccgtagagatttggaa

SEQ ID NO: 254657 - DNA, 20 bp, Artificial Sequence
  Description of Artificial Sequence: Synthetic oligonucleotide
  Target: LAMA2; (-) strand; PAM type: YTN; PAM sequence: TTC
attgtagaccgtagagattt

SEQ ID NO: 254658 - DNA, 20 bp, Artificial Sequence
  Description of Artificial Sequence: Synthetic oligonucleotide
  Target: LAMA2; (-) strand; PAM type: YTN; PAM sequence: CTT
cattgtagaccgtagagatt

SEQ ID NO: 254659 - DNA, 20 bp, Artificial Sequence
  Description of Artificial Sequence: Synthetic oligonucleotide
  Target: LAMA2; (-) strand; PAM type: YTN; PAM sequence: TTA
aagaagtcttcattgtagac

SEQ ID NO: 254660 - DNA, 20 bp, Artificial Sequence
  Description of Artificial Sequence: Synthetic oligonucleotide
  Target: LAMA2; (-) strand; PAM type: YTN; PAM sequence: TTT
aaagaagtcttcattgtaga

SEQ ID NO: 254661 - DNA, 20 bp, Artificial Sequence
  Description of Artificial Sequence: Synthetic oligonucleotide
  Target: LAMA2; (-) strand; PAM type: YTN; PAM sequence: TTT
taaagaagtcttcattgtag

SEQ ID NO: 254662 - DNA, 20 bp, Artificial Sequence
  Description of Artificial Sequence: Synthetic oligonucleotide
  Target: LAMA2; (-) strand; PAM type: YTN; PAM sequence: TTT
ttaaagaagtcttcattgta

SEQ ID NO: 254663 - DNA, 20 bp, Artificial Sequence
  Description of Artificial Sequence: Synthetic oligonucleotide
  Target: LAMA2; (-) strand; PAM type: YTN; PAM sequence: TTT
tttaaagaagtcttcattgt

SEQ ID NO: 254664 - DNA, 20 bp, Artificial Sequence
  Description of Artificial Sequence: Synthetic oligonucleotide
  Target: LAMA2; (-) strand; PAM type: YTN; PAM sequence: TTT
ttttaaagaagtcttcattg

SEQ ID NO: 254665 - DNA, 20 bp, Artificial Sequence
  Description of Artificial Sequence: Synthetic oligonucleotide
  Target: LAMA2; (-) strand; PAM type: YTN; PAM sequence: TTT
tttttaaagaagtcttcatt

SEQ ID NO: 254666 - DNA, 20 bp, Artificial Sequence
  Description of Artificial Sequence: Synthetic oligonucleotide
  Target: LAMA2; (-) strand; PAM type: YTN; PAM sequence: TTT
ttttttaaagaagtcttcat

SEQ ID NO: 254667 - DNA, 20 bp, Artificial Sequence
  Description of Artificial Sequence: Synthetic oligonucleotide
  Target: LAMA2; (-) strand; PAM type: YTN; PAM sequence: TTA
aaatgcagtgtgtatttttt

SEQ ID NO: 254668 - DNA, 20 bp, Artificial Sequence
  Description of Artificial Sequence: Synthetic oligonucleotide
  Target: LAMA2; (-) strand; PAM type: YTN; PAM sequence: CTT
aaaatgcagtgtgtattttt

SEQ ID NO: 254669 - DNA, 20 bp, Artificial Sequence
  Description of Artificial Sequence: Synthetic oligonucleotide
  Target: LAMA2; (-) strand; PAM type: YTN; PAM sequence: TTA
tcacttaaaatgcagtgtgt

SEQ ID NO: 254670 - DNA, 20 bp, Artificial Sequence
  Description of Artificial Sequence: Synthetic oligonucleotide
  Target: LAMA2; (-) strand; PAM type: YTN; PAM sequence: TTA
gtgttatcacttaaaatgca

SEQ ID NO: 254671 - DNA, 20 bp, Artificial Sequence
  Description of Artificial Sequence: Synthetic oligonucleotide
  Target: LAMA2; (-) strand; PAM type: YTN; PAM sequence: TTT
agtgttatcacttaaaatgc

SEQ ID NO: 254672 - DNA, 20 bp, Artificial Sequence
  Description of Artificial Sequence: Synthetic oligonucleotide
  Target: LAMA2; (-) strand; PAM type: YTN; PAM sequence: TTT
tagtgttatcacttaaaatg

SEQ ID NO: 254673 - DNA, 20 bp, Artificial Sequence
  Description of Artificial Sequence: Synthetic oligonucleotide
  Target: LAMA2; (-) strand; PAM type: YTN; PAM sequence: CTT
ttagtgttatcacttaaaat

SEQ ID NO: 254674 - DNA, 20 bp, Artificial Sequence
  Description of Artificial Sequence: Synthetic oligonucleotide
  Target: LAMA2; (-) strand; PAM type: YTN; PAM sequence: CTG
cttttagtgttatcacttaa

SEQ ID NO: 254675 - DNA, 20 bp, Artificial Sequence
  Description of Artificial Sequence: Synthetic oligonucleotide
  Target: LAMA2; (-) strand; PAM type: YTN; PAM sequence: TTA
ctgcttttagtgttatcact

SEQ ID NO: 254676 - DNA, 20 bp, Artificial Sequence
  Description of Artificial Sequence: Synthetic oligonucleotide
  Target: LAMA2; (-) strand; PAM type: YTN; PAM sequence: TTA
attactgcttttagtgttat

SEQ ID NO: 254677 - DNA, 20 bp, Artificial Sequence
  Description of Artificial Sequence: Synthetic oligonucleotide
  Target: LAMA2; (-) strand; PAM type: YTN; PAM sequence: TTA
tccaatgaattaattactgc

SEQ ID NO: 254678 - DNA, 20 bp, Artificial Sequence
  Description of Artificial Sequence: Synthetic oligonucleotide
  Target: LAMA2; (-) strand; PAM type: YTN; PAM sequence: CTT
atccaatgaattaattactg

SEQ ID NO: 254679 - DNA, 20 bp, Artificial Sequence
  Description of Artificial Sequence: Synthetic oligonucleotide
  Target: LAMA2; (-) strand; PAM type: YTN; PAM sequence: TTG
acttatccaatgaattaatt

SEQ ID NO: 254680 - DNA, 20 bp, Artificial Sequence
  Description of Artificial Sequence: Synthetic oligonucleotide
  Target: LAMA2; (-) strand; PAM type: YTN; PAM sequence: CTA
gataaattgacttatccaat

SEQ ID NO: 254681 - DNA, 20 bp, Artificial Sequence
  Description of Artificial Sequence: Synthetic oligonucleotide
  Target: LAMA2; (-) strand; PAM type: YTN; PAM sequence: TTG
ctagataaattgacttatcc

SEQ ID NO: 254682 - DNA, 20 bp, Artificial Sequence
  Description of Artificial Sequence: Synthetic oligonucleotide
  Target: LAMA2; (-) strand; PAM type: YTN; PAM sequence: CTT
gctagataaattgacttatc

SEQ ID NO: 254683 - DNA, 20 bp, Artificial Sequence
  Description of Artificial Sequence: Synthetic oligonucleotide
  Target: LAMA2; (-) strand; PAM type: YTN; PAM sequence: CTC
aaaaccttgctagataaatt

SEQ ID NO: 254684 - DNA, 20 bp, Artificial Sequence
  Description of Artificial Sequence: Synthetic oligonucleotide
  Target: LAMA2; (-) strand; PAM type: YTN; PAM sequence: TTC
tcaaaaccttgctagataaa

SEQ ID NO: 254685 - DNA, 20 bp, Artificial Sequence
  Description of Artificial Sequence: Synthetic oligonucleotide
  Target: LAMA2; (-) strand; PAM type: YTN; PAM sequence: TTT
ctcaaaaccttgctagataa

SEQ ID NO: 254686 - DNA, 20 bp, Artificial Sequence
  Description of Artificial Sequence: Synthetic oligonucleotide
  Target: LAMA2; (-) strand; PAM type: YTN; PAM sequence: TTT
tctcaaaaccttgctagata

SEQ ID NO: 254687 - DNA, 20 bp, Artificial Sequence
  Description of Artificial Sequence: Synthetic oligonucleotide
  Target: LAMA2; (-) strand; PAM type: YTN; PAM sequence: TTA
ttttctcaaaaccttgctag

SEQ ID NO: 254688 - DNA, 20 bp, Artificial Sequence
  Description of Artificial Sequence: Synthetic oligonucleotide
  Target: LAMA2; (-) strand; PAM type: YTN; PAM sequence: CTT
attttctcaaaaccttgcta

SEQ ID NO: 254689 - DNA, 20 bp, Artificial Sequence
  Description of Artificial Sequence: Synthetic oligonucleotide
  Target: LAMA2; (-) strand; PAM type: YTN; PAM sequence: TTA
aaccaatgtcttattttctc

SEQ ID NO: 254690 - DNA, 20 bp, Artificial Sequence
  Description of Artificial Sequence: Synthetic oligonucleotide
  Target: LAMA2; (-) strand; PAM type: YTN; PAM sequence: CTG
cattaaaccaatgtcttatt

SEQ ID NO: 254691 - DNA, 20 bp, Artificial Sequence
  Description of Artificial Sequence: Synthetic oligonucleotide
  Target: LAMA2; (-) strand; PAM type: YTN; PAM sequence: TTG
aggacccctgcattaaacca

SEQ ID NO: 254692 - DNA, 20 bp, Artificial Sequence
  Description of Artificial Sequence: Synthetic oligonucleotide
  Target: LAMA2; (-) strand; PAM type: YTN; PAM sequence: CTA
tagatggttgaggacccctg

SEQ ID NO: 254693 - DNA, 20 bp, Artificial Sequence
  Description of Artificial Sequence: Synthetic oligonucleotide
  Target: LAMA2; (-) strand; PAM type: YTN; PAM sequence: CTA
acaggctatagatggttgag

SEQ ID NO: 254694 - DNA, 20 bp, Artificial Sequence
  Description of Artificial Sequence: Synthetic oligonucleotide
  Target: LAMA2; (-) strand; PAM type: YTN; PAM sequence: TTC
ctaacaggctatagatggtt

SEQ ID NO: 254695 - DNA, 20 bp, Artificial Sequence
  Description of Artificial Sequence: Synthetic oligonucleotide
  Target: LAMA2; (-) strand; PAM type: YTN; PAM sequence: CTA
ggcagcccggttcctaacag

SEQ ID NO: 254696 - DNA, 20 bp, Artificial Sequence
  Description of Artificial Sequence: Synthetic oligonucleotide
  Target: LAMA2; (-) strand; PAM type: YTN; PAM sequence: CTG
ctaggcagcccggttcctaa

SEQ ID NO: 254697 - DNA, 20 bp, Artificial Sequence
  Description of Artificial Sequence: Synthetic oligonucleotide
  Target: LAMA2; (-) strand; PAM type: YTN; PAM sequence: TTC
ctgctaggcagcccggttcc

SEQ ID NO: 254698 - DNA, 20 bp, Artificial Sequence
  Description of Artificial Sequence: Synthetic oligonucleotide
  Target: LAMA2; (-) strand; PAM type: YTN; PAM sequence: CTT
cctgctaggcagcccggttc

SEQ ID NO: 254699 - DNA, 20 bp, Artificial Sequence
  Description of Artificial Sequence: Synthetic oligonucleotide
  Target: LAMA2; (-) strand; PAM type: YTN; PAM sequence: CTC
acttcctgctaggcagcccg

SEQ ID NO: 254700 - DNA, 20 bp, Artificial Sequence
  Description of Artificial Sequence: Synthetic oligonucleotide
  Target: LAMA2; (-) strand; PAM type: YTN; PAM sequence: CTC
aggtggtaatgccaaccact

SEQ ID NO: 254701 - DNA, 20 bp, Artificial Sequence
  Description of Artificial Sequence: Synthetic oligonucleotide
  Target: LAMA2; (-) strand; PAM type: YTN; PAM sequence: CTG
agctcaggtggtaatgccaa

SEQ ID NO: 254702 - DNA, 20 bp, Artificial Sequence
  Description of Artificial Sequence: Synthetic oligonucleotide
  Target: LAMA2; (-) strand; PAM type: YTN; PAM sequence: TTA
ggaggctgagctcaggtggt

SEQ ID NO: 254703 - DNA, 20 bp, Artificial Sequence
  Description of Artificial Sequence: Synthetic oligonucleotide
  Target: LAMA2; (-) strand; PAM type: YTN; PAM sequence: CTG
ttaggaggctgagctcaggt

SEQ ID NO: 254704 - DNA, 20 bp, Artificial Sequence
  Description of Artificial Sequence: Synthetic oligonucleotide
  Target: LAMA2; (-) strand; PAM type: YTN; PAM sequence: CTG
atctgttaggaggctgagct

SEQ ID NO: 254705 - DNA, 20 bp, Artificial Sequence
  Description of Artificial Sequence: Synthetic oligonucleotide
  Target: LAMA2; (-) strand; PAM type: YTN; PAM sequence: CTG
cctgatctgttaggaggctg

SEQ ID NO: 254706 - DNA, 20 bp, Artificial Sequence
  Description of Artificial Sequence: Synthetic oligonucleotide
  Target: LAMA2; (-) strand; PAM type: YTN; PAM sequence: CTA
atgcctgcctgatctgttag

SEQ ID NO: 254707 - DNA, 20 bp, Artificial Sequence
  Description of Artificial Sequence: Synthetic oligonucleotide
  Target: LAMA2; (-) strand; PAM type: YTN; PAM sequence: CTA
tgagaatctaatgcctgcct

SEQ ID NO: 254708 - DNA, 20 bp, Artificial Sequence
  Description of Artificial Sequence: Synthetic oligonucleotide
  Target: LAMA2; (-) strand; PAM type: YTN; PAM sequence: TTC
tatgagaatctaatgcctgc

SEQ ID NO: 254709 - DNA, 20 bp, Artificial Sequence
  Description of Artificial Sequence: Synthetic oligonucleotide
  Target: LAMA2; (-) strand; PAM type: YTN; PAM sequence: CTT
ctatgagaatctaatgcctg

SEQ ID NO: 254710 - DNA, 20 bp, Artificial Sequence
  Description of Artificial Sequence: Synthetic oligonucleotide
  Target: LAMA2; (-) strand; PAM type: YTN; PAM sequence: TTG
agcttctatgagaatctaat

SEQ ID NO: 254711 - DNA, 20 bp, Artificial Sequence
  Description of Artificial Sequence: Synthetic oligonucleotide
  Target: LAMA2; (-) strand; PAM type: YTN; PAM sequence: TTT
gagcttctatgagaatctaa

SEQ ID NO: 254712 - DNA, 20 bp, Artificial Sequence
  Description of Artificial Sequence: Synthetic oligonucleotide
  Target: LAMA2; (-) strand; PAM type: YTN; PAM sequence: TTC
gcaatagggtttgagcttct

SEQ ID NO: 254713 - DNA, 20 bp, Artificial Sequence
  Description of Artificial Sequence: Synthetic oligonucleotide
  Target: LAMA2; (-) strand; PAM type: YTN; PAM sequence: CTC
gcaggtgcagttcgcaatag

SEQ ID NO: 254714 - DNA, 20 bp, Artificial Sequence
  Description of Artificial Sequence: Synthetic oligonucleotide
  Target: LAMA2; (-) strand; PAM type: YTN; PAM sequence: CTA
gatccctcgcaggtgcagtt

SEQ ID NO: 254715 - DNA, 20 bp, Artificial Sequence
  Description of Artificial Sequence: Synthetic oligonucleotide
  Target: LAMA2; (-) strand; PAM type: YTN; PAM sequence: CTC
ataaggagcatacaagctag

SEQ ID NO: 254716 - DNA, 20 bp, Artificial Sequence
  Description of Artificial Sequence: Synthetic oligonucleotide
  Target: LAMA2; (-) strand; PAM type: YTN; PAM sequence: CTC
tcataaggagcatacaagct

SEQ ID NO: 254717 - DNA, 20 bp, Artificial Sequence
  Description of Artificial Sequence: Synthetic oligonucleotide
  Target: LAMA2; (-) strand; PAM type: YTN; PAM sequence: TTA
gactctcataaggagcatac

SEQ ID NO: 254718 - DNA, 20 bp, Artificial Sequence
  Description of Artificial Sequence: Synthetic oligonucleotide
  Target: LAMA2; (-) strand; PAM type: YTN; PAM sequence: TTC
cacgtcagatcatcaggcat

SEQ ID NO: 254719 - DNA, 20 bp, Artificial Sequence
  Description of Artificial Sequence: Synthetic oligonucleotide
  Target: LAMA2; (-) strand; PAM type: YTN; PAM sequence: CTG
ttccacgtcagatcatcagg

SEQ ID NO: 254720 - DNA, 20 bp, Artificial Sequence
  Description of Artificial Sequence: Synthetic oligonucleotide
  Target: LAMA2; (-) strand; PAM type: YTN; PAM sequence: TTG
ggataaaactgttccacgtc

SEQ ID NO: 254721 - DNA, 20 bp, Artificial Sequence
  Description of Artificial Sequence: Synthetic oligonucleotide
  Target: LAMA2; (-) strand; PAM type: YTN; PAM sequence: TTT
gggataaaactgttccacgt

SEQ ID NO: 254722 - DNA, 20 bp, Artificial Sequence
  Description of Artificial Sequence: Synthetic oligonucleotide
  Target: LAMA2; (-) strand; PAM type: YTN; PAM sequence: TTC
cacagatgcaggggaggagt

SEQ ID NO: 254723 - DNA, 20 bp, Artificial Sequence
  Description of Artificial Sequence: Synthetic oligonucleotide
  Target: LAMA2; (-) strand; PAM type: YTN; PAM sequence: TTT
ccacagatgcaggggaggag

SEQ ID NO: 254724 - DNA, 20 bp, Artificial Sequence
  Description of Artificial Sequence: Synthetic oligonucleotide
  Target: LAMA2; (-) strand; PAM type: YTN; PAM sequence: TTT
tccacagatgcaggggagga

SEQ ID NO: 254725 - DNA, 20 bp, Artificial Sequence
  Description of Artificial Sequence: Synthetic oligonucleotide
  Target: LAMA2; (-) strand; PAM type: YTN; PAM sequence: TTT
ttccacagatgcaggggagg

SEQ ID NO: 254726 - DNA, 20 bp, Artificial Sequence
  Description of Artificial Sequence: Synthetic oligonucleotide
  Target: LAMA2; (-) strand; PAM type: YTN; PAM sequence: TTG
gagacaatttttccacagat

SEQ ID NO: 254727 - DNA, 20 bp, Artificial Sequence
  Description of Artificial Sequence: Synthetic oligonucleotide
  Target: LAMA2; (-) strand; PAM type: YTN; PAM sequence: TTG
ttggagacaatttttccaca

SEQ ID NO: 254728 - DNA, 20 bp, Artificial Sequence
  Description of Artificial Sequence: Synthetic oligonucleotide
  Target: LAMA2; (-) strand; PAM type: YTN; PAM sequence: TTT
gttggagacaatttttccac

SEQ ID NO: 254729 - DNA, 20 bp, Artificial Sequence
  Description of Artificial Sequence: Synthetic oligonucleotide
  Target: LAMA2; (-) strand; PAM type: YTN; PAM sequence: TTT
tgttggagacaatttttcca

SEQ ID NO: 254730 - DNA, 20 bp, Artificial Sequence
  Description of Artificial Sequence: Synthetic oligonucleotide
  Target: LAMA2; (-) strand; PAM type: YTN; PAM sequence: CTT
ttgttggagacaatttttcc

SEQ ID NO: 254731 - DNA, 20 bp, Artificial Sequence
  Description of Artificial Sequence: Synthetic oligonucleotide
  Target: LAMA2; (-) strand; PAM type: YTN; PAM sequence: TTC
ttttgttggagacaattttt

SEQ ID NO: 254732 - DNA, 20 bp, Artificial Sequence
  Description of Artificial Sequence: Synthetic oligonucleotide
  Target: LAMA2; (-) strand; PAM type: YTN; PAM sequence: CTT
cttttgttggagacaatttt

SEQ ID NO: 254733 - DNA, 20 bp, Artificial Sequence
  Description of Artificial Sequence: Synthetic oligonucleotide
  Target: LAMA2; (-) strand; PAM type: YTN; PAM sequence: TTG
gcaccaggtacttcttttgt

SEQ ID NO: 254734 - DNA, 20 bp, Artificial Sequence
  Description of Artificial Sequence: Synthetic oligonucleotide
  Target: LAMA2; (-) strand; PAM type: YTN; PAM sequence: TTT
ggcaccaggtacttcttttg

SEQ ID NO: 254735 - DNA, 20 bp, Artificial Sequence
  Description of Artificial Sequence: Synthetic oligonucleotide
  Target: LAMA2; (-) strand; PAM type: YTN; PAM sequence: TTT
tggcaccaggtacttctttt

SEQ ID NO: 254736 - DNA, 20 bp, Artificial Sequence
  Description of Artificial Sequence: Synthetic oligonucleotide
  Target: LAMA2; (-) strand; PAM type: YTN; PAM sequence: TTT
ttggcaccaggtacttcttt

SEQ ID NO: 254737 - DNA, 20 bp, Artificial Sequence
  Description of Artificial Sequence: Synthetic oligonucleotide
  Target: LAMA2; (-) strand; PAM type: YTN; PAM sequence: TTA
accagtggtccccaaaattt

SEQ ID NO: 254738 - DNA, 20 bp, Artificial Sequence
  Description of Artificial Sequence: Synthetic oligonucleotide
  Target: LAMA2; (-) strand; PAM type: YTN; PAM sequence: CTA
acatacattaaccagtggtc

SEQ ID NO: 254739 - DNA, 20 bp, Artificial Sequence
  Description of Artificial Sequence: Synthetic oligonucleotide
  Target: LAMA2; (-) strand; PAM type: YTN; PAM sequence: CTG
atcactaacatacattaacc

SEQ ID NO: 254740 - DNA, 20 bp, Artificial Sequence
  Description of Artificial Sequence: Synthetic oligonucleotide
  Target: LAMA2; (-) strand; PAM type: YTN; PAM sequence: TTC
tgatcactaacatacattaa

SEQ ID NO: 254741 - DNA, 20 bp, Artificial Sequence
  Description of Artificial Sequence: Synthetic oligonucleotide
  Target: LAMA2; (-) strand; PAM type: YTN; PAM sequence: CTG
gaaatgttctgatcactaac

SEQ ID NO: 254742 - DNA, 20 bp, Artificial Sequence
  Description of Artificial Sequence: Synthetic oligonucleotide
  Target: LAMA2; (-) strand; PAM type: YTN; PAM sequence: TTA
ggccctggaaatgttctgat

SEQ ID NO: 254743 - DNA, 20 bp, Artificial Sequence
  Description of Artificial Sequence: Synthetic oligonucleotide
  Target: LAMA2; (-) strand; PAM type: YTN; PAM sequence: CTT
aggccctggaaatgttctga

SEQ ID NO: 254744 - DNA, 20 bp, Artificial Sequence
  Description of Artificial Sequence: Synthetic oligonucleotide
  Target: LAMA2; (-) strand; PAM type: YTN; PAM sequence: CTC
atgccttaggccctggaaat

SEQ ID NO: 254745 - DNA, 20 bp, Artificial Sequence
  Description of Artificial Sequence: Synthetic oligonucleotide
  Target: LAMA2; (-) strand; PAM type: YTN; PAM sequence: TTC
aggctcatgccttaggccct

SEQ ID NO: 254746 - DNA, 20 bp, Artificial Sequence
  Description of Artificial Sequence: Synthetic oligonucleotide
  Target: LAMA2; (-) strand; PAM type: YTN; PAM sequence: TTG
agcccattcaggctcatgcc

SEQ ID NO: 254747 - DNA, 20 bp, Artificial Sequence
  Description of Artificial Sequence: Synthetic oligonucleotide
  Target: LAMA2; (-) strand; PAM type: YTN; PAM sequence: TTT
gagcccattcaggctcatgc

SEQ ID NO: 254748 - DNA, 20 bp, Artificial Sequence
  Description of Artificial Sequence: Synthetic oligonucleotide
  Target: LAMA2; (-) strand; PAM type: YTN; PAM sequence: TTT
tgagcccattcaggctcatg

SEQ ID NO: 254749 - DNA, 20 bp, Artificial Sequence
  Description of Artificial Sequence: Synthetic oligonucleotide
  Target: LAMA2; (-) strand; PAM type: YTN; PAM sequence: TTC
agttttgagcccattcaggc

SEQ ID NO: 254750 - DNA, 20 bp, Artificial Sequence
  Description of Artificial Sequence: Synthetic oligonucleotide
  Target: LAMA2; (-) strand; PAM type: YTN; PAM sequence: CTT
cagttttgagcccattcagg

SEQ ID NO: 254751 - DNA, 20 bp, Artificial Sequence
  Description of Artificial Sequence: Synthetic oligonucleotide
  Target: LAMA2; (-) strand; PAM type: YTN; PAM sequence: TTA
aagaatcttcagttttgagc

SEQ ID NO: 254752 - DNA, 20 bp, Artificial Sequence
  Description of Artificial Sequence: Synthetic oligonucleotide
  Target: LAMA2; (-) strand; PAM type: YTN; PAM sequence: TTG
ttaaagaatcttcagttttg

SEQ ID NO: 254753 - DNA, 20 bp, Artificial Sequence
  Description of Artificial Sequence: Synthetic oligonucleotide
  Target: LAMA2; (-) strand; PAM type: YTN; PAM sequence: TTG
gttgttaaagaatcttcagt

SEQ ID NO: 254754 - DNA, 20 bp, Artificial Sequence
  Description of Artificial Sequence: Synthetic oligonucleotide
  Target: LAMA2; (-) strand; PAM type: YTN; PAM sequence: CTT
ggttgttaaagaatcttcag

SEQ ID NO: 254755 - DNA, 20 bp, Artificial Sequence
  Description of Artificial Sequence: Synthetic oligonucleotide
  Target: LAMA2; (-) strand; PAM type: YTN; PAM sequence: CTA
acatccttggttgttaaaga

SEQ ID NO: 254756 - DNA, 20 bp, Artificial Sequence
  Description of Artificial Sequence: Synthetic oligonucleotide
  Target: LAMA2; (-) strand; PAM type: YTN; PAM sequence: CTC
taacatccttggttgttaaa

SEQ ID NO: 254757 - DNA, 20 bp, Artificial Sequence
  Description of Artificial Sequence: Synthetic oligonucleotide
  Target: LAMA2; (-) strand; PAM type: YTN; PAM sequence: TTC
tctaacatccttggttgtta

SEQ ID NO: 254758 - DNA, 20 bp, Artificial Sequence
  Description of Artificial Sequence: Synthetic oligonucleotide
  Target: LAMA2; (-) strand; PAM type: YTN; PAM sequence: CTT
ctctaacatccttggttgtt

SEQ ID NO: 254759 - DNA, 20 bp, Artificial Sequence
  Description of Artificial Sequence: Synthetic oligonucleotide
  Target: LAMA2; (-) strand; PAM type: YTN; PAM sequence: CTC
ttctctaacatccttggttg

SEQ ID NO: 254760 - DNA, 20 bp, Artificial Sequence
  Description of Artificial Sequence: Synthetic oligonucleotide
  Target: LAMA2; (-) strand; PAM type: YTN; PAM sequence: TTC
ctcttctctaacatccttgg

SEQ ID NO: 254761 - DNA, 20 bp, Artificial Sequence
  Description of Artificial Sequence: Synthetic oligonucleotide
  Target: LAMA2; (-) strand; PAM type: YTN; PAM sequence: CTT
cctcttctctaacatccttg

SEQ ID NO: 254762 - DNA, 20 bp, Artificial Sequence
  Description of Artificial Sequence: Synthetic oligonucleotide
  Target: LAMA2; (-) strand; PAM type: YTN; PAM sequence: TTC
ttcctcttctctaacatcct

SEQ ID NO: 254763 - DNA, 20 bp, Artificial Sequence
  Description of Artificial Sequence: Synthetic oligonucleotide
  Target: LAMA2; (-) strand; PAM type: YTN; PAM sequence: CTT
cttcctcttctctaacatcc

SEQ ID NO: 254764 - DNA, 20 bp, Artificial Sequence
  Description of Artificial Sequence: Synthetic oligonucleotide
  Target: LAMA2; (-) strand; PAM type: YTN; PAM sequence: TTG
ccttcttcctcttctctaac

SEQ ID NO: 254765 - DNA, 20 bp, Artificial Sequence
  Description of Artificial Sequence: Synthetic oligonucleotide
  Target: LAMA2; (-) strand; PAM type: YTN; PAM sequence: CTT
gccttcttcctcttctctaa

SEQ ID NO: 254766 - DNA, 20 bp, Artificial Sequence
  Description of Artificial Sequence: Synthetic oligonucleotide
  Target: LAMA2; (-) strand; PAM type: YTN; PAM sequence: CTC
ttgccttcttcctcttctct

SEQ ID NO: 254767 - DNA, 20 bp, Artificial Sequence
  Description of Artificial Sequence: Synthetic oligonucleotide
  Target: LAMA2; (-) strand; PAM type: YTN; PAM sequence: CTC
tcttgccttcttcctcttct

SEQ ID NO: 254768 - DNA, 20 bp, Artificial Sequence
  Description of Artificial Sequence: Synthetic oligonucleotide
  Target: LAMA2; (-) strand; PAM type: YTN; PAM sequence: TTC
tctcttgccttcttcctctt

SEQ ID NO: 254769 - DNA, 20 bp, Artificial Sequence
  Description of Artificial Sequence: Synthetic oligonucleotide
  Target: LAMA2; (-) strand; PAM type: YTN; PAM sequence: TTT
ctctcttgccttcttcctct

SEQ ID NO: 254770 - DNA, 20 bp, Artificial Sequence
  Description of Artificial Sequence: Synthetic oligonucleotide
  Target: LAMA2; (-) strand; PAM type: YTN; PAM sequence: TTC
caacaggtttctctcttgcc

SEQ ID NO: 254771 - DNA, 20 bp, Artificial Sequence
  Description of Artificial Sequence: Synthetic oligonucleotide
  Target: LAMA2; (-) strand; PAM type: YTN; PAM sequence: TTT
ccaacaggtttctctcttgc

SEQ ID NO: 254772 - DNA, 20 bp, Artificial Sequence
  Description of Artificial Sequence: Synthetic oligonucleotide
  Target: LAMA2; (-) strand; PAM type: YTN; PAM sequence: TTT
tccaacaggtttctctcttg

SEQ ID NO: 254773 - DNA, 20 bp, Artificial Sequence
  Description of Artificial Sequence: Synthetic oligonucleotide
  Target: LAMA2; (-) strand; PAM type: YTN; PAM sequence: TTA
ttttccaacaggtttctctc

SEQ ID NO: 254774 - DNA, 20 bp, Artificial Sequence
  Description of Artificial Sequence: Synthetic oligonucleotide
  Target: LAMA2; (-) strand; PAM type: YTN; PAM sequence: CTA
tagtaattattttccaacag

SEQ ID NO: 254775 - DNA, 20 bp, Artificial Sequence
  Description of Artificial Sequence: Synthetic oligonucleotide
  Target: LAMA2; (-) strand; PAM type: YTN; PAM sequence: CTC
ctatagtaattattttccaa

SEQ ID NO: 254776 - DNA, 20 bp, Artificial Sequence
  Description of Artificial Sequence: Synthetic oligonucleotide
  Target: LAMA2; (-) strand; PAM type: YTN; PAM sequence: TTC
tcctatagtaattattttcc

SEQ ID NO: 254777 - DNA, 20 bp, Artificial Sequence
  Description of Artificial Sequence: Synthetic oligonucleotide
  Target: LAMA2; (-) strand; PAM type: YTN; PAM sequence: TTG
ttctcctatagtaattattt

SEQ ID NO: 254778 - DNA, 20 bp, Artificial Sequence
  Description of Artificial Sequence: Synthetic oligonucleotide
  Target: LAMA2; (-) strand; PAM type: YTN; PAM sequence: TTT
gttctcctatagtaattatt

SEQ ID NO: 254779 - DNA, 20 bp, Artificial Sequence
  Description of Artificial Sequence: Synthetic oligonucleotide
  Target: LAMA2; (-) strand; PAM type: YTN; PAM sequence: TTC
atttgttctcctatagtaat

SEQ ID NO: 254780 - DNA, 20 bp, Artificial Sequence
  Description of Artificial Sequence: Synthetic oligonucleotide
  Target: LAMA2; (-) strand; PAM type: YTN; PAM sequence: TTT
catttgttctcctatagtaa

SEQ ID NO: 254781 - DNA, 20 bp, Artificial Sequence
  Description of Artificial Sequence: Synthetic oligonucleotide
  Target: LAMA2; (-) strand; PAM type: YTN; PAM sequence: TTA
tgaaggaatatatttcattt

SEQ ID NO: 254782 - DNA, 20 bp, Artificial Sequence
  Description of Artificial Sequence: Synthetic oligonucleotide
  Target: LAMA2; (-) strand; PAM type: YTN; PAM sequence: TTA
attatgaaggaatatatttc

SEQ ID NO: 254783 - DNA, 20 bp, Artificial Sequence
  Description of Artificial Sequence: Synthetic oligonucleotide
  Target: LAMA2; (-) strand; PAM type: YTN; PAM sequence: TTT
aattatgaaggaatatattt

SEQ ID NO: 254784 - DNA, 20 bp, Artificial Sequence
  Description of Artificial Sequence: Synthetic oligonucleotide
  Target: LAMA2; (-) strand; PAM type: YTN; PAM sequence: CTT
taattatgaaggaatatatt

SEQ ID NO: 254785 - DNA, 20 bp, Artificial Sequence
  Description of Artificial Sequence: Synthetic oligonucleotide
  Target: LAMA2; (-) strand; PAM type: YTN; PAM sequence: TTG
agtagcctttaattatgaag

SEQ ID NO: 254786 - DNA, 20 bp, Artificial Sequence
  Description of Artificial Sequence: Synthetic oligonucleotide
  Target: LAMA2; (-) strand; PAM type: YTN; PAM sequence: CTT
gagtagcctttaattatgaa

SEQ ID NO: 254787 - DNA, 20 bp, Artificial Sequence
  Description of Artificial Sequence: Synthetic oligonucleotide
  Target: LAMA2; (-) strand; PAM type: YTN; PAM sequence: CTA
tcataggcttgagtagcctt

SEQ ID NO: 254788 - DNA, 20 bp, Artificial Sequence
  Description of Artificial Sequence: Synthetic oligonucleotide
  Target: LAMA2; (-) strand; PAM type: YTN; PAM sequence: TTA
tgactatcataggcttgagt

SEQ ID NO: 254789 - DNA, 20 bp, Artificial Sequence
  Description of Artificial Sequence: Synthetic oligonucleotide
  Target: LAMA2; (-) strand; PAM type: YTN; PAM sequence: TTG
tgtcatgttatgactatcat

SEQ ID NO: 254790 - DNA, 20 bp, Artificial Sequence
  Description of Artificial Sequence: Synthetic oligonucleotide
  Target: LAMA2; (-) strand; PAM type: YTN; PAM sequence: TTT
gtgtcatgttatgactatca

SEQ ID NO: 254791 - DNA, 20 bp, Artificial Sequence
  Description of Artificial Sequence: Synthetic oligonucleotide
  Target: LAMA2; (-) strand; PAM type: YTN; PAM sequence: TTT
tgtgtcatgttatgactatc

SEQ ID NO: 254792 - DNA, 20 bp, Artificial Sequence
  Description of Artificial Sequence: Synthetic oligonucleotide
  Target: LAMA2; (-) strand; PAM type: YTN; PAM sequence: TTC
gcatatataccaaagtgcag

SEQ ID NO: 254793 - DNA, 20 bp, Artificial Sequence
  Description of Artificial Sequence: Synthetic oligonucleotide
  Target: LAMA2; (-) strand; PAM type: YTN; PAM sequence: CTT
cgcatatataccaaagtgca

SEQ ID NO: 254794 - DNA, 20 bp, Artificial Sequence
  Description of Artificial Sequence: Synthetic oligonucleotide
  Target: LAMA2; (-) strand; PAM type: YTN; PAM sequence: CTA
acccttcgcatatataccaa

SEQ ID NO: 254795 - DNA, 20 bp, Artificial Sequence
  Description of Artificial Sequence: Synthetic oligonucleotide
  Target: LAMA2; (-) strand; PAM type: YTN; PAM sequence: TTG
ggtgatctaacccttcgcat

SEQ ID NO: 254796 - DNA, 20 bp, Artificial Sequence
  Description of Artificial Sequence: Synthetic oligonucleotide
  Target: LAMA2; (-) strand; PAM type: YTN; PAM sequence: TTC
cattgggtgatctaaccctt

SEQ ID NO: 254797 - DNA, 20 bp, Artificial Sequence
  Description of Artificial Sequence: Synthetic oligonucleotide
  Target: LAMA2; (-) strand; PAM type: YTN; PAM sequence: CTT
ccattgggtgatctaaccct

SEQ ID NO: 254798 - DNA, 20 bp, Artificial Sequence
  Description of Artificial Sequence: Synthetic oligonucleotide
  Target: LAMA2; (-) strand; PAM type: YTN; PAM sequence: TTC
agccatggcaaacaagtagg

SEQ ID NO: 254799 - DNA, 20 bp, Artificial Sequence
  Description of Artificial Sequence: Synthetic oligonucleotide
  Target: LAMA2; (-) strand; PAM type: YTN; PAM sequence: TTA
agagaatgccattcagccat

SEQ ID NO: 254800 - DNA, 20 bp, Artificial Sequence
  Description of Artificial Sequence: Synthetic oligonucleotide
  Target: LAMA2; (-) strand; PAM type: YTN; PAM sequence: TTC
atgtaaatgaagatggttaa

SEQ ID NO: 254801 - DNA, 20 bp, Artificial Sequence
  Description of Artificial Sequence: Synthetic oligonucleotide
  Target: LAMA2; (-) strand; PAM type: YTN; PAM sequence: TTT
catgtaaatgaagatggtta

SEQ ID NO: 254802 - DNA, 20 bp, Artificial Sequence
  Description of Artificial Sequence: Synthetic oligonucleotide
  Target: LAMA2; (-) strand; PAM type: YTN; PAM sequence: TTA
gtcgtgaacaatgagtttca

SEQ ID NO: 254803 - DNA, 20 bp, Artificial Sequence
  Description of Artificial Sequence: Synthetic oligonucleotide
  Target: LAMA2; (-) strand; PAM type: YTN; PAM sequence: CTC
aaatgcaagttagtcgtgaa

SEQ ID NO: 254804 - DNA, 20 bp, Artificial Sequence
  Description of Artificial Sequence: Synthetic oligonucleotide
  Target: LAMA2; (-) strand; PAM type: YTN; PAM sequence: TTC
ctcaaatgcaagttagtcgt

SEQ ID NO: 254805 - DNA, 20 bp, Artificial Sequence
  Description of Artificial Sequence: Synthetic oligonucleotide
  Target: LAMA2; (-) strand; PAM type: YTN; PAM sequence: TTT
cctcaaatgcaagttagtcg

SEQ ID NO: 254806 - DNA, 20 bp, Artificial Sequence
  Description of Artificial Sequence: Synthetic oligonucleotide
  Target: LAMA2; (-) strand; PAM type: YTN; PAM sequence: CTT
tcctcaaatgcaagttagtc

SEQ ID NO: 254807 - DNA, 20 bp, Artificial Sequence
  Description of Artificial Sequence: Synthetic oligonucleotide
  Target: LAMA2; (-) strand; PAM type: YTN; PAM sequence: CTG
ctttcctcaaatgcaagtta

SEQ ID NO: 254808 - DNA, 20 bp, Artificial Sequence
  Description of Artificial Sequence: Synthetic oligonucleotide
  Target: LAMA2; (-) strand; PAM type: YTN; PAM sequence: TTC
tgctttcctcaaatgcaagt

SEQ ID NO: 254809 - DNA, 20 bp, Artificial Sequence
  Description of Artificial Sequence: Synthetic oligonucleotide
  Target: LAMA2; (-) strand; PAM type: YTN; PAM sequence: CTT
ctgctttcctcaaatgcaag

SEQ ID NO: 254810 - DNA, 20 bp, Artificial Sequence
  Description of Artificial Sequence: Synthetic oligonucleotide
  Target: LAMA2; (-) strand; PAM type: YTN; PAM sequence: CTG
agaaggagatgcaatacgag

SEQ ID NO: 254811 - DNA, 20 bp, Artificial Sequence
  Description of Artificial Sequence: Synthetic oligonucleotide
  Target: LAMA2; (-) strand; PAM type: YTN; PAM sequence: TTG
gctgagaaggagatgcaata

SEQ ID NO: 254812 - DNA, 20 bp, Artificial Sequence
  Description of Artificial Sequence: Synthetic oligonucleotide
  Target: LAMA2; (-) strand; PAM type: YTN; PAM sequence: CTT
ggctgagaaggagatgcaat

SEQ ID NO: 254813 - DNA, 20 bp, Artificial Sequence
  Description of Artificial Sequence: Synthetic oligonucleotide
  Target: LAMA2; (-) strand; PAM type: YTN; PAM sequence: CTC
atgacatcttggctgagaag

SEQ ID NO: 254814 - DNA, 20 bp, Artificial Sequence
  Description of Artificial Sequence: Synthetic oligonucleotide
  Target: LAMA2; (-) strand; PAM type: YTN; PAM sequence: CTA
atgctcatgacatcttggct

SEQ ID NO: 254815 - DNA, 20 bp, Artificial Sequence
  Description of Artificial Sequence: Synthetic oligonucleotide
  Target: LAMA2; (-) strand; PAM type: YTN; PAM sequence: TTG
atagtggtgctaatgctcat

SEQ ID NO: 254816 - DNA, 20 bp, Artificial Sequence
  Description of Artificial Sequence: Synthetic oligonucleotide
  Target: LAMA2; (-) strand; PAM type: YTN; PAM sequence: CTG
gattgatagtggtgctaatg

SEQ ID NO: 254817 - DNA, 20 bp, Artificial Sequence
  Description of Artificial Sequence: Synthetic oligonucleotide
  Target: LAMA2; (-) strand; PAM type: YTN; PAM sequence: CTG
ctggattgatagtggtgcta

SEQ ID NO: 254818 - DNA, 20 bp, Artificial Sequence
  Description of Artificial Sequence: Synthetic oligonucleotide
  Target: LAMA2; (-) strand; PAM type: YTN; PAM sequence: CTC
tgctggattgatagtggtgc

SEQ ID NO: 254819 - DNA, 20 bp, Artificial Sequence
  Description of Artificial Sequence: Synthetic oligonucleotide
  Target: LAMA2; (-) strand; PAM type: YTN; PAM sequence: TTC
acatgatgcaatgggcagcc

SEQ ID NO: 254820 - DNA, 20 bp, Artificial Sequence
  Description of Artificial Sequence: Synthetic oligonucleotide
  Target: LAMA2; (-) strand; PAM type: YTN; PAM sequence: CTG
gaattcacatgatgcaatgg

SEQ ID NO: 254821 - DNA, 20 bp, Artificial Sequence
  Description of Artificial Sequence: Synthetic oligonucleotide
  Target: LAMA2; (-) strand; PAM type: YTN; PAM sequence: TTC
agctggaattcacatgatgc

SEQ ID NO: 254822 - DNA, 20 bp, Artificial Sequence
  Description of Artificial Sequence: Synthetic oligonucleotide
  Target: LAMA2; (-) strand; PAM type: YTN; PAM sequence: CTA
atatgtattcagctggaatt

SEQ ID NO: 254823 - DNA, 20 bp, Artificial Sequence
  Description of Artificial Sequence: Synthetic oligonucleotide
  Target: LAMA2; (-) strand; PAM type: YTN; PAM sequence: TTC
taatatgtattcagctggaa

SEQ ID NO: 254824 - DNA, 20 bp, Artificial Sequence
  Description of Artificial Sequence: Synthetic oligonucleotide
  Target: LAMA2; (-) strand; PAM type: YTN; PAM sequence: TTA
tataattctaatatgtattc

SEQ ID NO: 254825 - DNA, 20 bp, Artificial Sequence
  Description of Artificial Sequence: Synthetic oligonucleotide
  Target: LAMA2; (-) strand; PAM type: YTN; PAM sequence: CTC
aatcaattatataattctaa

SEQ ID NO: 254826 - DNA, 20 bp, Artificial Sequence
  Description of Artificial Sequence: Synthetic oligonucleotide
  Target: LAMA2; (-) strand; PAM type: YTN; PAM sequence: TTG
catactcaatcaattatata

SEQ ID NO: 254827 - DNA, 20 bp, Artificial Sequence
  Description of Artificial Sequence: Synthetic oligonucleotide
  Target: LAMA2; (-) strand; PAM type: YTN; PAM sequence: TTT
gcatactcaatcaattatat

SEQ ID NO: 254828 - DNA, 20 bp, Artificial Sequence
  Description of Artificial Sequence: Synthetic oligonucleotide
  Target: LAMA2; (-) strand; PAM type: YTN; PAM sequence: TTG
agggtaaatccatagggttt

SEQ ID NO: 254829 - DNA, 20 bp, Artificial Sequence
  Description of Artificial Sequence: Synthetic oligonucleotide
  Target: LAMA2; (-) strand; PAM type: YTN; PAM sequence: CTT
gagggtaaatccatagggtt

SEQ ID NO: 254830 - DNA, 20 bp, Artificial Sequence
  Description of Artificial Sequence: Synthetic oligonucleotide
  Target: LAMA2; (-) strand; PAM type: YTN; PAM sequence: TTG
gtcagacttgagggtaaatc

SEQ ID NO: 254831 - DNA, 20 bp, Artificial Sequence
  Description of Artificial Sequence: Synthetic oligonucleotide
  Target: LAMA2; (-) strand; PAM type: YTN; PAM sequence: TTA
tagtaatgttggtcagactt

SEQ ID NO: 254832 - DNA, 20 bp, Artificial Sequence
  Description of Artificial Sequence: Synthetic oligonucleotide
  Target: LAMA2; (-) strand; PAM type: YTN; PAM sequence: TTT
atagtaatgttggtcagact

SEQ ID NO: 254833 - DNA, 20 bp, Artificial Sequence
  Description of Artificial Sequence: Synthetic oligonucleotide
  Target: LAMA2; (-) strand; PAM type: YTN; PAM sequence: CTG
catttatagtaatgttggtc

SEQ ID NO: 254834 - DNA, 20 bp, Artificial Sequence
  Description of Artificial Sequence: Synthetic oligonucleotide
  Target: LAMA2; (-) strand; PAM type: YTN; PAM sequence: CTC
tgcatttatagtaatgttgg

SEQ ID NO: 254835 - DNA, 20 bp, Artificial Sequence
  Description of Artificial Sequence: Synthetic oligonucleotide
  Target: LAMA2; (-) strand; PAM type: YTN; PAM sequence: TTC
ctctgcatttatagtaatgt

SEQ ID NO: 254836 - DNA, 20 bp, Artificial Sequence
  Description of Artificial Sequence: Synthetic oligonucleotide
  Target: LAMA2; (-) strand; PAM type: YTN; PAM sequence: TTT
cctctgcatttatagtaatg

SEQ ID NO: 254837 - DNA, 20 bp, Artificial Sequence
  Description of Artificial Sequence: Synthetic oligonucleotide
  Target: LAMA2; (-) strand; PAM type: YTN; PAM sequence: CTA
atgtttcctctgcatttata

SEQ ID NO: 254838 - DNA, 20 bp, Artificial Sequence
  Description of Artificial Sequence: Synthetic oligonucleotide
  Target: LAMA2; (-) strand; PAM type: YTN; PAM sequence: CTC
cctaatgtttcctctgcatt

SEQ ID NO: 254839 - DNA, 20 bp, Artificial Sequence
  Description of Artificial Sequence: Synthetic oligonucleotide
  Target: LAMA2; (-) strand; PAM type: YTN; PAM sequence: TTA
tctccctaatgtttcctctg

SEQ ID NO: 254840 - DNA, 20 bp, Artificial Sequence
  Description of Artificial Sequence: Synthetic oligonucleotide
  Target: LAMA2; (-) strand; PAM type: YTN; PAM sequence: TTA
tccaagcaaaattatctccc

SEQ ID NO: 254841 - DNA, 20 bp, Artificial Sequence
  Description of Artificial Sequence: Synthetic oligonucleotide
  Target: LAMA2; (-) strand; PAM type: YTN; PAM sequence: CTA
taattatccaagcaaaatta

SEQ ID NO: 254842 - DNA, 20 bp, Artificial Sequence
  Description of Artificial Sequence: Synthetic oligonucleotide
  Target: LAMA2; (-) strand; PAM type: YTN; PAM sequence: TTA
tccaagtaaatgcacaacaa

SEQ ID NO: 254843 - DNA, 20 bp, Artificial Sequence
  Description of Artificial Sequence: Synthetic oligonucleotide
  Target: LAMA2; (-) strand; PAM type: YTN; PAM sequence: TTA
gaacccattatccaagtaaa

SEQ ID NO: 254844 - DNA, 20 bp, Artificial Sequence
  Description of Artificial Sequence: Synthetic oligonucleotide
  Target: LAMA2; (-) strand; PAM type: YTN; PAM sequence: TTC
aggaacaacaattagaaccc

SEQ ID NO: 254845 - DNA, 20 bp, Artificial Sequence
  Description of Artificial Sequence: Synthetic oligonucleotide
  Target: LAMA2; (-) strand; PAM type: YTN; PAM sequence: TTT
caggaacaacaattagaacc

SEQ ID NO: 254846 - DNA, 20 bp, Artificial Sequence
  Description of Artificial Sequence: Synthetic oligonucleotide
  Target: LAMA2; (-) strand; PAM type: YTN; PAM sequence: TTT
tcaggaacaacaattagaac

SEQ ID NO: 254847 - DNA, 20 bp, Artificial Sequence
  Description of Artificial Sequence: Synthetic oligonucleotide
  Target: LAMA2; (-) strand; PAM type: YTN; PAM sequence: TTT
ttcaggaacaacaattagaa

SEQ ID NO: 254848 - DNA, 20 bp, Artificial Sequence
  Description of Artificial Sequence: Synthetic oligonucleotide
  Target: LAMA2; (-) strand; PAM type: YTN; PAM sequence: CTT
tttcaggaacaacaattaga

SEQ ID NO: 254849 - DNA, 20 bp, Artificial Sequence
  Description of Artificial Sequence: Synthetic oligonucleotide
  Target: LAMA2; (-) strand; PAM type: YTN; PAM sequence: TTC
tttttcaggaacaacaatta

SEQ ID NO: 254850 - DNA, 20 bp, Artificial Sequence
  Description of Artificial Sequence: Synthetic oligonucleotide
  Target: LAMA2; (-) strand; PAM type: YTN; PAM sequence: TTT
ctttttcaggaacaacaatt

SEQ ID NO: 254851 - DNA, 20 bp, Artificial Sequence
  Description of Artificial Sequence: Synthetic oligonucleotide
  Target: LAMA2; (-) strand; PAM type: YTN; PAM sequence: CTT
tctttttcaggaacaacaat

SEQ ID NO: 254852 - DNA, 20 bp, Artificial Sequence
  Description of Artificial Sequence: Synthetic oligonucleotide
  Target: LAMA2; (-) strand; PAM type: YTN; PAM sequence: TTC
tttctttttcaggaacaaca

SEQ ID NO: 254853 - DNA, 20 bp, Artificial Sequence
  Description of Artificial Sequence: Synthetic oligonucleotide
  Target: LAMA2; (-) strand; PAM type: YTN; PAM sequence: TTT
ctttctttttcaggaacaac

SEQ ID NO: 254854 - DNA, 20 bp, Artificial Sequence
  Description of Artificial Sequence: Synthetic oligonucleotide
  Target: LAMA2; (-) strand; PAM type: YTN; PAM sequence: CTT
tctttctttttcaggaacaa

SEQ ID NO: 254855 - DNA, 20 bp, Artificial Sequence
  Description of Artificial Sequence: Synthetic oligonucleotide
  Target: LAMA2; (-) strand; PAM type: YTN; PAM sequence: TTG
cagactttctttctttttca

SEQ ID NO: 254856 - DNA, 20 bp, Artificial Sequence
  Description of Artificial Sequence: Synthetic oligonucleotide
  Target: LAMA2; (-) strand; PAM type: YTN; PAM sequence: CTT
gcagactttctttctttttc

SEQ ID NO: 254857 - DNA, 20 bp, Artificial Sequence
  Description of Artificial Sequence: Synthetic oligonucleotide
  Target: LAMA2; (-) strand; PAM type: YTN; PAM sequence: TTA
atgcttgcagactttctttc

SEQ ID NO: 254858 - DNA, 20 bp, Artificial Sequence
  Description of Artificial Sequence: Synthetic oligonucleotide
  Target: LAMA2; (-) strand; PAM type: YTN; PAM sequence: TTT
aatgcttgcagactttcttt

SEQ ID NO: 254859 - DNA, 20 bp, Artificial Sequence
  Description of Artificial Sequence: Synthetic oligonucleotide
  Target: LAMA2; (-) strand; PAM type: YTN; PAM sequence: TTT
taatgcttgcagactttctt

SEQ ID NO: 254860 - DNA, 20 bp, Artificial Sequence
  Description of Artificial Sequence: Synthetic oligonucleotide
  Target: LAMA2; (-) strand; PAM type: YTN; PAM sequence: TTG
tgttttaatgcttgcagact

SEQ ID NO: 254861 - DNA, 20 bp, Artificial Sequence
  Description of Artificial Sequence: Synthetic oligonucleotide
  Target: LAMA2; (-) strand; PAM type: YTN; PAM sequence: CTG
atggattgtgttttaatgct

SEQ ID NO: 254862 - DNA, 20 bp, Artificial Sequence
  Description of Artificial Sequence: Synthetic oligonucleotide
  Target: LAMA2; (-) strand; PAM type: YTN; PAM sequence: TTG
gcactgatggattgtgtttt

SEQ ID NO: 254863 - DNA, 20 bp, Artificial Sequence
  Description of Artificial Sequence: Synthetic oligonucleotide
  Target: LAMA2; (-) strand; PAM type: YTN; PAM sequence: TTT
ggcactgatggattgtgttt

SEQ ID NO: 254864 - DNA, 20 bp, Artificial Sequence
  Description of Artificial Sequence: Synthetic oligonucleotide
  Target: LAMA2; (-) strand; PAM type: YTN; PAM sequence: CTT
tggcactgatggattgtgtt

SEQ ID NO: 254865 - DNA, 20 bp, Artificial Sequence
  Description of Artificial Sequence: Synthetic oligonucleotide
  Target: LAMA2; (-) strand; PAM type: YTN; PAM sequence: CTG
gaaacccaatccctttggca

SEQ ID NO: 254866 - DNA, 20 bp, Artificial Sequence
  Description of Artificial Sequence: Synthetic oligonucleotide
  Target: LAMA2; (-) strand; PAM type: YTN; PAM sequence: TTG
gacactggaaacccaatccc

SEQ ID NO: 254867 - DNA, 20 bp, Artificial Sequence
  Description of Artificial Sequence: Synthetic oligonucleotide
  Target: LAMA2; (-) strand; PAM type: YTN; PAM sequence: TTA
ttggacactggaaacccaat

SEQ ID NO: 254868 - DNA, 20 bp, Artificial Sequence
  Description of Artificial Sequence: Synthetic oligonucleotide
  Target: LAMA2; (-) strand; PAM type: YTN; PAM sequence: TTA
ggaaataatattattggaca

SEQ ID NO: 254869 - DNA, 20 bp, Artificial Sequence
  Description of Artificial Sequence: Synthetic oligonucleotide
  Target: LAMA2; (-) strand; PAM type: YTN; PAM sequence: TTT
aggaaataatattattggac

SEQ ID NO: 254870 - DNA, 20 bp, Artificial Sequence
  Description of Artificial Sequence: Synthetic oligonucleotide
  Target: LAMA2; (-) strand; PAM type: YTN; PAM sequence: TTT
taggaaataatattattgga

SEQ ID NO: 254871 - DNA, 20 bp, Artificial Sequence
  Description of Artificial Sequence: Synthetic oligonucleotide
  Target: LAMA2; (-) strand; PAM type: YTN; PAM sequence: CTT
ttaggaaataatattattgg

SEQ ID NO: 254872 - DNA, 20 bp, Artificial Sequence
  Description of Artificial Sequence: Synthetic oligonucleotide
  Target: LAMA2; (-) strand; PAM type: YTN; PAM sequence: TTA
gaatatacatcttttaggaa

SEQ ID NO: 254873 - DNA, 20 bp, Artificial Sequence
  Description of Artificial Sequence: Synthetic oligonucleotide
  Target: LAMA2; (-) strand; PAM type: YTN; PAM sequence: TTA
taccaaattagaatatacat

SEQ ID NO: 254874 - DNA, 20 bp, Artificial Sequence
  Description of Artificial Sequence: Synthetic oligonucleotide
  Target: LAMA2; (-) strand; PAM type: YTN; PAM sequence: TTA
aaaatcaggatcaacgtaat

SEQ ID NO: 254875 - DNA, 20 bp, Artificial Sequence
  Description of Artificial Sequence: Synthetic oligonucleotide
  Target: LAMA2; (-) strand; PAM type: YTN; PAM sequence: TTT
aaaaatcaggatcaacgtaa

SEQ ID NO: 254876 - DNA, 20 bp, Artificial Sequence
  Description of Artificial Sequence: Synthetic oligonucleotide
  Target: LAMA2; (-) strand; PAM type: YTN; PAM sequence: TTT
taaaaatcaggatcaacgta

SEQ ID NO: 254877 - DNA, 20 bp, Artificial Sequence
  Description of Artificial Sequence: Synthetic oligonucleotide
  Target: LAMA2; (-) strand; PAM type: YTN; PAM sequence: TTT
ttaaaaatcaggatcaacgt

SEQ ID NO: 254878 - DNA, 20 bp, Artificial Sequence
  Description of Artificial Sequence: Synthetic oligonucleotide
  Target: LAMA2; (-) strand; PAM type: YTN; PAM sequence: TTA
tatgcatttttaaaaatcag

SEQ ID NO: 254879 - DNA, 20 bp, Artificial Sequence
  Description of Artificial Sequence: Synthetic oligonucleotide
  Target: LAMA2; (-) strand; PAM type: YTN; PAM sequence: CTG
tgttatatgcatttttaaaa

SEQ ID NO: 254880 - DNA, 20 bp, Artificial Sequence
  Description of Artificial Sequence: Synthetic oligonucleotide
  Target: LAMA2; (-) strand; PAM type: YTN; PAM sequence: TTA
tcactgtgttatatgcattt

SEQ ID NO: 254881 - DNA, 20 bp, Artificial Sequence
  Description of Artificial Sequence: Synthetic oligonucleotide
  Target: LAMA2; (-) strand; PAM type: YTN; PAM sequence: TTG
ttatcactgtgttatatgca

SEQ ID NO: 254882 - DNA, 20 bp, Artificial Sequence
  Description of Artificial Sequence: Synthetic oligonucleotide
  Target: LAMA2; (-) strand; PAM type: YTN; PAM sequence: CTG
gtattgttatcactgtgtta

SEQ ID NO: 254883 - DNA, 20 bp, Artificial Sequence
  Description of Artificial Sequence: Synthetic oligonucleotide
  Target: LAMA2; (-) strand; PAM type: YTN; PAM sequence: TTA
ctggtattgttatcactgtg

SEQ ID NO: 254884 - DNA, 20 bp, Artificial Sequence
  Description of Artificial Sequence: Synthetic oligonucleotide
  Target: LAMA2; (-) strand; PAM type: YTN; PAM sequence: TTG
gtgttactggtattgttatc

SEQ ID NO: 254885 - DNA, 20 bp, Artificial Sequence
  Description of Artificial Sequence: Synthetic oligonucleotide
  Target: LAMA2; (-) strand; PAM type: YTN; PAM sequence: CTT
ggtgttactggtattgttat

SEQ ID NO: 254886 - DNA, 20 bp, Artificial Sequence
  Description of Artificial Sequence: Synthetic oligonucleotide
  Target: LAMA2; (-) strand; PAM type: YTN; PAM sequence: TTA
aatacttggtgttactggta

SEQ ID NO: 254887 - DNA, 20 bp, Artificial Sequence
  Description of Artificial Sequence: Synthetic oligonucleotide
  Target: LAMA2; (-) strand; PAM type: YTN; PAM sequence: TTG
aaaatgaaagaatcattaaa

SEQ ID NO: 254888 - DNA, 20 bp, Artificial Sequence
  Description of Artificial Sequence: Synthetic oligonucleotide
  Target: LAMA2; (-) strand; PAM type: YTN; PAM sequence: TTT
gaaaatgaaagaatcattaa

SEQ ID NO: 254889 - DNA, 20 bp, Artificial Sequence
  Description of Artificial Sequence: Synthetic oligonucleotide
  Target: LAMA2; (-) strand; PAM type: YTN; PAM sequence: TTT
tgaaaatgaaagaatcatta

SEQ ID NO: 254890 - DNA, 20 bp, Artificial Sequence
  Description of Artificial Sequence: Synthetic oligonucleotide
  Target: LAMA2; (-) strand; PAM type: YTN; PAM sequence: CTA
agtgaaaacattttgaaaat

SEQ ID NO: 254891 - DNA, 20 bp, Artificial Sequence
  Description of Artificial Sequence: Synthetic oligonucleotide
  Target: LAMA2; (-) strand; PAM type: YTN; PAM sequence: CTC
taagtgaaaacattttgaaa

SEQ ID NO: 254892 - DNA, 20 bp, Artificial Sequence
  Description of Artificial Sequence: Synthetic oligonucleotide
  Target: LAMA2; (-) strand; PAM type: YTN; PAM sequence: TTA
ctctaagtgaaaacattttg

SEQ ID NO: 254893 - DNA, 20 bp, Artificial Sequence
  Description of Artificial Sequence: Synthetic oligonucleotide
  Target: LAMA2; (-) strand; PAM type: YTN; PAM sequence: CTT
actctaagtgaaaacatttt

SEQ ID NO: 254894 - DNA, 20 bp, Artificial Sequence
  Description of Artificial Sequence: Synthetic oligonucleotide
  Target: LAMA2; (-) strand; PAM type: YTN; PAM sequence: TTG
cttactctaagtgaaaacat

SEQ ID NO: 254895 - DNA, 20 bp, Artificial Sequence
  Description of Artificial Sequence: Synthetic oligonucleotide
  Target: LAMA2; (-) strand; PAM type: YTN; PAM sequence: TTA
attgcttactctaagtgaaa

SEQ ID NO: 254896 - DNA, 20 bp, Artificial Sequence
  Description of Artificial Sequence: Synthetic oligonucleotide
  Target: LAMA2; (-) strand; PAM type: YTN; PAM sequence: TTA
ttaattgcttactctaagtg

SEQ ID NO: 254897 - DNA, 20 bp, Artificial Sequence
  Description of Artificial Sequence: Synthetic oligonucleotide
  Target: LAMA2; (-) strand; PAM type: YTN; PAM sequence: CTA
ataattattaattgcttact

SEQ ID NO: 254898 - DNA, 20 bp, Artificial Sequence
  Description of Artificial Sequence: Synthetic oligonucleotide
  Target: LAMA2; (-) strand; PAM type: YTN; PAM sequence: TTA
ctaataattattaattgctt

SEQ ID NO: 254899 - DNA, 20 bp, Artificial Sequence
  Description of Artificial Sequence: Synthetic oligonucleotide
  Target: LAMA2; (-) strand; PAM type: YTN; PAM sequence: TTT
actaataattattaattgct

SEQ ID NO: 254900 - DNA, 20 bp, Artificial Sequence
  Description of Artificial Sequence: Synthetic oligonucleotide
  Target: LAMA2; (-) strand; PAM type: YTN; PAM sequence: TTA
atatttactaataattatta

SEQ ID NO: 254901 - DNA, 20 bp, Artificial Sequence
  Description of Artificial Sequence: Synthetic oligonucleotide
  Target: LAMA2; (-) strand; PAM type: YTN; PAM sequence: TTA
ttaatatttactaataatta

SEQ ID NO: 254902 - DNA, 20 bp, Artificial Sequence
  Description of Artificial Sequence: Synthetic oligonucleotide
  Target: LAMA2; (-) strand; PAM type: YTN; PAM sequence: TTG
gtaattattaatatttacta

SEQ ID NO: 254903 - DNA, 20 bp, Artificial Sequence
  Description of Artificial Sequence: Synthetic oligonucleotide
  Target: LAMA2; (-) strand; PAM type: YTN; PAM sequence: TTT
ggtaattattaatatttact

SEQ ID NO: 254904 - DNA, 20 bp, Artificial Sequence
  Description of Artificial Sequence: Synthetic oligonucleotide
  Target: LAMA2; (-) strand; PAM type: YTN; PAM sequence: TTG
ataatttggtaattattaat

SEQ ID NO: 254905 - DNA, 20 bp, Artificial Sequence
  Description of Artificial Sequence: Synthetic oligonucleotide
  Target: LAMA2; (-) strand; PAM type: YTN; PAM sequence: TTT
gataatttggtaattattaa

SEQ ID NO: 254906 - DNA, 20 bp, Artificial Sequence
  Description of Artificial Sequence: Synthetic oligonucleotide
  Target: LAMA2; (-) strand; PAM type: YTN; PAM sequence: TTA
atatttgataatttggtaat

SEQ ID NO: 254907 - DNA, 20 bp, Artificial Sequence
  Description of Artificial Sequence: Synthetic oligonucleotide
  Target: LAMA2; (-) strand; PAM type: YTN; PAM sequence: TTA
tattaatatttgataatttg

SEQ ID NO: 254908 - DNA, 20 bp, Artificial Sequence
  Description of Artificial Sequence: Synthetic oligonucleotide
  Target: LAMA2; (-) strand; PAM type: YTN; PAM sequence: TTT
atattaatatttgataattt

SEQ ID NO: 254909 - DNA, 20 bp, Artificial Sequence
  Description of Artificial Sequence: Synthetic oligonucleotide
  Target: LAMA2; (-) strand; PAM type: YTN; PAM sequence: TTT
tatattaatatttgataatt

SEQ ID NO: 254910 - DNA, 20 bp, Artificial Sequence
  Description of Artificial Sequence: Synthetic oligonucleotide
  Target: LAMA2; (-) strand; PAM type: YTN; PAM sequence: TTA
atattttatattaatatttg

SEQ ID NO: 254911 - DNA, 20 bp, Artificial Sequence
  Description of Artificial Sequence: Synthetic oligonucleotide
  Target: LAMA2; (-) strand; PAM type: YTN; PAM sequence: TTT
aatattttatattaatattt

SEQ ID NO: 254912 - DNA, 20 bp, Artificial Sequence
  Description of Artificial Sequence: Synthetic oligonucleotide
  Target: LAMA2; (-) strand; PAM type: YTN; PAM sequence: TTT
taatattttatattaatatt

SEQ ID NO: 254913 - DNA, 20 bp, Artificial Sequence
  Description of Artificial Sequence: Synthetic oligonucleotide
  Target: LAMA2; (-) strand; PAM type: YTN; PAM sequence: CTA
attttaatattttatattaa

SEQ ID NO: 254914 - DNA, 20 bp, Artificial Sequence
  Description of Artificial Sequence: Synthetic oligonucleotide
  Target: LAMA2; (-) strand; PAM type: YTN; PAM sequence: TTG
ctaattttaatattttatat

SEQ ID NO: 254915 - DNA, 20 bp, Artificial Sequence
  Description of Artificial Sequence: Synthetic oligonucleotide
  Target: LAMA2; (-) strand; PAM type: YTN; PAM sequence: TTT
gctaattttaatattttata

SEQ ID NO: 254916 - DNA, 20 bp, Artificial Sequence
  Description of Artificial Sequence: Synthetic oligonucleotide
  Target: LAMA2; (-) strand; PAM type: YTN; PAM sequence: TTA
gtaatttgctaattttaata

SEQ ID NO: 254917 - DNA, 20 bp, Artificial Sequence
  Description of Artificial Sequence: Synthetic oligonucleotide
  Target: LAMA2; (-) strand; PAM type: YTN; PAM sequence: TTT
agtaatttgctaattttaat

SEQ ID NO: 254918 - DNA, 20 bp, Artificial Sequence
  Description of Artificial Sequence: Synthetic oligonucleotide
  Target: LAMA2; (-) strand; PAM type: YTN; PAM sequence: TTA
tttagtaatttgctaatttt

SEQ ID NO: 254919 - DNA, 20 bp, Artificial Sequence
  Description of Artificial Sequence: Synthetic oligonucleotide
  Target: LAMA2; (-) strand; PAM type: YTN; PAM sequence: TTA
ttatttagtaatttgctaat

SEQ ID NO: 254920 - DNA, 20 bp, Artificial Sequence
  Description of Artificial Sequence: Synthetic oligonucleotide
  Target: LAMA2; (-) strand; PAM type: YTN; PAM sequence: CTA
gaagtaaaattattatttag

SEQ ID NO: 254921 - DNA, 20 bp, Artificial Sequence
  Description of Artificial Sequence: Synthetic oligonucleotide
  Target: LAMA2; (-) strand; PAM type: YTN; PAM sequence: CTG
ctagaagtaaaattattatt

SEQ ID NO: 254922 - DNA, 20 bp, Artificial Sequence
  Description of Artificial Sequence: Synthetic oligonucleotide
  Target: LAMA2; (-) strand; PAM type: YTN; PAM sequence: CTA
ctgctagaagtaaaattatt

SEQ ID NO: 254923 - DNA, 20 bp, Artificial Sequence
  Description of Artificial Sequence: Synthetic oligonucleotide
  Target: LAMA2; (-) strand; PAM type: YTN; PAM sequence: TTC
tactgctagaagtaaaatta

SEQ ID NO: 254924 - DNA, 20 bp, Artificial Sequence
  Description of Artificial Sequence: Synthetic oligonucleotide
  Target: LAMA2; (-) strand; PAM type: YTN; PAM sequence: CTA
gtcccaattctactgctaga

SEQ ID NO: 254925 - DNA, 20 bp, Artificial Sequence
  Description of Artificial Sequence: Synthetic oligonucleotide
  Target: LAMA2; (-) strand; PAM type: YTN; PAM sequence: TTC
tagtcccaattctactgcta

SEQ ID NO: 254926 - DNA, 20 bp, Artificial Sequence
  Description of Artificial Sequence: Synthetic oligonucleotide
  Target: LAMA2; (-) strand; PAM type: YTN; PAM sequence: CTA
ttctagtcccaattctactg

SEQ ID NO: 254927 - DNA, 20 bp, Artificial Sequence
  Description of Artificial Sequence: Synthetic oligonucleotide
  Target: LAMA2; (-) strand; PAM type: YTN; PAM sequence: TTG
ctattctagtcccaattcta

SEQ ID NO: 254928 - DNA, 20 bp, Artificial Sequence
  Description of Artificial Sequence: Synthetic oligonucleotide
  Target: LAMA2; (-) strand; PAM type: YTN; PAM sequence: TTA
aaataaattgctattctagt

SEQ ID NO: 254929 - DNA, 20 bp, Artificial Sequence
  Description of Artificial Sequence: Synthetic oligonucleotide
  Target: LAMA2; (-) strand; PAM type: YTN; PAM sequence: TTT
aaaataaattgctattctag

SEQ ID NO: 254930 - DNA, 20 bp, Artificial Sequence
  Description of Artificial Sequence: Synthetic oligonucleotide
  Target: LAMA2; (-) strand; PAM type: YTN; PAM sequence: CTG
gaatttaaaataaattgcta

SEQ ID NO: 254931 - DNA, 20 bp, Artificial Sequence
  Description of Artificial Sequence: Synthetic oligonucleotide
  Target: LAMA2; (-) strand; PAM type: YTN; PAM sequence: TTG
aaagctggaatttaaaataa

SEQ ID NO: 254932 - DNA, 20 bp, Artificial Sequence
  Description of Artificial Sequence: Synthetic oligonucleotide
  Target: LAMA2; (-) strand; PAM type: YTN; PAM sequence: TTA
aaataccacattgaaagctg

SEQ ID NO: 254933 - DNA, 20 bp, Artificial Sequence
  Description of Artificial Sequence: Synthetic oligonucleotide
  Target: LAMA2; (-) strand; PAM type: YTN; PAM sequence: TTG
ttaaaataccacattgaaag

SEQ ID NO: 254934 - DNA, 20 bp, Artificial Sequence
  Description of Artificial Sequence: Synthetic oligonucleotide
  Target: LAMA2; (-) strand; PAM type: YTN; PAM sequence: CTT
gttaaaataccacattgaaa

SEQ ID NO: 254935 - DNA, 20 bp, Artificial Sequence
  Description of Artificial Sequence: Synthetic oligonucleotide
  Target: LAMA2; (-) strand; PAM type: YTN; PAM sequence: CTA
cttgttaaaataccacattg

SEQ ID NO: 254936 - DNA, 20 bp, Artificial Sequence
  Description of Artificial Sequence: Synthetic oligonucleotide
  Target: LAMA2; (-) strand; PAM type: YTN; PAM sequence: TTC
tacttgttaaaataccacat

SEQ ID NO: 254937 - DNA, 20 bp, Artificial Sequence
  Description of Artificial Sequence: Synthetic oligonucleotide
  Target: LAMA2; (-) strand; PAM type: YTN; PAM sequence: TTT
ctacttgttaaaataccaca

SEQ ID NO: 254938 - DNA, 20 bp, Artificial Sequence
  Description of Artificial Sequence: Synthetic oligonucleotide
  Target: LAMA2; (-) strand; PAM type: YTN; PAM sequence: CTT
tctacttgttaaaataccac

SEQ ID NO: 254939 - DNA, 20 bp, Artificial Sequence
  Description of Artificial Sequence: Synthetic oligonucleotide
  Target: LAMA2; (-) strand; PAM type: YTN; PAM sequence: CTC
tttctacttgttaaaatacc

SEQ ID NO: 254940 - DNA, 20 bp, Artificial Sequence
  Description of Artificial Sequence: Synthetic oligonucleotide
  Target: LAMA2; (-) strand; PAM type: YTN; PAM sequence: CTC
tctttctacttgttaaaata

SEQ ID NO: 254941 - DNA, 20 bp, Artificial Sequence
  Description of Artificial Sequence: Synthetic oligonucleotide
  Target: LAMA2; (-) strand; PAM type: YTN; PAM sequence: CTG
ccctctctttctacttgtta

SEQ ID NO: 254942 - DNA, 20 bp, Artificial Sequence
  Description of Artificial Sequence: Synthetic oligonucleotide
  Target: LAMA2; (-) strand; PAM type: YTN; PAM sequence: TTA
tcactgccctctctttctac

SEQ ID NO: 254943 - DNA, 20 bp, Artificial Sequence
  Description of Artificial Sequence: Synthetic oligonucleotide
  Target: LAMA2; (-) strand; PAM type: YTN; PAM sequence: CTA
agtgaattatcactgccctc

SEQ ID NO: 254944 - DNA, 20 bp, Artificial Sequence
  Description of Artificial Sequence: Synthetic oligonucleotide
  Target: LAMA2; (-) strand; PAM type: YTN; PAM sequence: TTA
taaactaagtgaattatcac

SEQ ID NO: 254945 - DNA, 20 bp, Artificial Sequence
  Description of Artificial Sequence: Synthetic oligonucleotide
  Target: LAMA2; (-) strand; PAM type: YTN; PAM sequence: TTT
ataaactaagtgaattatca

SEQ ID NO: 254946 - DNA, 20 bp, Artificial Sequence
  Description of Artificial Sequence: Synthetic oligonucleotide
  Target: LAMA2; (-) strand; PAM type: YTN; PAM sequence: CTA
ggatttataaactaagtgaa

SEQ ID NO: 254947 - DNA, 20 bp, Artificial Sequence
  Description of Artificial Sequence: Synthetic oligonucleotide
  Target: LAMA2; (-) strand; PAM type: YTN; PAM sequence: TTC
taggatttataaactaagtg

SEQ ID NO: 254948 - DNA, 20 bp, Artificial Sequence
  Description of Artificial Sequence: Synthetic oligonucleotide
  Target: LAMA2; (-) strand; PAM type: YTN; PAM sequence: CTT
ctaggatttataaactaagt

SEQ ID NO: 254949 - DNA, 20 bp, Artificial Sequence
  Description of Artificial Sequence: Synthetic oligonucleotide
  Target: LAMA2; (-) strand; PAM type: YTN; PAM sequence: CTC
acaaaacttctaggatttat

SEQ ID NO: 254950 - DNA, 20 bp, Artificial Sequence
  Description of Artificial Sequence: Synthetic oligonucleotide
  Target: LAMA2; (-) strand; PAM type: YTN; PAM sequence: CTC
tcacaaaacttctaggattt

SEQ ID NO: 254951 - DNA, 20 bp, Artificial Sequence
  Description of Artificial Sequence: Synthetic oligonucleotide
  Target: LAMA2; (-) strand; PAM type: YTN; PAM sequence: TTA
taaccctctcacaaaacttc

SEQ ID NO: 254952 - DNA, 20 bp, Artificial Sequence
  Description of Artificial Sequence: Synthetic oligonucleotide
  Target: LAMA2; (-) strand; PAM type: YTN; PAM sequence: TTA
aatgtaaaagacattataac

SEQ ID NO: 254953 - DNA, 20 bp, Artificial Sequence
  Description of Artificial Sequence: Synthetic oligonucleotide
  Target: LAMA2; (-) strand; PAM type: YTN; PAM sequence: TTT
aaatgtaaaagacattataa

SEQ ID NO: 254954 - DNA, 20 bp, Artificial Sequence
  Description of Artificial Sequence: Synthetic oligonucleotide
  Target: LAMA2; (-) strand; PAM type: YTN; PAM sequence: TTT
taaatgtaaaagacattata

SEQ ID NO: 254955 - DNA, 20 bp, Artificial Sequence
  Description of Artificial Sequence: Synthetic oligonucleotide
  Target: LAMA2; (-) strand; PAM type: YTN; PAM sequence: TTG
ttttaaatgtaaaagacatt

SEQ ID NO: 254956 - DNA, 20 bp, Artificial Sequence
  Description of Artificial Sequence: Synthetic oligonucleotide
  Target: LAMA2; (-) strand; PAM type: YTN; PAM sequence: TTA
aatgtaaaattgttttaaat

SEQ ID NO: 254957 - DNA, 20 bp, Artificial Sequence
  Description of Artificial Sequence: Synthetic oligonucleotide
  Target: LAMA2; (-) strand; PAM type: YTN; PAM sequence: TTT
aaatgtaaaattgttttaaa

SEQ ID NO: 254958 - DNA, 20 bp, Artificial Sequence
  Description of Artificial Sequence: Synthetic oligonucleotide
  Target: LAMA2; (-) strand; PAM type: YTN; PAM sequence: TTT
taaatgtaaaattgttttaa

SEQ ID NO: 254959 - DNA, 20 bp, Artificial Sequence
  Description of Artificial Sequence: Synthetic oligonucleotide
  Target: LAMA2; (-) strand; PAM type: YTN; PAM sequence: TTG
ttttaaatgtaaaattgttt

SEQ ID NO: 254960 - DNA, 20 bp, Artificial Sequence
  Description of Artificial Sequence: Synthetic oligonucleotide
  Target: LAMA2; (-) strand; PAM type: YTN; PAM sequence: TTA
aatgtaaaattgttttaaat

SEQ ID NO: 254961 - DNA, 20 bp, Artificial Sequence
  Description of Artificial Sequence: Synthetic oligonucleotide
  Target: LAMA2; (-) strand; PAM type: YTN; PAM sequence: TTT
aaatgtaaaattgttttaaa

SEQ ID NO: 254962 - DNA, 20 bp, Artificial Sequence
  Description of Artificial Sequence: Synthetic oligonucleotide
  Target: LAMA2; (-) strand; PAM type: YTN; PAM sequence: TTT
taaatgtaaaattgttttaa

SEQ ID NO: 254963 - DNA, 20 bp, Artificial Sequence
  Description of Artificial Sequence: Synthetic oligonucleotide
  Target: LAMA2; (-) strand; PAM type: YTN; PAM sequence: TTG
ttttaaatgtaaaattgttt

SEQ ID NO: 254964 - DNA, 20 bp, Artificial Sequence
  Description of Artificial Sequence: Synthetic oligonucleotide
  Target: LAMA2; (-) strand; PAM type: YTN; PAM sequence: CTA
gttgttttaaatgtaaaatt

SEQ ID NO: 254965 - DNA, 20 bp, Artificial Sequence
  Description of Artificial Sequence: Synthetic oligonucleotide
  Target: LAMA2; (-) strand; PAM type: YTN; PAM sequence: TTC
tagttgttttaaatgtaaaa

SEQ ID NO: 254966 - DNA, 20 bp, Artificial Sequence
  Description of Artificial Sequence: Synthetic oligonucleotide
  Target: LAMA2; (-) strand; PAM type: YTN; PAM sequence: TTT
ctagttgttttaaatgtaaa

SEQ ID NO: 254967 - DNA, 20 bp, Artificial Sequence
  Description of Artificial Sequence: Synthetic oligonucleotide
  Target: LAMA2; (-) strand; PAM type: YTN; PAM sequence: TTT
tctagttgttttaaatgtaa

SEQ ID NO: 254968 - DNA, 20 bp, Artificial Sequence
  Description of Artificial Sequence: Synthetic oligonucleotide
  Target: LAMA2; (-) strand; PAM type: YTN; PAM sequence: CTA
aaccatgataattttctagt

SEQ ID NO: 254969 - DNA, 20 bp, Artificial Sequence
  Description of Artificial Sequence: Synthetic oligonucleotide
  Target: LAMA2; (-) strand; PAM type: YTN; PAM sequence: TTG
tgcaactaaaccatgataat

SEQ ID NO: 254970 - DNA, 20 bp, Artificial Sequence
  Description of Artificial Sequence: Synthetic oligonucleotide
  Target: LAMA2; (-) strand; PAM type: YTN; PAM sequence: CTC
atcacagttgtgcaactaaa

SEQ ID NO: 254971 - DNA, 20 bp, Artificial Sequence
  Description of Artificial Sequence: Synthetic oligonucleotide
  Target: LAMA2; (-) strand; PAM type: YTN; PAM sequence: TTC
tcatcacagttgtgcaacta

SEQ ID NO: 254972 - DNA, 20 bp, Artificial Sequence
  Description of Artificial Sequence: Synthetic oligonucleotide
  Target: LAMA2; (-) strand; PAM type: YTN; PAM sequence: TTT
ctcatcacagttgtgcaact

SEQ ID NO: 254973 - DNA, 20 bp, Artificial Sequence
  Description of Artificial Sequence: Synthetic oligonucleotide
  Target: LAMA2; (-) strand; PAM type: YTN; PAM sequence: TTT
tctcatcacagttgtgcaac

SEQ ID NO: 254974 - DNA, 20 bp, Artificial Sequence
  Description of Artificial Sequence: Synthetic oligonucleotide
  Target: LAMA2; (-) strand; PAM type: YTN; PAM sequence: TTT
ttctcatcacagttgtgcaa

SEQ ID NO: 254975 - DNA, 20 bp, Artificial Sequence
  Description of Artificial Sequence: Synthetic oligonucleotide
  Target: LAMA2; (-) strand; PAM type: YTN; PAM sequence: TTA
gatgaaaatggatttttctc

SEQ ID NO: 254976 - DNA, 20 bp, Artificial Sequence
  Description of Artificial Sequence: Synthetic oligonucleotide
  Target: LAMA2; (-) strand; PAM type: YTN; PAM sequence: TTG
ttagatgaaaatggattttt

SEQ ID NO: 254977 - DNA, 20 bp, Artificial Sequence
  Description of Artificial Sequence: Synthetic oligonucleotide
  Target: LAMA2; (-) strand; PAM type: YTN; PAM sequence: TTC
aggttgttagatgaaaatgg

SEQ ID NO: 254978 - DNA, 20 bp, Artificial Sequence
  Description of Artificial Sequence: Synthetic oligonucleotide
  Target: LAMA2; (-) strand; PAM type: YTN; PAM sequence: TTT
caggttgttagatgaaaatg

SEQ ID NO: 254979 - DNA, 20 bp, Artificial Sequence
  Description of Artificial Sequence: Synthetic oligonucleotide
  Target: LAMA2; (-) strand; PAM type: YTN; PAM sequence: TTA
aacatttcaggttgttagat

SEQ ID NO: 254980 - DNA, 20 bp, Artificial Sequence
  Description of Artificial Sequence: Synthetic oligonucleotide
  Target: LAMA2; (-) strand; PAM type: YTN; PAM sequence: TTT
aaacatttcaggttgttaga

SEQ ID NO: 254981 - DNA, 20 bp, Artificial Sequence
  Description of Artificial Sequence: Synthetic oligonucleotide
  Target: LAMA2; (-) strand; PAM type: YTN; PAM sequence: TTT
taaacatttcaggttgttag

SEQ ID NO: 254982 - DNA, 20 bp, Artificial Sequence
  Description of Artificial Sequence: Synthetic oligonucleotide
  Target: LAMA2; (-) strand; PAM type: YTN; PAM sequence: TTT
ttaaacatttcaggttgtta

SEQ ID NO: 254983 - DNA, 20 bp, Artificial Sequence
  Description of Artificial Sequence: Synthetic oligonucleotide
  Target: LAMA2; (-) strand; PAM type: YTN; PAM sequence: TTT
tttaaacatttcaggttgtt

SEQ ID NO: 254984 - DNA, 20 bp, Artificial Sequence
  Description of Artificial Sequence: Synthetic oligonucleotide
  Target: LAMA2; (-) strand; PAM type: YTN; PAM sequence: TTT
ttttaaacatttcaggttgt

SEQ ID NO: 254985 - DNA, 20 bp, Artificial Sequence
  Description of Artificial Sequence: Synthetic oligonucleotide
  Target: LAMA2; (-) strand; PAM type: YTN; PAM sequence: TTT
tttttaaacatttcaggttg

SEQ ID NO: 254986 - DNA, 20 bp, Artificial Sequence
  Description of Artificial Sequence: Synthetic oligonucleotide
  Target: LAMA2; (-) strand; PAM type: YTN; PAM sequence: TTT
ttttttaaacatttcaggtt

SEQ ID NO: 254987 - DNA, 20 bp, Artificial Sequence
  Description of Artificial Sequence: Synthetic oligonucleotide
  Target: LAMA2; (-) strand; PAM type: YTN; PAM sequence: TTT
tttttttaaacatttcaggt

SEQ ID NO: 254988 - DNA, 20 bp, Artificial Sequence
  Description of Artificial Sequence: Synthetic oligonucleotide
  Target: LAMA2; (-) strand; PAM type: YTN; PAM sequence: TTA
gtgattttttttttaaacat

SEQ ID NO: 254989 - DNA, 20 bp, Artificial Sequence
  Description of Artificial Sequence: Synthetic oligonucleotide
  Target: LAMA2; (-) strand; PAM type: YTN; PAM sequence: TTT
agtgattttttttttaaaca

SEQ ID NO: 254990 - DNA, 20 bp, Artificial Sequence
  Description of Artificial Sequence: Synthetic oligonucleotide
  Target: LAMA2; (-) strand; PAM type: YTN; PAM sequence: TTG
tttagtgattttttttttaa

SEQ ID NO: 254991 - DNA, 20 bp, Artificial Sequence
  Description of Artificial Sequence: Synthetic oligonucleotide
  Target: LAMA2; (-) strand; PAM type: YTN; PAM sequence: CTT
gtttagtgatttttttttta

SEQ ID NO: 254992 - DNA, 20 bp, Artificial Sequence
  Description of Artificial Sequence: Synthetic oligonucleotide
  Target: LAMA2; (-) strand; PAM type: YTN; PAM sequence: TTA
agtgtcttgtttagtgattt

SEQ ID NO: 254993 - DNA, 20 bp, Artificial Sequence
  Description of Artificial Sequence: Synthetic oligonucleotide
  Target: LAMA2; (-) strand; PAM type: YTN; PAM sequence: CTA
ggtcattaagtgtcttgttt

SEQ ID NO: 254994 - DNA, 20 bp, Artificial Sequence
  Description of Artificial Sequence: Synthetic oligonucleotide
  Target: LAMA2; (-) strand; PAM type: YTN; PAM sequence: TTC
cctaggtcattaagtgtctt

SEQ ID NO: 254995 - DNA, 20 bp, Artificial Sequence
  Description of Artificial Sequence: Synthetic oligonucleotide
  Target: LAMA2; (-) strand; PAM type: YTN; PAM sequence: TTT
ccctaggtcattaagtgtct

SEQ ID NO: 254996 - DNA, 20 bp, Artificial Sequence
  Description of Artificial Sequence: Synthetic oligonucleotide
  Target: LAMA2; (-) strand; PAM type: YTN; PAM sequence: TTA
aaaaggatagtttccctagg

SEQ ID NO: 254997 - DNA, 20 bp, Artificial Sequence
  Description of Artificial Sequence: Synthetic oligonucleotide
  Target: LAMA2; (-) strand; PAM type: YTN; PAM sequence: TTT
aaaaaggatagtttccctag

SEQ ID NO: 254998 - DNA, 20 bp, Artificial Sequence
  Description of Artificial Sequence: Synthetic oligonucleotide
  Target: LAMA2; (-) strand; PAM type: YTN; PAM sequence: TTT
taaaaaggatagtttcccta

SEQ ID NO: 254999 - DNA, 20 bp, Artificial Sequence
  Description of Artificial Sequence: Synthetic oligonucleotide
  Target: LAMA2; (-) strand; PAM type: YTN; PAM sequence: TTT
ttaaaaaggatagtttccct

SEQ ID NO: 255000 - DNA, 20 bp, Artificial Sequence
  Description of Artificial Sequence: Synthetic oligonucleotide
  Target: LAMA2; (-) strand; PAM type: YTN; PAM sequence: TTA
taaaatatttttaaaaagga

SEQ ID NO: 255001 - DNA, 20 bp, Artificial Sequence
  Description of Artificial Sequence: Synthetic oligonucleotide
  Target: LAMA2; (-) strand; PAM type: YTN; PAM sequence: TTT
ataaaatatttttaaaaagg

SEQ ID NO: 255002 - DNA, 20 bp, Artificial Sequence
  Description of Artificial Sequence: Synthetic oligonucleotide
  Target: LAMA2; (-) strand; PAM type: YTN; PAM sequence: TTT
tataaaatatttttaaaaag

SEQ ID NO: 255003 - DNA, 20 bp, Artificial Sequence
  Description of Artificial Sequence: Synthetic oligonucleotide
  Target: LAMA2; (-) strand; PAM type: YTN; PAM sequence: TTT
ttataaaatatttttaaaaa

SEQ ID NO: 255004 - DNA, 20 bp, Artificial Sequence
  Description of Artificial Sequence: Synthetic oligonucleotide
  Target: LAMA2; (-) strand; PAM type: YTN; PAM sequence: TTT
tttataaaatatttttaaaa

SEQ ID NO: 255005 - DNA, 20 bp, Artificial Sequence
  Description of Artificial Sequence: Synthetic oligonucleotide
  Target: LAMA2; (-) strand; PAM type: YTN; PAM sequence: TTA
taacagtaatgttttttata

SEQ ID NO: 255006 - DNA, 20 bp, Artificial Sequence
  Description of Artificial Sequence: Synthetic oligonucleotide
  Target: LAMA2; (-) strand; PAM type: YTN; PAM sequence: CTC
acattataacagtaatgttt

SEQ ID NO: 255007 - DNA, 20 bp, Artificial Sequence
  Description of Artificial Sequence: Synthetic oligonucleotide
  Target: LAMA2; (-) strand; PAM type: YTN; PAM sequence: CTA
gctcacattataacagtaat

SEQ ID NO: 255008 - DNA, 20 bp, Artificial Sequence
  Description of Artificial Sequence: Synthetic oligonucleotide
  Target: LAMA2; (-) strand; PAM type: YTN; PAM sequence: TTC
tagctcacattataacagta

SEQ ID NO: 255009 - DNA, 20 bp, Artificial Sequence
  Description of Artificial Sequence: Synthetic oligonucleotide
  Target: LAMA2; (-) strand; PAM type: YTN; PAM sequence: TTT
ctagctcacattataacagt

SEQ ID NO: 255010 - DNA, 20 bp, Artificial Sequence
  Description of Artificial Sequence: Synthetic oligonucleotide
  Target: LAMA2; (-) strand; PAM type: YTN; PAM sequence: CTC
agagtttctagctcacatta

SEQ ID NO: 255011 - DNA, 20 bp, Artificial Sequence
  Description of Artificial Sequence: Synthetic oligonucleotide
  Target: LAMA2; (-) strand; PAM type: YTN; PAM sequence: TTC
atatctcagagtttctagct

SEQ ID NO: 255012 - DNA, 20 bp, Artificial Sequence
  Description of Artificial Sequence: Synthetic oligonucleotide
  Target: LAMA2; (-) strand; PAM type: YTN; PAM sequence: TTC
aattcatatctcagagtttc

SEQ ID NO: 255013 - DNA, 20 bp, Artificial Sequence
  Description of Artificial Sequence: Synthetic oligonucleotide
  Target: LAMA2; (-) strand; PAM type: YTN; PAM sequence: TTG
tatgcaaatattcaattcat

SEQ ID NO: 255014 - DNA, 20 bp, Artificial Sequence
  Description of Artificial Sequence: Synthetic oligonucleotide
  Target: LAMA2; (-) strand; PAM type: YTN; PAM sequence: TTC
aggattgtatgcaaatattc

SEQ ID NO: 255015 - DNA, 20 bp, Artificial Sequence
  Description of Artificial Sequence: Synthetic oligonucleotide
  Target: LAMA2; (-) strand; PAM type: YTN; PAM sequence: CTT
caggattgtatgcaaatatt

SEQ ID NO: 255016 - DNA, 20 bp, Artificial Sequence
  Description of Artificial Sequence: Synthetic oligonucleotide
  Target: LAMA2; (-) strand; PAM type: YTN; PAM sequence: CTC
gtcttcaggattgtatgcaa

SEQ ID NO: 255017 - DNA, 20 bp, Artificial Sequence
  Description of Artificial Sequence: Synthetic oligonucleotide
  Target: LAMA2; (-) strand; PAM type: YTN; PAM sequence: TTA
aaatctcgtcttcaggattg

SEQ ID NO: 255018 - DNA, 20 bp, Artificial Sequence
  Description of Artificial Sequence: Synthetic oligonucleotide
  Target: LAMA2; (-) strand; PAM type: YTN; PAM sequence: CTG
tggaaattaaaatctcgtct

SEQ ID NO: 255019 - DNA, 20 bp, Artificial Sequence
  Description of Artificial Sequence: Synthetic oligonucleotide
  Target: LAMA2; (-) strand; PAM type: YTN; PAM sequence: CTG
aataacctgtggaaattaaa

SEQ ID NO: 255020 - DNA, 20 bp, Artificial Sequence
  Description of Artificial Sequence: Synthetic oligonucleotide
  Target: LAMA2; (-) strand; PAM type: YTN; PAM sequence: CTC
tgaataacctgtggaaatta

SEQ ID NO: 255021 - DNA, 20 bp, Artificial Sequence
  Description of Artificial Sequence: Synthetic oligonucleotide
  Target: LAMA2; (-) strand; PAM type: YTN; PAM sequence: TTC
tctgaataacctgtggaaat

SEQ ID NO: 255022 - DNA, 20 bp, Artificial Sequence
  Description of Artificial Sequence: Synthetic oligonucleotide
  Target: LAMA2; (-) strand; PAM type: YTN; PAM sequence: TTT
ctctgaataacctgtggaaa

SEQ ID NO: 255023 - DNA, 20 bp, Artificial Sequence
  Description of Artificial Sequence: Synthetic oligonucleotide
  Target: LAMA2; (-) strand; PAM type: YTN; PAM sequence: TTT
tctctgaataacctgtggaa

SEQ ID NO: 255024 - DNA, 20 bp, Artificial Sequence
  Description of Artificial Sequence: Synthetic oligonucleotide
  Target: LAMA2; (-) strand; PAM type: YTN; PAM sequence: TTT
ttctctgaataacctgtgga

SEQ ID NO: 255025 - DNA, 20 bp, Artificial Sequence
  Description of Artificial Sequence: Synthetic oligonucleotide
  Target: LAMA2; (-) strand; PAM type: YTN; PAM sequence: TTT
tttctctgaataacctgtgg

SEQ ID NO: 255026 - DNA, 20 bp, Artificial Sequence
  Description of Artificial Sequence: Synthetic oligonucleotide
  Target: LAMA2; (-) strand; PAM type: YTN; PAM sequence: TTT
ttttctctgaataacctgtg

SEQ ID NO: 255027 - DNA, 20 bp, Artificial Sequence
  Description of Artificial Sequence: Synthetic oligonucleotide
  Target: LAMA2; (-) strand; PAM type: YTN; PAM sequence: TTT
tttttctctgaataacctgt

SEQ ID NO: 255028 - DNA, 20 bp, Artificial Sequence
  Description of Artificial Sequence: Synthetic oligonucleotide
  Target: LAMA2; (-) strand; PAM type: YTN; PAM sequence: TTT
ttttttctctgaataacctg

SEQ ID NO: 255029 - DNA, 20 bp, Artificial Sequence
  Description of Artificial Sequence: Synthetic oligonucleotide
  Target: LAMA2; (-) strand; PAM type: YTN; PAM sequence: TTT
tttttttctctgaataacct

SEQ ID NO: 255030 - DNA, 20 bp, Artificial Sequence
  Description of Artificial Sequence: Synthetic oligonucleotide
  Target: LAMA2; (-) strand; PAM type: YTN; PAM sequence: TTT
ttttttttctctgaataacc

SEQ ID NO: 255031 - DNA, 20 bp, Artificial Sequence
  Description of Artificial Sequence: Synthetic oligonucleotide
  Target: LAMA2; (-) strand; PAM type: YTN; PAM sequence: CTT
tttttttttctctgaataac

SEQ ID NO: 255032 - DNA, 20 bp, Artificial Sequence
  Description of Artificial Sequence: Synthetic oligonucleotide
  Target: LAMA2; (-) strand; PAM type: YTN; PAM sequence: CTC
cctttttttttttctctgaa

SEQ ID NO: 255033 - DNA, 20 bp, Artificial Sequence
  Description of Artificial Sequence: Synthetic oligonucleotide
  Target: LAMA2; (-) strand; PAM type: YTN; PAM sequence: TTA
gctccctttttttttttctc

SEQ ID NO: 255034 - DNA, 20 bp, Artificial Sequence
  Description of Artificial Sequence: Synthetic oligonucleotide
  Target: LAMA2; (-) strand; PAM type: YTN; PAM sequence: TTT
agctccctttttttttttct

SEQ ID NO: 255035 - DNA, 20 bp, Artificial Sequence
  Description of Artificial Sequence: Synthetic oligonucleotide
  Target: LAMA2; (-) strand; PAM type: YTN; PAM sequence: CTT
tagctccctttttttttttc

SEQ ID NO: 255036 - DNA, 20 bp, Artificial Sequence
  Description of Artificial Sequence: Synthetic oligonucleotide
  Target: LAMA2; (-) strand; PAM type: YTN; PAM sequence: TTG
cgtcaacctttagctccctt

SEQ ID NO: 255037 - DNA, 20 bp, Artificial Sequence
  Description of Artificial Sequence: Synthetic oligonucleotide
  Target: LAMA2; (-) strand; PAM type: YTN; PAM sequence: TTC
ccatgaaggttgcgtcaacc

SEQ ID NO: 255038 - DNA, 20 bp, Artificial Sequence
  Description of Artificial Sequence: Synthetic oligonucleotide
  Target: LAMA2; (-) strand; PAM type: YTN; PAM sequence: CTT
cccatgaaggttgcgtcaac

SEQ ID NO: 255039 - DNA, 20 bp, Artificial Sequence
  Description of Artificial Sequence: Synthetic oligonucleotide
  Target: LAMA2; (-) strand; PAM type: YTN; PAM sequence: TTA
gacttcccatgaaggttgcg

SEQ ID NO: 255040 - DNA, 20 bp, Artificial Sequence
  Description of Artificial Sequence: Synthetic oligonucleotide
  Target: LAMA2; (-) strand; PAM type: YTN; PAM sequence: TTT
agacttcccatgaaggttgc

SEQ ID NO: 255041 - DNA, 20 bp, Artificial Sequence
  Description of Artificial Sequence: Synthetic oligonucleotide
  Target: LAMA2; (-) strand; PAM type: YTN; PAM sequence: CTT
tagacttcccatgaaggttg

SEQ ID NO: 255042 - DNA, 20 bp, Artificial Sequence
  Description of Artificial Sequence: Synthetic oligonucleotide
  Target: LAMA2; (-) strand; PAM type: YTN; PAM sequence: CTA
agctttagacttcccatgaa

SEQ ID NO: 255043 - DNA, 20 bp, Artificial Sequence
  Description of Artificial Sequence: Synthetic oligonucleotide
  Target: LAMA2; (-) strand; PAM type: YTN; PAM sequence: CTA
tcactaagctttagacttcc

SEQ ID NO: 255044 - DNA, 20 bp, Artificial Sequence
  Description of Artificial Sequence: Synthetic oligonucleotide
  Target: LAMA2; (-) strand; PAM type: YTN; PAM sequence: TTA
aatagataaatcaccaaggt

SEQ ID NO: 255045 - DNA, 20 bp, Artificial Sequence
  Description of Artificial Sequence: Synthetic oligonucleotide
  Target: LAMA2; (-) strand; PAM type: YTN; PAM sequence: TTA
tgaccagggattaaatagat

SEQ ID NO: 255046 - DNA, 20 bp, Artificial Sequence
  Description of Artificial Sequence: Synthetic oligonucleotide
  Target: LAMA2; (-) strand; PAM type: YTN; PAM sequence: TTT
atgaccagggattaaataga

SEQ ID NO: 255047 - DNA, 20 bp, Artificial Sequence
  Description of Artificial Sequence: Synthetic oligonucleotide
  Target: LAMA2; (-) strand; PAM type: YTN; PAM sequence: CTA
taagatttatgaccagggat

SEQ ID NO: 255048 - DNA, 20 bp, Artificial Sequence
  Description of Artificial Sequence: Synthetic oligonucleotide
  Target: LAMA2; (-) strand; PAM type: YTN; PAM sequence: TTG
tgatctataagatttatgac

SEQ ID NO: 255049 - DNA, 20 bp, Artificial Sequence
  Description of Artificial Sequence: Synthetic oligonucleotide
  Target: LAMA2; (-) strand; PAM type: YTN; PAM sequence: CTT
gtgatctataagatttatga

SEQ ID NO: 255050 - DNA, 20 bp, Artificial Sequence
  Description of Artificial Sequence: Synthetic oligonucleotide
  Target: LAMA2; (-) strand; PAM type: YTN; PAM sequence: TTG
gagccaaaatgcttgtgatc

SEQ ID NO: 255051 - DNA, 20 bp, Artificial Sequence
  Description of Artificial Sequence: Synthetic oligonucleotide
  Target: LAMA2; (-) strand; PAM type: YTN; PAM sequence: TTT
ggagccaaaatgcttgtgat

SEQ ID NO: 255052 - DNA, 20 bp, Artificial Sequence
  Description of Artificial Sequence: Synthetic oligonucleotide
  Target: LAMA2; (-) strand; PAM type: YTN; PAM sequence: CTA
agaaatttggagccaaaatg

SEQ ID NO: 255053 - DNA, 20 bp, Artificial Sequence
  Description of Artificial Sequence: Synthetic oligonucleotide
  Target: LAMA2; (-) strand; PAM type: YTN; PAM sequence: TTA
tctaagaaatttggagccaa

SEQ ID NO: 255054 - DNA, 20 bp, Artificial Sequence
  Description of Artificial Sequence: Synthetic oligonucleotide
  Target: LAMA2; (-) strand; PAM type: YTN; PAM sequence: TTA
gcaatattatctaagaaatt

SEQ ID NO: 255055 - DNA, 20 bp, Artificial Sequence
  Description of Artificial Sequence: Synthetic oligonucleotide
  Target: LAMA2; (-) strand; PAM type: YTN; PAM sequence: TTT
agcaatattatctaagaaat

SEQ ID NO: 255056 - DNA, 20 bp, Artificial Sequence
  Description of Artificial Sequence: Synthetic oligonucleotide
  Target: LAMA2; (-) strand; PAM type: YTN; PAM sequence: TTA
tttagcaatattatctaaga

SEQ ID NO: 255057 - DNA, 20 bp, Artificial Sequence
  Description of Artificial Sequence: Synthetic oligonucleotide
  Target: LAMA2; (-) strand; PAM type: YTN; PAM sequence: TTT
atttagcaatattatctaag

SEQ ID NO: 255058 - DNA, 20 bp, Artificial Sequence
  Description of Artificial Sequence: Synthetic oligonucleotide
  Target: LAMA2; (-) strand; PAM type: YTN; PAM sequence: TTG
atttatttagcaatattatc

SEQ ID NO: 255059 - DNA, 20 bp, Artificial Sequence
  Description of Artificial Sequence: Synthetic oligonucleotide
  Target: LAMA2; (-) strand; PAM type: YTN; PAM sequence: TTT
gatttatttagcaatattat

SEQ ID NO: 255060 - DNA, 20 bp, Artificial Sequence
  Description of Artificial Sequence: Synthetic oligonucleotide
  Target: LAMA2; (-) strand; PAM type: YTN; PAM sequence: TTA
catatttgatttatttagca

SEQ ID NO: 255061 - DNA, 20 bp, Artificial Sequence
  Description of Artificial Sequence: Synthetic oligonucleotide
  Target: LAMA2; (-) strand; PAM type: YTN; PAM sequence: CTT
acatatttgatttatttagc

SEQ ID NO: 255062 - DNA, 20 bp, Artificial Sequence
  Description of Artificial Sequence: Synthetic oligonucleotide
  Target: LAMA2; (-) strand; PAM type: YTN; PAM sequence: TTC
ttacatatttgatttattta

SEQ ID NO: 255063 - DNA, 20 bp, Artificial Sequence
  Description of Artificial Sequence: Synthetic oligonucleotide
  Target: LAMA2; (-) strand; PAM type: YTN; PAM sequence: CTT
cttacatatttgatttattt

SEQ ID NO: 255064 - DNA, 20 bp, Artificial Sequence
  Description of Artificial Sequence: Synthetic oligonucleotide
  Target: LAMA2; (-) strand; PAM type: YTN; PAM sequence: CTA
tcttcttacatatttgattt

SEQ ID NO: 255065 - DNA, 20 bp, Artificial Sequence
  Description of Artificial Sequence: Synthetic oligonucleotide
  Target: LAMA2; (-) strand; PAM type: YTN; PAM sequence: CTC
tatcttcttacatatttgat

SEQ ID NO: 255066 - DNA, 20 bp, Artificial Sequence
  Description of Artificial Sequence: Synthetic oligonucleotide
  Target: LAMA2; (-) strand; PAM type: YTN; PAM sequence: CTA
tctctatcttcttacatatt

SEQ ID NO: 255067 - DNA, 20 bp, Artificial Sequence
  Description of Artificial Sequence: Synthetic oligonucleotide
  Target: LAMA2; (-) strand; PAM type: YTN; PAM sequence: TTA
taccaatctatctctatctt

SEQ ID NO: 255068 - DNA, 20 bp, Artificial Sequence
  Description of Artificial Sequence: Synthetic oligonucleotide
  Target: LAMA2; (-) strand; PAM type: YTN; PAM sequence: TTC
atacatcataataattatac

SEQ ID NO: 255069 - DNA, 20 bp, Artificial Sequence
  Description of Artificial Sequence: Synthetic oligonucleotide
  Target: LAMA2; (-) strand; PAM type: YTN; PAM sequence: CTG
tattcatacatcataataat

SEQ ID NO: 255070 - DNA, 20 bp, Artificial Sequence
  Description of Artificial Sequence: Synthetic oligonucleotide
  Target: LAMA2; (-) strand; PAM type: YTN; PAM sequence: CTC
tgtattcatacatcataata

SEQ ID NO: 255071 - DNA, 20 bp, Artificial Sequence
  Description of Artificial Sequence: Synthetic oligonucleotide
  Target: LAMA2; (-) strand; PAM type: YTN; PAM sequence: TTC
tctgtattcatacatcataa

SEQ ID NO: 255072 - DNA, 20 bp, Artificial Sequence
  Description of Artificial Sequence: Synthetic oligonucleotide
  Target: LAMA2; (-) strand; PAM type: YTN; PAM sequence: CTT
ctctgtattcatacatcata

SEQ ID NO: 255073 - DNA, 20 bp, Artificial Sequence
  Description of Artificial Sequence: Synthetic oligonucleotide
  Target: LAMA2; (-) strand; PAM type: YTN; PAM sequence: TTA
tatgcttctctgtattcata

SEQ ID NO: 255074 - DNA, 20 bp, Artificial Sequence
  Description of Artificial Sequence: Synthetic oligonucleotide
  Target: LAMA2; (-) strand; PAM type: YTN; PAM sequence: TTA
aatattatatgcttctctgt

SEQ ID NO: 255075 - DNA, 20 bp, Artificial Sequence
  Description of Artificial Sequence: Synthetic oligonucleotide
  Target: LAMA2; (-) strand; PAM type: YTN; PAM sequence: TTT
aaatattatatgcttctctg

SEQ ID NO: 255076 - DNA, 20 bp, Artificial Sequence
  Description of Artificial Sequence: Synthetic oligonucleotide
  Target: LAMA2; (-) strand; PAM type: YTN; PAM sequence: TTG
atatatatgtataatttaaa

SEQ ID NO: 255077 - DNA, 20 bp, Artificial Sequence
  Description of Artificial Sequence: Synthetic oligonucleotide
  Target: LAMA2; (-) strand; PAM type: YTN; PAM sequence: TTG
atgaagttgatatatatgta

SEQ ID NO: 255078 - DNA, 20 bp, Artificial Sequence
  Description of Artificial Sequence: Synthetic oligonucleotide
  Target: LAMA2; (-) strand; PAM type: YTN; PAM sequence: CTA
gaatatatacatcaacaaga

SEQ ID NO: 255079 - DNA, 20 bp, Artificial Sequence
  Description of Artificial Sequence: Synthetic oligonucleotide
  Target: LAMA2; (-) strand; PAM type: YTN; PAM sequence: CTA
tagctagaatatatacatca

SEQ ID NO: 255080 - DNA, 20 bp, Artificial Sequence
  Description of Artificial Sequence: Synthetic oligonucleotide
  Target: LAMA2; (-) strand; PAM type: YTN; PAM sequence: TTA
caacctatagctagaatata

SEQ ID NO: 255081 - DNA, 20 bp, Artificial Sequence
  Description of Artificial Sequence: Synthetic oligonucleotide
  Target: LAMA2; (-) strand; PAM type: YTN; PAM sequence: CTA
gttacaacctatagctagaa

SEQ ID NO: 255082 - DNA, 20 bp, Artificial Sequence
  Description of Artificial Sequence: Synthetic oligonucleotide
  Target: LAMA2; (-) strand; PAM type: YTN; PAM sequence: CTG
cctagttacaacctatagct

SEQ ID NO: 255083 - DNA, 20 bp, Artificial Sequence
  Description of Artificial Sequence: Synthetic oligonucleotide
  Target: LAMA2; (-) strand; PAM type: YTN; PAM sequence: TTA
ctgcctagttacaacctata

SEQ ID NO: 255084 - DNA, 20 bp, Artificial Sequence
  Description of Artificial Sequence: Synthetic oligonucleotide
  Target: LAMA2; (-) strand; PAM type: YTN; PAM sequence: TTT
actgcctagttacaacctat

SEQ ID NO: 255085 - DNA, 20 bp, Artificial Sequence
  Description of Artificial Sequence: Synthetic oligonucleotide
  Target: LAMA2; (-) strand; PAM type: YTN; PAM sequence: TTT
tactgcctagttacaaccta

SEQ ID NO: 255086 - DNA, 20 bp, Artificial Sequence
  Description of Artificial Sequence: Synthetic oligonucleotide
  Target: LAMA2; (-) strand; PAM type: YTN; PAM sequence: CTT
ttactgcctagttacaacct

SEQ ID NO: 255087 - DNA, 20 bp, Artificial Sequence
  Description of Artificial Sequence: Synthetic oligonucleotide
  Target: LAMA2; (-) strand; PAM type: YTN; PAM sequence: CTC
cagataacttttactgccta

SEQ ID NO: 255088 - DNA, 20 bp, Artificial Sequence
  Description of Artificial Sequence: Synthetic oligonucleotide
  Target: LAMA2; (-) strand; PAM type: YTN; PAM sequence: CTC
tccagataacttttactgcc

SEQ ID NO: 255089 - DNA, 20 bp, Artificial Sequence
  Description of Artificial Sequence: Synthetic oligonucleotide
  Target: LAMA2; (-) strand; PAM type: YTN; PAM sequence: TTC
tctccagataacttttactg

SEQ ID NO: 255090 - DNA, 20 bp, Artificial Sequence
  Description of Artificial Sequence: Synthetic oligonucleotide
  Target: LAMA2; (-) strand; PAM type: YTN; PAM sequence: CTT
ctctccagataacttttact

SEQ ID NO: 255091 - DNA, 20 bp, Artificial Sequence
  Description of Artificial Sequence: Synthetic oligonucleotide
  Target: LAMA2; (-) strand; PAM type: YTN; PAM sequence: TTG
cttctctccagataactttt

SEQ ID NO: 255092 - DNA, 20 bp, Artificial Sequence
  Description of Artificial Sequence: Synthetic oligonucleotide
  Target: LAMA2; (-) strand; PAM type: YTN; PAM sequence: TTT
gcttctctccagataacttt

SEQ ID NO: 255093 - DNA, 20 bp, Artificial Sequence
  Description of Artificial Sequence: Synthetic oligonucleotide
  Target: LAMA2; (-) strand; PAM type: YTN; PAM sequence: TTA
tttgcttctctccagataac

SEQ ID NO: 255094 - DNA, 20 bp, Artificial Sequence
  Description of Artificial Sequence: Synthetic oligonucleotide
  Target: LAMA2; (-) strand; PAM type: YTN; PAM sequence: TTG
ttatttgcttctctccagat

SEQ ID NO: 255095 - DNA, 20 bp, Artificial Sequence
  Description of Artificial Sequence: Synthetic oligonucleotide
  Target: LAMA2; (-) strand; PAM type: YTN; PAM sequence: TTA
cattgttatttgcttctctc

SEQ ID NO: 255096 - DNA, 20 bp, Artificial Sequence
  Description of Artificial Sequence: Synthetic oligonucleotide
  Target: LAMA2; (-) strand; PAM type: YTN; PAM sequence: TTC
gaaatagttacattgttatt

SEQ ID NO: 255097 - DNA, 20 bp, Artificial Sequence
  Description of Artificial Sequence: Synthetic oligonucleotide
  Target: LAMA2; (-) strand; PAM type: YTN; PAM sequence: TTA
aagaatataaacattcgaaa

SEQ ID NO: 255098 - DNA, 20 bp, Artificial Sequence
  Description of Artificial Sequence: Synthetic oligonucleotide
  Target: LAMA2; (-) strand; PAM type: YTN; PAM sequence: CTA
tgtgatgccagaaattaaag

SEQ ID NO: 255099 - DNA, 20 bp, Artificial Sequence
  Description of Artificial Sequence: Synthetic oligonucleotide
  Target: LAMA2; (-) strand; PAM type: YTN; PAM sequence: CTA
taagctatgtgatgccagaa

SEQ ID NO: 255100 - DNA, 20 bp, Artificial Sequence
  Description of Artificial Sequence: Synthetic oligonucleotide
  Target: LAMA2; (-) strand; PAM type: YTN; PAM sequence: TTA
acctataagctatgtgatgc

SEQ ID NO: 255101 - DNA, 20 bp, Artificial Sequence
  Description of Artificial Sequence: Synthetic oligonucleotide
  Target: LAMA2; (-) strand; PAM type: YTN; PAM sequence: TTT
aacctataagctatgtgatg

SEQ ID NO: 255102 - DNA, 20 bp, Artificial Sequence
  Description of Artificial Sequence: Synthetic oligonucleotide
  Target: LAMA2; (-) strand; PAM type: YTN; PAM sequence: TTA
tttaacctataagctatgtg

SEQ ID NO: 255103 - DNA, 20 bp, Artificial Sequence
  Description of Artificial Sequence: Synthetic oligonucleotide
  Target: LAMA2; (-) strand; PAM type: YTN; PAM sequence: TTT
atttaacctataagctatgt

SEQ ID NO: 255104 - DNA, 20 bp, Artificial Sequence
  Description of Artificial Sequence: Synthetic oligonucleotide
  Target: LAMA2; (-) strand; PAM type: YTN; PAM sequence: TTT
tatttaacctataagctatg

SEQ ID NO: 255105 - DNA, 20 bp, Artificial Sequence
  Description of Artificial Sequence: Synthetic oligonucleotide
  Target: LAMA2; (-) strand; PAM type: YTN; PAM sequence: TTC
atattttatttaacctataa

SEQ ID NO: 255106 - DNA, 20 bp, Artificial Sequence
  Description of Artificial Sequence: Synthetic oligonucleotide
  Target: LAMA2; (-) strand; PAM type: YTN; PAM sequence: TTT
catattttatttaacctata

SEQ ID NO: 255107 - DNA, 20 bp, Artificial Sequence
  Description of Artificial Sequence: Synthetic oligonucleotide
  Target: LAMA2; (-) strand; PAM type: YTN; PAM sequence: CTT
tcatattttatttaacctat

SEQ ID NO: 255108 - DNA, 20 bp, Artificial Sequence
  Description of Artificial Sequence: Synthetic oligonucleotide
  Target: LAMA2; (-) strand; PAM type: YTN; PAM sequence: CTC
tttcatattttatttaacct

SEQ ID NO: 255109 - DNA, 20 bp, Artificial Sequence
  Description of Artificial Sequence: Synthetic oligonucleotide
  Target: LAMA2; (-) strand; PAM type: YTN; PAM sequence: TTC
acatgtctctttcatatttt

SEQ ID NO: 255110 - DNA, 20 bp, Artificial Sequence
  Description of Artificial Sequence: Synthetic oligonucleotide
  Target: LAMA2; (-) strand; PAM type: YTN; PAM sequence: TTC
aaaggcagagattcacatgt

SEQ ID NO: 255111 - DNA, 20 bp, Artificial Sequence
  Description of Artificial Sequence: Synthetic oligonucleotide
  Target: LAMA2; (-) strand; PAM type: YTN; PAM sequence: CTA
agtattcaaaggcagagatt

SEQ ID NO: 255112 - DNA, 20 bp, Artificial Sequence
  Description of Artificial Sequence: Synthetic oligonucleotide
  Target: LAMA2; (-) strand; PAM type: YTN; PAM sequence: TTC
aaacacatcctaagtattca

SEQ ID NO: 255113 - DNA, 20 bp, Artificial Sequence
  Description of Artificial Sequence: Synthetic oligonucleotide
  Target: LAMA2; (-) strand; PAM type: YTN; PAM sequence: TTA
tatattcaaacacatcctaa

SEQ ID NO: 255114 - DNA, 20 bp, Artificial Sequence
  Description of Artificial Sequence: Synthetic oligonucleotide
  Target: LAMA2; (-) strand; PAM type: YTN; PAM sequence: TTC
aataatattatatattcaaa

SEQ ID NO: 255115 - DNA, 20 bp, Artificial Sequence
  Description of Artificial Sequence: Synthetic oligonucleotide
  Target: LAMA2; (-) strand; PAM type: YTN; PAM sequence: CTT
caataatattatatattcaa

SEQ ID NO: 255116 - DNA, 20 bp, Artificial Sequence
  Description of Artificial Sequence: Synthetic oligonucleotide
  Target: LAMA2; (-) strand; PAM type: YTN; PAM sequence: CTA
taacaacttcaataatatta

SEQ ID NO: 255117 - DNA, 20 bp, Artificial Sequence
  Description of Artificial Sequence: Synthetic oligonucleotide
  Target: LAMA2; (-) strand; PAM type: YTN; PAM sequence: CTG
atgaaaatctataacaactt

SEQ ID NO: 255118 - DNA, 20 bp, Artificial Sequence
  Description of Artificial Sequence: Synthetic oligonucleotide
  Target: LAMA2; (-) strand; PAM type: YTN; PAM sequence: TTA
tataactgatgaaaatctat

SEQ ID NO: 255119 - DNA, 20 bp, Artificial Sequence
  Description of Artificial Sequence: Synthetic oligonucleotide
  Target: LAMA2; (-) strand; PAM type: YTN; PAM sequence: TTA
ttatataactgatgaaaatc

SEQ ID NO: 255120 - DNA, 20 bp, Artificial Sequence
  Description of Artificial Sequence: Synthetic oligonucleotide
  Target: LAMA2; (-) strand; PAM type: YTN; PAM sequence: TTT
attatataactgatgaaaat

SEQ ID NO: 255121 - DNA, 20 bp, Artificial Sequence
  Description of Artificial Sequence: Synthetic oligonucleotide
  Target: LAMA2; (-) strand; PAM type: YTN; PAM sequence: TTT
tattatataactgatgaaaa

SEQ ID NO: 255122 - DNA, 20 bp, Artificial Sequence
  Description of Artificial Sequence: Synthetic oligonucleotide
  Target: LAMA2; (-) strand; PAM type: YTN; PAM sequence: TTG
tgccaataatatattttatt

SEQ ID NO: 255123 - DNA, 20 bp, Artificial Sequence
  Description of Artificial Sequence: Synthetic oligonucleotide
  Target: LAMA2; (-) strand; PAM type: YTN; PAM sequence: CTT
gtgccaataatatattttat

SEQ ID NO: 255124 - DNA, 20 bp, Artificial Sequence
  Description of Artificial Sequence: Synthetic oligonucleotide
  Target: LAMA2; (-) strand; PAM type: YTN; PAM sequence: CTG
tccagccttgtgccaataat

SEQ ID NO: 255125 - DNA, 20 bp, Artificial Sequence
  Description of Artificial Sequence: Synthetic oligonucleotide
  Target: LAMA2; (-) strand; PAM type: YTN; PAM sequence: CTC
tgtccagccttgtgccaata

SEQ ID NO: 255126 - DNA, 20 bp, Artificial Sequence
  Description of Artificial Sequence: Synthetic oligonucleotide
  Target: LAMA2; (-) strand; PAM type: YTN; PAM sequence: CTA
tctctgtccagccttgtgcc

SEQ ID NO: 255127 - DNA, 20 bp, Artificial Sequence
  Description of Artificial Sequence: Synthetic oligonucleotide
  Target: LAMA2; (-) strand; PAM type: YTN; PAM sequence: TTG
aggtcctatctctgtccagc

SEQ ID NO: 255128 - DNA, 20 bp, Artificial Sequence
  Description of Artificial Sequence: Synthetic oligonucleotide
  Target: LAMA2; (-) strand; PAM type: YTN; PAM sequence: TTA
ttgaggtcctatctctgtcc

SEQ ID NO: 255129 - DNA, 20 bp, Artificial Sequence
  Description of Artificial Sequence: Synthetic oligonucleotide
  Target: LAMA2; (-) strand; PAM type: YTN; PAM sequence: CTT
attgaggtcctatctctgtc

SEQ ID NO: 255130 - DNA, 20 bp, Artificial Sequence
  Description of Artificial Sequence: Synthetic oligonucleotide
  Target: LAMA2; (-) strand; PAM type: YTN; PAM sequence: TTA
gtagatagaacttattgagg

SEQ ID NO: 255131 - DNA, 20 bp, Artificial Sequence
  Description of Artificial Sequence: Synthetic oligonucleotide
  Target: LAMA2; (-) strand; PAM type: YTN; PAM sequence: TTA
cagtgatattagtagataga

SEQ ID NO: 255132 - DNA, 20 bp, Artificial Sequence
  Description of Artificial Sequence: Synthetic oligonucleotide
  Target: LAMA2; (-) strand; PAM type: YTN; PAM sequence: TTT
acagtgatattagtagatag

SEQ ID NO: 255133 - DNA, 20 bp, Artificial Sequence
  Description of Artificial Sequence: Synthetic oligonucleotide
  Target: LAMA2; (-) strand; PAM type: YTN; PAM sequence: CTG
acccacacaaaccagtagta

SEQ ID NO: 255134 - DNA, 20 bp, Artificial Sequence
  Description of Artificial Sequence: Synthetic oligonucleotide
  Target: LAMA2; (-) strand; PAM type: YTN; PAM sequence: TTC
ctgacccacacaaaccagta

SEQ ID NO: 255135 - DNA, 20 bp, Artificial Sequence
  Description of Artificial Sequence: Synthetic oligonucleotide
  Target: LAMA2; (-) strand; PAM type: YTN; PAM sequence: TTC
agcattcctgacccacacaa

SEQ ID NO: 255136 - DNA, 20 bp, Artificial Sequence
  Description of Artificial Sequence: Synthetic oligonucleotide
  Target: LAMA2; (-) strand; PAM type: YTN; PAM sequence: TTT
cagcattcctgacccacaca

SEQ ID NO: 255137 - DNA, 20 bp, Artificial Sequence
  Description of Artificial Sequence: Synthetic oligonucleotide
  Target: LAMA2; (-) strand; PAM type: YTN; PAM sequence: TTA
aatttcagcattcctgaccc

SEQ ID NO: 255138 - DNA, 20 bp, Artificial Sequence
  Description of Artificial Sequence: Synthetic oligonucleotide
  Target: LAMA2; (-) strand; PAM type: YTN; PAM sequence: CTT
aaatttcagcattcctgacc

SEQ ID NO: 255139 - DNA, 20 bp, Artificial Sequence
  Description of Artificial Sequence: Synthetic oligonucleotide
  Target: LAMA2; (-) strand; PAM type: YTN; PAM sequence: TTC
aaaaacttaaatttcagcat

SEQ ID NO: 255140 - DNA, 20 bp, Artificial Sequence
  Description of Artificial Sequence: Synthetic oligonucleotide
  Target: LAMA2; (-) strand; PAM type: YTN; PAM sequence: TTT
caaaaacttaaatttcagca

SEQ ID NO: 255141 - DNA, 20 bp, Artificial Sequence
  Description of Artificial Sequence: Synthetic oligonucleotide
  Target: LAMA2; (-) strand; PAM type: YTN; PAM sequence: CTT
tcaaaaacttaaatttcagc

SEQ ID NO: 255142 - DNA, 20 bp, Artificial Sequence
  Description of Artificial Sequence: Synthetic oligonucleotide
  Target: LAMA2; (-) strand; PAM type: YTN; PAM sequence: TTC
tttcaaaaacttaaatttca

SEQ ID NO: 255143 - DNA, 20 bp, Artificial Sequence
  Description of Artificial Sequence: Synthetic oligonucleotide
  Target: LAMA2; (-) strand; PAM type: YTN; PAM sequence: TTC
attctttcaaaaacttaaat

SEQ ID NO: 255144 - DNA, 20 bp, Artificial Sequence
  Description of Artificial Sequence: Synthetic oligonucleotide
  Target: LAMA2; (-) strand; PAM type: YTN; PAM sequence: TTT
cattctttcaaaaacttaaa

SEQ ID NO: 255145 - DNA, 20 bp, Artificial Sequence
  Description of Artificial Sequence: Synthetic oligonucleotide
  Target: LAMA2; (-) strand; PAM type: YTN; PAM sequence: TTG
agtttcattctttcaaaaac

SEQ ID NO: 255146 - DNA, 20 bp, Artificial Sequence
  Description of Artificial Sequence: Synthetic oligonucleotide
  Target: LAMA2; (-) strand; PAM type: YTN; PAM sequence: TTT
gagtttcattctttcaaaaa

SEQ ID NO: 255147 - DNA, 20 bp, Artificial Sequence
  Description of Artificial Sequence: Synthetic oligonucleotide
  Target: LAMA2; (-) strand; PAM type: YTN; PAM sequence: CTC
aaatttgagtttcattcttt

SEQ ID NO: 255148 - DNA, 20 bp, Artificial Sequence
  Description of Artificial Sequence: Synthetic oligonucleotide
  Target: LAMA2; (-) strand; PAM type: YTN; PAM sequence: TTG
agtgagcccaaaggtcaact

SEQ ID NO: 255149 - DNA, 20 bp, Artificial Sequence
  Description of Artificial Sequence: Synthetic oligonucleotide
  Target: LAMA2; (-) strand; PAM type: YTN; PAM sequence: CTT
gagtgagcccaaaggtcaac

SEQ ID NO: 255150 - DNA, 20 bp, Artificial Sequence
  Description of Artificial Sequence: Synthetic oligonucleotide
  Target: LAMA2; (-) strand; PAM type: YTN; PAM sequence: CTC
ttgagtgagcccaaaggtca

SEQ ID NO: 255151 - DNA, 20 bp, Artificial Sequence
  Description of Artificial Sequence: Synthetic oligonucleotide
  Target: LAMA2; (-) strand; PAM type: YTN; PAM sequence: TTC
aatatgatctcttgagtgag

SEQ ID NO: 255152 - DNA, 20 bp, Artificial Sequence
  Description of Artificial Sequence: Synthetic oligonucleotide
  Target: LAMA2; (-) strand; PAM type: YTN; PAM sequence: TTA
acaacgtgcattcaatatga

SEQ ID NO: 255153 - DNA, 20 bp, Artificial Sequence
  Description of Artificial Sequence: Synthetic oligonucleotide
  Target: LAMA2; (-) strand; PAM type: YTN; PAM sequence: TTT
aacaacgtgcattcaatatg

SEQ ID NO: 255154 - DNA, 20 bp, Artificial Sequence
  Description of Artificial Sequence: Synthetic oligonucleotide
  Target: LAMA2; (-) strand; PAM type: YTN; PAM sequence: TTT
taacaacgtgcattcaatat

SEQ ID NO: 255155 - DNA, 20 bp, Artificial Sequence
  Description of Artificial Sequence: Synthetic oligonucleotide
  Target: LAMA2; (-) strand; PAM type: YTN; PAM sequence: TTA
attttaacaacgtgcattca

SEQ ID NO: 255156 - DNA, 20 bp, Artificial Sequence
  Description of Artificial Sequence: Synthetic oligonucleotide
  Target: LAMA2; (-) strand; PAM type: YTN; PAM sequence: CTA
tattaattttaacaacgtgc

SEQ ID NO: 255157 - DNA, 20 bp, Artificial Sequence
  Description of Artificial Sequence: Synthetic oligonucleotide
  Target: LAMA2; (-) strand; PAM type: YTN; PAM sequence: CTC
tatattaattttaacaacgt

SEQ ID NO: 255158 - DNA, 20 bp, Artificial Sequence
  Description of Artificial Sequence: Synthetic oligonucleotide
  Target: LAMA2; (-) strand; PAM type: YTN; PAM sequence: TTC
tctatattaattttaacaac

SEQ ID NO: 255159 - DNA, 20 bp, Artificial Sequence
  Description of Artificial Sequence: Synthetic oligonucleotide
  Target: LAMA2; (-) strand; PAM type: YTN; PAM sequence: TTT
ctctatattaattttaacaa

SEQ ID NO: 255160 - DNA, 20 bp, Artificial Sequence
  Description of Artificial Sequence: Synthetic oligonucleotide
  Target: LAMA2; (-) strand; PAM type: YTN; PAM sequence: TTG
gaatacatttctctatatta

SEQ ID NO: 255161 - DNA, 20 bp, Artificial Sequence
  Description of Artificial Sequence: Synthetic oligonucleotide
  Target: LAMA2; (-) strand; PAM type: YTN; PAM sequence: CTT
ggaatacatttctctatatt

SEQ ID NO: 255162 - DNA, 20 bp, Artificial Sequence
  Description of Artificial Sequence: Synthetic oligonucleotide
  Target: LAMA2; (-) strand; PAM type: YTN; PAM sequence: TTG
tcttggaatacatttctcta

SEQ ID NO: 255163 - DNA, 20 bp, Artificial Sequence
  Description of Artificial Sequence: Synthetic oligonucleotide
  Target: LAMA2; (-) strand; PAM type: YTN; PAM sequence: CTA
ttgtcttggaatacatttct

SEQ ID NO: 255164 - DNA, 20 bp, Artificial Sequence
  Description of Artificial Sequence: Synthetic oligonucleotide
  Target: LAMA2; (-) strand; PAM type: YTN; PAM sequence: TTA
cctattgtcttggaatacat

SEQ ID NO: 255165 - DNA, 20 bp, Artificial Sequence
  Description of Artificial Sequence: Synthetic oligonucleotide
  Target: LAMA2; (-) strand; PAM type: YTN; PAM sequence: TTT
acctattgtcttggaataca

SEQ ID NO: 255166 - DNA, 20 bp, Artificial Sequence
  Description of Artificial Sequence: Synthetic oligonucleotide
  Target: LAMA2; (-) strand; PAM type: YTN; PAM sequence: TTA
aatttacctattgtcttgga

SEQ ID NO: 255167 - DNA, 20 bp, Artificial Sequence
  Description of Artificial Sequence: Synthetic oligonucleotide
  Target: LAMA2; (-) strand; PAM type: YTN; PAM sequence: CTT
aaatttacctattgtcttgg

SEQ ID NO: 255168 - DNA, 20 bp, Artificial Sequence
  Description of Artificial Sequence: Synthetic oligonucleotide
  Target: LAMA2; (-) strand; PAM type: YTN; PAM sequence: TTC
cttaaatttacctattgtct

SEQ ID NO: 255169 - DNA, 20 bp, Artificial Sequence
  Description of Artificial Sequence: Synthetic oligonucleotide
  Target: LAMA2; (-) strand; PAM type: YTN; PAM sequence: TTT
ccttaaatttacctattgtc

SEQ ID NO: 255170 - DNA, 20 bp, Artificial Sequence
  Description of Artificial Sequence: Synthetic oligonucleotide
  Target: LAMA2; (-) strand; PAM type: YTN; PAM sequence: TTG
tttccttaaatttacctatt

SEQ ID NO: 255171 - DNA, 20 bp, Artificial Sequence
  Description of Artificial Sequence: Synthetic oligonucleotide
  Target: LAMA2; (-) strand; PAM type: YTN; PAM sequence: TTG
attgtttccttaaatttacc

SEQ ID NO: 255172 - DNA, 20 bp, Artificial Sequence
  Description of Artificial Sequence: Synthetic oligonucleotide
  Target: LAMA2; (-) strand; PAM type: YTN; PAM sequence: CTG
aattgattgtttccttaaat

SEQ ID NO: 255173 - DNA, 20 bp, Artificial Sequence
  Description of Artificial Sequence: Synthetic oligonucleotide
  Target: LAMA2; (-) strand; PAM type: YTN; PAM sequence: CTA
gagaatatggctgaattgat

SEQ ID NO: 255174 - DNA, 20 bp, Artificial Sequence
  Description of Artificial Sequence: Synthetic oligonucleotide
  Target: LAMA2; (-) strand; PAM type: YTN; PAM sequence: TTC
tagagaatatggctgaattg

SEQ ID NO: 255175 - DNA, 20 bp, Artificial Sequence
  Description of Artificial Sequence: Synthetic oligonucleotide
  Target: LAMA2; (-) strand; PAM type: YTN; PAM sequence: TTT
ctagagaatatggctgaatt

SEQ ID NO: 255176 - DNA, 20 bp, Artificial Sequence
  Description of Artificial Sequence: Synthetic oligonucleotide
  Target: LAMA2; (-) strand; PAM type: YTN; PAM sequence: TTT
tctagagaatatggctgaat

SEQ ID NO: 255177 - DNA, 20 bp, Artificial Sequence
  Description of Artificial Sequence: Synthetic oligonucleotide
  Target: LAMA2; (-) strand; PAM type: YTN; PAM sequence: CTC
aattttctagagaatatggc

SEQ ID NO: 255178 - DNA, 20 bp, Artificial Sequence
  Description of Artificial Sequence: Synthetic oligonucleotide
  Target: LAMA2; (-) strand; PAM type: YTN; PAM sequence: TTC
tcaattttctagagaatatg

SEQ ID NO: 255179 - DNA, 20 bp, Artificial Sequence
  Description of Artificial Sequence: Synthetic oligonucleotide
  Target: LAMA2; (-) strand; PAM type: YTN; PAM sequence: CTA
gagcattctcaattttctag

SEQ ID NO: 255180 - DNA, 20 bp, Artificial Sequence
  Description of Artificial Sequence: Synthetic oligonucleotide
  Target: LAMA2; (-) strand; PAM type: YTN; PAM sequence: CTA
aaacatctagagcattctca

SEQ ID NO: 255181 - DNA, 20 bp, Artificial Sequence
  Description of Artificial Sequence: Synthetic oligonucleotide
  Target: LAMA2; (-) strand; PAM type: YTN; PAM sequence: CTC
ccatgtgcacataaaacaat

SEQ ID NO: 255182 - DNA, 20 bp, Artificial Sequence
  Description of Artificial Sequence: Synthetic oligonucleotide
  Target: LAMA2; (-) strand; PAM type: YTN; PAM sequence: TTG
gcatatggaaccaggaagac

SEQ ID NO: 255183 - DNA, 20 bp, Artificial Sequence
  Description of Artificial Sequence: Synthetic oligonucleotide
  Target: LAMA2; (-) strand; PAM type: YTN; PAM sequence: TTT
ggcatatggaaccaggaaga

SEQ ID NO: 255184 - DNA, 20 bp, Artificial Sequence
  Description of Artificial Sequence: Synthetic oligonucleotide
  Target: LAMA2; (-) strand; PAM type: YTN; PAM sequence: CTT
tggcatatggaaccaggaag

SEQ ID NO: 255185 - DNA, 20 bp, Artificial Sequence
  Description of Artificial Sequence: Synthetic oligonucleotide
  Target: LAMA2; (-) strand; PAM type: YTN; PAM sequence: TTC
ctttggcatatggaaccagg

SEQ ID NO: 255186 - DNA, 20 bp, Artificial Sequence
  Description of Artificial Sequence: Synthetic oligonucleotide
  Target: LAMA2; (-) strand; PAM type: YTN; PAM sequence: TTT
cctttggcatatggaaccag

SEQ ID NO: 255187 - DNA, 20 bp, Artificial Sequence
  Description of Artificial Sequence: Synthetic oligonucleotide
  Target: LAMA2; (-) strand; PAM type: YTN; PAM sequence: TTT
tcctttggcatatggaacca

SEQ ID NO: 255188 - DNA, 20 bp, Artificial Sequence
  Description of Artificial Sequence: Synthetic oligonucleotide
  Target: LAMA2; (-) strand; PAM type: YTN; PAM sequence: TTT
ttcctttggcatatggaacc

SEQ ID NO: 255189 - DNA, 20 bp, Artificial Sequence
  Description of Artificial Sequence: Synthetic oligonucleotide
  Target: LAMA2; (-) strand; PAM type: YTN; PAM sequence: TTT
tttcctttggcatatggaac

SEQ ID NO: 255190 - DNA, 20 bp, Artificial Sequence
  Description of Artificial Sequence: Synthetic oligonucleotide
  Target: LAMA2; (-) strand; PAM type: YTN; PAM sequence: TTA
gttttttcctttggcatatg

SEQ ID NO: 255191 - DNA, 20 bp, Artificial Sequence
  Description of Artificial Sequence: Synthetic oligonucleotide
  Target: LAMA2; (-) strand; PAM type: YTN; PAM sequence: TTT
agttttttcctttggcatat

SEQ ID NO: 255192 - DNA, 20 bp, Artificial Sequence
  Description of Artificial Sequence: Synthetic oligonucleotide
  Target: LAMA2; (-) strand; PAM type: YTN; PAM sequence: CTT
tagttttttcctttggcata

SEQ ID NO: 255193 - DNA, 20 bp, Artificial Sequence
  Description of Artificial Sequence: Synthetic oligonucleotide
  Target: LAMA2; (-) strand; PAM type: YTN; PAM sequence: CTG
aactttagttttttcctttg

SEQ ID NO: 255194 - DNA, 20 bp, Artificial Sequence
  Description of Artificial Sequence: Synthetic oligonucleotide
  Target: LAMA2; (-) strand; PAM type: YTN; PAM sequence: CTC
tgaactttagttttttcctt

SEQ ID NO: 255195 - DNA, 20 bp, Artificial Sequence
  Description of Artificial Sequence: Synthetic oligonucleotide
  Target: LAMA2; (-) strand; PAM type: YTN; PAM sequence: TTC
tctgaactttagttttttcc

SEQ ID NO: 255196 - DNA, 20 bp, Artificial Sequence
  Description of Artificial Sequence: Synthetic oligonucleotide
  Target: LAMA2; (-) strand; PAM type: YTN; PAM sequence: TTT
ctctgaactttagttttttc

SEQ ID NO: 255197 - DNA, 20 bp, Artificial Sequence
  Description of Artificial Sequence: Synthetic oligonucleotide
  Target: LAMA2; (-) strand; PAM type: YTN; PAM sequence: TTA
atttctctgaactttagttt

SEQ ID NO: 255198 - DNA, 20 bp, Artificial Sequence
  Description of Artificial Sequence: Synthetic oligonucleotide
  Target: LAMA2; (-) strand; PAM type: YTN; PAM sequence: CTT
aatttctctgaactttagtt

SEQ ID NO: 255199 - DNA, 20 bp, Artificial Sequence
  Description of Artificial Sequence: Synthetic oligonucleotide
  Target: LAMA2; (-) strand; PAM type: YTN; PAM sequence: CTA
tcaaggcacttaatttctct

SEQ ID NO: 255200 - DNA, 20 bp, Artificial Sequence
  Description of Artificial Sequence: Synthetic oligonucleotide
  Target: LAMA2; (-) strand; PAM type: YTN; PAM sequence: CTG
tataatcactatcaaggcac

SEQ ID NO: 255201 - DNA, 20 bp, Artificial Sequence
  Description of Artificial Sequence: Synthetic oligonucleotide
  Target: LAMA2; (-) strand; PAM type: YTN; PAM sequence: CTG
ccacaagcaagctgtataat

SEQ ID NO: 255202 - DNA, 20 bp, Artificial Sequence
  Description of Artificial Sequence: Synthetic oligonucleotide
  Target: LAMA2; (-) strand; PAM type: YTN; PAM sequence: TTC
tgccacaagcaagctgtata

SEQ ID NO: 255203 - DNA, 20 bp, Artificial Sequence
  Description of Artificial Sequence: Synthetic oligonucleotide
  Target: LAMA2; (-) strand; PAM type: YTN; PAM sequence: TTG
gttctgccacaagcaagctg

SEQ ID NO: 255204 - DNA, 20 bp, Artificial Sequence
  Description of Artificial Sequence: Synthetic oligonucleotide
  Target: LAMA2; (-) strand; PAM type: YTN; PAM sequence: TTC
caatattggttctgccacaa

SEQ ID NO: 255205 - DNA, 20 bp, Artificial Sequence
  Description of Artificial Sequence: Synthetic oligonucleotide
  Target: LAMA2; (-) strand; PAM type: YTN; PAM sequence: TTG
gaagaagcacagagaggtga

SEQ ID NO: 255206 - DNA, 20 bp, Artificial Sequence
  Description of Artificial Sequence: Synthetic oligonucleotide
  Target: LAMA2; (-) strand; PAM type: YTN; PAM sequence: CTG
tagccccattggaagaagca

SEQ ID NO: 255207 - DNA, 20 bp, Artificial Sequence
  Description of Artificial Sequence: Synthetic oligonucleotide
  Target: LAMA2; (-) strand; PAM type: YTN; PAM sequence: TTA
ctgtagccccattggaagaa

SEQ ID NO: 255208 - DNA, 20 bp, Artificial Sequence
  Description of Artificial Sequence: Synthetic oligonucleotide
  Target: LAMA2; (-) strand; PAM type: YTN; PAM sequence: CTA
ttactgtagccccattggaa

SEQ ID NO: 255209 - DNA, 20 bp, Artificial Sequence
  Description of Artificial Sequence: Synthetic oligonucleotide
  Target: LAMA2; (-) strand; PAM type: YTN; PAM sequence: TTC
tattactgtagccccattgg

SEQ ID NO: 255210 - DNA, 20 bp, Artificial Sequence
  Description of Artificial Sequence: Synthetic oligonucleotide
  Target: LAMA2; (-) strand; PAM type: YTN; PAM sequence: TTT
ctattactgtagccccattg

SEQ ID NO: 255211 - DNA, 20 bp, Artificial Sequence
  Description of Artificial Sequence: Synthetic oligonucleotide
  Target: LAMA2; (-) strand; PAM type: YTN; PAM sequence: TTG
tttctattactgtagcccca

SEQ ID NO: 255212 - DNA, 20 bp, Artificial Sequence
  Description of Artificial Sequence: Synthetic oligonucleotide
  Target: LAMA2; (-) strand; PAM type: YTN; PAM sequence: CTG
taattgtttctattactgta

SEQ ID NO: 255213 - DNA, 20 bp, Artificial Sequence
  Description of Artificial Sequence: Synthetic oligonucleotide
  Target: LAMA2; (-) strand; PAM type: YTN; PAM sequence: TTC
tgtaattgtttctattactg

SEQ ID NO: 255214 - DNA, 20 bp, Artificial Sequence
  Description of Artificial Sequence: Synthetic oligonucleotide
  Target: LAMA2; (-) strand; PAM type: YTN; PAM sequence: TTT
ctgtaattgtttctattact

SEQ ID NO: 255215 - DNA, 20 bp, Artificial Sequence
  Description of Artificial Sequence: Synthetic oligonucleotide
  Target: LAMA2; (-) strand; PAM type: YTN; PAM sequence: TTC
aatgtttctgtaattgtttc

SEQ ID NO: 255216 - DNA, 20 bp, Artificial Sequence
  Description of Artificial Sequence: Synthetic oligonucleotide
  Target: LAMA2; (-) strand; PAM type: YTN; PAM sequence: TTT
caatgtttctgtaattgttt

SEQ ID NO: 255217 - DNA, 20 bp, Artificial Sequence
  Description of Artificial Sequence: Synthetic oligonucleotide
  Target: LAMA2; (-) strand; PAM type: YTN; PAM sequence: TTT
tcaatgtttctgtaattgtt

SEQ ID NO: 255218 - DNA, 20 bp, Artificial Sequence
  Description of Artificial Sequence: Synthetic oligonucleotide
  Target: LAMA2; (-) strand; PAM type: YTN; PAM sequence: CTT
ttcaatgtttctgtaattgt

SEQ ID NO: 255219 - DNA, 20 bp, Artificial Sequence
  Description of Artificial Sequence: Synthetic oligonucleotide
  Target: LAMA2; (-) strand; PAM type: YTN; PAM sequence: TTC
ttttcaatgtttctgtaatt

SEQ ID NO: 255220 - DNA, 20 bp, Artificial Sequence
  Description of Artificial Sequence: Synthetic oligonucleotide
  Target: LAMA2; (-) strand; PAM type: YTN; PAM sequence: CTT
cttttcaatgtttctgtaat

SEQ ID NO: 255221 - DNA, 20 bp, Artificial Sequence
  Description of Artificial Sequence: Synthetic oligonucleotide
  Target: LAMA2; (-) strand; PAM type: YTN; PAM sequence: TTG
cttcttttcaatgtttctgt

SEQ ID NO: 255222 - DNA, 20 bp, Artificial Sequence
  Description of Artificial Sequence: Synthetic oligonucleotide
  Target: LAMA2; (-) strand; PAM type: YTN; PAM sequence: TTT
gcttcttttcaatgtttctg

SEQ ID NO: 255223 - DNA, 20 bp, Artificial Sequence
  Description of Artificial Sequence: Synthetic oligonucleotide
  Target: LAMA2; (-) strand; PAM type: YTN; PAM sequence: TTT
tgcttcttttcaatgtttct

SEQ ID NO: 255224 - DNA, 20 bp, Artificial Sequence
  Description of Artificial Sequence: Synthetic oligonucleotide
  Target: LAMA2; (-) strand; PAM type: YTN; PAM sequence: TTT
ttgcttcttttcaatgtttc

SEQ ID NO: 255225 - DNA, 20 bp, Artificial Sequence
  Description of Artificial Sequence: Synthetic oligonucleotide
  Target: LAMA2; (-) strand; PAM type: YTN; PAM sequence: TTT
tttgcttcttttcaatgttt

SEQ ID NO: 255226 - DNA, 20 bp, Artificial Sequence
  Description of Artificial Sequence: Synthetic oligonucleotide
  Target: LAMA2; (-) strand; PAM type: YTN; PAM sequence: TTT
ttttgcttcttttcaatgtt

SEQ ID NO: 255227 - DNA, 20 bp, Artificial Sequence
  Description of Artificial Sequence: Synthetic oligonucleotide
  Target: LAMA2; (-) strand; PAM type: YTN; PAM sequence: TTT
tttttgcttcttttcaatgt

SEQ ID NO: 255228 - DNA, 20 bp, Artificial Sequence
  Description of Artificial Sequence: Synthetic oligonucleotide
  Target: LAMA2; (-) strand; PAM type: YTN; PAM sequence: TTT
ttttttgcttcttttcaatg

SEQ ID NO: 255229 - DNA, 20 bp, Artificial Sequence
  Description of Artificial Sequence: Synthetic oligonucleotide
  Target: LAMA2; (-) strand; PAM type: YTN; PAM sequence: TTG
atttttttttgcttcttttc

SEQ ID NO: 255230 - DNA, 20 bp, Artificial Sequence
  Description of Artificial Sequence: Synthetic oligonucleotide
  Target: LAMA2; (-) strand; PAM type: YTN; PAM sequence: CTA
ttgatttttttttgcttctt

SEQ ID NO: 255231 - DNA, 20 bp, Artificial Sequence
  Description of Artificial Sequence: Synthetic oligonucleotide
  Target: LAMA2; (-) strand; PAM type: YTN; PAM sequence: TTC
tattgatttttttttgcttc

SEQ ID NO: 255232 - DNA, 20 bp, Artificial Sequence
  Description of Artificial Sequence: Synthetic oligonucleotide
  Target: LAMA2; (-) strand; PAM type: YTN; PAM sequence: TTA
aattctattgattttttttt

SEQ ID NO: 255233 - DNA, 20 bp, Artificial Sequence
  Description of Artificial Sequence: Synthetic oligonucleotide
  Target: LAMA2; (-) strand; PAM type: YTN; PAM sequence: CTG
acattaaattctattgattt

SEQ ID NO: 255234 - DNA, 20 bp, Artificial Sequence
  Description of Artificial Sequence: Synthetic oligonucleotide
  Target: LAMA2; (-) strand; PAM type: YTN; PAM sequence: TTG
tctgacattaaattctattg

SEQ ID NO: 255235 - DNA, 20 bp, Artificial Sequence
  Description of Artificial Sequence: Synthetic oligonucleotide
  Target: LAMA2; (-) strand; PAM type: YTN; PAM sequence: TTT
gtctgacattaaattctatt

SEQ ID NO: 255236 - DNA, 20 bp, Artificial Sequence
  Description of Artificial Sequence: Synthetic oligonucleotide
  Target: LAMA2; (-) strand; PAM type: YTN; PAM sequence: TTA
cagtttgtctgacattaaat

SEQ ID NO: 255237 - DNA, 20 bp, Artificial Sequence
  Description of Artificial Sequence: Synthetic oligonucleotide
  Target: LAMA2; (-) strand; PAM type: YTN; PAM sequence: TTT
acagtttgtctgacattaaa

SEQ ID NO: 255238 - DNA, 20 bp, Artificial Sequence
  Description of Artificial Sequence: Synthetic oligonucleotide
  Target: LAMA2; (-) strand; PAM type: YTN; PAM sequence: TTA
cagtgaacatttacagtttg

SEQ ID NO: 255239 - DNA, 20 bp, Artificial Sequence
  Description of Artificial Sequence: Synthetic oligonucleotide
  Target: LAMA2; (-) strand; PAM type: YTN; PAM sequence: TTT
acagtgaacatttacagttt

SEQ ID NO: 255240 - DNA, 20 bp, Artificial Sequence
  Description of Artificial Sequence: Synthetic oligonucleotide
  Target: LAMA2; (-) strand; PAM type: YTN; PAM sequence: TTT
tacagtgaacatttacagtt

SEQ ID NO: 255241 - DNA, 20 bp, Artificial Sequence
  Description of Artificial Sequence: Synthetic oligonucleotide
  Target: LAMA2; (-) strand; PAM type: YTN; PAM sequence: TTT
ttacagtgaacatttacagt

SEQ ID NO: 255242 - DNA, 20 bp, Artificial Sequence
  Description of Artificial Sequence: Synthetic oligonucleotide
  Target: LAMA2; (-) strand; PAM type: YTN; PAM sequence: CTG
atttttacagtgaacattta

SEQ ID NO: 255243 - DNA, 20 bp, Artificial Sequence
  Description of Artificial Sequence: Synthetic oligonucleotide
  Target: LAMA2; (-) strand; PAM type: YTN; PAM sequence: TTA
ctgatttttacagtgaacat

SEQ ID NO: 255244 - DNA, 20 bp, Artificial Sequence
  Description of Artificial Sequence: Synthetic oligonucleotide
  Target: LAMA2; (-) strand; PAM type: YTN; PAM sequence: TTT
actgatttttacagtgaaca

SEQ ID NO: 255245 - DNA, 20 bp, Artificial Sequence
  Description of Artificial Sequence: Synthetic oligonucleotide
  Target: LAMA2; (-) strand; PAM type: YTN; PAM sequence: TTG
ccaaacagtgaagatttact

SEQ ID NO: 255246 - DNA, 20 bp, Artificial Sequence
  Description of Artificial Sequence: Synthetic oligonucleotide
  Target: LAMA2; (-) strand; PAM type: YTN; PAM sequence: CTT
gccaaacagtgaagatttac

SEQ ID NO: 255247 - DNA, 20 bp, Artificial Sequence
  Description of Artificial Sequence: Synthetic oligonucleotide
  Target: LAMA2; (-) strand; PAM type: YTN; PAM sequence: CTC
ttgccaaacagtgaagattt

SEQ ID NO: 255248 - DNA, 20 bp, Artificial Sequence
  Description of Artificial Sequence: Synthetic oligonucleotide
  Target: LAMA2; (-) strand; PAM type: YTN; PAM sequence: TTA
acataactcttgccaaacag

SEQ ID NO: 255249 - DNA, 20 bp, Artificial Sequence
  Description of Artificial Sequence: Synthetic oligonucleotide
  Target: LAMA2; (-) strand; PAM type: YTN; PAM sequence: CTA
tgtagcataattaacataac

SEQ ID NO: 255250 - DNA, 20 bp, Artificial Sequence
  Description of Artificial Sequence: Synthetic oligonucleotide
  Target: LAMA2; (-) strand; PAM type: YTN; PAM sequence: CTG
taactatgtagcataattaa

SEQ ID NO: 255251 - DNA, 20 bp, Artificial Sequence
  Description of Artificial Sequence: Synthetic oligonucleotide
  Target: LAMA2; (-) strand; PAM type: YTN; PAM sequence: TTA
atataactgtaactatgtag

SEQ ID NO: 255252 - DNA, 20 bp, Artificial Sequence
  Description of Artificial Sequence: Synthetic oligonucleotide
  Target: LAMA2; (-) strand; PAM type: YTN; PAM sequence: CTG
ttaatataactgtaactatg

SEQ ID NO: 255253 - DNA, 20 bp, Artificial Sequence
  Description of Artificial Sequence: Synthetic oligonucleotide
  Target: LAMA2; (-) strand; PAM type: YTN; PAM sequence: TTA
acatagctgttaatataact

SEQ ID NO: 255254 - DNA, 20 bp, Artificial Sequence
  Description of Artificial Sequence: Synthetic oligonucleotide
  Target: LAMA2; (-) strand; PAM type: YTN; PAM sequence: TTA
tattaacatagctgttaata

SEQ ID NO: 255255 - DNA, 20 bp, Artificial Sequence
  Description of Artificial Sequence: Synthetic oligonucleotide
  Target: LAMA2; (-) strand; PAM type: YTN; PAM sequence: CTT
atattaacatagctgttaat

SEQ ID NO: 255256 - DNA, 20 bp, Artificial Sequence
  Description of Artificial Sequence: Synthetic oligonucleotide
  Target: LAMA2; (-) strand; PAM type: YTN; PAM sequence: CTA
gtcccttatattaacatagc

SEQ ID NO: 255257 - DNA, 20 bp, Artificial Sequence
  Description of Artificial Sequence: Synthetic oligonucleotide
  Target: LAMA2; (-) strand; PAM type: YTN; PAM sequence: CTC
tagtcccttatattaacata

SEQ ID NO: 255258 - DNA, 20 bp, Artificial Sequence
  Description of Artificial Sequence: Synthetic oligonucleotide
  Target: LAMA2; (-) strand; PAM type: YTN; PAM sequence: CTG
ctctagtcccttatattaac

SEQ ID NO: 255259 - DNA, 20 bp, Artificial Sequence
  Description of Artificial Sequence: Synthetic oligonucleotide
  Target: LAMA2; (-) strand; PAM type: YTN; PAM sequence: CTC
atcctgctctagtcccttat

SEQ ID NO: 255260 - DNA, 20 bp, Artificial Sequence
  Description of Artificial Sequence: Synthetic oligonucleotide
  Target: LAMA2; (-) strand; PAM type: YTN; PAM sequence: TTC
tcatcctgctctagtccctt

SEQ ID NO: 255261 - DNA, 20 bp, Artificial Sequence
  Description of Artificial Sequence: Synthetic oligonucleotide
  Target: LAMA2; (-) strand; PAM type: YTN; PAM sequence: TTT
ctcatcctgctctagtccct

SEQ ID NO: 255262 - DNA, 20 bp, Artificial Sequence
  Description of Artificial Sequence: Synthetic oligonucleotide
  Target: LAMA2; (-) strand; PAM type: YTN; PAM sequence: TTT
tctcatcctgctctagtccc

SEQ ID NO: 255263 - DNA, 20 bp, Artificial Sequence
  Description of Artificial Sequence: Synthetic oligonucleotide
  Target: LAMA2; (-) strand; PAM type: YTN; PAM sequence: CTG
cagttttctcatcctgctct

SEQ ID NO: 255264 - DNA, 20 bp, Artificial Sequence
  Description of Artificial Sequence: Synthetic oligonucleotide
  Target: LAMA2; (-) strand; PAM type: YTN; PAM sequence: TTA
aatctgcagttttctcatcc

SEQ ID NO: 255265 - DNA, 20 bp, Artificial Sequence
  Description of Artificial Sequence: Synthetic oligonucleotide
  Target: LAMA2; (-) strand; PAM type: YTN; PAM sequence: TTA
aagaattaaatctgcagttt

SEQ ID NO: 255266 - DNA, 20 bp, Artificial Sequence
  Description of Artificial Sequence: Synthetic oligonucleotide
  Target: LAMA2; (-) strand; PAM type: YTN; PAM sequence: TTA
atagttaaagaattaaatct

SEQ ID NO: 255267 - DNA, 20 bp, Artificial Sequence
  Description of Artificial Sequence: Synthetic oligonucleotide
  Target: LAMA2; (-) strand; PAM type: YTN; PAM sequence: TTA
gttaatagttaaagaattaa

SEQ ID NO: 255268 - DNA, 20 bp, Artificial Sequence
  Description of Artificial Sequence: Synthetic oligonucleotide
  Target: LAMA2; (-) strand; PAM type: YTN; PAM sequence: TTT
agttaatagttaaagaatta

SEQ ID NO: 255269 - DNA, 20 bp, Artificial Sequence
  Description of Artificial Sequence: Synthetic oligonucleotide
  Target: LAMA2; (-) strand; PAM type: YTN; PAM sequence: TTA
acgtgaaaggtatttagtta

SEQ ID NO: 255270 - DNA, 20 bp, Artificial Sequence
  Description of Artificial Sequence: Synthetic oligonucleotide
  Target: LAMA2; (-) strand; PAM type: YTN; PAM sequence: TTT
aacgtgaaaggtatttagtt

SEQ ID NO: 255271 - DNA, 20 bp, Artificial Sequence
  Description of Artificial Sequence: Synthetic oligonucleotide
  Target: LAMA2; (-) strand; PAM type: YTN; PAM sequence: TTG
atttaacgtgaaaggtattt

SEQ ID NO: 255272 - DNA, 20 bp, Artificial Sequence
  Description of Artificial Sequence: Synthetic oligonucleotide
  Target: LAMA2; (-) strand; PAM type: YTN; PAM sequence: TTA
aacaaaataagatatgttga

SEQ ID NO: 255273 - DNA, 20 bp, Artificial Sequence
  Description of Artificial Sequence: Synthetic oligonucleotide
  Target: LAMA2; (-) strand; PAM type: YTN; PAM sequence: TTT
aaacaaaataagatatgttg

SEQ ID NO: 255274 - DNA, 20 bp, Artificial Sequence
  Description of Artificial Sequence: Synthetic oligonucleotide
  Target: LAMA2; (-) strand; PAM type: YTN; PAM sequence: TTT
taaacaaaataagatatgtt

SEQ ID NO: 255275 - DNA, 20 bp, Artificial Sequence
  Description of Artificial Sequence: Synthetic oligonucleotide
  Target: LAMA2; (-) strand; PAM type: YTN; PAM sequence: TTT
ttaaacaaaataagatatgt

SEQ ID NO: 255276 - DNA, 20 bp, Artificial Sequence
  Description of Artificial Sequence: Synthetic oligonucleotide
  Target: LAMA2; (-) strand; PAM type: YTN; PAM sequence: TTA
caaatttttaaacaaaataa

SEQ ID NO: 255277 - DNA, 20 bp, Artificial Sequence
  Description of Artificial Sequence: Synthetic oligonucleotide
  Target: LAMA2; (-) strand; PAM type: YTN; PAM sequence: TTT
acaaatttttaaacaaaata

SEQ ID NO: 255278 - DNA, 20 bp, Artificial Sequence
  Description of Artificial Sequence: Synthetic oligonucleotide
  Target: LAMA2; (-) strand; PAM type: YTN; PAM sequence: TTT
tacaaatttttaaacaaaat

SEQ ID NO: 255279 - DNA, 20 bp, Artificial Sequence
  Description of Artificial Sequence: Synthetic oligonucleotide
  Target: LAMA2; (-) strand; PAM type: YTN; PAM sequence: TTT
ttacaaatttttaaacaaaa

SEQ ID NO: 255280 - DNA, 20 bp, Artificial Sequence
  Description of Artificial Sequence: Synthetic oligonucleotide
  Target: LAMA2; (-) strand; PAM type: YTN; PAM sequence: TTT
tttacaaatttttaaacaaa

SEQ ID NO: 255281 - DNA, 20 bp, Artificial Sequence
  Description of Artificial Sequence: Synthetic oligonucleotide
  Target: LAMA2; (-) strand; PAM type: YTN; PAM sequence: TTT
ttttacaaatttttaaacaa

SEQ ID NO: 255282 - DNA, 20 bp, Artificial Sequence
  Description of Artificial Sequence: Synthetic oligonucleotide
  Target: LAMA2; (-) strand; PAM type: YTN; PAM sequence: TTT
tttttacaaatttttaaaca

SEQ ID NO: 255283 - DNA, 20 bp, Artificial Sequence
  Description of Artificial Sequence: Synthetic oligonucleotide
  Target: LAMA2; (-) strand; PAM type: YTN; PAM sequence: TTT
ttttttacaaatttttaaac

SEQ ID NO: 255284 - DNA, 20 bp, Artificial Sequence
  Description of Artificial Sequence: Synthetic oligonucleotide
  Target: LAMA2; (-) strand; PAM type: YTN; PAM sequence: TTT
tttttttacaaatttttaaa

SEQ ID NO: 255285 - DNA, 20 bp, Artificial Sequence
  Description of Artificial Sequence: Synthetic oligonucleotide
  Target: LAMA2; (-) strand; PAM type: YTN; PAM sequence: TTT
ttttttttacaaatttttaa

SEQ ID NO: 255286 - DNA, 20 bp, Artificial Sequence
  Description of Artificial Sequence: Synthetic oligonucleotide
  Target: LAMA2; (-) strand; PAM type: YTN; PAM sequence: TTT
tttttttttacaaattttta

SEQ ID NO: 255287 - DNA, 20 bp, Artificial Sequence
  Description of Artificial Sequence: Synthetic oligonucleotide
  Target: LAMA2; (-) strand; PAM type: YTN; PAM sequence: TTT
ttttttttttacaaattttt

SEQ ID NO: 255288 - DNA, 20 bp, Artificial Sequence
  Description of Artificial Sequence: Synthetic oligonucleotide
  Target: LAMA2; (-) strand; PAM type: YTN; PAM sequence: TTT
tttttttttttacaaatttt

SEQ ID NO: 255289 - DNA, 20 bp, Artificial Sequence
  Description of Artificial Sequence: Synthetic oligonucleotide
  Target: LAMA2; (-) strand; PAM type: YTN; PAM sequence: TTT
ttttttttttttacaaattt

SEQ ID NO: 255290 - DNA, 20 bp, Artificial Sequence
  Description of Artificial Sequence: Synthetic oligonucleotide
  Target: LAMA2; (-) strand; PAM type: YTN; PAM sequence: CTT
tttttttttttttacaaatt

SEQ ID NO: 255291 - DNA, 20 bp, Artificial Sequence
  Description of Artificial Sequence: Synthetic oligonucleotide
  Target: LAMA2; (-) strand; PAM type: YTN; PAM sequence: TTG
cctttttttttttttttaca

SEQ ID NO: 255292 - DNA, 20 bp, Artificial Sequence
  Description of Artificial Sequence: Synthetic oligonucleotide
  Target: LAMA2; (-) strand; PAM type: YTN; PAM sequence: TTT
gcctttttttttttttttac

SEQ ID NO: 255293 - DNA, 20 bp, Artificial Sequence
  Description of Artificial Sequence: Synthetic oligonucleotide
  Target: LAMA2; (-) strand; PAM type: YTN; PAM sequence: CTT
tgccttttttttttttttta

SEQ ID NO: 255294 - DNA, 20 bp, Artificial Sequence
  Description of Artificial Sequence: Synthetic oligonucleotide
  Target: LAMA2; (-) strand; PAM type: YTN; PAM sequence: TTA
aaaaactttgcctttttttt

SEQ ID NO: 255295 - DNA, 20 bp, Artificial Sequence
  Description of Artificial Sequence: Synthetic oligonucleotide
  Target: LAMA2; (-) strand; PAM type: YTN; PAM sequence: TTT
aaaaaactttgccttttttt

SEQ ID NO: 255296 - DNA, 20 bp, Artificial Sequence
  Description of Artificial Sequence: Synthetic oligonucleotide
  Target: LAMA2; (-) strand; PAM type: YTN; PAM sequence: TTT
taaaaaactttgcctttttt

SEQ ID NO: 255297 - DNA, 20 bp, Artificial Sequence
  Description of Artificial Sequence: Synthetic oligonucleotide
  Target: LAMA2; (-) strand; PAM type: YTN; PAM sequence: TTT
ttaaaaaactttgccttttt

SEQ ID NO: 255298 - DNA, 20 bp, Artificial Sequence
  Description of Artificial Sequence: Synthetic oligonucleotide
  Target: LAMA2; (-) strand; PAM type: YTN; PAM sequence: TTT
tttaaaaaactttgcctttt

SEQ ID NO: 255299 - DNA, 20 bp, Artificial Sequence
  Description of Artificial Sequence: Synthetic oligonucleotide
  Target: LAMA2; (-) strand; PAM type: YTN; PAM sequence: TTA
attttttaaaaaactttgcc

SEQ ID NO: 255300 - DNA, 20 bp, Artificial Sequence
  Description of Artificial Sequence: Synthetic oligonucleotide
  Target: LAMA2; (-) strand; PAM type: YTN; PAM sequence: TTA
ttaattttttaaaaaacttt

SEQ ID NO: 255301 - DNA, 20 bp, Artificial Sequence
  Description of Artificial Sequence: Synthetic oligonucleotide
  Target: LAMA2; (-) strand; PAM type: YTN; PAM sequence: CTT
attaattttttaaaaaactt

SEQ ID NO: 255302 - DNA, 20 bp, Artificial Sequence
  Description of Artificial Sequence: Synthetic oligonucleotide
  Target: LAMA2; (-) strand; PAM type: YTN; PAM sequence: TTA
tagatacgacttattaattt

SEQ ID NO: 255303 - DNA, 20 bp, Artificial Sequence
  Description of Artificial Sequence: Synthetic oligonucleotide
  Target: LAMA2; (-) strand; PAM type: YTN; PAM sequence: TTG
ccataataaattatagatac

SEQ ID NO: 255304 - DNA, 20 bp, Artificial Sequence
  Description of Artificial Sequence: Synthetic oligonucleotide
  Target: LAMA2; (-) strand; PAM type: YTN; PAM sequence: CTG
aaaaagtatgaaagcatatt

SEQ ID NO: 255305 - DNA, 20 bp, Artificial Sequence
  Description of Artificial Sequence: Synthetic oligonucleotide
  Target: LAMA2; (-) strand; PAM type: YTN; PAM sequence: TTA
tactgaaaaagtatgaaagc

SEQ ID NO: 255306 - DNA, 20 bp, Artificial Sequence
  Description of Artificial Sequence: Synthetic oligonucleotide
  Target: LAMA2; (-) strand; PAM type: YTN; PAM sequence: TTT
atactgaaaaagtatgaaag

SEQ ID NO: 255307 - DNA, 20 bp, Artificial Sequence
  Description of Artificial Sequence: Synthetic oligonucleotide
  Target: LAMA2; (-) strand; PAM type: YTN; PAM sequence: TTT
tatactgaaaaagtatgaaa

SEQ ID NO: 255308 - DNA, 20 bp, Artificial Sequence
  Description of Artificial Sequence: Synthetic oligonucleotide
  Target: LAMA2; (-) strand; PAM type: YTN; PAM sequence: CTT
ttatactgaaaaagtatgaa

SEQ ID NO: 255309 - DNA, 20 bp, Artificial Sequence
  Description of Artificial Sequence: Synthetic oligonucleotide
  Target: LAMA2; (-) strand; PAM type: YTN; PAM sequence: TTG
ataaacccttttatactgaa

SEQ ID NO: 255310 - DNA, 20 bp, Artificial Sequence
  Description of Artificial Sequence: Synthetic oligonucleotide
  Target: LAMA2; (-) strand; PAM type: YTN; PAM sequence: TTT
gataaacccttttatactga

SEQ ID NO: 255311 - DNA, 20 bp, Artificial Sequence
  Description of Artificial Sequence: Synthetic oligonucleotide
  Target: LAMA2; (-) strand; PAM type: YTN; PAM sequence: TTG
atttgataaacccttttata

SEQ ID NO: 255312 - DNA, 20 bp, Artificial Sequence
  Description of Artificial Sequence: Synthetic oligonucleotide
  Target: LAMA2; (-) strand; PAM type: YTN; PAM sequence: CTG
caaaatggaataatatgatt

SEQ ID NO: 255313 - DNA, 20 bp, Artificial Sequence
  Description of Artificial Sequence: Synthetic oligonucleotide
  Target: LAMA2; (-) strand; PAM type: YTN; PAM sequence: TTC
tgcaaaatggaataatatga

SEQ ID NO: 255314 - DNA, 20 bp, Artificial Sequence
  Description of Artificial Sequence: Synthetic oligonucleotide
  Target: LAMA2; (-) strand; PAM type: YTN; PAM sequence: TTC
ccattctgcaaaatggaata

SEQ ID NO: 255315 - DNA, 20 bp, Artificial Sequence
  Description of Artificial Sequence: Synthetic oligonucleotide
  Target: LAMA2; (-) strand; PAM type: YTN; PAM sequence: TTT
cccattctgcaaaatggaat

SEQ ID NO: 255316 - DNA, 20 bp, Artificial Sequence
  Description of Artificial Sequence: Synthetic oligonucleotide
  Target: LAMA2; (-) strand; PAM type: YTN; PAM sequence: CTG
tttcccattctgcaaaatgg

SEQ ID NO: 255317 - DNA, 20 bp, Artificial Sequence
  Description of Artificial Sequence: Synthetic oligonucleotide
  Target: LAMA2; (-) strand; PAM type: YTN; PAM sequence: CTA
aacctgtttcccattctgca

SEQ ID NO: 255318 - DNA, 20 bp, Artificial Sequence
  Description of Artificial Sequence: Synthetic oligonucleotide
  Target: LAMA2; (-) strand; PAM type: YTN; PAM sequence: CTC
taaacctgtttcccattctg

SEQ ID NO: 255319 - DNA, 20 bp, Artificial Sequence
  Description of Artificial Sequence: Synthetic oligonucleotide
  Target: LAMA2; (-) strand; PAM type: YTN; PAM sequence: TTC
tctaaacctgtttcccattc

SEQ ID NO: 255320 - DNA, 20 bp, Artificial Sequence
  Description of Artificial Sequence: Synthetic oligonucleotide
  Target: LAMA2; (-) strand; PAM type: YTN; PAM sequence: TTT
ctctaaacctgtttcccatt

SEQ ID NO: 255321 - DNA, 20 bp, Artificial Sequence
  Description of Artificial Sequence: Synthetic oligonucleotide
  Target: LAMA2; (-) strand; PAM type: YTN; PAM sequence: TTG
aacgatatatttctctaaac

SEQ ID NO: 255322 - DNA, 20 bp, Artificial Sequence
  Description of Artificial Sequence: Synthetic oligonucleotide
  Target: LAMA2; (-) strand; PAM type: YTN; PAM sequence: TTT
gaacgatatatttctctaaa

SEQ ID NO: 255323 - DNA, 20 bp, Artificial Sequence
  Description of Artificial Sequence: Synthetic oligonucleotide
  Target: LAMA2; (-) strand; PAM type: YTN; PAM sequence: CTT
tgaacgatatatttctctaa

SEQ ID NO: 255324 - DNA, 20 bp, Artificial Sequence
  Description of Artificial Sequence: Synthetic oligonucleotide
  Target: LAMA2; (-) strand; PAM type: YTN; PAM sequence: CTA
agtatgtctttgaacgatat

SEQ ID NO: 255325 - DNA, 20 bp, Artificial Sequence
  Description of Artificial Sequence: Synthetic oligonucleotide
  Target: LAMA2; (-) strand; PAM type: YTN; PAM sequence: TTC
taagtatgtctttgaacgat

SEQ ID NO: 255326 - DNA, 20 bp, Artificial Sequence
  Description of Artificial Sequence: Synthetic oligonucleotide
  Target: LAMA2; (-) strand; PAM type: YTN; PAM sequence: TTT
ctaagtatgtctttgaacga

SEQ ID NO: 255327 - DNA, 20 bp, Artificial Sequence
  Description of Artificial Sequence: Synthetic oligonucleotide
  Target: LAMA2; (-) strand; PAM type: YTN; PAM sequence: TTT
tctaagtatgtctttgaacg

SEQ ID NO: 255328 - DNA, 20 bp, Artificial Sequence
  Description of Artificial Sequence: Synthetic oligonucleotide
  Target: LAMA2; (-) strand; PAM type: YTN; PAM sequence: TTA
ttttctaagtatgtctttga

SEQ ID NO: 255329 - DNA, 20 bp, Artificial Sequence
  Description of Artificial Sequence: Synthetic oligonucleotide
  Target: LAMA2; (-) strand; PAM type: YTN; PAM sequence: TTT
attttctaagtatgtctttg

SEQ ID NO: 255330 - DNA, 20 bp, Artificial Sequence
  Description of Artificial Sequence: Synthetic oligonucleotide
  Target: LAMA2; (-) strand; PAM type: YTN; PAM sequence: TTG
atttattttctaagtatgtc

SEQ ID NO: 255331 - DNA, 20 bp, Artificial Sequence
  Description of Artificial Sequence: Synthetic oligonucleotide
  Target: LAMA2; (-) strand; PAM type: YTN; PAM sequence: CTT
gatttattttctaagtatgt

SEQ ID NO: 255332 - DNA, 20 bp, Artificial Sequence
  Description of Artificial Sequence: Synthetic oligonucleotide
  Target: LAMA2; (-) strand; PAM type: YTN; PAM sequence: TTA
gacttgatttattttctaag

SEQ ID NO: 255333 - DNA, 20 bp, Artificial Sequence
  Description of Artificial Sequence: Synthetic oligonucleotide
  Target: LAMA2; (-) strand; PAM type: YTN; PAM sequence: TTA
attagacttgatttattttc

SEQ ID NO: 255334 - DNA, 20 bp, Artificial Sequence
  Description of Artificial Sequence: Synthetic oligonucleotide
  Target: LAMA2; (-) strand; PAM type: YTN; PAM sequence: CTT
aattagacttgatttatttt

SEQ ID NO: 255335 - DNA, 20 bp, Artificial Sequence
  Description of Artificial Sequence: Synthetic oligonucleotide
  Target: LAMA2; (-) strand; PAM type: YTN; PAM sequence: TTC
ttaattagacttgatttatt

SEQ ID NO: 255336 - DNA, 20 bp, Artificial Sequence
  Description of Artificial Sequence: Synthetic oligonucleotide
  Target: LAMA2; (-) strand; PAM type: YTN; PAM sequence: TTT
cttaattagacttgatttat

SEQ ID NO: 255337 - DNA, 20 bp, Artificial Sequence
  Description of Artificial Sequence: Synthetic oligonucleotide
  Target: LAMA2; (-) strand; PAM type: YTN; PAM sequence: TTG
catttcttaattagacttga

SEQ ID NO: 255338 - DNA, 20 bp, Artificial Sequence
  Description of Artificial Sequence: Synthetic oligonucleotide
  Target: LAMA2; (-) strand; PAM type: YTN; PAM sequence: CTC
cacaattgcatttcttaatt

SEQ ID NO: 255339 - DNA, 20 bp, Artificial Sequence
  Description of Artificial Sequence: Synthetic oligonucleotide
  Target: LAMA2; (-) strand; PAM type: YTN; PAM sequence: TTA
atctccacaattgcatttct

SEQ ID NO: 255340 - DNA, 20 bp, Artificial Sequence
  Description of Artificial Sequence: Synthetic oligonucleotide
  Target: LAMA2; (-) strand; PAM type: YTN; PAM sequence: TTT
aatctccacaattgcatttc

SEQ ID NO: 255341 - DNA, 20 bp, Artificial Sequence
  Description of Artificial Sequence: Synthetic oligonucleotide
  Target: LAMA2; (-) strand; PAM type: YTN; PAM sequence: CTG
atttaatctccacaattgca

SEQ ID NO: 255342 - DNA, 20 bp, Artificial Sequence
  Description of Artificial Sequence: Synthetic oligonucleotide
  Target: LAMA2; (-) strand; PAM type: YTN; PAM sequence: CTA
tgaaatctgatttaatctcc

SEQ ID NO: 255343 - DNA, 20 bp, Artificial Sequence
  Description of Artificial Sequence: Synthetic oligonucleotide
  Target: LAMA2; (-) strand; PAM type: YTN; PAM sequence: TTA
agtactatgaaatctgattt

SEQ ID NO: 255344 - DNA, 20 bp, Artificial Sequence
  Description of Artificial Sequence: Synthetic oligonucleotide
  Target: LAMA2; (-) strand; PAM type: YTN; PAM sequence: TTT
aagtactatgaaatctgatt

SEQ ID NO: 255345 - DNA, 20 bp, Artificial Sequence
  Description of Artificial Sequence: Synthetic oligonucleotide
  Target: LAMA2; (-) strand; PAM type: YTN; PAM sequence: CTT
taagtactatgaaatctgat

SEQ ID NO: 255346 - DNA, 20 bp, Artificial Sequence
  Description of Artificial Sequence: Synthetic oligonucleotide
  Target: LAMA2; (-) strand; PAM type: YTN; PAM sequence: TTA
cctttaagtactatgaaatc

SEQ ID NO: 255347 - DNA, 20 bp, Artificial Sequence
  Description of Artificial Sequence: Synthetic oligonucleotide
  Target: LAMA2; (-) strand; PAM type: YTN; PAM sequence: TTA
attacctttaagtactatga

SEQ ID NO: 255348 - DNA, 20 bp, Artificial Sequence
  Description of Artificial Sequence: Synthetic oligonucleotide
  Target: LAMA2; (-) strand; PAM type: YTN; PAM sequence: TTT
aattacctttaagtactatg

SEQ ID NO: 255349 - DNA, 20 bp, Artificial Sequence
  Description of Artificial Sequence: Synthetic oligonucleotide
  Target: LAMA2; (-) strand; PAM type: YTN; PAM sequence: CTT
taattacctttaagtactat

SEQ ID NO: 255350 - DNA, 20 bp, Artificial Sequence
  Description of Artificial Sequence: Synthetic oligonucleotide
  Target: LAMA2; (-) strand; PAM type: YTN; PAM sequence: TTC
tttaattacctttaagtact

SEQ ID NO: 255351 - DNA, 20 bp, Artificial Sequence
  Description of Artificial Sequence: Synthetic oligonucleotide
  Target: LAMA2; (-) strand; PAM type: YTN; PAM sequence: TTT
ctttaattacctttaagtac

SEQ ID NO: 255352 - DNA, 20 bp, Artificial Sequence
  Description of Artificial Sequence: Synthetic oligonucleotide
  Target: LAMA2; (-) strand; PAM type: YTN; PAM sequence: TTA
tttctttaattacctttaag

SEQ ID NO: 255353 - DNA, 20 bp, Artificial Sequence
  Description of Artificial Sequence: Synthetic oligonucleotide
  Target: LAMA2; (-) strand; PAM type: YTN; PAM sequence: CTT
atttctttaattacctttaa

SEQ ID NO: 255354 - DNA, 20 bp, Artificial Sequence
  Description of Artificial Sequence: Synthetic oligonucleotide
  Target: LAMA2; (-) strand; PAM type: YTN; PAM sequence: TTA
agcaaacacttatttcttta

SEQ ID NO: 255355 - DNA, 20 bp, Artificial Sequence
  Description of Artificial Sequence: Synthetic oligonucleotide
  Target: LAMA2; (-) strand; PAM type: YTN; PAM sequence: CTC
aggagaatcattaagcaaac

SEQ ID NO: 255356 - DNA, 20 bp, Artificial Sequence
  Description of Artificial Sequence: Synthetic oligonucleotide
  Target: LAMA2; (-) strand; PAM type: YTN; PAM sequence: TTC
tcaggagaatcattaagcaa

SEQ ID NO: 255357 - DNA, 20 bp, Artificial Sequence
  Description of Artificial Sequence: Synthetic oligonucleotide
  Target: LAMA2; (-) strand; PAM type: YTN; PAM sequence: TTA
ttctcaggagaatcattaag

SEQ ID NO: 255358 - DNA, 20 bp, Artificial Sequence
  Description of Artificial Sequence: Synthetic oligonucleotide
  Target: LAMA2; (-) strand; PAM type: YTN; PAM sequence: CTT
attctcaggagaatcattaa

SEQ ID NO: 255359 - DNA, 20 bp, Artificial Sequence
  Description of Artificial Sequence: Synthetic oligonucleotide
  Target: LAMA2; (-) strand; PAM type: YTN; PAM sequence: CTA
cttattctcaggagaatcat

SEQ ID NO: 255360 - DNA, 20 bp, Artificial Sequence
  Description of Artificial Sequence: Synthetic oligonucleotide
  Target: LAMA2; (-) strand; PAM type: YTN; PAM sequence: CTC
ctacttattctcaggagaat

SEQ ID NO: 255361 - DNA, 20 bp, Artificial Sequence
  Description of Artificial Sequence: Synthetic oligonucleotide
  Target: LAMA2; (-) strand; PAM type: YTN; PAM sequence: CTC
tcctacttattctcaggaga

SEQ ID NO: 255362 - DNA, 20 bp, Artificial Sequence
  Description of Artificial Sequence: Synthetic oligonucleotide
  Target: LAMA2; (-) strand; PAM type: YTN; PAM sequence: TTC
aatgatctctcctacttatt

SEQ ID NO: 255363 - DNA, 20 bp, Artificial Sequence
  Description of Artificial Sequence: Synthetic oligonucleotide
  Target: LAMA2; (-) strand; PAM type: YTN; PAM sequence: TTC
agttcaatgatctctcctac

SEQ ID NO: 255364 - DNA, 20 bp, Artificial Sequence
  Description of Artificial Sequence: Synthetic oligonucleotide
  Target: LAMA2; (-) strand; PAM type: YTN; PAM sequence: CTT
cagttcaatgatctctccta

SEQ ID NO: 255365 - DNA, 20 bp, Artificial Sequence
  Description of Artificial Sequence: Synthetic oligonucleotide
  Target: LAMA2; (-) strand; PAM type: YTN; PAM sequence: TTC
ttcagttcaatgatctctcc

SEQ ID NO: 255366 - DNA, 20 bp, Artificial Sequence
  Description of Artificial Sequence: Synthetic oligonucleotide
  Target: LAMA2; (-) strand; PAM type: YTN; PAM sequence: CTT
cttcagttcaatgatctctc

SEQ ID NO: 255367 - DNA, 20 bp, Artificial Sequence
  Description of Artificial Sequence: Synthetic oligonucleotide
  Target: LAMA2; (-) strand; PAM type: YTN; PAM sequence: TTC
ttcttcagttcaatgatctc

SEQ ID NO: 255368 - DNA, 20 bp, Artificial Sequence
  Description of Artificial Sequence: Synthetic oligonucleotide
  Target: LAMA2; (-) strand; PAM type: YTN; PAM sequence: TTT
cttcttcagttcaatgatct

SEQ ID NO: 255369 - DNA, 20 bp, Artificial Sequence
  Description of Artificial Sequence: Synthetic oligonucleotide
  Target: LAMA2; (-) strand; PAM type: YTN; PAM sequence: TTT
tcttcttcagttcaatgatc

SEQ ID NO: 255370 - DNA, 20 bp, Artificial Sequence
  Description of Artificial Sequence: Synthetic oligonucleotide
  Target: LAMA2; (-) strand; PAM type: YTN; PAM sequence: CTA
agtattttcttcttcagttc

SEQ ID NO: 255371 - DNA, 20 bp, Artificial Sequence
  Description of Artificial Sequence: Synthetic oligonucleotide
  Target: LAMA2; (-) strand; PAM type: YTN; PAM sequence: TTC
taagtattttcttcttcagt

SEQ ID NO: 255372 - DNA, 20 bp, Artificial Sequence
  Description of Artificial Sequence: Synthetic oligonucleotide
  Target: LAMA2; (-) strand; PAM type: YTN; PAM sequence: TTT
ctaagtattttcttcttcag

SEQ ID NO: 255373 - DNA, 20 bp, Artificial Sequence
  Description of Artificial Sequence: Synthetic oligonucleotide
  Target: LAMA2; (-) strand; PAM type: YTN; PAM sequence: CTG
aagtttctaagtattttctt

SEQ ID NO: 255374 - DNA, 20 bp, Artificial Sequence
  Description of Artificial Sequence: Synthetic oligonucleotide
  Target: LAMA2; (-) strand; PAM type: YTN; PAM sequence: TTC
tgaagtttctaagtattttc

SEQ ID NO: 255375 - DNA, 20 bp, Artificial Sequence
  Description of Artificial Sequence: Synthetic oligonucleotide
  Target: LAMA2; (-) strand; PAM type: YTN; PAM sequence: TTT
ctgaagtttctaagtatttt

SEQ ID NO: 255376 - DNA, 20 bp, Artificial Sequence
  Description of Artificial Sequence: Synthetic oligonucleotide
  Target: LAMA2; (-) strand; PAM type: YTN; PAM sequence: TTA
gcgtcataaatttctgaagt

SEQ ID NO: 255377 - DNA, 20 bp, Artificial Sequence
  Description of Artificial Sequence: Synthetic oligonucleotide
  Target: LAMA2; (-) strand; PAM type: YTN; PAM sequence: TTG
gtgttagcgtcataaatttc

SEQ ID NO: 255378 - DNA, 20 bp, Artificial Sequence
  Description of Artificial Sequence: Synthetic oligonucleotide
  Target: LAMA2; (-) strand; PAM type: YTN; PAM sequence: TTT
ggtgttagcgtcataaattt

SEQ ID NO: 255379 - DNA, 20 bp, Artificial Sequence
  Description of Artificial Sequence: Synthetic oligonucleotide
  Target: LAMA2; (-) strand; PAM type: YTN; PAM sequence: TTT
tggtgttagcgtcataaatt

SEQ ID NO: 255380 - DNA, 20 bp, Artificial Sequence
  Description of Artificial Sequence: Synthetic oligonucleotide
  Target: LAMA2; (-) strand; PAM type: YTN; PAM sequence: TTC
atgattttggtgttagcgtc

SEQ ID NO: 255381 - DNA, 20 bp, Artificial Sequence
  Description of Artificial Sequence: Synthetic oligonucleotide
  Target: LAMA2; (-) strand; PAM type: YTN; PAM sequence: CTT
catgattttggtgttagcgt

SEQ ID NO: 255382 - DNA, 20 bp, Artificial Sequence
  Description of Artificial Sequence: Synthetic oligonucleotide
  Target: LAMA2; (-) strand; PAM type: YTN; PAM sequence: TTA
cttcatgattttggtgttag

SEQ ID NO: 255383 - DNA, 20 bp, Artificial Sequence
  Description of Artificial Sequence: Synthetic oligonucleotide
  Target: LAMA2; (-) strand; PAM type: YTN; PAM sequence: TTT
acttcatgattttggtgtta

SEQ ID NO: 255384 - DNA, 20 bp, Artificial Sequence
  Description of Artificial Sequence: Synthetic oligonucleotide
  Target: LAMA2; (-) strand; PAM type: YTN; PAM sequence: TTC
atttacttcatgattttggt

SEQ ID NO: 255385 - DNA, 20 bp, Artificial Sequence
  Description of Artificial Sequence: Synthetic oligonucleotide
  Target: LAMA2; (-) strand; PAM type: YTN; PAM sequence: CTG
agaggaagaggagaaaaaga

SEQ ID NO: 255386 - DNA, 20 bp, Artificial Sequence
  Description of Artificial Sequence: Synthetic oligonucleotide
  Target: LAMA2; (-) strand; PAM type: YTN; PAM sequence: CTG
aaaaggggcagggactgaga

SEQ ID NO: 255387 - DNA, 20 bp, Artificial Sequence
  Description of Artificial Sequence: Synthetic oligonucleotide
  Target: LAMA2; (-) strand; PAM type: YTN; PAM sequence: TTC
acacataactgaaaaggggc

SEQ ID NO: 255388 - DNA, 20 bp, Artificial Sequence
  Description of Artificial Sequence: Synthetic oligonucleotide
  Target: LAMA2; (-) strand; PAM type: YTN; PAM sequence: CTG
gagatgagggtaatgagaat

SEQ ID NO: 255389 - DNA, 20 bp, Artificial Sequence
  Description of Artificial Sequence: Synthetic oligonucleotide
  Target: LAMA2; (-) strand; PAM type: YTN; PAM sequence: CTA
cacaatgtcagtggagaagc

SEQ ID NO: 255390 - DNA, 20 bp, Artificial Sequence
  Description of Artificial Sequence: Synthetic oligonucleotide
  Target: LAMA2; (-) strand; PAM type: YTN; PAM sequence: TTG
agtggctacacaatgtcagt

SEQ ID NO: 255391 - DNA, 20 bp, Artificial Sequence
  Description of Artificial Sequence: Synthetic oligonucleotide
  Target: LAMA2; (-) strand; PAM type: YTN; PAM sequence: TTT
gagtggctacacaatgtcag

SEQ ID NO: 255392 - DNA, 20 bp, Artificial Sequence
  Description of Artificial Sequence: Synthetic oligonucleotide
  Target: LAMA2; (-) strand; PAM type: YTN; PAM sequence: TTT
tgagtggctacacaatgtca

SEQ ID NO: 255393 - DNA, 20 bp, Artificial Sequence
  Description of Artificial Sequence: Synthetic oligonucleotide
  Target: LAMA2; (-) strand; PAM type: YTN; PAM sequence: TTG
ggtaggataagagaaaccat

SEQ ID NO: 255394 - DNA, 20 bp, Artificial Sequence
  Description of Artificial Sequence: Synthetic oligonucleotide
  Target: LAMA2; (-) strand; PAM type: YTN; PAM sequence: TTG
aacagttgggtaggataaga

SEQ ID NO: 255395 - DNA, 20 bp, Artificial Sequence
  Description of Artificial Sequence: Synthetic oligonucleotide
  Target: LAMA2; (-) strand; PAM type: YTN; PAM sequence: CTT
gaacagttgggtaggataag

SEQ ID NO: 255396 - DNA, 20 bp, Artificial Sequence
  Description of Artificial Sequence: Synthetic oligonucleotide
  Target: LAMA2; (-) strand; PAM type: YTN; PAM sequence: TTA
tcttgaacagttgggtagga

SEQ ID NO: 255397 - DNA, 20 bp, Artificial Sequence
  Description of Artificial Sequence: Synthetic oligonucleotide
  Target: LAMA2; (-) strand; PAM type: YTN; PAM sequence: TTA
ttatcttgaacagttgggta

SEQ ID NO: 255398 - DNA, 20 bp, Artificial Sequence
  Description of Artificial Sequence: Synthetic oligonucleotide
  Target: LAMA2; (-) strand; PAM type: YTN; PAM sequence: CTA
attattatcttgaacagttg

SEQ ID NO: 255399 - DNA, 20 bp, Artificial Sequence
  Description of Artificial Sequence: Synthetic oligonucleotide
  Target: LAMA2; (-) strand; PAM type: YTN; PAM sequence: TTC
aactaattattatcttgaac

SEQ ID NO: 255400 - DNA, 20 bp, Artificial Sequence
  Description of Artificial Sequence: Synthetic oligonucleotide
  Target: LAMA2; (-) strand; PAM type: YTN; PAM sequence: TTT
caactaattattatcttgaa

SEQ ID NO: 255401 - DNA, 20 bp, Artificial Sequence
  Description of Artificial Sequence: Synthetic oligonucleotide
  Target: LAMA2; (-) strand; PAM type: YTN; PAM sequence: CTT
tcaactaattattatcttga

SEQ ID NO: 255402 - DNA, 20 bp, Artificial Sequence
  Description of Artificial Sequence: Synthetic oligonucleotide
  Target: LAMA2; (-) strand; PAM type: YTN; PAM sequence: CTC
ctttcaactaattattatct

SEQ ID NO: 255403 - DNA, 20 bp, Artificial Sequence
  Description of Artificial Sequence: Synthetic oligonucleotide
  Target: LAMA2; (-) strand; PAM type: YTN; PAM sequence: TTG
catacacaacaggggatcag

SEQ ID NO: 255404 - DNA, 20 bp, Artificial Sequence
  Description of Artificial Sequence: Synthetic oligonucleotide
  Target: LAMA2; (-) strand; PAM type: YTN; PAM sequence: TTT
gcatacacaacaggggatca

SEQ ID NO: 255405 - DNA, 20 bp, Artificial Sequence
  Description of Artificial Sequence: Synthetic oligonucleotide
  Target: LAMA2; (-) strand; PAM type: YTN; PAM sequence: CTG
tatttgcatacacaacaggg

SEQ ID NO: 255406 - DNA, 20 bp, Artificial Sequence
  Description of Artificial Sequence: Synthetic oligonucleotide
  Target: LAMA2; (-) strand; PAM type: YTN; PAM sequence: TTC
tgtatttgcatacacaacag

SEQ ID NO: 255407 - DNA, 20 bp, Artificial Sequence
  Description of Artificial Sequence: Synthetic oligonucleotide
  Target: LAMA2; (-) strand; PAM type: YTN; PAM sequence: TTA
gaaaatcagggcatgttctg

SEQ ID NO: 255408 - DNA, 20 bp, Artificial Sequence
  Description of Artificial Sequence: Synthetic oligonucleotide
  Target: LAMA2; (-) strand; PAM type: YTN; PAM sequence: TTA
gggttagaaaatcagggcat

SEQ ID NO: 255409 - DNA, 20 bp, Artificial Sequence
  Description of Artificial Sequence: Synthetic oligonucleotide
  Target: LAMA2; (-) strand; PAM type: YTN; PAM sequence: TTC
catcattagggttagaaaat

SEQ ID NO: 255410 - DNA, 20 bp, Artificial Sequence
  Description of Artificial Sequence: Synthetic oligonucleotide
  Target: LAMA2; (-) strand; PAM type: YTN; PAM sequence: CTT
ccatcattagggttagaaaa

SEQ ID NO: 255411 - DNA, 20 bp, Artificial Sequence
  Description of Artificial Sequence: Synthetic oligonucleotide
  Target: LAMA2; (-) strand; PAM type: YTN; PAM sequence: TTA
aaacttccatcattagggtt

SEQ ID NO: 255412 - DNA, 20 bp, Artificial Sequence
  Description of Artificial Sequence: Synthetic oligonucleotide
  Target: LAMA2; (-) strand; PAM type: YTN; PAM sequence: TTA
atcatgggtataaaattaaa

SEQ ID NO: 255413 - DNA, 20 bp, Artificial Sequence
  Description of Artificial Sequence: Synthetic oligonucleotide
  Target: LAMA2; (-) strand; PAM type: YTN; PAM sequence: TTT
aatcatgggtataaaattaa

SEQ ID NO: 255414 - DNA, 20 bp, Artificial Sequence
  Description of Artificial Sequence: Synthetic oligonucleotide
  Target: LAMA2; (-) strand; PAM type: YTN; PAM sequence: CTT
taatcatgggtataaaatta

SEQ ID NO: 255415 - DNA, 20 bp, Artificial Sequence
  Description of Artificial Sequence: Synthetic oligonucleotide
  Target: LAMA2; (-) strand; PAM type: YTN; PAM sequence: CTC
ctttaatcatgggtataaaa

SEQ ID NO: 255416 - DNA, 20 bp, Artificial Sequence
  Description of Artificial Sequence: Synthetic oligonucleotide
  Target: LAMA2; (-) strand; PAM type: YTN; PAM sequence: TTG
tatgtgatataaaacaagca

SEQ ID NO: 255417 - DNA, 20 bp, Artificial Sequence
  Description of Artificial Sequence: Synthetic oligonucleotide
  Target: LAMA2; (-) strand; PAM type: YTN; PAM sequence: TTG
ggattgtatgtgatataaaa

SEQ ID NO: 255418 - DNA, 20 bp, Artificial Sequence
  Description of Artificial Sequence: Synthetic oligonucleotide
  Target: LAMA2; (-) strand; PAM type: YTN; PAM sequence: CTT
gggattgtatgtgatataaa

SEQ ID NO: 255419 - DNA, 20 bp, Artificial Sequence
  Description of Artificial Sequence: Synthetic oligonucleotide
  Target: LAMA2; (-) strand; PAM type: YTN; PAM sequence: TTC
ttgggattgtatgtgatata

SEQ ID NO: 255420 - DNA, 20 bp, Artificial Sequence
  Description of Artificial Sequence: Synthetic oligonucleotide
  Target: LAMA2; (-) strand; PAM type: YTN; PAM sequence: CTT
cttgggattgtatgtgatat

SEQ ID NO: 255421 - DNA, 20 bp, Artificial Sequence
  Description of Artificial Sequence: Synthetic oligonucleotide
  Target: LAMA2; (-) strand; PAM type: YTN; PAM sequence: TTG
cttcttgggattgtatgtga

SEQ ID NO: 255422 - DNA, 20 bp, Artificial Sequence
  Description of Artificial Sequence: Synthetic oligonucleotide
  Target: LAMA2; (-) strand; PAM type: YTN; PAM sequence: TTG
aaataaaatataatgaattg

SEQ ID NO: 255423 - DNA, 20 bp, Artificial Sequence
  Description of Artificial Sequence: Synthetic oligonucleotide
  Target: LAMA2; (-) strand; PAM type: YTN; PAM sequence: TTT
gaaataaaatataatgaatt

SEQ ID NO: 255424 - DNA, 20 bp, Artificial Sequence
  Description of Artificial Sequence: Synthetic oligonucleotide
  Target: LAMA2; (-) strand; PAM type: YTN; PAM sequence: CTG
tcatgcatttgaaataaaat

SEQ ID NO: 255425 - DNA, 20 bp, Artificial Sequence
  Description of Artificial Sequence: Synthetic oligonucleotide
  Target: LAMA2; (-) strand; PAM type: YTN; PAM sequence: TTA
actgtcatgcatttgaaata

SEQ ID NO: 255426 - DNA, 20 bp, Artificial Sequence
  Description of Artificial Sequence: Synthetic oligonucleotide
  Target: LAMA2; (-) strand; PAM type: YTN; PAM sequence: TTT
aactgtcatgcatttgaaat

SEQ ID NO: 255427 - DNA, 20 bp, Artificial Sequence
  Description of Artificial Sequence: Synthetic oligonucleotide
  Target: LAMA2; (-) strand; PAM type: YTN; PAM sequence: CTT
taactgtcatgcatttgaaa

SEQ ID NO: 255428 - DNA, 20 bp, Artificial Sequence
  Description of Artificial Sequence: Synthetic oligonucleotide
  Target: LAMA2; (-) strand; PAM type: YTN; PAM sequence: TTG
tgtgtctttaactgtcatgc

SEQ ID NO: 255429 - DNA, 20 bp, Artificial Sequence
  Description of Artificial Sequence: Synthetic oligonucleotide
  Target: LAMA2; (-) strand; PAM type: YTN; PAM sequence: TTT
gtgtgtctttaactgtcatg

SEQ ID NO: 255430 - DNA, 20 bp, Artificial Sequence
  Description of Artificial Sequence: Synthetic oligonucleotide
  Target: LAMA2; (-) strand; PAM type: YTN; PAM sequence: TTT
tgtgtgtctttaactgtcat

SEQ ID NO: 255431 - DNA, 20 bp, Artificial Sequence
  Description of Artificial Sequence: Synthetic oligonucleotide
  Target: LAMA2; (-) strand; PAM type: YTN; PAM sequence: TTA
agtcaatgtgtgagaatatt

SEQ ID NO: 255432 - DNA, 20 bp, Artificial Sequence
  Description of Artificial Sequence: Synthetic oligonucleotide
  Target: LAMA2; (-) strand; PAM type: YTN; PAM sequence: TTA
aacacatattaagtcaatgt

SEQ ID NO: 255433 - DNA, 20 bp, Artificial Sequence
  Description of Artificial Sequence: Synthetic oligonucleotide
  Target: LAMA2; (-) strand; PAM type: YTN; PAM sequence: CTA
aaataaaattaaacacatat

SEQ ID NO: 255434 - DNA, 20 bp, Artificial Sequence
  Description of Artificial Sequence: Synthetic oligonucleotide
  Target: LAMA2; (-) strand; PAM type: YTN; PAM sequence: CTC
taaaataaaattaaacacat

SEQ ID NO: 255435 - DNA, 20 bp, Artificial Sequence
  Description of Artificial Sequence: Synthetic oligonucleotide
  Target: LAMA2; (-) strand; PAM type: YTN; PAM sequence: TTA
atccaatactctaaaataaa

SEQ ID NO: 255436 - DNA, 20 bp, Artificial Sequence
  Description of Artificial Sequence: Synthetic oligonucleotide
  Target: LAMA2; (-) strand; PAM type: YTN; PAM sequence: CTC
ccacagagagttaatccaat

SEQ ID NO: 255437 - DNA, 20 bp, Artificial Sequence
  Description of Artificial Sequence: Synthetic oligonucleotide
  Target: LAMA2; (-) strand; PAM type: YTN; PAM sequence: TTA
aatgctcccacagagagtta

SEQ ID NO: 255438 - DNA, 20 bp, Artificial Sequence
  Description of Artificial Sequence: Synthetic oligonucleotide
  Target: LAMA2; (-) strand; PAM type: YTN; PAM sequence: CTA
acgttaaatgctcccacaga

SEQ ID NO: 255439 - DNA, 20 bp, Artificial Sequence
  Description of Artificial Sequence: Synthetic oligonucleotide
  Target: LAMA2; (-) strand; PAM type: YTN; PAM sequence: TTC
taacgttaaatgctcccaca

SEQ ID NO: 255440 - DNA, 20 bp, Artificial Sequence
  Description of Artificial Sequence: Synthetic oligonucleotide
  Target: LAMA2; (-) strand; PAM type: YTN; PAM sequence: TTC
agttctaacgttaaatgctc

SEQ ID NO: 255441 - DNA, 20 bp, Artificial Sequence
  Description of Artificial Sequence: Synthetic oligonucleotide
  Target: LAMA2; (-) strand; PAM type: YTN; PAM sequence: CTG
aaattcagttctaacgttaa

SEQ ID NO: 255442 - DNA, 20 bp, Artificial Sequence
  Description of Artificial Sequence: Synthetic oligonucleotide
  Target: LAMA2; (-) strand; PAM type: YTN; PAM sequence: CTG
tgggtcctgaaattcagttc

SEQ ID NO: 255443 - DNA, 20 bp, Artificial Sequence
  Description of Artificial Sequence: Synthetic oligonucleotide
  Target: LAMA2; (-) strand; PAM type: YTN; PAM sequence: TTC
tgtgggtcctgaaattcagt

SEQ ID NO: 255444 - DNA, 20 bp, Artificial Sequence
  Description of Artificial Sequence: Synthetic oligonucleotide
  Target: LAMA2; (-) strand; PAM type: YTN; PAM sequence: CTT
ctgtgggtcctgaaattcag

SEQ ID NO: 255445 - DNA, 20 bp, Artificial Sequence
  Description of Artificial Sequence: Synthetic oligonucleotide
  Target: LAMA2; (-) strand; PAM type: YTN; PAM sequence: CTG
tgggtccttctgtgggtcct

SEQ ID NO: 255446 - DNA, 20 bp, Artificial Sequence
  Description of Artificial Sequence: Synthetic oligonucleotide
  Target: LAMA2; (-) strand; PAM type: YTN; PAM sequence: TTC
tgtgggtccttctgtgggtc

SEQ ID NO: 255447 - DNA, 20 bp, Artificial Sequence
  Description of Artificial Sequence: Synthetic oligonucleotide
  Target: LAMA2; (-) strand; PAM type: YTN; PAM sequence: CTT
ctgtgggtccttctgtgggt

SEQ ID NO: 255448 - DNA, 20 bp, Artificial Sequence
  Description of Artificial Sequence: Synthetic oligonucleotide
  Target: LAMA2; (-) strand; PAM type: YTN; PAM sequence: TTC
ttctgtgggtccttctgtgg

SEQ ID NO: 255449 - DNA, 20 bp, Artificial Sequence
  Description of Artificial Sequence: Synthetic oligonucleotide
  Target: LAMA2; (-) strand; PAM type: YTN; PAM sequence: CTT
cttctgtgggtccttctgtg

SEQ ID NO: 255450 - DNA, 20 bp, Artificial Sequence
  Description of Artificial Sequence: Synthetic oligonucleotide
  Target: LAMA2; (-) strand; PAM type: YTN; PAM sequence: TTA
gggaaacttcttctgtgggt

SEQ ID NO: 255451 - DNA, 20 bp, Artificial Sequence
  Description of Artificial Sequence: Synthetic oligonucleotide
  Target: LAMA2; (-) strand; PAM type: YTN; PAM sequence: TTA
tcagacattagggaaacttc

SEQ ID NO: 255452 - DNA, 20 bp, Artificial Sequence
  Description of Artificial Sequence: Synthetic oligonucleotide
  Target: LAMA2; (-) strand; PAM type: YTN; PAM sequence: CTG
attatcagacattagggaaa

SEQ ID NO: 255453 - DNA, 20 bp, Artificial Sequence
  Description of Artificial Sequence: Synthetic oligonucleotide
  Target: LAMA2; (-) strand; PAM type: YTN; PAM sequence: TTC
ctgattatcagacattaggg

SEQ ID NO: 255454 - DNA, 20 bp, Artificial Sequence
  Description of Artificial Sequence: Synthetic oligonucleotide
  Target: LAMA2; (-) strand; PAM type: YTN; PAM sequence: CTC
aacaattcctgattatcaga

SEQ ID NO: 255455 - DNA, 20 bp, Artificial Sequence
  Description of Artificial Sequence: Synthetic oligonucleotide
  Target: LAMA2; (-) strand; PAM type: YTN; PAM sequence: CTC
aatagaagctcaacaattcc

SEQ ID NO: 255456 - DNA, 20 bp, Artificial Sequence
  Description of Artificial Sequence: Synthetic oligonucleotide
  Target: LAMA2; (-) strand; PAM type: YTN; PAM sequence: TTG
ctcaatagaagctcaacaat

SEQ ID NO: 255457 - DNA, 20 bp, Artificial Sequence
  Description of Artificial Sequence: Synthetic oligonucleotide
  Target: LAMA2; (-) strand; PAM type: YTN; PAM sequence: TTC
agagcagccagaagccaaaa

SEQ ID NO: 255458 - DNA, 20 bp, Artificial Sequence
  Description of Artificial Sequence: Synthetic oligonucleotide
  Target: LAMA2; (-) strand; PAM type: YTN; PAM sequence: CTA
atgcaaaagggaacaatcaa

SEQ ID NO: 255459 - DNA, 20 bp, Artificial Sequence
  Description of Artificial Sequence: Synthetic oligonucleotide
  Target: LAMA2; (-) strand; PAM type: YTN; PAM sequence: TTC
acagctaatgcaaaagggaa

SEQ ID NO: 255460 - DNA, 20 bp, Artificial Sequence
  Description of Artificial Sequence: Synthetic oligonucleotide
  Target: LAMA2; (-) strand; PAM type: YTN; PAM sequence: TTT
cacagctaatgcaaaaggga

SEQ ID NO: 255461 - DNA, 20 bp, Artificial Sequence
  Description of Artificial Sequence: Synthetic oligonucleotide
  Target: LAMA2; (-) strand; PAM type: YTN; PAM sequence: TTT
tcacagctaatgcaaaaggg

SEQ ID NO: 255462 - DNA, 20 bp, Artificial Sequence
  Description of Artificial Sequence: Synthetic oligonucleotide
  Target: LAMA2; (-) strand; PAM type: YTN; PAM sequence: TTT
ttcacagctaatgcaaaagg

SEQ ID NO: 255463 - DNA, 20 bp, Artificial Sequence
  Description of Artificial Sequence: Synthetic oligonucleotide
  Target: LAMA2; (-) strand; PAM type: YTN; PAM sequence: TTG
aggtttttcacagctaatgc

SEQ ID NO: 255464 - DNA, 20 bp, Artificial Sequence
  Description of Artificial Sequence: Synthetic oligonucleotide
  Target: LAMA2; (-) strand; PAM type: YTN; PAM sequence: TTT
gaggtttttcacagctaatg

SEQ ID NO: 255465 - DNA, 20 bp, Artificial Sequence
  Description of Artificial Sequence: Synthetic oligonucleotide
  Target: LAMA2; (-) strand; PAM type: YTN; PAM sequence: CTT
tgaggtttttcacagctaat

SEQ ID NO: 255466 - DNA, 20 bp, Artificial Sequence
  Description of Artificial Sequence: Synthetic oligonucleotide
  Target: LAMA2; (-) strand; PAM type: YTN; PAM sequence: TTG
gctttgaggtttttcacagc

SEQ ID NO: 255467 - DNA, 20 bp, Artificial Sequence
  Description of Artificial Sequence: Synthetic oligonucleotide
  Target: LAMA2; (-) strand; PAM type: YTN; PAM sequence: TTT
ggctttgaggtttttcacag

SEQ ID NO: 255468 - DNA, 20 bp, Artificial Sequence
  Description of Artificial Sequence: Synthetic oligonucleotide
  Target: LAMA2; (-) strand; PAM type: YTN; PAM sequence: TTG
ataagggtggatcaacattt

SEQ ID NO: 255469 - DNA, 20 bp, Artificial Sequence
  Description of Artificial Sequence: Synthetic oligonucleotide
  Target: LAMA2; (-) strand; PAM type: YTN; PAM sequence: TTT
gataagggtggatcaacatt

SEQ ID NO: 255470 - DNA, 20 bp, Artificial Sequence
  Description of Artificial Sequence: Synthetic oligonucleotide
  Target: LAMA2; (-) strand; PAM type: YTN; PAM sequence: TTC
atttgataagggtggatcaa

SEQ ID NO: 255471 - DNA, 20 bp, Artificial Sequence
  Description of Artificial Sequence: Synthetic oligonucleotide
  Target: LAMA2; (-) strand; PAM type: YTN; PAM sequence: TTA
taacatatgttcatttgata

SEQ ID NO: 255472 - DNA, 20 bp, Artificial Sequence
  Description of Artificial Sequence: Synthetic oligonucleotide
  Target: LAMA2; (-) strand; PAM type: YTN; PAM sequence: TTC
aaaatgcatgttataacata

SEQ ID NO: 255473 - DNA, 20 bp, Artificial Sequence
  Description of Artificial Sequence: Synthetic oligonucleotide
  Target: LAMA2; (-) strand; PAM type: YTN; PAM sequence: TTA
gaattcaaaatgcatgttat

SEQ ID NO: 255474 - DNA, 20 bp, Artificial Sequence
  Description of Artificial Sequence: Synthetic oligonucleotide
  Target: LAMA2; (-) strand; PAM type: YTN; PAM sequence: TTT
agaattcaaaatgcatgtta

SEQ ID NO: 255475 - DNA, 20 bp, Artificial Sequence
  Description of Artificial Sequence: Synthetic oligonucleotide
  Target: LAMA2; (-) strand; PAM type: YTN; PAM sequence: TTA
agggtgtatttagaattcaa

SEQ ID NO: 255476 - DNA, 20 bp, Artificial Sequence
  Description of Artificial Sequence: Synthetic oligonucleotide
  Target: LAMA2; (-) strand; PAM type: YTN; PAM sequence: CTT
aagggtgtatttagaattca

SEQ ID NO: 255477 - DNA, 20 bp, Artificial Sequence
  Description of Artificial Sequence: Synthetic oligonucleotide
  Target: LAMA2; (-) strand; PAM type: YTN; PAM sequence: CTA
aaaaaaagataaacttaagg

SEQ ID NO: 255478 - DNA, 20 bp, Artificial Sequence
  Description of Artificial Sequence: Synthetic oligonucleotide
  Target: LAMA2; (-) strand; PAM type: YTN; PAM sequence: TTA
aagagaaaaaaatactaaaa

SEQ ID NO: 255479 - DNA, 20 bp, Artificial Sequence
  Description of Artificial Sequence: Synthetic oligonucleotide
  Target: LAMA2; (-) strand; PAM type: YTN; PAM sequence: TTA
agaataaagcaaggttaaag

SEQ ID NO: 255480 - DNA, 20 bp, Artificial Sequence
  Description of Artificial Sequence: Synthetic oligonucleotide
  Target: LAMA2; (-) strand; PAM type: YTN; PAM sequence: CTG
tcaaaatatgtgcattaaga

SEQ ID NO: 255481 - DNA, 20 bp, Artificial Sequence
  Description of Artificial Sequence: Synthetic oligonucleotide
  Target: LAMA2; (-) strand; PAM type: YTN; PAM sequence: CTA
tctgtcaaaatatgtgcatt

SEQ ID NO: 255482 - DNA, 20 bp, Artificial Sequence
  Description of Artificial Sequence: Synthetic oligonucleotide
  Target: LAMA2; (-) strand; PAM type: YTN; PAM sequence: TTC
tatctgtcaaaatatgtgca

SEQ ID NO: 255483 - DNA, 20 bp, Artificial Sequence
  Description of Artificial Sequence: Synthetic oligonucleotide
  Target: LAMA2; (-) strand; PAM type: YTN; PAM sequence: TTA
attctatctgtcaaaatatg

SEQ ID NO: 255484 - DNA, 20 bp, Artificial Sequence
  Description of Artificial Sequence: Synthetic oligonucleotide
  Target: LAMA2; (-) strand; PAM type: YTN; PAM sequence: TTT
aattctatctgtcaaaatat

SEQ ID NO: 255485 - DNA, 20 bp, Artificial Sequence
  Description of Artificial Sequence: Synthetic oligonucleotide
  Target: LAMA2; (-) strand; PAM type: YTN; PAM sequence: CTA
aaaagaatttaattctatct

SEQ ID NO: 255486 - DNA, 20 bp, Artificial Sequence
  Description of Artificial Sequence: Synthetic oligonucleotide
  Target: LAMA2; (-) strand; PAM type: YTN; PAM sequence: TTC
taaaaagaatttaattctat

SEQ ID NO: 255487 - DNA, 20 bp, Artificial Sequence
  Description of Artificial Sequence: Synthetic oligonucleotide
  Target: LAMA2; (-) strand; PAM type: YTN; PAM sequence: TTG
ttctaaaaagaatttaattc

SEQ ID NO: 255488 - DNA, 20 bp, Artificial Sequence
  Description of Artificial Sequence: Synthetic oligonucleotide
  Target: LAMA2; (-) strand; PAM type: YTN; PAM sequence: CTT
gttctaaaaagaatttaatt

SEQ ID NO: 255489 - DNA, 20 bp, Artificial Sequence
  Description of Artificial Sequence: Synthetic oligonucleotide
  Target: LAMA2; (-) strand; PAM type: YTN; PAM sequence: TTA
accttgttctaaaaagaatt

SEQ ID NO: 255490 - DNA, 20 bp, Artificial Sequence
  Description of Artificial Sequence: Synthetic oligonucleotide
  Target: LAMA2; (-) strand; PAM type: YTN; PAM sequence: TTA
tgtatgtgaatgcatacata

SEQ ID NO: 255491 - DNA, 20 bp, Artificial Sequence
  Description of Artificial Sequence: Synthetic oligonucleotide
  Target: LAMA2; (-) strand; PAM type: YTN; PAM sequence: TTT
atgtatgtgaatgcatacat

SEQ ID NO: 255492 - DNA, 20 bp, Artificial Sequence
  Description of Artificial Sequence: Synthetic oligonucleotide
  Target: LAMA2; (-) strand; PAM type: YTN; PAM sequence: CTA
tatatgtttatgtatgtgaa

SEQ ID NO: 255493 - DNA, 20 bp, Artificial Sequence
  Description of Artificial Sequence: Synthetic oligonucleotide
  Target: LAMA2; (-) strand; PAM type: YTN; PAM sequence: CTA
tgtcaacaatctatatatgt

SEQ ID NO: 255494 - DNA, 20 bp, Artificial Sequence
  Description of Artificial Sequence: Synthetic oligonucleotide
  Target: LAMA2; (-) strand; PAM type: YTN; PAM sequence: TTA
taagcatgtatatatgtatg

SEQ ID NO: 255495 - DNA, 20 bp, Artificial Sequence
  Description of Artificial Sequence: Synthetic oligonucleotide
  Target: LAMA2; (-) strand; PAM type: YTN; PAM sequence: CTT
ataagcatgtatatatgtat

SEQ ID NO: 255496 - DNA, 20 bp, Artificial Sequence
  Description of Artificial Sequence: Synthetic oligonucleotide
  Target: LAMA2; (-) strand; PAM type: YTN; PAM sequence: CTA
cttataagcatgtatatatg

SEQ ID NO: 255497 - DNA, 20 bp, Artificial Sequence
  Description of Artificial Sequence: Synthetic oligonucleotide
  Target: LAMA2; (-) strand; PAM type: YTN; PAM sequence: TTA
taatctacttataagcatgt

SEQ ID NO: 255498 - DNA, 20 bp, Artificial Sequence
  Description of Artificial Sequence: Synthetic oligonucleotide
  Target: LAMA2; (-) strand; PAM type: YTN; PAM sequence: TTT
ataatctacttataagcatg

SEQ ID NO: 255499 - DNA, 20 bp, Artificial Sequence
  Description of Artificial Sequence: Synthetic oligonucleotide
  Target: LAMA2; (-) strand; PAM type: YTN; PAM sequence: TTT
tataatctacttataagcat

SEQ ID NO: 255500 - DNA, 20 bp, Artificial Sequence
  Description of Artificial Sequence: Synthetic oligonucleotide
  Target: LAMA2; (-) strand; PAM type: YTN; PAM sequence: TTT
ttataatctacttataagca

SEQ ID NO: 255501 - DNA, 20 bp, Artificial Sequence
  Description of Artificial Sequence: Synthetic oligonucleotide
  Target: LAMA2; (-) strand; PAM type: YTN; PAM sequence: TTA
tttttataatctacttataa

SEQ ID NO: 255502 - DNA, 20 bp, Artificial Sequence
  Description of Artificial Sequence: Synthetic oligonucleotide
  Target: LAMA2; (-) strand; PAM type: YTN; PAM sequence: TTT
atttttataatctacttata

SEQ ID NO: 255503 - DNA, 20 bp, Artificial Sequence
  Description of Artificial Sequence: Synthetic oligonucleotide
  Target: LAMA2; (-) strand; PAM type: YTN; PAM sequence: TTT
tatttttataatctacttat

SEQ ID NO: 255504 - DNA, 20 bp, Artificial Sequence
  Description of Artificial Sequence: Synthetic oligonucleotide
  Target: LAMA2; (-) strand; PAM type: YTN; PAM sequence: CTT
ttatttttataatctactta

SEQ ID NO: 255505 - DNA, 20 bp, Artificial Sequence
  Description of Artificial Sequence: Synthetic oligonucleotide
  Target: LAMA2; (-) strand; PAM type: YTN; PAM sequence: CTG
aatatatacttttattttta

SEQ ID NO: 255506 - DNA, 20 bp, Artificial Sequence
  Description of Artificial Sequence: Synthetic oligonucleotide
  Target: LAMA2; (-) strand; PAM type: YTN; PAM sequence: TTA
atggctgaatatatactttt

SEQ ID NO: 255507 - DNA, 20 bp, Artificial Sequence
  Description of Artificial Sequence: Synthetic oligonucleotide
  Target: LAMA2; (-) strand; PAM type: YTN; PAM sequence: CTT
aatggctgaatatatacttt

SEQ ID NO: 255508 - DNA, 20 bp, Artificial Sequence
  Description of Artificial Sequence: Synthetic oligonucleotide
  Target: LAMA2; (-) strand; PAM type: YTN; PAM sequence: CTC
ttaatggctgaatatatact

SEQ ID NO: 255509 - DNA, 20 bp, Artificial Sequence
  Description of Artificial Sequence: Synthetic oligonucleotide
  Target: LAMA2; (-) strand; PAM type: YTN; PAM sequence: CTG
gacatgaaaataatccctct

SEQ ID NO: 255510 - DNA, 20 bp, Artificial Sequence
  Description of Artificial Sequence: Synthetic oligonucleotide
  Target: LAMA2; (-) strand; PAM type: YTN; PAM sequence: TTG
ggataaccaataaaaagctg

SEQ ID NO: 255511 - DNA, 20 bp, Artificial Sequence
  Description of Artificial Sequence: Synthetic oligonucleotide
  Target: LAMA2; (-) strand; PAM type: YTN; PAM sequence: TTA
ttgggataaccaataaaaag

SEQ ID NO: 255512 - DNA, 20 bp, Artificial Sequence
  Description of Artificial Sequence: Synthetic oligonucleotide
  Target: LAMA2; (-) strand; PAM type: YTN; PAM sequence: CTG
ttattgggataaccaataaa

SEQ ID NO: 255513 - DNA, 20 bp, Artificial Sequence
  Description of Artificial Sequence: Synthetic oligonucleotide
  Target: LAMA2; (-) strand; PAM type: YTN; PAM sequence: TTC
cacaaataggggaggagggg

SEQ ID NO: 255514 - DNA, 20 bp, Artificial Sequence
  Description of Artificial Sequence: Synthetic oligonucleotide
  Target: LAMA2; (-) strand; PAM type: YTN; PAM sequence: TTT
ccacaaataggggaggaggg

SEQ ID NO: 255515 - DNA, 20 bp, Artificial Sequence
  Description of Artificial Sequence: Synthetic oligonucleotide
  Target: LAMA2; (-) strand; PAM type: YTN; PAM sequence: TTT
tccacaaataggggaggagg

SEQ ID NO: 255516 - DNA, 20 bp, Artificial Sequence
  Description of Artificial Sequence: Synthetic oligonucleotide
  Target: LAMA2; (-) strand; PAM type: YTN; PAM sequence: TTA
tccaaaccacgccacaggaa

SEQ ID NO: 255517 - DNA, 20 bp, Artificial Sequence
  Description of Artificial Sequence: Synthetic oligonucleotide
  Target: LAMA2; (-) strand; PAM type: YTN; PAM sequence: TTC
atcccggattatccaaacca

SEQ ID NO: 255518 - DNA, 20 bp, Artificial Sequence
  Description of Artificial Sequence: Synthetic oligonucleotide
  Target: LAMA2; (-) strand; PAM type: YTN; PAM sequence: CTT
catcccggattatccaaacc

SEQ ID NO: 255519 - DNA, 20 bp, Artificial Sequence
  Description of Artificial Sequence: Synthetic oligonucleotide
  Target: LAMA2; (-) strand; PAM type: YTN; PAM sequence: TTC
ttcatcccggattatccaaa

SEQ ID NO: 255520 - DNA, 20 bp, Artificial Sequence
  Description of Artificial Sequence: Synthetic oligonucleotide
  Target: LAMA2; (-) strand; PAM type: YTN; PAM sequence: CTC
cacaccagcagaaaatgttc

SEQ ID NO: 255521 - DNA, 20 bp, Artificial Sequence
  Description of Artificial Sequence: Synthetic oligonucleotide
  Target: LAMA2; (-) strand; PAM type: YTN; PAM sequence: CTA
gctccacaccagcagaaaat

SEQ ID NO: 255522 - DNA, 20 bp, Artificial Sequence
  Description of Artificial Sequence: Synthetic oligonucleotide
  Target: LAMA2; (-) strand; PAM type: YTN; PAM sequence: TTG
gctagctccacaccagcaga

SEQ ID NO: 255523 - DNA, 20 bp, Artificial Sequence
  Description of Artificial Sequence: Synthetic oligonucleotide
  Target: LAMA2; (-) strand; PAM type: YTN; PAM sequence: TTT
ggctagctccacaccagcag

SEQ ID NO: 255524 - DNA, 20 bp, Artificial Sequence
  Description of Artificial Sequence: Synthetic oligonucleotide
  Target: LAMA2; (-) strand; PAM type: YTN; PAM sequence: CTA
tttggctagctccacaccag

SEQ ID NO: 255525 - DNA, 20 bp, Artificial Sequence
  Description of Artificial Sequence: Synthetic oligonucleotide
  Target: LAMA2; (-) strand; PAM type: YTN; PAM sequence: CTC
tatttggctagctccacacc

SEQ ID NO: 255526 - DNA, 20 bp, Artificial Sequence
  Description of Artificial Sequence: Synthetic oligonucleotide
  Target: LAMA2; (-) strand; PAM type: YTN; PAM sequence: TTA
actctatttggctagctcca

SEQ ID NO: 255527 - DNA, 20 bp, Artificial Sequence
  Description of Artificial Sequence: Synthetic oligonucleotide
  Target: LAMA2; (-) strand; PAM type: YTN; PAM sequence: TTT
aactctatttggctagctcc

SEQ ID NO: 255528 - DNA, 20 bp, Artificial Sequence
  Description of Artificial Sequence: Synthetic oligonucleotide
  Target: LAMA2; (-) strand; PAM type: YTN; PAM sequence: TTA
tgtcatttaactctatttgg

SEQ ID NO: 255529 - DNA, 20 bp, Artificial Sequence
  Description of Artificial Sequence: Synthetic oligonucleotide
  Target: LAMA2; (-) strand; PAM type: YTN; PAM sequence: TTC
caagattatgtcatttaact

SEQ ID NO: 255530 - DNA, 20 bp, Artificial Sequence
  Description of Artificial Sequence: Synthetic oligonucleotide
  Target: LAMA2; (-) strand; PAM type: YTN; PAM sequence: CTC
aagtgattccaagattatgt

SEQ ID NO: 255531 - DNA, 20 bp, Artificial Sequence
  Description of Artificial Sequence: Synthetic oligonucleotide
  Target: LAMA2; (-) strand; PAM type: YTN; PAM sequence: TTG
acctcaagtgattccaagat

SEQ ID NO: 255532 - DNA, 20 bp, Artificial Sequence
  Description of Artificial Sequence: Synthetic oligonucleotide
  Target: LAMA2; (-) strand; PAM type: YTN; PAM sequence: TTG
tgagatcatcattgacctca

SEQ ID NO: 255533 - DNA, 20 bp, Artificial Sequence
  Description of Artificial Sequence: Synthetic oligonucleotide
  Target: LAMA2; (-) strand; PAM type: YTN; PAM sequence: TTC
cgtgacacaaagaggaaatt

SEQ ID NO: 255534 - DNA, 20 bp, Artificial Sequence
  Description of Artificial Sequence: Synthetic oligonucleotide
  Target: LAMA2; (-) strand; PAM type: YTN; PAM sequence: TTG
ttccgtgacacaaagaggaa

SEQ ID NO: 255535 - DNA, 20 bp, Artificial Sequence
  Description of Artificial Sequence: Synthetic oligonucleotide
  Target: LAMA2; (-) strand; PAM type: YTN; PAM sequence: CTA
attgttccgtgacacaaaga

SEQ ID NO: 255536 - DNA, 20 bp, Artificial Sequence
  Description of Artificial Sequence: Synthetic oligonucleotide
  Target: LAMA2; (-) strand; PAM type: YTN; PAM sequence: TTG
gccaagacatgaagctaatt

SEQ ID NO: 255537 - DNA, 20 bp, Artificial Sequence
  Description of Artificial Sequence: Synthetic oligonucleotide
  Target: LAMA2; (-) strand; PAM type: YTN; PAM sequence: TTT
ggccaagacatgaagctaat

SEQ ID NO: 255538 - DNA, 20 bp, Artificial Sequence
  Description of Artificial Sequence: Synthetic oligonucleotide
  Target: LAMA2; (-) strand; PAM type: YTN; PAM sequence: TTT
tggccaagacatgaagctaa

SEQ ID NO: 255539 - DNA, 20 bp, Artificial Sequence
  Description of Artificial Sequence: Synthetic oligonucleotide
  Target: LAMA2; (-) strand; PAM type: YTN; PAM sequence: CTA
attttggccaagacatgaag

SEQ ID NO: 255540 - DNA, 20 bp, Artificial Sequence
  Description of Artificial Sequence: Synthetic oligonucleotide
  Target: LAMA2; (-) strand; PAM type: YTN; PAM sequence: TTA
gcactaattttggccaagac

SEQ ID NO: 255541 - DNA, 20 bp, Artificial Sequence
  Description of Artificial Sequence: Synthetic oligonucleotide
  Target: LAMA2; (-) strand; PAM type: YTN; PAM sequence: CTT
agcactaattttggccaaga

SEQ ID NO: 255542 - DNA, 20 bp, Artificial Sequence
  Description of Artificial Sequence: Synthetic oligonucleotide
  Target: LAMA2; (-) strand; PAM type: YTN; PAM sequence: TTG
gcaaatgcagtcacttagca

SEQ ID NO: 255543 - DNA, 20 bp, Artificial Sequence
  Description of Artificial Sequence: Synthetic oligonucleotide
  Target: LAMA2; (-) strand; PAM type: YTN; PAM sequence: CTT
ggcaaatgcagtcacttagc

SEQ ID NO: 255544 - DNA, 20 bp, Artificial Sequence
  Description of Artificial Sequence: Synthetic oligonucleotide
  Target: LAMA2; (-) strand; PAM type: YTN; PAM sequence: TTG
ccttggcaaatgcagtcact

SEQ ID NO: 255545 - DNA, 20 bp, Artificial Sequence
  Description of Artificial Sequence: Synthetic oligonucleotide
  Target: LAMA2; (-) strand; PAM type: YTN; PAM sequence: TTT
gccttggcaaatgcagtcac

SEQ ID NO: 255546 - DNA, 20 bp, Artificial Sequence
  Description of Artificial Sequence: Synthetic oligonucleotide
  Target: LAMA2; (-) strand; PAM type: YTN; PAM sequence: CTA
cagaatttgccttggcaaat

SEQ ID NO: 255547 - DNA, 20 bp, Artificial Sequence
  Description of Artificial Sequence: Synthetic oligonucleotide
  Target: LAMA2; (-) strand; PAM type: YTN; PAM sequence: TTA
gagtgagaaataaacatgca

SEQ ID NO: 255548 - DNA, 20 bp, Artificial Sequence
  Description of Artificial Sequence: Synthetic oligonucleotide
  Target: LAMA2; (-) strand; PAM type: YTN; PAM sequence: TTC
aacaacaaaaataaaattag

SEQ ID NO: 255549 - DNA, 20 bp, Artificial Sequence
  Description of Artificial Sequence: Synthetic oligonucleotide
  Target: LAMA2; (-) strand; PAM type: YTN; PAM sequence: CTA
tggcagaagatggcattcaa

SEQ ID NO: 255550 - DNA, 20 bp, Artificial Sequence
  Description of Artificial Sequence: Synthetic oligonucleotide
  Target: LAMA2; (-) strand; PAM type: YTN; PAM sequence: TTA
cagctatggcagaagatggc

SEQ ID NO: 255551 - DNA, 20 bp, Artificial Sequence
  Description of Artificial Sequence: Synthetic oligonucleotide
  Target: LAMA2; (-) strand; PAM type: YTN; PAM sequence: TTG
cagttacagctatggcagaa

SEQ ID NO: 255552 - DNA, 20 bp, Artificial Sequence
  Description of Artificial Sequence: Synthetic oligonucleotide
  Target: LAMA2; (-) strand; PAM type: YTN; PAM sequence: CTG
taattgcagttacagctatg

SEQ ID NO: 255553 - DNA, 20 bp, Artificial Sequence
  Description of Artificial Sequence: Synthetic oligonucleotide
  Target: LAMA2; (-) strand; PAM type: YTN; PAM sequence: TTG
ctgtaattgcagttacagct

SEQ ID NO: 255554 - DNA, 20 bp, Artificial Sequence
  Description of Artificial Sequence: Synthetic oligonucleotide
  Target: LAMA2; (-) strand; PAM type: YTN; PAM sequence: TTA
ttgctgtaattgcagttaca

SEQ ID NO: 255555 - DNA, 20 bp, Artificial Sequence
  Description of Artificial Sequence: Synthetic oligonucleotide
  Target: LAMA2; (-) strand; PAM type: YTN; PAM sequence: CTT
attgctgtaattgcagttac

SEQ ID NO: 255556 - DNA, 20 bp, Artificial Sequence
  Description of Artificial Sequence: Synthetic oligonucleotide
  Target: LAMA2; (-) strand; PAM type: YTN; PAM sequence: CTC
ttattgctgtaattgcagtt

SEQ ID NO: 255557 - DNA, 20 bp, Artificial Sequence
  Description of Artificial Sequence: Synthetic oligonucleotide
  Target: LAMA2; (-) strand; PAM type: YTN; PAM sequence: CTC
tcttattgctgtaattgcag

SEQ ID NO: 255558 - DNA, 20 bp, Artificial Sequence
  Description of Artificial Sequence: Synthetic oligonucleotide
  Target: LAMA2; (-) strand; PAM type: YTN; PAM sequence: TTC
actctcttattgctgtaatt

SEQ ID NO: 255559 - DNA, 20 bp, Artificial Sequence
  Description of Artificial Sequence: Synthetic oligonucleotide
  Target: LAMA2; (-) strand; PAM type: YTN; PAM sequence: CTG
aagattcactctcttattgc

SEQ ID NO: 255560 - DNA, 20 bp, Artificial Sequence
  Description of Artificial Sequence: Synthetic oligonucleotide
  Target: LAMA2; (-) strand; PAM type: YTN; PAM sequence: TTC
aacaacataaactgaagatt

SEQ ID NO: 255561 - DNA, 20 bp, Artificial Sequence
  Description of Artificial Sequence: Synthetic oligonucleotide
  Target: LAMA2; (-) strand; PAM type: YTN; PAM sequence: TTT
caacaacataaactgaagat

SEQ ID NO: 255562 - DNA, 20 bp, Artificial Sequence
  Description of Artificial Sequence: Synthetic oligonucleotide
  Target: LAMA2; (-) strand; PAM type: YTN; PAM sequence: CTT
tcaacaacataaactgaaga

SEQ ID NO: 255563 - DNA, 20 bp, Artificial Sequence
  Description of Artificial Sequence: Synthetic oligonucleotide
  Target: LAMA2; (-) strand; PAM type: YTN; PAM sequence: TTC
tttcaacaacataaactgaa

SEQ ID NO: 255564 - DNA, 20 bp, Artificial Sequence
  Description of Artificial Sequence: Synthetic oligonucleotide
  Target: LAMA2; (-) strand; PAM type: YTN; PAM sequence: TTG
atattctttcaacaacataa

SEQ ID NO: 255565 - DNA, 20 bp, Artificial Sequence
  Description of Artificial Sequence: Synthetic oligonucleotide
  Target: LAMA2; (-) strand; PAM type: YTN; PAM sequence: TTT
gatattctttcaacaacata

SEQ ID NO: 255566 - DNA, 20 bp, Artificial Sequence
  Description of Artificial Sequence: Synthetic oligonucleotide
  Target: LAMA2; (-) strand; PAM type: YTN; PAM sequence: CTT
tgatattctttcaacaacat

SEQ ID NO: 255567 - DNA, 20 bp, Artificial Sequence
  Description of Artificial Sequence: Synthetic oligonucleotide
  Target: LAMA2; (-) strand; PAM type: YTN; PAM sequence: TTG
tgctttgatattctttcaac

SEQ ID NO: 255568 - DNA, 20 bp, Artificial Sequence
  Description of Artificial Sequence: Synthetic oligonucleotide
  Target: LAMA2; (-) strand; PAM type: YTN; PAM sequence: TTT
gtgctttgatattctttcaa

SEQ ID NO: 255569 - DNA, 20 bp, Artificial Sequence
  Description of Artificial Sequence: Synthetic oligonucleotide
  Target: LAMA2; (-) strand; PAM type: YTN; PAM sequence: CTG
tatttgtgctttgatattct

SEQ ID NO: 255570 - DNA, 20 bp, Artificial Sequence
  Description of Artificial Sequence: Synthetic oligonucleotide
  Target: LAMA2; (-) strand; PAM type: YTN; PAM sequence: CTC
ataaaatatatctgtatttg

SEQ ID NO: 255571 - DNA, 20 bp, Artificial Sequence
  Description of Artificial Sequence: Synthetic oligonucleotide
  Target: LAMA2; (-) strand; PAM type: YTN; PAM sequence: TTC
tcataaaatatatctgtatt

SEQ ID NO: 255572 - DNA, 20 bp, Artificial Sequence
  Description of Artificial Sequence: Synthetic oligonucleotide
  Target: LAMA2; (-) strand; PAM type: YTN; PAM sequence: TTT
ctcataaaatatatctgtat

SEQ ID NO: 255573 - DNA, 20 bp, Artificial Sequence
  Description of Artificial Sequence: Synthetic oligonucleotide
  Target: LAMA2; (-) strand; PAM type: YTN; PAM sequence: CTT
tctcataaaatatatctgta

SEQ ID NO: 255574 - DNA, 20 bp, Artificial Sequence
  Description of Artificial Sequence: Synthetic oligonucleotide
  Target: LAMA2; (-) strand; PAM type: YTN; PAM sequence: CTC
gacataacgcatccaaataa

SEQ ID NO: 255575 - DNA, 20 bp, Artificial Sequence
  Description of Artificial Sequence: Synthetic oligonucleotide
  Target: LAMA2; (-) strand; PAM type: YTN; PAM sequence: CTA
gtaatatagatactcgacat

SEQ ID NO: 255576 - DNA, 20 bp, Artificial Sequence
  Description of Artificial Sequence: Synthetic oligonucleotide
  Target: LAMA2; (-) strand; PAM type: YTN; PAM sequence: TTC
tagtaatatagatactcgac

SEQ ID NO: 255577 - DNA, 20 bp, Artificial Sequence
  Description of Artificial Sequence: Synthetic oligonucleotide
  Target: LAMA2; (-) strand; PAM type: YTN; PAM sequence: TTT
ctagtaatatagatactcga

SEQ ID NO: 255578 - DNA, 20 bp, Artificial Sequence
  Description of Artificial Sequence: Synthetic oligonucleotide
  Target: LAMA2; (-) strand; PAM type: YTN; PAM sequence: TTA
agtttctagtaatatagata

SEQ ID NO: 255579 - DNA, 20 bp, Artificial Sequence
  Description of Artificial Sequence: Synthetic oligonucleotide
  Target: LAMA2; (-) strand; PAM type: YTN; PAM sequence: TTT
aagtttctagtaatatagat

SEQ ID NO: 255580 - DNA, 20 bp, Artificial Sequence
  Description of Artificial Sequence: Synthetic oligonucleotide
  Target: LAMA2; (-) strand; PAM type: YTN; PAM sequence: TTA
agtaagtttaagtttctagt

SEQ ID NO: 255581 - DNA, 20 bp, Artificial Sequence
  Description of Artificial Sequence: Synthetic oligonucleotide
  Target: LAMA2; (-) strand; PAM type: YTN; PAM sequence: CTG
gtaagaattaagtaagttta

SEQ ID NO: 255582 - DNA, 20 bp, Artificial Sequence
  Description of Artificial Sequence: Synthetic oligonucleotide
  Target: LAMA2; (-) strand; PAM type: YTN; PAM sequence: CTA
ctggtaagaattaagtaagt

SEQ ID NO: 255583 - DNA, 20 bp, Artificial Sequence
  Description of Artificial Sequence: Synthetic oligonucleotide
  Target: LAMA2; (-) strand; PAM type: YTN; PAM sequence: TTG
aaacctactggtaagaatta

SEQ ID NO: 255584 - DNA, 20 bp, Artificial Sequence
  Description of Artificial Sequence: Synthetic oligonucleotide
  Target: LAMA2; (-) strand; PAM type: YTN; PAM sequence: TTG
tcattgaaacctactggtaa

SEQ ID NO: 255585 - DNA, 20 bp, Artificial Sequence
  Description of Artificial Sequence: Synthetic oligonucleotide
  Target: LAMA2; (-) strand; PAM type: YTN; PAM sequence: CTA
taaccaattgtcattgaaac

SEQ ID NO: 255586 - DNA, 20 bp, Artificial Sequence
  Description of Artificial Sequence: Synthetic oligonucleotide
  Target: LAMA2; (-) strand; PAM type: YTN; PAM sequence: TTC
ctataaccaattgtcattga

SEQ ID NO: 255587 - DNA, 20 bp, Artificial Sequence
  Description of Artificial Sequence: Synthetic oligonucleotide
  Target: LAMA2; (-) strand; PAM type: YTN; PAM sequence: CTT
cctataaccaattgtcattg

SEQ ID NO: 255588 - DNA, 20 bp, Artificial Sequence
  Description of Artificial Sequence: Synthetic oligonucleotide
  Target: LAMA2; (-) strand; PAM type: YTN; PAM sequence: TTC
ttcctataaccaattgtcat

SEQ ID NO: 255589 - DNA, 20 bp, Artificial Sequence
  Description of Artificial Sequence: Synthetic oligonucleotide
  Target: LAMA2; (-) strand; PAM type: YTN; PAM sequence: CTT
cttcctataaccaattgtca

SEQ ID NO: 255590 - DNA, 20 bp, Artificial Sequence
  Description of Artificial Sequence: Synthetic oligonucleotide
  Target: LAMA2; (-) strand; PAM type: YTN; PAM sequence: CTC
ttcttcctataaccaattgt

SEQ ID NO: 255591 - DNA, 20 bp, Artificial Sequence
  Description of Artificial Sequence: Synthetic oligonucleotide
  Target: LAMA2; (-) strand; PAM type: YTN; PAM sequence: TTC
tcttcttcctataaccaatt

SEQ ID NO: 255592 - DNA, 20 bp, Artificial Sequence
  Description of Artificial Sequence: Synthetic oligonucleotide
  Target: LAMA2; (-) strand; PAM type: YTN; PAM sequence: TTA
atgtgatattctcttcttcc

SEQ ID NO: 255593 - DNA, 20 bp, Artificial Sequence
  Description of Artificial Sequence: Synthetic oligonucleotide
  Target: LAMA2; (-) strand; PAM type: YTN; PAM sequence: CTT
aatgtgatattctcttcttc

SEQ ID NO: 255594 - DNA, 20 bp, Artificial Sequence
  Description of Artificial Sequence: Synthetic oligonucleotide
  Target: LAMA2; (-) strand; PAM type: YTN; PAM sequence: TTC
ttaatgtgatattctcttct

SEQ ID NO: 255595 - DNA, 20 bp, Artificial Sequence
  Description of Artificial Sequence: Synthetic oligonucleotide
  Target: LAMA2; (-) strand; PAM type: YTN; PAM sequence: TTA
gattcttaatgtgatattct

SEQ ID NO: 255596 - DNA, 20 bp, Artificial Sequence
  Description of Artificial Sequence: Synthetic oligonucleotide
  Target: LAMA2; (-) strand; PAM type: YTN; PAM sequence: TTT
agattcttaatgtgatattc

SEQ ID NO: 255597 - DNA, 20 bp, Artificial Sequence
  Description of Artificial Sequence: Synthetic oligonucleotide
  Target: LAMA2; (-) strand; PAM type: YTN; PAM sequence: CTT
tagattcttaatgtgatatt

SEQ ID NO: 255598 - DNA, 20 bp, Artificial Sequence
  Description of Artificial Sequence: Synthetic oligonucleotide
  Target: LAMA2; (-) strand; PAM type: YTN; PAM sequence: CTA
ggactttagattcttaatgt

SEQ ID NO: 255599 - DNA, 20 bp, Artificial Sequence
  Description of Artificial Sequence: Synthetic oligonucleotide
  Target: LAMA2; (-) strand; PAM type: YTN; PAM sequence: TTA
gtatgggatctaggacttta

SEQ ID NO: 255600 - DNA, 20 bp, Artificial Sequence
  Description of Artificial Sequence: Synthetic oligonucleotide
  Target: LAMA2; (-) strand; PAM type: YTN; PAM sequence: TTT
agtatgggatctaggacttt

SEQ ID NO: 255601 - DNA, 20 bp, Artificial Sequence
  Description of Artificial Sequence: Synthetic oligonucleotide
  Target: LAMA2; (-) strand; PAM type: YTN; PAM sequence: TTC
caggagaatttagtatggga

SEQ ID NO: 255602 - DNA, 20 bp, Artificial Sequence
  Description of Artificial Sequence: Synthetic oligonucleotide
  Target: LAMA2; (-) strand; PAM type: YTN; PAM sequence: TTT
ccaggagaatttagtatggg

SEQ ID NO: 255603 - DNA, 20 bp, Artificial Sequence
  Description of Artificial Sequence: Synthetic oligonucleotide
  Target: LAMA2; (-) strand; PAM type: YTN; PAM sequence: TTA
accaaggtcatatacaaaat

SEQ ID NO: 255604 - DNA, 20 bp, Artificial Sequence
  Description of Artificial Sequence: Synthetic oligonucleotide
  Target: LAMA2; (-) strand; PAM type: YTN; PAM sequence: CTT
aaccaaggtcatatacaaaa

SEQ ID NO: 255605 - DNA, 20 bp, Artificial Sequence
  Description of Artificial Sequence: Synthetic oligonucleotide
  Target: LAMA2; (-) strand; PAM type: YTN; PAM sequence: TTC
ttaaccaaggtcatatacaa

SEQ ID NO: 255606 - DNA, 20 bp, Artificial Sequence
  Description of Artificial Sequence: Synthetic oligonucleotide
  Target: LAMA2; (-) strand; PAM type: YTN; PAM sequence: TTT
cttaaccaaggtcatataca

SEQ ID NO: 255607 - DNA, 20 bp, Artificial Sequence
  Description of Artificial Sequence: Synthetic oligonucleotide
  Target: LAMA2; (-) strand; PAM type: YTN; PAM sequence: TTT
tcttaaccaaggtcatatac

SEQ ID NO: 255608 - DNA, 20 bp, Artificial Sequence
  Description of Artificial Sequence: Synthetic oligonucleotide
  Target: LAMA2; (-) strand; PAM type: YTN; PAM sequence: TTT
ttcttaaccaaggtcatata

SEQ ID NO: 255609 - DNA, 20 bp, Artificial Sequence
  Description of Artificial Sequence: Synthetic oligonucleotide
  Target: LAMA2; (-) strand; PAM type: YTN; PAM sequence: TTA
gggcaggcacagtttttctt

SEQ ID NO: 255610 - DNA, 20 bp, Artificial Sequence
  Description of Artificial Sequence: Synthetic oligonucleotide
  Target: LAMA2; (-) strand; PAM type: YTN; PAM sequence: CTG
gttagggcaggcacagtttt

SEQ ID NO: 255611 - DNA, 20 bp, Artificial Sequence
  Description of Artificial Sequence: Synthetic oligonucleotide
  Target: LAMA2; (-) strand; PAM type: YTN; PAM sequence: CTA
tgagctggttagggcaggca

SEQ ID NO: 255612 - DNA, 20 bp, Artificial Sequence
  Description of Artificial Sequence: Synthetic oligonucleotide
  Target: LAMA2; (-) strand; PAM type: YTN; PAM sequence: TTC
acaaaatcctatgagctggt

SEQ ID NO: 255613 - DNA, 20 bp, Artificial Sequence
  Description of Artificial Sequence: Synthetic oligonucleotide
  Target: LAMA2; (-) strand; PAM type: YTN; PAM sequence: TTT
cacaaaatcctatgagctgg

SEQ ID NO: 255614 - DNA, 20 bp, Artificial Sequence
  Description of Artificial Sequence: Synthetic oligonucleotide
  Target: LAMA2; (-) strand; PAM type: YTN; PAM sequence: TTT
tcacaaaatcctatgagctg

SEQ ID NO: 255615 - DNA, 20 bp, Artificial Sequence
  Description of Artificial Sequence: Synthetic oligonucleotide
  Target: LAMA2; (-) strand; PAM type: YTN; PAM sequence: TTA
tcacattttcacaaaatcct

SEQ ID NO: 255616 - DNA, 20 bp, Artificial Sequence
  Description of Artificial Sequence: Synthetic oligonucleotide
  Target: LAMA2; (-) strand; PAM type: YTN; PAM sequence: TTT
atcacattttcacaaaatcc

SEQ ID NO: 255617 - DNA, 20 bp, Artificial Sequence
  Description of Artificial Sequence: Synthetic oligonucleotide
  Target: LAMA2; (-) strand; PAM type: YTN; PAM sequence: TTT
tatcacattttcacaaaatc

SEQ ID NO: 255618 - DNA, 20 bp, Artificial Sequence
  Description of Artificial Sequence: Synthetic oligonucleotide
  Target: LAMA2; (-) strand; PAM type: YTN; PAM sequence: TTA
caattttatcacattttcac

SEQ ID NO: 255619 - DNA, 20 bp, Artificial Sequence
  Description of Artificial Sequence: Synthetic oligonucleotide
  Target: LAMA2; (-) strand; PAM type: YTN; PAM sequence: TTT
acaattttatcacattttca

SEQ ID NO: 255620 - DNA, 20 bp, Artificial Sequence
  Description of Artificial Sequence: Synthetic oligonucleotide
  Target: LAMA2; (-) strand; PAM type: YTN; PAM sequence: TTT
tacaattttatcacattttc

SEQ ID NO: 255621 - DNA, 20 bp, Artificial Sequence
  Description of Artificial Sequence: Synthetic oligonucleotide
  Target: LAMA2; (-) strand; PAM type: YTN; PAM sequence: CTT
ttacaattttatcacatttt

SEQ ID NO: 255622 - DNA, 20 bp, Artificial Sequence
  Description of Artificial Sequence: Synthetic oligonucleotide
  Target: LAMA2; (-) strand; PAM type: YTN; PAM sequence: TTC
agaatacttttacaatttta

SEQ ID NO: 255623 - DNA, 20 bp, Artificial Sequence
  Description of Artificial Sequence: Synthetic oligonucleotide
  Target: LAMA2; (-) strand; PAM type: YTN; PAM sequence: TTA
cagttcagaatacttttaca

SEQ ID NO: 255624 - DNA, 20 bp, Artificial Sequence
  Description of Artificial Sequence: Synthetic oligonucleotide
  Target: LAMA2; (-) strand; PAM type: YTN; PAM sequence: CTT
acagttcagaatacttttac

SEQ ID NO: 255625 - DNA, 20 bp, Artificial Sequence
  Description of Artificial Sequence: Synthetic oligonucleotide
  Target: LAMA2; (-) strand; PAM type: YTN; PAM sequence: CTC
cttacagttcagaatacttt

SEQ ID NO: 255626 - DNA, 20 bp, Artificial Sequence
  Description of Artificial Sequence: Synthetic oligonucleotide
  Target: LAMA2; (-) strand; PAM type: YTN; PAM sequence: CTA
gctccttacagttcagaata

SEQ ID NO: 255627 - DNA, 20 bp, Artificial Sequence
  Description of Artificial Sequence: Synthetic oligonucleotide
  Target: LAMA2; (-) strand; PAM type: YTN; PAM sequence: TTG
actagctccttacagttcag

SEQ ID NO: 255628 - DNA, 20 bp, Artificial Sequence
  Description of Artificial Sequence: Synthetic oligonucleotide
  Target: LAMA2; (-) strand; PAM type: YTN; PAM sequence: TTT
gactagctccttacagttca

SEQ ID NO: 255629 - DNA, 20 bp, Artificial Sequence
  Description of Artificial Sequence: Synthetic oligonucleotide
  Target: LAMA2; (-) strand; PAM type: YTN; PAM sequence: TTA
aatttgactagctccttaca

SEQ ID NO: 255630 - DNA, 20 bp, Artificial Sequence
  Description of Artificial Sequence: Synthetic oligonucleotide
  Target: LAMA2; (-) strand; PAM type: YTN; PAM sequence: TTA
ggcaataaaaatatgttaaa

SEQ ID NO: 255631 - DNA, 20 bp, Artificial Sequence
  Description of Artificial Sequence: Synthetic oligonucleotide
  Target: LAMA2; (-) strand; PAM type: YTN; PAM sequence: TTC
gagaaaaaaattaggcaata

SEQ ID NO: 255632 - DNA, 20 bp, Artificial Sequence
  Description of Artificial Sequence: Synthetic oligonucleotide
  Target: LAMA2; (-) strand; PAM type: YTN; PAM sequence: TTT
cgagaaaaaaattaggcaat

SEQ ID NO: 255633 - DNA, 20 bp, Artificial Sequence
  Description of Artificial Sequence: Synthetic oligonucleotide
  Target: LAMA2; (-) strand; PAM type: YTN; PAM sequence: TTT
tcgagaaaaaaattaggcaa

SEQ ID NO: 255634 - DNA, 20 bp, Artificial Sequence
  Description of Artificial Sequence: Synthetic oligonucleotide
  Target: LAMA2; (-) strand; PAM type: YTN; PAM sequence: TTT
ttcgagaaaaaaattaggca

SEQ ID NO: 255635 - DNA, 20 bp, Artificial Sequence
  Description of Artificial Sequence: Synthetic oligonucleotide
  Target: LAMA2; (-) strand; PAM type: YTN; PAM sequence: CTT
tttcgagaaaaaaattaggc

SEQ ID NO: 255636 - DNA, 20 bp, Artificial Sequence
  Description of Artificial Sequence: Synthetic oligonucleotide
  Target: LAMA2; (-) strand; PAM type: YTN; PAM sequence: CTG
acaaaaatcaacactttttc

SEQ ID NO: 255637 - DNA, 20 bp, Artificial Sequence
  Description of Artificial Sequence: Synthetic oligonucleotide
  Target: LAMA2; (-) strand; PAM type: YTN; PAM sequence: CTC
actgacaaaaatcaacactt

SEQ ID NO: 255638 - DNA, 20 bp, Artificial Sequence
  Description of Artificial Sequence: Synthetic oligonucleotide
  Target: LAMA2; (-) strand; PAM type: YTN; PAM sequence: TTA
aaaccaacataagtaaaagg

SEQ ID NO: 255639 - DNA, 20 bp, Artificial Sequence
  Description of Artificial Sequence: Synthetic oligonucleotide
  Target: LAMA2; (-) strand; PAM type: YTN; PAM sequence: CTC
acatgtcagttaaaaccaac

SEQ ID NO: 255640 - DNA, 20 bp, Artificial Sequence
  Description of Artificial Sequence: Synthetic oligonucleotide
  Target: LAMA2; (-) strand; PAM type: YTN; PAM sequence: TTA
aatacactcacatgtcagtt

SEQ ID NO: 255641 - DNA, 20 bp, Artificial Sequence
  Description of Artificial Sequence: Synthetic oligonucleotide
  Target: LAMA2; (-) strand; PAM type: YTN; PAM sequence: CTT
aaatacactcacatgtcagt

SEQ ID NO: 255642 - DNA, 20 bp, Artificial Sequence
  Description of Artificial Sequence: Synthetic oligonucleotide
  Target: LAMA2; (-) strand; PAM type: YTN; PAM sequence: TTC
ttaaatacactcacatgtca

SEQ ID NO: 255643 - DNA, 20 bp, Artificial Sequence
  Description of Artificial Sequence: Synthetic oligonucleotide
  Target: LAMA2; (-) strand; PAM type: YTN; PAM sequence: TTC
agattcttaaatacactcac

SEQ ID NO: 255644 - DNA, 20 bp, Artificial Sequence
  Description of Artificial Sequence: Synthetic oligonucleotide
  Target: LAMA2; (-) strand; PAM type: YTN; PAM sequence: TTT
cagattcttaaatacactca

SEQ ID NO: 255645 - DNA, 20 bp, Artificial Sequence
  Description of Artificial Sequence: Synthetic oligonucleotide
  Target: LAMA2; (-) strand; PAM type: YTN; PAM sequence: TTC
ataaaatagatttcagattc

SEQ ID NO: 255646 - DNA, 20 bp, Artificial Sequence
  Description of Artificial Sequence: Synthetic oligonucleotide
  Target: LAMA2; (-) strand; PAM type: YTN; PAM sequence: CTA
ttcataaaatagatttcaga

SEQ ID NO: 255647 - DNA, 20 bp, Artificial Sequence
  Description of Artificial Sequence: Synthetic oligonucleotide
  Target: LAMA2; (-) strand; PAM type: YTN; PAM sequence: TTA
aagctattcataaaatagat

SEQ ID NO: 255648 - DNA, 20 bp, Artificial Sequence
  Description of Artificial Sequence: Synthetic oligonucleotide
  Target: LAMA2; (-) strand; PAM type: YTN; PAM sequence: TTT
aaagctattcataaaataga

SEQ ID NO: 255649 - DNA, 20 bp, Artificial Sequence
  Description of Artificial Sequence: Synthetic oligonucleotide
  Target: LAMA2; (-) strand; PAM type: YTN; PAM sequence: CTT
taaagctattcataaaatag

SEQ ID NO: 255650 - DNA, 20 bp, Artificial Sequence
  Description of Artificial Sequence: Synthetic oligonucleotide
  Target: LAMA2; (-) strand; PAM type: YTN; PAM sequence: TTG
acactttaaagctattcata

SEQ ID NO: 255651 - DNA, 20 bp, Artificial Sequence
  Description of Artificial Sequence: Synthetic oligonucleotide
  Target: LAMA2; (-) strand; PAM type: YTN; PAM sequence: CTT
gacactttaaagctattcat

SEQ ID NO: 255652 - DNA, 20 bp, Artificial Sequence
  Description of Artificial Sequence: Synthetic oligonucleotide
  Target: LAMA2; (-) strand; PAM type: YTN; PAM sequence: CTG
gccttgacactttaaagcta

SEQ ID NO: 255653 - DNA, 20 bp, Artificial Sequence
  Description of Artificial Sequence: Synthetic oligonucleotide
  Target: LAMA2; (-) strand; PAM type: YTN; PAM sequence: TTG
cacctggccttgacacttta

SEQ ID NO: 255654 - DNA, 20 bp, Artificial Sequence
  Description of Artificial Sequence: Synthetic oligonucleotide
  Target: LAMA2; (-) strand; PAM type: YTN; PAM sequence: TTA
caggcatgagccattgcacc

SEQ ID NO: 255655 - DNA, 20 bp, Artificial Sequence
  Description of Artificial Sequence: Synthetic oligonucleotide
  Target: LAMA2; (-) strand; PAM type: YTN; PAM sequence: CTA
ggattacaggcatgagccat

SEQ ID NO: 255656 - DNA, 20 bp, Artificial Sequence
  Description of Artificial Sequence: Synthetic oligonucleotide
  Target: LAMA2; (-) strand; PAM type: YTN; PAM sequence: CTC
ccaaagtgctaggattacag

SEQ ID NO: 255657 - DNA, 20 bp, Artificial Sequence
  Description of Artificial Sequence: Synthetic oligonucleotide
  Target: LAMA2; (-) strand; PAM type: YTN; PAM sequence: TTG
gcctcccaaagtgctaggat

SEQ ID NO: 255658 - DNA, 20 bp, Artificial Sequence
  Description of Artificial Sequence: Synthetic oligonucleotide
  Target: LAMA2; (-) strand; PAM type: YTN; PAM sequence: CTT
ggcctcccaaagtgctagga

SEQ ID NO: 255659 - DNA, 20 bp, Artificial Sequence
  Description of Artificial Sequence: Synthetic oligonucleotide
  Target: LAMA2; (-) strand; PAM type: YTN; PAM sequence: CTG
ccttggcctcccaaagtgct

SEQ ID NO: 255660 - DNA, 20 bp, Artificial Sequence
  Description of Artificial Sequence: Synthetic oligonucleotide
  Target: LAMA2; (-) strand; PAM type: YTN; PAM sequence: CTC
aagtgatccacctgccttgg

SEQ ID NO: 255661 - DNA, 20 bp, Artificial Sequence
  Description of Artificial Sequence: Synthetic oligonucleotide
  Target: LAMA2; (-) strand; PAM type: YTN; PAM sequence: CTG
acctcaagtgatccacctgc

SEQ ID NO: 255662 - DNA, 20 bp, Artificial Sequence
  Description of Artificial Sequence: Synthetic oligonucleotide
  Target: LAMA2; (-) strand; PAM type: YTN; PAM sequence: CTC
ctgacctcaagtgatccacc

SEQ ID NO: 255663 - DNA, 20 bp, Artificial Sequence
  Description of Artificial Sequence: Synthetic oligonucleotide
  Target: LAMA2; (-) strand; PAM type: YTN; PAM sequence: TTG
aactcctgacctcaagtgat

SEQ ID NO: 255664 - DNA, 20 bp, Artificial Sequence
  Description of Artificial Sequence: Synthetic oligonucleotide
  Target: LAMA2; (-) strand; PAM type: YTN; PAM sequence: CTT
gaactcctgacctcaagtga

SEQ ID NO: 255665 - DNA, 20 bp, Artificial Sequence
  Description of Artificial Sequence: Synthetic oligonucleotide
  Target: LAMA2; (-) strand; PAM type: YTN; PAM sequence: CTG
gtcttgaactcctgacctca

SEQ ID NO: 255666 - DNA, 20 bp, Artificial Sequence
  Description of Artificial Sequence: Synthetic oligonucleotide
  Target: LAMA2; (-) strand; PAM type: YTN; PAM sequence: TTG
gccgggctggtcttgaactc

SEQ ID NO: 255667 - DNA, 20 bp, Artificial Sequence
  Description of Artificial Sequence: Synthetic oligonucleotide
  Target: LAMA2; (-) strand; PAM type: YTN; PAM sequence: CTC
accatattggccgggctggt

SEQ ID NO: 255668 - DNA, 20 bp, Artificial Sequence
  Description of Artificial Sequence: Synthetic oligonucleotide
  Target: LAMA2; (-) strand; PAM type: YTN; PAM sequence: TTA
gtagaaatggggtctcacca

SEQ ID NO: 255669 - DNA, 20 bp, Artificial Sequence
  Description of Artificial Sequence: Synthetic oligonucleotide
  Target: LAMA2; (-) strand; PAM type: YTN; PAM sequence: TTT
agtagaaatggggtctcacc

SEQ ID NO: 255670 - DNA, 20 bp, Artificial Sequence
  Description of Artificial Sequence: Synthetic oligonucleotide
  Target: LAMA2; (-) strand; PAM type: YTN; PAM sequence: TTT
tagtagaaatggggtctcac

SEQ ID NO: 255671 - DNA, 20 bp, Artificial Sequence
  Description of Artificial Sequence: Synthetic oligonucleotide
  Target: LAMA2; (-) strand; PAM type: YTN; PAM sequence: TTT
ttagtagaaatggggtctca

SEQ ID NO: 255672 - DNA, 20 bp, Artificial Sequence
  Description of Artificial Sequence: Synthetic oligonucleotide
  Target: LAMA2; (-) strand; PAM type: YTN; PAM sequence: TTG
tatttttagtagaaatgggg

SEQ ID NO: 255673 - DNA, 20 bp, Artificial Sequence
  Description of Artificial Sequence: Synthetic oligonucleotide
  Target: LAMA2; (-) strand; PAM type: YTN; PAM sequence: TTT
gtatttttagtagaaatggg

SEQ ID NO: 255674 - DNA, 20 bp, Artificial Sequence
  Description of Artificial Sequence: Synthetic oligonucleotide
  Target: LAMA2; (-) strand; PAM type: YTN; PAM sequence: TTT
tgtatttttagtagaaatgg

SEQ ID NO: 255675 - DNA, 20 bp, Artificial Sequence
  Description of Artificial Sequence: Synthetic oligonucleotide
  Target: LAMA2; (-) strand; PAM type: YTN; PAM sequence: TTT
ttgtatttttagtagaaatg

SEQ ID NO: 255676 - DNA, 20 bp, Artificial Sequence
  Description of Artificial Sequence: Synthetic oligonucleotide
  Target: LAMA2; (-) strand; PAM type: YTN; PAM sequence: CTG
gcccatttttgtatttttag

SEQ ID NO: 255677 - DNA, 20 bp, Artificial Sequence
  Description of Artificial Sequence: Synthetic oligonucleotide
  Target: LAMA2; (-) strand; PAM type: YTN; PAM sequence: CTA
ccaggcctggcccatttttg

SEQ ID NO: 255678 - DNA, 20 bp, Artificial Sequence
  Description of Artificial Sequence: Synthetic oligonucleotide
  Target: LAMA2; (-) strand; PAM type: YTN; PAM sequence: TTG
caggcaggtgctaccaggcc

SEQ ID NO: 255679 - DNA, 20 bp, Artificial Sequence
  Description of Artificial Sequence: Synthetic oligonucleotide
  Target: LAMA2; (-) strand; PAM type: YTN; PAM sequence: CTG
ggattgcaggcaggtgctac

SEQ ID NO: 255680 - DNA, 20 bp, Artificial Sequence
  Description of Artificial Sequence: Synthetic oligonucleotide
  Target: LAMA2; (-) strand; PAM type: YTN; PAM sequence: CTG
agtagctgggattgcaggca

SEQ ID NO: 255681 - DNA, 20 bp, Artificial Sequence
  Description of Artificial Sequence: Synthetic oligonucleotide
  Target: LAMA2; (-) strand; PAM type: YTN; PAM sequence: CTC
ctgagtagctgggattgcag

SEQ ID NO: 255682 - DNA, 20 bp, Artificial Sequence
  Description of Artificial Sequence: Synthetic oligonucleotide
  Target: LAMA2; (-) strand; PAM type: YTN; PAM sequence: CTC
agcctcctgagtagctggga

SEQ ID NO: 255683 - DNA, 20 bp, Artificial Sequence
  Description of Artificial Sequence: Synthetic oligonucleotide
  Target: LAMA2; (-) strand; PAM type: YTN; PAM sequence: CTA
gtgtctcagcctcctgagta

SEQ ID NO: 255684 - DNA, 20 bp, Artificial Sequence
  Description of Artificial Sequence: Synthetic oligonucleotide
  Target: LAMA2; (-) strand; PAM type: YTN; PAM sequence: TTC
tagtgtctcagcctcctgag

SEQ ID NO: 255685 - DNA, 20 bp, Artificial Sequence
  Description of Artificial Sequence: Synthetic oligonucleotide
  Target: LAMA2; (-) strand; PAM type: YTN; PAM sequence: TTC
aagcgattctagtgtctcag

SEQ ID NO: 255686 - DNA, 20 bp, Artificial Sequence
  Description of Artificial Sequence: Synthetic oligonucleotide
  Target: LAMA2; (-) strand; PAM type: YTN; PAM sequence: CTG
ggttcaagcgattctagtgt

SEQ ID NO: 255687 - DNA, 20 bp, Artificial Sequence
  Description of Artificial Sequence: Synthetic oligonucleotide
  Target: LAMA2; (-) strand; PAM type: YTN; PAM sequence: CTA
ctgggttcaagcgattctag

SEQ ID NO: 255688 - DNA, 20 bp, Artificial Sequence
  Description of Artificial Sequence: Synthetic oligonucleotide
  Target: LAMA2; (-) strand; PAM type: YTN; PAM sequence: CTG
cctactgggttcaagcgatt

SEQ ID NO: 255689 - DNA, 20 bp, Artificial Sequence
  Description of Artificial Sequence: Synthetic oligonucleotide
  Target: LAMA2; (-) strand; PAM type: YTN; PAM sequence: CTG
aaacccctgcctactgggtt

SEQ ID NO: 255690 - DNA, 20 bp, Artificial Sequence
  Description of Artificial Sequence: Synthetic oligonucleotide
  Target: LAMA2; (-) strand; PAM type: YTN; PAM sequence: CTC
actgaaacccctgcctactg

SEQ ID NO: 255691 - DNA, 20 bp, Artificial Sequence
  Description of Artificial Sequence: Synthetic oligonucleotide
  Target: LAMA2; (-) strand; PAM type: YTN; PAM sequence: TTG
gctcactgaaacccctgcct

SEQ ID NO: 255692 - DNA, 20 bp, Artificial Sequence
  Description of Artificial Sequence: Synthetic oligonucleotide
  Target: LAMA2; (-) strand; PAM type: YTN; PAM sequence: CTT
ggctcactgaaacccctgcc

SEQ ID NO: 255693 - DNA, 20 bp, Artificial Sequence
  Description of Artificial Sequence: Synthetic oligonucleotide
  Target: LAMA2; (-) strand; PAM type: YTN; PAM sequence: CTG
gagtgcagtggtgcaatctt

SEQ ID NO: 255694 - DNA, 20 bp, Artificial Sequence
  Description of Artificial Sequence: Synthetic oligonucleotide
  Target: LAMA2; (-) strand; PAM type: YTN; PAM sequence: TTG
cccagactggagtgcagtgg

SEQ ID NO: 255695 - DNA, 20 bp, Artificial Sequence
  Description of Artificial Sequence: Synthetic oligonucleotide
  Target: LAMA2; (-) strand; PAM type: YTN; PAM sequence: CTG
ttgcccagactggagtgcag

SEQ ID NO: 255696 - DNA, 20 bp, Artificial Sequence
  Description of Artificial Sequence: Synthetic oligonucleotide
  Target: LAMA2; (-) strand; PAM type: YTN; PAM sequence: CTC
tgttgcccagactggagtgc

SEQ ID NO: 255697 - DNA, 20 bp, Artificial Sequence
  Description of Artificial Sequence: Synthetic oligonucleotide
  Target: LAMA2; (-) strand; PAM type: YTN; PAM sequence: TTG
ctctgttgcccagactggag

SEQ ID NO: 255698 - DNA, 20 bp, Artificial Sequence
  Description of Artificial Sequence: Synthetic oligonucleotide
  Target: LAMA2; (-) strand; PAM type: YTN; PAM sequence: CTT
gctctgttgcccagactgga

SEQ ID NO: 255699 - DNA, 20 bp, Artificial Sequence
  Description of Artificial Sequence: Synthetic oligonucleotide
  Target: LAMA2; (-) strand; PAM type: YTN; PAM sequence: TTG
agacagagtcttgctctgtt

SEQ ID NO: 255700 - DNA, 20 bp, Artificial Sequence
  Description of Artificial Sequence: Synthetic oligonucleotide
  Target: LAMA2; (-) strand; PAM type: YTN; PAM sequence: TTT
gagacagagtcttgctctgt

SEQ ID NO: 255701 - DNA, 20 bp, Artificial Sequence
  Description of Artificial Sequence: Synthetic oligonucleotide
  Target: LAMA2; (-) strand; PAM type: YTN; PAM sequence: TTA
tttgagacagagtcttgctc

SEQ ID NO: 255702 - DNA, 20 bp, Artificial Sequence
  Description of Artificial Sequence: Synthetic oligonucleotide
  Target: LAMA2; (-) strand; PAM type: YTN; PAM sequence: TTT
atttgagacagagtcttgct

SEQ ID NO: 255703 - DNA, 20 bp, Artificial Sequence
  Description of Artificial Sequence: Synthetic oligonucleotide
  Target: LAMA2; (-) strand; PAM type: YTN; PAM sequence: TTT
tatttgagacagagtcttgc

SEQ ID NO: 255704 - DNA, 20 bp, Artificial Sequence
  Description of Artificial Sequence: Synthetic oligonucleotide
  Target: LAMA2; (-) strand; PAM type: YTN; PAM sequence: TTA
ttttatttgagacagagtct

SEQ ID NO: 255705 - DNA, 20 bp, Artificial Sequence
  Description of Artificial Sequence: Synthetic oligonucleotide
  Target: LAMA2; (-) strand; PAM type: YTN; PAM sequence: TTT
attttatttgagacagagtc

SEQ ID NO: 255706 - DNA, 20 bp, Artificial Sequence
  Description of Artificial Sequence: Synthetic oligonucleotide
  Target: LAMA2; (-) strand; PAM type: YTN; PAM sequence: TTT
tattttatttgagacagagt

SEQ ID NO: 255707 - DNA, 20 bp, Artificial Sequence
  Description of Artificial Sequence: Synthetic oligonucleotide
  Target: LAMA2; (-) strand; PAM type: YTN; PAM sequence: TTA
ttttattttatttgagacag

SEQ ID NO: 255708 - DNA, 20 bp, Artificial Sequence
  Description of Artificial Sequence: Synthetic oligonucleotide
  Target: LAMA2; (-) strand; PAM type: YTN; PAM sequence: TTT
attttattttatttgagaca

SEQ ID NO: 255709 - DNA, 20 bp, Artificial Sequence
  Description of Artificial Sequence: Synthetic oligonucleotide
  Target: LAMA2; (-) strand; PAM type: YTN; PAM sequence: TTT
tattttattttatttgagac

SEQ ID NO: 255710 - DNA, 20 bp, Artificial Sequence
  Description of Artificial Sequence: Synthetic oligonucleotide
  Target: LAMA2; (-) strand; PAM type: YTN; PAM sequence: TTA
aaaatattttattttatttt

SEQ ID NO: 255711 - DNA, 20 bp, Artificial Sequence
  Description of Artificial Sequence: Synthetic oligonucleotide
  Target: LAMA2; (-) strand; PAM type: YTN; PAM sequence: TTT
aaaaatattttattttattt

SEQ ID NO: 255712 - DNA, 20 bp, Artificial Sequence
  Description of Artificial Sequence: Synthetic oligonucleotide
  Target: LAMA2; (-) strand; PAM type: YTN; PAM sequence: TTT
taaaaatattttattttatt

SEQ ID NO: 255713 - DNA, 20 bp, Artificial Sequence
  Description of Artificial Sequence: Synthetic oligonucleotide
  Target: LAMA2; (-) strand; PAM type: YTN; PAM sequence: TTT
ttaaaaatattttattttat

SEQ ID NO: 255714 - DNA, 20 bp, Artificial Sequence
  Description of Artificial Sequence: Synthetic oligonucleotide
  Target: LAMA2; (-) strand; PAM type: YTN; PAM sequence: CTG
acatttttaaaaatatttta

SEQ ID NO: 255715 - DNA, 20 bp, Artificial Sequence
  Description of Artificial Sequence: Synthetic oligonucleotide
  Target: LAMA2; (-) strand; PAM type: YTN; PAM sequence: TTC
tgacatttttaaaaatattt

SEQ ID NO: 255716 - DNA, 20 bp, Artificial Sequence
  Description of Artificial Sequence: Synthetic oligonucleotide
  Target: LAMA2; (-) strand; PAM type: YTN; PAM sequence: CTT
ctgacatttttaaaaatatt

SEQ ID NO: 255717 - DNA, 20 bp, Artificial Sequence
  Description of Artificial Sequence: Synthetic oligonucleotide
  Target: LAMA2; (-) strand; PAM type: YTN; PAM sequence: TTG
acaaggcttctgacattttt

SEQ ID NO: 255718 - DNA, 20 bp, Artificial Sequence
  Description of Artificial Sequence: Synthetic oligonucleotide
  Target: LAMA2; (-) strand; PAM type: YTN; PAM sequence: TTG
tcaatggtggttgacaaggc

SEQ ID NO: 255719 - DNA, 20 bp, Artificial Sequence
  Description of Artificial Sequence: Synthetic oligonucleotide
  Target: LAMA2; (-) strand; PAM type: YTN; PAM sequence: CTT
gtcaatggtggttgacaagg

SEQ ID NO: 255720 - DNA, 20 bp, Artificial Sequence
  Description of Artificial Sequence: Synthetic oligonucleotide
  Target: LAMA2; (-) strand; PAM type: YTN; PAM sequence: CTC
ttgtcaatggtggttgacaa

SEQ ID NO: 255721 - DNA, 20 bp, Artificial Sequence
  Description of Artificial Sequence: Synthetic oligonucleotide
  Target: LAMA2; (-) strand; PAM type: YTN; PAM sequence: TTA
tcataactcttgtcaatggt

SEQ ID NO: 255722 - DNA, 20 bp, Artificial Sequence
  Description of Artificial Sequence: Synthetic oligonucleotide
  Target: LAMA2; (-) strand; PAM type: YTN; PAM sequence: TTT
atcataactcttgtcaatgg

SEQ ID NO: 255723 - DNA, 20 bp, Artificial Sequence
  Description of Artificial Sequence: Synthetic oligonucleotide
  Target: LAMA2; (-) strand; PAM type: YTN; PAM sequence: CTA
aatcagtttatcataactct

SEQ ID NO: 255724 - DNA, 20 bp, Artificial Sequence
  Description of Artificial Sequence: Synthetic oligonucleotide
  Target: LAMA2; (-) strand; PAM type: YTN; PAM sequence: TTA
taatcctaaatcagtttatc

SEQ ID NO: 255725 - DNA, 20 bp, Artificial Sequence
  Description of Artificial Sequence: Synthetic oligonucleotide
  Target: LAMA2; (-) strand; PAM type: YTN; PAM sequence: TTT
ataatcctaaatcagtttat

SEQ ID NO: 255726 - DNA, 20 bp, Artificial Sequence
  Description of Artificial Sequence: Synthetic oligonucleotide
  Target: LAMA2; (-) strand; PAM type: YTN; PAM sequence: TTT
tataatcctaaatcagttta

SEQ ID NO: 255727 - DNA, 20 bp, Artificial Sequence
  Description of Artificial Sequence: Synthetic oligonucleotide
  Target: LAMA2; (-) strand; PAM type: YTN; PAM sequence: TTT
ttataatcctaaatcagttt

SEQ ID NO: 255728 - DNA, 20 bp, Artificial Sequence
  Description of Artificial Sequence: Synthetic oligonucleotide
  Target: LAMA2; (-) strand; PAM type: YTN; PAM sequence: TTT
tttataatcctaaatcagtt

SEQ ID NO: 255729 - DNA, 20 bp, Artificial Sequence
  Description of Artificial Sequence: Synthetic oligonucleotide
  Target: LAMA2; (-) strand; PAM type: YTN; PAM sequence: TTG
ttttttataatcctaaatca

SEQ ID NO: 255730 - DNA, 20 bp, Artificial Sequence
  Description of Artificial Sequence: Synthetic oligonucleotide
  Target: LAMA2; (-) strand; PAM type: YTN; PAM sequence: TTG
aaagaaaaccataccaattg

SEQ ID NO: 255731 - DNA, 20 bp, Artificial Sequence
  Description of Artificial Sequence: Synthetic oligonucleotide
  Target: LAMA2; (-) strand; PAM type: YTN; PAM sequence: CTG
attgaaagaaaaccatacca

SEQ ID NO: 255732 - DNA, 20 bp, Artificial Sequence
  Description of Artificial Sequence: Synthetic oligonucleotide
  Target: LAMA2; (-) strand; PAM type: YTN; PAM sequence: CTA
cactgattgaaagaaaacca

SEQ ID NO: 255733 - DNA, 20 bp, Artificial Sequence
  Description of Artificial Sequence: Synthetic oligonucleotide
  Target: LAMA2; (-) strand; PAM type: YTN; PAM sequence: CTG
tgggactacactgattgaaa

SEQ ID NO: 255734 - DNA, 20 bp, Artificial Sequence
  Description of Artificial Sequence: Synthetic oligonucleotide
  Target: LAMA2; (-) strand; PAM type: YTN; PAM sequence: CTC
tgtgggactacactgattga

SEQ ID NO: 255735 - DNA, 20 bp, Artificial Sequence
  Description of Artificial Sequence: Synthetic oligonucleotide
  Target: LAMA2; (-) strand; PAM type: YTN; PAM sequence: TTC
ccacctctgtgggactacac

SEQ ID NO: 255736 - DNA, 20 bp, Artificial Sequence
  Description of Artificial Sequence: Synthetic oligonucleotide
  Target: LAMA2; (-) strand; PAM type: YTN; PAM sequence: TTT
cccacctctgtgggactaca

SEQ ID NO: 255737 - DNA, 20 bp, Artificial Sequence
  Description of Artificial Sequence: Synthetic oligonucleotide
  Target: LAMA2; (-) strand; PAM type: YTN; PAM sequence: CTG
ggtttcccacctctgtggga

SEQ ID NO: 255738 - DNA, 20 bp, Artificial Sequence
  Description of Artificial Sequence: Synthetic oligonucleotide
  Target: LAMA2; (-) strand; PAM type: YTN; PAM sequence: CTC
caaccagaagcactgggttt

SEQ ID NO: 255739 - DNA, 20 bp, Artificial Sequence
  Description of Artificial Sequence: Synthetic oligonucleotide
  Target: LAMA2; (-) strand; PAM type: YTN; PAM sequence: CTG
actccaaccagaagcactgg

SEQ ID NO: 255740 - DNA, 20 bp, Artificial Sequence
  Description of Artificial Sequence: Synthetic oligonucleotide
  Target: LAMA2; (-) strand; PAM type: YTN; PAM sequence: CTG
agaaactgactccaaccaga

SEQ ID NO: 255741 - DNA, 20 bp, Artificial Sequence
  Description of Artificial Sequence: Synthetic oligonucleotide
  Target: LAMA2; (-) strand; PAM type: YTN; PAM sequence: CTA
ctgagaaactgactccaacc

SEQ ID NO: 255742 - DNA, 20 bp, Artificial Sequence
  Description of Artificial Sequence: Synthetic oligonucleotide
  Target: LAMA2; (-) strand; PAM type: YTN; PAM sequence: CTC
atcatctactgagaaactga

SEQ ID NO: 255743 - DNA, 20 bp, Artificial Sequence
  Description of Artificial Sequence: Synthetic oligonucleotide
  Target: LAMA2; (-) strand; PAM type: YTN; PAM sequence: CTA
tctcatcatctactgagaaa

SEQ ID NO: 255744 - DNA, 20 bp, Artificial Sequence
  Description of Artificial Sequence: Synthetic oligonucleotide
  Target: LAMA2; (-) strand; PAM type: YTN; PAM sequence: CTG
taactatctcatcatctact

SEQ ID NO: 255745 - DNA, 20 bp, Artificial Sequence
  Description of Artificial Sequence: Synthetic oligonucleotide
  Target: LAMA2; (-) strand; PAM type: YTN; PAM sequence: TTC
tgtaactatctcatcatcta

SEQ ID NO: 255746 - DNA, 20 bp, Artificial Sequence
  Description of Artificial Sequence: Synthetic oligonucleotide
  Target: LAMA2; (-) strand; PAM type: YTN; PAM sequence: TTG
gcattctgtaactatctcat

SEQ ID NO: 255747 - DNA, 20 bp, Artificial Sequence
  Description of Artificial Sequence: Synthetic oligonucleotide
  Target: LAMA2; (-) strand; PAM type: YTN; PAM sequence: TTG
aaaattggcattctgtaact

SEQ ID NO: 255748 - DNA, 20 bp, Artificial Sequence
  Description of Artificial Sequence: Synthetic oligonucleotide
  Target: LAMA2; (-) strand; PAM type: YTN; PAM sequence: TTT
gaaaattggcattctgtaac

SEQ ID NO: 255749 - DNA, 20 bp, Artificial Sequence
  Description of Artificial Sequence: Synthetic oligonucleotide
  Target: LAMA2; (-) strand; PAM type: YTN; PAM sequence: CTT
tgaaaattggcattctgtaa

SEQ ID NO: 255750 - DNA, 20 bp, Artificial Sequence
  Description of Artificial Sequence: Synthetic oligonucleotide
  Target: LAMA2; (-) strand; PAM type: YTN; PAM sequence: TTC
tttgaaaattggcattctgt

SEQ ID NO: 255751 - DNA, 20 bp, Artificial Sequence
  Description of Artificial Sequence: Synthetic oligonucleotide
  Target: LAMA2; (-) strand; PAM type: YTN; PAM sequence: CTT
ctttgaaaattggcattctg

SEQ ID NO: 255752 - DNA, 20 bp, Artificial Sequence
  Description of Artificial Sequence: Synthetic oligonucleotide
  Target: LAMA2; (-) strand; PAM type: YTN; PAM sequence: CTG
tagcatatatatgtcttctt

SEQ ID NO: 255753 - DNA, 20 bp, Artificial Sequence
  Description of Artificial Sequence: Synthetic oligonucleotide
  Target: LAMA2; (-) strand; PAM type: YTN; PAM sequence: CTC
tgtagcatatatatgtcttc

SEQ ID NO: 255754 - DNA, 20 bp, Artificial Sequence
  Description of Artificial Sequence: Synthetic oligonucleotide
  Target: LAMA2; (-) strand; PAM type: YTN; PAM sequence: CTG
catctctgtagcatatatat

SEQ ID NO: 255755 - DNA, 20 bp, Artificial Sequence
  Description of Artificial Sequence: Synthetic oligonucleotide
  Target: LAMA2; (-) strand; PAM type: YTN; PAM sequence: TTC
agacataaaagtgagaactg

SEQ ID NO: 255756 - DNA, 20 bp, Artificial Sequence
  Description of Artificial Sequence: Synthetic oligonucleotide
  Target: LAMA2; (-) strand; PAM type: YTN; PAM sequence: TTT
cagacataaaagtgagaact

SEQ ID NO: 255757 - DNA, 20 bp, Artificial Sequence
  Description of Artificial Sequence: Synthetic oligonucleotide
  Target: LAMA2; (-) strand; PAM type: YTN; PAM sequence: TTT
tcagacataaaagtgagaac

SEQ ID NO: 255758 - DNA, 20 bp, Artificial Sequence
  Description of Artificial Sequence: Synthetic oligonucleotide
  Target: LAMA2; (-) strand; PAM type: YTN; PAM sequence: CTG
ttttcagacataaaagtgag

SEQ ID NO: 255759 - DNA, 20 bp, Artificial Sequence
  Description of Artificial Sequence: Synthetic oligonucleotide
  Target: LAMA2; (-) strand; PAM type: YTN; PAM sequence: TTA
ctgttttcagacataaaagt

SEQ ID NO: 255760 - DNA, 20 bp, Artificial Sequence
  Description of Artificial Sequence: Synthetic oligonucleotide
  Target: LAMA2; (-) strand; PAM type: YTN; PAM sequence: CTG
ttactgttttcagacataaa

SEQ ID NO: 255761 - DNA, 20 bp, Artificial Sequence
  Description of Artificial Sequence: Synthetic oligonucleotide
  Target: LAMA2; (-) strand; PAM type: YTN; PAM sequence: TTG
ctgttactgttttcagacat

SEQ ID NO: 255762 - DNA, 20 bp, Artificial Sequence
  Description of Artificial Sequence: Synthetic oligonucleotide
  Target: LAMA2; (-) strand; PAM type: YTN; PAM sequence: TTT
gctgttactgttttcagaca

SEQ ID NO: 255763 - DNA, 20 bp, Artificial Sequence
  Description of Artificial Sequence: Synthetic oligonucleotide
  Target: LAMA2; (-) strand; PAM type: YTN; PAM sequence: CTC
atccacatccggtgatttgc

SEQ ID NO: 255764 - DNA, 20 bp, Artificial Sequence
  Description of Artificial Sequence: Synthetic oligonucleotide
  Target: LAMA2; (-) strand; PAM type: YTN; PAM sequence: CTC
tcatccacatccggtgattt

SEQ ID NO: 255765 - DNA, 20 bp, Artificial Sequence
  Description of Artificial Sequence: Synthetic oligonucleotide
  Target: LAMA2; (-) strand; PAM type: YTN; PAM sequence: TTC
ctctcatccacatccggtga

SEQ ID NO: 255766 - DNA, 20 bp, Artificial Sequence
  Description of Artificial Sequence: Synthetic oligonucleotide
  Target: LAMA2; (-) strand; PAM type: YTN; PAM sequence: TTT
cctctcatccacatccggtg

SEQ ID NO: 255767 - DNA, 20 bp, Artificial Sequence
  Description of Artificial Sequence: Synthetic oligonucleotide
  Target: LAMA2; (-) strand; PAM type: YTN; PAM sequence: TTA
aaataaaataaaaaaaaagg

SEQ ID NO: 255768 - DNA, 20 bp, Artificial Sequence
  Description of Artificial Sequence: Synthetic oligonucleotide
  Target: LAMA2; (-) strand; PAM type: YTN; PAM sequence: CTG
aagatgcacaggttaaaata

SEQ ID NO: 255769 - DNA, 20 bp, Artificial Sequence
  Description of Artificial Sequence: Synthetic oligonucleotide
  Target: LAMA2; (-) strand; PAM type: YTN; PAM sequence: TTG
cactgaagatgcacaggtta

SEQ ID NO: 255770 - DNA, 20 bp, Artificial Sequence
  Description of Artificial Sequence: Synthetic oligonucleotide
  Target: LAMA2; (-) strand; PAM type: YTN; PAM sequence: TTG
tgattgcactgaagatgcac

SEQ ID NO: 255771 - DNA, 20 bp, Artificial Sequence
  Description of Artificial Sequence: Synthetic oligonucleotide
  Target: LAMA2; (-) strand; PAM type: YTN; PAM sequence: TTG
acgggattgtgattgcactg

SEQ ID NO: 255772 - DNA, 20 bp, Artificial Sequence
  Description of Artificial Sequence: Synthetic oligonucleotide
  Target: LAMA2; (-) strand; PAM type: YTN; PAM sequence: CTT
gacgggattgtgattgcact

SEQ ID NO: 255773 - DNA, 20 bp, Artificial Sequence
  Description of Artificial Sequence: Synthetic oligonucleotide
  Target: LAMA2; (-) strand; PAM type: YTN; PAM sequence: TTC
ttgacgggattgtgattgca

SEQ ID NO: 255774 - DNA, 20 bp, Artificial Sequence
  Description of Artificial Sequence: Synthetic oligonucleotide
  Target: LAMA2; (-) strand; PAM type: YTN; PAM sequence: TTT
cttgacgggattgtgattgc

SEQ ID NO: 255775 - DNA, 20 bp, Artificial Sequence
  Description of Artificial Sequence: Synthetic oligonucleotide
  Target: LAMA2; (-) strand; PAM type: YTN; PAM sequence: TTT
tcttgacgggattgtgattg

SEQ ID NO: 255776 - DNA, 20 bp, Artificial Sequence
  Description of Artificial Sequence: Synthetic oligonucleotide
  Target: LAMA2; (-) strand; PAM type: YTN; PAM sequence: CTA
tgggtgattttcttgacggg

SEQ ID NO: 255777 - DNA, 20 bp, Artificial Sequence
  Description of Artificial Sequence: Synthetic oligonucleotide
  Target: LAMA2; (-) strand; PAM type: YTN; PAM sequence: TTC
actatgggtgattttcttga

SEQ ID NO: 255778 - DNA, 20 bp, Artificial Sequence
  Description of Artificial Sequence: Synthetic oligonucleotide
  Target: LAMA2; (-) strand; PAM type: YTN; PAM sequence: CTA
cgcatgacccaaagacagtt

SEQ ID NO: 255779 - DNA, 20 bp, Artificial Sequence
  Description of Artificial Sequence: Synthetic oligonucleotide
  Target: LAMA2; (-) strand; PAM type: YTN; PAM sequence: TTG
ctacgcatgacccaaagaca

SEQ ID NO: 255780 - DNA, 20 bp, Artificial Sequence
  Description of Artificial Sequence: Synthetic oligonucleotide
  Target: LAMA2; (-) strand; PAM type: YTN; PAM sequence: TTT
gctacgcatgacccaaagac

SEQ ID NO: 255781 - DNA, 20 bp, Artificial Sequence
  Description of Artificial Sequence: Synthetic oligonucleotide
  Target: LAMA2; (-) strand; PAM type: YTN; PAM sequence: CTT
tgctacgcatgacccaaaga

SEQ ID NO: 255782 - DNA, 20 bp, Artificial Sequence
  Description of Artificial Sequence: Synthetic oligonucleotide
  Target: LAMA2; (-) strand; PAM type: YTN; PAM sequence: CTG
tactttgctacgcatgaccc

SEQ ID NO: 255783 - DNA, 20 bp, Artificial Sequence
  Description of Artificial Sequence: Synthetic oligonucleotide
  Target: LAMA2; (-) strand; PAM type: YTN; PAM sequence: TTA
taaagcatcctgtactttgc

SEQ ID NO: 255784 - DNA, 20 bp, Artificial Sequence
  Description of Artificial Sequence: Synthetic oligonucleotide
  Target: LAMA2; (-) strand; PAM type: YTN; PAM sequence: TTT
ataaagcatcctgtactttg

SEQ ID NO: 255785 - DNA, 20 bp, Artificial Sequence
  Description of Artificial Sequence: Synthetic oligonucleotide
  Target: LAMA2; (-) strand; PAM type: YTN; PAM sequence: TTT
tataaagcatcctgtacttt

SEQ ID NO: 255786 - DNA, 20 bp, Artificial Sequence
  Description of Artificial Sequence: Synthetic oligonucleotide
  Target: LAMA2; (-) strand; PAM type: YTN; PAM sequence: CTT
ttataaagcatcctgtactt

SEQ ID NO: 255787 - DNA, 20 bp, Artificial Sequence
  Description of Artificial Sequence: Synthetic oligonucleotide
  Target: LAMA2; (-) strand; PAM type: YTN; PAM sequence: CTC
cttttataaagcatcctgta

SEQ ID NO: 255788 - DNA, 20 bp, Artificial Sequence
  Description of Artificial Sequence: Synthetic oligonucleotide
  Target: LAMA2; (-) strand; PAM type: YTN; PAM sequence: CTG
cgagtaaagaatctcctttt

SEQ ID NO: 255789 - DNA, 20 bp, Artificial Sequence
  Description of Artificial Sequence: Synthetic oligonucleotide
  Target: LAMA2; (-) strand; PAM type: YTN; PAM sequence: CTG
tgatgaacagcagacaagac

SEQ ID NO: 255790 - DNA, 20 bp, Artificial Sequence
  Description of Artificial Sequence: Synthetic oligonucleotide
  Target: LAMA2; (-) strand; PAM type: YTN; PAM sequence: CTG
gtagctgtgatgaacagcag

SEQ ID NO: 255791 - DNA, 20 bp, Artificial Sequence
  Description of Artificial Sequence: Synthetic oligonucleotide
  Target: LAMA2; (-) strand; PAM type: YTN; PAM sequence: TTC
tggtagctgtgatgaacagc

SEQ ID NO: 255792 - DNA, 20 bp, Artificial Sequence
  Description of Artificial Sequence: Synthetic oligonucleotide
  Target: LAMA2; (-) strand; PAM type: YTN; PAM sequence: TTA
aggagttctggtagctgtga

SEQ ID NO: 255793 - DNA, 20 bp, Artificial Sequence
  Description of Artificial Sequence: Synthetic oligonucleotide
  Target: LAMA2; (-) strand; PAM type: YTN; PAM sequence: TTC
cacattaaggagttctggta

SEQ ID NO: 255794 - DNA, 20 bp, Artificial Sequence
  Description of Artificial Sequence: Synthetic oligonucleotide
  Target: LAMA2; (-) strand; PAM type: YTN; PAM sequence: CTG
gatcaaagattccacattaa

SEQ ID NO: 255795 - DNA, 20 bp, Artificial Sequence
  Description of Artificial Sequence: Synthetic oligonucleotide
  Target: LAMA2; (-) strand; PAM type: YTN; PAM sequence: TTA
tctggatcaaagattccaca

SEQ ID NO: 255796 - DNA, 20 bp, Artificial Sequence
  Description of Artificial Sequence: Synthetic oligonucleotide
  Target: LAMA2; (-) strand; PAM type: YTN; PAM sequence: TTA
taaatattatctggatcaaa

SEQ ID NO: 255797 - DNA, 20 bp, Artificial Sequence
  Description of Artificial Sequence: Synthetic oligonucleotide
  Target: LAMA2; (-) strand; PAM type: YTN; PAM sequence: TTT
ataaatattatctggatcaa

SEQ ID NO: 255798 - DNA, 20 bp, Artificial Sequence
  Description of Artificial Sequence: Synthetic oligonucleotide
  Target: LAMA2; (-) strand; PAM type: YTN; PAM sequence: TTG
aatttataaatattatctgg

SEQ ID NO: 255799 - DNA, 20 bp, Artificial Sequence
  Description of Artificial Sequence: Synthetic oligonucleotide
  Target: LAMA2; (-) strand; PAM type: YTN; PAM sequence: TTT
gaatttataaatattatctg

SEQ ID NO: 255800 - DNA, 20 bp, Artificial Sequence
  Description of Artificial Sequence: Synthetic oligonucleotide
  Target: LAMA2; (-) strand; PAM type: YTN; PAM sequence: CTT
tgaatttataaatattatct

SEQ ID NO: 255801 - DNA, 20 bp, Artificial Sequence
  Description of Artificial Sequence: Synthetic oligonucleotide
  Target: LAMA2; (-) strand; PAM type: YTN; PAM sequence: CTG
ggatgctttgaatttataaa

SEQ ID NO: 255802 - DNA, 20 bp, Artificial Sequence
  Description of Artificial Sequence: Synthetic oligonucleotide
  Target: LAMA2; (-) strand; PAM type: YTN; PAM sequence: CTG
gtctgggatgctttgaattt

SEQ ID NO: 255803 - DNA, 20 bp, Artificial Sequence
  Description of Artificial Sequence: Synthetic oligonucleotide
  Target: LAMA2; (-) strand; PAM type: YTN; PAM sequence: CTG
ggtcaaggagataaaggctg

SEQ ID NO: 255804 - DNA, 20 bp, Artificial Sequence
  Description of Artificial Sequence: Synthetic oligonucleotide
  Target: LAMA2; (-) strand; PAM type: YTN; PAM sequence: CTG
ctgggtcaaggagataaagg

SEQ ID NO: 255805 - DNA, 20 bp, Artificial Sequence
  Description of Artificial Sequence: Synthetic oligonucleotide
  Target: LAMA2; (-) strand; PAM type: YTN; PAM sequence: CTA
aatgaatctgctgggtcaag

SEQ ID NO: 255806 - DNA, 20 bp, Artificial Sequence
  Description of Artificial Sequence: Synthetic oligonucleotide
  Target: LAMA2; (-) strand; PAM type: YTN; PAM sequence: CTC
agtggaaagtctaaatgaat

SEQ ID NO: 255807 - DNA, 20 bp, Artificial Sequence
  Description of Artificial Sequence: Synthetic oligonucleotide
  Target: LAMA2; (-) strand; PAM type: YTN; PAM sequence: TTC
aactcagtggaaagtctaaa

SEQ ID NO: 255808 - DNA, 20 bp, Artificial Sequence
  Description of Artificial Sequence: Synthetic oligonucleotide
  Target: LAMA2; (-) strand; PAM type: YTN; PAM sequence: TTT
caactcagtggaaagtctaa

SEQ ID NO: 255809 - DNA, 20 bp, Artificial Sequence
  Description of Artificial Sequence: Synthetic oligonucleotide
  Target: LAMA2; (-) strand; PAM type: YTN; PAM sequence: TTA
aacatttcaactcagtggaa

SEQ ID NO: 255810 - DNA, 20 bp, Artificial Sequence
  Description of Artificial Sequence: Synthetic oligonucleotide
  Target: LAMA2; (-) strand; PAM type: YTN; PAM sequence: TTT
aaacatttcaactcagtgga

SEQ ID NO: 255811 - DNA, 20 bp, Artificial Sequence
  Description of Artificial Sequence: Synthetic oligonucleotide
  Target: LAMA2; (-) strand; PAM type: YTN; PAM sequence: TTT
taaacatttcaactcagtgg

SEQ ID NO: 255812 - DNA, 20 bp, Artificial Sequence
  Description of Artificial Sequence: Synthetic oligonucleotide
  Target: LAMA2; (-) strand; PAM type: YTN; PAM sequence: CTA
tcattttaaacatttcaact

SEQ ID NO: 255813 - DNA, 20 bp, Artificial Sequence
  Description of Artificial Sequence: Synthetic oligonucleotide
  Target: LAMA2; (-) strand; PAM type: YTN; PAM sequence: TTA
ggaccaggtaagtctatcat

SEQ ID NO: 255814 - DNA, 20 bp, Artificial Sequence
  Description of Artificial Sequence: Synthetic oligonucleotide
  Target: LAMA2; (-) strand; PAM type: YTN; PAM sequence: CTA
gcaaggtattaggaccaggt

SEQ ID NO: 255815 - DNA, 20 bp, Artificial Sequence
  Description of Artificial Sequence: Synthetic oligonucleotide
  Target: LAMA2; (-) strand; PAM type: YTN; PAM sequence: TTG
ggatactagcaaggtattag

SEQ ID NO: 255816 - DNA, 20 bp, Artificial Sequence
  Description of Artificial Sequence: Synthetic oligonucleotide
  Target: LAMA2; (-) strand; PAM type: YTN; PAM sequence: TTT
gggatactagcaaggtatta

SEQ ID NO: 255817 - DNA, 20 bp, Artificial Sequence
  Description of Artificial Sequence: Synthetic oligonucleotide
  Target: LAMA2; (-) strand; PAM type: YTN; PAM sequence: TTT
tgggatactagcaaggtatt

SEQ ID NO: 255818 - DNA, 20 bp, Artificial Sequence
  Description of Artificial Sequence: Synthetic oligonucleotide
  Target: LAMA2; (-) strand; PAM type: YTN; PAM sequence: TTT
ttgggatactagcaaggtat

SEQ ID NO: 255819 - DNA, 20 bp, Artificial Sequence
  Description of Artificial Sequence: Synthetic oligonucleotide
  Target: LAMA2; (-) strand; PAM type: YTN; PAM sequence: CTA
tttttgggatactagcaagg

SEQ ID NO: 255820 - DNA, 20 bp, Artificial Sequence
  Description of Artificial Sequence: Synthetic oligonucleotide
  Target: LAMA2; (-) strand; PAM type: YTN; PAM sequence: TTC
ctatttttgggatactagca

SEQ ID NO: 255821 - DNA, 20 bp, Artificial Sequence
  Description of Artificial Sequence: Synthetic oligonucleotide
  Target: LAMA2; (-) strand; PAM type: YTN; PAM sequence: CTT
cctatttttgggatactagc

SEQ ID NO: 255822 - DNA, 20 bp, Artificial Sequence
  Description of Artificial Sequence: Synthetic oligonucleotide
  Target: LAMA2; (-) strand; PAM type: YTN; PAM sequence: TTC
ttcctatttttgggatacta

SEQ ID NO: 255823 - DNA, 20 bp, Artificial Sequence
  Description of Artificial Sequence: Synthetic oligonucleotide
  Target: LAMA2; (-) strand; PAM type: YTN; PAM sequence: TTA
atagttcttcctatttttgg

SEQ ID NO: 255824 - DNA, 20 bp, Artificial Sequence
  Description of Artificial Sequence: Synthetic oligonucleotide
  Target: LAMA2; (-) strand; PAM type: YTN; PAM sequence: TTT
aatagttcttcctatttttg

SEQ ID NO: 255825 - DNA, 20 bp, Artificial Sequence
  Description of Artificial Sequence: Synthetic oligonucleotide
  Target: LAMA2; (-) strand; PAM type: YTN; PAM sequence: CTG
taaagatttaatagttcttc

SEQ ID NO: 255826 - DNA, 20 bp, Artificial Sequence
  Description of Artificial Sequence: Synthetic oligonucleotide
  Target: LAMA2; (-) strand; PAM type: YTN; PAM sequence: TTC
tgtaaagatttaatagttct

SEQ ID NO: 255827 - DNA, 20 bp, Artificial Sequence
  Description of Artificial Sequence: Synthetic oligonucleotide
  Target: LAMA2; (-) strand; PAM type: YTN; PAM sequence: CTC
agggtagttctgtaaagatt

SEQ ID NO: 255828 - DNA, 20 bp, Artificial Sequence
  Description of Artificial Sequence: Synthetic oligonucleotide
  Target: LAMA2; (-) strand; PAM type: YTN; PAM sequence: TTA
actcagggtagttctgtaaa

SEQ ID NO: 255829 - DNA, 20 bp, Artificial Sequence
  Description of Artificial Sequence: Synthetic oligonucleotide
  Target: LAMA2; (-) strand; PAM type: YTN; PAM sequence: CTT
aactcagggtagttctgtaa

SEQ ID NO: 255830 - DNA, 20 bp, Artificial Sequence
  Description of Artificial Sequence: Synthetic oligonucleotide
  Target: LAMA2; (-) strand; PAM type: YTN; PAM sequence: CTG
gcttaactcagggtagttct

SEQ ID NO: 255831 - DNA, 20 bp, Artificial Sequence
  Description of Artificial Sequence: Synthetic oligonucleotide
  Target: LAMA2; (-) strand; PAM type: YTN; PAM sequence: CTC
tggcttaactcagggtagtt

SEQ ID NO: 255832 - DNA, 20 bp, Artificial Sequence
  Description of Artificial Sequence: Synthetic oligonucleotide
  Target: LAMA2; (-) strand; PAM type: YTN; PAM sequence: TTC
tctggcttaactcagggtag

SEQ ID NO: 255833 - DNA, 20 bp, Artificial Sequence
  Description of Artificial Sequence: Synthetic oligonucleotide
  Target: LAMA2; (-) strand; PAM type: YTN; PAM sequence: TTT
ctctggcttaactcagggta

SEQ ID NO: 255834 - DNA, 20 bp, Artificial Sequence
  Description of Artificial Sequence: Synthetic oligonucleotide
  Target: LAMA2; (-) strand; PAM type: YTN; PAM sequence: CTG
aatagtatttctctggctta

SEQ ID NO: 255835 - DNA, 20 bp, Artificial Sequence
  Description of Artificial Sequence: Synthetic oligonucleotide
  Target: LAMA2; (-) strand; PAM type: YTN; PAM sequence: TTC
tgaatagtatttctctggct

SEQ ID NO: 255836 - DNA, 20 bp, Artificial Sequence
  Description of Artificial Sequence: Synthetic oligonucleotide
  Target: LAMA2; (-) strand; PAM type: YTN; PAM sequence: TTT
ctgaatagtatttctctggc

SEQ ID NO: 255837 - DNA, 20 bp, Artificial Sequence
  Description of Artificial Sequence: Synthetic oligonucleotide
  Target: LAMA2; (-) strand; PAM type: YTN; PAM sequence: CTA
tttctgaatagtatttctct

SEQ ID NO: 255838 - DNA, 20 bp, Artificial Sequence
  Description of Artificial Sequence: Synthetic oligonucleotide
  Target: LAMA2; (-) strand; PAM type: YTN; PAM sequence: TTG
gtgcagatcagatcatgaac

SEQ ID NO: 255839 - DNA, 20 bp, Artificial Sequence
  Description of Artificial Sequence: Synthetic oligonucleotide
  Target: LAMA2; (-) strand; PAM type: YTN; PAM sequence: TTT
ggtgcagatcagatcatgaa

SEQ ID NO: 255840 - DNA, 20 bp, Artificial Sequence
  Description of Artificial Sequence: Synthetic oligonucleotide
  Target: LAMA2; (-) strand; PAM type: YTN; PAM sequence: CTT
tggtgcagatcagatcatga

SEQ ID NO: 255841 - DNA, 20 bp, Artificial Sequence
  Description of Artificial Sequence: Synthetic oligonucleotide
  Target: LAMA2; (-) strand; PAM type: YTN; PAM sequence: TTA
actttggtgcagatcagatc

SEQ ID NO: 255842 - DNA, 20 bp, Artificial Sequence
  Description of Artificial Sequence: Synthetic oligonucleotide
  Target: LAMA2; (-) strand; PAM type: YTN; PAM sequence: CTT
aactttggtgcagatcagat

SEQ ID NO: 255843 - DNA, 20 bp, Artificial Sequence
  Description of Artificial Sequence: Synthetic oligonucleotide
  Target: LAMA2; (-) strand; PAM type: YTN; PAM sequence: TTC
ttaactttggtgcagatcag

SEQ ID NO: 255844 - DNA, 20 bp, Artificial Sequence
  Description of Artificial Sequence: Synthetic oligonucleotide
  Target: LAMA2; (-) strand; PAM type: YTN; PAM sequence: TTT
cttaactttggtgcagatca

SEQ ID NO: 255845 - DNA, 20 bp, Artificial Sequence
  Description of Artificial Sequence: Synthetic oligonucleotide
  Target: LAMA2; (-) strand; PAM type: YTN; PAM sequence: CTT
tcttaactttggtgcagatc

SEQ ID NO: 255846 - DNA, 20 bp, Artificial Sequence
  Description of Artificial Sequence: Synthetic oligonucleotide
  Target: LAMA2; (-) strand; PAM type: YTN; PAM sequence: TTG
aaatactttcttaactttgg

SEQ ID NO: 255847 - DNA, 20 bp, Artificial Sequence
  Description of Artificial Sequence: Synthetic oligonucleotide
  Target: LAMA2; (-) strand; PAM type: YTN; PAM sequence: TTT
gaaatactttcttaactttg

SEQ ID NO: 255848 - DNA, 20 bp, Artificial Sequence
  Description of Artificial Sequence: Synthetic oligonucleotide
  Target: LAMA2; (-) strand; PAM type: YTN; PAM sequence: CTT
tgaaatactttcttaacttt

SEQ ID NO: 255849 - DNA, 20 bp, Artificial Sequence
  Description of Artificial Sequence: Synthetic oligonucleotide
  Target: LAMA2; (-) strand; PAM type: YTN; PAM sequence: TTA
ctttgaaatactttcttaac

SEQ ID NO: 255850 - DNA, 20 bp, Artificial Sequence
  Description of Artificial Sequence: Synthetic oligonucleotide
  Target: LAMA2; (-) strand; PAM type: YTN; PAM sequence: TTG
aattactttgaaatactttc

SEQ ID NO: 255851 - DNA, 20 bp, Artificial Sequence
  Description of Artificial Sequence: Synthetic oligonucleotide
  Target: LAMA2; (-) strand; PAM type: YTN; PAM sequence: CTT
gaattactttgaaatacttt

SEQ ID NO: 255852 - DNA, 20 bp, Artificial Sequence
  Description of Artificial Sequence: Synthetic oligonucleotide
  Target: LAMA2; (-) strand; PAM type: YTN; PAM sequence: CTG
acacttgaattactttgaaa

SEQ ID NO: 255853 - DNA, 20 bp, Artificial Sequence
  Description of Artificial Sequence: Synthetic oligonucleotide
  Target: LAMA2; (-) strand; PAM type: YTN; PAM sequence: CTC
ctgacacttgaattactttg

SEQ ID NO: 255854 - DNA, 20 bp, Artificial Sequence
  Description of Artificial Sequence: Synthetic oligonucleotide
  Target: LAMA2; (-) strand; PAM type: YTN; PAM sequence: CTG
ctcctgacacttgaattact

SEQ ID NO: 255855 - DNA, 20 bp, Artificial Sequence
  Description of Artificial Sequence: Synthetic oligonucleotide
  Target: LAMA2; (-) strand; PAM type: YTN; PAM sequence: TTG
atcctgctcctgacacttga

SEQ ID NO: 255856 - DNA, 20 bp, Artificial Sequence
  Description of Artificial Sequence: Synthetic oligonucleotide
  Target: LAMA2; (-) strand; PAM type: YTN; PAM sequence: TTT
gatcctgctcctgacacttg

SEQ ID NO: 255857 - DNA, 20 bp, Artificial Sequence
  Description of Artificial Sequence: Synthetic oligonucleotide
  Target: LAMA2; (-) strand; PAM type: YTN; PAM sequence: CTG
atttgatcctgctcctgaca

SEQ ID NO: 255858 - DNA, 20 bp, Artificial Sequence
  Description of Artificial Sequence: Synthetic oligonucleotide
  Target: LAMA2; (-) strand; PAM type: YTN; PAM sequence: TTC
caagtcctgatttgatcctg

SEQ ID NO: 255859 - DNA, 20 bp, Artificial Sequence
  Description of Artificial Sequence: Synthetic oligonucleotide
  Target: LAMA2; (-) strand; PAM type: YTN; PAM sequence: TTA
aacattccaagtcctgattt

SEQ ID NO: 255860 - DNA, 20 bp, Artificial Sequence
  Description of Artificial Sequence: Synthetic oligonucleotide
  Target: LAMA2; (-) strand; PAM type: YTN; PAM sequence: TTA
aagacataacaacaaattaa

SEQ ID NO: 255861 - DNA, 20 bp, Artificial Sequence
  Description of Artificial Sequence: Synthetic oligonucleotide
  Target: LAMA2; (-) strand; PAM type: YTN; PAM sequence: CTA
aatgaattaaagacataaca

SEQ ID NO: 255862 - DNA, 20 bp, Artificial Sequence
  Description of Artificial Sequence: Synthetic oligonucleotide
  Target: LAMA2; (-) strand; PAM type: YTN; PAM sequence: TTG
atggctaaatgaattaaaga

SEQ ID NO: 255863 - DNA, 20 bp, Artificial Sequence
  Description of Artificial Sequence: Synthetic oligonucleotide
  Target: LAMA2; (-) strand; PAM type: YTN; PAM sequence: CTT
gatggctaaatgaattaaag

SEQ ID NO: 255864 - DNA, 20 bp, Artificial Sequence
  Description of Artificial Sequence: Synthetic oligonucleotide
  Target: LAMA2; (-) strand; PAM type: YTN; PAM sequence: TTG
cttgatggctaaatgaatta

SEQ ID NO: 255865 - DNA, 20 bp, Artificial Sequence
  Description of Artificial Sequence: Synthetic oligonucleotide
  Target: LAMA2; (-) strand; PAM type: YTN; PAM sequence: CTT
gcttgatggctaaatgaatt

SEQ ID NO: 255866 - DNA, 20 bp, Artificial Sequence
  Description of Artificial Sequence: Synthetic oligonucleotide
  Target: LAMA2; (-) strand; PAM type: YTN; PAM sequence: TTC
aatagagacttgcttgatgg

SEQ ID NO: 255867 - DNA, 20 bp, Artificial Sequence
  Description of Artificial Sequence: Synthetic oligonucleotide
  Target: LAMA2; (-) strand; PAM type: YTN; PAM sequence: TTA
tatatgacagggcaattcaa

SEQ ID NO: 255868 - DNA, 20 bp, Artificial Sequence
  Description of Artificial Sequence: Synthetic oligonucleotide
  Target: LAMA2; (-) strand; PAM type: YTN; PAM sequence: CTA
ttatatatgacagggcaatt

SEQ ID NO: 255869 - DNA, 20 bp, Artificial Sequence
  Description of Artificial Sequence: Synthetic oligonucleotide
  Target: LAMA2; (-) strand; PAM type: YTN; PAM sequence: TTC
tattatatatgacagggcaa

SEQ ID NO: 255870 - DNA, 20 bp, Artificial Sequence
  Description of Artificial Sequence: Synthetic oligonucleotide
  Target: LAMA2; (-) strand; PAM type: YTN; PAM sequence: TTT
ctattatatatgacagggca

SEQ ID NO: 255871 - DNA, 20 bp, Artificial Sequence
  Description of Artificial Sequence: Synthetic oligonucleotide
  Target: LAMA2; (-) strand; PAM type: YTN; PAM sequence: TTT
tctattatatatgacagggc

SEQ ID NO: 255872 - DNA, 20 bp, Artificial Sequence
  Description of Artificial Sequence: Synthetic oligonucleotide
  Target: LAMA2; (-) strand; PAM type: YTN; PAM sequence: TTG
ttttctattatatatgacag

SEQ ID NO: 255873 - DNA, 20 bp, Artificial Sequence
  Description of Artificial Sequence: Synthetic oligonucleotide
  Target: LAMA2; (-) strand; PAM type: YTN; PAM sequence: TTT
gttttctattatatatgaca

SEQ ID NO: 255874 - DNA, 20 bp, Artificial Sequence
  Description of Artificial Sequence: Synthetic oligonucleotide
  Target: LAMA2; (-) strand; PAM type: YTN; PAM sequence: CTA
agtagatttgttttctatta

SEQ ID NO: 255875 - DNA, 20 bp, Artificial Sequence
  Description of Artificial Sequence: Synthetic oligonucleotide
  Target: LAMA2; (-) strand; PAM type: YTN; PAM sequence: TTC
cctaagtagatttgttttct

SEQ ID NO: 255876 - DNA, 20 bp, Artificial Sequence
  Description of Artificial Sequence: Synthetic oligonucleotide
  Target: LAMA2; (-) strand; PAM type: YTN; PAM sequence: TTT
ccctaagtagatttgttttc

SEQ ID NO: 255877 - DNA, 20 bp, Artificial Sequence
  Description of Artificial Sequence: Synthetic oligonucleotide
  Target: LAMA2; (-) strand; PAM type: YTN; PAM sequence: TTT
tccctaagtagatttgtttt

SEQ ID NO: 255878 - DNA, 20 bp, Artificial Sequence
  Description of Artificial Sequence: Synthetic oligonucleotide
  Target: LAMA2; (-) strand; PAM type: YTN; PAM sequence: TTA
tgttttccctaagtagattt

SEQ ID NO: 255879 - DNA, 20 bp, Artificial Sequence
  Description of Artificial Sequence: Synthetic oligonucleotide
  Target: LAMA2; (-) strand; PAM type: YTN; PAM sequence: TTA
ttatgttttccctaagtaga

SEQ ID NO: 255880 - DNA, 20 bp, Artificial Sequence
  Description of Artificial Sequence: Synthetic oligonucleotide
  Target: LAMA2; (-) strand; PAM type: YTN; PAM sequence: CTT
attatgttttccctaagtag

SEQ ID NO: 255881 - DNA, 20 bp, Artificial Sequence
  Description of Artificial Sequence: Synthetic oligonucleotide
  Target: LAMA2; (-) strand; PAM type: YTN; PAM sequence: CTC
ttattatgttttccctaagt

SEQ ID NO: 255882 - DNA, 20 bp, Artificial Sequence
  Description of Artificial Sequence: Synthetic oligonucleotide
  Target: LAMA2; (-) strand; PAM type: YTN; PAM sequence: TTC
tcttattatgttttccctaa

SEQ ID NO: 255883 - DNA, 20 bp, Artificial Sequence
  Description of Artificial Sequence: Synthetic oligonucleotide
  Target: LAMA2; (-) strand; PAM type: YTN; PAM sequence: TTT
ctcttattatgttttcccta

SEQ ID NO: 255884 - DNA, 20 bp, Artificial Sequence
  Description of Artificial Sequence: Synthetic oligonucleotide
  Target: LAMA2; (-) strand; PAM type: YTN; PAM sequence: CTT
tctcttattatgttttccct

SEQ ID NO: 255885 - DNA, 20 bp, Artificial Sequence
  Description of Artificial Sequence: Synthetic oligonucleotide
  Target: LAMA2; (-) strand; PAM type: YTN; PAM sequence: TTA
atctttctcttattatgttt

SEQ ID NO: 255886 - DNA, 20 bp, Artificial Sequence
  Description of Artificial Sequence: Synthetic oligonucleotide
  Target: LAMA2; (-) strand; PAM type: YTN; PAM sequence: CTC
aattaatctttctcttatta

SEQ ID NO: 255887 - DNA, 20 bp, Artificial Sequence
  Description of Artificial Sequence: Synthetic oligonucleotide
  Target: LAMA2; (-) strand; PAM type: YTN; PAM sequence: TTA
aagggaaatgccctcaatta

SEQ ID NO: 255888 - DNA, 20 bp, Artificial Sequence
  Description of Artificial Sequence: Synthetic oligonucleotide
  Target: LAMA2; (-) strand; PAM type: YTN; PAM sequence: TTT
aaagggaaatgccctcaatt

SEQ ID NO: 255889 - DNA, 20 bp, Artificial Sequence
  Description of Artificial Sequence: Synthetic oligonucleotide
  Target: LAMA2; (-) strand; PAM type: YTN; PAM sequence: TTT
taaagggaaatgccctcaat

SEQ ID NO: 255890 - DNA, 20 bp, Artificial Sequence
  Description of Artificial Sequence: Synthetic oligonucleotide
  Target: LAMA2; (-) strand; PAM type: YTN; PAM sequence: CTA
ccgttttaaagggaaatgcc

SEQ ID NO: 255891 - DNA, 20 bp, Artificial Sequence
  Description of Artificial Sequence: Synthetic oligonucleotide
  Target: LAMA2; (-) strand; PAM type: YTN; PAM sequence: TTG
cgctaccgttttaaagggaa

SEQ ID NO: 255892 - DNA, 20 bp, Artificial Sequence
  Description of Artificial Sequence: Synthetic oligonucleotide
  Target: LAMA2; (-) strand; PAM type: YTN; PAM sequence: CTG
ttgcgctaccgttttaaagg

SEQ ID NO: 255893 - DNA, 20 bp, Artificial Sequence
  Description of Artificial Sequence: Synthetic oligonucleotide
  Target: LAMA2; (-) strand; PAM type: YTN; PAM sequence: CTG
taaggtctgttgcgctaccg

SEQ ID NO: 255894 - DNA, 20 bp, Artificial Sequence
  Description of Artificial Sequence: Synthetic oligonucleotide
  Target: LAMA2; (-) strand; PAM type: YTN; PAM sequence: TTC
tgtaaggtctgttgcgctac

SEQ ID NO: 255895 - DNA, 20 bp, Artificial Sequence
  Description of Artificial Sequence: Synthetic oligonucleotide
  Target: LAMA2; (-) strand; PAM type: YTN; PAM sequence: TTG
aattctgtaaggtctgttgc

SEQ ID NO: 255896 - DNA, 20 bp, Artificial Sequence
  Description of Artificial Sequence: Synthetic oligonucleotide
  Target: LAMA2; (-) strand; PAM type: YTN; PAM sequence: TTT
gaattctgtaaggtctgttg

SEQ ID NO: 255897 - DNA, 20 bp, Artificial Sequence
  Description of Artificial Sequence: Synthetic oligonucleotide
  Target: LAMA2; (-) strand; PAM type: YTN; PAM sequence: TTT
tgaattctgtaaggtctgtt

SEQ ID NO: 255898 - DNA, 20 bp, Artificial Sequence
  Description of Artificial Sequence: Synthetic oligonucleotide
  Target: LAMA2; (-) strand; PAM type: YTN; PAM sequence: CTG
aagggccatcaaccattttg

SEQ ID NO: 255899 - DNA, 20 bp, Artificial Sequence
  Description of Artificial Sequence: Synthetic oligonucleotide
  Target: LAMA2; (-) strand; PAM type: YTN; PAM sequence: CTC
tgaagggccatcaaccattt

SEQ ID NO: 255900 - DNA, 20 bp, Artificial Sequence
  Description of Artificial Sequence: Synthetic oligonucleotide
  Target: LAMA2; (-) strand; PAM type: YTN; PAM sequence: CTC
tctgaagggccatcaaccat

SEQ ID NO: 255901 - DNA, 20 bp, Artificial Sequence
  Description of Artificial Sequence: Synthetic oligonucleotide
  Target: LAMA2; (-) strand; PAM type: YTN; PAM sequence: CTG
gctctctgaagggccatcaa

SEQ ID NO: 255902 - DNA, 20 bp, Artificial Sequence
  Description of Artificial Sequence: Synthetic oligonucleotide
  Target: LAMA2; (-) strand; PAM type: YTN; PAM sequence: CTC
gactggctctctgaagggcc

SEQ ID NO: 255903 - DNA, 20 bp, Artificial Sequence
  Description of Artificial Sequence: Synthetic oligonucleotide
  Target: LAMA2; (-) strand; PAM type: YTN; PAM sequence: TTC
tcgactggctctctgaaggg

SEQ ID NO: 255904 - DNA, 20 bp, Artificial Sequence
  Description of Artificial Sequence: Synthetic oligonucleotide
  Target: LAMA2; (-) strand; PAM type: YTN; PAM sequence: TTG
acacacggtaatgcgttctc

SEQ ID NO: 255905 - DNA, 20 bp, Artificial Sequence
  Description of Artificial Sequence: Synthetic oligonucleotide
  Target: LAMA2; (-) strand; PAM type: YTN; PAM sequence: CTA
ccccaagattgacacacggt

SEQ ID NO: 255906 - DNA, 20 bp, Artificial Sequence
  Description of Artificial Sequence: Synthetic oligonucleotide
  Target: LAMA2; (-) strand; PAM type: YTN; PAM sequence: CTC
atacatgaacccctacccca

SEQ ID NO: 255907 - DNA, 20 bp, Artificial Sequence
  Description of Artificial Sequence: Synthetic oligonucleotide
  Target: LAMA2; (-) strand; PAM type: YTN; PAM sequence: CTC
tcatacatgaacccctaccc

SEQ ID NO: 255908 - DNA, 20 bp, Artificial Sequence
  Description of Artificial Sequence: Synthetic oligonucleotide
  Target: LAMA2; (-) strand; PAM type: YTN; PAM sequence: TTG
tgagaggcacctctcataca

SEQ ID NO: 255909 - DNA, 20 bp, Artificial Sequence
  Description of Artificial Sequence: Synthetic oligonucleotide
  Target: LAMA2; (-) strand; PAM type: YTN; PAM sequence: CTT
gtgagaggcacctctcatac

SEQ ID NO: 255910 - DNA, 20 bp, Artificial Sequence
  Description of Artificial Sequence: Synthetic oligonucleotide
  Target: LAMA2; (-) strand; PAM type: YTN; PAM sequence: TTG
ccttgtgagaggcacctctc

SEQ ID NO: 255911 - DNA, 20 bp, Artificial Sequence
  Description of Artificial Sequence: Synthetic oligonucleotide
  Target: LAMA2; (-) strand; PAM type: YTN; PAM sequence: TTT
gccttgtgagaggcacctct

SEQ ID NO: 255912 - DNA, 20 bp, Artificial Sequence
  Description of Artificial Sequence: Synthetic oligonucleotide
  Target: LAMA2; (-) strand; PAM type: YTN; PAM sequence: CTT
tgccttgtgagaggcacctc

SEQ ID NO: 255913 - DNA, 20 bp, Artificial Sequence
  Description of Artificial Sequence: Synthetic oligonucleotide
  Target: LAMA2; (-) strand; PAM type: YTN; PAM sequence: TTC
tttgccttgtgagaggcacc

SEQ ID NO: 255914 - DNA, 20 bp, Artificial Sequence
  Description of Artificial Sequence: Synthetic oligonucleotide
  Target: LAMA2; (-) strand; PAM type: YTN; PAM sequence: CTT
ctttgccttgtgagaggcac

SEQ ID NO: 255915 - DNA, 20 bp, Artificial Sequence
  Description of Artificial Sequence: Synthetic oligonucleotide
  Target: LAMA2; (-) strand; PAM type: YTN; PAM sequence: CTC
cagccatgcttctttgcctt

SEQ ID NO: 255916 - DNA, 20 bp, Artificial Sequence
  Description of Artificial Sequence: Synthetic oligonucleotide
  Target: LAMA2; (-) strand; PAM type: YTN; PAM sequence: TTC
actccagccatgcttctttg

SEQ ID NO: 255917 - DNA, 20 bp, Artificial Sequence
  Description of Artificial Sequence: Synthetic oligonucleotide
  Target: LAMA2; (-) strand; PAM type: YTN; PAM sequence: TTT
cactccagccatgcttcttt

SEQ ID NO: 255918 - DNA, 20 bp, Artificial Sequence
  Description of Artificial Sequence: Synthetic oligonucleotide
  Target: LAMA2; (-) strand; PAM type: YTN; PAM sequence: TTC
agcaacatgtttcactccag

SEQ ID NO: 255919 - DNA, 20 bp, Artificial Sequence
  Description of Artificial Sequence: Synthetic oligonucleotide
  Target: LAMA2; (-) strand; PAM type: YTN; PAM sequence: TTT
cagcaacatgtttcactcca

SEQ ID NO: 255920 - DNA, 20 bp, Artificial Sequence
  Description of Artificial Sequence: Synthetic oligonucleotide
  Target: LAMA2; (-) strand; PAM type: YTN; PAM sequence: CTT
tcagcaacatgtttcactcc

SEQ ID NO: 255921 - DNA, 20 bp, Artificial Sequence
  Description of Artificial Sequence: Synthetic oligonucleotide
  Target: LAMA2; (-) strand; PAM type: YTN; PAM sequence: TTA
gctttcagcaacatgtttca

SEQ ID NO: 255922 - DNA, 20 bp, Artificial Sequence
  Description of Artificial Sequence: Synthetic oligonucleotide
  Target: LAMA2; (-) strand; PAM type: YTN; PAM sequence: TTT
agctttcagcaacatgtttc

SEQ ID NO: 255923 - DNA, 20 bp, Artificial Sequence
  Description of Artificial Sequence: Synthetic oligonucleotide
  Target: LAMA2; (-) strand; PAM type: YTN; PAM sequence: CTT
tagctttcagcaacatgttt

SEQ ID NO: 255924 - DNA, 20 bp, Artificial Sequence
  Description of Artificial Sequence: Synthetic oligonucleotide
  Target: LAMA2; (-) strand; PAM type: YTN; PAM sequence: CTA
gctttagctttcagcaacat

SEQ ID NO: 255925 - DNA, 20 bp, Artificial Sequence
  Description of Artificial Sequence: Synthetic oligonucleotide
  Target: LAMA2; (-) strand; PAM type: YTN; PAM sequence: CTC
aggtgctagctttagctttc

SEQ ID NO: 255926 - DNA, 20 bp, Artificial Sequence
  Description of Artificial Sequence: Synthetic oligonucleotide
  Target: LAMA2; (-) strand; PAM type: YTN; PAM sequence: CTG
aacaccagatgaagaaccaa

SEQ ID NO: 255927 - DNA, 20 bp, Artificial Sequence
  Description of Artificial Sequence: Synthetic oligonucleotide
  Target: LAMA2; (-) strand; PAM type: YTN; PAM sequence: CTG
aagcaatagagctgaacacc

SEQ ID NO: 255928 - DNA, 20 bp, Artificial Sequence
  Description of Artificial Sequence: Synthetic oligonucleotide
  Target: LAMA2; (-) strand; PAM type: YTN; PAM sequence: TTG
ggtctgaagcaatagagctg

SEQ ID NO: 255929 - DNA, 20 bp, Artificial Sequence
  Description of Artificial Sequence: Synthetic oligonucleotide
  Target: LAMA2; (-) strand; PAM type: YTN; PAM sequence: TTT
gggtctgaagcaatagagct

SEQ ID NO: 255930 - DNA, 20 bp, Artificial Sequence
  Description of Artificial Sequence: Synthetic oligonucleotide
  Target: LAMA2; (-) strand; PAM type: YTN; PAM sequence: CTA
atttgggtctgaagcaatag

SEQ ID NO: 255931 - DNA, 20 bp, Artificial Sequence
  Description of Artificial Sequence: Synthetic oligonucleotide
  Target: LAMA2; (-) strand; PAM type: YTN; PAM sequence: TTC
taatttgggtctgaagcaat

SEQ ID NO: 255932 - DNA, 20 bp, Artificial Sequence
  Description of Artificial Sequence: Synthetic oligonucleotide
  Target: LAMA2; (-) strand; PAM type: YTN; PAM sequence: TTT
ctaatttgggtctgaagcaa

SEQ ID NO: 255933 - DNA, 20 bp, Artificial Sequence
  Description of Artificial Sequence: Synthetic oligonucleotide
  Target: LAMA2; (-) strand; PAM type: YTN; PAM sequence: TTG
cacatatttctaatttgggt

SEQ ID NO: 255934 - DNA, 20 bp, Artificial Sequence
  Description of Artificial Sequence: Synthetic oligonucleotide
  Target: LAMA2; (-) strand; PAM type: YTN; PAM sequence: TTT
gcacatatttctaatttggg

SEQ ID NO: 255935 - DNA, 20 bp, Artificial Sequence
  Description of Artificial Sequence: Synthetic oligonucleotide
  Target: LAMA2; (-) strand; PAM type: YTN; PAM sequence: CTT
tgcacatatttctaatttgg

SEQ ID NO: 255936 - DNA, 20 bp, Artificial Sequence
  Description of Artificial Sequence: Synthetic oligonucleotide
  Target: LAMA2; (-) strand; PAM type: YTN; PAM sequence: CTC
tttgcacatatttctaattt

SEQ ID NO: 255937 - DNA, 20 bp, Artificial Sequence
  Description of Artificial Sequence: Synthetic oligonucleotide
  Target: LAMA2; (-) strand; PAM type: YTN; PAM sequence: CTC
tctttgcacatatttctaat

SEQ ID NO: 255938 - DNA, 20 bp, Artificial Sequence
  Description of Artificial Sequence: Synthetic oligonucleotide
  Target: LAMA2; (-) strand; PAM type: YTN; PAM sequence: TTC
tctctttgcacatatttcta

SEQ ID NO: 255939 - DNA, 20 bp, Artificial Sequence
  Description of Artificial Sequence: Synthetic oligonucleotide
  Target: LAMA2; (-) strand; PAM type: YTN; PAM sequence: CTT
ctctctttgcacatatttct

SEQ ID NO: 255940 - DNA, 20 bp, Artificial Sequence
  Description of Artificial Sequence: Synthetic oligonucleotide
  Target: LAMA2; (-) strand; PAM type: YTN; PAM sequence: TTC
acttctctctttgcacatat

SEQ ID NO: 255941 - DNA, 20 bp, Artificial Sequence
  Description of Artificial Sequence: Synthetic oligonucleotide
  Target: LAMA2; (-) strand; PAM type: YTN; PAM sequence: TTC
aaaattcacttctctctttg

SEQ ID NO: 255942 - DNA, 20 bp, Artificial Sequence
  Description of Artificial Sequence: Synthetic oligonucleotide
  Target: LAMA2; (-) strand; PAM type: YTN; PAM sequence: TTT
caaaattcacttctctcttt

SEQ ID NO: 255943 - DNA, 20 bp, Artificial Sequence
  Description of Artificial Sequence: Synthetic oligonucleotide
  Target: LAMA2; (-) strand; PAM type: YTN; PAM sequence: CTG
gcatgtttcaaaattcactt

SEQ ID NO: 255944 - DNA, 20 bp, Artificial Sequence
  Description of Artificial Sequence: Synthetic oligonucleotide
  Target: LAMA2; (-) strand; PAM type: YTN; PAM sequence: CTC
tggcatgtttcaaaattcac

SEQ ID NO: 255945 - DNA, 20 bp, Artificial Sequence
  Description of Artificial Sequence: Synthetic oligonucleotide
  Target: LAMA2; (-) strand; PAM type: YTN; PAM sequence: CTC
ataccctctggcatgtttca

SEQ ID NO: 255946 - DNA, 20 bp, Artificial Sequence
  Description of Artificial Sequence: Synthetic oligonucleotide
  Target: LAMA2; (-) strand; PAM type: YTN; PAM sequence: TTG
ccatctcataccctctggca

SEQ ID NO: 255947 - DNA, 20 bp, Artificial Sequence
  Description of Artificial Sequence: Synthetic oligonucleotide
  Target: LAMA2; (-) strand; PAM type: YTN; PAM sequence: CTT
gccatctcataccctctggc

SEQ ID NO: 255948 - DNA, 20 bp, Artificial Sequence
  Description of Artificial Sequence: Synthetic oligonucleotide
  Target: LAMA2; (-) strand; PAM type: YTN; PAM sequence: CTA
accaaacaaaagcaaccttg

SEQ ID NO: 255949 - DNA, 20 bp, Artificial Sequence
  Description of Artificial Sequence: Synthetic oligonucleotide
  Target: LAMA2; (-) strand; PAM type: YTN; PAM sequence: TTA
tcataaacctaaccaaacaa

SEQ ID NO: 255950 - DNA, 20 bp, Artificial Sequence
  Description of Artificial Sequence: Synthetic oligonucleotide
  Target: LAMA2; (-) strand; PAM type: YTN; PAM sequence: CTT
atcataaacctaaccaaaca

SEQ ID NO: 255951 - DNA, 20 bp, Artificial Sequence
  Description of Artificial Sequence: Synthetic oligonucleotide
  Target: LAMA2; (-) strand; PAM type: YTN; PAM sequence: CTA
aacttatcataaacctaacc

SEQ ID NO: 255952 - DNA, 20 bp, Artificial Sequence
  Description of Artificial Sequence: Synthetic oligonucleotide
  Target: LAMA2; (-) strand; PAM type: YTN; PAM sequence: CTA
cctaaacttatcataaacct

SEQ ID NO: 255953 - DNA, 20 bp, Artificial Sequence
  Description of Artificial Sequence: Synthetic oligonucleotide
  Target: LAMA2; (-) strand; PAM type: YTN; PAM sequence: TTC
tacctaaacttatcataaac

SEQ ID NO: 255954 - DNA, 20 bp, Artificial Sequence
  Description of Artificial Sequence: Synthetic oligonucleotide
  Target: LAMA2; (-) strand; PAM type: YTN; PAM sequence: TTC
agaagagatcaagtgtgcat

SEQ ID NO: 255955 - DNA, 20 bp, Artificial Sequence
  Description of Artificial Sequence: Synthetic oligonucleotide
  Target: LAMA2; (-) strand; PAM type: YTN; PAM sequence: TTT
cagaagagatcaagtgtgca

SEQ ID NO: 255956 - DNA, 20 bp, Artificial Sequence
  Description of Artificial Sequence: Synthetic oligonucleotide
  Target: LAMA2; (-) strand; PAM type: YTN; PAM sequence: CTT
tcagaagagatcaagtgtgc

SEQ ID NO: 255957 - DNA, 20 bp, Artificial Sequence
  Description of Artificial Sequence: Synthetic oligonucleotide
  Target: LAMA2; (-) strand; PAM type: YTN; PAM sequence: CTC
aggaaagctttcagaagaga

SEQ ID NO: 255958 - DNA, 20 bp, Artificial Sequence
  Description of Artificial Sequence: Synthetic oligonucleotide
  Target: LAMA2; (-) strand; PAM type: YTN; PAM sequence: CTG
atggaatcctcaggaaagct

SEQ ID NO: 255959 - DNA, 20 bp, Artificial Sequence
  Description of Artificial Sequence: Synthetic oligonucleotide
  Target: LAMA2; (-) strand; PAM type: YTN; PAM sequence: CTC
acactgatggaatcctcagg

SEQ ID NO: 255960 - DNA, 20 bp, Artificial Sequence
  Description of Artificial Sequence: Synthetic oligonucleotide
  Target: LAMA2; (-) strand; PAM type: YTN; PAM sequence: TTG
caggtatgccctcacactga

SEQ ID NO: 255961 - DNA, 20 bp, Artificial Sequence
  Description of Artificial Sequence: Synthetic oligonucleotide
  Target: LAMA2; (-) strand; PAM type: YTN; PAM sequence: CTT
gcaggtatgccctcacactg

SEQ ID NO: 255962 - DNA, 20 bp, Artificial Sequence
  Description of Artificial Sequence: Synthetic oligonucleotide
  Target: LAMA2; (-) strand; PAM type: YTN; PAM sequence: TTC
cttgcaggtatgccctcaca

SEQ ID NO: 255963 - DNA, 20 bp, Artificial Sequence
  Description of Artificial Sequence: Synthetic oligonucleotide
  Target: LAMA2; (-) strand; PAM type: YTN; PAM sequence: CTT
ccttgcaggtatgccctcac

SEQ ID NO: 255964 - DNA, 20 bp, Artificial Sequence
  Description of Artificial Sequence: Synthetic oligonucleotide
  Target: LAMA2; (-) strand; PAM type: YTN; PAM sequence: CTG
cggcatgtgcttccttgcag

SEQ ID NO: 255965 - DNA, 20 bp, Artificial Sequence
  Description of Artificial Sequence: Synthetic oligonucleotide
  Target: LAMA2; (-) strand; PAM type: YTN; PAM sequence: CTG
tgtgcaggctgcggcatgtg

SEQ ID NO: 255966 - DNA, 20 bp, Artificial Sequence
  Description of Artificial Sequence: Synthetic oligonucleotide
  Target: LAMA2; (-) strand; PAM type: YTN; PAM sequence: CTG
ccatagtggggcgtgcctgt

SEQ ID NO: 255967 - DNA, 20 bp, Artificial Sequence
  Description of Artificial Sequence: Synthetic oligonucleotide
  Target: LAMA2; (-) strand; PAM type: YTN; PAM sequence: CTA
ctgccatagtggggcgtgcc

SEQ ID NO: 255968 - DNA, 20 bp, Artificial Sequence
  Description of Artificial Sequence: Synthetic oligonucleotide
  Target: LAMA2; (-) strand; PAM type: YTN; PAM sequence: TTC
agctactgccatagtggggc

SEQ ID NO: 255969 - DNA, 20 bp, Artificial Sequence
  Description of Artificial Sequence: Synthetic oligonucleotide
  Target: LAMA2; (-) strand; PAM type: YTN; PAM sequence: CTT
cagctactgccatagtgggg

SEQ ID NO: 255970 - DNA, 20 bp, Artificial Sequence
  Description of Artificial Sequence: Synthetic oligonucleotide
  Target: LAMA2; (-) strand; PAM type: YTN; PAM sequence: TTC
ttcagctactgccatagtgg

SEQ ID NO: 255971 - DNA, 20 bp, Artificial Sequence
  Description of Artificial Sequence: Synthetic oligonucleotide
  Target: LAMA2; (-) strand; PAM type: YTN; PAM sequence: CTT
cttcagctactgccatagtg

SEQ ID NO: 255972 - DNA, 20 bp, Artificial Sequence
  Description of Artificial Sequence: Synthetic oligonucleotide
  Target: LAMA2; (-) strand; PAM type: YTN; PAM sequence: TTC
cttcttcagctactgccata

SEQ ID NO: 255973 - DNA, 20 bp, Artificial Sequence
  Description of Artificial Sequence: Synthetic oligonucleotide
  Target: LAMA2; (-) strand; PAM type: YTN; PAM sequence: CTT
ccttcttcagctactgccat

SEQ ID NO: 255974 - DNA, 20 bp, Artificial Sequence
  Description of Artificial Sequence: Synthetic oligonucleotide
  Target: LAMA2; (-) strand; PAM type: YTN; PAM sequence: CTC
agtatgtggtagtggtggtg

SEQ ID NO: 255975 - DNA, 20 bp, Artificial Sequence
  Description of Artificial Sequence: Synthetic oligonucleotide
  Target: LAMA2; (-) strand; PAM type: YTN; PAM sequence: TTG
gaaatctcagtatgtggtag

SEQ ID NO: 255976 - DNA, 20 bp, Artificial Sequence
  Description of Artificial Sequence: Synthetic oligonucleotide
  Target: LAMA2; (-) strand; PAM type: YTN; PAM sequence: TTT
ggaaatctcagtatgtggta

SEQ ID NO: 255977 - DNA, 20 bp, Artificial Sequence
  Description of Artificial Sequence: Synthetic oligonucleotide
  Target: LAMA2; (-) strand; PAM type: YTN; PAM sequence: TTT
tggaaatctcagtatgtggt

SEQ ID NO: 255978 - DNA, 20 bp, Artificial Sequence
  Description of Artificial Sequence: Synthetic oligonucleotide
  Target: LAMA2; (-) strand; PAM type: YTN; PAM sequence: TTA
gtgattttggaaatctcagt

SEQ ID NO: 255979 - DNA, 20 bp, Artificial Sequence
  Description of Artificial Sequence: Synthetic oligonucleotide
  Target: LAMA2; (-) strand; PAM type: YTN; PAM sequence: TTG
ttagtgattttggaaatctc

SEQ ID NO: 255980 - DNA, 20 bp, Artificial Sequence
  Description of Artificial Sequence: Synthetic oligonucleotide
  Target: LAMA2; (-) strand; PAM type: YTN; PAM sequence: TTT
gttagtgattttggaaatct

SEQ ID NO: 255981 - DNA, 20 bp, Artificial Sequence
  Description of Artificial Sequence: Synthetic oligonucleotide
  Target: LAMA2; (-) strand; PAM type: YTN; PAM sequence: CTG
gagaaatttgttagtgattt

SEQ ID NO: 255982 - DNA, 20 bp, Artificial Sequence
  Description of Artificial Sequence: Synthetic oligonucleotide
  Target: LAMA2; (-) strand; PAM type: YTN; PAM sequence: TTG
aagcagcctggagaaatttg

SEQ ID NO: 255983 - DNA, 20 bp, Artificial Sequence
  Description of Artificial Sequence: Synthetic oligonucleotide
  Target: LAMA2; (-) strand; PAM type: YTN; PAM sequence: TTT
gaagcagcctggagaaattt

SEQ ID NO: 255984 - DNA, 20 bp, Artificial Sequence
  Description of Artificial Sequence: Synthetic oligonucleotide
  Target: LAMA2; (-) strand; PAM type: YTN; PAM sequence: CTG
aatttgaagcagcctggaga

SEQ ID NO: 255985 - DNA, 20 bp, Artificial Sequence
  Description of Artificial Sequence: Synthetic oligonucleotide
  Target: LAMA2; (-) strand; PAM type: YTN; PAM sequence: CTC
tgaatttgaagcagcctgga

SEQ ID NO: 255986 - DNA, 20 bp, Artificial Sequence
  Description of Artificial Sequence: Synthetic oligonucleotide
  Target: LAMA2; (-) strand; PAM type: YTN; PAM sequence: CTG
tagccaaatccctctgaatt

SEQ ID NO: 255987 - DNA, 20 bp, Artificial Sequence
  Description of Artificial Sequence: Synthetic oligonucleotide
  Target: LAMA2; (-) strand; PAM type: YTN; PAM sequence: TTC
tgtagccaaatccctctgaa

SEQ ID NO: 255988 - DNA, 20 bp, Artificial Sequence
  Description of Artificial Sequence: Synthetic oligonucleotide
  Target: LAMA2; (-) strand; PAM type: YTN; PAM sequence: CTT
ctgtagccaaatccctctga

SEQ ID NO: 255989 - DNA, 20 bp, Artificial Sequence
  Description of Artificial Sequence: Synthetic oligonucleotide
  Target: LAMA2; (-) strand; PAM type: YTN; PAM sequence: TTC
ttctgtagccaaatccctct

SEQ ID NO: 255990 - DNA, 20 bp, Artificial Sequence
  Description of Artificial Sequence: Synthetic oligonucleotide
  Target: LAMA2; (-) strand; PAM type: YTN; PAM sequence: TTT
cttctgtagccaaatccctc

SEQ ID NO: 255991 - DNA, 20 bp, Artificial Sequence
  Description of Artificial Sequence: Synthetic oligonucleotide
  Target: LAMA2; (-) strand; PAM type: YTN; PAM sequence: CTT
tcttctgtagccaaatccct

SEQ ID NO: 255992 - DNA, 20 bp, Artificial Sequence
  Description of Artificial Sequence: Synthetic oligonucleotide
  Target: LAMA2; (-) strand; PAM type: YTN; PAM sequence: CTC
acatactttcttctgtagcc

SEQ ID NO: 255993 - DNA, 20 bp, Artificial Sequence
  Description of Artificial Sequence: Synthetic oligonucleotide
  Target: LAMA2; (-) strand; PAM type: YTN; PAM sequence: CTG
gcacatatgcagcctcacat

SEQ ID NO: 255994 - DNA, 20 bp, Artificial Sequence
  Description of Artificial Sequence: Synthetic oligonucleotide
  Target: LAMA2; (-) strand; PAM type: YTN; PAM sequence: CTC
caggcctggcacatatgcag

SEQ ID NO: 255995 - DNA, 20 bp, Artificial Sequence
  Description of Artificial Sequence: Synthetic oligonucleotide
  Target: LAMA2; (-) strand; PAM type: YTN; PAM sequence: TTC
ctccaggcctggcacatatg

SEQ ID NO: 255996 - DNA, 20 bp, Artificial Sequence
  Description of Artificial Sequence: Synthetic oligonucleotide
  Target: LAMA2; (-) strand; PAM type: YTN; PAM sequence: TTA
gaaattcctccaggcctggc

SEQ ID NO: 255997 - DNA, 20 bp, Artificial Sequence
  Description of Artificial Sequence: Synthetic oligonucleotide
  Target: LAMA2; (-) strand; PAM type: YTN; PAM sequence: TTT
agaaattcctccaggcctgg

SEQ ID NO: 255998 - DNA, 20 bp, Artificial Sequence
  Description of Artificial Sequence: Synthetic oligonucleotide
  Target: LAMA2; (-) strand; PAM type: YTN; PAM sequence: TTT
tagaaattcctccaggcctg

SEQ ID NO: 255999 - DNA, 20 bp, Artificial Sequence
  Description of Artificial Sequence: Synthetic oligonucleotide
  Target: LAMA2; (-) strand; PAM type: YTN; PAM sequence: TTT
ttagaaattcctccaggcct

SEQ ID NO: 256000 - DNA, 20 bp, Artificial Sequence
  Description of Artificial Sequence: Synthetic oligonucleotide
  Target: LAMA2; (-) strand; PAM type: YTN; PAM sequence: CTT
tttagaaattcctccaggcc

SEQ ID NO: 256001 - DNA, 20 bp, Artificial Sequence
  Description of Artificial Sequence: Synthetic oligonucleotide
  Target: LAMA2; (-) strand; PAM type: YTN; PAM sequence: CTG
ctttttagaaattcctccag

SEQ ID NO: 256002 - DNA, 20 bp, Artificial Sequence
  Description of Artificial Sequence: Synthetic oligonucleotide
  Target: LAMA2; (-) strand; PAM type: YTN; PAM sequence: CTG
agtagtgatcatcagtaaca

SEQ ID NO: 256003 - DNA, 20 bp, Artificial Sequence
  Description of Artificial Sequence: Synthetic oligonucleotide
  Target: LAMA2; (-) strand; PAM type: YTN; PAM sequence: CTC
tgagtagtgatcatcagtaa

SEQ ID NO: 256004 - DNA, 20 bp, Artificial Sequence
  Description of Artificial Sequence: Synthetic oligonucleotide
  Target: LAMA2; (-) strand; PAM type: YTN; PAM sequence: CTG
ctctgagtagtgatcatcag

SEQ ID NO: 256005 - DNA, 20 bp, Artificial Sequence
  Description of Artificial Sequence: Synthetic oligonucleotide
  Target: LAMA2; (-) strand; PAM type: YTN; PAM sequence: TTC
gactgctctgagtagtgatc

SEQ ID NO: 256006 - DNA, 20 bp, Artificial Sequence
  Description of Artificial Sequence: Synthetic oligonucleotide
  Target: LAMA2; (-) strand; PAM type: YTN; PAM sequence: TTT
cgactgctctgagtagtgat

SEQ ID NO: 256007 - DNA, 20 bp, Artificial Sequence
  Description of Artificial Sequence: Synthetic oligonucleotide
  Target: LAMA2; (-) strand; PAM type: YTN; PAM sequence: CTT
tcgactgctctgagtagtga

SEQ ID NO: 256008 - DNA, 20 bp, Artificial Sequence
  Description of Artificial Sequence: Synthetic oligonucleotide
  Target: LAMA2; (-) strand; PAM type: YTN; PAM sequence: CTG
actttcgactgctctgagta

SEQ ID NO: 256009 - DNA, 20 bp, Artificial Sequence
  Description of Artificial Sequence: Synthetic oligonucleotide
  Target: LAMA2; (-) strand; PAM type: YTN; PAM sequence: TTA
actgactttcgactgctctg

SEQ ID NO: 256010 - DNA, 20 bp, Artificial Sequence
  Description of Artificial Sequence: Synthetic oligonucleotide
  Target: LAMA2; (-) strand; PAM type: YTN; PAM sequence: TTA
ttaactgactttcgactgct

SEQ ID NO: 256011 - DNA, 20 bp, Artificial Sequence
  Description of Artificial Sequence: Synthetic oligonucleotide
  Target: LAMA2; (-) strand; PAM type: YTN; PAM sequence: CTG
tgacatgttattaactgact

SEQ ID NO: 256012 - DNA, 20 bp, Artificial Sequence
  Description of Artificial Sequence: Synthetic oligonucleotide
  Target: LAMA2; (-) strand; PAM type: YTN; PAM sequence: CTG
cagacgtgaatatagcccag

SEQ ID NO: 256013 - DNA, 20 bp, Artificial Sequence
  Description of Artificial Sequence: Synthetic oligonucleotide
  Target: LAMA2; (-) strand; PAM type: YTN; PAM sequence: TTC
tgcagacgtgaatatagccc

SEQ ID NO: 256014 - DNA, 20 bp, Artificial Sequence
  Description of Artificial Sequence: Synthetic oligonucleotide
  Target: LAMA2; (-) strand; PAM type: YTN; PAM sequence: TTT
ctgcagacgtgaatatagcc

SEQ ID NO: 256015 - DNA, 20 bp, Artificial Sequence
  Description of Artificial Sequence: Synthetic oligonucleotide
  Target: LAMA2; (-) strand; PAM type: YTN; PAM sequence: CTA
tttctgcagacgtgaatata

SEQ ID NO: 256016 - DNA, 20 bp, Artificial Sequence
  Description of Artificial Sequence: Synthetic oligonucleotide
  Target: LAMA2; (-) strand; PAM type: YTN; PAM sequence: TTG
ctatttctgcagacgtgaat

SEQ ID NO: 256017 - DNA, 20 bp, Artificial Sequence
  Description of Artificial Sequence: Synthetic oligonucleotide
  Target: LAMA2; (-) strand; PAM type: YTN; PAM sequence: CTG
gccaatggaggatgaaatga

SEQ ID NO: 256018 - DNA, 20 bp, Artificial Sequence
  Description of Artificial Sequence: Synthetic oligonucleotide
  Target: LAMA2; (-) strand; PAM type: YTN; PAM sequence: TTA
gggtctggccaatggaggat

SEQ ID NO: 256019 - DNA, 20 bp, Artificial Sequence
  Description of Artificial Sequence: Synthetic oligonucleotide
  Target: LAMA2; (-) strand; PAM type: YTN; PAM sequence: CTC
accccagagacagagattag

SEQ ID NO: 256020 - DNA, 20 bp, Artificial Sequence
  Description of Artificial Sequence: Synthetic oligonucleotide
  Target: LAMA2; (-) strand; PAM type: YTN; PAM sequence: TTC
tcaccccagagacagagatt

SEQ ID NO: 256021 - DNA, 20 bp, Artificial Sequence
  Description of Artificial Sequence: Synthetic oligonucleotide
  Target: LAMA2; (-) strand; PAM type: YTN; PAM sequence: CTG
gtcattctcaccccagagac

SEQ ID NO: 256022 - DNA, 20 bp, Artificial Sequence
  Description of Artificial Sequence: Synthetic oligonucleotide
  Target: LAMA2; (-) strand; PAM type: YTN; PAM sequence: CTG
acaaaagagtacaggctggt

SEQ ID NO: 256023 - DNA, 20 bp, Artificial Sequence
  Description of Artificial Sequence: Synthetic oligonucleotide
  Target: LAMA2; (-) strand; PAM type: YTN; PAM sequence: CTC
tgacaaaagagtacaggctg

SEQ ID NO: 256024 - DNA, 20 bp, Artificial Sequence
  Description of Artificial Sequence: Synthetic oligonucleotide
  Target: LAMA2; (-) strand; PAM type: YTN; PAM sequence: CTG
ctctgacaaaagagtacagg

SEQ ID NO: 256025 - DNA, 20 bp, Artificial Sequence
  Description of Artificial Sequence: Synthetic oligonucleotide
  Target: LAMA2; (-) strand; PAM type: YTN; PAM sequence: CTA
ctgctctgacaaaagagtac

SEQ ID NO: 256026 - DNA, 20 bp, Artificial Sequence
  Description of Artificial Sequence: Synthetic oligonucleotide
  Target: LAMA2; (-) strand; PAM type: YTN; PAM sequence: CTC
cactactgctctgacaaaag

SEQ ID NO: 256027 - DNA, 20 bp, Artificial Sequence
  Description of Artificial Sequence: Synthetic oligonucleotide
  Target: LAMA2; (-) strand; PAM type: YTN; PAM sequence: CTC
tccactactgctctgacaaa

SEQ ID NO: 256028 - DNA, 20 bp, Artificial Sequence
  Description of Artificial Sequence: Synthetic oligonucleotide
  Target: LAMA2; (-) strand; PAM type: YTN; PAM sequence: CTC
tctccactactgctctgaca

SEQ ID NO: 256029 - DNA, 20 bp, Artificial Sequence
  Description of Artificial Sequence: Synthetic oligonucleotide
  Target: LAMA2; (-) strand; PAM type: YTN; PAM sequence: CTC
tctctccactactgctctga

SEQ ID NO: 256030 - DNA, 20 bp, Artificial Sequence
  Description of Artificial Sequence: Synthetic oligonucleotide
  Target: LAMA2; (-) strand; PAM type: YTN; PAM sequence: TTC
tctctctccactactgctct

SEQ ID NO: 256031 - DNA, 20 bp, Artificial Sequence
  Description of Artificial Sequence: Synthetic oligonucleotide
  Target: LAMA2; (-) strand; PAM type: YTN; PAM sequence: TTT
ctctctctccactactgctc

SEQ ID NO: 256032 - DNA, 20 bp, Artificial Sequence
  Description of Artificial Sequence: Synthetic oligonucleotide
  Target: LAMA2; (-) strand; PAM type: YTN; PAM sequence: CTC
atttctctctctccactact

SEQ ID NO: 256033 - DNA, 20 bp, Artificial Sequence
  Description of Artificial Sequence: Synthetic oligonucleotide
  Target: LAMA2; (-) strand; PAM type: YTN; PAM sequence: TTC
tcatttctctctctccacta

SEQ ID NO: 256034 - DNA, 20 bp, Artificial Sequence
  Description of Artificial Sequence: Synthetic oligonucleotide
  Target: LAMA2; (-) strand; PAM type: YTN; PAM sequence: TTT
ctcatttctctctctccact

SEQ ID NO: 256035 - DNA, 20 bp, Artificial Sequence
  Description of Artificial Sequence: Synthetic oligonucleotide
  Target: LAMA2; (-) strand; PAM type: YTN; PAM sequence: TTT
tctcatttctctctctccac

SEQ ID NO: 256036 - DNA, 20 bp, Artificial Sequence
  Description of Artificial Sequence: Synthetic oligonucleotide
  Target: LAMA2; (-) strand; PAM type: YTN; PAM sequence: TTA
gcattttctcatttctctct

SEQ ID NO: 256037 - DNA, 20 bp, Artificial Sequence
  Description of Artificial Sequence: Synthetic oligonucleotide
  Target: LAMA2; (-) strand; PAM type: YTN; PAM sequence: TTG
cggaaaacagggacaaggaa

SEQ ID NO: 256038 - DNA, 20 bp, Artificial Sequence
  Description of Artificial Sequence: Synthetic oligonucleotide
  Target: LAMA2; (-) strand; PAM type: YTN; PAM sequence: TTG
ttgcggaaaacagggacaag

SEQ ID NO: 256039 - DNA, 20 bp, Artificial Sequence
  Description of Artificial Sequence: Synthetic oligonucleotide
  Target: LAMA2; (-) strand; PAM type: YTN; PAM sequence: TTG
atgttgttgcggaaaacagg

SEQ ID NO: 256040 - DNA, 20 bp, Artificial Sequence
  Description of Artificial Sequence: Synthetic oligonucleotide
  Target: LAMA2; (-) strand; PAM type: YTN; PAM sequence: CTA
tgttgatgttgttgcggaaa

SEQ ID NO: 256041 - DNA, 20 bp, Artificial Sequence
  Description of Artificial Sequence: Synthetic oligonucleotide
  Target: LAMA2; (-) strand; PAM type: YTN; PAM sequence: CTA
aagctatgttgatgttgttg

SEQ ID NO: 256042 - DNA, 20 bp, Artificial Sequence
  Description of Artificial Sequence: Synthetic oligonucleotide
  Target: LAMA2; (-) strand; PAM type: YTN; PAM sequence: TTG
ggctaaagctatgttgatgt

SEQ ID NO: 256043 - DNA, 20 bp, Artificial Sequence
  Description of Artificial Sequence: Synthetic oligonucleotide
  Target: LAMA2; (-) strand; PAM type: YTN; PAM sequence: CTA
aatggcacgttgggctaaag

SEQ ID NO: 256044 - DNA, 20 bp, Artificial Sequence
  Description of Artificial Sequence: Synthetic oligonucleotide
  Target: LAMA2; (-) strand; PAM type: YTN; PAM sequence: CTC
cggtctaaatggcacgttgg

SEQ ID NO: 256045 - DNA, 20 bp, Artificial Sequence
  Description of Artificial Sequence: Synthetic oligonucleotide
  Target: LAMA2; (-) strand; PAM type: YTN; PAM sequence: CTG
tgtacccgacagggcatcca

SEQ ID NO: 256046 - DNA, 20 bp, Artificial Sequence
  Description of Artificial Sequence: Synthetic oligonucleotide
  Target: LAMA2; (-) strand; PAM type: YTN; PAM sequence: CTC
acagcgtggtcctgtgtacc

SEQ ID NO: 256047 - DNA, 20 bp, Artificial Sequence
  Description of Artificial Sequence: Synthetic oligonucleotide
  Target: LAMA2; (-) strand; PAM type: YTN; PAM sequence: CTC
tcacagcgtggtcctgtgta

SEQ ID NO: 256048 - DNA, 20 bp, Artificial Sequence
  Description of Artificial Sequence: Synthetic oligonucleotide
  Target: LAMA2; (-) strand; PAM type: YTN; PAM sequence: TTA
cctctcacagcgtggtcctg

SEQ ID NO: 256049 - DNA, 20 bp, Artificial Sequence
  Description of Artificial Sequence: Synthetic oligonucleotide
  Target: LAMA2; (-) strand; PAM type: YTN; PAM sequence: CTT
acctctcacagcgtggtcct

SEQ ID NO: 256050 - DNA, 20 bp, Artificial Sequence
  Description of Artificial Sequence: Synthetic oligonucleotide
  Target: LAMA2; (-) strand; PAM type: YTN; PAM sequence: CTC
ttacctctcacagcgtggtc

SEQ ID NO: 256051 - DNA, 20 bp, Artificial Sequence
  Description of Artificial Sequence: Synthetic oligonucleotide
  Target: LAMA2; (-) strand; PAM type: YTN; PAM sequence: TTG
caagacagtgtagtatactc

SEQ ID NO: 256052 - DNA, 20 bp, Artificial Sequence
  Description of Artificial Sequence: Synthetic oligonucleotide
  Target: LAMA2; (-) strand; PAM type: YTN; PAM sequence: TTT
gcaagacagtgtagtatact

SEQ ID NO: 256053 - DNA, 20 bp, Artificial Sequence
  Description of Artificial Sequence: Synthetic oligonucleotide
  Target: LAMA2; (-) strand; PAM type: YTN; PAM sequence: TTT
tgcaagacagtgtagtatac

SEQ ID NO: 256054 - DNA, 20 bp, Artificial Sequence
  Description of Artificial Sequence: Synthetic oligonucleotide
  Target: LAMA2; (-) strand; PAM type: YTN; PAM sequence: CTC
ccaaggtagaaatcattttg

SEQ ID NO: 256055 - DNA, 20 bp, Artificial Sequence
  Description of Artificial Sequence: Synthetic oligonucleotide
  Target: LAMA2; (-) strand; PAM type: YTN; PAM sequence: TTA
taactcccaaggtagaaatc

SEQ ID NO: 256056 - DNA, 20 bp, Artificial Sequence
  Description of Artificial Sequence: Synthetic oligonucleotide
  Target: LAMA2; (-) strand; PAM type: YTN; PAM sequence: TTT
ataactcccaaggtagaaat

SEQ ID NO: 256057 - DNA, 20 bp, Artificial Sequence
  Description of Artificial Sequence: Synthetic oligonucleotide
  Target: LAMA2; (-) strand; PAM type: YTN; PAM sequence: TTT
tataactcccaaggtagaaa

SEQ ID NO: 256058 - DNA, 20 bp, Artificial Sequence
  Description of Artificial Sequence: Synthetic oligonucleotide
  Target: LAMA2; (-) strand; PAM type: YTN; PAM sequence: CTG
cggttttataactcccaagg

SEQ ID NO: 256059 - DNA, 20 bp, Artificial Sequence
  Description of Artificial Sequence: Synthetic oligonucleotide
  Target: LAMA2; (-) strand; PAM type: YTN; PAM sequence: TTG
tatctgcggttttataactc

SEQ ID NO: 256060 - DNA, 20 bp, Artificial Sequence
  Description of Artificial Sequence: Synthetic oligonucleotide
  Target: LAMA2; (-) strand; PAM type: YTN; PAM sequence: CTC
caaaggatgatgcaaaggat

SEQ ID NO: 256061 - DNA, 20 bp, Artificial Sequence
  Description of Artificial Sequence: Synthetic oligonucleotide
  Target: LAMA2; (-) strand; PAM type: YTN; PAM sequence: TTC
tccaaaggatgatgcaaagg

SEQ ID NO: 256062 - DNA, 20 bp, Artificial Sequence
  Description of Artificial Sequence: Synthetic oligonucleotide
  Target: LAMA2; (-) strand; PAM type: YTN; PAM sequence: TTT
ctccaaaggatgatgcaaag

SEQ ID NO: 256063 - DNA, 20 bp, Artificial Sequence
  Description of Artificial Sequence: Synthetic oligonucleotide
  Target: LAMA2; (-) strand; PAM type: YTN; PAM sequence: TTT
tctccaaaggatgatgcaaa

SEQ ID NO: 256064 - DNA, 20 bp, Artificial Sequence
  Description of Artificial Sequence: Synthetic oligonucleotide
  Target: LAMA2; (-) strand; PAM type: YTN; PAM sequence: TTT
ttctccaaaggatgatgcaa

SEQ ID NO: 256065 - DNA, 20 bp, Artificial Sequence
  Description of Artificial Sequence: Synthetic oligonucleotide
  Target: LAMA2; (-) strand; PAM type: YTN; PAM sequence: TTT
tttctccaaaggatgatgca

SEQ ID NO: 256066 - DNA, 20 bp, Artificial Sequence
  Description of Artificial Sequence: Synthetic oligonucleotide
  Target: LAMA2; (-) strand; PAM type: YTN; PAM sequence: CTT
ttttctccaaaggatgatgc

SEQ ID NO: 256067 - DNA, 20 bp, Artificial Sequence
  Description of Artificial Sequence: Synthetic oligonucleotide
  Target: LAMA2; (-) strand; PAM type: YTN; PAM sequence: TTG
agtgtggccttttttctcca

SEQ ID NO: 256068 - DNA, 20 bp, Artificial Sequence
  Description of Artificial Sequence: Synthetic oligonucleotide
  Target: LAMA2; (-) strand; PAM type: YTN; PAM sequence: CTC
attgagtgtggccttttttc

SEQ ID NO: 256069 - DNA, 20 bp, Artificial Sequence
  Description of Artificial Sequence: Synthetic oligonucleotide
  Target: LAMA2; (-) strand; PAM type: YTN; PAM sequence: TTC
acctcattgagtgtggcctt

SEQ ID NO: 256070 - DNA, 20 bp, Artificial Sequence
  Description of Artificial Sequence: Synthetic oligonucleotide
  Target: LAMA2; (-) strand; PAM type: YTN; PAM sequence: TTT
cacctcattgagtgtggcct

SEQ ID NO: 256071 - DNA, 20 bp, Artificial Sequence
  Description of Artificial Sequence: Synthetic oligonucleotide
  Target: LAMA2; (-) strand; PAM type: YTN; PAM sequence: TTA
tttcacctcattgagtgtgg

SEQ ID NO: 256072 - DNA, 20 bp, Artificial Sequence
  Description of Artificial Sequence: Synthetic oligonucleotide
  Target: LAMA2; (-) strand; PAM type: YTN; PAM sequence: TTT
atttcacctcattgagtgtg

SEQ ID NO: 256073 - DNA, 20 bp, Artificial Sequence
  Description of Artificial Sequence: Synthetic oligonucleotide
  Target: LAMA2; (-) strand; PAM type: YTN; PAM sequence: CTT
tatttcacctcattgagtgt

SEQ ID NO: 256074 - DNA, 20 bp, Artificial Sequence
  Description of Artificial Sequence: Synthetic oligonucleotide
  Target: LAMA2; (-) strand; PAM type: YTN; PAM sequence: TTG
agaaactttatttcacctca

SEQ ID NO: 256075 - DNA, 20 bp, Artificial Sequence
  Description of Artificial Sequence: Synthetic oligonucleotide
  Target: LAMA2; (-) strand; PAM type: YTN; PAM sequence: TTG
acaagtgcgttgagaaactt

SEQ ID NO: 256076 - DNA, 20 bp, Artificial Sequence
  Description of Artificial Sequence: Synthetic oligonucleotide
  Target: LAMA2; (-) strand; PAM type: YTN; PAM sequence: TTT
gacaagtgcgttgagaaact

SEQ ID NO: 256077 - DNA, 20 bp, Artificial Sequence
  Description of Artificial Sequence: Synthetic oligonucleotide
  Target: LAMA2; (-) strand; PAM type: YTN; PAM sequence: TTG
tttgacaagtgcgttgagaa

SEQ ID NO: 256078 - DNA, 20 bp, Artificial Sequence
  Description of Artificial Sequence: Synthetic oligonucleotide
  Target: LAMA2; (-) strand; PAM type: YTN; PAM sequence: TTT
gtttgacaagtgcgttgaga

SEQ ID NO: 256079 - DNA, 20 bp, Artificial Sequence
  Description of Artificial Sequence: Synthetic oligonucleotide
  Target: LAMA2; (-) strand; PAM type: YTN; PAM sequence: TTA
caaaaatataatgcatttgt

SEQ ID NO: 256080 - DNA, 20 bp, Artificial Sequence
  Description of Artificial Sequence: Synthetic oligonucleotide
  Target: LAMA2; (-) strand; PAM type: YTN; PAM sequence: CTG
aaaaataaataaattacaaa

SEQ ID NO: 256081 - DNA, 20 bp, Artificial Sequence
  Description of Artificial Sequence: Synthetic oligonucleotide
  Target: LAMA2; (-) strand; PAM type: YTN; PAM sequence: TTC
tgaaaaataaataaattaca

SEQ ID NO: 256082 - DNA, 20 bp, Artificial Sequence
  Description of Artificial Sequence: Synthetic oligonucleotide
  Target: LAMA2; (-) strand; PAM type: YTN; PAM sequence: TTT
ctgaaaaataaataaattac

SEQ ID NO: 256083 - DNA, 20 bp, Artificial Sequence
  Description of Artificial Sequence: Synthetic oligonucleotide
  Target: LAMA2; (-) strand; PAM type: YTN; PAM sequence: TTA
tgaagcaatttctgaaaaat

SEQ ID NO: 256084 - DNA, 20 bp, Artificial Sequence
  Description of Artificial Sequence: Synthetic oligonucleotide
  Target: LAMA2; (-) strand; PAM type: YTN; PAM sequence: TTT
atgaagcaatttctgaaaaa

SEQ ID NO: 256085 - DNA, 20 bp, Artificial Sequence
  Description of Artificial Sequence: Synthetic oligonucleotide
  Target: LAMA2; (-) strand; PAM type: YTN; PAM sequence: CTG
agtgaatgaagatttatgaa

SEQ ID NO: 256086 - DNA, 20 bp, Artificial Sequence
  Description of Artificial Sequence: Synthetic oligonucleotide
  Target: LAMA2; (-) strand; PAM type: YTN; PAM sequence: CTC
tgagtgaatgaagatttatg

SEQ ID NO: 256087 - DNA, 20 bp, Artificial Sequence
  Description of Artificial Sequence: Synthetic oligonucleotide
  Target: LAMA2; (-) strand; PAM type: YTN; PAM sequence: TTC
tctgagtgaatgaagattta

SEQ ID NO: 256088 - DNA, 20 bp, Artificial Sequence
  Description of Artificial Sequence: Synthetic oligonucleotide
  Target: LAMA2; (-) strand; PAM type: YTN; PAM sequence: TTA
atcagatattctctgagtga

SEQ ID NO: 256089 - DNA, 20 bp, Artificial Sequence
  Description of Artificial Sequence: Synthetic oligonucleotide
  Target: LAMA2; (-) strand; PAM type: YTN; PAM sequence: TTA
aaacattaatcagatattct

SEQ ID NO: 256090 - DNA, 20 bp, Artificial Sequence
  Description of Artificial Sequence: Synthetic oligonucleotide
  Target: LAMA2; (-) strand; PAM type: YTN; PAM sequence: TTA
agattaaaacattaatcaga

SEQ ID NO: 256091 - DNA, 20 bp, Artificial Sequence
  Description of Artificial Sequence: Synthetic oligonucleotide
  Target: LAMA2; (-) strand; PAM type: YTN; PAM sequence: TTT
aagattaaaacattaatcag

SEQ ID NO: 256092 - DNA, 20 bp, Artificial Sequence
  Description of Artificial Sequence: Synthetic oligonucleotide
  Target: LAMA2; (-) strand; PAM type: YTN; PAM sequence: CTT
taagattaaaacattaatca

SEQ ID NO: 256093 - DNA, 20 bp, Artificial Sequence
  Description of Artificial Sequence: Synthetic oligonucleotide
  Target: LAMA2; (-) strand; PAM type: YTN; PAM sequence: TTA
acctttaagattaaaacatt

SEQ ID NO: 256094 - DNA, 20 bp, Artificial Sequence
  Description of Artificial Sequence: Synthetic oligonucleotide
  Target: LAMA2; (-) strand; PAM type: YTN; PAM sequence: CTT
aacctttaagattaaaacat

SEQ ID NO: 256095 - DNA, 20 bp, Artificial Sequence
  Description of Artificial Sequence: Synthetic oligonucleotide
  Target: LAMA2; (-) strand; PAM type: YTN; PAM sequence: TTA
atacttaacctttaagatta

SEQ ID NO: 256096 - DNA, 20 bp, Artificial Sequence
  Description of Artificial Sequence: Synthetic oligonucleotide
  Target: LAMA2; (-) strand; PAM type: YTN; PAM sequence: TTG
taggttaatacttaaccttt

SEQ ID NO: 256097 - DNA, 20 bp, Artificial Sequence
  Description of Artificial Sequence: Synthetic oligonucleotide
  Target: LAMA2; (-) strand; PAM type: YTN; PAM sequence: CTA
caaagattgtaggttaatac

SEQ ID NO: 256098 - DNA, 20 bp, Artificial Sequence
  Description of Artificial Sequence: Synthetic oligonucleotide
  Target: LAMA2; (-) strand; PAM type: YTN; PAM sequence: TTC
tacaaagattgtaggttaat

SEQ ID NO: 256099 - DNA, 20 bp, Artificial Sequence
  Description of Artificial Sequence: Synthetic oligonucleotide
  Target: LAMA2; (-) strand; PAM type: YTN; PAM sequence: TTT
ctacaaagattgtaggttaa

SEQ ID NO: 256100 - DNA, 20 bp, Artificial Sequence
  Description of Artificial Sequence: Synthetic oligonucleotide
  Target: LAMA2; (-) strand; PAM type: YTN; PAM sequence: CTT
tctacaaagattgtaggtta

SEQ ID NO: 256101 - DNA, 20 bp, Artificial Sequence
  Description of Artificial Sequence: Synthetic oligonucleotide
  Target: LAMA2; (-) strand; PAM type: YTN; PAM sequence: TTG
agcaatgctttctacaaaga

SEQ ID NO: 256102 - DNA, 20 bp, Artificial Sequence
  Description of Artificial Sequence: Synthetic oligonucleotide
  Target: LAMA2; (-) strand; PAM type: YTN; PAM sequence: CTT
gagcaatgctttctacaaag

SEQ ID NO: 256103 - DNA, 20 bp, Artificial Sequence
  Description of Artificial Sequence: Synthetic oligonucleotide
  Target: LAMA2; (-) strand; PAM type: YTN; PAM sequence: TTC
cacttgagcaatgctttcta

SEQ ID NO: 256104 - DNA, 20 bp, Artificial Sequence
  Description of Artificial Sequence: Synthetic oligonucleotide
  Target: LAMA2; (-) strand; PAM type: YTN; PAM sequence: TTT
ccacttgagcaatgctttct

SEQ ID NO: 256105 - DNA, 20 bp, Artificial Sequence
  Description of Artificial Sequence: Synthetic oligonucleotide
  Target: LAMA2; (-) strand; PAM type: YTN; PAM sequence: CTT
tccacttgagcaatgctttc

SEQ ID NO: 256106 - DNA, 20 bp, Artificial Sequence
  Description of Artificial Sequence: Synthetic oligonucleotide
  Target: LAMA2; (-) strand; PAM type: YTN; PAM sequence: TTA
aagtgcatgactttccactt

SEQ ID NO: 256107 - DNA, 20 bp, Artificial Sequence
  Description of Artificial Sequence: Synthetic oligonucleotide
  Target: LAMA2; (-) strand; PAM type: YTN; PAM sequence: CTT
aaagtgcatgactttccact

SEQ ID NO: 256108 - DNA, 20 bp, Artificial Sequence
  Description of Artificial Sequence: Synthetic oligonucleotide
  Target: LAMA2; (-) strand; PAM type: YTN; PAM sequence: CTA
cacagacagtaagataaatc

SEQ ID NO: 256109 - DNA, 20 bp, Artificial Sequence
  Description of Artificial Sequence: Synthetic oligonucleotide
  Target: LAMA2; (-) strand; PAM type: YTN; PAM sequence: TTA
tgaaaaataaatggtgccta

SEQ ID NO: 256110 - DNA, 20 bp, Artificial Sequence
  Description of Artificial Sequence: Synthetic oligonucleotide
  Target: LAMA2; (-) strand; PAM type: YTN; PAM sequence: CTA
attatgaaaaataaatggtg

SEQ ID NO: 256111 - DNA, 20 bp, Artificial Sequence
  Description of Artificial Sequence: Synthetic oligonucleotide
  Target: LAMA2; (-) strand; PAM type: YTN; PAM sequence: TTA
aggacaaaaagctaattatg

SEQ ID NO: 256112 - DNA, 20 bp, Artificial Sequence
  Description of Artificial Sequence: Synthetic oligonucleotide
  Target: LAMA2; (-) strand; PAM type: YTN; PAM sequence: TTT
aaggacaaaaagctaattat

SEQ ID NO: 256113 - DNA, 20 bp, Artificial Sequence
  Description of Artificial Sequence: Synthetic oligonucleotide
  Target: LAMA2; (-) strand; PAM type: YTN; PAM sequence: TTT
taaggacaaaaagctaatta

SEQ ID NO: 256114 - DNA, 20 bp, Artificial Sequence
  Description of Artificial Sequence: Synthetic oligonucleotide
  Target: LAMA2; (-) strand; PAM type: YTN; PAM sequence: CTA
cattttaaggacaaaaagct

SEQ ID NO: 256115 - DNA, 20 bp, Artificial Sequence
  Description of Artificial Sequence: Synthetic oligonucleotide
  Target: LAMA2; (-) strand; PAM type: YTN; PAM sequence: TTA
agctacattttaaggacaaa

SEQ ID NO: 256116 - DNA, 20 bp, Artificial Sequence
  Description of Artificial Sequence: Synthetic oligonucleotide
  Target: LAMA2; (-) strand; PAM type: YTN; PAM sequence: TTT
aagctacattttaaggacaa

SEQ ID NO: 256117 - DNA, 20 bp, Artificial Sequence
  Description of Artificial Sequence: Synthetic oligonucleotide
  Target: LAMA2; (-) strand; PAM type: YTN; PAM sequence: CTA
tgcatttaagctacatttta

SEQ ID NO: 256118 - DNA, 20 bp, Artificial Sequence
  Description of Artificial Sequence: Synthetic oligonucleotide
  Target: LAMA2; (-) strand; PAM type: YTN; PAM sequence: CTA
tgaactatgcatttaagcta

SEQ ID NO: 256119 - DNA, 20 bp, Artificial Sequence
  Description of Artificial Sequence: Synthetic oligonucleotide
  Target: LAMA2; (-) strand; PAM type: YTN; PAM sequence: CTG
aactatgaactatgcattta

SEQ ID NO: 256120 - DNA, 20 bp, Artificial Sequence
  Description of Artificial Sequence: Synthetic oligonucleotide
  Target: LAMA2; (-) strand; PAM type: YTN; PAM sequence: TTG
ctgaactatgaactatgcat

SEQ ID NO: 256121 - DNA, 20 bp, Artificial Sequence
  Description of Artificial Sequence: Synthetic oligonucleotide
  Target: LAMA2; (-) strand; PAM type: YTN; PAM sequence: CTT
gctgaactatgaactatgca

SEQ ID NO: 256122 - DNA, 20 bp, Artificial Sequence
  Description of Artificial Sequence: Synthetic oligonucleotide
  Target: LAMA2; (-) strand; PAM type: YTN; PAM sequence: TTA
tgaaccacttgctgaactat

SEQ ID NO: 256123 - DNA, 20 bp, Artificial Sequence
  Description of Artificial Sequence: Synthetic oligonucleotide
  Target: LAMA2; (-) strand; PAM type: YTN; PAM sequence: TTA
aagtaaattatgaaccactt

SEQ ID NO: 256124 - DNA, 20 bp, Artificial Sequence
  Description of Artificial Sequence: Synthetic oligonucleotide
  Target: LAMA2; (-) strand; PAM type: YTN; PAM sequence: TTT
aaagtaaattatgaaccact

SEQ ID NO: 256125 - DNA, 20 bp, Artificial Sequence
  Description of Artificial Sequence: Synthetic oligonucleotide
  Target: LAMA2; (-) strand; PAM type: YTN; PAM sequence: TTC
aagtatatttaaagtaaatt

SEQ ID NO: 256126 - DNA, 20 bp, Artificial Sequence
  Description of Artificial Sequence: Synthetic oligonucleotide
  Target: LAMA2; (-) strand; PAM type: YTN; PAM sequence: TTT
caagtatatttaaagtaaat

SEQ ID NO: 256127 - DNA, 20 bp, Artificial Sequence
  Description of Artificial Sequence: Synthetic oligonucleotide
  Target: LAMA2; (-) strand; PAM type: YTN; PAM sequence: TTT
tcaagtatatttaaagtaaa

SEQ ID NO: 256128 - DNA, 20 bp, Artificial Sequence
  Description of Artificial Sequence: Synthetic oligonucleotide
  Target: LAMA2; (-) strand; PAM type: YTN; PAM sequence: CTA
ttttcaagtatatttaaagt

SEQ ID NO: 256129 - DNA, 20 bp, Artificial Sequence
  Description of Artificial Sequence: Synthetic oligonucleotide
  Target: LAMA2; (-) strand; PAM type: YTN; PAM sequence: TTC
tattttcaagtatatttaaa

SEQ ID NO: 256130 - DNA, 20 bp, Artificial Sequence
  Description of Artificial Sequence: Synthetic oligonucleotide
  Target: LAMA2; (-) strand; PAM type: YTN; PAM sequence: TTT
ctattttcaagtatatttaa

SEQ ID NO: 256131 - DNA, 20 bp, Artificial Sequence
  Description of Artificial Sequence: Synthetic oligonucleotide
  Target: LAMA2; (-) strand; PAM type: YTN; PAM sequence: TTG
tttctattttcaagtatatt

SEQ ID NO: 256132 - DNA, 20 bp, Artificial Sequence
  Description of Artificial Sequence: Synthetic oligonucleotide
  Target: LAMA2; (-) strand; PAM type: YTN; PAM sequence: TTT
gtttctattttcaagtatat

SEQ ID NO: 256133 - DNA, 20 bp, Artificial Sequence
  Description of Artificial Sequence: Synthetic oligonucleotide
  Target: LAMA2; (-) strand; PAM type: YTN; PAM sequence: TTT
tgtttctattttcaagtata

SEQ ID NO: 256134 - DNA, 20 bp, Artificial Sequence
  Description of Artificial Sequence: Synthetic oligonucleotide
  Target: LAMA2; (-) strand; PAM type: YTN; PAM sequence: TTA
cattttgtttctattttcaa

SEQ ID NO: 256135 - DNA, 20 bp, Artificial Sequence
  Description of Artificial Sequence: Synthetic oligonucleotide
  Target: LAMA2; (-) strand; PAM type: YTN; PAM sequence: TTA
gaagaggatataaatcatga

SEQ ID NO: 256136 - DNA, 20 bp, Artificial Sequence
  Description of Artificial Sequence: Synthetic oligonucleotide
  Target: LAMA2; (-) strand; PAM type: YTN; PAM sequence: TTA
ggagcaattagaagaggata

SEQ ID NO: 256137 - DNA, 20 bp, Artificial Sequence
  Description of Artificial Sequence: Synthetic oligonucleotide
  Target: LAMA2; (-) strand; PAM type: YTN; PAM sequence: TTT
aggagcaattagaagaggat

SEQ ID NO: 256138 - DNA, 20 bp, Artificial Sequence
  Description of Artificial Sequence: Synthetic oligonucleotide
  Target: LAMA2; (-) strand; PAM type: YTN; PAM sequence: CTG
gtttaggagcaattagaaga

SEQ ID NO: 256139 - DNA, 20 bp, Artificial Sequence
  Description of Artificial Sequence: Synthetic oligonucleotide
  Target: LAMA2; (-) strand; PAM type: YTN; PAM sequence: TTA
aaatactggtttaggagcaa

SEQ ID NO: 256140 - DNA, 20 bp, Artificial Sequence
  Description of Artificial Sequence: Synthetic oligonucleotide
  Target: LAMA2; (-) strand; PAM type: YTN; PAM sequence: CTG
caaagcaacccagtaaaatc

SEQ ID NO: 256141 - DNA, 20 bp, Artificial Sequence
  Description of Artificial Sequence: Synthetic oligonucleotide
  Target: LAMA2; (-) strand; PAM type: YTN; PAM sequence: CTG
ctgcaaagcaacccagtaaa

SEQ ID NO: 256142 - DNA, 20 bp, Artificial Sequence
  Description of Artificial Sequence: Synthetic oligonucleotide
  Target: LAMA2; (-) strand; PAM type: YTN; PAM sequence: TTC
tgctgcaaagcaacccagta

SEQ ID NO: 256143 - DNA, 20 bp, Artificial Sequence
  Description of Artificial Sequence: Synthetic oligonucleotide
  Target: LAMA2; (-) strand; PAM type: YTN; PAM sequence: TTT
ctgctgcaaagcaacccagt

SEQ ID NO: 256144 - DNA, 20 bp, Artificial Sequence
  Description of Artificial Sequence: Synthetic oligonucleotide
  Target: LAMA2; (-) strand; PAM type: YTN; PAM sequence: TTG
tttctgctgcaaagcaaccc

SEQ ID NO: 256145 - DNA, 20 bp, Artificial Sequence
  Description of Artificial Sequence: Synthetic oligonucleotide
  Target: LAMA2; (-) strand; PAM type: YTN; PAM sequence: CTT
gtttctgctgcaaagcaacc

SEQ ID NO: 256146 - DNA, 20 bp, Artificial Sequence
  Description of Artificial Sequence: Synthetic oligonucleotide
  Target: LAMA2; (-) strand; PAM type: YTN; PAM sequence: CTC
ttgtttctgctgcaaagcaa

SEQ ID NO: 256147 - DNA, 20 bp, Artificial Sequence
  Description of Artificial Sequence: Synthetic oligonucleotide
  Target: LAMA2; (-) strand; PAM type: YTN; PAM sequence: TTA
cataaaataatactcttgtt

SEQ ID NO: 256148 - DNA, 20 bp, Artificial Sequence
  Description of Artificial Sequence: Synthetic oligonucleotide
  Target: LAMA2; (-) strand; PAM type: YTN; PAM sequence: TTC
agaaggaaatataatcacac

SEQ ID NO: 256149 - DNA, 20 bp, Artificial Sequence
  Description of Artificial Sequence: Synthetic oligonucleotide
  Target: LAMA2; (-) strand; PAM type: YTN; PAM sequence: TTT
cagaaggaaatataatcaca

SEQ ID NO: 256150 - DNA, 20 bp, Artificial Sequence
  Description of Artificial Sequence: Synthetic oligonucleotide
  Target: LAMA2; (-) strand; PAM type: YTN; PAM sequence: TTC
aaaaacatttcagaaggaaa

SEQ ID NO: 256151 - DNA, 20 bp, Artificial Sequence
  Description of Artificial Sequence: Synthetic oligonucleotide
  Target: LAMA2; (-) strand; PAM type: YTN; PAM sequence: CTT
caaaaacatttcagaaggaa

SEQ ID NO: 256152 - DNA, 20 bp, Artificial Sequence
  Description of Artificial Sequence: Synthetic oligonucleotide
  Target: LAMA2; (-) strand; PAM type: YTN; PAM sequence: TTC
ttcaaaaacatttcagaagg

SEQ ID NO: 256153 - DNA, 20 bp, Artificial Sequence
  Description of Artificial Sequence: Synthetic oligonucleotide
  Target: LAMA2; (-) strand; PAM type: YTN; PAM sequence: TTT
cttcaaaaacatttcagaag

SEQ ID NO: 256154 - DNA, 20 bp, Artificial Sequence
  Description of Artificial Sequence: Synthetic oligonucleotide
  Target: LAMA2; (-) strand; PAM type: YTN; PAM sequence: TTA
tttcttcaaaaacatttcag

SEQ ID NO: 256155 - DNA, 20 bp, Artificial Sequence
  Description of Artificial Sequence: Synthetic oligonucleotide
  Target: LAMA2; (-) strand; PAM type: YTN; PAM sequence: CTG
aatatatagaagaattattt

SEQ ID NO: 256156 - DNA, 20 bp, Artificial Sequence
  Description of Artificial Sequence: Synthetic oligonucleotide
  Target: LAMA2; (-) strand; PAM type: YTN; PAM sequence: CTG
aggctgaatatatagaagaa

SEQ ID NO: 256157 - DNA, 20 bp, Artificial Sequence
  Description of Artificial Sequence: Synthetic oligonucleotide
  Target: LAMA2; (-) strand; PAM type: YTN; PAM sequence: TTA
tgctgaggctgaatatatag

SEQ ID NO: 256158 - DNA, 20 bp, Artificial Sequence
  Description of Artificial Sequence: Synthetic oligonucleotide
  Target: LAMA2; (-) strand; PAM type: YTN; PAM sequence: TTT
atgctgaggctgaatatata

SEQ ID NO: 256159 - DNA, 20 bp, Artificial Sequence
  Description of Artificial Sequence: Synthetic oligonucleotide
  Target: LAMA2; (-) strand; PAM type: YTN; PAM sequence: TTT
tatgctgaggctgaatatat

SEQ ID NO: 256160 - DNA, 20 bp, Artificial Sequence
  Description of Artificial Sequence: Synthetic oligonucleotide
  Target: LAMA2; (-) strand; PAM type: YTN; PAM sequence: CTT
ttatgctgaggctgaatata

SEQ ID NO: 256161 - DNA, 20 bp, Artificial Sequence
  Description of Artificial Sequence: Synthetic oligonucleotide
  Target: LAMA2; (-) strand; PAM type: YTN; PAM sequence: TTG
tatcacttttatgctgaggc

SEQ ID NO: 256162 - DNA, 20 bp, Artificial Sequence
  Description of Artificial Sequence: Synthetic oligonucleotide
  Target: LAMA2; (-) strand; PAM type: YTN; PAM sequence: TTT
gtatcacttttatgctgagg

SEQ ID NO: 256163 - DNA, 20 bp, Artificial Sequence
  Description of Artificial Sequence: Synthetic oligonucleotide
  Target: LAMA2; (-) strand; PAM type: YTN; PAM sequence: TTG
gcaatgatgtcaagggggaa

SEQ ID NO: 256164 - DNA, 20 bp, Artificial Sequence
  Description of Artificial Sequence: Synthetic oligonucleotide
  Target: LAMA2; (-) strand; PAM type: YTN; PAM sequence: TTT
ggcaatgatgtcaaggggga

SEQ ID NO: 256165 - DNA, 20 bp, Artificial Sequence
  Description of Artificial Sequence: Synthetic oligonucleotide
  Target: LAMA2; (-) strand; PAM type: YTN; PAM sequence: TTT
tggcaatgatgtcaaggggg

SEQ ID NO: 256166 - DNA, 20 bp, Artificial Sequence
  Description of Artificial Sequence: Synthetic oligonucleotide
  Target: LAMA2; (-) strand; PAM type: YTN; PAM sequence: TTT
ttggcaatgatgtcaagggg

SEQ ID NO: 256167 - DNA, 20 bp, Artificial Sequence
  Description of Artificial Sequence: Synthetic oligonucleotide
  Target: LAMA2; (-) strand; PAM type: YTN; PAM sequence: TTG
tttttggcaatgatgtcaag

SEQ ID NO: 256168 - DNA, 20 bp, Artificial Sequence
  Description of Artificial Sequence: Synthetic oligonucleotide
  Target: LAMA2; (-) strand; PAM type: YTN; PAM sequence: TTT
gtttttggcaatgatgtcaa

SEQ ID NO: 256169 - DNA, 20 bp, Artificial Sequence
  Description of Artificial Sequence: Synthetic oligonucleotide
  Target: LAMA2; (-) strand; PAM type: YTN; PAM sequence: TTT
tgtttttggcaatgatgtca

SEQ ID NO: 256170 - DNA, 20 bp, Artificial Sequence
  Description of Artificial Sequence: Synthetic oligonucleotide
  Target: LAMA2; (-) strand; PAM type: YTN; PAM sequence: TTT
ttgtttttggcaatgatgtc

SEQ ID NO: 256171 - DNA, 20 bp, Artificial Sequence
  Description of Artificial Sequence: Synthetic oligonucleotide
  Target: LAMA2; (-) strand; PAM type: YTN; PAM sequence: CTG
aaaccagagggaggtttttg

SEQ ID NO: 256172 - DNA, 20 bp, Artificial Sequence
  Description of Artificial Sequence: Synthetic oligonucleotide
  Target: LAMA2; (-) strand; PAM type: YTN; PAM sequence: TTC
cagtgctgaaaccagaggga

SEQ ID NO: 256173 - DNA, 20 bp, Artificial Sequence
  Description of Artificial Sequence: Synthetic oligonucleotide
  Target: LAMA2; (-) strand; PAM type: YTN; PAM sequence: TTT
ccagtgctgaaaccagaggg

SEQ ID NO: 256174 - DNA, 20 bp, Artificial Sequence
  Description of Artificial Sequence: Synthetic oligonucleotide
  Target: LAMA2; (-) strand; PAM type: YTN; PAM sequence: CTA
tttccagtgctgaaaccaga

SEQ ID NO: 256175 - DNA, 20 bp, Artificial Sequence
  Description of Artificial Sequence: Synthetic oligonucleotide
  Target: LAMA2; (-) strand; PAM type: YTN; PAM sequence: CTC
ccaggaagggtggcagcagg

SEQ ID NO: 256176 - DNA, 20 bp, Artificial Sequence
  Description of Artificial Sequence: Synthetic oligonucleotide
  Target: LAMA2; (-) strand; PAM type: YTN; PAM sequence: CTC
cctcccaggaagggtggcag

SEQ ID NO: 256177 - DNA, 20 bp, Artificial Sequence
  Description of Artificial Sequence: Synthetic oligonucleotide
  Target: LAMA2; (-) strand; PAM type: YTN; PAM sequence: TTG
cacccctccctcccaggaag

SEQ ID NO: 256178 - DNA, 20 bp, Artificial Sequence
  Description of Artificial Sequence: Synthetic oligonucleotide
  Target: LAMA2; (-) strand; PAM type: YTN; PAM sequence: TTT
gcacccctccctcccaggaa

SEQ ID NO: 256179 - DNA, 20 bp, Artificial Sequence
  Description of Artificial Sequence: Synthetic oligonucleotide
  Target: LAMA2; (-) strand; PAM type: YTN; PAM sequence: CTT
tgcacccctccctcccagga

SEQ ID NO: 256180 - DNA, 20 bp, Artificial Sequence
  Description of Artificial Sequence: Synthetic oligonucleotide
  Target: LAMA2; (-) strand; PAM type: YTN; PAM sequence: TTC
ctttgcacccctccctccca

SEQ ID NO: 256181 - DNA, 20 bp, Artificial Sequence
  Description of Artificial Sequence: Synthetic oligonucleotide
  Target: LAMA2; (-) strand; PAM type: YTN; PAM sequence: CTT
cctttgcacccctccctccc

SEQ ID NO: 256182 - DNA, 20 bp, Artificial Sequence
  Description of Artificial Sequence: Synthetic oligonucleotide
  Target: LAMA2; (-) strand; PAM type: YTN; PAM sequence: CTC
agtgatgatgagtgaaagta

SEQ ID NO: 256183 - DNA, 20 bp, Artificial Sequence
  Description of Artificial Sequence: Synthetic oligonucleotide
  Target: LAMA2; (-) strand; PAM type: YTN; PAM sequence: TTA
gcctcagtgatgatgagtga

SEQ ID NO: 256184 - DNA, 20 bp, Artificial Sequence
  Description of Artificial Sequence: Synthetic oligonucleotide
  Target: LAMA2; (-) strand; PAM type: YTN; PAM sequence: TTC
agggttagcctcagtgatga

SEQ ID NO: 256185 - DNA, 20 bp, Artificial Sequence
  Description of Artificial Sequence: Synthetic oligonucleotide
  Target: LAMA2; (-) strand; PAM type: YTN; PAM sequence: CTT
cagggttagcctcagtgatg

SEQ ID NO: 256186 - DNA, 20 bp, Artificial Sequence
  Description of Artificial Sequence: Synthetic oligonucleotide
  Target: LAMA2; (-) strand; PAM type: YTN; PAM sequence: CTC
ttcagggttagcctcagtga

SEQ ID NO: 256187 - DNA, 20 bp, Artificial Sequence
  Description of Artificial Sequence: Synthetic oligonucleotide
  Target: LAMA2; (-) strand; PAM type: YTN; PAM sequence: CTG
ccaagatgacaggaaaagac

SEQ ID NO: 256188 - DNA, 20 bp, Artificial Sequence
  Description of Artificial Sequence: Synthetic oligonucleotide
  Target: LAMA2; (-) strand; PAM type: YTN; PAM sequence: TTG
aaacaggggtgatagctgcc

SEQ ID NO: 256189 - DNA, 20 bp, Artificial Sequence
  Description of Artificial Sequence: Synthetic oligonucleotide
  Target: LAMA2; (-) strand; PAM type: YTN; PAM sequence: CTG
gttgaaacaggggtgatagc

SEQ ID NO: 256190 - DNA, 20 bp, Artificial Sequence
  Description of Artificial Sequence: Synthetic oligonucleotide
  Target: LAMA2; (-) strand; PAM type: YTN; PAM sequence: TTA
tgcatcctggttgaaacagg

SEQ ID NO: 256191 - DNA, 20 bp, Artificial Sequence
  Description of Artificial Sequence: Synthetic oligonucleotide
  Target: LAMA2; (-) strand; PAM type: YTN; PAM sequence: TTT
atgcatcctggttgaaacag

SEQ ID NO: 256192 - DNA, 20 bp, Artificial Sequence
  Description of Artificial Sequence: Synthetic oligonucleotide
  Target: LAMA2; (-) strand; PAM type: YTN; PAM sequence: TTT
tatgcatcctggttgaaaca

SEQ ID NO: 256193 - DNA, 20 bp, Artificial Sequence
  Description of Artificial Sequence: Synthetic oligonucleotide
  Target: LAMA2; (-) strand; PAM type: YTN; PAM sequence: TTA
attttatgcatcctggttga

SEQ ID NO: 256194 - DNA, 20 bp, Artificial Sequence
  Description of Artificial Sequence: Synthetic oligonucleotide
  Target: LAMA2; (-) strand; PAM type: YTN; PAM sequence: TTC
attaattttatgcatcctgg

SEQ ID NO: 256195 - DNA, 20 bp, Artificial Sequence
  Description of Artificial Sequence: Synthetic oligonucleotide
  Target: LAMA2; (-) strand; PAM type: YTN; PAM sequence: CTT
cattaattttatgcatcctg

SEQ ID NO: 256196 - DNA, 20 bp, Artificial Sequence
  Description of Artificial Sequence: Synthetic oligonucleotide
  Target: LAMA2; (-) strand; PAM type: YTN; PAM sequence: CTG
cttcattaattttatgcatc

SEQ ID NO: 256197 - DNA, 20 bp, Artificial Sequence
  Description of Artificial Sequence: Synthetic oligonucleotide
  Target: LAMA2; (-) strand; PAM type: YTN; PAM sequence: CTC
ctgcttcattaattttatgc

SEQ ID NO: 256198 - DNA, 20 bp, Artificial Sequence
  Description of Artificial Sequence: Synthetic oligonucleotide
  Target: LAMA2; (-) strand; PAM type: YTN; PAM sequence: CTG
ggtgataggctcctgcttca

SEQ ID NO: 256199 - DNA, 20 bp, Artificial Sequence
  Description of Artificial Sequence: Synthetic oligonucleotide
  Target: LAMA2; (-) strand; PAM type: YTN; PAM sequence: CTC
tgggtgataggctcctgctt

SEQ ID NO: 256200 - DNA, 20 bp, Artificial Sequence
  Description of Artificial Sequence: Synthetic oligonucleotide
  Target: LAMA2; (-) strand; PAM type: YTN; PAM sequence: CTC
tctgggtgataggctcctgc

SEQ ID NO: 256201 - DNA, 20 bp, Artificial Sequence
  Description of Artificial Sequence: Synthetic oligonucleotide
  Target: LAMA2; (-) strand; PAM type: YTN; PAM sequence: TTC
tctctgggtgataggctcct

SEQ ID NO: 256202 - DNA, 20 bp, Artificial Sequence
  Description of Artificial Sequence: Synthetic oligonucleotide
  Target: LAMA2; (-) strand; PAM type: YTN; PAM sequence: CTA
aattctctctgggtgatagg

SEQ ID NO: 256203 - DNA, 20 bp, Artificial Sequence
  Description of Artificial Sequence: Synthetic oligonucleotide
  Target: LAMA2; (-) strand; PAM type: YTN; PAM sequence: CTA
gctaaattctctctgggtga

SEQ ID NO: 256204 - DNA, 20 bp, Artificial Sequence
  Description of Artificial Sequence: Synthetic oligonucleotide
  Target: LAMA2; (-) strand; PAM type: YTN; PAM sequence: TTG
ctagctaaattctctctggg

SEQ ID NO: 256205 - DNA, 20 bp, Artificial Sequence
  Description of Artificial Sequence: Synthetic oligonucleotide
  Target: LAMA2; (-) strand; PAM type: YTN; PAM sequence: CTA
gttgctagctaaattctctc

SEQ ID NO: 256206 - DNA, 20 bp, Artificial Sequence
  Description of Artificial Sequence: Synthetic oligonucleotide
  Target: LAMA2; (-) strand; PAM type: YTN; PAM sequence: CTG
ctagttgctagctaaattct

SEQ ID NO: 256207 - DNA, 20 bp, Artificial Sequence
  Description of Artificial Sequence: Synthetic oligonucleotide
  Target: LAMA2; (-) strand; PAM type: YTN; PAM sequence: TTG
tccacagactgctagttgct

SEQ ID NO: 256208 - DNA, 20 bp, Artificial Sequence
  Description of Artificial Sequence: Synthetic oligonucleotide
  Target: LAMA2; (-) strand; PAM type: YTN; PAM sequence: TTT
gtccacagactgctagttgc

SEQ ID NO: 256209 - DNA, 20 bp, Artificial Sequence
  Description of Artificial Sequence: Synthetic oligonucleotide
  Target: LAMA2; (-) strand; PAM type: YTN; PAM sequence: CTT
tgtccacagactgctagttg

SEQ ID NO: 256210 - DNA, 20 bp, Artificial Sequence
  Description of Artificial Sequence: Synthetic oligonucleotide
  Target: LAMA2; (-) strand; PAM type: YTN; PAM sequence: TTG
gcactttgtccacagactgc

SEQ ID NO: 256211 - DNA, 20 bp, Artificial Sequence
  Description of Artificial Sequence: Synthetic oligonucleotide
  Target: LAMA2; (-) strand; PAM type: YTN; PAM sequence: CTG
tcattggcactttgtccaca

SEQ ID NO: 256212 - DNA, 20 bp, Artificial Sequence
  Description of Artificial Sequence: Synthetic oligonucleotide
  Target: LAMA2; (-) strand; PAM type: YTN; PAM sequence: CTA
ggaactgtcattggcacttt

SEQ ID NO: 256213 - DNA, 20 bp, Artificial Sequence
  Description of Artificial Sequence: Synthetic oligonucleotide
  Target: LAMA2; (-) strand; PAM type: YTN; PAM sequence: CTG
ctaggaactgtcattggcac

SEQ ID NO: 256214 - DNA, 20 bp, Artificial Sequence
  Description of Artificial Sequence: Synthetic oligonucleotide
  Target: LAMA2; (-) strand; PAM type: YTN; PAM sequence: TTG
ctgctaggaactgtcattgg

SEQ ID NO: 256215 - DNA, 20 bp, Artificial Sequence
  Description of Artificial Sequence: Synthetic oligonucleotide
  Target: LAMA2; (-) strand; PAM type: YTN; PAM sequence: TTG
ttgctgctaggaactgtcat

SEQ ID NO: 256216 - DNA, 20 bp, Artificial Sequence
  Description of Artificial Sequence: Synthetic oligonucleotide
  Target: LAMA2; (-) strand; PAM type: YTN; PAM sequence: CTT
gttgctgctaggaactgtca

SEQ ID NO: 256217 - DNA, 20 bp, Artificial Sequence
  Description of Artificial Sequence: Synthetic oligonucleotide
  Target: LAMA2; (-) strand; PAM type: YTN; PAM sequence: CTC
acaaatagtacttgttgctg

SEQ ID NO: 256218 - DNA, 20 bp, Artificial Sequence
  Description of Artificial Sequence: Synthetic oligonucleotide
  Target: LAMA2; (-) strand; PAM type: YTN; PAM sequence: TTC
catactcacaaatagtactt

SEQ ID NO: 256219 - DNA, 20 bp, Artificial Sequence
  Description of Artificial Sequence: Synthetic oligonucleotide
  Target: LAMA2; (-) strand; PAM type: YTN; PAM sequence: CTT
ccatactcacaaatagtact

SEQ ID NO: 256220 - DNA, 20 bp, Artificial Sequence
  Description of Artificial Sequence: Synthetic oligonucleotide
  Target: LAMA2; (-) strand; PAM type: YTN; PAM sequence: TTA
cagatgcttccatactcaca

SEQ ID NO: 256221 - DNA, 20 bp, Artificial Sequence
  Description of Artificial Sequence: Synthetic oligonucleotide
  Target: LAMA2; (-) strand; PAM type: YTN; PAM sequence: TTT
acagatgcttccatactcac

SEQ ID NO: 256222 - DNA, 20 bp, Artificial Sequence
  Description of Artificial Sequence: Synthetic oligonucleotide
  Target: LAMA2; (-) strand; PAM type: YTN; PAM sequence: CTA
atttacagatgcttccatac

SEQ ID NO: 256223 - DNA, 20 bp, Artificial Sequence
  Description of Artificial Sequence: Synthetic oligonucleotide
  Target: LAMA2; (-) strand; PAM type: YTN; PAM sequence: TTC
ctaatttacagatgcttcca

SEQ ID NO: 256224 - DNA, 20 bp, Artificial Sequence
  Description of Artificial Sequence: Synthetic oligonucleotide
  Target: LAMA2; (-) strand; PAM type: YTN; PAM sequence: TTC
attcctaatttacagatgct

SEQ ID NO: 256225 - DNA, 20 bp, Artificial Sequence
  Description of Artificial Sequence: Synthetic oligonucleotide
  Target: LAMA2; (-) strand; PAM type: YTN; PAM sequence: TTT
cattcctaatttacagatgc

SEQ ID NO: 256226 - DNA, 20 bp, Artificial Sequence
  Description of Artificial Sequence: Synthetic oligonucleotide
  Target: LAMA2; (-) strand; PAM type: YTN; PAM sequence: CTT
tcattcctaatttacagatg

SEQ ID NO: 256227 - DNA, 20 bp, Artificial Sequence
  Description of Artificial Sequence: Synthetic oligonucleotide
  Target: LAMA2; (-) strand; PAM type: YTN; PAM sequence: TTC
tttcattcctaatttacaga

SEQ ID NO: 256228 - DNA, 20 bp, Artificial Sequence
  Description of Artificial Sequence: Synthetic oligonucleotide
  Target: LAMA2; (-) strand; PAM type: YTN; PAM sequence: TTT
ctttcattcctaatttacag

SEQ ID NO: 256229 - DNA, 20 bp, Artificial Sequence
  Description of Artificial Sequence: Synthetic oligonucleotide
  Target: LAMA2; (-) strand; PAM type: YTN; PAM sequence: TTT
tctttcattcctaatttaca

SEQ ID NO: 256230 - DNA, 20 bp, Artificial Sequence
  Description of Artificial Sequence: Synthetic oligonucleotide
  Target: LAMA2; (-) strand; PAM type: YTN; PAM sequence: TTT
ttctttcattcctaatttac

SEQ ID NO: 256231 - DNA, 20 bp, Artificial Sequence
  Description of Artificial Sequence: Synthetic oligonucleotide
  Target: LAMA2; (-) strand; PAM type: YTN; PAM sequence: TTT
tttctttcattcctaattta

SEQ ID NO: 256232 - DNA, 20 bp, Artificial Sequence
  Description of Artificial Sequence: Synthetic oligonucleotide
  Target: LAMA2; (-) strand; PAM type: YTN; PAM sequence: TTT
ttttctttcattcctaattt

SEQ ID NO: 256233 - DNA, 20 bp, Artificial Sequence
  Description of Artificial Sequence: Synthetic oligonucleotide
  Target: LAMA2; (-) strand; PAM type: YTN; PAM sequence: TTT
tttttctttcattcctaatt

SEQ ID NO: 256234 - DNA, 20 bp, Artificial Sequence
  Description of Artificial Sequence: Synthetic oligonucleotide
  Target: LAMA2; (-) strand; PAM type: YTN; PAM sequence: TTT
ttttttctttcattcctaat

SEQ ID NO: 256235 - DNA, 20 bp, Artificial Sequence
  Description of Artificial Sequence: Synthetic oligonucleotide
  Target: LAMA2; (-) strand; PAM type: YTN; PAM sequence: TTC
atttttttttctttcattcc

SEQ ID NO: 256236 - DNA, 20 bp, Artificial Sequence
  Description of Artificial Sequence: Synthetic oligonucleotide
  Target: LAMA2; (-) strand; PAM type: YTN; PAM sequence: TTT
catttttttttctttcattc

SEQ ID NO: 256237 - DNA, 20 bp, Artificial Sequence
  Description of Artificial Sequence: Synthetic oligonucleotide
  Target: LAMA2; (-) strand; PAM type: YTN; PAM sequence: TTG
tttcatttttttttctttca

SEQ ID NO: 256238 - DNA, 20 bp, Artificial Sequence
  Description of Artificial Sequence: Synthetic oligonucleotide
  Target: LAMA2; (-) strand; PAM type: YTN; PAM sequence: CTT
gtttcatttttttttctttc

SEQ ID NO: 256239 - DNA, 20 bp, Artificial Sequence
  Description of Artificial Sequence: Synthetic oligonucleotide
  Target: LAMA2; (-) strand; PAM type: YTN; PAM sequence: CTG
cttgtttcatttttttttct

SEQ ID NO: 256240 - DNA, 20 bp, Artificial Sequence
  Description of Artificial Sequence: Synthetic oligonucleotide
  Target: LAMA2; (-) strand; PAM type: YTN; PAM sequence: TTG
caaataaatgctgcttgttt

SEQ ID NO: 256241 - DNA, 20 bp, Artificial Sequence
  Description of Artificial Sequence: Synthetic oligonucleotide
  Target: LAMA2; (-) strand; PAM type: YTN; PAM sequence: TTG
attgcaaataaatgctgctt

SEQ ID NO: 256242 - DNA, 20 bp, Artificial Sequence
  Description of Artificial Sequence: Synthetic oligonucleotide
  Target: LAMA2; (-) strand; PAM type: YTN; PAM sequence: CTT
gattgcaaataaatgctgct

SEQ ID NO: 256243 - DNA, 20 bp, Artificial Sequence
  Description of Artificial Sequence: Synthetic oligonucleotide
  Target: LAMA2; (-) strand; PAM type: YTN; PAM sequence: TTC
ttgattgcaaataaatgctg

SEQ ID NO: 256244 - DNA, 20 bp, Artificial Sequence
  Description of Artificial Sequence: Synthetic oligonucleotide
  Target: LAMA2; (-) strand; PAM type: YTN; PAM sequence: TTT
cttgattgcaaataaatgct

SEQ ID NO: 256245 - DNA, 20 bp, Artificial Sequence
  Description of Artificial Sequence: Synthetic oligonucleotide
  Target: LAMA2; (-) strand; PAM type: YTN; PAM sequence: CTA
gtttcttgattgcaaataaa

SEQ ID NO: 256246 - DNA, 20 bp, Artificial Sequence
  Description of Artificial Sequence: Synthetic oligonucleotide
  Target: LAMA2; (-) strand; PAM type: YTN; PAM sequence: TTA
aagatatctagtttcttgat

SEQ ID NO: 256247 - DNA, 20 bp, Artificial Sequence
  Description of Artificial Sequence: Synthetic oligonucleotide
  Target: LAMA2; (-) strand; PAM type: YTN; PAM sequence: TTA
aacacacacacagacacaca

SEQ ID NO: 256248 - DNA, 20 bp, Artificial Sequence
  Description of Artificial Sequence: Synthetic oligonucleotide
  Target: LAMA2; (-) strand; PAM type: YTN; PAM sequence: TTT
aaacacacacacagacacac

SEQ ID NO: 256249 - DNA, 20 bp, Artificial Sequence
  Description of Artificial Sequence: Synthetic oligonucleotide
  Target: LAMA2; (-) strand; PAM type: YTN; PAM sequence: CTT
taaacacacacacagacaca

SEQ ID NO: 256250 - DNA, 20 bp, Artificial Sequence
  Description of Artificial Sequence: Synthetic oligonucleotide
  Target: LAMA2; (-) strand; PAM type: YTN; PAM sequence: TTC
tttaaacacacacacagaca

SEQ ID NO: 256251 - DNA, 20 bp, Artificial Sequence
  Description of Artificial Sequence: Synthetic oligonucleotide
  Target: LAMA2; (-) strand; PAM type: YTN; PAM sequence: TTT
ctttaaacacacacacagac

SEQ ID NO: 256252 - DNA, 20 bp, Artificial Sequence
  Description of Artificial Sequence: Synthetic oligonucleotide
  Target: LAMA2; (-) strand; PAM type: YTN; PAM sequence: CTT
tctttaaacacacacacaga

SEQ ID NO: 256253 - DNA, 20 bp, Artificial Sequence
  Description of Artificial Sequence: Synthetic oligonucleotide
  Target: LAMA2; (-) strand; PAM type: YTN; PAM sequence: TTA
tagtaagtaatatgcacatg

SEQ ID NO: 256254 - DNA, 20 bp, Artificial Sequence
  Description of Artificial Sequence: Synthetic oligonucleotide
  Target: LAMA2; (-) strand; PAM type: YTN; PAM sequence: CTA
ttatagtaagtaatatgcac

SEQ ID NO: 256255 - DNA, 20 bp, Artificial Sequence
  Description of Artificial Sequence: Synthetic oligonucleotide
  Target: LAMA2; (-) strand; PAM type: YTN; PAM sequence: CTC
ctattatagtaagtaatatg

SEQ ID NO: 256256 - DNA, 20 bp, Artificial Sequence
  Description of Artificial Sequence: Synthetic oligonucleotide
  Target: LAMA2; (-) strand; PAM type: YTN; PAM sequence: TTC
tcctattatagtaagtaata

SEQ ID NO: 256257 - DNA, 20 bp, Artificial Sequence
  Description of Artificial Sequence: Synthetic oligonucleotide
  Target: LAMA2; (-) strand; PAM type: YTN; PAM sequence: TTG
gcaatgatatgttctcctat

SEQ ID NO: 256258 - DNA, 20 bp, Artificial Sequence
  Description of Artificial Sequence: Synthetic oligonucleotide
  Target: LAMA2; (-) strand; PAM type: YTN; PAM sequence: CTT
ggcaatgatatgttctccta

SEQ ID NO: 256259 - DNA, 20 bp, Artificial Sequence
  Description of Artificial Sequence: Synthetic oligonucleotide
  Target: LAMA2; (-) strand; PAM type: YTN; PAM sequence: CTG
tcttggcaatgatatgttct

SEQ ID NO: 256260 - DNA, 20 bp, Artificial Sequence
  Description of Artificial Sequence: Synthetic oligonucleotide
  Target: LAMA2; (-) strand; PAM type: YTN; PAM sequence: TTG
atgtaaatctgtcttggcaa

SEQ ID NO: 256261 - DNA, 20 bp, Artificial Sequence
  Description of Artificial Sequence: Synthetic oligonucleotide
  Target: LAMA2; (-) strand; PAM type: YTN; PAM sequence: CTT
gatgtaaatctgtcttggca

SEQ ID NO: 256262 - DNA, 20 bp, Artificial Sequence
  Description of Artificial Sequence: Synthetic oligonucleotide
  Target: LAMA2; (-) strand; PAM type: YTN; PAM sequence: TTA
ggcacttgatgtaaatctgt

SEQ ID NO: 256263 - DNA, 20 bp, Artificial Sequence
  Description of Artificial Sequence: Synthetic oligonucleotide
  Target: LAMA2; (-) strand; PAM type: YTN; PAM sequence: TTT
aggcacttgatgtaaatctg

SEQ ID NO: 256264 - DNA, 20 bp, Artificial Sequence
  Description of Artificial Sequence: Synthetic oligonucleotide
  Target: LAMA2; (-) strand; PAM type: YTN; PAM sequence: CTG
gggggtttaggcacttgatg

SEQ ID NO: 256265 - DNA, 20 bp, Artificial Sequence
  Description of Artificial Sequence: Synthetic oligonucleotide
  Target: LAMA2; (-) strand; PAM type: YTN; PAM sequence: CTG
tagtgaactggggggtttag

SEQ ID NO: 256266 - DNA, 20 bp, Artificial Sequence
  Description of Artificial Sequence: Synthetic oligonucleotide
  Target: LAMA2; (-) strand; PAM type: YTN; PAM sequence: TTG
cctgtagtgaactggggggt

SEQ ID NO: 256267 - DNA, 20 bp, Artificial Sequence
  Description of Artificial Sequence: Synthetic oligonucleotide
  Target: LAMA2; (-) strand; PAM type: YTN; PAM sequence: CTA
aaaaaaggttgcctgtagtg

SEQ ID NO: 256268 - DNA, 20 bp, Artificial Sequence
  Description of Artificial Sequence: Synthetic oligonucleotide
  Target: LAMA2; (-) strand; PAM type: YTN; PAM sequence: TTG
ctaaaaaaaggttgcctgta

SEQ ID NO: 256269 - DNA, 20 bp, Artificial Sequence
  Description of Artificial Sequence: Synthetic oligonucleotide
  Target: LAMA2; (-) strand; PAM type: YTN; PAM sequence: TTC
cagttgctaaaaaaaggttg

SEQ ID NO: 256270 - DNA, 20 bp, Artificial Sequence
  Description of Artificial Sequence: Synthetic oligonucleotide
  Target: LAMA2; (-) strand; PAM type: YTN; PAM sequence: TTT
ccagttgctaaaaaaaggtt

SEQ ID NO: 256271 - DNA, 20 bp, Artificial Sequence
  Description of Artificial Sequence: Synthetic oligonucleotide
  Target: LAMA2; (-) strand; PAM type: YTN; PAM sequence: TTT
tccagttgctaaaaaaaggt

SEQ ID NO: 256272 - DNA, 20 bp, Artificial Sequence
  Description of Artificial Sequence: Synthetic oligonucleotide
  Target: LAMA2; (-) strand; PAM type: YTN; PAM sequence: CTG
tcattttccagttgctaaaa

SEQ ID NO: 256273 - DNA, 20 bp, Artificial Sequence
  Description of Artificial Sequence: Synthetic oligonucleotide
  Target: LAMA2; (-) strand; PAM type: YTN; PAM sequence: TTG
tatgacagagcagctgtcat

SEQ ID NO: 256274 - DNA, 20 bp, Artificial Sequence
  Description of Artificial Sequence: Synthetic oligonucleotide
  Target: LAMA2; (-) strand; PAM type: YTN; PAM sequence: CTT
gtatgacagagcagctgtca

SEQ ID NO: 256275 - DNA, 20 bp, Artificial Sequence
  Description of Artificial Sequence: Synthetic oligonucleotide
  Target: LAMA2; (-) strand; PAM type: YTN; PAM sequence: TTA
atagccttgtatgacagagc

SEQ ID NO: 256276 - DNA, 20 bp, Artificial Sequence
  Description of Artificial Sequence: Synthetic oligonucleotide
  Target: LAMA2; (-) strand; PAM type: YTN; PAM sequence: TTT
aatagccttgtatgacagag

SEQ ID NO: 256277 - DNA, 20 bp, Artificial Sequence
  Description of Artificial Sequence: Synthetic oligonucleotide
  Target: LAMA2; (-) strand; PAM type: YTN; PAM sequence: CTA
gataagtggatttaatagcc

SEQ ID NO: 256278 - DNA, 20 bp, Artificial Sequence
  Description of Artificial Sequence: Synthetic oligonucleotide
  Target: LAMA2; (-) strand; PAM type: YTN; PAM sequence: CTC
acctagataagtggatttaa

SEQ ID NO: 256279 - DNA, 20 bp, Artificial Sequence
  Description of Artificial Sequence: Synthetic oligonucleotide
  Target: LAMA2; (-) strand; PAM type: YTN; PAM sequence: TTA
tgctcacctagataagtgga

SEQ ID NO: 256280 - DNA, 20 bp, Artificial Sequence
  Description of Artificial Sequence: Synthetic oligonucleotide
  Target: LAMA2; (-) strand; PAM type: YTN; PAM sequence: CTA
acatgtatagggagtatagt

SEQ ID NO: 256281 - DNA, 20 bp, Artificial Sequence
  Description of Artificial Sequence: Synthetic oligonucleotide
  Target: LAMA2; (-) strand; PAM type: YTN; PAM sequence: TTG
tctaacatgtatagggagta

SEQ ID NO: 256282 - DNA, 20 bp, Artificial Sequence
  Description of Artificial Sequence: Synthetic oligonucleotide
  Target: LAMA2; (-) strand; PAM type: YTN; PAM sequence: CTA
ttgtctaacatgtataggga

SEQ ID NO: 256283 - DNA, 20 bp, Artificial Sequence
  Description of Artificial Sequence: Synthetic oligonucleotide
  Target: LAMA2; (-) strand; PAM type: YTN; PAM sequence: TTC
agaaactattgtctaacatg

SEQ ID NO: 256284 - DNA, 20 bp, Artificial Sequence
  Description of Artificial Sequence: Synthetic oligonucleotide
  Target: LAMA2; (-) strand; PAM type: YTN; PAM sequence: TTA
tagatggttcagaaactatt

SEQ ID NO: 256285 - DNA, 20 bp, Artificial Sequence
  Description of Artificial Sequence: Synthetic oligonucleotide
  Target: LAMA2; (-) strand; PAM type: YTN; PAM sequence: TTA
aattatagatggttcagaaa

SEQ ID NO: 256286 - DNA, 20 bp, Artificial Sequence
  Description of Artificial Sequence: Synthetic oligonucleotide
  Target: LAMA2; (-) strand; PAM type: YTN; PAM sequence: TTT
aaattatagatggttcagaa

SEQ ID NO: 256287 - DNA, 20 bp, Artificial Sequence
  Description of Artificial Sequence: Synthetic oligonucleotide
  Target: LAMA2; (-) strand; PAM type: YTN; PAM sequence: TTT
taaattatagatggttcaga

SEQ ID NO: 256288 - DNA, 20 bp, Artificial Sequence
  Description of Artificial Sequence: Synthetic oligonucleotide
  Target: LAMA2; (-) strand; PAM type: YTN; PAM sequence: TTA
aataaaatgtagggttttaa

SEQ ID NO: 256289 - DNA, 20 bp, Artificial Sequence
  Description of Artificial Sequence: Synthetic oligonucleotide
  Target: LAMA2; (-) strand; PAM type: YTN; PAM sequence: TTG
ttaaataaaatgtagggttt

SEQ ID NO: 256290 - DNA, 20 bp, Artificial Sequence
  Description of Artificial Sequence: Synthetic oligonucleotide
  Target: LAMA2; (-) strand; PAM type: YTN; PAM sequence: TTT
gttaaataaaatgtagggtt

SEQ ID NO: 256291 - DNA, 20 bp, Artificial Sequence
  Description of Artificial Sequence: Synthetic oligonucleotide
  Target: LAMA2; (-) strand; PAM type: YTN; PAM sequence: CTA
aacagatgtttgttaaataa

SEQ ID NO: 256292 - DNA, 20 bp, Artificial Sequence
  Description of Artificial Sequence: Synthetic oligonucleotide
  Target: LAMA2; (-) strand; PAM type: YTN; PAM sequence: TTG
ctaaacagatgtttgttaaa

SEQ ID NO: 256293 - DNA, 20 bp, Artificial Sequence
  Description of Artificial Sequence: Synthetic oligonucleotide
  Target: LAMA2; (-) strand; PAM type: YTN; PAM sequence: TTG
tacccagcacatggtagttg

SEQ ID NO: 256294 - DNA, 20 bp, Artificial Sequence
  Description of Artificial Sequence: Synthetic oligonucleotide
  Target: LAMA2; (-) strand; PAM type: YTN; PAM sequence: CTT
gtacccagcacatggtagtt

SEQ ID NO: 256295 - DNA, 20 bp, Artificial Sequence
  Description of Artificial Sequence: Synthetic oligonucleotide
  Target: LAMA2; (-) strand; PAM type: YTN; PAM sequence: CTA
gccttgtacccagcacatgg

SEQ ID NO: 256296 - DNA, 20 bp, Artificial Sequence
  Description of Artificial Sequence: Synthetic oligonucleotide
  Target: LAMA2; (-) strand; PAM type: YTN; PAM sequence: TTA
tatccaatgtctagccttgt

SEQ ID NO: 256297 - DNA, 20 bp, Artificial Sequence
  Description of Artificial Sequence: Synthetic oligonucleotide
  Target: LAMA2; (-) strand; PAM type: YTN; PAM sequence: TTT
atatccaatgtctagccttg

SEQ ID NO: 256298 - DNA, 20 bp, Artificial Sequence
  Description of Artificial Sequence: Synthetic oligonucleotide
  Target: LAMA2; (-) strand; PAM type: YTN; PAM sequence: CTA
tttatatccaatgtctagcc

SEQ ID NO: 256299 - DNA, 20 bp, Artificial Sequence
  Description of Artificial Sequence: Synthetic oligonucleotide
  Target: LAMA2; (-) strand; PAM type: YTN; PAM sequence: CTG
agggcaaggatgggaaaatg

SEQ ID NO: 256300 - DNA, 20 bp, Artificial Sequence
  Description of Artificial Sequence: Synthetic oligonucleotide
  Target: LAMA2; (-) strand; PAM type: YTN; PAM sequence: TTA
aagaaagatgtgaggtgctg

SEQ ID NO: 256301 - DNA, 20 bp, Artificial Sequence
  Description of Artificial Sequence: Synthetic oligonucleotide
  Target: LAMA2; (-) strand; PAM type: YTN; PAM sequence: TTG
cattaaagaaagatgtgagg

SEQ ID NO: 256302 - DNA, 20 bp, Artificial Sequence
  Description of Artificial Sequence: Synthetic oligonucleotide
  Target: LAMA2; (-) strand; PAM type: YTN; PAM sequence: CTT
gcattaaagaaagatgtgag

SEQ ID NO: 256303 - DNA, 20 bp, Artificial Sequence
  Description of Artificial Sequence: Synthetic oligonucleotide
  Target: LAMA2; (-) strand; PAM type: YTN; PAM sequence: CTC
acttgcattaaagaaagatg

SEQ ID NO: 256304 - DNA, 20 bp, Artificial Sequence
  Description of Artificial Sequence: Synthetic oligonucleotide
  Target: LAMA2; (-) strand; PAM type: YTN; PAM sequence: CTC
ccaagaatacaagcaaccat

SEQ ID NO: 256305 - DNA, 20 bp, Artificial Sequence
  Description of Artificial Sequence: Synthetic oligonucleotide
  Target: LAMA2; (-) strand; PAM type: YTN; PAM sequence: TTC
tcccaagaatacaagcaacc

SEQ ID NO: 256306 - DNA, 20 bp, Artificial Sequence
  Description of Artificial Sequence: Synthetic oligonucleotide
  Target: LAMA2; (-) strand; PAM type: YTN; PAM sequence: TTC
aaatggaattctcccaagaa

SEQ ID NO: 256307 - DNA, 20 bp, Artificial Sequence
  Description of Artificial Sequence: Synthetic oligonucleotide
  Target: LAMA2; (-) strand; PAM type: YTN; PAM sequence: CTA
ttcaaatggaattctcccaa

SEQ ID NO: 256308 - DNA, 20 bp, Artificial Sequence
  Description of Artificial Sequence: Synthetic oligonucleotide
  Target: LAMA2; (-) strand; PAM type: YTN; PAM sequence: TTA
ctattcaaatggaattctcc

SEQ ID NO: 256309 - DNA, 20 bp, Artificial Sequence
  Description of Artificial Sequence: Synthetic oligonucleotide
  Target: LAMA2; (-) strand; PAM type: YTN; PAM sequence: TTT
actattcaaatggaattctc

SEQ ID NO: 256310 - DNA, 20 bp, Artificial Sequence
  Description of Artificial Sequence: Synthetic oligonucleotide
  Target: LAMA2; (-) strand; PAM type: YTN; PAM sequence: TTT
tactattcaaatggaattct

SEQ ID NO: 256311 - DNA, 20 bp, Artificial Sequence
  Description of Artificial Sequence: Synthetic oligonucleotide
  Target: LAMA2; (-) strand; PAM type: YTN; PAM sequence: TTT
ttactattcaaatggaattc

SEQ ID NO: 256312 - DNA, 20 bp, Artificial Sequence
  Description of Artificial Sequence: Synthetic oligonucleotide
  Target: LAMA2; (-) strand; PAM type: YTN; PAM sequence: TTG
gtgatttttactattcaaat

SEQ ID NO: 256313 - DNA, 20 bp, Artificial Sequence
  Description of Artificial Sequence: Synthetic oligonucleotide
  Target: LAMA2; (-) strand; PAM type: YTN; PAM sequence: CTT
ggtgatttttactattcaaa

SEQ ID NO: 256314 - DNA, 20 bp, Artificial Sequence
  Description of Artificial Sequence: Synthetic oligonucleotide
  Target: LAMA2; (-) strand; PAM type: YTN; PAM sequence: CTC
cttggtgatttttactattc

SEQ ID NO: 256315 - DNA, 20 bp, Artificial Sequence
  Description of Artificial Sequence: Synthetic oligonucleotide
  Target: LAMA2; (-) strand; PAM type: YTN; PAM sequence: CTC
tccttggtgatttttactat

SEQ ID NO: 256316 - DNA, 20 bp, Artificial Sequence
  Description of Artificial Sequence: Synthetic oligonucleotide
  Target: LAMA2; (-) strand; PAM type: YTN; PAM sequence: TTC
tctccttggtgatttttact

SEQ ID NO: 256317 - DNA, 20 bp, Artificial Sequence
  Description of Artificial Sequence: Synthetic oligonucleotide
  Target: LAMA2; (-) strand; PAM type: YTN; PAM sequence: TTT
ctctccttggtgatttttac

SEQ ID NO: 256318 - DNA, 20 bp, Artificial Sequence
  Description of Artificial Sequence: Synthetic oligonucleotide
  Target: LAMA2; (-) strand; PAM type: YTN; PAM sequence: CTG
tcaggtatttctctccttgg

SEQ ID NO: 256319 - DNA, 20 bp, Artificial Sequence
  Description of Artificial Sequence: Synthetic oligonucleotide
  Target: LAMA2; (-) strand; PAM type: YTN; PAM sequence: TTC
tgtcaggtatttctctcctt

SEQ ID NO: 256320 - DNA, 20 bp, Artificial Sequence
  Description of Artificial Sequence: Synthetic oligonucleotide
  Target: LAMA2; (-) strand; PAM type: YTN; PAM sequence: TTT
ctgtcaggtatttctctcct

SEQ ID NO: 256321 - DNA, 20 bp, Artificial Sequence
  Description of Artificial Sequence: Synthetic oligonucleotide
  Target: LAMA2; (-) strand; PAM type: YTN; PAM sequence: CTT
tctgtcaggtatttctctcc

SEQ ID NO: 256322 - DNA, 20 bp, Artificial Sequence
  Description of Artificial Sequence: Synthetic oligonucleotide
  Target: LAMA2; (-) strand; PAM type: YTN; PAM sequence: TTA
gacaggaaatcatactttct

SEQ ID NO: 256323 - DNA, 20 bp, Artificial Sequence
  Description of Artificial Sequence: Synthetic oligonucleotide
  Target: LAMA2; (-) strand; PAM type: YTN; PAM sequence: TTT
agacaggaaatcatactttc

SEQ ID NO: 256324 - DNA, 20 bp, Artificial Sequence
  Description of Artificial Sequence: Synthetic oligonucleotide
  Target: LAMA2; (-) strand; PAM type: YTN; PAM sequence: TTT
tagacaggaaatcatacttt

SEQ ID NO: 256325 - DNA, 20 bp, Artificial Sequence
  Description of Artificial Sequence: Synthetic oligonucleotide
  Target: LAMA2; (-) strand; PAM type: YTN; PAM sequence: TTA
atacagattttagacaggaa

SEQ ID NO: 256326 - DNA, 20 bp, Artificial Sequence
  Description of Artificial Sequence: Synthetic oligonucleotide
  Target: LAMA2; (-) strand; PAM type: YTN; PAM sequence: CTG
aatcagattaatacagattt

SEQ ID NO: 256327 - DNA, 20 bp, Artificial Sequence
  Description of Artificial Sequence: Synthetic oligonucleotide
  Target: LAMA2; (-) strand; PAM type: YTN; PAM sequence: TTC
tgaatcagattaatacagat

SEQ ID NO: 256328 - DNA, 20 bp, Artificial Sequence
  Description of Artificial Sequence: Synthetic oligonucleotide
  Target: LAMA2; (-) strand; PAM type: YTN; PAM sequence: CTT
ctgaatcagattaatacaga

SEQ ID NO: 256329 - DNA, 20 bp, Artificial Sequence
  Description of Artificial Sequence: Synthetic oligonucleotide
  Target: LAMA2; (-) strand; PAM type: YTN; PAM sequence: TTG
ccatcttctgaatcagatta

SEQ ID NO: 256330 - DNA, 20 bp, Artificial Sequence
  Description of Artificial Sequence: Synthetic oligonucleotide
  Target: LAMA2; (-) strand; PAM type: YTN; PAM sequence: CTG
catatgcatgttgccatctt

SEQ ID NO: 256331 - DNA, 20 bp, Artificial Sequence
  Description of Artificial Sequence: Synthetic oligonucleotide
  Target: LAMA2; (-) strand; PAM type: YTN; PAM sequence: TTA
cactgcatatgcatgttgcc

SEQ ID NO: 256332 - DNA, 20 bp, Artificial Sequence
  Description of Artificial Sequence: Synthetic oligonucleotide
  Target: LAMA2; (-) strand; PAM type: YTN; PAM sequence: TTC
attacactgcatatgcatgt

SEQ ID NO: 256333 - DNA, 20 bp, Artificial Sequence
  Description of Artificial Sequence: Synthetic oligonucleotide
  Target: LAMA2; (-) strand; PAM type: YTN; PAM sequence: CTG
gagataaaatatgccattca

SEQ ID NO: 256334 - DNA, 20 bp, Artificial Sequence
  Description of Artificial Sequence: Synthetic oligonucleotide
  Target: LAMA2; (-) strand; PAM type: YTN; PAM sequence: TTG
agctggagataaaatatgcc

SEQ ID NO: 256335 - DNA, 20 bp, Artificial Sequence
  Description of Artificial Sequence: Synthetic oligonucleotide
  Target: LAMA2; (-) strand; PAM type: YTN; PAM sequence: CTT
gagctggagataaaatatgc

SEQ ID NO: 256336 - DNA, 20 bp, Artificial Sequence
  Description of Artificial Sequence: Synthetic oligonucleotide
  Target: LAMA2; (-) strand; PAM type: YTN; PAM sequence: CTG
tggaaaaacttgagctggag

SEQ ID NO: 256337 - DNA, 20 bp, Artificial Sequence
  Description of Artificial Sequence: Synthetic oligonucleotide
  Target: LAMA2; (-) strand; PAM type: YTN; PAM sequence: CTA
gaaaaatatggtatcaactg

SEQ ID NO: 256338 - DNA, 20 bp, Artificial Sequence
  Description of Artificial Sequence: Synthetic oligonucleotide
  Target: LAMA2; (-) strand; PAM type: YTN; PAM sequence: CTG
gctagaaaaatatggtatca

SEQ ID NO: 256339 - DNA, 20 bp, Artificial Sequence
  Description of Artificial Sequence: Synthetic oligonucleotide
  Target: LAMA2; (-) strand; PAM type: YTN; PAM sequence: TTC
tggctagaaaaatatggtat

SEQ ID NO: 256340 - DNA, 20 bp, Artificial Sequence
  Description of Artificial Sequence: Synthetic oligonucleotide
  Target: LAMA2; (-) strand; PAM type: YTN; PAM sequence: CTA
aattctggctagaaaaatat

SEQ ID NO: 256341 - DNA, 20 bp, Artificial Sequence
  Description of Artificial Sequence: Synthetic oligonucleotide
  Target: LAMA2; (-) strand; PAM type: YTN; PAM sequence: CTA
atctaaattctggctagaaa

SEQ ID NO: 256342 - DNA, 20 bp, Artificial Sequence
  Description of Artificial Sequence: Synthetic oligonucleotide
  Target: LAMA2; (-) strand; PAM type: YTN; PAM sequence: CTG
gaaaaccctaatctaaattc

SEQ ID NO: 256343 - DNA, 20 bp, Artificial Sequence
  Description of Artificial Sequence: Synthetic oligonucleotide
  Target: LAMA2; (-) strand; PAM type: YTN; PAM sequence: TTC
ctggaaaaccctaatctaaa

SEQ ID NO: 256344 - DNA, 20 bp, Artificial Sequence
  Description of Artificial Sequence: Synthetic oligonucleotide
  Target: LAMA2; (-) strand; PAM type: YTN; PAM sequence: TTA
aatattcctggaaaacccta

SEQ ID NO: 256345 - DNA, 20 bp, Artificial Sequence
  Description of Artificial Sequence: Synthetic oligonucleotide
  Target: LAMA2; (-) strand; PAM type: YTN; PAM sequence: CTT
aaatattcctggaaaaccct

SEQ ID NO: 256346 - DNA, 20 bp, Artificial Sequence
  Description of Artificial Sequence: Synthetic oligonucleotide
  Target: LAMA2; (-) strand; PAM type: YTN; PAM sequence: TTA
taaatcttaaatattcctgg

SEQ ID NO: 256347 - DNA, 20 bp, Artificial Sequence
  Description of Artificial Sequence: Synthetic oligonucleotide
  Target: LAMA2; (-) strand; PAM type: YTN; PAM sequence: TTA
cataaatacaatgaaattat

SEQ ID NO: 256348 - DNA, 20 bp, Artificial Sequence
  Description of Artificial Sequence: Synthetic oligonucleotide
  Target: LAMA2; (-) strand; PAM type: YTN; PAM sequence: CTT
acataaatacaatgaaatta

SEQ ID NO: 256349 - DNA, 20 bp, Artificial Sequence
  Description of Artificial Sequence: Synthetic oligonucleotide
  Target: LAMA2; (-) strand; PAM type: YTN; PAM sequence: TTG
gcttacataaatacaatgaa

SEQ ID NO: 256350 - DNA, 20 bp, Artificial Sequence
  Description of Artificial Sequence: Synthetic oligonucleotide
  Target: LAMA2; (-) strand; PAM type: YTN; PAM sequence: TTT
ggcttacataaatacaatga

SEQ ID NO: 256351 - DNA, 20 bp, Artificial Sequence
  Description of Artificial Sequence: Synthetic oligonucleotide
  Target: LAMA2; (-) strand; PAM type: YTN; PAM sequence: TTT
tggcttacataaatacaatg

SEQ ID NO: 256352 - DNA, 20 bp, Artificial Sequence
  Description of Artificial Sequence: Synthetic oligonucleotide
  Target: LAMA2; (-) strand; PAM type: YTN; PAM sequence: CTT
ttggcttacataaatacaat

SEQ ID NO: 256353 - DNA, 20 bp, Artificial Sequence
  Description of Artificial Sequence: Synthetic oligonucleotide
  Target: LAMA2; (-) strand; PAM type: YTN; PAM sequence: TTC
ttttggcttacataaataca

SEQ ID NO: 256354 - DNA, 20 bp, Artificial Sequence
  Description of Artificial Sequence: Synthetic oligonucleotide
  Target: LAMA2; (-) strand; PAM type: YTN; PAM sequence: CTA
aggtgttcttttggcttaca

SEQ ID NO: 256355 - DNA, 20 bp, Artificial Sequence
  Description of Artificial Sequence: Synthetic oligonucleotide
  Target: LAMA2; (-) strand; PAM type: YTN; PAM sequence: CTA
tctaaggtgttcttttggct

SEQ ID NO: 256356 - DNA, 20 bp, Artificial Sequence
  Description of Artificial Sequence: Synthetic oligonucleotide
  Target: LAMA2; (-) strand; PAM type: YTN; PAM sequence: TTA
gatctatctaaggtgttctt

SEQ ID NO: 256357 - DNA, 20 bp, Artificial Sequence
  Description of Artificial Sequence: Synthetic oligonucleotide
  Target: LAMA2; (-) strand; PAM type: YTN; PAM sequence: TTT
agatctatctaaggtgttct

SEQ ID NO: 256358 - DNA, 20 bp, Artificial Sequence
  Description of Artificial Sequence: Synthetic oligonucleotide
  Target: LAMA2; (-) strand; PAM type: YTN; PAM sequence: TTT
tagatctatctaaggtgttc

SEQ ID NO: 256359 - DNA, 20 bp, Artificial Sequence
  Description of Artificial Sequence: Synthetic oligonucleotide
  Target: LAMA2; (-) strand; PAM type: YTN; PAM sequence: CTC
atattttagatctatctaag

SEQ ID NO: 256360 - DNA, 20 bp, Artificial Sequence
  Description of Artificial Sequence: Synthetic oligonucleotide
  Target: LAMA2; (-) strand; PAM type: YTN; PAM sequence: TTC
cctcatattttagatctatc

SEQ ID NO: 256361 - DNA, 20 bp, Artificial Sequence
  Description of Artificial Sequence: Synthetic oligonucleotide
  Target: LAMA2; (-) strand; PAM type: YTN; PAM sequence: TTT
ccctcatattttagatctat

SEQ ID NO: 256362 - DNA, 20 bp, Artificial Sequence
  Description of Artificial Sequence: Synthetic oligonucleotide
  Target: LAMA2; (-) strand; PAM type: YTN; PAM sequence: CTC
aaacaaaaaatgtttccctc

SEQ ID NO: 256363 - DNA, 20 bp, Artificial Sequence
  Description of Artificial Sequence: Synthetic oligonucleotide
  Target: LAMA2; (-) strand; PAM type: YTN; PAM sequence: TTC
aacaggcacatctcaaacaa

SEQ ID NO: 256364 - DNA, 20 bp, Artificial Sequence
  Description of Artificial Sequence: Synthetic oligonucleotide
  Target: LAMA2; (-) strand; PAM type: YTN; PAM sequence: CTT
caacaggcacatctcaaaca

SEQ ID NO: 256365 - DNA, 20 bp, Artificial Sequence
  Description of Artificial Sequence: Synthetic oligonucleotide
  Target: LAMA2; (-) strand; PAM type: YTN; PAM sequence: CTA
cttcaacaggcacatctcaa

SEQ ID NO: 256366 - DNA, 20 bp, Artificial Sequence
  Description of Artificial Sequence: Synthetic oligonucleotide
  Target: LAMA2; (-) strand; PAM type: YTN; PAM sequence: TTC
tacttcaacaggcacatctc

SEQ ID NO: 256367 - DNA, 20 bp, Artificial Sequence
  Description of Artificial Sequence: Synthetic oligonucleotide
  Target: LAMA2; (-) strand; PAM type: YTN; PAM sequence: CTT
ctacttcaacaggcacatct

SEQ ID NO: 256368 - DNA, 20 bp, Artificial Sequence
  Description of Artificial Sequence: Synthetic oligonucleotide
  Target: LAMA2; (-) strand; PAM type: YTN; PAM sequence: CTC
ttctacttcaacaggcacat

SEQ ID NO: 256369 - DNA, 20 bp, Artificial Sequence
  Description of Artificial Sequence: Synthetic oligonucleotide
  Target: LAMA2; (-) strand; PAM type: YTN; PAM sequence: CTC
tcttctacttcaacaggcac

SEQ ID NO: 256370 - DNA, 20 bp, Artificial Sequence
  Description of Artificial Sequence: Synthetic oligonucleotide
  Target: LAMA2; (-) strand; PAM type: YTN; PAM sequence: TTC
cctctcttctacttcaacag

SEQ ID NO: 256371 - DNA, 20 bp, Artificial Sequence
  Description of Artificial Sequence: Synthetic oligonucleotide
  Target: LAMA2; (-) strand; PAM type: YTN; PAM sequence: CTT
ccctctcttctacttcaaca

SEQ ID NO: 256372 - DNA, 20 bp, Artificial Sequence
  Description of Artificial Sequence: Synthetic oligonucleotide
  Target: LAMA2; (-) strand; PAM type: YTN; PAM sequence: TTA
tcttccctctcttctacttc

SEQ ID NO: 256373 - DNA, 20 bp, Artificial Sequence
  Description of Artificial Sequence: Synthetic oligonucleotide
  Target: LAMA2; (-) strand; PAM type: YTN; PAM sequence: CTT
atcttccctctcttctactt

SEQ ID NO: 256374 - DNA, 20 bp, Artificial Sequence
  Description of Artificial Sequence: Synthetic oligonucleotide
  Target: LAMA2; (-) strand; PAM type: YTN; PAM sequence: CTG
acccttatcttccctctctt

SEQ ID NO: 256375 - DNA, 20 bp, Artificial Sequence
  Description of Artificial Sequence: Synthetic oligonucleotide
  Target: LAMA2; (-) strand; PAM type: YTN; PAM sequence: TTA
ccctgacccttatcttccct

SEQ ID NO: 256376 - DNA, 20 bp, Artificial Sequence
  Description of Artificial Sequence: Synthetic oligonucleotide
  Target: LAMA2; (-) strand; PAM type: YTN; PAM sequence: CTT
accctgacccttatcttccc

SEQ ID NO: 256377 - DNA, 20 bp, Artificial Sequence
  Description of Artificial Sequence: Synthetic oligonucleotide
  Target: LAMA2; (-) strand; PAM type: YTN; PAM sequence: CTC
cttaccctgacccttatctt

SEQ ID NO: 256378 - DNA, 20 bp, Artificial Sequence
  Description of Artificial Sequence: Synthetic oligonucleotide
  Target: LAMA2; (-) strand; PAM type: YTN; PAM sequence: CTC
ctccttaccctgacccttat

SEQ ID NO: 256379 - DNA, 20 bp, Artificial Sequence
  Description of Artificial Sequence: Synthetic oligonucleotide
  Target: LAMA2; (-) strand; PAM type: YTN; PAM sequence: TTA
atgcaaccagtatctcctcc

SEQ ID NO: 256380 - DNA, 20 bp, Artificial Sequence
  Description of Artificial Sequence: Synthetic oligonucleotide
  Target: LAMA2; (-) strand; PAM type: YTN; PAM sequence: TTT
aatgcaaccagtatctcctc

SEQ ID NO: 256381 - DNA, 20 bp, Artificial Sequence
  Description of Artificial Sequence: Synthetic oligonucleotide
  Target: LAMA2; (-) strand; PAM type: YTN; PAM sequence: TTT
taatgcaaccagtatctcct

SEQ ID NO: 256382 - DNA, 20 bp, Artificial Sequence
  Description of Artificial Sequence: Synthetic oligonucleotide
  Target: LAMA2; (-) strand; PAM type: YTN; PAM sequence: TTT
ttaatgcaaccagtatctcc

SEQ ID NO: 256383 - DNA, 20 bp, Artificial Sequence
  Description of Artificial Sequence: Synthetic oligonucleotide
  Target: LAMA2; (-) strand; PAM type: YTN; PAM sequence: TTA
caagatttttaatgcaacca

SEQ ID NO: 256384 - DNA, 20 bp, Artificial Sequence
  Description of Artificial Sequence: Synthetic oligonucleotide
  Target: LAMA2; (-) strand; PAM type: YTN; PAM sequence: TTG
attacaagatttttaatgca

SEQ ID NO: 256385 - DNA, 20 bp, Artificial Sequence
  Description of Artificial Sequence: Synthetic oligonucleotide
  Target: LAMA2; (-) strand; PAM type: YTN; PAM sequence: TTT
gattacaagatttttaatgc

SEQ ID NO: 256386 - DNA, 20 bp, Artificial Sequence
  Description of Artificial Sequence: Synthetic oligonucleotide
  Target: LAMA2; (-) strand; PAM type: YTN; PAM sequence: TTT
tgattacaagatttttaatg

SEQ ID NO: 256387 - DNA, 20 bp, Artificial Sequence
  Description of Artificial Sequence: Synthetic oligonucleotide
  Target: LAMA2; (-) strand; PAM type: YTN; PAM sequence: TTA
cagaatggttttgattacaa

SEQ ID NO: 256388 - DNA, 20 bp, Artificial Sequence
  Description of Artificial Sequence: Synthetic oligonucleotide
  Target: LAMA2; (-) strand; PAM type: YTN; PAM sequence: CTT
acagaatggttttgattaca

SEQ ID NO: 256389 - DNA, 20 bp, Artificial Sequence
  Description of Artificial Sequence: Synthetic oligonucleotide
  Target: LAMA2; (-) strand; PAM type: YTN; PAM sequence: CTG
atcacacaaatcacttacag

SEQ ID NO: 256390 - DNA, 20 bp, Artificial Sequence
  Description of Artificial Sequence: Synthetic oligonucleotide
  Target: LAMA2; (-) strand; PAM type: YTN; PAM sequence: TTA
gatgatgtgcataagctgat

SEQ ID NO: 256391 - DNA, 20 bp, Artificial Sequence
  Description of Artificial Sequence: Synthetic oligonucleotide
  Target: LAMA2; (-) strand; PAM type: YTN; PAM sequence: TTT
agatgatgtgcataagctga

SEQ ID NO: 256392 - DNA, 20 bp, Artificial Sequence
  Description of Artificial Sequence: Synthetic oligonucleotide
  Target: LAMA2; (-) strand; PAM type: YTN; PAM sequence: TTA
tttagatgatgtgcataagc

SEQ ID NO: 256393 - DNA, 20 bp, Artificial Sequence
  Description of Artificial Sequence: Synthetic oligonucleotide
  Target: LAMA2; (-) strand; PAM type: YTN; PAM sequence: CTT
atttagatgatgtgcataag

SEQ ID NO: 256394 - DNA, 20 bp, Artificial Sequence
  Description of Artificial Sequence: Synthetic oligonucleotide
  Target: LAMA2; (-) strand; PAM type: YTN; PAM sequence: CTG
gtcttatttagatgatgtgc

SEQ ID NO: 256395 - DNA, 20 bp, Artificial Sequence
  Description of Artificial Sequence: Synthetic oligonucleotide
  Target: LAMA2; (-) strand; PAM type: YTN; PAM sequence: TTC
tggtcttatttagatgatgt

SEQ ID NO: 256396 - DNA, 20 bp, Artificial Sequence
  Description of Artificial Sequence: Synthetic oligonucleotide
  Target: LAMA2; (-) strand; PAM type: YTN; PAM sequence: TTA
aattctggtcttatttagat

SEQ ID NO: 256397 - DNA, 20 bp, Artificial Sequence
  Description of Artificial Sequence: Synthetic oligonucleotide
  Target: LAMA2; (-) strand; PAM type: YTN; PAM sequence: TTT
aaattctggtcttatttaga

SEQ ID NO: 256398 - DNA, 20 bp, Artificial Sequence
  Description of Artificial Sequence: Synthetic oligonucleotide
  Target: LAMA2; (-) strand; PAM type: YTN; PAM sequence: TTT
taaattctggtcttatttag

SEQ ID NO: 256399 - DNA, 20 bp, Artificial Sequence
  Description of Artificial Sequence: Synthetic oligonucleotide
  Target: LAMA2; (-) strand; PAM type: YTN; PAM sequence: TTT
ttaaattctggtcttattta

SEQ ID NO: 256400 - DNA, 20 bp, Artificial Sequence
  Description of Artificial Sequence: Synthetic oligonucleotide
  Target: LAMA2; (-) strand; PAM type: YTN; PAM sequence: TTA
gtttttaaattctggtctta

SEQ ID NO: 256401 - DNA, 20 bp, Artificial Sequence
  Description of Artificial Sequence: Synthetic oligonucleotide
  Target: LAMA2; (-) strand; PAM type: YTN; PAM sequence: TTT
agtttttaaattctggtctt

SEQ ID NO: 256402 - DNA, 20 bp, Artificial Sequence
  Description of Artificial Sequence: Synthetic oligonucleotide
  Target: LAMA2; (-) strand; PAM type: YTN; PAM sequence: TTG
atttagtttttaaattctgg

SEQ ID NO: 256403 - DNA, 20 bp, Artificial Sequence
  Description of Artificial Sequence: Synthetic oligonucleotide
  Target: LAMA2; (-) strand; PAM type: YTN; PAM sequence: TTG
ggaaatgttgatttagtttt

SEQ ID NO: 256404 - DNA, 20 bp, Artificial Sequence
  Description of Artificial Sequence: Synthetic oligonucleotide
  Target: LAMA2; (-) strand; PAM type: YTN; PAM sequence: TTT
gggaaatgttgatttagttt

SEQ ID NO: 256405 - DNA, 20 bp, Artificial Sequence
  Description of Artificial Sequence: Synthetic oligonucleotide
  Target: LAMA2; (-) strand; PAM type: YTN; PAM sequence: CTA
caatttgggaaatgttgatt

SEQ ID NO: 256406 - DNA, 20 bp, Artificial Sequence
  Description of Artificial Sequence: Synthetic oligonucleotide
  Target: LAMA2; (-) strand; PAM type: YTN; PAM sequence: TTC
caggaacatctacaatttgg

SEQ ID NO: 256407 - DNA, 20 bp, Artificial Sequence
  Description of Artificial Sequence: Synthetic oligonucleotide
  Target: LAMA2; (-) strand; PAM type: YTN; PAM sequence: TTA
ttccaggaacatctacaatt

SEQ ID NO: 256408 - DNA, 20 bp, Artificial Sequence
  Description of Artificial Sequence: Synthetic oligonucleotide
  Target: LAMA2; (-) strand; PAM type: YTN; PAM sequence: TTT
attccaggaacatctacaat

SEQ ID NO: 256409 - DNA, 20 bp, Artificial Sequence
  Description of Artificial Sequence: Synthetic oligonucleotide
  Target: LAMA2; (-) strand; PAM type: YTN; PAM sequence: CTT
tattccaggaacatctacaa

SEQ ID NO: 256410 - DNA, 20 bp, Artificial Sequence
  Description of Artificial Sequence: Synthetic oligonucleotide
  Target: LAMA2; (-) strand; PAM type: YTN; PAM sequence: TTC
tttattccaggaacatctac

SEQ ID NO: 256411 - DNA, 20 bp, Artificial Sequence
  Description of Artificial Sequence: Synthetic oligonucleotide
  Target: LAMA2; (-) strand; PAM type: YTN; PAM sequence: CTC
atgtgatcacagaattcttt

SEQ ID NO: 256412 - DNA, 20 bp, Artificial Sequence
  Description of Artificial Sequence: Synthetic oligonucleotide
  Target: LAMA2; (-) strand; PAM type: YTN; PAM sequence: TTC
ccaaactcatgtgatcacag

SEQ ID NO: 256413 - DNA, 20 bp, Artificial Sequence
  Description of Artificial Sequence: Synthetic oligonucleotide
  Target: LAMA2; (-) strand; PAM type: YTN; PAM sequence: CTT
cccaaactcatgtgatcaca

SEQ ID NO: 256414 - DNA, 20 bp, Artificial Sequence
  Description of Artificial Sequence: Synthetic oligonucleotide
  Target: LAMA2; (-) strand; PAM type: YTN; PAM sequence: TTA
acatgcaaatggatgcttcc

SEQ ID NO: 256415 - DNA, 20 bp, Artificial Sequence
  Description of Artificial Sequence: Synthetic oligonucleotide
  Target: LAMA2; (-) strand; PAM type: YTN; PAM sequence: TTT
aacatgcaaatggatgcttc

SEQ ID NO: 256416 - DNA, 20 bp, Artificial Sequence
  Description of Artificial Sequence: Synthetic oligonucleotide
  Target: LAMA2; (-) strand; PAM type: YTN; PAM sequence: TTT
taacatgcaaatggatgctt

SEQ ID NO: 256417 - DNA, 20 bp, Artificial Sequence
  Description of Artificial Sequence: Synthetic oligonucleotide
  Target: LAMA2; (-) strand; PAM type: YTN; PAM sequence: CTT
ttaacatgcaaatggatgct

SEQ ID NO: 256418 - DNA, 20 bp, Artificial Sequence
  Description of Artificial Sequence: Synthetic oligonucleotide
  Target: LAMA2; (-) strand; PAM type: YTN; PAM sequence: CTG
taggacatgccagaactttt

SEQ ID NO: 256419 - DNA, 20 bp, Artificial Sequence
  Description of Artificial Sequence: Synthetic oligonucleotide
  Target: LAMA2; (-) strand; PAM type: YTN; PAM sequence: TTA
cacactgtaggacatgccag

SEQ ID NO: 256420 - DNA, 20 bp, Artificial Sequence
  Description of Artificial Sequence: Synthetic oligonucleotide
  Target: LAMA2; (-) strand; PAM type: YTN; PAM sequence: TTA
attacacactgtaggacatg

SEQ ID NO: 256421 - DNA, 20 bp, Artificial Sequence
  Description of Artificial Sequence: Synthetic oligonucleotide
  Target: LAMA2; (-) strand; PAM type: YTN; PAM sequence: CTT
aattacacactgtaggacat

SEQ ID NO: 256422 - DNA, 20 bp, Artificial Sequence
  Description of Artificial Sequence: Synthetic oligonucleotide
  Target: LAMA2; (-) strand; PAM type: YTN; PAM sequence: TTC
ttaattacacactgtaggac

SEQ ID NO: 256423 - DNA, 20 bp, Artificial Sequence
  Description of Artificial Sequence: Synthetic oligonucleotide
  Target: LAMA2; (-) strand; PAM type: YTN; PAM sequence: TTT
cttaattacacactgtagga

SEQ ID NO: 256424 - DNA, 20 bp, Artificial Sequence
  Description of Artificial Sequence: Synthetic oligonucleotide
  Target: LAMA2; (-) strand; PAM type: YTN; PAM sequence: TTG
aacagatttcttaattacac

SEQ ID NO: 256425 - DNA, 20 bp, Artificial Sequence
  Description of Artificial Sequence: Synthetic oligonucleotide
  Target: LAMA2; (-) strand; PAM type: YTN; PAM sequence: CTA
aacaaattgaacagatttct

SEQ ID NO: 256426 - DNA, 20 bp, Artificial Sequence
  Description of Artificial Sequence: Synthetic oligonucleotide
  Target: LAMA2; (-) strand; PAM type: YTN; PAM sequence: CTG
agctaaacaaattgaacaga

SEQ ID NO: 256427 - DNA, 20 bp, Artificial Sequence
  Description of Artificial Sequence: Synthetic oligonucleotide
  Target: LAMA2; (-) strand; PAM type: YTN; PAM sequence: TTA
ggaaatgctgagctaaacaa

SEQ ID NO: 256428 - DNA, 20 bp, Artificial Sequence
  Description of Artificial Sequence: Synthetic oligonucleotide
  Target: LAMA2; (-) strand; PAM type: YTN; PAM sequence: TTT
aggaaatgctgagctaaaca

SEQ ID NO: 256429 - DNA, 20 bp, Artificial Sequence
  Description of Artificial Sequence: Synthetic oligonucleotide
  Target: LAMA2; (-) strand; PAM type: YTN; PAM sequence: TTA
tggccacataagtttaggaa

SEQ ID NO: 256430 - DNA, 20 bp, Artificial Sequence
  Description of Artificial Sequence: Synthetic oligonucleotide
  Target: LAMA2; (-) strand; PAM type: YTN; PAM sequence: TTT
atggccacataagtttagga

SEQ ID NO: 256431 - DNA, 20 bp, Artificial Sequence
  Description of Artificial Sequence: Synthetic oligonucleotide
  Target: LAMA2; (-) strand; PAM type: YTN; PAM sequence: TTA
aagcagagggtttatggcca

SEQ ID NO: 256432 - DNA, 20 bp, Artificial Sequence
  Description of Artificial Sequence: Synthetic oligonucleotide
  Target: LAMA2; (-) strand; PAM type: YTN; PAM sequence: CTA
tatagttaaagcagagggtt

SEQ ID NO: 256433 - DNA, 20 bp, Artificial Sequence
  Description of Artificial Sequence: Synthetic oligonucleotide
  Target: LAMA2; (-) strand; PAM type: YTN; PAM sequence: TTG
ctatatagttaaagcagagg

SEQ ID NO: 256434 - DNA, 20 bp, Artificial Sequence
  Description of Artificial Sequence: Synthetic oligonucleotide
  Target: LAMA2; (-) strand; PAM type: YTN; PAM sequence: CTT
gctatatagttaaagcagag

SEQ ID NO: 256435 - DNA, 20 bp, Artificial Sequence
  Description of Artificial Sequence: Synthetic oligonucleotide
  Target: LAMA2; (-) strand; PAM type: YTN; PAM sequence: TTC
ttgctatatagttaaagcag

SEQ ID NO: 256436 - DNA, 20 bp, Artificial Sequence
  Description of Artificial Sequence: Synthetic oligonucleotide
  Target: LAMA2; (-) strand; PAM type: YTN; PAM sequence: CTG
agatatattcttgctatata

SEQ ID NO: 256437 - DNA, 20 bp, Artificial Sequence
  Description of Artificial Sequence: Synthetic oligonucleotide
  Target: LAMA2; (-) strand; PAM type: YTN; PAM sequence: CTG
tagtctgagatatattcttg

SEQ ID NO: 256438 - DNA, 20 bp, Artificial Sequence
  Description of Artificial Sequence: Synthetic oligonucleotide
  Target: LAMA2; (-) strand; PAM type: YTN; PAM sequence: CTG
agctgtagtctgagatatat

SEQ ID NO: 256439 - DNA, 20 bp, Artificial Sequence
  Description of Artificial Sequence: Synthetic oligonucleotide
  Target: LAMA2; (-) strand; PAM type: YTN; PAM sequence: TTG
tcccacctgagctgtagtct

SEQ ID NO: 256440 - DNA, 20 bp, Artificial Sequence
  Description of Artificial Sequence: Synthetic oligonucleotide
  Target: LAMA2; (-) strand; PAM type: YTN; PAM sequence: CTT
gtcccacctgagctgtagtc

SEQ ID NO: 256441 - DNA, 20 bp, Artificial Sequence
  Description of Artificial Sequence: Synthetic oligonucleotide
  Target: LAMA2; (-) strand; PAM type: YTN; PAM sequence: CTC
ttgtcccacctgagctgtag

SEQ ID NO: 256442 - DNA, 20 bp, Artificial Sequence
  Description of Artificial Sequence: Synthetic oligonucleotide
  Target: LAMA2; (-) strand; PAM type: YTN; PAM sequence: TTA
taactcttgtcccacctgag

SEQ ID NO: 256443 - DNA, 20 bp, Artificial Sequence
  Description of Artificial Sequence: Synthetic oligonucleotide
  Target: LAMA2; (-) strand; PAM type: YTN; PAM sequence: CTA
taaagttataactcttgtcc

SEQ ID NO: 256444 - DNA, 20 bp, Artificial Sequence
  Description of Artificial Sequence: Synthetic oligonucleotide
  Target: LAMA2; (-) strand; PAM type: YTN; PAM sequence: TTG
tgataaagactataaagtta

SEQ ID NO: 256445 - DNA, 20 bp, Artificial Sequence
  Description of Artificial Sequence: Synthetic oligonucleotide
  Target: LAMA2; (-) strand; PAM type: YTN; PAM sequence: TTA
aattgtgataaagactataa

SEQ ID NO: 256446 - DNA, 20 bp, Artificial Sequence
  Description of Artificial Sequence: Synthetic oligonucleotide
  Target: LAMA2; (-) strand; PAM type: YTN; PAM sequence: CTC
aaaatagaaattaaattgtg

SEQ ID NO: 256447 - DNA, 20 bp, Artificial Sequence
  Description of Artificial Sequence: Synthetic oligonucleotide
  Target: LAMA2; (-) strand; PAM type: YTN; PAM sequence: TTC
ccacatatagagaaaggggt

SEQ ID NO: 256448 - DNA, 20 bp, Artificial Sequence
  Description of Artificial Sequence: Synthetic oligonucleotide
  Target: LAMA2; (-) strand; PAM type: YTN; PAM sequence: CTC
acagttcccacatatagaga

SEQ ID NO: 256449 - DNA, 20 bp, Artificial Sequence
  Description of Artificial Sequence: Synthetic oligonucleotide
  Target: LAMA2; (-) strand; PAM type: YTN; PAM sequence: CTA
agacctcacagttcccacat

SEQ ID NO: 256450 - DNA, 20 bp, Artificial Sequence
  Description of Artificial Sequence: Synthetic oligonucleotide
  Target: LAMA2; (-) strand; PAM type: YTN; PAM sequence: TTC
taagacctcacagttcccac

SEQ ID NO: 256451 - DNA, 20 bp, Artificial Sequence
  Description of Artificial Sequence: Synthetic oligonucleotide
  Target: LAMA2; (-) strand; PAM type: YTN; PAM sequence: TTT
ctaagacctcacagttccca

SEQ ID NO: 256452 - DNA, 20 bp, Artificial Sequence
  Description of Artificial Sequence: Synthetic oligonucleotide
  Target: LAMA2; (-) strand; PAM type: YTN; PAM sequence: TTA
tgtttctaagacctcacagt

SEQ ID NO: 256453 - DNA, 20 bp, Artificial Sequence
  Description of Artificial Sequence: Synthetic oligonucleotide
  Target: LAMA2; (-) strand; PAM type: YTN; PAM sequence: CTC
agattatgtttctaagacct

SEQ ID NO: 256454 - DNA, 20 bp, Artificial Sequence
  Description of Artificial Sequence: Synthetic oligonucleotide
  Target: LAMA2; (-) strand; PAM type: YTN; PAM sequence: TTG
aaatgggctcagattatgtt

SEQ ID NO: 256455 - DNA, 20 bp, Artificial Sequence
  Description of Artificial Sequence: Synthetic oligonucleotide
  Target: LAMA2; (-) strand; PAM type: YTN; PAM sequence: CTT
gaaatgggctcagattatgt

SEQ ID NO: 256456 - DNA, 20 bp, Artificial Sequence
  Description of Artificial Sequence: Synthetic oligonucleotide
  Target: LAMA2; (-) strand; PAM type: YTN; PAM sequence: CTG
ggagagaggagaagaaaaca

SEQ ID NO: 256457 - DNA, 20 bp, Artificial Sequence
  Description of Artificial Sequence: Synthetic oligonucleotide
  Target: LAMA2; (-) strand; PAM type: YTN; PAM sequence: CTA
gctgggagagaggagaagaa

SEQ ID NO: 256458 - DNA, 20 bp, Artificial Sequence
  Description of Artificial Sequence: Synthetic oligonucleotide
  Target: LAMA2; (-) strand; PAM type: YTN; PAM sequence: TTC
tagctgggagagaggagaag

SEQ ID NO: 256459 - DNA, 20 bp, Artificial Sequence
  Description of Artificial Sequence: Synthetic oligonucleotide
  Target: LAMA2; (-) strand; PAM type: YTN; PAM sequence: TTG
attctagctgggagagagga

SEQ ID NO: 256460 - DNA, 20 bp, Artificial Sequence
  Description of Artificial Sequence: Synthetic oligonucleotide
  Target: LAMA2; (-) strand; PAM type: YTN; PAM sequence: TTT
gattctagctgggagagagg

SEQ ID NO: 256461 - DNA, 20 bp, Artificial Sequence
  Description of Artificial Sequence: Synthetic oligonucleotide
  Target: LAMA2; (-) strand; PAM type: YTN; PAM sequence: CTT
tgattctagctgggagagag

SEQ ID NO: 256462 - DNA, 20 bp, Artificial Sequence
  Description of Artificial Sequence: Synthetic oligonucleotide
  Target: LAMA2; (-) strand; PAM type: YTN; PAM sequence: TTA
atagaactttgattctagct

SEQ ID NO: 256463 - DNA, 20 bp, Artificial Sequence
  Description of Artificial Sequence: Synthetic oligonucleotide
  Target: LAMA2; (-) strand; PAM type: YTN; PAM sequence: CTT
aatagaactttgattctagc

SEQ ID NO: 256464 - DNA, 20 bp, Artificial Sequence
  Description of Artificial Sequence: Synthetic oligonucleotide
  Target: LAMA2; (-) strand; PAM type: YTN; PAM sequence: CTA
ggtaagcttaatagaacttt

SEQ ID NO: 256465 - DNA, 20 bp, Artificial Sequence
  Description of Artificial Sequence: Synthetic oligonucleotide
  Target: LAMA2; (-) strand; PAM type: YTN; PAM sequence: TTG
gtactaggtaagcttaatag

SEQ ID NO: 256466 - DNA, 20 bp, Artificial Sequence
  Description of Artificial Sequence: Synthetic oligonucleotide
  Target: LAMA2; (-) strand; PAM type: YTN; PAM sequence: TTT
ggtactaggtaagcttaata

SEQ ID NO: 256467 - DNA, 20 bp, Artificial Sequence
  Description of Artificial Sequence: Synthetic oligonucleotide
  Target: LAMA2; (-) strand; PAM type: YTN; PAM sequence: CTT
tggtactaggtaagcttaat

SEQ ID NO: 256468 - DNA, 20 bp, Artificial Sequence
  Description of Artificial Sequence: Synthetic oligonucleotide
  Target: LAMA2; (-) strand; PAM type: YTN; PAM sequence: TTG
catataaggcctttggtact

SEQ ID NO: 256469 - DNA, 20 bp, Artificial Sequence
  Description of Artificial Sequence: Synthetic oligonucleotide
  Target: LAMA2; (-) strand; PAM type: YTN; PAM sequence: CTT
gcatataaggcctttggtac

SEQ ID NO: 256470 - DNA, 20 bp, Artificial Sequence
  Description of Artificial Sequence: Synthetic oligonucleotide
  Target: LAMA2; (-) strand; PAM type: YTN; PAM sequence: CTA
cccttgcatataaggccttt

SEQ ID NO: 256471 - DNA, 20 bp, Artificial Sequence
  Description of Artificial Sequence: Synthetic oligonucleotide
  Target: LAMA2; (-) strand; PAM type: YTN; PAM sequence: CTC
tacccttgcatataaggcct

SEQ ID NO: 256472 - DNA, 20 bp, Artificial Sequence
  Description of Artificial Sequence: Synthetic oligonucleotide
  Target: LAMA2; (-) strand; PAM type: YTN; PAM sequence: CTC
ccctctacccttgcatataa

SEQ ID NO: 256473 - DNA, 20 bp, Artificial Sequence
  Description of Artificial Sequence: Synthetic oligonucleotide
  Target: LAMA2; (-) strand; PAM type: YTN; PAM sequence: TTA
taccctcccctctacccttg

SEQ ID NO: 256474 - DNA, 20 bp, Artificial Sequence
  Description of Artificial Sequence: Synthetic oligonucleotide
  Target: LAMA2; (-) strand; PAM type: YTN; PAM sequence: CTC
aacatatacacacagacatt

SEQ ID NO: 256475 - DNA, 20 bp, Artificial Sequence
  Description of Artificial Sequence: Synthetic oligonucleotide
  Target: LAMA2; (-) strand; PAM type: YTN; PAM sequence: TTG
ctcaacatatacacacagac

SEQ ID NO: 256476 - DNA, 20 bp, Artificial Sequence
  Description of Artificial Sequence: Synthetic oligonucleotide
  Target: LAMA2; (-) strand; PAM type: YTN; PAM sequence: CTT
gctcaacatatacacacaga

SEQ ID NO: 256477 - DNA, 20 bp, Artificial Sequence
  Description of Artificial Sequence: Synthetic oligonucleotide
  Target: LAMA2; (-) strand; PAM type: YTN; PAM sequence: CTA
tcacatgtccccttgctcaa

SEQ ID NO: 256478 - DNA, 20 bp, Artificial Sequence
  Description of Artificial Sequence: Synthetic oligonucleotide
  Target: LAMA2; (-) strand; PAM type: YTN; PAM sequence: CTG
gccctatcacatgtcccctt

SEQ ID NO: 256479 - DNA, 20 bp, Artificial Sequence
  Description of Artificial Sequence: Synthetic oligonucleotide
  Target: LAMA2; (-) strand; PAM type: YTN; PAM sequence: CTG
gctggccctatcacatgtcc

SEQ ID NO: 256480 - DNA, 20 bp, Artificial Sequence
  Description of Artificial Sequence: Synthetic oligonucleotide
  Target: LAMA2; (-) strand; PAM type: YTN; PAM sequence: CTC
agtactggctggccctatca

SEQ ID NO: 256481 - DNA, 20 bp, Artificial Sequence
  Description of Artificial Sequence: Synthetic oligonucleotide
  Target: LAMA2; (-) strand; PAM type: YTN; PAM sequence: TTG
ggtgaaatactcagtactgg

SEQ ID NO: 256482 - DNA, 20 bp, Artificial Sequence
  Description of Artificial Sequence: Synthetic oligonucleotide
  Target: LAMA2; (-) strand; PAM type: YTN; PAM sequence: CTT
gggtgaaatactcagtactg

SEQ ID NO: 256483 - DNA, 20 bp, Artificial Sequence
  Description of Artificial Sequence: Synthetic oligonucleotide
  Target: LAMA2; (-) strand; PAM type: YTN; PAM sequence: TTA
ggaggacggagaaaaaggga

SEQ ID NO: 256484 - DNA, 20 bp, Artificial Sequence
  Description of Artificial Sequence: Synthetic oligonucleotide
  Target: LAMA2; (-) strand; PAM type: YTN; PAM sequence: CTG
aaaggaaaggtaattaggag

SEQ ID NO: 256485 - DNA, 20 bp, Artificial Sequence
  Description of Artificial Sequence: Synthetic oligonucleotide
  Target: LAMA2; (-) strand; PAM type: YTN; PAM sequence: CTA
gacctgaaaggaaaggtaat

SEQ ID NO: 256486 - DNA, 20 bp, Artificial Sequence
  Description of Artificial Sequence: Synthetic oligonucleotide
  Target: LAMA2; (-) strand; PAM type: YTN; PAM sequence: TTC
tagacctgaaaggaaaggta

SEQ ID NO: 256487 - DNA, 20 bp, Artificial Sequence
  Description of Artificial Sequence: Synthetic oligonucleotide
  Target: LAMA2; (-) strand; PAM type: YTN; PAM sequence: TTT
ctagacctgaaaggaaaggt

SEQ ID NO: 256488 - DNA, 20 bp, Artificial Sequence
  Description of Artificial Sequence: Synthetic oligonucleotide
  Target: LAMA2; (-) strand; PAM type: YTN; PAM sequence: CTT
tctagacctgaaaggaaagg

SEQ ID NO: 256489 - DNA, 20 bp, Artificial Sequence
  Description of Artificial Sequence: Synthetic oligonucleotide
  Target: LAMA2; (-) strand; PAM type: YTN; PAM sequence: TTG
agagactttctagacctgaa

SEQ ID NO: 256490 - DNA, 20 bp, Artificial Sequence
  Description of Artificial Sequence: Synthetic oligonucleotide
  Target: LAMA2; (-) strand; PAM type: YTN; PAM sequence: CTA
agaatggaatgaaagtagtt

SEQ ID NO: 256491 - DNA, 20 bp, Artificial Sequence
  Description of Artificial Sequence: Synthetic oligonucleotide
  Target: LAMA2; (-) strand; PAM type: YTN; PAM sequence: CTC
taagaatggaatgaaagtag

SEQ ID NO: 256492 - DNA, 20 bp, Artificial Sequence
  Description of Artificial Sequence: Synthetic oligonucleotide
  Target: LAMA2; (-) strand; PAM type: YTN; PAM sequence: CTG
tgcctctaagaatggaatga

SEQ ID NO: 256493 - DNA, 20 bp, Artificial Sequence
  Description of Artificial Sequence: Synthetic oligonucleotide
  Target: LAMA2; (-) strand; PAM type: YTN; PAM sequence: TTC
ctgtgcctctaagaatggaa

SEQ ID NO: 256494 - DNA, 20 bp, Artificial Sequence
  Description of Artificial Sequence: Synthetic oligonucleotide
  Target: LAMA2; (-) strand; PAM type: YTN; PAM sequence: CTG
aatgattcctgtgcctctaa

SEQ ID NO: 256495 - DNA, 20 bp, Artificial Sequence
  Description of Artificial Sequence: Synthetic oligonucleotide
  Target: LAMA2; (-) strand; PAM type: YTN; PAM sequence: TTA
gcatggaatgaaagaagctg

SEQ ID NO: 256496 - DNA, 20 bp, Artificial Sequence
  Description of Artificial Sequence: Synthetic oligonucleotide
  Target: LAMA2; (-) strand; PAM type: YTN; PAM sequence: CTT
agcatggaatgaaagaagct

SEQ ID NO: 256497 - DNA, 20 bp, Artificial Sequence
  Description of Artificial Sequence: Synthetic oligonucleotide
  Target: LAMA2; (-) strand; PAM type: YTN; PAM sequence: TTG
gtgggtcttagcatggaatg

SEQ ID NO: 256498 - DNA, 20 bp, Artificial Sequence
  Description of Artificial Sequence: Synthetic oligonucleotide
  Target: LAMA2; (-) strand; PAM type: YTN; PAM sequence: TTG
gaaaggcagatggaaaaatg

SEQ ID NO: 256499 - DNA, 20 bp, Artificial Sequence
  Description of Artificial Sequence: Synthetic oligonucleotide
  Target: LAMA2; (-) strand; PAM type: YTN; PAM sequence: TTT
ggaaaggcagatggaaaaat

SEQ ID NO: 256500 - DNA, 20 bp, Artificial Sequence
  Description of Artificial Sequence: Synthetic oligonucleotide
  Target: LAMA2; (-) strand; PAM type: YTN; PAM sequence: TTC
aaatagaaaatgggatggat

SEQ ID NO: 256501 - DNA, 20 bp, Artificial Sequence
  Description of Artificial Sequence: Synthetic oligonucleotide
  Target: LAMA2; (-) strand; PAM type: YTN; PAM sequence: TTT
caaatagaaaatgggatgga

SEQ ID NO: 256502 - DNA, 20 bp, Artificial Sequence
  Description of Artificial Sequence: Synthetic oligonucleotide
  Target: LAMA2; (-) strand; PAM type: YTN; PAM sequence: TTT
tcaaatagaaaatgggatgg

SEQ ID NO: 256503 - DNA, 20 bp, Artificial Sequence
  Description of Artificial Sequence: Synthetic oligonucleotide
  Target: LAMA2; (-) strand; PAM type: YTN; PAM sequence: TTT
ttcaaatagaaaatgggatg

SEQ ID NO: 256504 - DNA, 20 bp, Artificial Sequence
  Description of Artificial Sequence: Synthetic oligonucleotide
  Target: LAMA2; (-) strand; PAM type: YTN; PAM sequence: CTT
tttcaaatagaaaatgggat

SEQ ID NO: 256505 - DNA, 20 bp, Artificial Sequence
  Description of Artificial Sequence: Synthetic oligonucleotide
  Target: LAMA2; (-) strand; PAM type: YTN; PAM sequence: CTC
atcctttttcaaatagaaaa

SEQ ID NO: 256506 - DNA, 20 bp, Artificial Sequence
  Description of Artificial Sequence: Synthetic oligonucleotide
  Target: LAMA2; (-) strand; PAM type: YTN; PAM sequence: TTC
cacaaatgtagctcatcctt

SEQ ID NO: 256507 - DNA, 20 bp, Artificial Sequence
  Description of Artificial Sequence: Synthetic oligonucleotide
  Target: LAMA2; (-) strand; PAM type: YTN; PAM sequence: CTG
aaagccaccagttccacaaa

SEQ ID NO: 256508 - DNA, 20 bp, Artificial Sequence
  Description of Artificial Sequence: Synthetic oligonucleotide
  Target: LAMA2; (-) strand; PAM type: YTN; PAM sequence: CTC
tgaaagccaccagttccaca

SEQ ID NO: 256509 - DNA, 20 bp, Artificial Sequence
  Description of Artificial Sequence: Synthetic oligonucleotide
  Target: LAMA2; (-) strand; PAM type: YTN; PAM sequence: CTG
ccagaccccgagctctgaaa

SEQ ID NO: 256510 - DNA, 20 bp, Artificial Sequence
  Description of Artificial Sequence: Synthetic oligonucleotide
  Target: LAMA2; (-) strand; PAM type: YTN; PAM sequence: TTG
acagggcaaaaggcagagac

SEQ ID NO: 256511 - DNA, 20 bp, Artificial Sequence
  Description of Artificial Sequence: Synthetic oligonucleotide
  Target: LAMA2; (-) strand; PAM type: YTN; PAM sequence: TTT
gacagggcaaaaggcagaga

SEQ ID NO: 256512 - DNA, 20 bp, Artificial Sequence
  Description of Artificial Sequence: Synthetic oligonucleotide
  Target: LAMA2; (-) strand; PAM type: YTN; PAM sequence: TTG
aatgaagggatttgacaggg

SEQ ID NO: 256513 - DNA, 20 bp, Artificial Sequence
  Description of Artificial Sequence: Synthetic oligonucleotide
  Target: LAMA2; (-) strand; PAM type: YTN; PAM sequence: TTT
gaatgaagggatttgacagg

SEQ ID NO: 256514 - DNA, 20 bp, Artificial Sequence
  Description of Artificial Sequence: Synthetic oligonucleotide
  Target: LAMA2; (-) strand; PAM type: YTN; PAM sequence: CTA
catgtttgaatgaagggatt

SEQ ID NO: 256515 - DNA, 20 bp, Artificial Sequence
  Description of Artificial Sequence: Synthetic oligonucleotide
  Target: LAMA2; (-) strand; PAM type: YTN; PAM sequence: TTG
tgctacatgtttgaatgaag

SEQ ID NO: 256516 - DNA, 20 bp, Artificial Sequence
  Description of Artificial Sequence: Synthetic oligonucleotide
  Target: LAMA2; (-) strand; PAM type: YTN; PAM sequence: CTT
gtgctacatgtttgaatgaa

SEQ ID NO: 256517 - DNA, 20 bp, Artificial Sequence
  Description of Artificial Sequence: Synthetic oligonucleotide
  Target: LAMA2; (-) strand; PAM type: YTN; PAM sequence: TTC
aagaagcaaggccatcttgt

SEQ ID NO: 256518 - DNA, 20 bp, Artificial Sequence
  Description of Artificial Sequence: Synthetic oligonucleotide
  Target: LAMA2; (-) strand; PAM type: YTN; PAM sequence: CTC
gattcaagaagcaaggccat

SEQ ID NO: 256519 - DNA, 20 bp, Artificial Sequence
  Description of Artificial Sequence: Synthetic oligonucleotide
  Target: LAMA2; (-) strand; PAM type: YTN; PAM sequence: TTC
accccctcgattcaagaagc

SEQ ID NO: 256520 - DNA, 20 bp, Artificial Sequence
  Description of Artificial Sequence: Synthetic oligonucleotide
  Target: LAMA2; (-) strand; PAM type: YTN; PAM sequence: CTT
caccccctcgattcaagaag

SEQ ID NO: 256521 - DNA, 20 bp, Artificial Sequence
  Description of Artificial Sequence: Synthetic oligonucleotide
  Target: LAMA2; (-) strand; PAM type: YTN; PAM sequence: CTC
ttcaccccctcgattcaaga

SEQ ID NO: 256522 - DNA, 20 bp, Artificial Sequence
  Description of Artificial Sequence: Synthetic oligonucleotide
  Target: LAMA2; (-) strand; PAM type: YTN; PAM sequence: TTC
tcttcaccccctcgattcaa

SEQ ID NO: 256523 - DNA, 20 bp, Artificial Sequence
  Description of Artificial Sequence: Synthetic oligonucleotide
  Target: LAMA2; (-) strand; PAM type: YTN; PAM sequence: TTT
ctcttcaccccctcgattca

SEQ ID NO: 256524 - DNA, 20 bp, Artificial Sequence
  Description of Artificial Sequence: Synthetic oligonucleotide
  Target: LAMA2; (-) strand; PAM type: YTN; PAM sequence: CTG
tttctcttcaccccctcgat

SEQ ID NO: 256525 - DNA, 20 bp, Artificial Sequence
  Description of Artificial Sequence: Synthetic oligonucleotide
  Target: LAMA2; (-) strand; PAM type: YTN; PAM sequence: TTC
actgtttctcttcaccccct

SEQ ID NO: 256526 - DNA, 20 bp, Artificial Sequence
  Description of Artificial Sequence: Synthetic oligonucleotide
  Target: LAMA2; (-) strand; PAM type: YTN; PAM sequence: CTG
ttcactgtttctcttcaccc

SEQ ID NO: 256527 - DNA, 20 bp, Artificial Sequence
  Description of Artificial Sequence: Synthetic oligonucleotide
  Target: LAMA2; (-) strand; PAM type: YTN; PAM sequence: TTC
ccctgttcactgtttctctt

SEQ ID NO: 256528 - DNA, 20 bp, Artificial Sequence
  Description of Artificial Sequence: Synthetic oligonucleotide
  Target: LAMA2; (-) strand; PAM type: YTN; PAM sequence: TTG
gccattcccctgttcactgt

SEQ ID NO: 256529 - DNA, 20 bp, Artificial Sequence
  Description of Artificial Sequence: Synthetic oligonucleotide
  Target: LAMA2; (-) strand; PAM type: YTN; PAM sequence: TTT
ggccattcccctgttcactg

SEQ ID NO: 256530 - DNA, 20 bp, Artificial Sequence
  Description of Artificial Sequence: Synthetic oligonucleotide
  Target: LAMA2; (-) strand; PAM type: YTN; PAM sequence: TTG
tttggccattcccctgttca

SEQ ID NO: 256531 - DNA, 20 bp, Artificial Sequence
  Description of Artificial Sequence: Synthetic oligonucleotide
  Target: LAMA2; (-) strand; PAM type: YTN; PAM sequence: CTT
gtttggccattcccctgttc

SEQ ID NO: 256532 - DNA, 20 bp, Artificial Sequence
  Description of Artificial Sequence: Synthetic oligonucleotide
  Target: LAMA2; (-) strand; PAM type: YTN; PAM sequence: TTG
tatcttgtttggccattccc

SEQ ID NO: 256533 - DNA, 20 bp, Artificial Sequence
  Description of Artificial Sequence: Synthetic oligonucleotide
  Target: LAMA2; (-) strand; PAM type: YTN; PAM sequence: TTG
ttgtatcttgtttggccatt

SEQ ID NO: 256534 - DNA, 20 bp, Artificial Sequence
  Description of Artificial Sequence: Synthetic oligonucleotide
  Target: LAMA2; (-) strand; PAM type: YTN; PAM sequence: TTT
gttgtatcttgtttggccat

SEQ ID NO: 256535 - DNA, 20 bp, Artificial Sequence
  Description of Artificial Sequence: Synthetic oligonucleotide
  Target: LAMA2; (-) strand; PAM type: YTN; PAM sequence: TTT
tgttgtatcttgtttggcca

SEQ ID NO: 256536 - DNA, 20 bp, Artificial Sequence
  Description of Artificial Sequence: Synthetic oligonucleotide
  Target: LAMA2; (-) strand; PAM type: YTN; PAM sequence: TTG
tgacagaataccaatccatg

SEQ ID NO: 256537 - DNA, 20 bp, Artificial Sequence
  Description of Artificial Sequence: Synthetic oligonucleotide
  Target: LAMA2; (-) strand; PAM type: YTN; PAM sequence: CTT
gtgacagaataccaatccat

SEQ ID NO: 256538 - DNA, 20 bp, Artificial Sequence
  Description of Artificial Sequence: Synthetic oligonucleotide
  Target: LAMA2; (-) strand; PAM type: YTN; PAM sequence: TTC
aacttgtgacagaataccaa

SEQ ID NO: 256539 - DNA, 20 bp, Artificial Sequence
  Description of Artificial Sequence: Synthetic oligonucleotide
  Target: LAMA2; (-) strand; PAM type: YTN; PAM sequence: CTA
gtgttcaacttgtgacagaa

SEQ ID NO: 256540 - DNA, 20 bp, Artificial Sequence
  Description of Artificial Sequence: Synthetic oligonucleotide
  Target: LAMA2; (-) strand; PAM type: YTN; PAM sequence: CTG
taactagtgttcaacttgtg

SEQ ID NO: 256541 - DNA, 20 bp, Artificial Sequence
  Description of Artificial Sequence: Synthetic oligonucleotide
  Target: LAMA2; (-) strand; PAM type: YTN; PAM sequence: TTC
caagctgtaactagtgttca

SEQ ID NO: 256542 - DNA, 20 bp, Artificial Sequence
  Description of Artificial Sequence: Synthetic oligonucleotide
  Target: LAMA2; (-) strand; PAM type: YTN; PAM sequence: TTT
ccaagctgtaactagtgttc

SEQ ID NO: 256543 - DNA, 20 bp, Artificial Sequence
  Description of Artificial Sequence: Synthetic oligonucleotide
  Target: LAMA2; (-) strand; PAM type: YTN; PAM sequence: TTT
tccaagctgtaactagtgtt

SEQ ID NO: 256544 - DNA, 20 bp, Artificial Sequence
  Description of Artificial Sequence: Synthetic oligonucleotide
  Target: LAMA2; (-) strand; PAM type: YTN; PAM sequence: CTA
agtgaatgttttccaagctg

SEQ ID NO: 256545 - DNA, 20 bp, Artificial Sequence
  Description of Artificial Sequence: Synthetic oligonucleotide
  Target: LAMA2; (-) strand; PAM type: YTN; PAM sequence: TTG
gccctaagtgaatgttttcc

SEQ ID NO: 256546 - DNA, 20 bp, Artificial Sequence
  Description of Artificial Sequence: Synthetic oligonucleotide
  Target: LAMA2; (-) strand; PAM type: YTN; PAM sequence: TTT
ggccctaagtgaatgttttc

SEQ ID NO: 256547 - DNA, 20 bp, Artificial Sequence
  Description of Artificial Sequence: Synthetic oligonucleotide
  Target: LAMA2; (-) strand; PAM type: YTN; PAM sequence: TTT
tggccctaagtgaatgtttt

SEQ ID NO: 256548 - DNA, 20 bp, Artificial Sequence
  Description of Artificial Sequence: Synthetic oligonucleotide
  Target: LAMA2; (-) strand; PAM type: YTN; PAM sequence: CTC
aaaaatagtggtgttttggc

SEQ ID NO: 256549 - DNA, 20 bp, Artificial Sequence
  Description of Artificial Sequence: Synthetic oligonucleotide
  Target: LAMA2; (-) strand; PAM type: YTN; PAM sequence: TTC
cccagcaaagcagtgatacc

SEQ ID NO: 256550 - DNA, 20 bp, Artificial Sequence
  Description of Artificial Sequence: Synthetic oligonucleotide
  Target: LAMA2; (-) strand; PAM type: YTN; PAM sequence: TTA
aatcattccccagcaaagca

SEQ ID NO: 256551 - DNA, 20 bp, Artificial Sequence
  Description of Artificial Sequence: Synthetic oligonucleotide
  Target: LAMA2; (-) strand; PAM type: YTN; PAM sequence: TTT
aaatcattccccagcaaagc

SEQ ID NO: 256552 - DNA, 20 bp, Artificial Sequence
  Description of Artificial Sequence: Synthetic oligonucleotide
  Target: LAMA2; (-) strand; PAM type: YTN; PAM sequence: TTG
tttaaatcattccccagcaa

SEQ ID NO: 256553 - DNA, 20 bp, Artificial Sequence
  Description of Artificial Sequence: Synthetic oligonucleotide
  Target: LAMA2; (-) strand; PAM type: YTN; PAM sequence: TTT
gtttaaatcattccccagca

SEQ ID NO: 256554 - DNA, 20 bp, Artificial Sequence
  Description of Artificial Sequence: Synthetic oligonucleotide
  Target: LAMA2; (-) strand; PAM type: YTN; PAM sequence: CTT
tgtttaaatcattccccagc

SEQ ID NO: 256555 - DNA, 20 bp, Artificial Sequence
  Description of Artificial Sequence: Synthetic oligonucleotide
  Target: LAMA2; (-) strand; PAM type: YTN; PAM sequence: TTC
ctttgtttaaatcattcccc

SEQ ID NO: 256556 - DNA, 20 bp, Artificial Sequence
  Description of Artificial Sequence: Synthetic oligonucleotide
  Target: LAMA2; (-) strand; PAM type: YTN; PAM sequence: TTT
cctttgtttaaatcattccc

SEQ ID NO: 256557 - DNA, 20 bp, Artificial Sequence
  Description of Artificial Sequence: Synthetic oligonucleotide
  Target: LAMA2; (-) strand; PAM type: YTN; PAM sequence: TTT
tcctttgtttaaatcattcc

SEQ ID NO: 256558 - DNA, 20 bp, Artificial Sequence
  Description of Artificial Sequence: Synthetic oligonucleotide
  Target: LAMA2; (-) strand; PAM type: YTN; PAM sequence: TTT
ttcctttgtttaaatcattc

SEQ ID NO: 256559 - DNA, 20 bp, Artificial Sequence
  Description of Artificial Sequence: Synthetic oligonucleotide
  Target: LAMA2; (-) strand; PAM type: YTN; PAM sequence: TTT
tttcctttgtttaaatcatt

SEQ ID NO: 256560 - DNA, 20 bp, Artificial Sequence
  Description of Artificial Sequence: Synthetic oligonucleotide
  Target: LAMA2; (-) strand; PAM type: YTN; PAM sequence: TTT
ttttcctttgtttaaatcat

SEQ ID NO: 256561 - DNA, 20 bp, Artificial Sequence
  Description of Artificial Sequence: Synthetic oligonucleotide
  Target: LAMA2; (-) strand; PAM type: YTN; PAM sequence: TTT
tttttcctttgtttaaatca

SEQ ID NO: 256562 - DNA, 20 bp, Artificial Sequence
  Description of Artificial Sequence: Synthetic oligonucleotide
  Target: LAMA2; (-) strand; PAM type: YTN; PAM sequence: CTT
ttttttcctttgtttaaatc

SEQ ID NO: 256563 - DNA, 20 bp, Artificial Sequence
  Description of Artificial Sequence: Synthetic oligonucleotide
  Target: LAMA2; (-) strand; PAM type: YTN; PAM sequence: CTC
ttttttttcctttgtttaaa

SEQ ID NO: 256564 - DNA, 20 bp, Artificial Sequence
  Description of Artificial Sequence: Synthetic oligonucleotide
  Target: LAMA2; (-) strand; PAM type: YTN; PAM sequence: CTG
actcttttttttcctttgtt

SEQ ID NO: 256565 - DNA, 20 bp, Artificial Sequence
  Description of Artificial Sequence: Synthetic oligonucleotide
  Target: LAMA2; (-) strand; PAM type: YTN; PAM sequence: CTC
tgactcttttttttcctttg

SEQ ID NO: 256566 - DNA, 20 bp, Artificial Sequence
  Description of Artificial Sequence: Synthetic oligonucleotide
  Target: LAMA2; (-) strand; PAM type: YTN; PAM sequence: CTC
tctgactcttttttttcctt

SEQ ID NO: 256567 - DNA, 20 bp, Artificial Sequence
  Description of Artificial Sequence: Synthetic oligonucleotide
  Target: LAMA2; (-) strand; PAM type: YTN; PAM sequence: CTC
actctctgactctttttttt

SEQ ID NO: 256568 - DNA, 20 bp, Artificial Sequence
  Description of Artificial Sequence: Synthetic oligonucleotide
  Target: LAMA2; (-) strand; PAM type: YTN; PAM sequence: CTC
ccctcactctctgactcttt

SEQ ID NO: 256569 - DNA, 20 bp, Artificial Sequence
  Description of Artificial Sequence: Synthetic oligonucleotide
  Target: LAMA2; (-) strand; PAM type: YTN; PAM sequence: TTC
tcccctcactctctgactct

SEQ ID NO: 256570 - DNA, 20 bp, Artificial Sequence
  Description of Artificial Sequence: Synthetic oligonucleotide
  Target: LAMA2; (-) strand; PAM type: YTN; PAM sequence: CTT
ctcccctcactctctgactc

SEQ ID NO: 256571 - DNA, 20 bp, Artificial Sequence
  Description of Artificial Sequence: Synthetic oligonucleotide
  Target: LAMA2; (-) strand; PAM type: YTN; PAM sequence: TTA
gcaaaggtatcatcatgaat

SEQ ID NO: 256572 - DNA, 20 bp, Artificial Sequence
  Description of Artificial Sequence: Synthetic oligonucleotide
  Target: LAMA2; (-) strand; PAM type: YTN; PAM sequence: CTT
agcaaaggtatcatcatgaa

SEQ ID NO: 256573 - DNA, 20 bp, Artificial Sequence
  Description of Artificial Sequence: Synthetic oligonucleotide
  Target: LAMA2; (-) strand; PAM type: YTN; PAM sequence: CTA
gaatcttagcaaaggtatca

SEQ ID NO: 256574 - DNA, 20 bp, Artificial Sequence
  Description of Artificial Sequence: Synthetic oligonucleotide
  Target: LAMA2; (-) strand; PAM type: YTN; PAM sequence: TTG
tccagatgataaaagtctag

SEQ ID NO: 256575 - DNA, 20 bp, Artificial Sequence
  Description of Artificial Sequence: Synthetic oligonucleotide
  Target: LAMA2; (-) strand; PAM type: YTN; PAM sequence: CTT
gtccagatgataaaagtcta

SEQ ID NO: 256576 - DNA, 20 bp, Artificial Sequence
  Description of Artificial Sequence: Synthetic oligonucleotide
  Target: LAMA2; (-) strand; PAM type: YTN; PAM sequence: CTC
ttgtccagatgataaaagtc

SEQ ID NO: 256577 - DNA, 20 bp, Artificial Sequence
  Description of Artificial Sequence: Synthetic oligonucleotide
  Target: LAMA2; (-) strand; PAM type: YTN; PAM sequence: CTC
ctcttgtccagatgataaaa

SEQ ID NO: 256578 - DNA, 20 bp, Artificial Sequence
  Description of Artificial Sequence: Synthetic oligonucleotide
  Target: LAMA2; (-) strand; PAM type: YTN; PAM sequence: TTC
tcctcttgtccagatgataa

SEQ ID NO: 256579 - DNA, 20 bp, Artificial Sequence
  Description of Artificial Sequence: Synthetic oligonucleotide
  Target: LAMA2; (-) strand; PAM type: YTN; PAM sequence: TTG
ttctcctcttgtccagatga

SEQ ID NO: 256580 - DNA, 20 bp, Artificial Sequence
  Description of Artificial Sequence: Synthetic oligonucleotide
  Target: LAMA2; (-) strand; PAM type: YTN; PAM sequence: TTT
gttctcctcttgtccagatg

SEQ ID NO: 256581 - DNA, 20 bp, Artificial Sequence
  Description of Artificial Sequence: Synthetic oligonucleotide
  Target: LAMA2; (-) strand; PAM type: YTN; PAM sequence: TTT
tgttctcctcttgtccagat

SEQ ID NO: 256582 - DNA, 20 bp, Artificial Sequence
  Description of Artificial Sequence: Synthetic oligonucleotide
  Target: LAMA2; (-) strand; PAM type: YTN; PAM sequence: TTT
ttgttctcctcttgtccaga

SEQ ID NO: 256583 - DNA, 20 bp, Artificial Sequence
  Description of Artificial Sequence: Synthetic oligonucleotide
  Target: LAMA2; (-) strand; PAM type: YTN; PAM sequence: TTA
tttttgttctcctcttgtcc

SEQ ID NO: 256584 - DNA, 20 bp, Artificial Sequence
  Description of Artificial Sequence: Synthetic oligonucleotide
  Target: LAMA2; (-) strand; PAM type: YTN; PAM sequence: TTG
ttatttttgttctcctcttg

SEQ ID NO: 256585 - DNA, 20 bp, Artificial Sequence
  Description of Artificial Sequence: Synthetic oligonucleotide
  Target: LAMA2; (-) strand; PAM type: YTN; PAM sequence: TTT
gttatttttgttctcctctt

SEQ ID NO: 256586 - DNA, 20 bp, Artificial Sequence
  Description of Artificial Sequence: Synthetic oligonucleotide
  Target: LAMA2; (-) strand; PAM type: YTN; PAM sequence: CTT
tgttatttttgttctcctct

SEQ ID NO: 256587 - DNA, 20 bp, Artificial Sequence
  Description of Artificial Sequence: Synthetic oligonucleotide
  Target: LAMA2; (-) strand; PAM type: YTN; PAM sequence: CTC
tttgttatttttgttctcct

SEQ ID NO: 256588 - DNA, 20 bp, Artificial Sequence
  Description of Artificial Sequence: Synthetic oligonucleotide
  Target: LAMA2; (-) strand; PAM type: YTN; PAM sequence: CTG
tctctttgttatttttgttc

SEQ ID NO: 256589 - DNA, 20 bp, Artificial Sequence
  Description of Artificial Sequence: Synthetic oligonucleotide
  Target: LAMA2; (-) strand; PAM type: YTN; PAM sequence: TTC
tgtctctttgttatttttgt

SEQ ID NO: 256590 - DNA, 20 bp, Artificial Sequence
  Description of Artificial Sequence: Synthetic oligonucleotide
  Target: LAMA2; (-) strand; PAM type: YTN; PAM sequence: TTC
aagattctgtctctttgtta

SEQ ID NO: 256591 - DNA, 20 bp, Artificial Sequence
  Description of Artificial Sequence: Synthetic oligonucleotide
  Target: LAMA2; (-) strand; PAM type: YTN; PAM sequence: CTT
caagattctgtctctttgtt

SEQ ID NO: 256592 - DNA, 20 bp, Artificial Sequence
  Description of Artificial Sequence: Synthetic oligonucleotide
  Target: LAMA2; (-) strand; PAM type: YTN; PAM sequence: TTA
gcccttcaagattctgtctc

SEQ ID NO: 256593 - DNA, 20 bp, Artificial Sequence
  Description of Artificial Sequence: Synthetic oligonucleotide
  Target: LAMA2; (-) strand; PAM type: YTN; PAM sequence: TTT
agcccttcaagattctgtct

SEQ ID NO: 256594 - DNA, 20 bp, Artificial Sequence
  Description of Artificial Sequence: Synthetic oligonucleotide
  Target: LAMA2; (-) strand; PAM type: YTN; PAM sequence: TTT
tagcccttcaagattctgtc

SEQ ID NO: 256595 - DNA, 20 bp, Artificial Sequence
  Description of Artificial Sequence: Synthetic oligonucleotide
  Target: LAMA2; (-) strand; PAM type: YTN; PAM sequence: CTT
ttagcccttcaagattctgt

SEQ ID NO: 256596 - DNA, 20 bp, Artificial Sequence
  Description of Artificial Sequence: Synthetic oligonucleotide
  Target: LAMA2; (-) strand; PAM type: YTN; PAM sequence: CTC
ttttagcccttcaagattct

SEQ ID NO: 256597 - DNA, 20 bp, Artificial Sequence
  Description of Artificial Sequence: Synthetic oligonucleotide
  Target: LAMA2; (-) strand; PAM type: YTN; PAM sequence: TTA
atctcttttagcccttcaag

SEQ ID NO: 256598 - DNA, 20 bp, Artificial Sequence
  Description of Artificial Sequence: Synthetic oligonucleotide
  Target: LAMA2; (-) strand; PAM type: YTN; PAM sequence: CTT
aatctcttttagcccttcaa

SEQ ID NO: 256599 - DNA, 20 bp, Artificial Sequence
  Description of Artificial Sequence: Synthetic oligonucleotide
  Target: LAMA2; (-) strand; PAM type: YTN; PAM sequence: TTA
cttaatctcttttagccctt

SEQ ID NO: 256600 - DNA, 20 bp, Artificial Sequence
  Description of Artificial Sequence: Synthetic oligonucleotide
  Target: LAMA2; (-) strand; PAM type: YTN; PAM sequence: CTT
acttaatctcttttagccct

SEQ ID NO: 256601 - DNA, 20 bp, Artificial Sequence
  Description of Artificial Sequence: Synthetic oligonucleotide
  Target: LAMA2; (-) strand; PAM type: YTN; PAM sequence: TTG
cttacttaatctcttttagc

SEQ ID NO: 256602 - DNA, 20 bp, Artificial Sequence
  Description of Artificial Sequence: Synthetic oligonucleotide
  Target: LAMA2; (-) strand; PAM type: YTN; PAM sequence: TTC
caattgcttacttaatctct

SEQ ID NO: 256603 - DNA, 20 bp, Artificial Sequence
  Description of Artificial Sequence: Synthetic oligonucleotide
  Target: LAMA2; (-) strand; PAM type: YTN; PAM sequence: TTG
atattccaattgcttactta

SEQ ID NO: 256604 - DNA, 20 bp, Artificial Sequence
  Description of Artificial Sequence: Synthetic oligonucleotide
  Target: LAMA2; (-) strand; PAM type: YTN; PAM sequence: CTT
gatattccaattgcttactt

SEQ ID NO: 256605 - DNA, 20 bp, Artificial Sequence
  Description of Artificial Sequence: Synthetic oligonucleotide
  Target: LAMA2; (-) strand; PAM type: YTN; PAM sequence: CTC
ttgatattccaattgcttac

SEQ ID NO: 256606 - DNA, 20 bp, Artificial Sequence
  Description of Artificial Sequence: Synthetic oligonucleotide
  Target: LAMA2; (-) strand; PAM type: YTN; PAM sequence: TTG
ctcttgatattccaattgct

SEQ ID NO: 256607 - DNA, 20 bp, Artificial Sequence
  Description of Artificial Sequence: Synthetic oligonucleotide
  Target: LAMA2; (-) strand; PAM type: YTN; PAM sequence: TTA
attgctcttgatattccaat

SEQ ID NO: 256608 - DNA, 20 bp, Artificial Sequence
  Description of Artificial Sequence: Synthetic oligonucleotide
  Target: LAMA2; (-) strand; PAM type: YTN; PAM sequence: TTT
aattgctcttgatattccaa

SEQ ID NO: 256609 - DNA, 20 bp, Artificial Sequence
  Description of Artificial Sequence: Synthetic oligonucleotide
  Target: LAMA2; (-) strand; PAM type: YTN; PAM sequence: TTT
taattgctcttgatattcca

SEQ ID NO: 256610 - DNA, 20 bp, Artificial Sequence
  Description of Artificial Sequence: Synthetic oligonucleotide
  Target: LAMA2; (-) strand; PAM type: YTN; PAM sequence: TTT
ttaattgctcttgatattcc

SEQ ID NO: 256611 - DNA, 20 bp, Artificial Sequence
  Description of Artificial Sequence: Synthetic oligonucleotide
  Target: LAMA2; (-) strand; PAM type: YTN; PAM sequence: CTT
tttaattgctcttgatattc

SEQ ID NO: 256612 - DNA, 20 bp, Artificial Sequence
  Description of Artificial Sequence: Synthetic oligonucleotide
  Target: LAMA2; (-) strand; PAM type: YTN; PAM sequence: CTC
aacagtctttttaattgctc

SEQ ID NO: 256613 - DNA, 20 bp, Artificial Sequence
  Description of Artificial Sequence: Synthetic oligonucleotide
  Target: LAMA2; (-) strand; PAM type: YTN; PAM sequence: TTA
gctcaacagtctttttaatt

SEQ ID NO: 256614 - DNA, 20 bp, Artificial Sequence
  Description of Artificial Sequence: Synthetic oligonucleotide
  Target: LAMA2; (-) strand; PAM type: YTN; PAM sequence: TTT
agctcaacagtctttttaat

SEQ ID NO: 256615 - DNA, 20 bp, Artificial Sequence
  Description of Artificial Sequence: Synthetic oligonucleotide
  Target: LAMA2; (-) strand; PAM type: YTN; PAM sequence: TTT
tagctcaacagtctttttaa

SEQ ID NO: 256616 - DNA, 20 bp, Artificial Sequence
  Description of Artificial Sequence: Synthetic oligonucleotide
  Target: LAMA2; (-) strand; PAM type: YTN; PAM sequence: CTT
ttagctcaacagtcttttta

SEQ ID NO: 256617 - DNA, 20 bp, Artificial Sequence
  Description of Artificial Sequence: Synthetic oligonucleotide
  Target: LAMA2; (-) strand; PAM type: YTN; PAM sequence: CTC
acttttagctcaacagtctt

SEQ ID NO: 256618 - DNA, 20 bp, Artificial Sequence
  Description of Artificial Sequence: Synthetic oligonucleotide
  Target: LAMA2; (-) strand; PAM type: YTN; PAM sequence: TTG
actcacttttagctcaacag

SEQ ID NO: 256619 - DNA, 20 bp, Artificial Sequence
  Description of Artificial Sequence: Synthetic oligonucleotide
  Target: LAMA2; (-) strand; PAM type: YTN; PAM sequence: TTT
gactcacttttagctcaaca

SEQ ID NO: 256620 - DNA, 20 bp, Artificial Sequence
  Description of Artificial Sequence: Synthetic oligonucleotide
  Target: LAMA2; (-) strand; PAM type: YTN; PAM sequence: CTC
agcatttgactcacttttag

SEQ ID NO: 256621 - DNA, 20 bp, Artificial Sequence
  Description of Artificial Sequence: Synthetic oligonucleotide
  Target: LAMA2; (-) strand; PAM type: YTN; PAM sequence: TTA
gtgtccgatcaggcaggtat

SEQ ID NO: 256622 - DNA, 20 bp, Artificial Sequence
  Description of Artificial Sequence: Synthetic oligonucleotide
  Target: LAMA2; (-) strand; PAM type: YTN; PAM sequence: CTT
agtgtccgatcaggcaggta

SEQ ID NO: 256623 - DNA, 20 bp, Artificial Sequence
  Description of Artificial Sequence: Synthetic oligonucleotide
  Target: LAMA2; (-) strand; PAM type: YTN; PAM sequence: CTG
aaagtaacttagtgtccgat

SEQ ID NO: 256624 - DNA, 20 bp, Artificial Sequence
  Description of Artificial Sequence: Synthetic oligonucleotide
  Target: LAMA2; (-) strand; PAM type: YTN; PAM sequence: TTC
tgaaagtaacttagtgtccg

SEQ ID NO: 256625 - DNA, 20 bp, Artificial Sequence
  Description of Artificial Sequence: Synthetic oligonucleotide
  Target: LAMA2; (-) strand; PAM type: YTN; PAM sequence: TTA
ttctgaaagtaacttagtgt

SEQ ID NO: 256626 - DNA, 20 bp, Artificial Sequence
  Description of Artificial Sequence: Synthetic oligonucleotide
  Target: LAMA2; (-) strand; PAM type: YTN; PAM sequence: CTT
attctgaaagtaacttagtg

SEQ ID NO: 256627 - DNA, 20 bp, Artificial Sequence
  Description of Artificial Sequence: Synthetic oligonucleotide
  Target: LAMA2; (-) strand; PAM type: YTN; PAM sequence: TTA
caaacttattctgaaagtaa

SEQ ID NO: 256628 - DNA, 20 bp, Artificial Sequence
  Description of Artificial Sequence: Synthetic oligonucleotide
  Target: LAMA2; (-) strand; PAM type: YTN; PAM sequence: CTG
aggttacaaacttattctga

SEQ ID NO: 256629 - DNA, 20 bp, Artificial Sequence
  Description of Artificial Sequence: Synthetic oligonucleotide
  Target: LAMA2; (-) strand; PAM type: YTN; PAM sequence: TTG
ctgaggttacaaacttattc

SEQ ID NO: 256630 - DNA, 20 bp, Artificial Sequence
  Description of Artificial Sequence: Synthetic oligonucleotide
  Target: LAMA2; (-) strand; PAM type: YTN; PAM sequence: CTC
cataatgtatgacatgttgc

SEQ ID NO: 256631 - DNA, 20 bp, Artificial Sequence
  Description of Artificial Sequence: Synthetic oligonucleotide
  Target: LAMA2; (-) strand; PAM type: YTN; PAM sequence: TTC
tccataatgtatgacatgtt

SEQ ID NO: 256632 - DNA, 20 bp, Artificial Sequence
  Description of Artificial Sequence: Synthetic oligonucleotide
  Target: LAMA2; (-) strand; PAM type: YTN; PAM sequence: CTT
ctccataatgtatgacatgt

SEQ ID NO: 256633 - DNA, 20 bp, Artificial Sequence
  Description of Artificial Sequence: Synthetic oligonucleotide
  Target: LAMA2; (-) strand; PAM type: YTN; PAM sequence: TTG
aaatgccttctccataatgt

SEQ ID NO: 256634 - DNA, 20 bp, Artificial Sequence
  Description of Artificial Sequence: Synthetic oligonucleotide
  Target: LAMA2; (-) strand; PAM type: YTN; PAM sequence: TTT
gaaatgccttctccataatg

SEQ ID NO: 256635 - DNA, 20 bp, Artificial Sequence
  Description of Artificial Sequence: Synthetic oligonucleotide
  Target: LAMA2; (-) strand; PAM type: YTN; PAM sequence: TTT
tgaaatgccttctccataat

SEQ ID NO: 256636 - DNA, 20 bp, Artificial Sequence
  Description of Artificial Sequence: Synthetic oligonucleotide
  Target: LAMA2; (-) strand; PAM type: YTN; PAM sequence: TTT
ttgaaatgccttctccataa

SEQ ID NO: 256637 - DNA, 20 bp, Artificial Sequence
  Description of Artificial Sequence: Synthetic oligonucleotide
  Target: LAMA2; (-) strand; PAM type: YTN; PAM sequence: CTT
tttgaaatgccttctccata

SEQ ID NO: 256638 - DNA, 20 bp, Artificial Sequence
  Description of Artificial Sequence: Synthetic oligonucleotide
  Target: LAMA2; (-) strand; PAM type: YTN; PAM sequence: CTG
cctttttgaaatgccttctc

SEQ ID NO: 256639 - DNA, 20 bp, Artificial Sequence
  Description of Artificial Sequence: Synthetic oligonucleotide
  Target: LAMA2; (-) strand; PAM type: YTN; PAM sequence: TTG
cctgcctttttgaaatgcct

SEQ ID NO: 256640 - DNA, 20 bp, Artificial Sequence
  Description of Artificial Sequence: Synthetic oligonucleotide
  Target: LAMA2; (-) strand; PAM type: YTN; PAM sequence: CTT
gcctgcctttttgaaatgcc

SEQ ID NO: 256641 - DNA, 20 bp, Artificial Sequence
  Description of Artificial Sequence: Synthetic oligonucleotide
  Target: LAMA2; (-) strand; PAM type: YTN; PAM sequence: CTA
tagaatccaccagatgaact

SEQ ID NO: 256642 - DNA, 20 bp, Artificial Sequence
  Description of Artificial Sequence: Synthetic oligonucleotide
  Target: LAMA2; (-) strand; PAM type: YTN; PAM sequence: TTG
tcctatagaatccaccagat

SEQ ID NO: 256643 - DNA, 20 bp, Artificial Sequence
  Description of Artificial Sequence: Synthetic oligonucleotide
  Target: LAMA2; (-) strand; PAM type: YTN; PAM sequence: TTC
atgttgtcctatagaatcca

SEQ ID NO: 256644 - DNA, 20 bp, Artificial Sequence
  Description of Artificial Sequence: Synthetic oligonucleotide
  Target: LAMA2; (-) strand; PAM type: YTN; PAM sequence: TTT
catgttgtcctatagaatcc

SEQ ID NO: 256645 - DNA, 20 bp, Artificial Sequence
  Description of Artificial Sequence: Synthetic oligonucleotide
  Target: LAMA2; (-) strand; PAM type: YTN; PAM sequence: TTA
agtttcatgttgtcctatag

SEQ ID NO: 256646 - DNA, 20 bp, Artificial Sequence
  Description of Artificial Sequence: Synthetic oligonucleotide
  Target: LAMA2; (-) strand; PAM type: YTN; PAM sequence: CTA
tgtatcccattaagtttcat

SEQ ID NO: 256647 - DNA, 20 bp, Artificial Sequence
  Description of Artificial Sequence: Synthetic oligonucleotide
  Target: LAMA2; (-) strand; PAM type: YTN; PAM sequence: TTA
agaagtctatgtatcccatt

SEQ ID NO: 256648 - DNA, 20 bp, Artificial Sequence
  Description of Artificial Sequence: Synthetic oligonucleotide
  Target: LAMA2; (-) strand; PAM type: YTN; PAM sequence: CTT
aagaagtctatgtatcccat

SEQ ID NO: 256649 - DNA, 20 bp, Artificial Sequence
  Description of Artificial Sequence: Synthetic oligonucleotide
  Target: LAMA2; (-) strand; PAM type: YTN; PAM sequence: CTG
gggagcggggagggcttaag

SEQ ID NO: 256650 - DNA, 20 bp, Artificial Sequence
  Description of Artificial Sequence: Synthetic oligonucleotide
  Target: LAMA2; (-) strand; PAM type: YTN; PAM sequence: TTG
ccagctggggagcggggagg

SEQ ID NO: 256651 - DNA, 20 bp, Artificial Sequence
  Description of Artificial Sequence: Synthetic oligonucleotide
  Target: LAMA2; (-) strand; PAM type: YTN; PAM sequence: TTT
gccagctggggagcggggag

SEQ ID NO: 256652 - DNA, 20 bp, Artificial Sequence
  Description of Artificial Sequence: Synthetic oligonucleotide
  Target: LAMA2; (-) strand; PAM type: YTN; PAM sequence: TTA
aaaatttgccagctggggag

SEQ ID NO: 256653 - DNA, 20 bp, Artificial Sequence
  Description of Artificial Sequence: Synthetic oligonucleotide
  Target: LAMA2; (-) strand; PAM type: YTN; PAM sequence: TTG
ttaaaaatttgccagctggg

SEQ ID NO: 256654 - DNA, 20 bp, Artificial Sequence
  Description of Artificial Sequence: Synthetic oligonucleotide
  Target: LAMA2; (-) strand; PAM type: YTN; PAM sequence: TTA
aggagaagttgttaaaaatt

SEQ ID NO: 256655 - DNA, 20 bp, Artificial Sequence
  Description of Artificial Sequence: Synthetic oligonucleotide
  Target: LAMA2; (-) strand; PAM type: YTN; PAM sequence: CTT
aaggagaagttgttaaaaat

SEQ ID NO: 256656 - DNA, 20 bp, Artificial Sequence
  Description of Artificial Sequence: Synthetic oligonucleotide
  Target: LAMA2; (-) strand; PAM type: YTN; PAM sequence: CTC
atcacttaaggagaagttgt

SEQ ID NO: 256657 - DNA, 20 bp, Artificial Sequence
  Description of Artificial Sequence: Synthetic oligonucleotide
  Target: LAMA2; (-) strand; PAM type: YTN; PAM sequence: CTC
tcatcacttaaggagaagtt

SEQ ID NO: 256658 - DNA, 20 bp, Artificial Sequence
  Description of Artificial Sequence: Synthetic oligonucleotide
  Target: LAMA2; (-) strand; PAM type: YTN; PAM sequence: CTC
tctcatcacttaaggagaag

SEQ ID NO: 256659 - DNA, 20 bp, Artificial Sequence
  Description of Artificial Sequence: Synthetic oligonucleotide
  Target: LAMA2; (-) strand; PAM type: YTN; PAM sequence: TTG
acccctctctcatcacttaa

SEQ ID NO: 256660 - DNA, 20 bp, Artificial Sequence
  Description of Artificial Sequence: Synthetic oligonucleotide
  Target: LAMA2; (-) strand; PAM type: YTN; PAM sequence: TTT
gacccctctctcatcactta

SEQ ID NO: 256661 - DNA, 20 bp, Artificial Sequence
  Description of Artificial Sequence: Synthetic oligonucleotide
  Target: LAMA2; (-) strand; PAM type: YTN; PAM sequence: TTT
tgacccctctctcatcactt

SEQ ID NO: 256662 - DNA, 20 bp, Artificial Sequence
  Description of Artificial Sequence: Synthetic oligonucleotide
  Target: LAMA2; (-) strand; PAM type: YTN; PAM sequence: CTT
ttgacccctctctcatcact

SEQ ID NO: 256663 - DNA, 20 bp, Artificial Sequence
  Description of Artificial Sequence: Synthetic oligonucleotide
  Target: LAMA2; (-) strand; PAM type: YTN; PAM sequence: CTG
gcttttgacccctctctcat

SEQ ID NO: 256664 - DNA, 20 bp, Artificial Sequence
  Description of Artificial Sequence: Synthetic oligonucleotide
  Target: LAMA2; (-) strand; PAM type: YTN; PAM sequence: TTA
gtcctggcttttgacccctc

SEQ ID NO: 256665 - DNA, 20 bp, Artificial Sequence
  Description of Artificial Sequence: Synthetic oligonucleotide
  Target: LAMA2; (-) strand; PAM type: YTN; PAM sequence: TTG
tgagattagtcctggctttt

SEQ ID NO: 256666 - DNA, 20 bp, Artificial Sequence
  Description of Artificial Sequence: Synthetic oligonucleotide
  Target: LAMA2; (-) strand; PAM type: YTN; PAM sequence: TTC
agtggcaattgtgagattag

SEQ ID NO: 256667 - DNA, 20 bp, Artificial Sequence
  Description of Artificial Sequence: Synthetic oligonucleotide
  Target: LAMA2; (-) strand; PAM type: YTN; PAM sequence: TTT
cagtggcaattgtgagatta

SEQ ID NO: 256668 - DNA, 20 bp, Artificial Sequence
  Description of Artificial Sequence: Synthetic oligonucleotide
  Target: LAMA2; (-) strand; PAM type: YTN; PAM sequence: TTT
tcagtggcaattgtgagatt

SEQ ID NO: 256669 - DNA, 20 bp, Artificial Sequence
  Description of Artificial Sequence: Synthetic oligonucleotide
  Target: LAMA2; (-) strand; PAM type: YTN; PAM sequence: TTC
cacattttcagtggcaattg

SEQ ID NO: 256670 - DNA, 20 bp, Artificial Sequence
  Description of Artificial Sequence: Synthetic oligonucleotide
  Target: LAMA2; (-) strand; PAM type: YTN; PAM sequence: CTT
ccacattttcagtggcaatt

SEQ ID NO: 256671 - DNA, 20 bp, Artificial Sequence
  Description of Artificial Sequence: Synthetic oligonucleotide
  Target: LAMA2; (-) strand; PAM type: YTN; PAM sequence: TTC
aaacaccttccacattttca

SEQ ID NO: 256672 - DNA, 20 bp, Artificial Sequence
  Description of Artificial Sequence: Synthetic oligonucleotide
  Target: LAMA2; (-) strand; PAM type: YTN; PAM sequence: TTA
gattcaaacaccttccacat

SEQ ID NO: 256673 - DNA, 20 bp, Artificial Sequence
  Description of Artificial Sequence: Synthetic oligonucleotide
  Target: LAMA2; (-) strand; PAM type: YTN; PAM sequence: TTA
agcaattagattcaaacacc

SEQ ID NO: 256674 - DNA, 20 bp, Artificial Sequence
  Description of Artificial Sequence: Synthetic oligonucleotide
  Target: LAMA2; (-) strand; PAM type: YTN; PAM sequence: TTC
aaaatattaagcaattagat

SEQ ID NO: 256675 - DNA, 20 bp, Artificial Sequence
  Description of Artificial Sequence: Synthetic oligonucleotide
  Target: LAMA2; (-) strand; PAM type: YTN; PAM sequence: TTT
caaaatattaagcaattaga

SEQ ID NO: 256676 - DNA, 20 bp, Artificial Sequence
  Description of Artificial Sequence: Synthetic oligonucleotide
  Target: LAMA2; (-) strand; PAM type: YTN; PAM sequence: TTT
tcaaaatattaagcaattag

SEQ ID NO: 256677 - DNA, 20 bp, Artificial Sequence
  Description of Artificial Sequence: Synthetic oligonucleotide
  Target: LAMA2; (-) strand; PAM type: YTN; PAM sequence: CTG
tagatgaattttcaaaatat

SEQ ID NO: 256678 - DNA, 20 bp, Artificial Sequence
  Description of Artificial Sequence: Synthetic oligonucleotide
  Target: LAMA2; (-) strand; PAM type: YTN; PAM sequence: TTG
aggataaaactgtagatgaa

SEQ ID NO: 256679 - DNA, 20 bp, Artificial Sequence
  Description of Artificial Sequence: Synthetic oligonucleotide
  Target: LAMA2; (-) strand; PAM type: YTN; PAM sequence: CTT
gaggataaaactgtagatga

SEQ ID NO: 256680 - DNA, 20 bp, Artificial Sequence
  Description of Artificial Sequence: Synthetic oligonucleotide
  Target: LAMA2; (-) strand; PAM type: YTN; PAM sequence: CTA
gtatgaatcttgaggataaa

SEQ ID NO: 256681 - DNA, 20 bp, Artificial Sequence
  Description of Artificial Sequence: Synthetic oligonucleotide
  Target: LAMA2; (-) strand; PAM type: YTN; PAM sequence: TTG
atatctagtatgaatcttga

SEQ ID NO: 256682 - DNA, 20 bp, Artificial Sequence
  Description of Artificial Sequence: Synthetic oligonucleotide
  Target: LAMA2; (-) strand; PAM type: YTN; PAM sequence: TTT
gatatctagtatgaatcttg

SEQ ID NO: 256683 - DNA, 20 bp, Artificial Sequence
  Description of Artificial Sequence: Synthetic oligonucleotide
  Target: LAMA2; (-) strand; PAM type: YTN; PAM sequence: CTT
tgatatctagtatgaatctt

SEQ ID NO: 256684 - DNA, 20 bp, Artificial Sequence
  Description of Artificial Sequence: Synthetic oligonucleotide
  Target: LAMA2; (-) strand; PAM type: YTN; PAM sequence: TTC
tttgatatctagtatgaatc

SEQ ID NO: 256685 - DNA, 20 bp, Artificial Sequence
  Description of Artificial Sequence: Synthetic oligonucleotide
  Target: LAMA2; (-) strand; PAM type: YTN; PAM sequence: TTT
ctttgatatctagtatgaat

SEQ ID NO: 256686 - DNA, 20 bp, Artificial Sequence
  Description of Artificial Sequence: Synthetic oligonucleotide
  Target: LAMA2; (-) strand; PAM type: YTN; PAM sequence: TTA
agatacaaaaaggaatttct

SEQ ID NO: 256687 - DNA, 20 bp, Artificial Sequence
  Description of Artificial Sequence: Synthetic oligonucleotide
  Target: LAMA2; (-) strand; PAM type: YTN; PAM sequence: TTT
aagatacaaaaaggaatttc

SEQ ID NO: 256688 - DNA, 20 bp, Artificial Sequence
  Description of Artificial Sequence: Synthetic oligonucleotide
  Target: LAMA2; (-) strand; PAM type: YTN; PAM sequence: CTG
aaatttaagatacaaaaagg

SEQ ID NO: 256689 - DNA, 20 bp, Artificial Sequence
  Description of Artificial Sequence: Synthetic oligonucleotide
  Target: LAMA2; (-) strand; PAM type: YTN; PAM sequence: TTG
gaactgaaatttaagataca

SEQ ID NO: 256690 - DNA, 20 bp, Artificial Sequence
  Description of Artificial Sequence: Synthetic oligonucleotide
  Target: LAMA2; (-) strand; PAM type: YTN; PAM sequence: TTT
ggaactgaaatttaagatac

SEQ ID NO: 256691 - DNA, 20 bp, Artificial Sequence
  Description of Artificial Sequence: Synthetic oligonucleotide
  Target: LAMA2; (-) strand; PAM type: YTN; PAM sequence: TTT
tggaactgaaatttaagata

SEQ ID NO: 256692 - DNA, 20 bp, Artificial Sequence
  Description of Artificial Sequence: Synthetic oligonucleotide
  Target: LAMA2; (-) strand; PAM type: YTN; PAM sequence: CTA
aatgggattttggaactgaa

SEQ ID NO: 256693 - DNA, 20 bp, Artificial Sequence
  Description of Artificial Sequence: Synthetic oligonucleotide
  Target: LAMA2; (-) strand; PAM type: YTN; PAM sequence: CTG
aagcagacaaaatctaaatg

SEQ ID NO: 256694 - DNA, 20 bp, Artificial Sequence
  Description of Artificial Sequence: Synthetic oligonucleotide
  Target: LAMA2; (-) strand; PAM type: YTN; PAM sequence: TTC
tgaagcagacaaaatctaaa

SEQ ID NO: 256695 - DNA, 20 bp, Artificial Sequence
  Description of Artificial Sequence: Synthetic oligonucleotide
  Target: LAMA2; (-) strand; PAM type: YTN; PAM sequence: TTC
agacattctgaagcagacaa

SEQ ID NO: 256696 - DNA, 20 bp, Artificial Sequence
  Description of Artificial Sequence: Synthetic oligonucleotide
  Target: LAMA2; (-) strand; PAM type: YTN; PAM sequence: TTC
gaattcagacattctgaagc

SEQ ID NO: 256697 - DNA, 20 bp, Artificial Sequence
  Description of Artificial Sequence: Synthetic oligonucleotide
  Target: LAMA2; (-) strand; PAM type: YTN; PAM sequence: TTG
attcgaattcagacattctg

SEQ ID NO: 256698 - DNA, 20 bp, Artificial Sequence
  Description of Artificial Sequence: Synthetic oligonucleotide
  Target: LAMA2; (-) strand; PAM type: YTN; PAM sequence: CTT
gattcgaattcagacattct

SEQ ID NO: 256699 - DNA, 20 bp, Artificial Sequence
  Description of Artificial Sequence: Synthetic oligonucleotide
  Target: LAMA2; (-) strand; PAM type: YTN; PAM sequence: TTA
gacttgattcgaattcagac

SEQ ID NO: 256700 - DNA, 20 bp, Artificial Sequence
  Description of Artificial Sequence: Synthetic oligonucleotide
  Target: LAMA2; (-) strand; PAM type: YTN; PAM sequence: CTC
acaagtgaatagaaggtccc

SEQ ID NO: 256701 - DNA, 20 bp, Artificial Sequence
  Description of Artificial Sequence: Synthetic oligonucleotide
  Target: LAMA2; (-) strand; PAM type: YTN; PAM sequence: TTC
aggacccaaaggcacaagga

SEQ ID NO: 256702 - DNA, 20 bp, Artificial Sequence
  Description of Artificial Sequence: Synthetic oligonucleotide
  Target: LAMA2; (-) strand; PAM type: YTN; PAM sequence: CTG
cattcaggacccaaaggcac

SEQ ID NO: 256703 - DNA, 20 bp, Artificial Sequence
  Description of Artificial Sequence: Synthetic oligonucleotide
  Target: LAMA2; (-) strand; PAM type: YTN; PAM sequence: CTC
tgcattcaggacccaaaggc

SEQ ID NO: 256704 - DNA, 20 bp, Artificial Sequence
  Description of Artificial Sequence: Synthetic oligonucleotide
  Target: LAMA2; (-) strand; PAM type: YTN; PAM sequence: CTG
tagcccatgctctgcattca

SEQ ID NO: 256705 - DNA, 20 bp, Artificial Sequence
  Description of Artificial Sequence: Synthetic oligonucleotide
  Target: LAMA2; (-) strand; PAM type: YTN; PAM sequence: TTC
tgtagcccatgctctgcatt

SEQ ID NO: 256706 - DNA, 20 bp, Artificial Sequence
  Description of Artificial Sequence: Synthetic oligonucleotide
  Target: LAMA2; (-) strand; PAM type: YTN; PAM sequence: TTT
ctgtagcccatgctctgcat

SEQ ID NO: 256707 - DNA, 20 bp, Artificial Sequence
  Description of Artificial Sequence: Synthetic oligonucleotide
  Target: LAMA2; (-) strand; PAM type: YTN; PAM sequence: TTA
tttctgtagcccatgctctg

SEQ ID NO: 256708 - DNA, 20 bp, Artificial Sequence
  Description of Artificial Sequence: Synthetic oligonucleotide
  Target: LAMA2; (-) strand; PAM type: YTN; PAM sequence: CTG
ttatttctgtagcccatgct

SEQ ID NO: 256709 - DNA, 20 bp, Artificial Sequence
  Description of Artificial Sequence: Synthetic oligonucleotide
  Target: LAMA2; (-) strand; PAM type: YTN; PAM sequence: CTC
tgttatttctgtagcccatg

SEQ ID NO: 256710 - DNA, 20 bp, Artificial Sequence
  Description of Artificial Sequence: Synthetic oligonucleotide
  Target: LAMA2; (-) strand; PAM type: YTN; PAM sequence: CTC
ctctgttatttctgtagccc

SEQ ID NO: 256711 - DNA, 20 bp, Artificial Sequence
  Description of Artificial Sequence: Synthetic oligonucleotide
  Target: LAMA2; (-) strand; PAM type: YTN; PAM sequence: CTG
cccctcctctgttatttctg

SEQ ID NO: 256712 - DNA, 20 bp, Artificial Sequence
  Description of Artificial Sequence: Synthetic oligonucleotide
  Target: LAMA2; (-) strand; PAM type: YTN; PAM sequence: CTA
caggtaggtataactgcccc

SEQ ID NO: 256713 - DNA, 20 bp, Artificial Sequence
  Description of Artificial Sequence: Synthetic oligonucleotide
  Target: LAMA2; (-) strand; PAM type: YTN; PAM sequence: CTA
acagtactacaggtaggtat

SEQ ID NO: 256714 - DNA, 20 bp, Artificial Sequence
  Description of Artificial Sequence: Synthetic oligonucleotide
  Target: LAMA2; (-) strand; PAM type: YTN; PAM sequence: TTG
ctaacagtactacaggtagg

SEQ ID NO: 256715 - DNA, 20 bp, Artificial Sequence
  Description of Artificial Sequence: Synthetic oligonucleotide
  Target: LAMA2; (-) strand; PAM type: YTN; PAM sequence: TTT
gctaacagtactacaggtag

SEQ ID NO: 256716 - DNA, 20 bp, Artificial Sequence
  Description of Artificial Sequence: Synthetic oligonucleotide
  Target: LAMA2; (-) strand; PAM type: YTN; PAM sequence: TTT
tgctaacagtactacaggta

SEQ ID NO: 256717 - DNA, 20 bp, Artificial Sequence
  Description of Artificial Sequence: Synthetic oligonucleotide
  Target: LAMA2; (-) strand; PAM type: YTN; PAM sequence: CTG
gagtcacaattttgctaaca

SEQ ID NO: 256718 - DNA, 20 bp, Artificial Sequence
  Description of Artificial Sequence: Synthetic oligonucleotide
  Target: LAMA2; (-) strand; PAM type: YTN; PAM sequence: CTC
aactggagtcacaattttgc

SEQ ID NO: 256719 - DNA, 20 bp, Artificial Sequence
  Description of Artificial Sequence: Synthetic oligonucleotide
  Target: LAMA2; (-) strand; PAM type: YTN; PAM sequence: TTG
acacctcaactggagtcaca

SEQ ID NO: 256720 - DNA, 20 bp, Artificial Sequence
  Description of Artificial Sequence: Synthetic oligonucleotide
  Target: LAMA2; (-) strand; PAM type: YTN; PAM sequence: CTT
gacacctcaactggagtcac

SEQ ID NO: 256721 - DNA, 20 bp, Artificial Sequence
  Description of Artificial Sequence: Synthetic oligonucleotide
  Target: LAMA2; (-) strand; PAM type: YTN; PAM sequence: CTC
ttgacacctcaactggagtc

SEQ ID NO: 256722 - DNA, 20 bp, Artificial Sequence
  Description of Artificial Sequence: Synthetic oligonucleotide
  Target: LAMA2; (-) strand; PAM type: YTN; PAM sequence: CTG
cacaaccacatatgagtggc

SEQ ID NO: 256723 - DNA, 20 bp, Artificial Sequence
  Description of Artificial Sequence: Synthetic oligonucleotide
  Target: LAMA2; (-) strand; PAM type: YTN; PAM sequence: TTG
tgcagtgtacaaactgcaca

SEQ ID NO: 256724 - DNA, 20 bp, Artificial Sequence
  Description of Artificial Sequence: Synthetic oligonucleotide
  Target: LAMA2; (-) strand; PAM type: YTN; PAM sequence: TTT
gtgcagtgtacaaactgcac

SEQ ID NO: 256725 - DNA, 20 bp, Artificial Sequence
  Description of Artificial Sequence: Synthetic oligonucleotide
  Target: LAMA2; (-) strand; PAM type: YTN; PAM sequence: CTT
tgtgcagtgtacaaactgca

SEQ ID NO: 256726 - DNA, 20 bp, Artificial Sequence
  Description of Artificial Sequence: Synthetic oligonucleotide
  Target: LAMA2; (-) strand; PAM type: YTN; PAM sequence: CTG
agtgcctttgtgcagtgtac

SEQ ID NO: 256727 - DNA, 20 bp, Artificial Sequence
  Description of Artificial Sequence: Synthetic oligonucleotide
  Target: LAMA2; (-) strand; PAM type: YTN; PAM sequence: TTC
cctgagtgcctttgtgcagt

SEQ ID NO: 256728 - DNA, 20 bp, Artificial Sequence
  Description of Artificial Sequence: Synthetic oligonucleotide
  Target: LAMA2; (-) strand; PAM type: YTN; PAM sequence: CTT
ccctgagtgcctttgtgcag

SEQ ID NO: 256729 - DNA, 20 bp, Artificial Sequence
  Description of Artificial Sequence: Synthetic oligonucleotide
  Target: LAMA2; (-) strand; PAM type: YTN; PAM sequence: TTC
cccttccctgagtgcctttg

SEQ ID NO: 256730 - DNA, 20 bp, Artificial Sequence
  Description of Artificial Sequence: Synthetic oligonucleotide
  Target: LAMA2; (-) strand; PAM type: YTN; PAM sequence: CTT
ccccttccctgagtgccttt

SEQ ID NO: 256731 - DNA, 20 bp, Artificial Sequence
  Description of Artificial Sequence: Synthetic oligonucleotide
  Target: LAMA2; (-) strand; PAM type: YTN; PAM sequence: CTC
aatcttccccttccctgagt

SEQ ID NO: 256732 - DNA, 20 bp, Artificial Sequence
  Description of Artificial Sequence: Synthetic oligonucleotide
  Target: LAMA2; (-) strand; PAM type: YTN; PAM sequence: TTC
aagccctcaatcttcccctt

SEQ ID NO: 256733 - DNA, 20 bp, Artificial Sequence
  Description of Artificial Sequence: Synthetic oligonucleotide
  Target: LAMA2; (-) strand; PAM type: YTN; PAM sequence: CTG
gattcaagccctcaatcttc

SEQ ID NO: 256734 - DNA, 20 bp, Artificial Sequence
  Description of Artificial Sequence: Synthetic oligonucleotide
  Target: LAMA2; (-) strand; PAM type: YTN; PAM sequence: TTC
atggaaaagaagagggtaaa

SEQ ID NO: 256735 - DNA, 20 bp, Artificial Sequence
  Description of Artificial Sequence: Synthetic oligonucleotide
  Target: LAMA2; (-) strand; PAM type: YTN; PAM sequence: CTT
catggaaaagaagagggtaa

SEQ ID NO: 256736 - DNA, 20 bp, Artificial Sequence
  Description of Artificial Sequence: Synthetic oligonucleotide
  Target: LAMA2; (-) strand; PAM type: YTN; PAM sequence: CTA
gacacccagggacttcatgg

SEQ ID NO: 256737 - DNA, 20 bp, Artificial Sequence
  Description of Artificial Sequence: Synthetic oligonucleotide
  Target: LAMA2; (-) strand; PAM type: YTN; PAM sequence: CTA
gacatatgcagaaaaagtaa

SEQ ID NO: 256738 - DNA, 20 bp, Artificial Sequence
  Description of Artificial Sequence: Synthetic oligonucleotide
  Target: LAMA2; (-) strand; PAM type: YTN; PAM sequence: TTC
tagacatatgcagaaaaagt

SEQ ID NO: 256739 - DNA, 20 bp, Artificial Sequence
  Description of Artificial Sequence: Synthetic oligonucleotide
  Target: LAMA2; (-) strand; PAM type: YTN; PAM sequence: TTT
ctagacatatgcagaaaaag

SEQ ID NO: 256740 - DNA, 20 bp, Artificial Sequence
  Description of Artificial Sequence: Synthetic oligonucleotide
  Target: LAMA2; (-) strand; PAM type: YTN; PAM sequence: CTT
tctagacatatgcagaaaaa

SEQ ID NO: 256741 - DNA, 20 bp, Artificial Sequence
  Description of Artificial Sequence: Synthetic oligonucleotide
  Target: LAMA2; (-) strand; PAM type: YTN; PAM sequence: TTG
tcctttctagacatatgcag

SEQ ID NO: 256742 - DNA, 20 bp, Artificial Sequence
  Description of Artificial Sequence: Synthetic oligonucleotide
  Target: LAMA2; (-) strand; PAM type: YTN; PAM sequence: TTG
gaagaaattgtcctttctag

SEQ ID NO: 256743 - DNA, 20 bp, Artificial Sequence
  Description of Artificial Sequence: Synthetic oligonucleotide
  Target: LAMA2; (-) strand; PAM type: YTN; PAM sequence: TTA
caagttggaagaaattgtcc

SEQ ID NO: 256744 - DNA, 20 bp, Artificial Sequence
  Description of Artificial Sequence: Synthetic oligonucleotide
  Target: LAMA2; (-) strand; PAM type: YTN; PAM sequence: TTT
acaagttggaagaaattgtc

SEQ ID NO: 256745 - DNA, 20 bp, Artificial Sequence
  Description of Artificial Sequence: Synthetic oligonucleotide
  Target: LAMA2; (-) strand; PAM type: YTN; PAM sequence: TTT
tacaagttggaagaaattgt

SEQ ID NO: 256746 - DNA, 20 bp, Artificial Sequence
  Description of Artificial Sequence: Synthetic oligonucleotide
  Target: LAMA2; (-) strand; PAM type: YTN; PAM sequence: CTT
ttacaagttggaagaaattg

SEQ ID NO: 256747 - DNA, 20 bp, Artificial Sequence
  Description of Artificial Sequence: Synthetic oligonucleotide
  Target: LAMA2; (-) strand; PAM type: YTN; PAM sequence: CTC
acatggtgccttttacaagt

SEQ ID NO: 256748 - DNA, 20 bp, Artificial Sequence
  Description of Artificial Sequence: Synthetic oligonucleotide
  Target: LAMA2; (-) strand; PAM type: YTN; PAM sequence: CTG
ctcacatggtgccttttaca

SEQ ID NO: 256749 - DNA, 20 bp, Artificial Sequence
  Description of Artificial Sequence: Synthetic oligonucleotide
  Target: LAMA2; (-) strand; PAM type: YTN; PAM sequence: TTC
cctgctcacatggtgccttt

SEQ ID NO: 256750 - DNA, 20 bp, Artificial Sequence
  Description of Artificial Sequence: Synthetic oligonucleotide
  Target: LAMA2; (-) strand; PAM type: YTN; PAM sequence: TTT
ccctgctcacatggtgcctt

SEQ ID NO: 256751 - DNA, 20 bp, Artificial Sequence
  Description of Artificial Sequence: Synthetic oligonucleotide
  Target: LAMA2; (-) strand; PAM type: YTN; PAM sequence: CTG
agggtgtttccctgctcaca

SEQ ID NO: 256752 - DNA, 20 bp, Artificial Sequence
  Description of Artificial Sequence: Synthetic oligonucleotide
  Target: LAMA2; (-) strand; PAM type: YTN; PAM sequence: TTG
acataatcagcaaaagactg

SEQ ID NO: 256753 - DNA, 20 bp, Artificial Sequence
  Description of Artificial Sequence: Synthetic oligonucleotide
  Target: LAMA2; (-) strand; PAM type: YTN; PAM sequence: TTT
gacataatcagcaaaagact

SEQ ID NO: 256754 - DNA, 20 bp, Artificial Sequence
  Description of Artificial Sequence: Synthetic oligonucleotide
  Target: LAMA2; (-) strand; PAM type: YTN; PAM sequence: CTC
ccatttgacataatcagcaa

SEQ ID NO: 256755 - DNA, 20 bp, Artificial Sequence
  Description of Artificial Sequence: Synthetic oligonucleotide
  Target: LAMA2; (-) strand; PAM type: YTN; PAM sequence: TTC
ctcccatttgacataatcag

SEQ ID NO: 256756 - DNA, 20 bp, Artificial Sequence
  Description of Artificial Sequence: Synthetic oligonucleotide
  Target: LAMA2; (-) strand; PAM type: YTN; PAM sequence: CTT
cctcccatttgacataatca

SEQ ID NO: 256757 - DNA, 20 bp, Artificial Sequence
  Description of Artificial Sequence: Synthetic oligonucleotide
  Target: LAMA2; (-) strand; PAM type: YTN; PAM sequence: TTA
cttcctcccatttgacataa

SEQ ID NO: 256758 - DNA, 20 bp, Artificial Sequence
  Description of Artificial Sequence: Synthetic oligonucleotide
  Target: LAMA2; (-) strand; PAM type: YTN; PAM sequence: CTT
acttcctcccatttgacata

SEQ ID NO: 256759 - DNA, 20 bp, Artificial Sequence
  Description of Artificial Sequence: Synthetic oligonucleotide
  Target: LAMA2; (-) strand; PAM type: YTN; PAM sequence: TTC
ttacttcctcccatttgaca

SEQ ID NO: 256760 - DNA, 20 bp, Artificial Sequence
  Description of Artificial Sequence: Synthetic oligonucleotide
  Target: LAMA2; (-) strand; PAM type: YTN; PAM sequence: CTG
tgttcttacttcctcccatt

SEQ ID NO: 256761 - DNA, 20 bp, Artificial Sequence
  Description of Artificial Sequence: Synthetic oligonucleotide
  Target: LAMA2; (-) strand; PAM type: YTN; PAM sequence: CTG
taatgctgtgttcttacttc

SEQ ID NO: 256762 - DNA, 20 bp, Artificial Sequence
  Description of Artificial Sequence: Synthetic oligonucleotide
  Target: LAMA2; (-) strand; PAM type: YTN; PAM sequence: CTG
tataaagaggcgtggctgta

SEQ ID NO: 256763 - DNA, 20 bp, Artificial Sequence
  Description of Artificial Sequence: Synthetic oligonucleotide
  Target: LAMA2; (-) strand; PAM type: YTN; PAM sequence: CTG
ctgtataaagaggcgtggct

SEQ ID NO: 256764 - DNA, 20 bp, Artificial Sequence
  Description of Artificial Sequence: Synthetic oligonucleotide
  Target: LAMA2; (-) strand; PAM type: YTN; PAM sequence: TTG
gcaaaggcacagaagagggt

SEQ ID NO: 256765 - DNA, 20 bp, Artificial Sequence
  Description of Artificial Sequence: Synthetic oligonucleotide
  Target: LAMA2; (-) strand; PAM type: YTN; PAM sequence: TTC
caggcagagggaacagtatt

SEQ ID NO: 256766 - DNA, 20 bp, Artificial Sequence
  Description of Artificial Sequence: Synthetic oligonucleotide
  Target: LAMA2; (-) strand; PAM type: YTN; PAM sequence: CTT
ccaggcagagggaacagtat

SEQ ID NO: 256767 - DNA, 20 bp, Artificial Sequence
  Description of Artificial Sequence: Synthetic oligonucleotide
  Target: LAMA2; (-) strand; PAM type: YTN; PAM sequence: CTG
caatcttccaggcagaggga

SEQ ID NO: 256768 - DNA, 20 bp, Artificial Sequence
  Description of Artificial Sequence: Synthetic oligonucleotide
  Target: LAMA2; (-) strand; PAM type: YTN; PAM sequence: CTC
ggatggaggagtgaaagggc

SEQ ID NO: 256769 - DNA, 20 bp, Artificial Sequence
  Description of Artificial Sequence: Synthetic oligonucleotide
  Target: LAMA2; (-) strand; PAM type: YTN; PAM sequence: TTA
gtctcggatggaggagtgaa

SEQ ID NO: 256770 - DNA, 20 bp, Artificial Sequence
  Description of Artificial Sequence: Synthetic oligonucleotide
  Target: LAMA2; (-) strand; PAM type: YTN; PAM sequence: TTA
gttagtctcggatggaggag

SEQ ID NO: 256771 - DNA, 20 bp, Artificial Sequence
  Description of Artificial Sequence: Synthetic oligonucleotide
  Target: LAMA2; (-) strand; PAM type: YTN; PAM sequence: CTG
aacagggattagttagtctc

SEQ ID NO: 256772 - DNA, 20 bp, Artificial Sequence
  Description of Artificial Sequence: Synthetic oligonucleotide
  Target: LAMA2; (-) strand; PAM type: YTN; PAM sequence: TTG
ggagctgaacagggattagt

SEQ ID NO: 256773 - DNA, 20 bp, Artificial Sequence
  Description of Artificial Sequence: Synthetic oligonucleotide
  Target: LAMA2; (-) strand; PAM type: YTN; PAM sequence: TTT
gggagctgaacagggattag

SEQ ID NO: 256774 - DNA, 20 bp, Artificial Sequence
  Description of Artificial Sequence: Synthetic oligonucleotide
  Target: LAMA2; (-) strand; PAM type: YTN; PAM sequence: TTT
tgggagctgaacagggatta

SEQ ID NO: 256775 - DNA, 20 bp, Artificial Sequence
  Description of Artificial Sequence: Synthetic oligonucleotide
  Target: LAMA2; (-) strand; PAM type: YTN; PAM sequence: CTT
ttgggagctgaacagggatt

SEQ ID NO: 256776 - DNA, 20 bp, Artificial Sequence
  Description of Artificial Sequence: Synthetic oligonucleotide
  Target: LAMA2; (-) strand; PAM type: YTN; PAM sequence: CTG
acttttgggagctgaacagg

SEQ ID NO: 256777 - DNA, 20 bp, Artificial Sequence
  Description of Artificial Sequence: Synthetic oligonucleotide
  Target: LAMA2; (-) strand; PAM type: YTN; PAM sequence: TTC
aggatgatagtgctgacttt

SEQ ID NO: 256778 - DNA, 20 bp, Artificial Sequence
  Description of Artificial Sequence: Synthetic oligonucleotide
  Target: LAMA2; (-) strand; PAM type: YTN; PAM sequence: TTT
caggatgatagtgctgactt

SEQ ID NO: 256779 - DNA, 20 bp, Artificial Sequence
  Description of Artificial Sequence: Synthetic oligonucleotide
  Target: LAMA2; (-) strand; PAM type: YTN; PAM sequence: TTT
tcaggatgatagtgctgact

SEQ ID NO: 256780 - DNA, 20 bp, Artificial Sequence
  Description of Artificial Sequence: Synthetic oligonucleotide
  Target: LAMA2; (-) strand; PAM type: YTN; PAM sequence: TTA
ggcccaatcaaggacatttt

SEQ ID NO: 256781 - DNA, 20 bp, Artificial Sequence
  Description of Artificial Sequence: Synthetic oligonucleotide
  Target: LAMA2; (-) strand; PAM type: YTN; PAM sequence: CTC
agattaggcccaatcaagga

SEQ ID NO: 256782 - DNA, 20 bp, Artificial Sequence
  Description of Artificial Sequence: Synthetic oligonucleotide
  Target: LAMA2; (-) strand; PAM type: YTN; PAM sequence: TTA
tggcagcacacaaaagggca

SEQ ID NO: 256783 - DNA, 20 bp, Artificial Sequence
  Description of Artificial Sequence: Synthetic oligonucleotide
  Target: LAMA2; (-) strand; PAM type: YTN; PAM sequence: CTA
ttatggcagcacacaaaagg

SEQ ID NO: 256784 - DNA, 20 bp, Artificial Sequence
  Description of Artificial Sequence: Synthetic oligonucleotide
  Target: LAMA2; (-) strand; PAM type: YTN; PAM sequence: CTG
gagatatgcaaatgctatta

SEQ ID NO: 256785 - DNA, 20 bp, Artificial Sequence
  Description of Artificial Sequence: Synthetic oligonucleotide
  Target: LAMA2; (-) strand; PAM type: YTN; PAM sequence: TTA
aaacgtagcagtagaacaac

SEQ ID NO: 256786 - DNA, 20 bp, Artificial Sequence
  Description of Artificial Sequence: Synthetic oligonucleotide
  Target: LAMA2; (-) strand; PAM type: YTN; PAM sequence: TTT
aaaacgtagcagtagaacaa

SEQ ID NO: 256787 - DNA, 20 bp, Artificial Sequence
  Description of Artificial Sequence: Synthetic oligonucleotide
  Target: LAMA2; (-) strand; PAM type: YTN; PAM sequence: TTT
taaaacgtagcagtagaaca

SEQ ID NO: 256788 - DNA, 20 bp, Artificial Sequence
  Description of Artificial Sequence: Synthetic oligonucleotide
  Target: LAMA2; (-) strand; PAM type: YTN; PAM sequence: CTA
cagtccatggagaatgaaca

SEQ ID NO: 256789 - DNA, 20 bp, Artificial Sequence
  Description of Artificial Sequence: Synthetic oligonucleotide
  Target: LAMA2; (-) strand; PAM type: YTN; PAM sequence: TTC
acactacagtccatggagaa

SEQ ID NO: 256790 - DNA, 20 bp, Artificial Sequence
  Description of Artificial Sequence: Synthetic oligonucleotide
  Target: LAMA2; (-) strand; PAM type: YTN; PAM sequence: CTT
cacactacagtccatggaga

SEQ ID NO: 256791 - DNA, 20 bp, Artificial Sequence
  Description of Artificial Sequence: Synthetic oligonucleotide
  Target: LAMA2; (-) strand; PAM type: YTN; PAM sequence: CTA
atacaaataaggtacagtct

SEQ ID NO: 256792 - DNA, 20 bp, Artificial Sequence
  Description of Artificial Sequence: Synthetic oligonucleotide
  Target: LAMA2; (-) strand; PAM type: YTN; PAM sequence: TTA
cacggtactaatacaaataa

SEQ ID NO: 256793 - DNA, 20 bp, Artificial Sequence
  Description of Artificial Sequence: Synthetic oligonucleotide
  Target: LAMA2; (-) strand; PAM type: YTN; PAM sequence: TTT
acacggtactaatacaaata

SEQ ID NO: 256794 - DNA, 20 bp, Artificial Sequence
  Description of Artificial Sequence: Synthetic oligonucleotide
  Target: LAMA2; (-) strand; PAM type: YTN; PAM sequence: TTT
tacacggtactaatacaaat

SEQ ID NO: 256795 - DNA, 20 bp, Artificial Sequence
  Description of Artificial Sequence: Synthetic oligonucleotide
  Target: LAMA2; (-) strand; PAM type: YTN; PAM sequence: CTT
ttacacggtactaatacaaa

SEQ ID NO: 256796 - DNA, 20 bp, Artificial Sequence
  Description of Artificial Sequence: Synthetic oligonucleotide
  Target: LAMA2; (-) strand; PAM type: YTN; PAM sequence: CTG
agcacttttacacggtacta

SEQ ID NO: 256797 - DNA, 20 bp, Artificial Sequence
  Description of Artificial Sequence: Synthetic oligonucleotide
  Target: LAMA2; (-) strand; PAM type: YTN; PAM sequence: TTA
aaaaaaatcagctgagcact

SEQ ID NO: 256798 - DNA, 20 bp, Artificial Sequence
  Description of Artificial Sequence: Synthetic oligonucleotide
  Target: LAMA2; (-) strand; PAM type: YTN; PAM sequence: CTC
ccaacccattaaaaaaaatc

SEQ ID NO: 256799 - DNA, 20 bp, Artificial Sequence
  Description of Artificial Sequence: Synthetic oligonucleotide
  Target: LAMA2; (-) strand; PAM type: YTN; PAM sequence: TTC
tcccaacccattaaaaaaaa

SEQ ID NO: 256800 - DNA, 20 bp, Artificial Sequence
  Description of Artificial Sequence: Synthetic oligonucleotide
  Target: LAMA2; (-) strand; PAM type: YTN; PAM sequence: TTT
ctcccaacccattaaaaaaa

SEQ ID NO: 256801 - DNA, 20 bp, Artificial Sequence
  Description of Artificial Sequence: Synthetic oligonucleotide
  Target: LAMA2; (-) strand; PAM type: YTN; PAM sequence: CTG
gtttctcccaacccattaaa

SEQ ID NO: 256802 - DNA, 20 bp, Artificial Sequence
  Description of Artificial Sequence: Synthetic oligonucleotide
  Target: LAMA2; (-) strand; PAM type: YTN; PAM sequence: CTC
tggtttctcccaacccatta

SEQ ID NO: 256803 - DNA, 20 bp, Artificial Sequence
  Description of Artificial Sequence: Synthetic oligonucleotide
  Target: LAMA2; (-) strand; PAM type: YTN; PAM sequence: TTA
gaaaagctctggtttctccc

SEQ ID NO: 256804 - DNA, 20 bp, Artificial Sequence
  Description of Artificial Sequence: Synthetic oligonucleotide
  Target: LAMA2; (-) strand; PAM type: YTN; PAM sequence: CTA
gccaagcaaattagaaaagc

SEQ ID NO: 256805 - DNA, 20 bp, Artificial Sequence
  Description of Artificial Sequence: Synthetic oligonucleotide
  Target: LAMA2; (-) strand; PAM type: YTN; PAM sequence: TTA
atctagccaagcaaattaga

SEQ ID NO: 256806 - DNA, 20 bp, Artificial Sequence
  Description of Artificial Sequence: Synthetic oligonucleotide
  Target: LAMA2; (-) strand; PAM type: YTN; PAM sequence: CTT
aatctagccaagcaaattag

SEQ ID NO: 256807 - DNA, 20 bp, Artificial Sequence
  Description of Artificial Sequence: Synthetic oligonucleotide
  Target: LAMA2; (-) strand; PAM type: YTN; PAM sequence: CTG
gcttaatctagccaagcaaa

SEQ ID NO: 256808 - DNA, 20 bp, Artificial Sequence
  Description of Artificial Sequence: Synthetic oligonucleotide
  Target: LAMA2; (-) strand; PAM type: YTN; PAM sequence: CTG
aaaacaatgaaacaatataa

SEQ ID NO: 256809 - DNA, 20 bp, Artificial Sequence
  Description of Artificial Sequence: Synthetic oligonucleotide
  Target: LAMA2; (-) strand; PAM type: YTN; PAM sequence: CTA
tacactgaaaacaatgaaac

SEQ ID NO: 256810 - DNA, 20 bp, Artificial Sequence
  Description of Artificial Sequence: Synthetic oligonucleotide
  Target: LAMA2; (-) strand; PAM type: YTN; PAM sequence: TTA
tctatacactgaaaacaatg

SEQ ID NO: 256811 - DNA, 20 bp, Artificial Sequence
  Description of Artificial Sequence: Synthetic oligonucleotide
  Target: LAMA2; (-) strand; PAM type: YTN; PAM sequence: CTA
ttatctatacactgaaaaca

SEQ ID NO: 256812 - DNA, 20 bp, Artificial Sequence
  Description of Artificial Sequence: Synthetic oligonucleotide
  Target: LAMA2; (-) strand; PAM type: YTN; PAM sequence: TTC
tattatctatacactgaaaa

SEQ ID NO: 256813 - DNA, 20 bp, Artificial Sequence
  Description of Artificial Sequence: Synthetic oligonucleotide
  Target: LAMA2; (-) strand; PAM type: YTN; PAM sequence: TTT
ctattatctatacactgaaa

SEQ ID NO: 256814 - DNA, 20 bp, Artificial Sequence
  Description of Artificial Sequence: Synthetic oligonucleotide
  Target: LAMA2; (-) strand; PAM type: YTN; PAM sequence: CTA
catttctattatctatacac

SEQ ID NO: 256815 - DNA, 20 bp, Artificial Sequence
  Description of Artificial Sequence: Synthetic oligonucleotide
  Target: LAMA2; (-) strand; PAM type: YTN; PAM sequence: CTA
aaatcacggcctacatttct

SEQ ID NO: 256816 - DNA, 20 bp, Artificial Sequence
  Description of Artificial Sequence: Synthetic oligonucleotide
  Target: LAMA2; (-) strand; PAM type: YTN; PAM sequence: TTG
gctaaaatcacggcctacat

SEQ ID NO: 256817 - DNA, 20 bp, Artificial Sequence
  Description of Artificial Sequence: Synthetic oligonucleotide
  Target: LAMA2; (-) strand; PAM type: YTN; PAM sequence: TTT
ggctaaaatcacggcctaca

SEQ ID NO: 256818 - DNA, 20 bp, Artificial Sequence
  Description of Artificial Sequence: Synthetic oligonucleotide
  Target: LAMA2; (-) strand; PAM type: YTN; PAM sequence: TTT
tggctaaaatcacggcctac

SEQ ID NO: 256819 - DNA, 20 bp, Artificial Sequence
  Description of Artificial Sequence: Synthetic oligonucleotide
  Target: LAMA2; (-) strand; PAM type: YTN; PAM sequence: CTT
ttggctaaaatcacggccta

SEQ ID NO: 256820 - DNA, 20 bp, Artificial Sequence
  Description of Artificial Sequence: Synthetic oligonucleotide
  Target: LAMA2; (-) strand; PAM type: YTN; PAM sequence: TTC
agcaacttttggctaaaatc

SEQ ID NO: 256821 - DNA, 20 bp, Artificial Sequence
  Description of Artificial Sequence: Synthetic oligonucleotide
  Target: LAMA2; (-) strand; PAM type: YTN; PAM sequence: TTT
cagcaacttttggctaaaat

SEQ ID NO: 256822 - DNA, 20 bp, Artificial Sequence
  Description of Artificial Sequence: Synthetic oligonucleotide
  Target: LAMA2; (-) strand; PAM type: YTN; PAM sequence: TTT
tcagcaacttttggctaaaa

SEQ ID NO: 256823 - DNA, 20 bp, Artificial Sequence
  Description of Artificial Sequence: Synthetic oligonucleotide
  Target: LAMA2; (-) strand; PAM type: YTN; PAM sequence: TTT
ttcagcaacttttggctaaa

SEQ ID NO: 256824 - DNA, 20 bp, Artificial Sequence
  Description of Artificial Sequence: Synthetic oligonucleotide
  Target: LAMA2; (-) strand; PAM type: YTN; PAM sequence: TTT
tttcagcaacttttggctaa

SEQ ID NO: 256825 - DNA, 20 bp, Artificial Sequence
  Description of Artificial Sequence: Synthetic oligonucleotide
  Target: LAMA2; (-) strand; PAM type: YTN; PAM sequence: CTG
ccccatcattttttcagcaa

SEQ ID NO: 256826 - DNA, 20 bp, Artificial Sequence
  Description of Artificial Sequence: Synthetic oligonucleotide
  Target: LAMA2; (-) strand; PAM type: YTN; PAM sequence: TTC
tgccccatcattttttcagc

SEQ ID NO: 256827 - DNA, 20 bp, Artificial Sequence
  Description of Artificial Sequence: Synthetic oligonucleotide
  Target: LAMA2; (-) strand; PAM type: YTN; PAM sequence: CTC
attctgccccatcatttttt

SEQ ID NO: 256828 - DNA, 20 bp, Artificial Sequence
  Description of Artificial Sequence: Synthetic oligonucleotide
  Target: LAMA2; (-) strand; PAM type: YTN; PAM sequence: TTG
tctcattctgccccatcatt

SEQ ID NO: 256829 - DNA, 20 bp, Artificial Sequence
  Description of Artificial Sequence: Synthetic oligonucleotide
  Target: LAMA2; (-) strand; PAM type: YTN; PAM sequence: TTT
gtctcattctgccccatcat

SEQ ID NO: 256830 - DNA, 20 bp, Artificial Sequence
  Description of Artificial Sequence: Synthetic oligonucleotide
  Target: LAMA2; (-) strand; PAM type: YTN; PAM sequence: TTT
tgtctcattctgccccatca

SEQ ID NO: 256831 - DNA, 20 bp, Artificial Sequence
  Description of Artificial Sequence: Synthetic oligonucleotide
  Target: LAMA2; (-) strand; PAM type: YTN; PAM sequence: CTT
ttgtctcattctgccccatc

SEQ ID NO: 256832 - DNA, 20 bp, Artificial Sequence
  Description of Artificial Sequence: Synthetic oligonucleotide
  Target: LAMA2; (-) strand; PAM type: YTN; PAM sequence: CTG
atgagacttttgtctcattc

SEQ ID NO: 256833 - DNA, 20 bp, Artificial Sequence
  Description of Artificial Sequence: Synthetic oligonucleotide
  Target: LAMA2; (-) strand; PAM type: YTN; PAM sequence: TTA
gagggagggagggagagagg

SEQ ID NO: 256834 - DNA, 20 bp, Artificial Sequence
  Description of Artificial Sequence: Synthetic oligonucleotide
  Target: LAMA2; (-) strand; PAM type: YTN; PAM sequence: TTA
ggaacaatgttagagggagg

SEQ ID NO: 256835 - DNA, 20 bp, Artificial Sequence
  Description of Artificial Sequence: Synthetic oligonucleotide
  Target: LAMA2; (-) strand; PAM type: YTN; PAM sequence: TTT
aggaacaatgttagagggag

SEQ ID NO: 256836 - DNA, 20 bp, Artificial Sequence
  Description of Artificial Sequence: Synthetic oligonucleotide
  Target: LAMA2; (-) strand; PAM type: YTN; PAM sequence: TTG
ataatttaggaacaatgtta

SEQ ID NO: 256837 - DNA, 20 bp, Artificial Sequence
  Description of Artificial Sequence: Synthetic oligonucleotide
  Target: LAMA2; (-) strand; PAM type: YTN; PAM sequence: CTA
ttgataatttaggaacaatg

SEQ ID NO: 256838 - DNA, 20 bp, Artificial Sequence
  Description of Artificial Sequence: Synthetic oligonucleotide
  Target: LAMA2; (-) strand; PAM type: YTN; PAM sequence: CTG
ctattgataatttaggaaca

SEQ ID NO: 256839 - DNA, 20 bp, Artificial Sequence
  Description of Artificial Sequence: Synthetic oligonucleotide
  Target: LAMA2; (-) strand; PAM type: YTN; PAM sequence: TTG
ctgctattgataatttagga

SEQ ID NO: 256840 - DNA, 20 bp, Artificial Sequence
  Description of Artificial Sequence: Synthetic oligonucleotide
  Target: LAMA2; (-) strand; PAM type: YTN; PAM sequence: CTT
gctgctattgataatttagg

SEQ ID NO: 256841 - DNA, 20 bp, Artificial Sequence
  Description of Artificial Sequence: Synthetic oligonucleotide
  Target: LAMA2; (-) strand; PAM type: YTN; PAM sequence: TTA
cacttgctgctattgataat

SEQ ID NO: 256842 - DNA, 20 bp, Artificial Sequence
  Description of Artificial Sequence: Synthetic oligonucleotide
  Target: LAMA2; (-) strand; PAM type: YTN; PAM sequence: TTG
ttacacttgctgctattgat

SEQ ID NO: 256843 - DNA, 20 bp, Artificial Sequence
  Description of Artificial Sequence: Synthetic oligonucleotide
  Target: LAMA2; (-) strand; PAM type: YTN; PAM sequence: TTT
gttacacttgctgctattga

SEQ ID NO: 256844 - DNA, 20 bp, Artificial Sequence
  Description of Artificial Sequence: Synthetic oligonucleotide
  Target: LAMA2; (-) strand; PAM type: YTN; PAM sequence: TTA
tttgttacacttgctgctat

SEQ ID NO: 256845 - DNA, 20 bp, Artificial Sequence
  Description of Artificial Sequence: Synthetic oligonucleotide
  Target: LAMA2; (-) strand; PAM type: YTN; PAM sequence: CTC
cagataacacatgcagttat

SEQ ID NO: 256846 - DNA, 20 bp, Artificial Sequence
  Description of Artificial Sequence: Synthetic oligonucleotide
  Target: LAMA2; (-) strand; PAM type: YTN; PAM sequence: TTA
aatgtaaataagactccaga

SEQ ID NO: 256847 - DNA, 20 bp, Artificial Sequence
  Description of Artificial Sequence: Synthetic oligonucleotide
  Target: LAMA2; (-) strand; PAM type: YTN; PAM sequence: TTT
aaatgtaaataagactccag

SEQ ID NO: 256848 - DNA, 20 bp, Artificial Sequence
  Description of Artificial Sequence: Synthetic oligonucleotide
  Target: LAMA2; (-) strand; PAM type: YTN; PAM sequence: TTG
aaaaagggccgtttaaatgt

SEQ ID NO: 256849 - DNA, 20 bp, Artificial Sequence
  Description of Artificial Sequence: Synthetic oligonucleotide
  Target: LAMA2; (-) strand; PAM type: YTN; PAM sequence: TTT
gaaaaagggccgtttaaatg

SEQ ID NO: 256850 - DNA, 20 bp, Artificial Sequence
  Description of Artificial Sequence: Synthetic oligonucleotide
  Target: LAMA2; (-) strand; PAM type: YTN; PAM sequence: TTT
tgaaaaagggccgtttaaat

SEQ ID NO: 256851 - DNA, 20 bp, Artificial Sequence
  Description of Artificial Sequence: Synthetic oligonucleotide
  Target: LAMA2; (-) strand; PAM type: YTN; PAM sequence: TTG
caatattttgaaaaagggcc

SEQ ID NO: 256852 - DNA, 20 bp, Artificial Sequence
  Description of Artificial Sequence: Synthetic oligonucleotide
  Target: LAMA2; (-) strand; PAM type: YTN; PAM sequence: TTC
aaatcaaattgcaatatttt

SEQ ID NO: 256853 - DNA, 20 bp, Artificial Sequence
  Description of Artificial Sequence: Synthetic oligonucleotide
  Target: LAMA2; (-) strand; PAM type: YTN; PAM sequence: TTT
caaatcaaattgcaatattt

SEQ ID NO: 256854 - DNA, 20 bp, Artificial Sequence
  Description of Artificial Sequence: Synthetic oligonucleotide
  Target: LAMA2; (-) strand; PAM type: YTN; PAM sequence: TTT
tcaaatcaaattgcaatatt

SEQ ID NO: 256855 - DNA, 20 bp, Artificial Sequence
  Description of Artificial Sequence: Synthetic oligonucleotide
  Target: LAMA2; (-) strand; PAM type: YTN; PAM sequence: TTT
ttcaaatcaaattgcaatat

SEQ ID NO: 256856 - DNA, 20 bp, Artificial Sequence
  Description of Artificial Sequence: Synthetic oligonucleotide
  Target: LAMA2; (-) strand; PAM type: YTN; PAM sequence: CTT
tttcaaatcaaattgcaata

SEQ ID NO: 256857 - DNA, 20 bp, Artificial Sequence
  Description of Artificial Sequence: Synthetic oligonucleotide
  Target: LAMA2; (-) strand; PAM type: YTN; PAM sequence: TTA
actttttcaaatcaaattgc

SEQ ID NO: 256858 - DNA, 20 bp, Artificial Sequence
  Description of Artificial Sequence: Synthetic oligonucleotide
  Target: LAMA2; (-) strand; PAM type: YTN; PAM sequence: CTG
ttaactttttcaaatcaaat

SEQ ID NO: 256859 - DNA, 20 bp, Artificial Sequence
  Description of Artificial Sequence: Synthetic oligonucleotide
  Target: LAMA2; (-) strand; PAM type: YTN; PAM sequence: TTC
cacatctgttaactttttca

SEQ ID NO: 256860 - DNA, 20 bp, Artificial Sequence
  Description of Artificial Sequence: Synthetic oligonucleotide
  Target: LAMA2; (-) strand; PAM type: YTN; PAM sequence: TTT
ccacatctgttaactttttc

SEQ ID NO: 256861 - DNA, 20 bp, Artificial Sequence
  Description of Artificial Sequence: Synthetic oligonucleotide
  Target: LAMA2; (-) strand; PAM type: YTN; PAM sequence: CTT
tccacatctgttaacttttt

SEQ ID NO: 256862 - DNA, 20 bp, Artificial Sequence
  Description of Artificial Sequence: Synthetic oligonucleotide
  Target: LAMA2; (-) strand; PAM type: YTN; PAM sequence: TTC
ctttccacatctgttaactt

SEQ ID NO: 256863 - DNA, 20 bp, Artificial Sequence
  Description of Artificial Sequence: Synthetic oligonucleotide
  Target: LAMA2; (-) strand; PAM type: YTN; PAM sequence: TTG
ttcctttccacatctgttaa

SEQ ID NO: 256864 - DNA, 20 bp, Artificial Sequence
  Description of Artificial Sequence: Synthetic oligonucleotide
  Target: LAMA2; (-) strand; PAM type: YTN; PAM sequence: TTG
acataacaaaggcattgttc

SEQ ID NO: 256865 - DNA, 20 bp, Artificial Sequence
  Description of Artificial Sequence: Synthetic oligonucleotide
  Target: LAMA2; (-) strand; PAM type: YTN; PAM sequence: CTT
gacataacaaaggcattgtt

SEQ ID NO: 256866 - DNA, 20 bp, Artificial Sequence
  Description of Artificial Sequence: Synthetic oligonucleotide
  Target: LAMA2; (-) strand; PAM type: YTN; PAM sequence: CTA
gaaacggatatcttgacata

SEQ ID NO: 256867 - DNA, 20 bp, Artificial Sequence
  Description of Artificial Sequence: Synthetic oligonucleotide
  Target: LAMA2; (-) strand; PAM type: YTN; PAM sequence: TTG
ctagaaacggatatcttgac

SEQ ID NO: 256868 - DNA, 20 bp, Artificial Sequence
  Description of Artificial Sequence: Synthetic oligonucleotide
  Target: LAMA2; (-) strand; PAM type: YTN; PAM sequence: CTT
gctagaaacggatatcttga

SEQ ID NO: 256869 - DNA, 20 bp, Artificial Sequence
  Description of Artificial Sequence: Synthetic oligonucleotide
  Target: LAMA2; (-) strand; PAM type: YTN; PAM sequence: TTA
tcgaatgaatgccttgctag

SEQ ID NO: 256870 - DNA, 20 bp, Artificial Sequence
  Description of Artificial Sequence: Synthetic oligonucleotide
  Target: LAMA2; (-) strand; PAM type: YTN; PAM sequence: TTT
atcgaatgaatgccttgcta

SEQ ID NO: 256871 - DNA, 20 bp, Artificial Sequence
  Description of Artificial Sequence: Synthetic oligonucleotide
  Target: LAMA2; (-) strand; PAM type: YTN; PAM sequence: TTA
aaaatagtttatcgaatgaa

SEQ ID NO: 256872 - DNA, 20 bp, Artificial Sequence
  Description of Artificial Sequence: Synthetic oligonucleotide
  Target: LAMA2; (-) strand; PAM type: YTN; PAM sequence: TTT
aaaaatagtttatcgaatga

SEQ ID NO: 256873 - DNA, 20 bp, Artificial Sequence
  Description of Artificial Sequence: Synthetic oligonucleotide
  Target: LAMA2; (-) strand; PAM type: YTN; PAM sequence: TTT
taaaaatagtttatcgaatg

SEQ ID NO: 256874 - DNA, 20 bp, Artificial Sequence
  Description of Artificial Sequence: Synthetic oligonucleotide
  Target: LAMA2; (-) strand; PAM type: YTN; PAM sequence: TTT
ttaaaaatagtttatcgaat

SEQ ID NO: 256875 - DNA, 20 bp, Artificial Sequence
  Description of Artificial Sequence: Synthetic oligonucleotide
  Target: LAMA2; (-) strand; PAM type: YTN; PAM sequence: TTC
atatgcaaggcagaatgagt

SEQ ID NO: 256876 - DNA, 20 bp, Artificial Sequence
  Description of Artificial Sequence: Synthetic oligonucleotide
  Target: LAMA2; (-) strand; PAM type: YTN; PAM sequence: TTT
catatgcaaggcagaatgag

SEQ ID NO: 256877 - DNA, 20 bp, Artificial Sequence
  Description of Artificial Sequence: Synthetic oligonucleotide
  Target: LAMA2; (-) strand; PAM type: YTN; PAM sequence: TTT
tcatatgcaaggcagaatga

SEQ ID NO: 256878 - DNA, 20 bp, Artificial Sequence
  Description of Artificial Sequence: Synthetic oligonucleotide
  Target: LAMA2; (-) strand; PAM type: YTN; PAM sequence: CTC
attttcatatgcaaggcaga

SEQ ID NO: 256879 - DNA, 20 bp, Artificial Sequence
  Description of Artificial Sequence: Synthetic oligonucleotide
  Target: LAMA2; (-) strand; PAM type: YTN; PAM sequence: CTC
tcattttcatatgcaaggca

SEQ ID NO: 256880 - DNA, 20 bp, Artificial Sequence
  Description of Artificial Sequence: Synthetic oligonucleotide
  Target: LAMA2; (-) strand; PAM type: YTN; PAM sequence: TTG
taatgtgaaatgtcaagccc

SEQ ID NO: 256881 - DNA, 20 bp, Artificial Sequence
  Description of Artificial Sequence: Synthetic oligonucleotide
  Target: LAMA2; (-) strand; PAM type: YTN; PAM sequence: CTC
caccaaaaataattgtaatg

SEQ ID NO: 256882 - DNA, 20 bp, Artificial Sequence
  Description of Artificial Sequence: Synthetic oligonucleotide
  Target: LAMA2; (-) strand; PAM type: YTN; PAM sequence: TTC
actccaccaaaaataattgt

SEQ ID NO: 256883 - DNA, 20 bp, Artificial Sequence
  Description of Artificial Sequence: Synthetic oligonucleotide
  Target: LAMA2; (-) strand; PAM type: YTN; PAM sequence: TTT
cactccaccaaaaataattg

SEQ ID NO: 256884 - DNA, 20 bp, Artificial Sequence
  Description of Artificial Sequence: Synthetic oligonucleotide
  Target: LAMA2; (-) strand; PAM type: YTN; PAM sequence: TTT
tcactccaccaaaaataatt

SEQ ID NO: 256885 - DNA, 20 bp, Artificial Sequence
  Description of Artificial Sequence: Synthetic oligonucleotide
  Target: LAMA2; (-) strand; PAM type: YTN; PAM sequence: TTT
ttcactccaccaaaaataat

SEQ ID NO: 256886 - DNA, 20 bp, Artificial Sequence
  Description of Artificial Sequence: Synthetic oligonucleotide
  Target: LAMA2; (-) strand; PAM type: YTN; PAM sequence: TTG
gtttttcactccaccaaaaa

SEQ ID NO: 256887 - DNA, 20 bp, Artificial Sequence
  Description of Artificial Sequence: Synthetic oligonucleotide
  Target: LAMA2; (-) strand; PAM type: YTN; PAM sequence: TTT
ggtttttcactccaccaaaa

SEQ ID NO: 256888 - DNA, 20 bp, Artificial Sequence
  Description of Artificial Sequence: Synthetic oligonucleotide
  Target: LAMA2; (-) strand; PAM type: YTN; PAM sequence: CTT
tggtttttcactccaccaaa

SEQ ID NO: 256889 - DNA, 20 bp, Artificial Sequence
  Description of Artificial Sequence: Synthetic oligonucleotide
  Target: LAMA2; (-) strand; PAM type: YTN; PAM sequence: TTA
aatcacagtcctttggtttt

SEQ ID NO: 256890 - DNA, 20 bp, Artificial Sequence
  Description of Artificial Sequence: Synthetic oligonucleotide
  Target: LAMA2; (-) strand; PAM type: YTN; PAM sequence: TTT
aaatcacagtcctttggttt

SEQ ID NO: 256891 - DNA, 20 bp, Artificial Sequence
  Description of Artificial Sequence: Synthetic oligonucleotide
  Target: LAMA2; (-) strand; PAM type: YTN; PAM sequence: TTA
gtttaaatcacagtcctttg

SEQ ID NO: 256892 - DNA, 20 bp, Artificial Sequence
  Description of Artificial Sequence: Synthetic oligonucleotide
  Target: LAMA2; (-) strand; PAM type: YTN; PAM sequence: TTA
aaattagtttaaatcacagt

SEQ ID NO: 256893 - DNA, 20 bp, Artificial Sequence
  Description of Artificial Sequence: Synthetic oligonucleotide
  Target: LAMA2; (-) strand; PAM type: YTN; PAM sequence: CTA
attaaaattagtttaaatca

SEQ ID NO: 256894 - DNA, 20 bp, Artificial Sequence
  Description of Artificial Sequence: Synthetic oligonucleotide
  Target: LAMA2; (-) strand; PAM type: YTN; PAM sequence: TTC
acctaattaaaattagttta

SEQ ID NO: 256895 - DNA, 20 bp, Artificial Sequence
  Description of Artificial Sequence: Synthetic oligonucleotide
  Target: LAMA2; (-) strand; PAM type: YTN; PAM sequence: TTG
gattcacctaattaaaatta

SEQ ID NO: 256896 - DNA, 20 bp, Artificial Sequence
  Description of Artificial Sequence: Synthetic oligonucleotide
  Target: LAMA2; (-) strand; PAM type: YTN; PAM sequence: CTG
atcaagttggattcacctaa

SEQ ID NO: 256897 - DNA, 20 bp, Artificial Sequence
  Description of Artificial Sequence: Synthetic oligonucleotide
  Target: LAMA2; (-) strand; PAM type: YTN; PAM sequence: TTA
gagtctgatcaagttggatt

SEQ ID NO: 256898 - DNA, 20 bp, Artificial Sequence
  Description of Artificial Sequence: Synthetic oligonucleotide
  Target: LAMA2; (-) strand; PAM type: YTN; PAM sequence: TTA
ataaaaatagtgtgttagag

SEQ ID NO: 256899 - DNA, 20 bp, Artificial Sequence
  Description of Artificial Sequence: Synthetic oligonucleotide
  Target: LAMA2; (-) strand; PAM type: YTN; PAM sequence: TTA
ttaataaaaatagtgtgtta

SEQ ID NO: 256900 - DNA, 20 bp, Artificial Sequence
  Description of Artificial Sequence: Synthetic oligonucleotide
  Target: LAMA2; (-) strand; PAM type: YTN; PAM sequence: TTT
attaataaaaatagtgtgtt

SEQ ID NO: 256901 - DNA, 20 bp, Artificial Sequence
  Description of Artificial Sequence: Synthetic oligonucleotide
  Target: LAMA2; (-) strand; PAM type: YTN; PAM sequence: TTT
tattaataaaaatagtgtgt

SEQ ID NO: 256902 - DNA, 20 bp, Artificial Sequence
  Description of Artificial Sequence: Synthetic oligonucleotide
  Target: LAMA2; (-) strand; PAM type: YTN; PAM sequence: CTT
ttattaataaaaatagtgtg

SEQ ID NO: 256903 - DNA, 20 bp, Artificial Sequence
  Description of Artificial Sequence: Synthetic oligonucleotide
  Target: LAMA2; (-) strand; PAM type: YTN; PAM sequence: CTA
atcatataacttttattaat

SEQ ID NO: 256904 - DNA, 20 bp, Artificial Sequence
  Description of Artificial Sequence: Synthetic oligonucleotide
  Target: LAMA2; (-) strand; PAM type: YTN; PAM sequence: CTG
ctaatcatataacttttatt

SEQ ID NO: 256905 - DNA, 20 bp, Artificial Sequence
  Description of Artificial Sequence: Synthetic oligonucleotide
  Target: LAMA2; (-) strand; PAM type: YTN; PAM sequence: TTG
agggtcagagaatataatac

SEQ ID NO: 256906 - DNA, 20 bp, Artificial Sequence
  Description of Artificial Sequence: Synthetic oligonucleotide
  Target: LAMA2; (-) strand; PAM type: YTN; PAM sequence: TTT
gagggtcagagaatataata

SEQ ID NO: 256907 - DNA, 20 bp, Artificial Sequence
  Description of Artificial Sequence: Synthetic oligonucleotide
  Target: LAMA2; (-) strand; PAM type: YTN; PAM sequence: TTA
aaaagtaatttgagggtcag

SEQ ID NO: 256908 - DNA, 20 bp, Artificial Sequence
  Description of Artificial Sequence: Synthetic oligonucleotide
  Target: LAMA2; (-) strand; PAM type: YTN; PAM sequence: TTA
ggaattaaaaagtaatttga

SEQ ID NO: 256909 - DNA, 20 bp, Artificial Sequence
  Description of Artificial Sequence: Synthetic oligonucleotide
  Target: LAMA2; (-) strand; PAM type: YTN; PAM sequence: TTC
cgttaggaattaaaaagtaa

SEQ ID NO: 256910 - DNA, 20 bp, Artificial Sequence
  Description of Artificial Sequence: Synthetic oligonucleotide
  Target: LAMA2; (-) strand; PAM type: YTN; PAM sequence: CTG
aaggtgttccgttaggaatt

SEQ ID NO: 256911 - DNA, 20 bp, Artificial Sequence
  Description of Artificial Sequence: Synthetic oligonucleotide
  Target: LAMA2; (-) strand; PAM type: YTN; PAM sequence: TTC
tgaaggtgttccgttaggaa

SEQ ID NO: 256912 - DNA, 20 bp, Artificial Sequence
  Description of Artificial Sequence: Synthetic oligonucleotide
  Target: LAMA2; (-) strand; PAM type: YTN; PAM sequence: TTT
ctgaaggtgttccgttagga

SEQ ID NO: 256913 - DNA, 20 bp, Artificial Sequence
  Description of Artificial Sequence: Synthetic oligonucleotide
  Target: LAMA2; (-) strand; PAM type: YTN; PAM sequence: TTA
gagatttctgaaggtgttcc

SEQ ID NO: 256914 - DNA, 20 bp, Artificial Sequence
  Description of Artificial Sequence: Synthetic oligonucleotide
  Target: LAMA2; (-) strand; PAM type: YTN; PAM sequence: CTA
tacagagaacagtattagag

SEQ ID NO: 256915 - DNA, 20 bp, Artificial Sequence
  Description of Artificial Sequence: Synthetic oligonucleotide
  Target: LAMA2; (-) strand; PAM type: YTN; PAM sequence: TTC
tatacagagaacagtattag

SEQ ID NO: 256916 - DNA, 20 bp, Artificial Sequence
  Description of Artificial Sequence: Synthetic oligonucleotide
  Target: LAMA2; (-) strand; PAM type: YTN; PAM sequence: TTT
ctatacagagaacagtatta

SEQ ID NO: 256917 - DNA, 20 bp, Artificial Sequence
  Description of Artificial Sequence: Synthetic oligonucleotide
  Target: LAMA2; (-) strand; PAM type: YTN; PAM sequence: CTG
gtgtatgggtgtgtgtttct

SEQ ID NO: 256918 - DNA, 20 bp, Artificial Sequence
  Description of Artificial Sequence: Synthetic oligonucleotide
  Target: LAMA2; (-) strand; PAM type: YTN; PAM sequence: TTA
ctggtgtatgggtgtgtgtt

SEQ ID NO: 256919 - DNA, 20 bp, Artificial Sequence
  Description of Artificial Sequence: Synthetic oligonucleotide
  Target: LAMA2; (-) strand; PAM type: YTN; PAM sequence: TTC
agcacattactggtgtatgg

SEQ ID NO: 256920 - DNA, 20 bp, Artificial Sequence
  Description of Artificial Sequence: Synthetic oligonucleotide
  Target: LAMA2; (-) strand; PAM type: YTN; PAM sequence: CTT
cagcacattactggtgtatg

SEQ ID NO: 256921 - DNA, 20 bp, Artificial Sequence
  Description of Artificial Sequence: Synthetic oligonucleotide
  Target: LAMA2; (-) strand; PAM type: YTN; PAM sequence: CTG
caacacttcagcacattact

SEQ ID NO: 256922 - DNA, 20 bp, Artificial Sequence
  Description of Artificial Sequence: Synthetic oligonucleotide
  Target: LAMA2; (-) strand; PAM type: YTN; PAM sequence: TTC
tgcaacacttcagcacatta

SEQ ID NO: 256923 - DNA, 20 bp, Artificial Sequence
  Description of Artificial Sequence: Synthetic oligonucleotide
  Target: LAMA2; (-) strand; PAM type: YTN; PAM sequence: TTT
ctgcaacacttcagcacatt

SEQ ID NO: 256924 - DNA, 20 bp, Artificial Sequence
  Description of Artificial Sequence: Synthetic oligonucleotide
  Target: LAMA2; (-) strand; PAM type: YTN; PAM sequence: TTT
tctgcaacacttcagcacat

SEQ ID NO: 256925 - DNA, 20 bp, Artificial Sequence
  Description of Artificial Sequence: Synthetic oligonucleotide
  Target: LAMA2; (-) strand; PAM type: YTN; PAM sequence: CTA
ttttctgcaacacttcagca

SEQ ID NO: 256926 - DNA, 20 bp, Artificial Sequence
  Description of Artificial Sequence: Synthetic oligonucleotide
  Target: LAMA2; (-) strand; PAM type: YTN; PAM sequence: CTG
aaagtgggactattttctgc

SEQ ID NO: 256927 - DNA, 20 bp, Artificial Sequence
  Description of Artificial Sequence: Synthetic oligonucleotide
  Target: LAMA2; (-) strand; PAM type: YTN; PAM sequence: TTA
ctgaaagtgggactattttc

SEQ ID NO: 256928 - DNA, 20 bp, Artificial Sequence
  Description of Artificial Sequence: Synthetic oligonucleotide
  Target: LAMA2; (-) strand; PAM type: YTN; PAM sequence: TTC
atatgccatgttactgaaag

SEQ ID NO: 256929 - DNA, 20 bp, Artificial Sequence
  Description of Artificial Sequence: Synthetic oligonucleotide
  Target: LAMA2; (-) strand; PAM type: YTN; PAM sequence: TTG
tgaatatacgtgatagaaaa

SEQ ID NO: 256930 - DNA, 20 bp, Artificial Sequence
  Description of Artificial Sequence: Synthetic oligonucleotide
  Target: LAMA2; (-) strand; PAM type: YTN; PAM sequence: TTT
gtgaatatacgtgatagaaa

SEQ ID NO: 256931 - DNA, 20 bp, Artificial Sequence
  Description of Artificial Sequence: Synthetic oligonucleotide
  Target: LAMA2; (-) strand; PAM type: YTN; PAM sequence: TTG
caggacgtgtaaggaaaatt

SEQ ID NO: 256932 - DNA, 20 bp, Artificial Sequence
  Description of Artificial Sequence: Synthetic oligonucleotide
  Target: LAMA2; (-) strand; PAM type: YTN; PAM sequence: CTT
gcaggacgtgtaaggaaaat

SEQ ID NO: 256933 - DNA, 20 bp, Artificial Sequence
  Description of Artificial Sequence: Synthetic oligonucleotide
  Target: LAMA2; (-) strand; PAM type: YTN; PAM sequence: TTC
ttgcaggacgtgtaaggaaa

SEQ ID NO: 256934 - DNA, 20 bp, Artificial Sequence
  Description of Artificial Sequence: Synthetic oligonucleotide
  Target: LAMA2; (-) strand; PAM type: YTN; PAM sequence: TTT
cttgcaggacgtgtaaggaa

SEQ ID NO: 256935 - DNA, 20 bp, Artificial Sequence
  Description of Artificial Sequence: Synthetic oligonucleotide
  Target: LAMA2; (-) strand; PAM type: YTN; PAM sequence: TTT
tcttgcaggacgtgtaagga

SEQ ID NO: 256936 - DNA, 20 bp, Artificial Sequence
  Description of Artificial Sequence: Synthetic oligonucleotide
  Target: LAMA2; (-) strand; PAM type: YTN; PAM sequence: TTT
ttcttgcaggacgtgtaagg

SEQ ID NO: 256937 - DNA, 20 bp, Artificial Sequence
  Description of Artificial Sequence: Synthetic oligonucleotide
  Target: LAMA2; (-) strand; PAM type: YTN; PAM sequence: TTT
tttcttgcaggacgtgtaag

SEQ ID NO: 256938 - DNA, 20 bp, Artificial Sequence
  Description of Artificial Sequence: Synthetic oligonucleotide
  Target: LAMA2; (-) strand; PAM type: YTN; PAM sequence: TTA
ttttttcttgcaggacgtgt

SEQ ID NO: 256939 - DNA, 20 bp, Artificial Sequence
  Description of Artificial Sequence: Synthetic oligonucleotide
  Target: LAMA2; (-) strand; PAM type: YTN; PAM sequence: TTT
attttttcttgcaggacgtg

SEQ ID NO: 256940 - DNA, 20 bp, Artificial Sequence
  Description of Artificial Sequence: Synthetic oligonucleotide
  Target: LAMA2; (-) strand; PAM type: YTN; PAM sequence: TTA
tttattttttcttgcaggac

SEQ ID NO: 256941 - DNA, 20 bp, Artificial Sequence
  Description of Artificial Sequence: Synthetic oligonucleotide
  Target: LAMA2; (-) strand; PAM type: YTN; PAM sequence: TTT
atttattttttcttgcagga

SEQ ID NO: 256942 - DNA, 20 bp, Artificial Sequence
  Description of Artificial Sequence: Synthetic oligonucleotide
  Target: LAMA2; (-) strand; PAM type: YTN; PAM sequence: TTT
tatttattttttcttgcagg

SEQ ID NO: 256943 - DNA, 20 bp, Artificial Sequence
  Description of Artificial Sequence: Synthetic oligonucleotide
  Target: LAMA2; (-) strand; PAM type: YTN; PAM sequence: CTT
ttatttattttttcttgcag

SEQ ID NO: 256944 - DNA, 20 bp, Artificial Sequence
  Description of Artificial Sequence: Synthetic oligonucleotide
  Target: LAMA2; (-) strand; PAM type: YTN; PAM sequence: CTG
tcttttatttattttttctt

SEQ ID NO: 256945 - DNA, 20 bp, Artificial Sequence
  Description of Artificial Sequence: Synthetic oligonucleotide
  Target: LAMA2; (-) strand; PAM type: YTN; PAM sequence: CTA
aagaagcatctgtcttttat

SEQ ID NO: 256946 - DNA, 20 bp, Artificial Sequence
  Description of Artificial Sequence: Synthetic oligonucleotide
  Target: LAMA2; (-) strand; PAM type: YTN; PAM sequence: TTA
aatagaataactaaagaagc

SEQ ID NO: 256947 - DNA, 20 bp, Artificial Sequence
  Description of Artificial Sequence: Synthetic oligonucleotide
  Target: LAMA2; (-) strand; PAM type: YTN; PAM sequence: CTA
taattaaatagaataactaa

SEQ ID NO: 256948 - DNA, 20 bp, Artificial Sequence
  Description of Artificial Sequence: Synthetic oligonucleotide
  Target: LAMA2; (-) strand; PAM type: YTN; PAM sequence: TTC
aggaggaaaataactataat

SEQ ID NO: 256949 - DNA, 20 bp, Artificial Sequence
  Description of Artificial Sequence: Synthetic oligonucleotide
  Target: LAMA2; (-) strand; PAM type: YTN; PAM sequence: TTT
caggaggaaaataactataa

SEQ ID NO: 256950 - DNA, 20 bp, Artificial Sequence
  Description of Artificial Sequence: Synthetic oligonucleotide
  Target: LAMA2; (-) strand; PAM type: YTN; PAM sequence: CTC
atttcaggaggaaaataact

SEQ ID NO: 256951 - DNA, 20 bp, Artificial Sequence
  Description of Artificial Sequence: Synthetic oligonucleotide
  Target: LAMA2; (-) strand; PAM type: YTN; PAM sequence: CTC
cataataaaaaaactcattt

SEQ ID NO: 256952 - DNA, 20 bp, Artificial Sequence
  Description of Artificial Sequence: Synthetic oligonucleotide
  Target: LAMA2; (-) strand; PAM type: YTN; PAM sequence: TTC
tccataataaaaaaactcat

SEQ ID NO: 256953 - DNA, 20 bp, Artificial Sequence
  Description of Artificial Sequence: Synthetic oligonucleotide
  Target: LAMA2; (-) strand; PAM type: YTN; PAM sequence: CTG
aaattctccataataaaaaa

SEQ ID NO: 256954 - DNA, 20 bp, Artificial Sequence
  Description of Artificial Sequence: Synthetic oligonucleotide
  Target: LAMA2; (-) strand; PAM type: YTN; PAM sequence: TTA
ataagactgaaattctccat

SEQ ID NO: 256955 - DNA, 20 bp, Artificial Sequence
  Description of Artificial Sequence: Synthetic oligonucleotide
  Target: LAMA2; (-) strand; PAM type: YTN; PAM sequence: TTA
gatagcaattaataagactg

SEQ ID NO: 256956 - DNA, 20 bp, Artificial Sequence
  Description of Artificial Sequence: Synthetic oligonucleotide
  Target: LAMA2; (-) strand; PAM type: YTN; PAM sequence: CTT
agatagcaattaataagact

SEQ ID NO: 256957 - DNA, 20 bp, Artificial Sequence
  Description of Artificial Sequence: Synthetic oligonucleotide
  Target: LAMA2; (-) strand; PAM type: YTN; PAM sequence: TTA
acttagatagcaattaataa

SEQ ID NO: 256958 - DNA, 20 bp, Artificial Sequence
  Description of Artificial Sequence: Synthetic oligonucleotide
  Target: LAMA2; (-) strand; PAM type: YTN; PAM sequence: CTT
aacttagatagcaattaata

SEQ ID NO: 256959 - DNA, 20 bp, Artificial Sequence
  Description of Artificial Sequence: Synthetic oligonucleotide
  Target: LAMA2; (-) strand; PAM type: YTN; PAM sequence: TTC
ttaacttagatagcaattaa

SEQ ID NO: 256960 - DNA, 20 bp, Artificial Sequence
  Description of Artificial Sequence: Synthetic oligonucleotide
  Target: LAMA2; (-) strand; PAM type: YTN; PAM sequence: TTT
cttaacttagatagcaatta

SEQ ID NO: 256961 - DNA, 20 bp, Artificial Sequence
  Description of Artificial Sequence: Synthetic oligonucleotide
  Target: LAMA2; (-) strand; PAM type: YTN; PAM sequence: TTT
tcttaacttagatagcaatt

SEQ ID NO: 256962 - DNA, 20 bp, Artificial Sequence
  Description of Artificial Sequence: Synthetic oligonucleotide
  Target: LAMA2; (-) strand; PAM type: YTN; PAM sequence: TTT
ttcttaacttagatagcaat

SEQ ID NO: 256963 - DNA, 20 bp, Artificial Sequence
  Description of Artificial Sequence: Synthetic oligonucleotide
  Target: LAMA2; (-) strand; PAM type: YTN; PAM sequence: CTG
ggaatttttcttaacttaga

SEQ ID NO: 256964 - DNA, 20 bp, Artificial Sequence
  Description of Artificial Sequence: Synthetic oligonucleotide
  Target: LAMA2; (-) strand; PAM type: YTN; PAM sequence: TTA
tataacgagatctgggaatt

SEQ ID NO: 256965 - DNA, 20 bp, Artificial Sequence
  Description of Artificial Sequence: Synthetic oligonucleotide
  Target: LAMA2; (-) strand; PAM type: YTN; PAM sequence: TTT
atataacgagatctgggaat

SEQ ID NO: 256966 - DNA, 20 bp, Artificial Sequence
  Description of Artificial Sequence: Synthetic oligonucleotide
  Target: LAMA2; (-) strand; PAM type: YTN; PAM sequence: CTT
tatataacgagatctgggaa

SEQ ID NO: 256967 - DNA, 20 bp, Artificial Sequence
  Description of Artificial Sequence: Synthetic oligonucleotide
  Target: LAMA2; (-) strand; PAM type: YTN; PAM sequence: TTG
gagagatagctttatataac

SEQ ID NO: 256968 - DNA, 20 bp, Artificial Sequence
  Description of Artificial Sequence: Synthetic oligonucleotide
  Target: LAMA2; (-) strand; PAM type: YTN; PAM sequence: TTT
ggagagatagctttatataa

SEQ ID NO: 256969 - DNA, 20 bp, Artificial Sequence
  Description of Artificial Sequence: Synthetic oligonucleotide
  Target: LAMA2; (-) strand; PAM type: YTN; PAM sequence: CTT
tggagagatagctttatata

SEQ ID NO: 256970 - DNA, 20 bp, Artificial Sequence
  Description of Artificial Sequence: Synthetic oligonucleotide
  Target: LAMA2; (-) strand; PAM type: YTN; PAM sequence: CTG
ccctttggagagatagcttt

SEQ ID NO: 256971 - DNA, 20 bp, Artificial Sequence
  Description of Artificial Sequence: Synthetic oligonucleotide
  Target: LAMA2; (-) strand; PAM type: YTN; PAM sequence: TTA
ctgccctttggagagatagc

SEQ ID NO: 256972 - DNA, 20 bp, Artificial Sequence
  Description of Artificial Sequence: Synthetic oligonucleotide
  Target: LAMA2; (-) strand; PAM type: YTN; PAM sequence: CTC
aagatgagttactgcccttt

SEQ ID NO: 256973 - DNA, 20 bp, Artificial Sequence
  Description of Artificial Sequence: Synthetic oligonucleotide
  Target: LAMA2; (-) strand; PAM type: YTN; PAM sequence: TTC
ctcaagatgagttactgccc

SEQ ID NO: 256974 - DNA, 20 bp, Artificial Sequence
  Description of Artificial Sequence: Synthetic oligonucleotide
  Target: LAMA2; (-) strand; PAM type: YTN; PAM sequence: TTT
cctcaagatgagttactgcc

SEQ ID NO: 256975 - DNA, 20 bp, Artificial Sequence
  Description of Artificial Sequence: Synthetic oligonucleotide
  Target: LAMA2; (-) strand; PAM type: YTN; PAM sequence: CTT
tcctcaagatgagttactgc

SEQ ID NO: 256976 - DNA, 20 bp, Artificial Sequence
  Description of Artificial Sequence: Synthetic oligonucleotide
  Target: LAMA2; (-) strand; PAM type: YTN; PAM sequence: CTC
actttcctcaagatgagtta

SEQ ID NO: 256977 - DNA, 20 bp, Artificial Sequence
  Description of Artificial Sequence: Synthetic oligonucleotide
  Target: LAMA2; (-) strand; PAM type: YTN; PAM sequence: TTC
agctcactttcctcaagatg

SEQ ID NO: 256978 - DNA, 20 bp, Artificial Sequence
  Description of Artificial Sequence: Synthetic oligonucleotide
  Target: LAMA2; (-) strand; PAM type: YTN; PAM sequence: TTT
cagctcactttcctcaagat

SEQ ID NO: 256979 - DNA, 20 bp, Artificial Sequence
  Description of Artificial Sequence: Synthetic oligonucleotide
  Target: LAMA2; (-) strand; PAM type: YTN; PAM sequence: TTT
tcagctcactttcctcaaga

SEQ ID NO: 256980 - DNA, 20 bp, Artificial Sequence
  Description of Artificial Sequence: Synthetic oligonucleotide
  Target: LAMA2; (-) strand; PAM type: YTN; PAM sequence: TTA
ttttcagctcactttcctca

SEQ ID NO: 256981 - DNA, 20 bp, Artificial Sequence
  Description of Artificial Sequence: Synthetic oligonucleotide
  Target: LAMA2; (-) strand; PAM type: YTN; PAM sequence: CTA
ttattttcagctcactttcc

SEQ ID NO: 256982 - DNA, 20 bp, Artificial Sequence
  Description of Artificial Sequence: Synthetic oligonucleotide
  Target: LAMA2; (-) strand; PAM type: YTN; PAM sequence: TTA
tcacagcaaacgaaaaccta

SEQ ID NO: 256983 - DNA, 20 bp, Artificial Sequence
  Description of Artificial Sequence: Synthetic oligonucleotide
  Target: LAMA2; (-) strand; PAM type: YTN; PAM sequence: CTG
gaataaggatatacaatgat

SEQ ID NO: 256984 - DNA, 20 bp, Artificial Sequence
  Description of Artificial Sequence: Synthetic oligonucleotide
  Target: LAMA2; (-) strand; PAM type: YTN; PAM sequence: TTG
tgccactggaataaggatat

SEQ ID NO: 256985 - DNA, 20 bp, Artificial Sequence
  Description of Artificial Sequence: Synthetic oligonucleotide
  Target: LAMA2; (-) strand; PAM type: YTN; PAM sequence: TTT
gtgccactggaataaggata

SEQ ID NO: 256986 - DNA, 20 bp, Artificial Sequence
  Description of Artificial Sequence: Synthetic oligonucleotide
  Target: LAMA2; (-) strand; PAM type: YTN; PAM sequence: CTT
tgtgccactggaataaggat

SEQ ID NO: 256987 - DNA, 20 bp, Artificial Sequence
  Description of Artificial Sequence: Synthetic oligonucleotide
  Target: LAMA2; (-) strand; PAM type: YTN; PAM sequence: CTA
agagagtgactttgtgccac

SEQ ID NO: 256988 - DNA, 20 bp, Artificial Sequence
  Description of Artificial Sequence: Synthetic oligonucleotide
  Target: LAMA2; (-) strand; PAM type: YTN; PAM sequence: TTA
ccactaagagagtgactttg

SEQ ID NO: 256989 - DNA, 20 bp, Artificial Sequence
  Description of Artificial Sequence: Synthetic oligonucleotide
  Target: LAMA2; (-) strand; PAM type: YTN; PAM sequence: TTT
accactaagagagtgacttt

SEQ ID NO: 256990 - DNA, 20 bp, Artificial Sequence
  Description of Artificial Sequence: Synthetic oligonucleotide
  Target: LAMA2; (-) strand; PAM type: YTN; PAM sequence: TTG
tttaccactaagagagtgac

SEQ ID NO: 256991 - DNA, 20 bp, Artificial Sequence
  Description of Artificial Sequence: Synthetic oligonucleotide
  Target: LAMA2; (-) strand; PAM type: YTN; PAM sequence: TTT
gtttaccactaagagagtga

SEQ ID NO: 256992 - DNA, 20 bp, Artificial Sequence
  Description of Artificial Sequence: Synthetic oligonucleotide
  Target: LAMA2; (-) strand; PAM type: YTN; PAM sequence: TTT
tgtttaccactaagagagtg

SEQ ID NO: 256993 - DNA, 20 bp, Artificial Sequence
  Description of Artificial Sequence: Synthetic oligonucleotide
  Target: LAMA2; (-) strand; PAM type: YTN; PAM sequence: CTC
attttgtttaccactaagag

SEQ ID NO: 256994 - DNA, 20 bp, Artificial Sequence
  Description of Artificial Sequence: Synthetic oligonucleotide
  Target: LAMA2; (-) strand; PAM type: YTN; PAM sequence: TTC
acatctcattttgtttacca

SEQ ID NO: 256995 - DNA, 20 bp, Artificial Sequence
  Description of Artificial Sequence: Synthetic oligonucleotide
  Target: LAMA2; (-) strand; PAM type: YTN; PAM sequence: TTA
tgatcacatccacatatatt

SEQ ID NO: 256996 - DNA, 20 bp, Artificial Sequence
  Description of Artificial Sequence: Synthetic oligonucleotide
  Target: LAMA2; (-) strand; PAM type: YTN; PAM sequence: CTT
atgatcacatccacatatat

SEQ ID NO: 256997 - DNA, 20 bp, Artificial Sequence
  Description of Artificial Sequence: Synthetic oligonucleotide
  Target: LAMA2; (-) strand; PAM type: YTN; PAM sequence: TTC
agagcttatgatcacatcca

SEQ ID NO: 256998 - DNA, 20 bp, Artificial Sequence
  Description of Artificial Sequence: Synthetic oligonucleotide
  Target: LAMA2; (-) strand; PAM type: YTN; PAM sequence: TTA
atattcagagcttatgatca

SEQ ID NO: 256999 - DNA, 20 bp, Artificial Sequence
  Description of Artificial Sequence: Synthetic oligonucleotide
  Target: LAMA2; (-) strand; PAM type: YTN; PAM sequence: TTT
aatattcagagcttatgatc

SEQ ID NO: 257000 - DNA, 20 bp, Artificial Sequence
  Description of Artificial Sequence: Synthetic oligonucleotide
  Target: LAMA2; (-) strand; PAM type: YTN; PAM sequence: TTA
tttaatattcagagcttatg

SEQ ID NO: 257001 - DNA, 20 bp, Artificial Sequence
  Description of Artificial Sequence: Synthetic oligonucleotide
  Target: LAMA2; (-) strand; PAM type: YTN; PAM sequence: CTT
atttaatattcagagcttat

SEQ ID NO: 257002 - DNA, 20 bp, Artificial Sequence
  Description of Artificial Sequence: Synthetic oligonucleotide
  Target: LAMA2; (-) strand; PAM type: YTN; PAM sequence: TTG
tcttatttaatattcagagc

SEQ ID NO: 257003 - DNA, 20 bp, Artificial Sequence
  Description of Artificial Sequence: Synthetic oligonucleotide
  Target: LAMA2; (-) strand; PAM type: YTN; PAM sequence: CTT
gtcttatttaatattcagag

SEQ ID NO: 257004 - DNA, 20 bp, Artificial Sequence
  Description of Artificial Sequence: Synthetic oligonucleotide
  Target: LAMA2; (-) strand; PAM type: YTN; PAM sequence: TTC
ttgtcttatttaatattcag

SEQ ID NO: 257005 - DNA, 20 bp, Artificial Sequence
  Description of Artificial Sequence: Synthetic oligonucleotide
  Target: LAMA2; (-) strand; PAM type: YTN; PAM sequence: CTT
cttgtcttatttaatattca

SEQ ID NO: 257006 - DNA, 20 bp, Artificial Sequence
  Description of Artificial Sequence: Synthetic oligonucleotide
  Target: LAMA2; (-) strand; PAM type: YTN; PAM sequence: TTC
ttcttgtcttatttaatatt

SEQ ID NO: 257007 - DNA, 20 bp, Artificial Sequence
  Description of Artificial Sequence: Synthetic oligonucleotide
  Target: LAMA2; (-) strand; PAM type: YTN; PAM sequence: CTG
attcttcttgtcttatttaa

SEQ ID NO: 257008 - DNA, 20 bp, Artificial Sequence
  Description of Artificial Sequence: Synthetic oligonucleotide
  Target: LAMA2; (-) strand; PAM type: YTN; PAM sequence: TTA
acctgattcttcttgtctta

SEQ ID NO: 257009 - DNA, 20 bp, Artificial Sequence
  Description of Artificial Sequence: Synthetic oligonucleotide
  Target: LAMA2; (-) strand; PAM type: YTN; PAM sequence: TTT
aacctgattcttcttgtctt

SEQ ID NO: 257010 - DNA, 20 bp, Artificial Sequence
  Description of Artificial Sequence: Synthetic oligonucleotide
  Target: LAMA2; (-) strand; PAM type: YTN; PAM sequence: TTT
taacctgattcttcttgtct

SEQ ID NO: 257011 - DNA, 20 bp, Artificial Sequence
  Description of Artificial Sequence: Synthetic oligonucleotide
  Target: LAMA2; (-) strand; PAM type: YTN; PAM sequence: TTG
aattttaacctgattcttct

SEQ ID NO: 257012 - DNA, 20 bp, Artificial Sequence
  Description of Artificial Sequence: Synthetic oligonucleotide
  Target: LAMA2; (-) strand; PAM type: YTN; PAM sequence: TTT
gaattttaacctgattcttc

SEQ ID NO: 257013 - DNA, 20 bp, Artificial Sequence
  Description of Artificial Sequence: Synthetic oligonucleotide
  Target: LAMA2; (-) strand; PAM type: YTN; PAM sequence: TTT
tgaattttaacctgattctt

SEQ ID NO: 257014 - DNA, 20 bp, Artificial Sequence
  Description of Artificial Sequence: Synthetic oligonucleotide
  Target: LAMA2; (-) strand; PAM type: YTN; PAM sequence: CTT
ttgaattttaacctgattct

SEQ ID NO: 257015 - DNA, 20 bp, Artificial Sequence
  Description of Artificial Sequence: Synthetic oligonucleotide
  Target: LAMA2; (-) strand; PAM type: YTN; PAM sequence: TTC
ttttgaattttaacctgatt

SEQ ID NO: 257016 - DNA, 20 bp, Artificial Sequence
  Description of Artificial Sequence: Synthetic oligonucleotide
  Target: LAMA2; (-) strand; PAM type: YTN; PAM sequence: TTG
ataaagataagaaggagatt

SEQ ID NO: 257017 - DNA, 20 bp, Artificial Sequence
  Description of Artificial Sequence: Synthetic oligonucleotide
  Target: LAMA2; (-) strand; PAM type: YTN; PAM sequence: TTT
gataaagataagaaggagat

SEQ ID NO: 257018 - DNA, 20 bp, Artificial Sequence
  Description of Artificial Sequence: Synthetic oligonucleotide
  Target: LAMA2; (-) strand; PAM type: YTN; PAM sequence: TTC
aagagaggcatttgataaag

SEQ ID NO: 257019 - DNA, 20 bp, Artificial Sequence
  Description of Artificial Sequence: Synthetic oligonucleotide
  Target: LAMA2; (-) strand; PAM type: YTN; PAM sequence: CTT
caagagaggcatttgataaa

SEQ ID NO: 257020 - DNA, 20 bp, Artificial Sequence
  Description of Artificial Sequence: Synthetic oligonucleotide
  Target: LAMA2; (-) strand; PAM type: YTN; PAM sequence: TTC
ccccaaaatcccttcaagag

SEQ ID NO: 257021 - DNA, 20 bp, Artificial Sequence
  Description of Artificial Sequence: Synthetic oligonucleotide
  Target: LAMA2; (-) strand; PAM type: YTN; PAM sequence: TTG
agtgcacaaaattcccccaa

SEQ ID NO: 257022 - DNA, 20 bp, Artificial Sequence
  Description of Artificial Sequence: Synthetic oligonucleotide
  Target: LAMA2; (-) strand; PAM type: YTN; PAM sequence: TTT
gagtgcacaaaattccccca

SEQ ID NO: 257023 - DNA, 20 bp, Artificial Sequence
  Description of Artificial Sequence: Synthetic oligonucleotide
  Target: LAMA2; (-) strand; PAM type: YTN; PAM sequence: TTA
taaaatatgcaataaaattt

SEQ ID NO: 257024 - DNA, 20 bp, Artificial Sequence
  Description of Artificial Sequence: Synthetic oligonucleotide
  Target: LAMA2; (-) strand; PAM type: YTN; PAM sequence: CTG
tattataaaatatgcaataa

SEQ ID NO: 257025 - DNA, 20 bp, Artificial Sequence
  Description of Artificial Sequence: Synthetic oligonucleotide
  Target: LAMA2; (-) strand; PAM type: YTN; PAM sequence: TTC
tgtattataaaatatgcaat

SEQ ID NO: 257026 - DNA, 20 bp, Artificial Sequence
  Description of Artificial Sequence: Synthetic oligonucleotide
  Target: LAMA2; (-) strand; PAM type: YTN; PAM sequence: TTA
attctgtattataaaatatg

SEQ ID NO: 257027 - DNA, 20 bp, Artificial Sequence
  Description of Artificial Sequence: Synthetic oligonucleotide
  Target: LAMA2; (-) strand; PAM type: YTN; PAM sequence: TTG
ttaattctgtattataaaat

SEQ ID NO: 257028 - DNA, 20 bp, Artificial Sequence
  Description of Artificial Sequence: Synthetic oligonucleotide
  Target: LAMA2; (-) strand; PAM type: YTN; PAM sequence: TTT
gttaattctgtattataaaa

SEQ ID NO: 257029 - DNA, 20 bp, Artificial Sequence
  Description of Artificial Sequence: Synthetic oligonucleotide
  Target: LAMA2; (-) strand; PAM type: YTN; PAM sequence: TTG
tttgttaattctgtattata

SEQ ID NO: 257030 - DNA, 20 bp, Artificial Sequence
  Description of Artificial Sequence: Synthetic oligonucleotide
  Target: LAMA2; (-) strand; PAM type: YTN; PAM sequence: TTG
ccaaccacagatataattgt

SEQ ID NO: 257031 - DNA, 20 bp, Artificial Sequence
  Description of Artificial Sequence: Synthetic oligonucleotide
  Target: LAMA2; (-) strand; PAM type: YTN; PAM sequence: TTA
gaagaatattgccaaccaca

SEQ ID NO: 257032 - DNA, 20 bp, Artificial Sequence
  Description of Artificial Sequence: Synthetic oligonucleotide
  Target: LAMA2; (-) strand; PAM type: YTN; PAM sequence: CTT
agaagaatattgccaaccac

SEQ ID NO: 257033 - DNA, 20 bp, Artificial Sequence
  Description of Artificial Sequence: Synthetic oligonucleotide
  Target: LAMA2; (-) strand; PAM type: YTN; PAM sequence: CTG
cttagaagaatattgccaac

SEQ ID NO: 257034 - DNA, 20 bp, Artificial Sequence
  Description of Artificial Sequence: Synthetic oligonucleotide
  Target: LAMA2; (-) strand; PAM type: YTN; PAM sequence: TTG
tataaatactgcttagaaga

SEQ ID NO: 257035 - DNA, 20 bp, Artificial Sequence
  Description of Artificial Sequence: Synthetic oligonucleotide
  Target: LAMA2; (-) strand; PAM type: YTN; PAM sequence: TTA
tgagttgtataaatactgct

SEQ ID NO: 257036 - DNA, 20 bp, Artificial Sequence
  Description of Artificial Sequence: Synthetic oligonucleotide
  Target: LAMA2; (-) strand; PAM type: YTN; PAM sequence: CTT
atgagttgtataaatactgc

SEQ ID NO: 257037 - DNA, 20 bp, Artificial Sequence
  Description of Artificial Sequence: Synthetic oligonucleotide
  Target: LAMA2; (-) strand; PAM type: YTN; PAM sequence: TTA
tacacttatgagttgtataa

SEQ ID NO: 257038 - DNA, 20 bp, Artificial Sequence
  Description of Artificial Sequence: Synthetic oligonucleotide
  Target: LAMA2; (-) strand; PAM type: YTN; PAM sequence: TTT
atacacttatgagttgtata

SEQ ID NO: 257039 - DNA, 20 bp, Artificial Sequence
  Description of Artificial Sequence: Synthetic oligonucleotide
  Target: LAMA2; (-) strand; PAM type: YTN; PAM sequence: TTT
tatacacttatgagttgtat

SEQ ID NO: 257040 - DNA, 20 bp, Artificial Sequence
  Description of Artificial Sequence: Synthetic oligonucleotide
  Target: LAMA2; (-) strand; PAM type: YTN; PAM sequence: TTC
acaaaagattttatacactt

SEQ ID NO: 257041 - DNA, 20 bp, Artificial Sequence
  Description of Artificial Sequence: Synthetic oligonucleotide
  Target: LAMA2; (-) strand; PAM type: YTN; PAM sequence: TTA
tattcacaaaagattttata

SEQ ID NO: 257042 - DNA, 20 bp, Artificial Sequence
  Description of Artificial Sequence: Synthetic oligonucleotide
  Target: LAMA2; (-) strand; PAM type: YTN; PAM sequence: CTT
atattcacaaaagattttat

SEQ ID NO: 257043 - DNA, 20 bp, Artificial Sequence
  Description of Artificial Sequence: Synthetic oligonucleotide
  Target: LAMA2; (-) strand; PAM type: YTN; PAM sequence: TTA
cttatattcacaaaagattt

SEQ ID NO: 257044 - DNA, 20 bp, Artificial Sequence
  Description of Artificial Sequence: Synthetic oligonucleotide
  Target: LAMA2; (-) strand; PAM type: YTN; PAM sequence: TTA
aaatgaaattacttatattc

SEQ ID NO: 257045 - DNA, 20 bp, Artificial Sequence
  Description of Artificial Sequence: Synthetic oligonucleotide
  Target: LAMA2; (-) strand; PAM type: YTN; PAM sequence: TTT
aaaatgaaattacttatatt

SEQ ID NO: 257046 - DNA, 20 bp, Artificial Sequence
  Description of Artificial Sequence: Synthetic oligonucleotide
  Target: LAMA2; (-) strand; PAM type: YTN; PAM sequence: TTT
taaaatgaaattacttatat

SEQ ID NO: 257047 - DNA, 20 bp, Artificial Sequence
  Description of Artificial Sequence: Synthetic oligonucleotide
  Target: LAMA2; (-) strand; PAM type: YTN; PAM sequence: TTT
ttaaaatgaaattacttata

SEQ ID NO: 257048 - DNA, 20 bp, Artificial Sequence
  Description of Artificial Sequence: Synthetic oligonucleotide
  Target: LAMA2; (-) strand; PAM type: YTN; PAM sequence: TTA
tcataatttttaaaatgaaa

SEQ ID NO: 257049 - DNA, 20 bp, Artificial Sequence
  Description of Artificial Sequence: Synthetic oligonucleotide
  Target: LAMA2; (-) strand; PAM type: YTN; PAM sequence: TTT
atcataatttttaaaatgaa

SEQ ID NO: 257050 - DNA, 20 bp, Artificial Sequence
  Description of Artificial Sequence: Synthetic oligonucleotide
  Target: LAMA2; (-) strand; PAM type: YTN; PAM sequence: TTT
tatcataatttttaaaatga

SEQ ID NO: 257051 - DNA, 20 bp, Artificial Sequence
  Description of Artificial Sequence: Synthetic oligonucleotide
  Target: LAMA2; (-) strand; PAM type: YTN; PAM sequence: TTG
atgttttatcataattttta

SEQ ID NO: 257052 - DNA, 20 bp, Artificial Sequence
  Description of Artificial Sequence: Synthetic oligonucleotide
  Target: LAMA2; (-) strand; PAM type: YTN; PAM sequence: TTT
gatgttttatcataattttt

SEQ ID NO: 257053 - DNA, 20 bp, Artificial Sequence
  Description of Artificial Sequence: Synthetic oligonucleotide
  Target: LAMA2; (-) strand; PAM type: YTN; PAM sequence: TTC
atagatttgatgttttatca

SEQ ID NO: 257054 - DNA, 20 bp, Artificial Sequence
  Description of Artificial Sequence: Synthetic oligonucleotide
  Target: LAMA2; (-) strand; PAM type: YTN; PAM sequence: CTA
taattcatagatttgatgtt

SEQ ID NO: 257055 - DNA, 20 bp, Artificial Sequence
  Description of Artificial Sequence: Synthetic oligonucleotide
  Target: LAMA2; (-) strand; PAM type: YTN; PAM sequence: TTA
ggtactataattcatagatt

SEQ ID NO: 257056 - DNA, 20 bp, Artificial Sequence
  Description of Artificial Sequence: Synthetic oligonucleotide
  Target: LAMA2; (-) strand; PAM type: YTN; PAM sequence: CTT
aggtactataattcatagat

SEQ ID NO: 257057 - DNA, 20 bp, Artificial Sequence
  Description of Artificial Sequence: Synthetic oligonucleotide
  Target: LAMA2; (-) strand; PAM type: YTN; PAM sequence: CTA
gaaaatgtataggtacttag

SEQ ID NO: 257058 - DNA, 20 bp, Artificial Sequence
  Description of Artificial Sequence: Synthetic oligonucleotide
  Target: LAMA2; (-) strand; PAM type: YTN; PAM sequence: TTC
tagaaaatgtataggtactt

SEQ ID NO: 257059 - DNA, 20 bp, Artificial Sequence
  Description of Artificial Sequence: Synthetic oligonucleotide
  Target: LAMA2; (-) strand; PAM type: YTN; PAM sequence: TTT
ctagaaaatgtataggtact

SEQ ID NO: 257060 - DNA, 20 bp, Artificial Sequence
  Description of Artificial Sequence: Synthetic oligonucleotide
  Target: LAMA2; (-) strand; PAM type: YTN; PAM sequence: TTT
tctagaaaatgtataggtac

SEQ ID NO: 257061 - DNA, 20 bp, Artificial Sequence
  Description of Artificial Sequence: Synthetic oligonucleotide
  Target: LAMA2; (-) strand; PAM type: YTN; PAM sequence: CTA
agttttctagaaaatgtata

SEQ ID NO: 257062 - DNA, 20 bp, Artificial Sequence
  Description of Artificial Sequence: Synthetic oligonucleotide
  Target: LAMA2; (-) strand; PAM type: YTN; PAM sequence: TTC
taagttttctagaaaatgta

SEQ ID NO: 257063 - DNA, 20 bp, Artificial Sequence
  Description of Artificial Sequence: Synthetic oligonucleotide
  Target: LAMA2; (-) strand; PAM type: YTN; PAM sequence: TTG
atgattctaagttttctaga

SEQ ID NO: 257064 - DNA, 20 bp, Artificial Sequence
  Description of Artificial Sequence: Synthetic oligonucleotide
  Target: LAMA2; (-) strand; PAM type: YTN; PAM sequence: TTG
gtgcagatacattgatgatt

SEQ ID NO: 257065 - DNA, 20 bp, Artificial Sequence
  Description of Artificial Sequence: Synthetic oligonucleotide
  Target: LAMA2; (-) strand; PAM type: YTN; PAM sequence: TTT
ggtgcagatacattgatgat

SEQ ID NO: 257066 - DNA, 20 bp, Artificial Sequence
  Description of Artificial Sequence: Synthetic oligonucleotide
  Target: LAMA2; (-) strand; PAM type: YTN; PAM sequence: TTA
atttggtgcagatacattga

SEQ ID NO: 257067 - DNA, 20 bp, Artificial Sequence
  Description of Artificial Sequence: Synthetic oligonucleotide
  Target: LAMA2; (-) strand; PAM type: YTN; PAM sequence: CTG
gggcagagccattaatttgg

SEQ ID NO: 257068 - DNA, 20 bp, Artificial Sequence
  Description of Artificial Sequence: Synthetic oligonucleotide
  Target: LAMA2; (-) strand; PAM type: YTN; PAM sequence: TTC
tggggcagagccattaattt

SEQ ID NO: 257069 - DNA, 20 bp, Artificial Sequence
  Description of Artificial Sequence: Synthetic oligonucleotide
  Target: LAMA2; (-) strand; PAM type: YTN; PAM sequence: TTA
acaaatcccaattctggggc

SEQ ID NO: 257070 - DNA, 20 bp, Artificial Sequence
  Description of Artificial Sequence: Synthetic oligonucleotide
  Target: LAMA2; (-) strand; PAM type: YTN; PAM sequence: TTT
aacaaatcccaattctgggg

SEQ ID NO: 257071 - DNA, 20 bp, Artificial Sequence
  Description of Artificial Sequence: Synthetic oligonucleotide
  Target: LAMA2; (-) strand; PAM type: YTN; PAM sequence: CTT
taacaaatcccaattctggg

SEQ ID NO: 257072 - DNA, 20 bp, Artificial Sequence
  Description of Artificial Sequence: Synthetic oligonucleotide
  Target: LAMA2; (-) strand; PAM type: YTN; PAM sequence: TTG
agagtactttaacaaatccc

SEQ ID NO: 257073 - DNA, 20 bp, Artificial Sequence
  Description of Artificial Sequence: Synthetic oligonucleotide
  Target: LAMA2; (-) strand; PAM type: YTN; PAM sequence: TTA
tattgagagtactttaacaa

SEQ ID NO: 257074 - DNA, 20 bp, Artificial Sequence
  Description of Artificial Sequence: Synthetic oligonucleotide
  Target: LAMA2; (-) strand; PAM type: YTN; PAM sequence: TTA
aatccagtacattatattga

SEQ ID NO: 257075 - DNA, 20 bp, Artificial Sequence
  Description of Artificial Sequence: Synthetic oligonucleotide
  Target: LAMA2; (-) strand; PAM type: YTN; PAM sequence: TTT
aaatccagtacattatattg

SEQ ID NO: 257076 - DNA, 20 bp, Artificial Sequence
  Description of Artificial Sequence: Synthetic oligonucleotide
  Target: LAMA2; (-) strand; PAM type: YTN; PAM sequence: TTG
aaataaaaatggtttaaatc

SEQ ID NO: 257077 - DNA, 20 bp, Artificial Sequence
  Description of Artificial Sequence: Synthetic oligonucleotide
  Target: LAMA2; (-) strand; PAM type: YTN; PAM sequence: TTT
gaaataaaaatggtttaaat

SEQ ID NO: 257078 - DNA, 20 bp, Artificial Sequence
  Description of Artificial Sequence: Synthetic oligonucleotide
  Target: LAMA2; (-) strand; PAM type: YTN; PAM sequence: CTA
ccatttgaaataaaaatggt

SEQ ID NO: 257079 - DNA, 20 bp, Artificial Sequence
  Description of Artificial Sequence: Synthetic oligonucleotide
  Target: LAMA2; (-) strand; PAM type: YTN; PAM sequence: CTC
taccatttgaaataaaaatg

SEQ ID NO: 257080 - DNA, 20 bp, Artificial Sequence
  Description of Artificial Sequence: Synthetic oligonucleotide
  Target: LAMA2; (-) strand; PAM type: YTN; PAM sequence: CTC
tctaccatttgaaataaaaa

SEQ ID NO: 257081 - DNA, 20 bp, Artificial Sequence
  Description of Artificial Sequence: Synthetic oligonucleotide
  Target: LAMA2; (-) strand; PAM type: YTN; PAM sequence: TTA
gagaaaggctctctaccatt

SEQ ID NO: 257082 - DNA, 20 bp, Artificial Sequence
  Description of Artificial Sequence: Synthetic oligonucleotide
  Target: LAMA2; (-) strand; PAM type: YTN; PAM sequence: TTT
agagaaaggctctctaccat

SEQ ID NO: 257083 - DNA, 20 bp, Artificial Sequence
  Description of Artificial Sequence: Synthetic oligonucleotide
  Target: LAMA2; (-) strand; PAM type: YTN; PAM sequence: TTA
tttagagaaaggctctctac

SEQ ID NO: 257084 - DNA, 20 bp, Artificial Sequence
  Description of Artificial Sequence: Synthetic oligonucleotide
  Target: LAMA2; (-) strand; PAM type: YTN; PAM sequence: CTC
acagatatgcagtcattatt

SEQ ID NO: 257085 - DNA, 20 bp, Artificial Sequence
  Description of Artificial Sequence: Synthetic oligonucleotide
  Target: LAMA2; (-) strand; PAM type: YTN; PAM sequence: CTA
ctcacagatatgcagtcatt

SEQ ID NO: 257086 - DNA, 20 bp, Artificial Sequence
  Description of Artificial Sequence: Synthetic oligonucleotide
  Target: LAMA2; (-) strand; PAM type: YTN; PAM sequence: CTC
atctactcacagatatgcag

SEQ ID NO: 257087 - DNA, 20 bp, Artificial Sequence
  Description of Artificial Sequence: Synthetic oligonucleotide
  Target: LAMA2; (-) strand; PAM type: YTN; PAM sequence: TTA
tgctcatctactcacagata

SEQ ID NO: 257088 - DNA, 20 bp, Artificial Sequence
  Description of Artificial Sequence: Synthetic oligonucleotide
  Target: LAMA2; (-) strand; PAM type: YTN; PAM sequence: TTT
atgctcatctactcacagat

SEQ ID NO: 257089 - DNA, 20 bp, Artificial Sequence
  Description of Artificial Sequence: Synthetic oligonucleotide
  Target: LAMA2; (-) strand; PAM type: YTN; PAM sequence: TTT
tatgctcatctactcacaga

SEQ ID NO: 257090 - DNA, 20 bp, Artificial Sequence
  Description of Artificial Sequence: Synthetic oligonucleotide
  Target: LAMA2; (-) strand; PAM type: YTN; PAM sequence: CTT
ttatgctcatctactcacag

SEQ ID NO: 257091 - DNA, 20 bp, Artificial Sequence
  Description of Artificial Sequence: Synthetic oligonucleotide
  Target: LAMA2; (-) strand; PAM type: YTN; PAM sequence: CTC
agtagtacaccacttttatg

SEQ ID NO: 257092 - DNA, 20 bp, Artificial Sequence
  Description of Artificial Sequence: Synthetic oligonucleotide
  Target: LAMA2; (-) strand; PAM type: YTN; PAM sequence: TTC
ctcagtagtacaccactttt

SEQ ID NO: 257093 - DNA, 20 bp, Artificial Sequence
  Description of Artificial Sequence: Synthetic oligonucleotide
  Target: LAMA2; (-) strand; PAM type: YTN; PAM sequence: TTT
cctcagtagtacaccacttt

SEQ ID NO: 257094 - DNA, 20 bp, Artificial Sequence
  Description of Artificial Sequence: Synthetic oligonucleotide
  Target: LAMA2; (-) strand; PAM type: YTN; PAM sequence: TTG
aaggggatcaaaaacaatgt

SEQ ID NO: 257095 - DNA, 20 bp, Artificial Sequence
  Description of Artificial Sequence: Synthetic oligonucleotide
  Target: LAMA2; (-) strand; PAM type: YTN; PAM sequence: TTG
cagcaagtgtcaaaattgaa

SEQ ID NO: 257096 - DNA, 20 bp, Artificial Sequence
  Description of Artificial Sequence: Synthetic oligonucleotide
  Target: LAMA2; (-) strand; PAM type: YTN; PAM sequence: TTT
gcagcaagtgtcaaaattga

SEQ ID NO: 257097 - DNA, 20 bp, Artificial Sequence
  Description of Artificial Sequence: Synthetic oligonucleotide
  Target: LAMA2; (-) strand; PAM type: YTN; PAM sequence: TTT
tgcagcaagtgtcaaaattg

SEQ ID NO: 257098 - DNA, 20 bp, Artificial Sequence
  Description of Artificial Sequence: Synthetic oligonucleotide
  Target: LAMA2; (-) strand; PAM type: YTN; PAM sequence: CTT
ttgcagcaagtgtcaaaatt

SEQ ID NO: 257099 - DNA, 20 bp, Artificial Sequence
  Description of Artificial Sequence: Synthetic oligonucleotide
  Target: LAMA2; (-) strand; PAM type: YTN; PAM sequence: TTA
ccaagataaagtcttttgca

SEQ ID NO: 257100 - DNA, 20 bp, Artificial Sequence
  Description of Artificial Sequence: Synthetic oligonucleotide
  Target: LAMA2; (-) strand; PAM type: YTN; PAM sequence: CTT
accaagataaagtcttttgc

SEQ ID NO: 257101 - DNA, 20 bp, Artificial Sequence
  Description of Artificial Sequence: Synthetic oligonucleotide
  Target: LAMA2; (-) strand; PAM type: YTN; PAM sequence: TTG
ccatcttaccaagataaagt

SEQ ID NO: 257102 - DNA, 20 bp, Artificial Sequence
  Description of Artificial Sequence: Synthetic oligonucleotide
  Target: LAMA2; (-) strand; PAM type: YTN; PAM sequence: TTT
gccatcttaccaagataaag

SEQ ID NO: 257103 - DNA, 20 bp, Artificial Sequence
  Description of Artificial Sequence: Synthetic oligonucleotide
  Target: LAMA2; (-) strand; PAM type: YTN; PAM sequence: CTT
tgccatcttaccaagataaa

SEQ ID NO: 257104 - DNA, 20 bp, Artificial Sequence
  Description of Artificial Sequence: Synthetic oligonucleotide
  Target: LAMA2; (-) strand; PAM type: YTN; PAM sequence: TTA
tctttgccatcttaccaaga

SEQ ID NO: 257105 - DNA, 20 bp, Artificial Sequence
  Description of Artificial Sequence: Synthetic oligonucleotide
  Target: LAMA2; (-) strand; PAM type: YTN; PAM sequence: CTG
ttatctttgccatcttacca

SEQ ID NO: 257106 - DNA, 20 bp, Artificial Sequence
  Description of Artificial Sequence: Synthetic oligonucleotide
  Target: LAMA2; (-) strand; PAM type: YTN; PAM sequence: CTC
tgttatctttgccatcttac

SEQ ID NO: 257107 - DNA, 20 bp, Artificial Sequence
  Description of Artificial Sequence: Synthetic oligonucleotide
  Target: LAMA2; (-) strand; PAM type: YTN; PAM sequence: CTA
gctctgttatctttgccatc

SEQ ID NO: 257108 - DNA, 20 bp, Artificial Sequence
  Description of Artificial Sequence: Synthetic oligonucleotide
  Target: LAMA2; (-) strand; PAM type: YTN; PAM sequence: TTA
tggtcaggctagctctgtta

SEQ ID NO: 257109 - DNA, 20 bp, Artificial Sequence
  Description of Artificial Sequence: Synthetic oligonucleotide
  Target: LAMA2; (-) strand; PAM type: YTN; PAM sequence: CTT
atggtcaggctagctctgtt

SEQ ID NO: 257110 - DNA, 20 bp, Artificial Sequence
  Description of Artificial Sequence: Synthetic oligonucleotide
  Target: LAMA2; (-) strand; PAM type: YTN; PAM sequence: CTG
aatcttatggtcaggctagc

SEQ ID NO: 257111 - DNA, 20 bp, Artificial Sequence
  Description of Artificial Sequence: Synthetic oligonucleotide
  Target: LAMA2; (-) strand; PAM type: YTN; PAM sequence: TTG
ccaaaggagaaacagaacag

SEQ ID NO: 257112 - DNA, 20 bp, Artificial Sequence
  Description of Artificial Sequence: Synthetic oligonucleotide
  Target: LAMA2; (-) strand; PAM type: YTN; PAM sequence: TTT
gccaaaggagaaacagaaca

SEQ ID NO: 257113 - DNA, 20 bp, Artificial Sequence
  Description of Artificial Sequence: Synthetic oligonucleotide
  Target: LAMA2; (-) strand; PAM type: YTN; PAM sequence: CTA
agccacatttgccaaaggag

SEQ ID NO: 257114 - DNA, 20 bp, Artificial Sequence
  Description of Artificial Sequence: Synthetic oligonucleotide
  Target: LAMA2; (-) strand; PAM type: YTN; PAM sequence: TTA
tactaagccacatttgccaa

SEQ ID NO: 257115 - DNA, 20 bp, Artificial Sequence
  Description of Artificial Sequence: Synthetic oligonucleotide
  Target: LAMA2; (-) strand; PAM type: YTN; PAM sequence: TTT
atactaagccacatttgcca

SEQ ID NO: 257116 - DNA, 20 bp, Artificial Sequence
  Description of Artificial Sequence: Synthetic oligonucleotide
  Target: LAMA2; (-) strand; PAM type: YTN; PAM sequence: CTT
tatactaagccacatttgcc

SEQ ID NO: 257117 - DNA, 20 bp, Artificial Sequence
  Description of Artificial Sequence: Synthetic oligonucleotide
  Target: LAMA2; (-) strand; PAM type: YTN; PAM sequence: CTC
acactttatactaagccaca

SEQ ID NO: 257118 - DNA, 20 bp, Artificial Sequence
  Description of Artificial Sequence: Synthetic oligonucleotide
  Target: LAMA2; (-) strand; PAM type: YTN; PAM sequence: TTG
ctcacactttatactaagcc

SEQ ID NO: 257119 - DNA, 20 bp, Artificial Sequence
  Description of Artificial Sequence: Synthetic oligonucleotide
  Target: LAMA2; (-) strand; PAM type: YTN; PAM sequence: TTT
gctcacactttatactaagc

SEQ ID NO: 257120 - DNA, 20 bp, Artificial Sequence
  Description of Artificial Sequence: Synthetic oligonucleotide
  Target: LAMA2; (-) strand; PAM type: YTN; PAM sequence: TTC
aatgacatttgctcacactt

SEQ ID NO: 257121 - DNA, 20 bp, Artificial Sequence
  Description of Artificial Sequence: Synthetic oligonucleotide
  Target: LAMA2; (-) strand; PAM type: YTN; PAM sequence: TTT
caatgacatttgctcacact

SEQ ID NO: 257122 - DNA, 20 bp, Artificial Sequence
  Description of Artificial Sequence: Synthetic oligonucleotide
  Target: LAMA2; (-) strand; PAM type: YTN; PAM sequence: CTT
tcaatgacatttgctcacac

SEQ ID NO: 257123 - DNA, 20 bp, Artificial Sequence
  Description of Artificial Sequence: Synthetic oligonucleotide
  Target: LAMA2; (-) strand; PAM type: YTN; PAM sequence: CTC
tttcaatgacatttgctcac

SEQ ID NO: 257124 - DNA, 20 bp, Artificial Sequence
  Description of Artificial Sequence: Synthetic oligonucleotide
  Target: LAMA2; (-) strand; PAM type: YTN; PAM sequence: TTC
tctttcaatgacatttgctc

SEQ ID NO: 257125 - DNA, 20 bp, Artificial Sequence
  Description of Artificial Sequence: Synthetic oligonucleotide
  Target: LAMA2; (-) strand; PAM type: YTN; PAM sequence: CTT
ctctttcaatgacatttgct

SEQ ID NO: 257126 - DNA, 20 bp, Artificial Sequence
  Description of Artificial Sequence: Synthetic oligonucleotide
  Target: LAMA2; (-) strand; PAM type: YTN; PAM sequence: CTG
tcttctctttcaatgacatt

SEQ ID NO: 257127 - DNA, 20 bp, Artificial Sequence
  Description of Artificial Sequence: Synthetic oligonucleotide
  Target: LAMA2; (-) strand; PAM type: YTN; PAM sequence: CTC
tgtcttctctttcaatgaca

SEQ ID NO: 257128 - DNA, 20 bp, Artificial Sequence
  Description of Artificial Sequence: Synthetic oligonucleotide
  Target: LAMA2; (-) strand; PAM type: YTN; PAM sequence: CTG
ctctgtcttctctttcaatg

SEQ ID NO: 257129 - DNA, 20 bp, Artificial Sequence
  Description of Artificial Sequence: Synthetic oligonucleotide
  Target: LAMA2; (-) strand; PAM type: YTN; PAM sequence: TTC
tgctctgtcttctctttcaa

SEQ ID NO: 257130 - DNA, 20 bp, Artificial Sequence
  Description of Artificial Sequence: Synthetic oligonucleotide
  Target: LAMA2; (-) strand; PAM type: YTN; PAM sequence: TTA
tattctgctctgtcttctct

SEQ ID NO: 257131 - DNA, 20 bp, Artificial Sequence
  Description of Artificial Sequence: Synthetic oligonucleotide
  Target: LAMA2; (-) strand; PAM type: YTN; PAM sequence: TTT
atattctgctctgtcttctc

SEQ ID NO: 257132 - DNA, 20 bp, Artificial Sequence
  Description of Artificial Sequence: Synthetic oligonucleotide
  Target: LAMA2; (-) strand; PAM type: YTN; PAM sequence: CTA
tttatattctgctctgtctt

SEQ ID NO: 257133 - DNA, 20 bp, Artificial Sequence
  Description of Artificial Sequence: Synthetic oligonucleotide
  Target: LAMA2; (-) strand; PAM type: YTN; PAM sequence: TTA
taggcagcgcctatttatat

SEQ ID NO: 257134 - DNA, 20 bp, Artificial Sequence
  Description of Artificial Sequence: Synthetic oligonucleotide
  Target: LAMA2; (-) strand; PAM type: YTN; PAM sequence: CTT
ataggcagcgcctatttata

SEQ ID NO: 257135 - DNA, 20 bp, Artificial Sequence
  Description of Artificial Sequence: Synthetic oligonucleotide
  Target: LAMA2; (-) strand; PAM type: YTN; PAM sequence: CTA
caggtgtgcagaaacgtcct

SEQ ID NO: 257136 - DNA, 20 bp, Artificial Sequence
  Description of Artificial Sequence: Synthetic oligonucleotide
  Target: LAMA2; (-) strand; PAM type: YTN; PAM sequence: CTG
ctacaggtgtgcagaaacgt

SEQ ID NO: 257137 - DNA, 20 bp, Artificial Sequence
  Description of Artificial Sequence: Synthetic oligonucleotide
  Target: LAMA2; (-) strand; PAM type: YTN; PAM sequence: TTA
ctgctacaggtgtgcagaaa

SEQ ID NO: 257138 - DNA, 20 bp, Artificial Sequence
  Description of Artificial Sequence: Synthetic oligonucleotide
  Target: LAMA2; (-) strand; PAM type: YTN; PAM sequence: CTT
actgctacaggtgtgcagaa

SEQ ID NO: 257139 - DNA, 20 bp, Artificial Sequence
  Description of Artificial Sequence: Synthetic oligonucleotide
  Target: LAMA2; (-) strand; PAM type: YTN; PAM sequence: TTA
aaatgcaacttactgctaca

SEQ ID NO: 257140 - DNA, 20 bp, Artificial Sequence
  Description of Artificial Sequence: Synthetic oligonucleotide
  Target: LAMA2; (-) strand; PAM type: YTN; PAM sequence: TTT
aaaatgcaacttactgctac

SEQ ID NO: 257141 - DNA, 20 bp, Artificial Sequence
  Description of Artificial Sequence: Synthetic oligonucleotide
  Target: LAMA2; (-) strand; PAM type: YTN; PAM sequence: TTT
taaaatgcaacttactgcta

SEQ ID NO: 257142 - DNA, 20 bp, Artificial Sequence
  Description of Artificial Sequence: Synthetic oligonucleotide
  Target: LAMA2; (-) strand; PAM type: YTN; PAM sequence: TTA
tgttttaaaatgcaacttac

SEQ ID NO: 257143 - DNA, 20 bp, Artificial Sequence
  Description of Artificial Sequence: Synthetic oligonucleotide
  Target: LAMA2; (-) strand; PAM type: YTN; PAM sequence: CTA
aatgttatgttttaaaatgc

SEQ ID NO: 257144 - DNA, 20 bp, Artificial Sequence
  Description of Artificial Sequence: Synthetic oligonucleotide
  Target: LAMA2; (-) strand; PAM type: YTN; PAM sequence: CTG
acctaaatgttatgttttaa

SEQ ID NO: 257145 - DNA, 20 bp, Artificial Sequence
  Description of Artificial Sequence: Synthetic oligonucleotide
  Target: LAMA2; (-) strand; PAM type: YTN; PAM sequence: CTC
tgacctaaatgttatgtttt

SEQ ID NO: 257146 - DNA, 20 bp, Artificial Sequence
  Description of Artificial Sequence: Synthetic oligonucleotide
  Target: LAMA2; (-) strand; PAM type: YTN; PAM sequence: TTC
tctgacctaaatgttatgtt

SEQ ID NO: 257147 - DNA, 20 bp, Artificial Sequence
  Description of Artificial Sequence: Synthetic oligonucleotide
  Target: LAMA2; (-) strand; PAM type: YTN; PAM sequence: TTT
ctctgacctaaatgttatgt

SEQ ID NO: 257148 - DNA, 20 bp, Artificial Sequence
  Description of Artificial Sequence: Synthetic oligonucleotide
  Target: LAMA2; (-) strand; PAM type: YTN; PAM sequence: TTT
tctctgacctaaatgttatg

SEQ ID NO: 257149 - DNA, 20 bp, Artificial Sequence
  Description of Artificial Sequence: Synthetic oligonucleotide
  Target: LAMA2; (-) strand; PAM type: YTN; PAM sequence: TTA
aaaacgatagcagcaaattt

SEQ ID NO: 257150 - DNA, 20 bp, Artificial Sequence
  Description of Artificial Sequence: Synthetic oligonucleotide
  Target: LAMA2; (-) strand; PAM type: YTN; PAM sequence: TTT
aaaaacgatagcagcaaatt

SEQ ID NO: 257151 - DNA, 20 bp, Artificial Sequence
  Description of Artificial Sequence: Synthetic oligonucleotide
  Target: LAMA2; (-) strand; PAM type: YTN; PAM sequence: TTT
taaaaacgatagcagcaaat

SEQ ID NO: 257152 - DNA, 20 bp, Artificial Sequence
  Description of Artificial Sequence: Synthetic oligonucleotide
  Target: LAMA2; (-) strand; PAM type: YTN; PAM sequence: TTT
ttaaaaacgatagcagcaaa

SEQ ID NO: 257153 - DNA, 20 bp, Artificial Sequence
  Description of Artificial Sequence: Synthetic oligonucleotide
  Target: LAMA2; (-) strand; PAM type: YTN; PAM sequence: TTA
tagggcatggcaaagaagat

SEQ ID NO: 257154 - DNA, 20 bp, Artificial Sequence
  Description of Artificial Sequence: Synthetic oligonucleotide
  Target: LAMA2; (-) strand; PAM type: YTN; PAM sequence: TTT
atagggcatggcaaagaaga

SEQ ID NO: 257155 - DNA, 20 bp, Artificial Sequence
  Description of Artificial Sequence: Synthetic oligonucleotide
  Target: LAMA2; (-) strand; PAM type: YTN; PAM sequence: TTG
tttatagggcatggcaaaga

SEQ ID NO: 257156 - DNA, 20 bp, Artificial Sequence
  Description of Artificial Sequence: Synthetic oligonucleotide
  Target: LAMA2; (-) strand; PAM type: YTN; PAM sequence: TTT
gtttatagggcatggcaaag

SEQ ID NO: 257157 - DNA, 20 bp, Artificial Sequence
  Description of Artificial Sequence: Synthetic oligonucleotide
  Target: LAMA2; (-) strand; PAM type: YTN; PAM sequence: TTG
gaaaaacaaaagtttgttta

SEQ ID NO: 257158 - DNA, 20 bp, Artificial Sequence
  Description of Artificial Sequence: Synthetic oligonucleotide
  Target: LAMA2; (-) strand; PAM type: YTN; PAM sequence: TTA
ttggaaaaacaaaagtttgt

SEQ ID NO: 257159 - DNA, 20 bp, Artificial Sequence
  Description of Artificial Sequence: Synthetic oligonucleotide
  Target: LAMA2; (-) strand; PAM type: YTN; PAM sequence: TTA
tattattggaaaaacaaaag

SEQ ID NO: 257160 - DNA, 20 bp, Artificial Sequence
  Description of Artificial Sequence: Synthetic oligonucleotide
  Target: LAMA2; (-) strand; PAM type: YTN; PAM sequence: TTA
tataatatattatattattg

SEQ ID NO: 257161 - DNA, 20 bp, Artificial Sequence
  Description of Artificial Sequence: Synthetic oligonucleotide
  Target: LAMA2; (-) strand; PAM type: YTN; PAM sequence: TTT
atataatatattatattatt

SEQ ID NO: 257162 - DNA, 20 bp, Artificial Sequence
  Description of Artificial Sequence: Synthetic oligonucleotide
  Target: LAMA2; (-) strand; PAM type: YTN; PAM sequence: CTA
tttatataatatattatatt

SEQ ID NO: 257163 - DNA, 20 bp, Artificial Sequence
  Description of Artificial Sequence: Synthetic oligonucleotide
  Target: LAMA2; (-) strand; PAM type: YTN; PAM sequence: TTA
tataaatataatataatata

SEQ ID NO: 257164 - DNA, 20 bp, Artificial Sequence
  Description of Artificial Sequence: Synthetic oligonucleotide
  Target: LAMA2; (-) strand; PAM type: YTN; PAM sequence: TTA
tatatattatataaatataa

SEQ ID NO: 257165 - DNA, 20 bp, Artificial Sequence
  Description of Artificial Sequence: Synthetic oligonucleotide
  Target: LAMA2; (-) strand; PAM type: YTN; PAM sequence: TTA
ttatatatattatataaata

SEQ ID NO: 257166 - DNA, 20 bp, Artificial Sequence
  Description of Artificial Sequence: Synthetic oligonucleotide
  Target: LAMA2; (-) strand; PAM type: YTN; PAM sequence: TTA
tatattattatatatattat

SEQ ID NO: 257167 - DNA, 20 bp, Artificial Sequence
  Description of Artificial Sequence: Synthetic oligonucleotide
  Target: LAMA2; (-) strand; PAM type: YTN; PAM sequence: TTA
tataaatataatatattata

SEQ ID NO: 257168 - DNA, 20 bp, Artificial Sequence
  Description of Artificial Sequence: Synthetic oligonucleotide
  Target: LAMA2; (-) strand; PAM type: YTN; PAM sequence: TTA
tatatattatataaatataa

SEQ ID NO: 257169 - DNA, 20 bp, Artificial Sequence
  Description of Artificial Sequence: Synthetic oligonucleotide
  Target: LAMA2; (-) strand; PAM type: YTN; PAM sequence: TTA
ttatatatattatataaata

SEQ ID NO: 257170 - DNA, 20 bp, Artificial Sequence
  Description of Artificial Sequence: Synthetic oligonucleotide
  Target: LAMA2; (-) strand; PAM type: YTN; PAM sequence: TTA
tatattattatatatattat

SEQ ID NO: 257171 - DNA, 20 bp, Artificial Sequence
  Description of Artificial Sequence: Synthetic oligonucleotide
  Target: LAMA2; (-) strand; PAM type: YTN; PAM sequence: TTA
tataaatataatatattata

SEQ ID NO: 257172 - DNA, 20 bp, Artificial Sequence
  Description of Artificial Sequence: Synthetic oligonucleotide
  Target: LAMA2; (-) strand; PAM type: YTN; PAM sequence: TTA
tatatattatataaatataa

SEQ ID NO: 257173 - DNA, 20 bp, Artificial Sequence
  Description of Artificial Sequence: Synthetic oligonucleotide
  Target: LAMA2; (-) strand; PAM type: YTN; PAM sequence: TTA
ttatatatattatataaata

SEQ ID NO: 257174 - DNA, 20 bp, Artificial Sequence
  Description of Artificial Sequence: Synthetic oligonucleotide
  Target: LAMA2; (-) strand; PAM type: YTN; PAM sequence: TTA
tatattattatatatattat

SEQ ID NO: 257175 - DNA, 20 bp, Artificial Sequence
  Description of Artificial Sequence: Synthetic oligonucleotide
  Target: LAMA2; (-) strand; PAM type: YTN; PAM sequence: TTA
tataaatataatatattata

SEQ ID NO: 257176 - DNA, 20 bp, Artificial Sequence
  Description of Artificial Sequence: Synthetic oligonucleotide
  Target: LAMA2; (-) strand; PAM type: YTN; PAM sequence: TTA
tatatattatataaatataa

SEQ ID NO: 257177 - DNA, 20 bp, Artificial Sequence
  Description of Artificial Sequence: Synthetic oligonucleotide
  Target: LAMA2; (-) strand; PAM type: YTN; PAM sequence: TTA
ttatatatattatataaata

SEQ ID NO: 257178 - DNA, 20 bp, Artificial Sequence
  Description of Artificial Sequence: Synthetic oligonucleotide
  Target: LAMA2; (-) strand; PAM type: YTN; PAM sequence: TTA
tatattattatatatattat

SEQ ID NO: 257179 - DNA, 20 bp, Artificial Sequence
  Description of Artificial Sequence: Synthetic oligonucleotide
  Target: LAMA2; (-) strand; PAM type: YTN; PAM sequence: TTA
tataatatattatatattat

SEQ ID NO: 257180 - DNA, 20 bp, Artificial Sequence
  Description of Artificial Sequence: Synthetic oligonucleotide
  Target: LAMA2; (-) strand; PAM type: YTN; PAM sequence: TTA
tataatatattatataatat

SEQ ID NO: 257181 - DNA, 20 bp, Artificial Sequence
  Description of Artificial Sequence: Synthetic oligonucleotide
  Target: LAMA2; (-) strand; PAM type: YTN; PAM sequence: TTA
tatattatataatatattat

SEQ ID NO: 257182 - DNA, 20 bp, Artificial Sequence
  Description of Artificial Sequence: Synthetic oligonucleotide
  Target: LAMA2; (-) strand; PAM type: YTN; PAM sequence: TTA
ttatatattatataatatat

SEQ ID NO: 257183 - DNA, 20 bp, Artificial Sequence
  Description of Artificial Sequence: Synthetic oligonucleotide
  Target: LAMA2; (-) strand; PAM type: YTN; PAM sequence: TTA
tatattattatatattatat

SEQ ID NO: 257184 - DNA, 20 bp, Artificial Sequence
  Description of Artificial Sequence: Synthetic oligonucleotide
  Target: LAMA2; (-) strand; PAM type: YTN; PAM sequence: TTA
tataatatattatatattat

SEQ ID NO: 257185 - DNA, 20 bp, Artificial Sequence
  Description of Artificial Sequence: Synthetic oligonucleotide
  Target: LAMA2; (-) strand; PAM type: YTN; PAM sequence: TTA
tatattatataatatattat

SEQ ID NO: 257186 - DNA, 20 bp, Artificial Sequence
  Description of Artificial Sequence: Synthetic oligonucleotide
  Target: LAMA2; (-) strand; PAM type: YTN; PAM sequence: TTA
ttatatattatataatatat

SEQ ID NO: 257187 - DNA, 20 bp, Artificial Sequence
  Description of Artificial Sequence: Synthetic oligonucleotide
  Target: LAMA2; (-) strand; PAM type: YTN; PAM sequence: TTA
tatattattatatattatat

SEQ ID NO: 257188 - DNA, 20 bp, Artificial Sequence
  Description of Artificial Sequence: Synthetic oligonucleotide
  Target: LAMA2; (-) strand; PAM type: YTN; PAM sequence: TTA
tataatatattatatattat

SEQ ID NO: 257189 - DNA, 20 bp, Artificial Sequence
  Description of Artificial Sequence: Synthetic oligonucleotide
  Target: LAMA2; (-) strand; PAM type: YTN; PAM sequence: TTA
tatattatataatatattat

SEQ ID NO: 257190 - DNA, 20 bp, Artificial Sequence
  Description of Artificial Sequence: Synthetic oligonucleotide
  Target: LAMA2; (-) strand; PAM type: YTN; PAM sequence: TTA
ttatatattatataatatat

SEQ ID NO: 257191 - DNA, 20 bp, Artificial Sequence
  Description of Artificial Sequence: Synthetic oligonucleotide
  Target: LAMA2; (-) strand; PAM type: YTN; PAM sequence: TTA
tatattattatatattatat

SEQ ID NO: 257192 - DNA, 20 bp, Artificial Sequence
  Description of Artificial Sequence: Synthetic oligonucleotide
  Target: LAMA2; (-) strand; PAM type: YTN; PAM sequence: TTA
tataatatattatatattat

SEQ ID NO: 257193 - DNA, 20 bp, Artificial Sequence
  Description of Artificial Sequence: Synthetic oligonucleotide
  Target: LAMA2; (-) strand; PAM type: YTN; PAM sequence: TTA
tatattatataatatattat

SEQ ID NO: 257194 - DNA, 20 bp, Artificial Sequence
  Description of Artificial Sequence: Synthetic oligonucleotide
  Target: LAMA2; (-) strand; PAM type: YTN; PAM sequence: TTA
ttatatattatataatatat

SEQ ID NO: 257195 - DNA, 20 bp, Artificial Sequence
  Description of Artificial Sequence: Synthetic oligonucleotide
  Target: LAMA2; (-) strand; PAM type: YTN; PAM sequence: TTA
tatattattatatattatat

SEQ ID NO: 257196 - DNA, 20 bp, Artificial Sequence
  Description of Artificial Sequence: Synthetic oligonucleotide
  Target: LAMA2; (-) strand; PAM type: YTN; PAM sequence: TTA
tataatatattatatattat

SEQ ID NO: 257197 - DNA, 20 bp, Artificial Sequence
  Description of Artificial Sequence: Synthetic oligonucleotide
  Target: LAMA2; (-) strand; PAM type: YTN; PAM sequence: TTA
tatattatataatatattat

SEQ ID NO: 257198 - DNA, 20 bp, Artificial Sequence
  Description of Artificial Sequence: Synthetic oligonucleotide
  Target: LAMA2; (-) strand; PAM type: YTN; PAM sequence: TTA
ttatatattatataatatat

SEQ ID NO: 257199 - DNA, 20 bp, Artificial Sequence
  Description of Artificial Sequence: Synthetic oligonucleotide
  Target: LAMA2; (-) strand; PAM type: YTN; PAM sequence: TTA
tatattattatatattatat

SEQ ID NO: 257200 - DNA, 20 bp, Artificial Sequence
  Description of Artificial Sequence: Synthetic oligonucleotide
  Target: LAMA2; (-) strand; PAM type: YTN; PAM sequence: TTA
tataatatattatatattat

SEQ ID NO: 257201 - DNA, 20 bp, Artificial Sequence
  Description of Artificial Sequence: Synthetic oligonucleotide
  Target: LAMA2; (-) strand; PAM type: YTN; PAM sequence: TTA
tatattatataatatattat

SEQ ID NO: 257202 - DNA, 20 bp, Artificial Sequence
  Description of Artificial Sequence: Synthetic oligonucleotide
  Target: LAMA2; (-) strand; PAM type: YTN; PAM sequence: TTA
ttatatattatataatatat

SEQ ID NO: 257203 - DNA, 20 bp, Artificial Sequence
  Description of Artificial Sequence: Synthetic oligonucleotide
  Target: LAMA2; (-) strand; PAM type: YTN; PAM sequence: TTA
tatattattatatattatat

SEQ ID NO: 257204 - DNA, 20 bp, Artificial Sequence
  Description of Artificial Sequence: Synthetic oligonucleotide
  Target: LAMA2; (-) strand; PAM type: YTN; PAM sequence: TTA
tataatatattatatattat

SEQ ID NO: 257205 - DNA, 20 bp, Artificial Sequence
  Description of Artificial Sequence: Synthetic oligonucleotide
  Target: LAMA2; (-) strand; PAM type: YTN; PAM sequence: TTA
tatattatataatatattat

SEQ ID NO: 257206 - DNA, 20 bp, Artificial Sequence
  Description of Artificial Sequence: Synthetic oligonucleotide
  Target: LAMA2; (-) strand; PAM type: YTN; PAM sequence: TTA
tattatatattatataatat

SEQ ID NO: 257207 - DNA, 20 bp, Artificial Sequence
  Description of Artificial Sequence: Synthetic oligonucleotide
  Target: LAMA2; (-) strand; PAM type: YTN; PAM sequence: TTT
atattatatattatataata

SEQ ID NO: 257208 - DNA, 20 bp, Artificial Sequence
  Description of Artificial Sequence: Synthetic oligonucleotide
  Target: LAMA2; (-) strand; PAM type: YTN; PAM sequence: CTA
tttatattatatattatata

SEQ ID NO: 257209 - DNA, 20 bp, Artificial Sequence
  Description of Artificial Sequence: Synthetic oligonucleotide
  Target: LAMA2; (-) strand; PAM type: YTN; PAM sequence: TTA
ccaaaaactatttatattat

SEQ ID NO: 257210 - DNA, 20 bp, Artificial Sequence
  Description of Artificial Sequence: Synthetic oligonucleotide
  Target: LAMA2; (-) strand; PAM type: YTN; PAM sequence: CTT
accaaaaactatttatatta

SEQ ID NO: 257211 - DNA, 20 bp, Artificial Sequence
  Description of Artificial Sequence: Synthetic oligonucleotide
  Target: LAMA2; (-) strand; PAM type: YTN; PAM sequence: TTC
ttaccaaaaactatttatat

SEQ ID NO: 257212 - DNA, 20 bp, Artificial Sequence
  Description of Artificial Sequence: Synthetic oligonucleotide
  Target: LAMA2; (-) strand; PAM type: YTN; PAM sequence: TTT
cttaccaaaaactatttata

SEQ ID NO: 257213 - DNA, 20 bp, Artificial Sequence
  Description of Artificial Sequence: Synthetic oligonucleotide
  Target: LAMA2; (-) strand; PAM type: YTN; PAM sequence: CTT
tcttaccaaaaactatttat

SEQ ID NO: 257214 - DNA, 20 bp, Artificial Sequence
  Description of Artificial Sequence: Synthetic oligonucleotide
  Target: LAMA2; (-) strand; PAM type: YTN; PAM sequence: TTC
tttcttaccaaaaactattt

SEQ ID NO: 257215 - DNA, 20 bp, Artificial Sequence
  Description of Artificial Sequence: Synthetic oligonucleotide
  Target: LAMA2; (-) strand; PAM type: YTN; PAM sequence: TTT
ctttcttaccaaaaactatt

SEQ ID NO: 257216 - DNA, 20 bp, Artificial Sequence
  Description of Artificial Sequence: Synthetic oligonucleotide
  Target: LAMA2; (-) strand; PAM type: YTN; PAM sequence: CTT
tctttcttaccaaaaactat

SEQ ID NO: 257217 - DNA, 20 bp, Artificial Sequence
  Description of Artificial Sequence: Synthetic oligonucleotide
  Target: LAMA2; (-) strand; PAM type: YTN; PAM sequence: CTC
tttctttcttaccaaaaact

SEQ ID NO: 257218 - DNA, 20 bp, Artificial Sequence
  Description of Artificial Sequence: Synthetic oligonucleotide
  Target: LAMA2; (-) strand; PAM type: YTN; PAM sequence: CTG
ctctttctttcttaccaaaa

SEQ ID NO: 257219 - DNA, 20 bp, Artificial Sequence
  Description of Artificial Sequence: Synthetic oligonucleotide
  Target: LAMA2; (-) strand; PAM type: YTN; PAM sequence: CTC
ctgctctttctttcttacca

SEQ ID NO: 257220 - DNA, 20 bp, Artificial Sequence
  Description of Artificial Sequence: Synthetic oligonucleotide
  Target: LAMA2; (-) strand; PAM type: YTN; PAM sequence: TTG
tctcctgctctttctttctt

SEQ ID NO: 257221 - DNA, 20 bp, Artificial Sequence
  Description of Artificial Sequence: Synthetic oligonucleotide
  Target: LAMA2; (-) strand; PAM type: YTN; PAM sequence: TTT
gtctcctgctctttctttct

SEQ ID NO: 257222 - DNA, 20 bp, Artificial Sequence
  Description of Artificial Sequence: Synthetic oligonucleotide
  Target: LAMA2; (-) strand; PAM type: YTN; PAM sequence: CTT
tgtctcctgctctttctttc

SEQ ID NO: 257223 - DNA, 20 bp, Artificial Sequence
  Description of Artificial Sequence: Synthetic oligonucleotide
  Target: LAMA2; (-) strand; PAM type: YTN; PAM sequence: TTC
tttgtctcctgctctttctt

SEQ ID NO: 257224 - DNA, 20 bp, Artificial Sequence
  Description of Artificial Sequence: Synthetic oligonucleotide
  Target: LAMA2; (-) strand; PAM type: YTN; PAM sequence: TTT
ctttgtctcctgctctttct

SEQ ID NO: 257225 - DNA, 20 bp, Artificial Sequence
  Description of Artificial Sequence: Synthetic oligonucleotide
  Target: LAMA2; (-) strand; PAM type: YTN; PAM sequence: CTT
tctttgtctcctgctctttc

SEQ ID NO: 257226 - DNA, 20 bp, Artificial Sequence
  Description of Artificial Sequence: Synthetic oligonucleotide
  Target: LAMA2; (-) strand; PAM type: YTN; PAM sequence: TTC
tttctttgtctcctgctctt

SEQ ID NO: 257227 - DNA, 20 bp, Artificial Sequence
  Description of Artificial Sequence: Synthetic oligonucleotide
  Target: LAMA2; (-) strand; PAM type: YTN; PAM sequence: TTT
ctttctttgtctcctgctct

SEQ ID NO: 257228 - DNA, 20 bp, Artificial Sequence
  Description of Artificial Sequence: Synthetic oligonucleotide
  Target: LAMA2; (-) strand; PAM type: YTN; PAM sequence: CTT
tctttctttgtctcctgctc

SEQ ID NO: 257229 - DNA, 20 bp, Artificial Sequence
  Description of Artificial Sequence: Synthetic oligonucleotide
  Target: LAMA2; (-) strand; PAM type: YTN; PAM sequence: TTC
tttctttctttgtctcctgc

SEQ ID NO: 257230 - DNA, 20 bp, Artificial Sequence
  Description of Artificial Sequence: Synthetic oligonucleotide
  Target: LAMA2; (-) strand; PAM type: YTN; PAM sequence: TTT
ctttctttctttgtctcctg

SEQ ID NO: 257231 - DNA, 20 bp, Artificial Sequence
  Description of Artificial Sequence: Synthetic oligonucleotide
  Target: LAMA2; (-) strand; PAM type: YTN; PAM sequence: CTG
tttctttctttctttgtctc

SEQ ID NO: 257232 - DNA, 20 bp, Artificial Sequence
  Description of Artificial Sequence: Synthetic oligonucleotide
  Target: LAMA2; (-) strand; PAM type: YTN; PAM sequence: CTC
tgtttctttctttctttgtc

SEQ ID NO: 257233 - DNA, 20 bp, Artificial Sequence
  Description of Artificial Sequence: Synthetic oligonucleotide
  Target: LAMA2; (-) strand; PAM type: YTN; PAM sequence: CTC
tctgtttctttctttctttg

SEQ ID NO: 257234 - DNA, 20 bp, Artificial Sequence
  Description of Artificial Sequence: Synthetic oligonucleotide
  Target: LAMA2; (-) strand; PAM type: YTN; PAM sequence: TTC
ctctctgtttctttctttct

SEQ ID NO: 257235 - DNA, 20 bp, Artificial Sequence
  Description of Artificial Sequence: Synthetic oligonucleotide
  Target: LAMA2; (-) strand; PAM type: YTN; PAM sequence: CTT
cctctctgtttctttctttc

SEQ ID NO: 257236 - DNA, 20 bp, Artificial Sequence
  Description of Artificial Sequence: Synthetic oligonucleotide
  Target: LAMA2; (-) strand; PAM type: YTN; PAM sequence: TTC
cttcctctctgtttctttct

SEQ ID NO: 257237 - DNA, 20 bp, Artificial Sequence
  Description of Artificial Sequence: Synthetic oligonucleotide
  Target: LAMA2; (-) strand; PAM type: YTN; PAM sequence: CTT
ccttcctctctgtttctttc

SEQ ID NO: 257238 - DNA, 20 bp, Artificial Sequence
  Description of Artificial Sequence: Synthetic oligonucleotide
  Target: LAMA2; (-) strand; PAM type: YTN; PAM sequence: TTC
cttccttcctctctgtttct

SEQ ID NO: 257239 - DNA, 20 bp, Artificial Sequence
  Description of Artificial Sequence: Synthetic oligonucleotide
  Target: LAMA2; (-) strand; PAM type: YTN; PAM sequence: CTT
ccttccttcctctctgtttc

SEQ ID NO: 257240 - DNA, 20 bp, Artificial Sequence
  Description of Artificial Sequence: Synthetic oligonucleotide
  Target: LAMA2; (-) strand; PAM type: YTN; PAM sequence: TTC
cttccttccttcctctctgt

SEQ ID NO: 257241 - DNA, 20 bp, Artificial Sequence
  Description of Artificial Sequence: Synthetic oligonucleotide
  Target: LAMA2; (-) strand; PAM type: YTN; PAM sequence: CTT
ccttccttccttcctctctg

SEQ ID NO: 257242 - DNA, 20 bp, Artificial Sequence
  Description of Artificial Sequence: Synthetic oligonucleotide
  Target: LAMA2; (-) strand; PAM type: YTN; PAM sequence: CTC
ccttccttccttccttcctc

SEQ ID NO: 257243 - DNA, 20 bp, Artificial Sequence
  Description of Artificial Sequence: Synthetic oligonucleotide
  Target: LAMA2; (-) strand; PAM type: YTN; PAM sequence: TTC
ctcccttccttccttccttc

SEQ ID NO: 257244 - DNA, 20 bp, Artificial Sequence
  Description of Artificial Sequence: Synthetic oligonucleotide
  Target: LAMA2; (-) strand; PAM type: YTN; PAM sequence: TTT
cctcccttccttccttcctt

SEQ ID NO: 257245 - DNA, 20 bp, Artificial Sequence
  Description of Artificial Sequence: Synthetic oligonucleotide
  Target: LAMA2; (-) strand; PAM type: YTN; PAM sequence: CTT
tcctcccttccttccttcct

SEQ ID NO: 257246 - DNA, 20 bp, Artificial Sequence
  Description of Artificial Sequence: Synthetic oligonucleotide
  Target: LAMA2; (-) strand; PAM type: YTN; PAM sequence: CTC
tttcctcccttccttccttc

SEQ ID NO: 257247 - DNA, 20 bp, Artificial Sequence
  Description of Artificial Sequence: Synthetic oligonucleotide
  Target: LAMA2; (-) strand; PAM type: YTN; PAM sequence: TTC
cctctttcctcccttccttc

SEQ ID NO: 257248 - DNA, 20 bp, Artificial Sequence
  Description of Artificial Sequence: Synthetic oligonucleotide
  Target: LAMA2; (-) strand; PAM type: YTN; PAM sequence: CTT
ccctctttcctcccttcctt

SEQ ID NO: 257249 - DNA, 20 bp, Artificial Sequence
  Description of Artificial Sequence: Synthetic oligonucleotide
  Target: LAMA2; (-) strand; PAM type: YTN; PAM sequence: CTC
cttccctctttcctcccttc

SEQ ID NO: 257250 - DNA, 20 bp, Artificial Sequence
  Description of Artificial Sequence: Synthetic oligonucleotide
  Target: LAMA2; (-) strand; PAM type: YTN; PAM sequence: CTC
cctccttccctctttcctcc

SEQ ID NO: 257251 - DNA, 20 bp, Artificial Sequence
  Description of Artificial Sequence: Synthetic oligonucleotide
  Target: LAMA2; (-) strand; PAM type: YTN; PAM sequence: CTC
tccctccttccctctttcct

SEQ ID NO: 257252 - DNA, 20 bp, Artificial Sequence
  Description of Artificial Sequence: Synthetic oligonucleotide
  Target: LAMA2; (-) strand; PAM type: YTN; PAM sequence: CTC
tctccctccttccctctttc

SEQ ID NO: 257253 - DNA, 20 bp, Artificial Sequence
  Description of Artificial Sequence: Synthetic oligonucleotide
  Target: LAMA2; (-) strand; PAM type: YTN; PAM sequence: CTC
cctctctccctccttccctc

SEQ ID NO: 257254 - DNA, 20 bp, Artificial Sequence
  Description of Artificial Sequence: Synthetic oligonucleotide
  Target: LAMA2; (-) strand; PAM type: YTN; PAM sequence: CTC
cctccctctctccctccttc

SEQ ID NO: 257255 - DNA, 20 bp, Artificial Sequence
  Description of Artificial Sequence: Synthetic oligonucleotide
  Target: LAMA2; (-) strand; PAM type: YTN; PAM sequence: CTC
cctccctccctctctccctc

SEQ ID NO: 257256 - DNA, 20 bp, Artificial Sequence
  Description of Artificial Sequence: Synthetic oligonucleotide
  Target: LAMA2; (-) strand; PAM type: YTN; PAM sequence: CTC
cctccctccctccctctctc

SEQ ID NO: 257257 - DNA, 20 bp, Artificial Sequence
  Description of Artificial Sequence: Synthetic oligonucleotide
  Target: LAMA2; (-) strand; PAM type: YTN; PAM sequence: TTC
ctccctccctccctccctct

SEQ ID NO: 257258 - DNA, 20 bp, Artificial Sequence
  Description of Artificial Sequence: Synthetic oligonucleotide
  Target: LAMA2; (-) strand; PAM type: YTN; PAM sequence: CTT
cctccctccctccctccctc

SEQ ID NO: 257259 - DNA, 20 bp, Artificial Sequence
  Description of Artificial Sequence: Synthetic oligonucleotide
  Target: LAMA2; (-) strand; PAM type: YTN; PAM sequence: TTC
cttcctccctccctccctcc

SEQ ID NO: 257260 - DNA, 20 bp, Artificial Sequence
  Description of Artificial Sequence: Synthetic oligonucleotide
  Target: LAMA2; (-) strand; PAM type: YTN; PAM sequence: CTT
ccttcctccctccctccctc

SEQ ID NO: 257261 - DNA, 20 bp, Artificial Sequence
  Description of Artificial Sequence: Synthetic oligonucleotide
  Target: LAMA2; (-) strand; PAM type: YTN; PAM sequence: TTC
cttccttcctccctccctcc

SEQ ID NO: 257262 - DNA, 20 bp, Artificial Sequence
  Description of Artificial Sequence: Synthetic oligonucleotide
  Target: LAMA2; (-) strand; PAM type: YTN; PAM sequence: CTT
ccttccttcctccctccctc

SEQ ID NO: 257263 - DNA, 20 bp, Artificial Sequence
  Description of Artificial Sequence: Synthetic oligonucleotide
  Target: LAMA2; (-) strand; PAM type: YTN; PAM sequence: TTG
cttccttccttcctccctcc

SEQ ID NO: 257264 - DNA, 20 bp, Artificial Sequence
  Description of Artificial Sequence: Synthetic oligonucleotide
  Target: LAMA2; (-) strand; PAM type: YTN; PAM sequence: CTT
gcttccttccttcctccctc

SEQ ID NO: 257265 - DNA, 20 bp, Artificial Sequence
  Description of Artificial Sequence: Synthetic oligonucleotide
  Target: LAMA2; (-) strand; PAM type: YTN; PAM sequence: TTC
cttgcttccttccttcctcc

SEQ ID NO: 257266 - DNA, 20 bp, Artificial Sequence
  Description of Artificial Sequence: Synthetic oligonucleotide
  Target: LAMA2; (-) strand; PAM type: YTN; PAM sequence: CTT
ccttgcttccttccttcctc

SEQ ID NO: 257267 - DNA, 20 bp, Artificial Sequence
  Description of Artificial Sequence: Synthetic oligonucleotide
  Target: LAMA2; (-) strand; PAM type: YTN; PAM sequence: TTC
cttccttgcttccttccttc

SEQ ID NO: 257268 - DNA, 20 bp, Artificial Sequence
  Description of Artificial Sequence: Synthetic oligonucleotide
  Target: LAMA2; (-) strand; PAM type: YTN; PAM sequence: CTT
ccttccttgcttccttcctt

SEQ ID NO: 257269 - DNA, 20 bp, Artificial Sequence
  Description of Artificial Sequence: Synthetic oligonucleotide
  Target: LAMA2; (-) strand; PAM type: YTN; PAM sequence: TTC
cttccttccttgcttccttc

SEQ ID NO: 257270 - DNA, 20 bp, Artificial Sequence
  Description of Artificial Sequence: Synthetic oligonucleotide
  Target: LAMA2; (-) strand; PAM type: YTN; PAM sequence: CTT
ccttccttccttgcttcctt

SEQ ID NO: 257271 - DNA, 20 bp, Artificial Sequence
  Description of Artificial Sequence: Synthetic oligonucleotide
  Target: LAMA2; (-) strand; PAM type: YTN; PAM sequence: CTC
ccttccttccttccttgctt

SEQ ID NO: 257272 - DNA, 20 bp, Artificial Sequence
  Description of Artificial Sequence: Synthetic oligonucleotide
  Target: LAMA2; (-) strand; PAM type: YTN; PAM sequence: TTC
ctcccttccttccttccttg

SEQ ID NO: 257273 - DNA, 20 bp, Artificial Sequence
  Description of Artificial Sequence: Synthetic oligonucleotide
  Target: LAMA2; (-) strand; PAM type: YTN; PAM sequence: TTT
cctcccttccttccttcctt

SEQ ID NO: 257274 - DNA, 20 bp, Artificial Sequence
  Description of Artificial Sequence: Synthetic oligonucleotide
  Target: LAMA2; (-) strand; PAM type: YTN; PAM sequence: CTT
tcctcccttccttccttcct

SEQ ID NO: 257275 - DNA, 20 bp, Artificial Sequence
  Description of Artificial Sequence: Synthetic oligonucleotide
  Target: LAMA2; (-) strand; PAM type: YTN; PAM sequence: CTC
tttcctcccttccttccttc

SEQ ID NO: 257276 - DNA, 20 bp, Artificial Sequence
  Description of Artificial Sequence: Synthetic oligonucleotide
  Target: LAMA2; (-) strand; PAM type: YTN; PAM sequence: CTC
cctctttcctcccttccttc

SEQ ID NO: 257277 - DNA, 20 bp, Artificial Sequence
  Description of Artificial Sequence: Synthetic oligonucleotide
  Target: LAMA2; (-) strand; PAM type: YTN; PAM sequence: CTC
cctccctctttcctcccttc

SEQ ID NO: 257278 - DNA, 20 bp, Artificial Sequence
  Description of Artificial Sequence: Synthetic oligonucleotide
  Target: LAMA2; (-) strand; PAM type: YTN; PAM sequence: TTC
cctccctccctctttcctcc

SEQ ID NO: 257279 - DNA, 20 bp, Artificial Sequence
  Description of Artificial Sequence: Synthetic oligonucleotide
  Target: LAMA2; (-) strand; PAM type: YTN; PAM sequence: CTT
ccctccctccctctttcctc

SEQ ID NO: 257280 - DNA, 20 bp, Artificial Sequence
  Description of Artificial Sequence: Synthetic oligonucleotide
  Target: LAMA2; (-) strand; PAM type: YTN; PAM sequence: CTC
cttccctccctccctctttc

SEQ ID NO: 257281 - DNA, 20 bp, Artificial Sequence
  Description of Artificial Sequence: Synthetic oligonucleotide
  Target: LAMA2; (-) strand; PAM type: YTN; PAM sequence: TTC
cctccttccctccctccctc

SEQ ID NO: 257282 - DNA, 20 bp, Artificial Sequence
  Description of Artificial Sequence: Synthetic oligonucleotide
  Target: LAMA2; (-) strand; PAM type: YTN; PAM sequence: CTT
ccctccttccctccctccct

SEQ ID NO: 257283 - DNA, 20 bp, Artificial Sequence
  Description of Artificial Sequence: Synthetic oligonucleotide
  Target: LAMA2; (-) strand; PAM type: YTN; PAM sequence: CTC
cttccctccttccctccctc

SEQ ID NO: 257284 - DNA, 20 bp, Artificial Sequence
  Description of Artificial Sequence: Synthetic oligonucleotide
  Target: LAMA2; (-) strand; PAM type: YTN; PAM sequence: CTC
cctccttccctccttccctc

SEQ ID NO: 257285 - DNA, 20 bp, Artificial Sequence
  Description of Artificial Sequence: Synthetic oligonucleotide
  Target: LAMA2; (-) strand; PAM type: YTN; PAM sequence: TTC
ctccctccttccctccttcc

SEQ ID NO: 257286 - DNA, 20 bp, Artificial Sequence
  Description of Artificial Sequence: Synthetic oligonucleotide
  Target: LAMA2; (-) strand; PAM type: YTN; PAM sequence: CTT
cctccctccttccctccttc

SEQ ID NO: 257287 - DNA, 20 bp, Artificial Sequence
  Description of Artificial Sequence: Synthetic oligonucleotide
  Target: LAMA2; (-) strand; PAM type: YTN; PAM sequence: TTC
cttcctccctccttccctcc

SEQ ID NO: 257288 - DNA, 20 bp, Artificial Sequence
  Description of Artificial Sequence: Synthetic oligonucleotide
  Target: LAMA2; (-) strand; PAM type: YTN; PAM sequence: CTT
ccttcctccctccttccctc

SEQ ID NO: 257289 - DNA, 20 bp, Artificial Sequence
  Description of Artificial Sequence: Synthetic oligonucleotide
  Target: LAMA2; (-) strand; PAM type: YTN; PAM sequence: TTC
cttccttcctccctccttcc

SEQ ID NO: 257290 - DNA, 20 bp, Artificial Sequence
  Description of Artificial Sequence: Synthetic oligonucleotide
  Target: LAMA2; (-) strand; PAM type: YTN; PAM sequence: CTT
ccttccttcctccctccttc

SEQ ID NO: 257291 - DNA, 20 bp, Artificial Sequence
  Description of Artificial Sequence: Synthetic oligonucleotide
  Target: LAMA2; (-) strand; PAM type: YTN; PAM sequence: CTC
ttccttccttcctccctcct

SEQ ID NO: 257292 - DNA, 20 bp, Artificial Sequence
  Description of Artificial Sequence: Synthetic oligonucleotide
  Target: LAMA2; (-) strand; PAM type: YTN; PAM sequence: CTC
tcttccttccttcctccctc

SEQ ID NO: 257293 - DNA, 20 bp, Artificial Sequence
  Description of Artificial Sequence: Synthetic oligonucleotide
  Target: LAMA2; (-) strand; PAM type: YTN; PAM sequence: CTC
tctcttccttccttcctccc

SEQ ID NO: 257294 - DNA, 20 bp, Artificial Sequence
  Description of Artificial Sequence: Synthetic oligonucleotide
  Target: LAMA2; (-) strand; PAM type: YTN; PAM sequence: CTC
tctctcttccttccttcctc

SEQ ID NO: 257295 - DNA, 20 bp, Artificial Sequence
  Description of Artificial Sequence: Synthetic oligonucleotide
  Target: LAMA2; (-) strand; PAM type: YTN; PAM sequence: CTC
tctctctcttccttccttcc

SEQ ID NO: 257296 - DNA, 20 bp, Artificial Sequence
  Description of Artificial Sequence: Synthetic oligonucleotide
  Target: LAMA2; (-) strand; PAM type: YTN; PAM sequence: TTC
tctctctctcttccttcctt

SEQ ID NO: 257297 - DNA, 20 bp, Artificial Sequence
  Description of Artificial Sequence: Synthetic oligonucleotide
  Target: LAMA2; (-) strand; PAM type: YTN; PAM sequence: TTT
ctctctctctcttccttcct

SEQ ID NO: 257298 - DNA, 20 bp, Artificial Sequence
  Description of Artificial Sequence: Synthetic oligonucleotide
  Target: LAMA2; (-) strand; PAM type: YTN; PAM sequence: CTT
tctctctctctcttccttcc

SEQ ID NO: 257299 - DNA, 20 bp, Artificial Sequence
  Description of Artificial Sequence: Synthetic oligonucleotide
  Target: LAMA2; (-) strand; PAM type: YTN; PAM sequence: TTC
tttctctctctctcttcctt

SEQ ID NO: 257300 - DNA, 20 bp, Artificial Sequence
  Description of Artificial Sequence: Synthetic oligonucleotide
  Target: LAMA2; (-) strand; PAM type: YTN; PAM sequence: TTT
ctttctctctctctcttcct

SEQ ID NO: 257301 - DNA, 20 bp, Artificial Sequence
  Description of Artificial Sequence: Synthetic oligonucleotide
  Target: LAMA2; (-) strand; PAM type: YTN; PAM sequence: CTT
tctttctctctctctcttcc

SEQ ID NO: 257302 - DNA, 20 bp, Artificial Sequence
  Description of Artificial Sequence: Synthetic oligonucleotide
  Target: LAMA2; (-) strand; PAM type: YTN; PAM sequence: TTC
ctttctttctctctctctct

SEQ ID NO: 257303 - DNA, 20 bp, Artificial Sequence
  Description of Artificial Sequence: Synthetic oligonucleotide
  Target: LAMA2; (-) strand; PAM type: YTN; PAM sequence: CTT
cctttctttctctctctctc

SEQ ID NO: 257304 - DNA, 20 bp, Artificial Sequence
  Description of Artificial Sequence: Synthetic oligonucleotide
  Target: LAMA2; (-) strand; PAM type: YTN; PAM sequence: TTC
ttcctttctttctctctctc

SEQ ID NO: 257305 - DNA, 20 bp, Artificial Sequence
  Description of Artificial Sequence: Synthetic oligonucleotide
  Target: LAMA2; (-) strand; PAM type: YTN; PAM sequence: TTT
cttcctttctttctctctct

SEQ ID NO: 257306 - DNA, 20 bp, Artificial Sequence
  Description of Artificial Sequence: Synthetic oligonucleotide
  Target: LAMA2; (-) strand; PAM type: YTN; PAM sequence: CTT
tcttcctttctttctctctc

SEQ ID NO: 257307 - DNA, 20 bp, Artificial Sequence
  Description of Artificial Sequence: Synthetic oligonucleotide
  Target: LAMA2; (-) strand; PAM type: YTN; PAM sequence: CTC
cctttcttcctttctttctc

SEQ ID NO: 257308 - DNA, 20 bp, Artificial Sequence
  Description of Artificial Sequence: Synthetic oligonucleotide
  Target: LAMA2; (-) strand; PAM type: YTN; PAM sequence: TTC
tccctttcttcctttctttc

SEQ ID NO: 257309 - DNA, 20 bp, Artificial Sequence
  Description of Artificial Sequence: Synthetic oligonucleotide
  Target: LAMA2; (-) strand; PAM type: YTN; PAM sequence: TTT
ctccctttcttcctttcttt

SEQ ID NO: 257310 - DNA, 20 bp, Artificial Sequence
  Description of Artificial Sequence: Synthetic oligonucleotide
  Target: LAMA2; (-) strand; PAM type: YTN; PAM sequence: CTT
tctccctttcttcctttctt

SEQ ID NO: 257311 - DNA, 20 bp, Artificial Sequence
  Description of Artificial Sequence: Synthetic oligonucleotide
  Target: LAMA2; (-) strand; PAM type: YTN; PAM sequence: CTC
caggtctttctccctttctt

SEQ ID NO: 257312 - DNA, 20 bp, Artificial Sequence
  Description of Artificial Sequence: Synthetic oligonucleotide
  Target: LAMA2; (-) strand; PAM type: YTN; PAM sequence: TTA
gcaaactccaggtctttctc

SEQ ID NO: 257313 - DNA, 20 bp, Artificial Sequence
  Description of Artificial Sequence: Synthetic oligonucleotide
  Target: LAMA2; (-) strand; PAM type: YTN; PAM sequence: CTA
ttagcaaactccaggtcttt

SEQ ID NO: 257314 - DNA, 20 bp, Artificial Sequence
  Description of Artificial Sequence: Synthetic oligonucleotide
  Target: LAMA2; (-) strand; PAM type: YTN; PAM sequence: CTC
tattagcaaactccaggtct

SEQ ID NO: 257315 - DNA, 20 bp, Artificial Sequence
  Description of Artificial Sequence: Synthetic oligonucleotide
  Target: LAMA2; (-) strand; PAM type: YTN; PAM sequence: CTG
ccaactctattagcaaactc

SEQ ID NO: 257316 - DNA, 20 bp, Artificial Sequence
  Description of Artificial Sequence: Synthetic oligonucleotide
  Target: LAMA2; (-) strand; PAM type: YTN; PAM sequence: CTG
tgcctgccaactctattagc

SEQ ID NO: 257317 - DNA, 20 bp, Artificial Sequence
  Description of Artificial Sequence: Synthetic oligonucleotide
  Target: LAMA2; (-) strand; PAM type: YTN; PAM sequence: CTG
aactgtgcctgccaactcta

SEQ ID NO: 257318 - DNA, 20 bp, Artificial Sequence
  Description of Artificial Sequence: Synthetic oligonucleotide
  Target: LAMA2; (-) strand; PAM type: YTN; PAM sequence: TTA
taggaatatgccataaggtg

SEQ ID NO: 257319 - DNA, 20 bp, Artificial Sequence
  Description of Artificial Sequence: Synthetic oligonucleotide
  Target: LAMA2; (-) strand; PAM type: YTN; PAM sequence: CTG
catattataggaatatgcca

SEQ ID NO: 257320 - DNA, 20 bp, Artificial Sequence
  Description of Artificial Sequence: Synthetic oligonucleotide
  Target: LAMA2; (-) strand; PAM type: YTN; PAM sequence: CTG
agaaagcatgcctgcatatt

SEQ ID NO: 257321 - DNA, 20 bp, Artificial Sequence
  Description of Artificial Sequence: Synthetic oligonucleotide
  Target: LAMA2; (-) strand; PAM type: YTN; PAM sequence: CTA
aagggaagtctgagaaagca

SEQ ID NO: 257322 - DNA, 20 bp, Artificial Sequence
  Description of Artificial Sequence: Synthetic oligonucleotide
  Target: LAMA2; (-) strand; PAM type: YTN; PAM sequence: TTA
ctaaagggaagtctgagaaa

SEQ ID NO: 257323 - DNA, 20 bp, Artificial Sequence
  Description of Artificial Sequence: Synthetic oligonucleotide
  Target: LAMA2; (-) strand; PAM type: YTN; PAM sequence: TTT
actaaagggaagtctgagaa

SEQ ID NO: 257324 - DNA, 20 bp, Artificial Sequence
  Description of Artificial Sequence: Synthetic oligonucleotide
  Target: LAMA2; (-) strand; PAM type: YTN; PAM sequence: CTT
tactaaagggaagtctgaga

SEQ ID NO: 257325 - DNA, 20 bp, Artificial Sequence
  Description of Artificial Sequence: Synthetic oligonucleotide
  Target: LAMA2; (-) strand; PAM type: YTN; PAM sequence: TTG
aaggctttactaaagggaag

SEQ ID NO: 257326 - DNA, 20 bp, Artificial Sequence
  Description of Artificial Sequence: Synthetic oligonucleotide
  Target: LAMA2; (-) strand; PAM type: YTN; PAM sequence: TTC
attgaaggctttactaaagg

SEQ ID NO: 257327 - DNA, 20 bp, Artificial Sequence
  Description of Artificial Sequence: Synthetic oligonucleotide
  Target: LAMA2; (-) strand; PAM type: YTN; PAM sequence: TTT
cattgaaggctttactaaag

SEQ ID NO: 257328 - DNA, 20 bp, Artificial Sequence
  Description of Artificial Sequence: Synthetic oligonucleotide
  Target: LAMA2; (-) strand; PAM type: YTN; PAM sequence: TTT
tcattgaaggctttactaaa

SEQ ID NO: 257329 - DNA, 20 bp, Artificial Sequence
  Description of Artificial Sequence: Synthetic oligonucleotide
  Target: LAMA2; (-) strand; PAM type: YTN; PAM sequence: TTC
agaggcaaattttcattgaa

SEQ ID NO: 257330 - DNA, 20 bp, Artificial Sequence
  Description of Artificial Sequence: Synthetic oligonucleotide
  Target: LAMA2; (-) strand; PAM type: YTN; PAM sequence: TTG
catatgaattcagaggcaaa

SEQ ID NO: 257331 - DNA, 20 bp, Artificial Sequence
  Description of Artificial Sequence: Synthetic oligonucleotide
  Target: LAMA2; (-) strand; PAM type: YTN; PAM sequence: TTT
gcatatgaattcagaggcaa

SEQ ID NO: 257332 - DNA, 20 bp, Artificial Sequence
  Description of Artificial Sequence: Synthetic oligonucleotide
  Target: LAMA2; (-) strand; PAM type: YTN; PAM sequence: TTG
tatgtatttgcatatgaatt

SEQ ID NO: 257333 - DNA, 20 bp, Artificial Sequence
  Description of Artificial Sequence: Synthetic oligonucleotide
  Target: LAMA2; (-) strand; PAM type: YTN; PAM sequence: TTT
gtatgtatttgcatatgaat

SEQ ID NO: 257334 - DNA, 20 bp, Artificial Sequence
  Description of Artificial Sequence: Synthetic oligonucleotide
  Target: LAMA2; (-) strand; PAM type: YTN; PAM sequence: CTA
tttgtatgtatttgcatatg

SEQ ID NO: 257335 - DNA, 20 bp, Artificial Sequence
  Description of Artificial Sequence: Synthetic oligonucleotide
  Target: LAMA2; (-) strand; PAM type: YTN; PAM sequence: TTA
ataatctatttgtatgtatt

SEQ ID NO: 257336 - DNA, 20 bp, Artificial Sequence
  Description of Artificial Sequence: Synthetic oligonucleotide
  Target: LAMA2; (-) strand; PAM type: YTN; PAM sequence: CTG
aattaataatctatttgtat

SEQ ID NO: 257337 - DNA, 20 bp, Artificial Sequence
  Description of Artificial Sequence: Synthetic oligonucleotide
  Target: LAMA2; (-) strand; PAM type: YTN; PAM sequence: CTG
tgggtatatctgaattaata

SEQ ID NO: 257338 - DNA, 20 bp, Artificial Sequence
  Description of Artificial Sequence: Synthetic oligonucleotide
  Target: LAMA2; (-) strand; PAM type: YTN; PAM sequence: TTG
gatgggagctgtgggtatat

SEQ ID NO: 257339 - DNA, 20 bp, Artificial Sequence
  Description of Artificial Sequence: Synthetic oligonucleotide
  Target: LAMA2; (-) strand; PAM type: YTN; PAM sequence: TTA
attggatgggagctgtgggt

SEQ ID NO: 257340 - DNA, 20 bp, Artificial Sequence
  Description of Artificial Sequence: Synthetic oligonucleotide
  Target: LAMA2; (-) strand; PAM type: YTN; PAM sequence: TTA
ttaattggatgggagctgtg

SEQ ID NO: 257341 - DNA, 20 bp, Artificial Sequence
  Description of Artificial Sequence: Synthetic oligonucleotide
  Target: LAMA2; (-) strand; PAM type: YTN; PAM sequence: CTT
attaattggatgggagctgt

SEQ ID NO: 257342 - DNA, 20 bp, Artificial Sequence
  Description of Artificial Sequence: Synthetic oligonucleotide
  Target: LAMA2; (-) strand; PAM type: YTN; PAM sequence: TTC
ttattaattggatgggagct

SEQ ID NO: 257343 - DNA, 20 bp, Artificial Sequence
  Description of Artificial Sequence: Synthetic oligonucleotide
  Target: LAMA2; (-) strand; PAM type: YTN; PAM sequence: CTC
agaagattcttattaattgg

SEQ ID NO: 257344 - DNA, 20 bp, Artificial Sequence
  Description of Artificial Sequence: Synthetic oligonucleotide
  Target: LAMA2; (-) strand; PAM type: YTN; PAM sequence: CTG
tgactcagaagattcttatt

SEQ ID NO: 257345 - DNA, 20 bp, Artificial Sequence
  Description of Artificial Sequence: Synthetic oligonucleotide
  Target: LAMA2; (-) strand; PAM type: YTN; PAM sequence: CTA
gaaactgtgactcagaagat

SEQ ID NO: 257346 - DNA, 20 bp, Artificial Sequence
  Description of Artificial Sequence: Synthetic oligonucleotide
  Target: LAMA2; (-) strand; PAM type: YTN; PAM sequence: TTA
actagaaactgtgactcaga

SEQ ID NO: 257347 - DNA, 20 bp, Artificial Sequence
  Description of Artificial Sequence: Synthetic oligonucleotide
  Target: LAMA2; (-) strand; PAM type: YTN; PAM sequence: TTA
ttaactagaaactgtgactc

SEQ ID NO: 257348 - DNA, 20 bp, Artificial Sequence
  Description of Artificial Sequence: Synthetic oligonucleotide
  Target: LAMA2; (-) strand; PAM type: YTN; PAM sequence: TTT
attaactagaaactgtgact

SEQ ID NO: 257349 - DNA, 20 bp, Artificial Sequence
  Description of Artificial Sequence: Synthetic oligonucleotide
  Target: LAMA2; (-) strand; PAM type: YTN; PAM sequence: TTC
agaatttattaactagaaac

SEQ ID NO: 257350 - DNA, 20 bp, Artificial Sequence
  Description of Artificial Sequence: Synthetic oligonucleotide
  Target: LAMA2; (-) strand; PAM type: YTN; PAM sequence: TTC
agtaataagagttcagaatt

SEQ ID NO: 257351 - DNA, 20 bp, Artificial Sequence
  Description of Artificial Sequence: Synthetic oligonucleotide
  Target: LAMA2; (-) strand; PAM type: YTN; PAM sequence: CTC
gcaaggaaattcagtaataa

SEQ ID NO: 257352 - DNA, 20 bp, Artificial Sequence
  Description of Artificial Sequence: Synthetic oligonucleotide
  Target: LAMA2; (-) strand; PAM type: YTN; PAM sequence: TTA
tgaggaaacaggctcgcaag

SEQ ID NO: 257353 - DNA, 20 bp, Artificial Sequence
  Description of Artificial Sequence: Synthetic oligonucleotide
  Target: LAMA2; (-) strand; PAM type: YTN; PAM sequence: TTG
ttatgaggaaacaggctcgc

SEQ ID NO: 257354 - DNA, 20 bp, Artificial Sequence
  Description of Artificial Sequence: Synthetic oligonucleotide
  Target: LAMA2; (-) strand; PAM type: YTN; PAM sequence: CTT
gttatgaggaaacaggctcg

SEQ ID NO: 257355 - DNA, 20 bp, Artificial Sequence
  Description of Artificial Sequence: Synthetic oligonucleotide
  Target: LAMA2; (-) strand; PAM type: YTN; PAM sequence: TTG
cagccagaacttgttatgag

SEQ ID NO: 257356 - DNA, 20 bp, Artificial Sequence
  Description of Artificial Sequence: Synthetic oligonucleotide
  Target: LAMA2; (-) strand; PAM type: YTN; PAM sequence: TTG
ttgcagccagaacttgttat

SEQ ID NO: 257357 - DNA, 20 bp, Artificial Sequence
  Description of Artificial Sequence: Synthetic oligonucleotide
  Target: LAMA2; (-) strand; PAM type: YTN; PAM sequence: TTG
ttgttgcagccagaacttgt

SEQ ID NO: 257358 - DNA, 20 bp, Artificial Sequence
  Description of Artificial Sequence: Synthetic oligonucleotide
  Target: LAMA2; (-) strand; PAM type: YTN; PAM sequence: TTG
ttgttgttgcagccagaact

SEQ ID NO: 257359 - DNA, 20 bp, Artificial Sequence
  Description of Artificial Sequence: Synthetic oligonucleotide
  Target: LAMA2; (-) strand; PAM type: YTN; PAM sequence: TTT
gttgttgttgcagccagaac

SEQ ID NO: 257360 - DNA, 20 bp, Artificial Sequence
  Description of Artificial Sequence: Synthetic oligonucleotide
  Target: LAMA2; (-) strand; PAM type: YTN; PAM sequence: TTT
tgttgttgttgcagccagaa

SEQ ID NO: 257361 - DNA, 20 bp, Artificial Sequence
  Description of Artificial Sequence: Synthetic oligonucleotide
  Target: LAMA2; (-) strand; PAM type: YTN; PAM sequence: TTT
ttgttgttgttgcagccaga

SEQ ID NO: 257362 - DNA, 20 bp, Artificial Sequence
  Description of Artificial Sequence: Synthetic oligonucleotide
  Target: LAMA2; (-) strand; PAM type: YTN; PAM sequence: TTT
tttgttgttgttgcagccag

SEQ ID NO: 257363 - DNA, 20 bp, Artificial Sequence
  Description of Artificial Sequence: Synthetic oligonucleotide
  Target: LAMA2; (-) strand; PAM type: YTN; PAM sequence: TTC
acattttttgttgttgttgc

SEQ ID NO: 257364 - DNA, 20 bp, Artificial Sequence
  Description of Artificial Sequence: Synthetic oligonucleotide
  Target: LAMA2; (-) strand; PAM type: YTN; PAM sequence: CTA
caaatatgtaaggttcacat

SEQ ID NO: 257365 - DNA, 20 bp, Artificial Sequence
  Description of Artificial Sequence: Synthetic oligonucleotide
  Target: LAMA2; (-) strand; PAM type: YTN; PAM sequence: CTC
tacaaatatgtaaggttcac

SEQ ID NO: 257366 - DNA, 20 bp, Artificial Sequence
  Description of Artificial Sequence: Synthetic oligonucleotide
  Target: LAMA2; (-) strand; PAM type: YTN; PAM sequence: TTC
tctacaaatatgtaaggttc

SEQ ID NO: 257367 - DNA, 20 bp, Artificial Sequence
  Description of Artificial Sequence: Synthetic oligonucleotide
  Target: LAMA2; (-) strand; PAM type: YTN; PAM sequence: TTT
ctctacaaatatgtaaggtt

SEQ ID NO: 257368 - DNA, 20 bp, Artificial Sequence
  Description of Artificial Sequence: Synthetic oligonucleotide
  Target: LAMA2; (-) strand; PAM type: YTN; PAM sequence: TTT
tctctacaaatatgtaaggt

SEQ ID NO: 257369 - DNA, 20 bp, Artificial Sequence
  Description of Artificial Sequence: Synthetic oligonucleotide
  Target: LAMA2; (-) strand; PAM type: YTN; PAM sequence: TTA
ttttctctacaaatatgtaa

SEQ ID NO: 257370 - DNA, 20 bp, Artificial Sequence
  Description of Artificial Sequence: Synthetic oligonucleotide
  Target: LAMA2; (-) strand; PAM type: YTN; PAM sequence: TTG
gttattttctctacaaatat

SEQ ID NO: 257371 - DNA, 20 bp, Artificial Sequence
  Description of Artificial Sequence: Synthetic oligonucleotide
  Target: LAMA2; (-) strand; PAM type: YTN; PAM sequence: CTC
caattggttattttctctac

SEQ ID NO: 257372 - DNA, 20 bp, Artificial Sequence
  Description of Artificial Sequence: Synthetic oligonucleotide
  Target: LAMA2; (-) strand; PAM type: YTN; PAM sequence: CTA
ctccaattggttattttctc

SEQ ID NO: 257373 - DNA, 20 bp, Artificial Sequence
  Description of Artificial Sequence: Synthetic oligonucleotide
  Target: LAMA2; (-) strand; PAM type: YTN; PAM sequence: CTC
tactccaattggttattttc

SEQ ID NO: 257374 - DNA, 20 bp, Artificial Sequence
  Description of Artificial Sequence: Synthetic oligonucleotide
  Target: LAMA2; (-) strand; PAM type: YTN; PAM sequence: TTG
tagtacaacacatcatatgt

SEQ ID NO: 257375 - DNA, 20 bp, Artificial Sequence
  Description of Artificial Sequence: Synthetic oligonucleotide
  Target: LAMA2; (-) strand; PAM type: YTN; PAM sequence: TTT
gtagtacaacacatcatatg

SEQ ID NO: 257376 - DNA, 20 bp, Artificial Sequence
  Description of Artificial Sequence: Synthetic oligonucleotide
  Target: LAMA2; (-) strand; PAM type: YTN; PAM sequence: CTT
tgtagtacaacacatcatat

SEQ ID NO: 257377 - DNA, 20 bp, Artificial Sequence
  Description of Artificial Sequence: Synthetic oligonucleotide
  Target: LAMA2; (-) strand; PAM type: YTN; PAM sequence: TTG
gaaagcctttgtagtacaac

SEQ ID NO: 257378 - DNA, 20 bp, Artificial Sequence
  Description of Artificial Sequence: Synthetic oligonucleotide
  Target: LAMA2; (-) strand; PAM type: YTN; PAM sequence: CTG
gaggaatccaggtccatgtt

SEQ ID NO: 257379 - DNA, 20 bp, Artificial Sequence
  Description of Artificial Sequence: Synthetic oligonucleotide
  Target: LAMA2; (-) strand; PAM type: YTN; PAM sequence: CTC
tggaggaatccaggtccatg

SEQ ID NO: 257380 - DNA, 20 bp, Artificial Sequence
  Description of Artificial Sequence: Synthetic oligonucleotide
  Target: LAMA2; (-) strand; PAM type: YTN; PAM sequence: CTG
gcactctggaggaatccagg

SEQ ID NO: 257381 - DNA, 20 bp, Artificial Sequence
  Description of Artificial Sequence: Synthetic oligonucleotide
  Target: LAMA2; (-) strand; PAM type: YTN; PAM sequence: CTG
ctggcactctggaggaatcc

SEQ ID NO: 257382 - DNA, 20 bp, Artificial Sequence
  Description of Artificial Sequence: Synthetic oligonucleotide
  Target: LAMA2; (-) strand; PAM type: YTN; PAM sequence: CTG
ctgctggcactctggaggaa

SEQ ID NO: 257383 - DNA, 20 bp, Artificial Sequence
  Description of Artificial Sequence: Synthetic oligonucleotide
  Target: LAMA2; (-) strand; PAM type: YTN; PAM sequence: CTG
aaaatgagaccaaagcataa

SEQ ID NO: 257384 - DNA, 20 bp, Artificial Sequence
  Description of Artificial Sequence: Synthetic oligonucleotide
  Target: LAMA2; (-) strand; PAM type: YTN; PAM sequence: CTG
gcactgaaaatgagaccaaa

SEQ ID NO: 257385 - DNA, 20 bp, Artificial Sequence
  Description of Artificial Sequence: Synthetic oligonucleotide
  Target: LAMA2; (-) strand; PAM type: YTN; PAM sequence: TTG
tcactggcactgaaaatgag

SEQ ID NO: 257386 - DNA, 20 bp, Artificial Sequence
  Description of Artificial Sequence: Synthetic oligonucleotide
  Target: LAMA2; (-) strand; PAM type: YTN; PAM sequence: CTT
gtcactggcactgaaaatga

SEQ ID NO: 257387 - DNA, 20 bp, Artificial Sequence
  Description of Artificial Sequence: Synthetic oligonucleotide
  Target: LAMA2; (-) strand; PAM type: YTN; PAM sequence: TTC
agcccgaaaaaaatatataa

SEQ ID NO: 257388 - DNA, 20 bp, Artificial Sequence
  Description of Artificial Sequence: Synthetic oligonucleotide
  Target: LAMA2; (-) strand; PAM type: YTN; PAM sequence: TTT
cagcccgaaaaaaatatata

SEQ ID NO: 257389 - DNA, 20 bp, Artificial Sequence
  Description of Artificial Sequence: Synthetic oligonucleotide
  Target: LAMA2; (-) strand; PAM type: YTN; PAM sequence: TTA
gatttcagcccgaaaaaaat

SEQ ID NO: 257390 - DNA, 20 bp, Artificial Sequence
  Description of Artificial Sequence: Synthetic oligonucleotide
  Target: LAMA2; (-) strand; PAM type: YTN; PAM sequence: CTA
gtaattagatttcagcccga

SEQ ID NO: 257391 - DNA, 20 bp, Artificial Sequence
  Description of Artificial Sequence: Synthetic oligonucleotide
  Target: LAMA2; (-) strand; PAM type: YTN; PAM sequence: CTG
ccagcccactagtaattaga

SEQ ID NO: 257392 - DNA, 20 bp, Artificial Sequence
  Description of Artificial Sequence: Synthetic oligonucleotide
  Target: LAMA2; (-) strand; PAM type: YTN; PAM sequence: CTG
cagtgtagatacaagatgat

SEQ ID NO: 257393 - DNA, 20 bp, Artificial Sequence
  Description of Artificial Sequence: Synthetic oligonucleotide
  Target: LAMA2; (-) strand; PAM type: YTN; PAM sequence: CTA
caactgcagtgtagatacaa

SEQ ID NO: 257394 - DNA, 20 bp, Artificial Sequence
  Description of Artificial Sequence: Synthetic oligonucleotide
  Target: LAMA2; (-) strand; PAM type: YTN; PAM sequence: TTC
tacaactgcagtgtagatac

SEQ ID NO: 257395 - DNA, 20 bp, Artificial Sequence
  Description of Artificial Sequence: Synthetic oligonucleotide
  Target: LAMA2; (-) strand; PAM type: YTN; PAM sequence: TTT
ctacaactgcagtgtagata

SEQ ID NO: 257396 - DNA, 20 bp, Artificial Sequence
  Description of Artificial Sequence: Synthetic oligonucleotide
  Target: LAMA2; (-) strand; PAM type: YTN; PAM sequence: TTT
tctacaactgcagtgtagat

SEQ ID NO: 257397 - DNA, 20 bp, Artificial Sequence
  Description of Artificial Sequence: Synthetic oligonucleotide
  Target: LAMA2; (-) strand; PAM type: YTN; PAM sequence: TTT
ttctacaactgcagtgtaga

SEQ ID NO: 257398 - DNA, 20 bp, Artificial Sequence
  Description of Artificial Sequence: Synthetic oligonucleotide
  Target: LAMA2; (-) strand; PAM type: YTN; PAM sequence: TTA
aaaaaatgtttttctacaac

SEQ ID NO: 257399 - DNA, 20 bp, Artificial Sequence
  Description of Artificial Sequence: Synthetic oligonucleotide
  Target: LAMA2; (-) strand; PAM type: YTN; PAM sequence: CTC
aaacgcaacgtgattaaaaa

SEQ ID NO: 257400 - DNA, 20 bp, Artificial Sequence
  Description of Artificial Sequence: Synthetic oligonucleotide
  Target: LAMA2; (-) strand; PAM type: YTN; PAM sequence: TTC
tcaaacgcaacgtgattaaa

SEQ ID NO: 257401 - DNA, 20 bp, Artificial Sequence
  Description of Artificial Sequence: Synthetic oligonucleotide
  Target: LAMA2; (-) strand; PAM type: YTN; PAM sequence: TTT
ctcaaacgcaacgtgattaa

SEQ ID NO: 257402 - DNA, 20 bp, Artificial Sequence
  Description of Artificial Sequence: Synthetic oligonucleotide
  Target: LAMA2; (-) strand; PAM type: YTN; PAM sequence: TTT
tctcaaacgcaacgtgatta

SEQ ID NO: 257403 - DNA, 20 bp, Artificial Sequence
  Description of Artificial Sequence: Synthetic oligonucleotide
  Target: LAMA2; (-) strand; PAM type: YTN; PAM sequence: CTT
ttctcaaacgcaacgtgatt

SEQ ID NO: 257404 - DNA, 20 bp, Artificial Sequence
  Description of Artificial Sequence: Synthetic oligonucleotide
  Target: LAMA2; (-) strand; PAM type: YTN; PAM sequence: TTC
cttttctcaaacgcaacgtg

SEQ ID NO: 257405 - DNA, 20 bp, Artificial Sequence
  Description of Artificial Sequence: Synthetic oligonucleotide
  Target: LAMA2; (-) strand; PAM type: YTN; PAM sequence: TTA
agtgttccttttctcaaacg

SEQ ID NO: 257406 - DNA, 20 bp, Artificial Sequence
  Description of Artificial Sequence: Synthetic oligonucleotide
  Target: LAMA2; (-) strand; PAM type: YTN; PAM sequence: TTT
aagtgttccttttctcaaac

SEQ ID NO: 257407 - DNA, 20 bp, Artificial Sequence
  Description of Artificial Sequence: Synthetic oligonucleotide
  Target: LAMA2; (-) strand; PAM type: YTN; PAM sequence: TTT
taagtgttccttttctcaaa

SEQ ID NO: 257408 - DNA, 20 bp, Artificial Sequence
  Description of Artificial Sequence: Synthetic oligonucleotide
  Target: LAMA2; (-) strand; PAM type: YTN; PAM sequence: CTT
ttaagtgttccttttctcaa

SEQ ID NO: 257409 - DNA, 20 bp, Artificial Sequence
  Description of Artificial Sequence: Synthetic oligonucleotide
  Target: LAMA2; (-) strand; PAM type: YTN; PAM sequence: TTC
cttttaagtgttccttttct

SEQ ID NO: 257410 - DNA, 20 bp, Artificial Sequence
  Description of Artificial Sequence: Synthetic oligonucleotide
  Target: LAMA2; (-) strand; PAM type: YTN; PAM sequence: TTT
ccttttaagtgttccttttc

SEQ ID NO: 257411 - DNA, 20 bp, Artificial Sequence
  Description of Artificial Sequence: Synthetic oligonucleotide
  Target: LAMA2; (-) strand; PAM type: YTN; PAM sequence: TTT
tccttttaagtgttcctttt

SEQ ID NO: 257412 - DNA, 20 bp, Artificial Sequence
  Description of Artificial Sequence: Synthetic oligonucleotide
  Target: LAMA2; (-) strand; PAM type: YTN; PAM sequence: CTC
ccaggatgatggattttcct

SEQ ID NO: 257413 - DNA, 20 bp, Artificial Sequence
  Description of Artificial Sequence: Synthetic oligonucleotide
  Target: LAMA2; (-) strand; PAM type: YTN; PAM sequence: TTC
tcccaggatgatggattttc

SEQ ID NO: 257414 - DNA, 20 bp, Artificial Sequence
  Description of Artificial Sequence: Synthetic oligonucleotide
  Target: LAMA2; (-) strand; PAM type: YTN; PAM sequence: CTT
ctcccaggatgatggatttt

SEQ ID NO: 257415 - DNA, 20 bp, Artificial Sequence
  Description of Artificial Sequence: Synthetic oligonucleotide
  Target: LAMA2; (-) strand; PAM type: YTN; PAM sequence: CTC
cccttctcccaggatgatgg

SEQ ID NO: 257416 - DNA, 20 bp, Artificial Sequence
  Description of Artificial Sequence: Synthetic oligonucleotide
  Target: LAMA2; (-) strand; PAM type: YTN; PAM sequence: TTC
tccccttctcccaggatgat

SEQ ID NO: 257417 - DNA, 20 bp, Artificial Sequence
  Description of Artificial Sequence: Synthetic oligonucleotide
  Target: LAMA2; (-) strand; PAM type: YTN; PAM sequence: TTC
attctccccttctcccagga

SEQ ID NO: 257418 - DNA, 20 bp, Artificial Sequence
  Description of Artificial Sequence: Synthetic oligonucleotide
  Target: LAMA2; (-) strand; PAM type: YTN; PAM sequence: TTT
cattctccccttctcccagg

SEQ ID NO: 257419 - DNA, 20 bp, Artificial Sequence
  Description of Artificial Sequence: Synthetic oligonucleotide
  Target: LAMA2; (-) strand; PAM type: YTN; PAM sequence: TTT
tcattctccccttctcccag

SEQ ID NO: 257420 - DNA, 20 bp, Artificial Sequence
  Description of Artificial Sequence: Synthetic oligonucleotide
  Target: LAMA2; (-) strand; PAM type: YTN; PAM sequence: TTT
ttcattctccccttctccca

SEQ ID NO: 257421 - DNA, 20 bp, Artificial Sequence
  Description of Artificial Sequence: Synthetic oligonucleotide
  Target: LAMA2; (-) strand; PAM type: YTN; PAM sequence: TTA
catatttttcattctcccct

SEQ ID NO: 257422 - DNA, 20 bp, Artificial Sequence
  Description of Artificial Sequence: Synthetic oligonucleotide
  Target: LAMA2; (-) strand; PAM type: YTN; PAM sequence: TTT
acatatttttcattctcccc

SEQ ID NO: 257423 - DNA, 20 bp, Artificial Sequence
  Description of Artificial Sequence: Synthetic oligonucleotide
  Target: LAMA2; (-) strand; PAM type: YTN; PAM sequence: TTG
gggcaatgtttacatatttt

SEQ ID NO: 257424 - DNA, 20 bp, Artificial Sequence
  Description of Artificial Sequence: Synthetic oligonucleotide
  Target: LAMA2; (-) strand; PAM type: YTN; PAM sequence: CTC
agttggggcaatgtttacat

SEQ ID NO: 257425 - DNA, 20 bp, Artificial Sequence
  Description of Artificial Sequence: Synthetic oligonucleotide
  Target: LAMA2; (-) strand; PAM type: YTN; PAM sequence: TTG
gggggacctcagttggggca

SEQ ID NO: 257426 - DNA, 20 bp, Artificial Sequence
  Description of Artificial Sequence: Synthetic oligonucleotide
  Target: LAMA2; (-) strand; PAM type: YTN; PAM sequence: TTT
ggggggacctcagttggggc

SEQ ID NO: 257427 - DNA, 20 bp, Artificial Sequence
  Description of Artificial Sequence: Synthetic oligonucleotide
  Target: LAMA2; (-) strand; PAM type: YTN; PAM sequence: CTT
tggggggacctcagttgggg

SEQ ID NO: 257428 - DNA, 20 bp, Artificial Sequence
  Description of Artificial Sequence: Synthetic oligonucleotide
  Target: LAMA2; (-) strand; PAM type: YTN; PAM sequence: TTC
atcagtgagcctttgggggg

SEQ ID NO: 257429 - DNA, 20 bp, Artificial Sequence
  Description of Artificial Sequence: Synthetic oligonucleotide
  Target: LAMA2; (-) strand; PAM type: YTN; PAM sequence: TTT
catcagtgagcctttggggg

SEQ ID NO: 257430 - DNA, 20 bp, Artificial Sequence
  Description of Artificial Sequence: Synthetic oligonucleotide
  Target: LAMA2; (-) strand; PAM type: YTN; PAM sequence: CTA
aggcaagaaatttcatcagt

SEQ ID NO: 257431 - DNA, 20 bp, Artificial Sequence
  Description of Artificial Sequence: Synthetic oligonucleotide
  Target: LAMA2; (-) strand; PAM type: YTN; PAM sequence: CTG
cacacctaaggcaagaaatt

SEQ ID NO: 257432 - DNA, 20 bp, Artificial Sequence
  Description of Artificial Sequence: Synthetic oligonucleotide
  Target: LAMA2; (-) strand; PAM type: YTN; PAM sequence: TTC
tgcacacctaaggcaagaaa

SEQ ID NO: 257433 - DNA, 20 bp, Artificial Sequence
  Description of Artificial Sequence: Synthetic oligonucleotide
  Target: LAMA2; (-) strand; PAM type: YTN; PAM sequence: CTT
ctgcacacctaaggcaagaa

SEQ ID NO: 257434 - DNA, 20 bp, Artificial Sequence
  Description of Artificial Sequence: Synthetic oligonucleotide
  Target: LAMA2; (-) strand; PAM type: YTN; PAM sequence: TTG
tccaaaatagccttctgcac

SEQ ID NO: 257435 - DNA, 20 bp, Artificial Sequence
  Description of Artificial Sequence: Synthetic oligonucleotide
  Target: LAMA2; (-) strand; PAM type: YTN; PAM sequence: CTC
caggtacagagggttgtcca

SEQ ID NO: 257436 - DNA, 20 bp, Artificial Sequence
  Description of Artificial Sequence: Synthetic oligonucleotide
  Target: LAMA2; (-) strand; PAM type: YTN; PAM sequence: CTG
acatgatcctccaggtacag

SEQ ID NO: 257437 - DNA, 20 bp, Artificial Sequence
  Description of Artificial Sequence: Synthetic oligonucleotide
  Target: LAMA2; (-) strand; PAM type: YTN; PAM sequence: TTG
gcatggctgacatgatcctc

SEQ ID NO: 257438 - DNA, 20 bp, Artificial Sequence
  Description of Artificial Sequence: Synthetic oligonucleotide
  Target: LAMA2; (-) strand; PAM type: YTN; PAM sequence: TTG
cattggcatggctgacatga

SEQ ID NO: 257439 - DNA, 20 bp, Artificial Sequence
  Description of Artificial Sequence: Synthetic oligonucleotide
  Target: LAMA2; (-) strand; PAM type: YTN; PAM sequence: TTG
tcattgcattggcatggctg

SEQ ID NO: 257440 - DNA, 20 bp, Artificial Sequence
  Description of Artificial Sequence: Synthetic oligonucleotide
  Target: LAMA2; (-) strand; PAM type: YTN; PAM sequence: CTG
ccagggatggagaagtcaag

SEQ ID NO: 257441 - DNA, 20 bp, Artificial Sequence
  Description of Artificial Sequence: Synthetic oligonucleotide
  Target: LAMA2; (-) strand; PAM type: YTN; PAM sequence: CTG
tcacagctgccagggatgga

SEQ ID NO: 257442 - DNA, 20 bp, Artificial Sequence
  Description of Artificial Sequence: Synthetic oligonucleotide
  Target: LAMA2; (-) strand; PAM type: YTN; PAM sequence: TTA
catatcagacaggagccaga

SEQ ID NO: 257443 - DNA, 20 bp, Artificial Sequence
  Description of Artificial Sequence: Synthetic oligonucleotide
  Target: LAMA2; (-) strand; PAM type: YTN; PAM sequence: TTT
acatatcagacaggagccag

SEQ ID NO: 257444 - DNA, 20 bp, Artificial Sequence
  Description of Artificial Sequence: Synthetic oligonucleotide
  Target: LAMA2; (-) strand; PAM type: YTN; PAM sequence: CTG
gtttacatatcagacaggag

SEQ ID NO: 257445 - DNA, 20 bp, Artificial Sequence
  Description of Artificial Sequence: Synthetic oligonucleotide
  Target: LAMA2; (-) strand; PAM type: YTN; PAM sequence: TTG
tacctggtttacatatcaga

SEQ ID NO: 257446 - DNA, 20 bp, Artificial Sequence
  Description of Artificial Sequence: Synthetic oligonucleotide
  Target: LAMA2; (-) strand; PAM type: YTN; PAM sequence: CTG
ttgtacctggtttacatatc

SEQ ID NO: 257447 - DNA, 20 bp, Artificial Sequence
  Description of Artificial Sequence: Synthetic oligonucleotide
  Target: LAMA2; (-) strand; PAM type: YTN; PAM sequence: CTC
acagtaccggcctgttgtac

SEQ ID NO: 257448 - DNA, 20 bp, Artificial Sequence
  Description of Artificial Sequence: Synthetic oligonucleotide
  Target: LAMA2; (-) strand; PAM type: YTN; PAM sequence: CTC
caaaatatccatcagcacag

SEQ ID NO: 257449 - DNA, 20 bp, Artificial Sequence
  Description of Artificial Sequence: Synthetic oligonucleotide
  Target: LAMA2; (-) strand; PAM type: YTN; PAM sequence: CTG
catctccaaaatatccatca

SEQ ID NO: 257450 - DNA, 20 bp, Artificial Sequence
  Description of Artificial Sequence: Synthetic oligonucleotide
  Target: LAMA2; (-) strand; PAM type: YTN; PAM sequence: TTC
gcatcaactgcatctccaaa

SEQ ID NO: 257451 - DNA, 20 bp, Artificial Sequence
  Description of Artificial Sequence: Synthetic oligonucleotide
  Target: LAMA2; (-) strand; PAM type: YTN; PAM sequence: CTT
cgcatcaactgcatctccaa

SEQ ID NO: 257452 - DNA, 20 bp, Artificial Sequence
  Description of Artificial Sequence: Synthetic oligonucleotide
  Target: LAMA2; (-) strand; PAM type: YTN; PAM sequence: TTC
ttcgcatcaactgcatctcc

SEQ ID NO: 257453 - DNA, 20 bp, Artificial Sequence
  Description of Artificial Sequence: Synthetic oligonucleotide
  Target: LAMA2; (-) strand; PAM type: YTN; PAM sequence: CTG
acagttcttcgcatcaactg

SEQ ID NO: 257454 - DNA, 20 bp, Artificial Sequence
  Description of Artificial Sequence: Synthetic oligonucleotide
  Target: LAMA2; (-) strand; PAM type: YTN; PAM sequence: TTA
cgctgacagttcttcgcatc

SEQ ID NO: 257455 - DNA, 20 bp, Artificial Sequence
  Description of Artificial Sequence: Synthetic oligonucleotide
  Target: LAMA2; (-) strand; PAM type: YTN; PAM sequence: CTT
acgctgacagttcttcgcat

SEQ ID NO: 257456 - DNA, 20 bp, Artificial Sequence
  Description of Artificial Sequence: Synthetic oligonucleotide
  Target: LAMA2; (-) strand; PAM type: YTN; PAM sequence: TTC
aggacttacgctgacagttc

SEQ ID NO: 257457 - DNA, 20 bp, Artificial Sequence
  Description of Artificial Sequence: Synthetic oligonucleotide
  Target: LAMA2; (-) strand; PAM type: YTN; PAM sequence: CTG
tcaggggcatcaatagttca

SEQ ID NO: 257458 - DNA, 20 bp, Artificial Sequence
  Description of Artificial Sequence: Synthetic oligonucleotide
  Target: LAMA2; (-) strand; PAM type: YTN; PAM sequence: TTC
tgtcaggggcatcaatagtt

SEQ ID NO: 257459 - DNA, 20 bp, Artificial Sequence
  Description of Artificial Sequence: Synthetic oligonucleotide
  Target: LAMA2; (-) strand; PAM type: YTN; PAM sequence: TTG
aggtacaatacatcaattct

SEQ ID NO: 257460 - DNA, 20 bp, Artificial Sequence
  Description of Artificial Sequence: Synthetic oligonucleotide
  Target: LAMA2; (-) strand; PAM type: YTN; PAM sequence: TTT
gaggtacaatacatcaattc

SEQ ID NO: 257461 - DNA, 20 bp, Artificial Sequence
  Description of Artificial Sequence: Synthetic oligonucleotide
  Target: LAMA2; (-) strand; PAM type: YTN; PAM sequence: CTT
tgaggtacaatacatcaatt

SEQ ID NO: 257462 - DNA, 20 bp, Artificial Sequence
  Description of Artificial Sequence: Synthetic oligonucleotide
  Target: LAMA2; (-) strand; PAM type: YTN; PAM sequence: CTA
ctttgaggtacaatacatca

SEQ ID NO: 257463 - DNA, 20 bp, Artificial Sequence
  Description of Artificial Sequence: Synthetic oligonucleotide
  Target: LAMA2; (-) strand; PAM type: YTN; PAM sequence: CTC
atcagctactttgaggtaca

SEQ ID NO: 257464 - DNA, 20 bp, Artificial Sequence
  Description of Artificial Sequence: Synthetic oligonucleotide
  Target: LAMA2; (-) strand; PAM type: YTN; PAM sequence: CTC
aagaactcatcagctacttt

SEQ ID NO: 257465 - DNA, 20 bp, Artificial Sequence
  Description of Artificial Sequence: Synthetic oligonucleotide
  Target: LAMA2; (-) strand; PAM type: YTN; PAM sequence: TTC
aatccacactcaagaactca

SEQ ID NO: 257466 - DNA, 20 bp, Artificial Sequence
  Description of Artificial Sequence: Synthetic oligonucleotide
  Target: LAMA2; (-) strand; PAM type: YTN; PAM sequence: CTT
caatccacactcaagaactc

SEQ ID NO: 257467 - DNA, 20 bp, Artificial Sequence
  Description of Artificial Sequence: Synthetic oligonucleotide
  Target: LAMA2; (-) strand; PAM type: YTN; PAM sequence: CTC
ttcaatccacactcaagaac

SEQ ID NO: 257468 - DNA, 20 bp, Artificial Sequence
  Description of Artificial Sequence: Synthetic oligonucleotide
  Target: LAMA2; (-) strand; PAM type: YTN; PAM sequence: CTA
ctcttcaatccacactcaag

SEQ ID NO: 257469 - DNA, 20 bp, Artificial Sequence
  Description of Artificial Sequence: Synthetic oligonucleotide
  Target: LAMA2; (-) strand; PAM type: YTN; PAM sequence: TTC
ctactcttcaatccacactc

SEQ ID NO: 257470 - DNA, 20 bp, Artificial Sequence
  Description of Artificial Sequence: Synthetic oligonucleotide
  Target: LAMA2; (-) strand; PAM type: YTN; PAM sequence: TTT
cctactcttcaatccacact

SEQ ID NO: 257471 - DNA, 20 bp, Artificial Sequence
  Description of Artificial Sequence: Synthetic oligonucleotide
  Target: LAMA2; (-) strand; PAM type: YTN; PAM sequence: TTC
cacataatttcctactcttc

SEQ ID NO: 257472 - DNA, 20 bp, Artificial Sequence
  Description of Artificial Sequence: Synthetic oligonucleotide
  Target: LAMA2; (-) strand; PAM type: YTN; PAM sequence: CTA
tcaaccatgtattccacata

SEQ ID NO: 257473 - DNA, 20 bp, Artificial Sequence
  Description of Artificial Sequence: Synthetic oligonucleotide
  Target: LAMA2; (-) strand; PAM type: YTN; PAM sequence: CTA
tgcatctatcaaccatgtat

SEQ ID NO: 257474 - DNA, 20 bp, Artificial Sequence
  Description of Artificial Sequence: Synthetic oligonucleotide
  Target: LAMA2; (-) strand; PAM type: YTN; PAM sequence: TTC
tatgcatctatcaaccatgt

SEQ ID NO: 257475 - DNA, 20 bp, Artificial Sequence
  Description of Artificial Sequence: Synthetic oligonucleotide
  Target: LAMA2; (-) strand; PAM type: YTN; PAM sequence: CTG
tatattctatgcatctatca

SEQ ID NO: 257476 - DNA, 20 bp, Artificial Sequence
  Description of Artificial Sequence: Synthetic oligonucleotide
  Target: LAMA2; (-) strand; PAM type: YTN; PAM sequence: CTC
tgtatattctatgcatctat

SEQ ID NO: 257477 - DNA, 20 bp, Artificial Sequence
  Description of Artificial Sequence: Synthetic oligonucleotide
  Target: LAMA2; (-) strand; PAM type: YTN; PAM sequence: CTG
gaatatgcagactctgtata

SEQ ID NO: 257478 - DNA, 20 bp, Artificial Sequence
  Description of Artificial Sequence: Synthetic oligonucleotide
  Target: LAMA2; (-) strand; PAM type: YTN; PAM sequence: TTC
tggaatatgcagactctgta

SEQ ID NO: 257479 - DNA, 20 bp, Artificial Sequence
  Description of Artificial Sequence: Synthetic oligonucleotide
  Target: LAMA2; (-) strand; PAM type: YTN; PAM sequence: TTA
gtacaaggaaatgttctgga

SEQ ID NO: 257480 - DNA, 20 bp, Artificial Sequence
  Description of Artificial Sequence: Synthetic oligonucleotide
  Target: LAMA2; (-) strand; PAM type: YTN; PAM sequence: TTA
gttagtacaaggaaatgttc

SEQ ID NO: 257481 - DNA, 20 bp, Artificial Sequence
  Description of Artificial Sequence: Synthetic oligonucleotide
  Target: LAMA2; (-) strand; PAM type: YTN; PAM sequence: CTA
ttagttagtacaaggaaatg

SEQ ID NO: 257482 - DNA, 20 bp, Artificial Sequence
  Description of Artificial Sequence: Synthetic oligonucleotide
  Target: LAMA2; (-) strand; PAM type: YTN; PAM sequence: CTC
tattagttagtacaaggaaa

SEQ ID NO: 257483 - DNA, 20 bp, Artificial Sequence
  Description of Artificial Sequence: Synthetic oligonucleotide
  Target: LAMA2; (-) strand; PAM type: YTN; PAM sequence: TTA
ctctattagttagtacaagg

SEQ ID NO: 257484 - DNA, 20 bp, Artificial Sequence
  Description of Artificial Sequence: Synthetic oligonucleotide
  Target: LAMA2; (-) strand; PAM type: YTN; PAM sequence: TTT
actctattagttagtacaag

SEQ ID NO: 257485 - DNA, 20 bp, Artificial Sequence
  Description of Artificial Sequence: Synthetic oligonucleotide
  Target: LAMA2; (-) strand; PAM type: YTN; PAM sequence: TTA
aaggtatttactctattagt

SEQ ID NO: 257486 - DNA, 20 bp, Artificial Sequence
  Description of Artificial Sequence: Synthetic oligonucleotide
  Target: LAMA2; (-) strand; PAM type: YTN; PAM sequence: TTT
aaaggtatttactctattag

SEQ ID NO: 257487 - DNA, 20 bp, Artificial Sequence
  Description of Artificial Sequence: Synthetic oligonucleotide
  Target: LAMA2; (-) strand; PAM type: YTN; PAM sequence: TTT
taaaggtatttactctatta

SEQ ID NO: 257488 - DNA, 20 bp, Artificial Sequence
  Description of Artificial Sequence: Synthetic oligonucleotide
  Target: LAMA2; (-) strand; PAM type: YTN; PAM sequence: TTC
aataccacagcaattttaaa

SEQ ID NO: 257489 - DNA, 20 bp, Artificial Sequence
  Description of Artificial Sequence: Synthetic oligonucleotide
  Target: LAMA2; (-) strand; PAM type: YTN; PAM sequence: CTT
caataccacagcaattttaa

SEQ ID NO: 257490 - DNA, 20 bp, Artificial Sequence
  Description of Artificial Sequence: Synthetic oligonucleotide
  Target: LAMA2; (-) strand; PAM type: YTN; PAM sequence: TTG
gaaaacagtgatgcttcaat

SEQ ID NO: 257491 - DNA, 20 bp, Artificial Sequence
  Description of Artificial Sequence: Synthetic oligonucleotide
  Target: LAMA2; (-) strand; PAM type: YTN; PAM sequence: TTT
ggaaaacagtgatgcttcaa

SEQ ID NO: 257492 - DNA, 20 bp, Artificial Sequence
  Description of Artificial Sequence: Synthetic oligonucleotide
  Target: LAMA2; (-) strand; PAM type: YTN; PAM sequence: TTA
tcatttggaaaacagtgatg

SEQ ID NO: 257493 - DNA, 20 bp, Artificial Sequence
  Description of Artificial Sequence: Synthetic oligonucleotide
  Target: LAMA2; (-) strand; PAM type: YTN; PAM sequence: TTT
atcatttggaaaacagtgat

SEQ ID NO: 257494 - DNA, 20 bp, Artificial Sequence
  Description of Artificial Sequence: Synthetic oligonucleotide
  Target: LAMA2; (-) strand; PAM type: YTN; PAM sequence: TTC
cgcatgtaaataaaaacatg

SEQ ID NO: 257495 - DNA, 20 bp, Artificial Sequence
  Description of Artificial Sequence: Synthetic oligonucleotide
  Target: LAMA2; (-) strand; PAM type: YTN; PAM sequence: CTT
ccgcatgtaaataaaaacat

SEQ ID NO: 257496 - DNA, 20 bp, Artificial Sequence
  Description of Artificial Sequence: Synthetic oligonucleotide
  Target: LAMA2; (-) strand; PAM type: YTN; PAM sequence: TTC
cttccgcatgtaaataaaaa

SEQ ID NO: 257497 - DNA, 20 bp, Artificial Sequence
  Description of Artificial Sequence: Synthetic oligonucleotide
  Target: LAMA2; (-) strand; PAM type: YTN; PAM sequence: CTT
ccttccgcatgtaaataaaa

SEQ ID NO: 257498 - DNA, 20 bp, Artificial Sequence
  Description of Artificial Sequence: Synthetic oligonucleotide
  Target: LAMA2; (-) strand; PAM type: YTN; PAM sequence: TTA
aaaaaatcttccttccgcat

SEQ ID NO: 257499 - DNA, 20 bp, Artificial Sequence
  Description of Artificial Sequence: Synthetic oligonucleotide
  Target: LAMA2; (-) strand; PAM type: YTN; PAM sequence: TTC
attaaaaaaatcttccttcc

SEQ ID NO: 257500 - DNA, 20 bp, Artificial Sequence
  Description of Artificial Sequence: Synthetic oligonucleotide
  Target: LAMA2; (-) strand; PAM type: YTN; PAM sequence: CTG
tggacataagttcattaaaa

SEQ ID NO: 257501 - DNA, 20 bp, Artificial Sequence
  Description of Artificial Sequence: Synthetic oligonucleotide
  Target: LAMA2; (-) strand; PAM type: YTN; PAM sequence: CTG
ctgtggacataagttcatta

SEQ ID NO: 257502 - DNA, 20 bp, Artificial Sequence
  Description of Artificial Sequence: Synthetic oligonucleotide
  Target: LAMA2; (-) strand; PAM type: YTN; PAM sequence: TTC
ctgctgtggacataagttca

SEQ ID NO: 257503 - DNA, 20 bp, Artificial Sequence
  Description of Artificial Sequence: Synthetic oligonucleotide
  Target: LAMA2; (-) strand; PAM type: YTN; PAM sequence: TTT
cctgctgtggacataagttc

SEQ ID NO: 257504 - DNA, 20 bp, Artificial Sequence
  Description of Artificial Sequence: Synthetic oligonucleotide
  Target: LAMA2; (-) strand; PAM type: YTN; PAM sequence: CTT
tcctgctgtggacataagtt

SEQ ID NO: 257505 - DNA, 20 bp, Artificial Sequence
  Description of Artificial Sequence: Synthetic oligonucleotide
  Target: LAMA2; (-) strand; PAM type: YTN; PAM sequence: TTC
tttcctgctgtggacataag

SEQ ID NO: 257506 - DNA, 20 bp, Artificial Sequence
  Description of Artificial Sequence: Synthetic oligonucleotide
  Target: LAMA2; (-) strand; PAM type: YTN; PAM sequence: CTT
ctttcctgctgtggacataa

SEQ ID NO: 257507 - DNA, 20 bp, Artificial Sequence
  Description of Artificial Sequence: Synthetic oligonucleotide
  Target: LAMA2; (-) strand; PAM type: YTN; PAM sequence: TTC
ttctttcctgctgtggacat

SEQ ID NO: 257508 - DNA, 20 bp, Artificial Sequence
  Description of Artificial Sequence: Synthetic oligonucleotide
  Target: LAMA2; (-) strand; PAM type: YTN; PAM sequence: CTA
atatgcaaattcttctttcc

SEQ ID NO: 257509 - DNA, 20 bp, Artificial Sequence
  Description of Artificial Sequence: Synthetic oligonucleotide
  Target: LAMA2; (-) strand; PAM type: YTN; PAM sequence: CTA
tctaatatgcaaattcttct

SEQ ID NO: 257510 - DNA, 20 bp, Artificial Sequence
  Description of Artificial Sequence: Synthetic oligonucleotide
  Target: LAMA2; (-) strand; PAM type: YTN; PAM sequence: TTG
agataaaaaaatggatacat

SEQ ID NO: 257511 - DNA, 20 bp, Artificial Sequence
  Description of Artificial Sequence: Synthetic oligonucleotide
  Target: LAMA2; (-) strand; PAM type: YTN; PAM sequence: TTA
gaattgagataaaaaaatgg

SEQ ID NO: 257512 - DNA, 20 bp, Artificial Sequence
  Description of Artificial Sequence: Synthetic oligonucleotide
  Target: LAMA2; (-) strand; PAM type: YTN; PAM sequence: TTA
aagcaagtgattagaattga

SEQ ID NO: 257513 - DNA, 20 bp, Artificial Sequence
  Description of Artificial Sequence: Synthetic oligonucleotide
  Target: LAMA2; (-) strand; PAM type: YTN; PAM sequence: TTT
aaagcaagtgattagaattg

SEQ ID NO: 257514 - DNA, 20 bp, Artificial Sequence
  Description of Artificial Sequence: Synthetic oligonucleotide
  Target: LAMA2; (-) strand; PAM type: YTN; PAM sequence: TTA
tttaaagcaagtgattagaa

SEQ ID NO: 257515 - DNA, 20 bp, Artificial Sequence
  Description of Artificial Sequence: Synthetic oligonucleotide
  Target: LAMA2; (-) strand; PAM type: YTN; PAM sequence: CTG
aaatatcatgggcagaaaaa

SEQ ID NO: 257516 - DNA, 20 bp, Artificial Sequence
  Description of Artificial Sequence: Synthetic oligonucleotide
  Target: LAMA2; (-) strand; PAM type: YTN; PAM sequence: CTA
ctgaaatatcatgggcagaa

SEQ ID NO: 257517 - DNA, 20 bp, Artificial Sequence
  Description of Artificial Sequence: Synthetic oligonucleotide
  Target: LAMA2; (-) strand; PAM type: YTN; PAM sequence: CTA
ctactgaaatatcatgggca

SEQ ID NO: 257518 - DNA, 20 bp, Artificial Sequence
  Description of Artificial Sequence: Synthetic oligonucleotide
  Target: LAMA2; (-) strand; PAM type: YTN; PAM sequence: CTG
atggctactactgaaatatc

SEQ ID NO: 257519 - DNA, 20 bp, Artificial Sequence
  Description of Artificial Sequence: Synthetic oligonucleotide
  Target: LAMA2; (-) strand; PAM type: YTN; PAM sequence: TTC
tgatggctactactgaaata

SEQ ID NO: 257520 - DNA, 20 bp, Artificial Sequence
  Description of Artificial Sequence: Synthetic oligonucleotide
  Target: LAMA2; (-) strand; PAM type: YTN; PAM sequence: CTT
ctgatggctactactgaaat

SEQ ID NO: 257521 - DNA, 20 bp, Artificial Sequence
  Description of Artificial Sequence: Synthetic oligonucleotide
  Target: LAMA2; (-) strand; PAM type: YTN; PAM sequence: TTA
acaccttctgatggctacta

SEQ ID NO: 257522 - DNA, 20 bp, Artificial Sequence
  Description of Artificial Sequence: Synthetic oligonucleotide
  Target: LAMA2; (-) strand; PAM type: YTN; PAM sequence: CTG
attaacaccttctgatggct

SEQ ID NO: 257523 - DNA, 20 bp, Artificial Sequence
  Description of Artificial Sequence: Synthetic oligonucleotide
  Target: LAMA2; (-) strand; PAM type: YTN; PAM sequence: TTA
acatatgaaagcataactga

SEQ ID NO: 257524 - DNA, 20 bp, Artificial Sequence
  Description of Artificial Sequence: Synthetic oligonucleotide
  Target: LAMA2; (-) strand; PAM type: YTN; PAM sequence: CTG
taaagttaacatatgaaagc

SEQ ID NO: 257525 - DNA, 20 bp, Artificial Sequence
  Description of Artificial Sequence: Synthetic oligonucleotide
  Target: LAMA2; (-) strand; PAM type: YTN; PAM sequence: TTA
caaaatacgacactgtaaag

SEQ ID NO: 257526 - DNA, 20 bp, Artificial Sequence
  Description of Artificial Sequence: Synthetic oligonucleotide
  Target: LAMA2; (-) strand; PAM type: YTN; PAM sequence: CTA
ttacaaaatacgacactgta

SEQ ID NO: 257527 - DNA, 20 bp, Artificial Sequence
  Description of Artificial Sequence: Synthetic oligonucleotide
  Target: LAMA2; (-) strand; PAM type: YTN; PAM sequence: TTA
tacctattacaaaatacgac

SEQ ID NO: 257528 - DNA, 20 bp, Artificial Sequence
  Description of Artificial Sequence: Synthetic oligonucleotide
  Target: LAMA2; (-) strand; PAM type: YTN; PAM sequence: TTT
atacctattacaaaatacga

SEQ ID NO: 257529 - DNA, 20 bp, Artificial Sequence
  Description of Artificial Sequence: Synthetic oligonucleotide
  Target: LAMA2; (-) strand; PAM type: YTN; PAM sequence: TTT
tatacctattacaaaatacg

SEQ ID NO: 257530 - DNA, 20 bp, Artificial Sequence
  Description of Artificial Sequence: Synthetic oligonucleotide
  Target: LAMA2; (-) strand; PAM type: YTN; PAM sequence: TTG
gcagaattttatacctatta

SEQ ID NO: 257531 - DNA, 20 bp, Artificial Sequence
  Description of Artificial Sequence: Synthetic oligonucleotide
  Target: LAMA2; (-) strand; PAM type: YTN; PAM sequence: CTG
tgtgcgaaaatattggcaga

SEQ ID NO: 257532 - DNA, 20 bp, Artificial Sequence
  Description of Artificial Sequence: Synthetic oligonucleotide
  Target: LAMA2; (-) strand; PAM type: YTN; PAM sequence: TTC
aacaatgacaaatgcctgtg

SEQ ID NO: 257533 - DNA, 20 bp, Artificial Sequence
  Description of Artificial Sequence: Synthetic oligonucleotide
  Target: LAMA2; (-) strand; PAM type: YTN; PAM sequence: TTA
atcattcaacaatgacaaat

SEQ ID NO: 257534 - DNA, 20 bp, Artificial Sequence
  Description of Artificial Sequence: Synthetic oligonucleotide
  Target: LAMA2; (-) strand; PAM type: YTN; PAM sequence: CTA
aaatgaggttaatcattcaa

SEQ ID NO: 257535 - DNA, 20 bp, Artificial Sequence
  Description of Artificial Sequence: Synthetic oligonucleotide
  Target: LAMA2; (-) strand; PAM type: YTN; PAM sequence: TTA
tgaaactaaaatgaggttaa

SEQ ID NO: 257536 - DNA, 20 bp, Artificial Sequence
  Description of Artificial Sequence: Synthetic oligonucleotide
  Target: LAMA2; (-) strand; PAM type: YTN; PAM sequence: CTA
ttatgaaactaaaatgaggt

SEQ ID NO: 257537 - DNA, 20 bp, Artificial Sequence
  Description of Artificial Sequence: Synthetic oligonucleotide
  Target: LAMA2; (-) strand; PAM type: YTN; PAM sequence: TTA
aatgactattatgaaactaa

SEQ ID NO: 257538 - DNA, 20 bp, Artificial Sequence
  Description of Artificial Sequence: Synthetic oligonucleotide
  Target: LAMA2; (-) strand; PAM type: YTN; PAM sequence: CTT
aaatgactattatgaaacta

SEQ ID NO: 257539 - DNA, 20 bp, Artificial Sequence
  Description of Artificial Sequence: Synthetic oligonucleotide
  Target: LAMA2; (-) strand; PAM type: YTN; PAM sequence: CTA
gaaatagtccttaaatgact

SEQ ID NO: 257540 - DNA, 20 bp, Artificial Sequence
  Description of Artificial Sequence: Synthetic oligonucleotide
  Target: LAMA2; (-) strand; PAM type: YTN; PAM sequence: TTC
tagaaatagtccttaaatga

SEQ ID NO: 257541 - DNA, 20 bp, Artificial Sequence
  Description of Artificial Sequence: Synthetic oligonucleotide
  Target: LAMA2; (-) strand; PAM type: YTN; PAM sequence: CTG
aaagagcattctagaaatag

SEQ ID NO: 257542 - DNA, 20 bp, Artificial Sequence
  Description of Artificial Sequence: Synthetic oligonucleotide
  Target: LAMA2; (-) strand; PAM type: YTN; PAM sequence: TTG
tggaaggaaaacactgaaag

SEQ ID NO: 257543 - DNA, 20 bp, Artificial Sequence
  Description of Artificial Sequence: Synthetic oligonucleotide
  Target: LAMA2; (-) strand; PAM type: YTN; PAM sequence: TTT
gtggaaggaaaacactgaaa

SEQ ID NO: 257544 - DNA, 20 bp, Artificial Sequence
  Description of Artificial Sequence: Synthetic oligonucleotide
  Target: LAMA2; (-) strand; PAM type: YTN; PAM sequence: TTT
tgtggaaggaaaacactgaa

SEQ ID NO: 257545 - DNA, 20 bp, Artificial Sequence
  Description of Artificial Sequence: Synthetic oligonucleotide
  Target: LAMA2; (-) strand; PAM type: YTN; PAM sequence: CTA
attttgtggaaggaaaacac

SEQ ID NO: 257546 - DNA, 20 bp, Artificial Sequence
  Description of Artificial Sequence: Synthetic oligonucleotide
  Target: LAMA2; (-) strand; PAM type: YTN; PAM sequence: CTA
gagtagctaattttgtggaa

SEQ ID NO: 257547 - DNA, 20 bp, Artificial Sequence
  Description of Artificial Sequence: Synthetic oligonucleotide
  Target: LAMA2; (-) strand; PAM type: YTN; PAM sequence: CTA
atatggatgaagccctagag

SEQ ID NO: 257548 - DNA, 20 bp, Artificial Sequence
  Description of Artificial Sequence: Synthetic oligonucleotide
  Target: LAMA2; (-) strand; PAM type: YTN; PAM sequence: TTA
tactaatatggatgaagccc

SEQ ID NO: 257549 - DNA, 20 bp, Artificial Sequence
  Description of Artificial Sequence: Synthetic oligonucleotide
  Target: LAMA2; (-) strand; PAM type: YTN; PAM sequence: TTA
atacagcaaaaaaggtaaag

SEQ ID NO: 257550 - DNA, 20 bp, Artificial Sequence
  Description of Artificial Sequence: Synthetic oligonucleotide
  Target: LAMA2; (-) strand; PAM type: YTN; PAM sequence: CTA
tgtagtattaatacagcaaa

SEQ ID NO: 257551 - DNA, 20 bp, Artificial Sequence
  Description of Artificial Sequence: Synthetic oligonucleotide
  Target: LAMA2; (-) strand; PAM type: YTN; PAM sequence: TTC
tatgtagtattaatacagca

SEQ ID NO: 257552 - DNA, 20 bp, Artificial Sequence
  Description of Artificial Sequence: Synthetic oligonucleotide
  Target: LAMA2; (-) strand; PAM type: YTN; PAM sequence: TTG
gaaattctatgtagtattaa

SEQ ID NO: 257553 - DNA, 20 bp, Artificial Sequence
  Description of Artificial Sequence: Synthetic oligonucleotide
  Target: LAMA2; (-) strand; PAM type: YTN; PAM sequence: TTT
ggaaattctatgtagtatta

SEQ ID NO: 257554 - DNA, 20 bp, Artificial Sequence
  Description of Artificial Sequence: Synthetic oligonucleotide
  Target: LAMA2; (-) strand; PAM type: YTN; PAM sequence: TTA
aggatttggaaattctatgt

SEQ ID NO: 257555 - DNA, 20 bp, Artificial Sequence
  Description of Artificial Sequence: Synthetic oligonucleotide
  Target: LAMA2; (-) strand; PAM type: YTN; PAM sequence: CTG
acattaaggatttggaaatt

SEQ ID NO: 257556 - DNA, 20 bp, Artificial Sequence
  Description of Artificial Sequence: Synthetic oligonucleotide
  Target: LAMA2; (-) strand; PAM type: YTN; PAM sequence: CTA
atcccactgacattaaggat

SEQ ID NO: 257557 - DNA, 20 bp, Artificial Sequence
  Description of Artificial Sequence: Synthetic oligonucleotide
  Target: LAMA2; (-) strand; PAM type: YTN; PAM sequence: TTC
taatcccactgacattaagg

SEQ ID NO: 257558 - DNA, 20 bp, Artificial Sequence
  Description of Artificial Sequence: Synthetic oligonucleotide
  Target: LAMA2; (-) strand; PAM type: YTN; PAM sequence: TTC
atattctaatcccactgaca

SEQ ID NO: 257559 - DNA, 20 bp, Artificial Sequence
  Description of Artificial Sequence: Synthetic oligonucleotide
  Target: LAMA2; (-) strand; PAM type: YTN; PAM sequence: CTT
catattctaatcccactgac

SEQ ID NO: 257560 - DNA, 20 bp, Artificial Sequence
  Description of Artificial Sequence: Synthetic oligonucleotide
  Target: LAMA2; (-) strand; PAM type: YTN; PAM sequence: CTG
caacaagatccgccttcata

SEQ ID NO: 257561 - DNA, 20 bp, Artificial Sequence
  Description of Artificial Sequence: Synthetic oligonucleotide
  Target: LAMA2; (-) strand; PAM type: YTN; PAM sequence: TTC
tgcaacaagatccgccttca

SEQ ID NO: 257562 - DNA, 20 bp, Artificial Sequence
  Description of Artificial Sequence: Synthetic oligonucleotide
  Target: LAMA2; (-) strand; PAM type: YTN; PAM sequence: CTT
ctgcaacaagatccgccttc

SEQ ID NO: 257563 - DNA, 20 bp, Artificial Sequence
  Description of Artificial Sequence: Synthetic oligonucleotide
  Target: LAMA2; (-) strand; PAM type: YTN; PAM sequence: TTG
atcttctgcaacaagatccg

SEQ ID NO: 257564 - DNA, 20 bp, Artificial Sequence
  Description of Artificial Sequence: Synthetic oligonucleotide
  Target: LAMA2; (-) strand; PAM type: YTN; PAM sequence: TTT
gatcttctgcaacaagatcc

SEQ ID NO: 257565 - DNA, 20 bp, Artificial Sequence
  Description of Artificial Sequence: Synthetic oligonucleotide
  Target: LAMA2; (-) strand; PAM type: YTN; PAM sequence: TTC
catttgatcttctgcaacaa

SEQ ID NO: 257566 - DNA, 20 bp, Artificial Sequence
  Description of Artificial Sequence: Synthetic oligonucleotide
  Target: LAMA2; (-) strand; PAM type: YTN; PAM sequence: TTT
ccatttgatcttctgcaaca

SEQ ID NO: 257567 - DNA, 20 bp, Artificial Sequence
  Description of Artificial Sequence: Synthetic oligonucleotide
  Target: LAMA2; (-) strand; PAM type: YTN; PAM sequence: CTT
tccatttgatcttctgcaac

SEQ ID NO: 257568 - DNA, 20 bp, Artificial Sequence
  Description of Artificial Sequence: Synthetic oligonucleotide
  Target: LAMA2; (-) strand; PAM type: YTN; PAM sequence: TTC
actttccatttgatcttctg

SEQ ID NO: 257569 - DNA, 20 bp, Artificial Sequence
  Description of Artificial Sequence: Synthetic oligonucleotide
  Target: LAMA2; (-) strand; PAM type: YTN; PAM sequence: TTG
gattcactttccatttgatc

SEQ ID NO: 257570 - DNA, 20 bp, Artificial Sequence
  Description of Artificial Sequence: Synthetic oligonucleotide
  Target: LAMA2; (-) strand; PAM type: YTN; PAM sequence: CTA
acattggattcactttccat

SEQ ID NO: 257571 - DNA, 20 bp, Artificial Sequence
  Description of Artificial Sequence: Synthetic oligonucleotide
  Target: LAMA2; (-) strand; PAM type: YTN; PAM sequence: CTG
atgatggccaaatgctaaca

SEQ ID NO: 257572 - DNA, 20 bp, Artificial Sequence
  Description of Artificial Sequence: Synthetic oligonucleotide
  Target: LAMA2; (-) strand; PAM type: YTN; PAM sequence: TTA
tgatagtaaatgaagctgat

SEQ ID NO: 257573 - DNA, 20 bp, Artificial Sequence
  Description of Artificial Sequence: Synthetic oligonucleotide
  Target: LAMA2; (-) strand; PAM type: YTN; PAM sequence: TTA
aacattatgatagtaaatga

SEQ ID NO: 257574 - DNA, 20 bp, Artificial Sequence
  Description of Artificial Sequence: Synthetic oligonucleotide
  Target: LAMA2; (-) strand; PAM type: YTN; PAM sequence: CTT
aaacattatgatagtaaatg

SEQ ID NO: 257575 - DNA, 20 bp, Artificial Sequence
  Description of Artificial Sequence: Synthetic oligonucleotide
  Target: LAMA2; (-) strand; PAM type: YTN; PAM sequence: CTG
cttaaacattatgatagtaa

SEQ ID NO: 257576 - DNA, 20 bp, Artificial Sequence
  Description of Artificial Sequence: Synthetic oligonucleotide
  Target: LAMA2; (-) strand; PAM type: YTN; PAM sequence: CTC
tgcttaaacattatgatagt

SEQ ID NO: 257577 - DNA, 20 bp, Artificial Sequence
  Description of Artificial Sequence: Synthetic oligonucleotide
  Target: LAMA2; (-) strand; PAM type: YTN; PAM sequence: CTA
ctctgcttaaacattatgat

SEQ ID NO: 257578 - DNA, 20 bp, Artificial Sequence
  Description of Artificial Sequence: Synthetic oligonucleotide
  Target: LAMA2; (-) strand; PAM type: YTN; PAM sequence: CTC
ataacctactctgcttaaac

SEQ ID NO: 257579 - DNA, 20 bp, Artificial Sequence
  Description of Artificial Sequence: Synthetic oligonucleotide
  Target: LAMA2; (-) strand; PAM type: YTN; PAM sequence: CTG
gtctcataacctactctgct

SEQ ID NO: 257580 - DNA, 20 bp, Artificial Sequence
  Description of Artificial Sequence: Synthetic oligonucleotide
  Target: LAMA2; (-) strand; PAM type: YTN; PAM sequence: TTG
acagaaatgaatggataggc

SEQ ID NO: 257581 - DNA, 20 bp, Artificial Sequence
  Description of Artificial Sequence: Synthetic oligonucleotide
  Target: LAMA2; (-) strand; PAM type: YTN; PAM sequence: TTT
gacagaaatgaatggatagg

SEQ ID NO: 257582 - DNA, 20 bp, Artificial Sequence
  Description of Artificial Sequence: Synthetic oligonucleotide
  Target: LAMA2; (-) strand; PAM type: YTN; PAM sequence: CTC
acataaatttgacagaaatg

SEQ ID NO: 257583 - DNA, 20 bp, Artificial Sequence
  Description of Artificial Sequence: Synthetic oligonucleotide
  Target: LAMA2; (-) strand; PAM type: YTN; PAM sequence: CTC
tcacataaatttgacagaaa

SEQ ID NO: 257584 - DNA, 20 bp, Artificial Sequence
  Description of Artificial Sequence: Synthetic oligonucleotide
  Target: LAMA2; (-) strand; PAM type: YTN; PAM sequence: TTG
gaagagtctctcacataaat

SEQ ID NO: 257585 - DNA, 20 bp, Artificial Sequence
  Description of Artificial Sequence: Synthetic oligonucleotide
  Target: LAMA2; (-) strand; PAM type: YTN; PAM sequence: CTG
aataattggaagagtctctc

SEQ ID NO: 257586 - DNA, 20 bp, Artificial Sequence
  Description of Artificial Sequence: Synthetic oligonucleotide
  Target: LAMA2; (-) strand; PAM type: YTN; PAM sequence: CTG
ggacccacctgaataattgg

SEQ ID NO: 257587 - DNA, 20 bp, Artificial Sequence
  Description of Artificial Sequence: Synthetic oligonucleotide
  Target: LAMA2; (-) strand; PAM type: YTN; PAM sequence: CTG
catgtcctgggacccacctg

SEQ ID NO: 257588 - DNA, 20 bp, Artificial Sequence
  Description of Artificial Sequence: Synthetic oligonucleotide
  Target: LAMA2; (-) strand; PAM type: YTN; PAM sequence: TTC
tgcatgtcctgggacccacc

SEQ ID NO: 257589 - DNA, 20 bp, Artificial Sequence
  Description of Artificial Sequence: Synthetic oligonucleotide
  Target: LAMA2; (-) strand; PAM type: YTN; PAM sequence: CTA
taattctgcatgtcctggga

SEQ ID NO: 257590 - DNA, 20 bp, Artificial Sequence
  Description of Artificial Sequence: Synthetic oligonucleotide
  Target: LAMA2; (-) strand; PAM type: YTN; PAM sequence: TTC
tataattctgcatgtcctgg

SEQ ID NO: 257591 - DNA, 20 bp, Artificial Sequence
  Description of Artificial Sequence: Synthetic oligonucleotide
  Target: LAMA2; (-) strand; PAM type: YTN; PAM sequence: TTT
ctataattctgcatgtcctg

SEQ ID NO: 257592 - DNA, 20 bp, Artificial Sequence
  Description of Artificial Sequence: Synthetic oligonucleotide
  Target: LAMA2; (-) strand; PAM type: YTN; PAM sequence: TTA
cagtggtttctataattctg

SEQ ID NO: 257593 - DNA, 20 bp, Artificial Sequence
  Description of Artificial Sequence: Synthetic oligonucleotide
  Target: LAMA2; (-) strand; PAM type: YTN; PAM sequence: TTT
acagtggtttctataattct

SEQ ID NO: 257594 - DNA, 20 bp, Artificial Sequence
  Description of Artificial Sequence: Synthetic oligonucleotide
  Target: LAMA2; (-) strand; PAM type: YTN; PAM sequence: CTA
catttacagtggtttctata

SEQ ID NO: 257595 - DNA, 20 bp, Artificial Sequence
  Description of Artificial Sequence: Synthetic oligonucleotide
  Target: LAMA2; (-) strand; PAM type: YTN; PAM sequence: TTG
ataataggctacatttacag

SEQ ID NO: 257596 - DNA, 20 bp, Artificial Sequence
  Description of Artificial Sequence: Synthetic oligonucleotide
  Target: LAMA2; (-) strand; PAM type: YTN; PAM sequence: TTA
cagtagagttgataataggc

SEQ ID NO: 257597 - DNA, 20 bp, Artificial Sequence
  Description of Artificial Sequence: Synthetic oligonucleotide
  Target: LAMA2; (-) strand; PAM type: YTN; PAM sequence: CTT
acagtagagttgataatagg

SEQ ID NO: 257598 - DNA, 20 bp, Artificial Sequence
  Description of Artificial Sequence: Synthetic oligonucleotide
  Target: LAMA2; (-) strand; PAM type: YTN; PAM sequence: TTG
gtgcttacagtagagttgat

SEQ ID NO: 257599 - DNA, 20 bp, Artificial Sequence
  Description of Artificial Sequence: Synthetic oligonucleotide
  Target: LAMA2; (-) strand; PAM type: YTN; PAM sequence: TTT
ggtgcttacagtagagttga

SEQ ID NO: 257600 - DNA, 20 bp, Artificial Sequence
  Description of Artificial Sequence: Synthetic oligonucleotide
  Target: LAMA2; (-) strand; PAM type: YTN; PAM sequence: CTT
tggtgcttacagtagagttg

SEQ ID NO: 257601 - DNA, 20 bp, Artificial Sequence
  Description of Artificial Sequence: Synthetic oligonucleotide
  Target: LAMA2; (-) strand; PAM type: YTN; PAM sequence: CTG
ggtctttggtgcttacagta

SEQ ID NO: 257602 - DNA, 20 bp, Artificial Sequence
  Description of Artificial Sequence: Synthetic oligonucleotide
  Target: LAMA2; (-) strand; PAM type: YTN; PAM sequence: CTA
ctgggtctttggtgcttaca

SEQ ID NO: 257603 - DNA, 20 bp, Artificial Sequence
  Description of Artificial Sequence: Synthetic oligonucleotide
  Target: LAMA2; (-) strand; PAM type: YTN; PAM sequence: TTA
atgaaatagggtaccctact

SEQ ID NO: 257604 - DNA, 20 bp, Artificial Sequence
  Description of Artificial Sequence: Synthetic oligonucleotide
  Target: LAMA2; (-) strand; PAM type: YTN; PAM sequence: CTT
aatgaaatagggtaccctac

SEQ ID NO: 257605 - DNA, 20 bp, Artificial Sequence
  Description of Artificial Sequence: Synthetic oligonucleotide
  Target: LAMA2; (-) strand; PAM type: YTN; PAM sequence: TTC
ttaatgaaatagggtaccct

SEQ ID NO: 257606 - DNA, 20 bp, Artificial Sequence
  Description of Artificial Sequence: Synthetic oligonucleotide
  Target: LAMA2; (-) strand; PAM type: YTN; PAM sequence: TTT
cttaatgaaatagggtaccc

SEQ ID NO: 257607 - DNA, 20 bp, Artificial Sequence
  Description of Artificial Sequence: Synthetic oligonucleotide
  Target: LAMA2; (-) strand; PAM type: YTN; PAM sequence: CTG
tgatgagagagacacatttc

SEQ ID NO: 257608 - DNA, 20 bp, Artificial Sequence
  Description of Artificial Sequence: Synthetic oligonucleotide
  Target: LAMA2; (-) strand; PAM type: YTN; PAM sequence: CTA
aacctgtgatgagagagaca

SEQ ID NO: 257609 - DNA, 20 bp, Artificial Sequence
  Description of Artificial Sequence: Synthetic oligonucleotide
  Target: LAMA2; (-) strand; PAM type: YTN; PAM sequence: TTC
taaacctgtgatgagagaga

SEQ ID NO: 257610 - DNA, 20 bp, Artificial Sequence
  Description of Artificial Sequence: Synthetic oligonucleotide
  Target: LAMA2; (-) strand; PAM type: YTN; PAM sequence: CTT
ctaaacctgtgatgagagag

SEQ ID NO: 257611 - DNA, 20 bp, Artificial Sequence
  Description of Artificial Sequence: Synthetic oligonucleotide
  Target: LAMA2; (-) strand; PAM type: YTN; PAM sequence: CTC
atcttctaaacctgtgatga

SEQ ID NO: 257612 - DNA, 20 bp, Artificial Sequence
  Description of Artificial Sequence: Synthetic oligonucleotide
  Target: LAMA2; (-) strand; PAM type: YTN; PAM sequence: CTA
gaactcatcttctaaacctg

SEQ ID NO: 257613 - DNA, 20 bp, Artificial Sequence
  Description of Artificial Sequence: Synthetic oligonucleotide
  Target: LAMA2; (-) strand; PAM type: YTN; PAM sequence: TTA
aataacaaaaagctagaact

SEQ ID NO: 257614 - DNA, 20 bp, Artificial Sequence
  Description of Artificial Sequence: Synthetic oligonucleotide
  Target: LAMA2; (-) strand; PAM type: YTN; PAM sequence: TTA
ttaaataacaaaaagctaga

SEQ ID NO: 257615 - DNA, 20 bp, Artificial Sequence
  Description of Artificial Sequence: Synthetic oligonucleotide
  Target: LAMA2; (-) strand; PAM type: YTN; PAM sequence: TTA
tcattattaaataacaaaaa

SEQ ID NO: 257616 - DNA, 20 bp, Artificial Sequence
  Description of Artificial Sequence: Synthetic oligonucleotide
  Target: LAMA2; (-) strand; PAM type: YTN; PAM sequence: TTC
aatgaattatcattattaaa

SEQ ID NO: 257617 - DNA, 20 bp, Artificial Sequence
  Description of Artificial Sequence: Synthetic oligonucleotide
  Target: LAMA2; (-) strand; PAM type: YTN; PAM sequence: TTG
attcaatgaattatcattat

SEQ ID NO: 257618 - DNA, 20 bp, Artificial Sequence
  Description of Artificial Sequence: Synthetic oligonucleotide
  Target: LAMA2; (-) strand; PAM type: YTN; PAM sequence: TTT
gattcaatgaattatcatta

SEQ ID NO: 257619 - DNA, 20 bp, Artificial Sequence
  Description of Artificial Sequence: Synthetic oligonucleotide
  Target: LAMA2; (-) strand; PAM type: YTN; PAM sequence: TTT
tgattcaatgaattatcatt

SEQ ID NO: 257620 - DNA, 20 bp, Artificial Sequence
  Description of Artificial Sequence: Synthetic oligonucleotide
  Target: LAMA2; (-) strand; PAM type: YTN; PAM sequence: TTG
gttttgattcaatgaattat

SEQ ID NO: 257621 - DNA, 20 bp, Artificial Sequence
  Description of Artificial Sequence: Synthetic oligonucleotide
  Target: LAMA2; (-) strand; PAM type: YTN; PAM sequence: TTT
ggttttgattcaatgaatta

SEQ ID NO: 257622 - DNA, 20 bp, Artificial Sequence
  Description of Artificial Sequence: Synthetic oligonucleotide
  Target: LAMA2; (-) strand; PAM type: YTN; PAM sequence: TTG
gtccagaaagtgatttggtt

SEQ ID NO: 257623 - DNA, 20 bp, Artificial Sequence
  Description of Artificial Sequence: Synthetic oligonucleotide
  Target: LAMA2; (-) strand; PAM type: YTN; PAM sequence: CTG
ccagttggtccagaaagtga

SEQ ID NO: 257624 - DNA, 20 bp, Artificial Sequence
  Description of Artificial Sequence: Synthetic oligonucleotide
  Target: LAMA2; (-) strand; PAM type: YTN; PAM sequence: TTA
acagctgccagttggtccag

SEQ ID NO: 257625 - DNA, 20 bp, Artificial Sequence
  Description of Artificial Sequence: Synthetic oligonucleotide
  Target: LAMA2; (-) strand; PAM type: YTN; PAM sequence: TTA
tattaacagctgccagttgg

SEQ ID NO: 257626 - DNA, 20 bp, Artificial Sequence
  Description of Artificial Sequence: Synthetic oligonucleotide
  Target: LAMA2; (-) strand; PAM type: YTN; PAM sequence: TTA
caggttatattaacagctgc

SEQ ID NO: 257627 - DNA, 20 bp, Artificial Sequence
  Description of Artificial Sequence: Synthetic oligonucleotide
  Target: LAMA2; (-) strand; PAM type: YTN; PAM sequence: TTT
acaggttatattaacagctg

SEQ ID NO: 257628 - DNA, 20 bp, Artificial Sequence
  Description of Artificial Sequence: Synthetic oligonucleotide
  Target: LAMA2; (-) strand; PAM type: YTN; PAM sequence: TTA
aaaaaagatcaatttacagg

SEQ ID NO: 257629 - DNA, 20 bp, Artificial Sequence
  Description of Artificial Sequence: Synthetic oligonucleotide
  Target: LAMA2; (-) strand; PAM type: YTN; PAM sequence: TTT
aaaaaaagatcaatttacag

SEQ ID NO: 257630 - DNA, 20 bp, Artificial Sequence
  Description of Artificial Sequence: Synthetic oligonucleotide
  Target: LAMA2; (-) strand; PAM type: YTN; PAM sequence: CTT
taaaaaaagatcaatttaca

SEQ ID NO: 257631 - DNA, 20 bp, Artificial Sequence
  Description of Artificial Sequence: Synthetic oligonucleotide
  Target: LAMA2; (-) strand; PAM type: YTN; PAM sequence: TTG
ctttaaaaaaagatcaattt

SEQ ID NO: 257632 - DNA, 20 bp, Artificial Sequence
  Description of Artificial Sequence: Synthetic oligonucleotide
  Target: LAMA2; (-) strand; PAM type: YTN; PAM sequence: TTT
gctttaaaaaaagatcaatt

SEQ ID NO: 257633 - DNA, 20 bp, Artificial Sequence
  Description of Artificial Sequence: Synthetic oligonucleotide
  Target: LAMA2; (-) strand; PAM type: YTN; PAM sequence: TTT
tgctttaaaaaaagatcaat

SEQ ID NO: 257634 - DNA, 20 bp, Artificial Sequence
  Description of Artificial Sequence: Synthetic oligonucleotide
  Target: LAMA2; (-) strand; PAM type: YTN; PAM sequence: TTG
gaaattttgctttaaaaaaa

SEQ ID NO: 257635 - DNA, 20 bp, Artificial Sequence
  Description of Artificial Sequence: Synthetic oligonucleotide
  Target: LAMA2; (-) strand; PAM type: YTN; PAM sequence: CTG
ttggaaattttgctttaaaa

SEQ ID NO: 257636 - DNA, 20 bp, Artificial Sequence
  Description of Artificial Sequence: Synthetic oligonucleotide
  Target: LAMA2; (-) strand; PAM type: YTN; PAM sequence: CTG
agctgttggaaattttgctt

SEQ ID NO: 257637 - DNA, 20 bp, Artificial Sequence
  Description of Artificial Sequence: Synthetic oligonucleotide
  Target: LAMA2; (-) strand; PAM type: YTN; PAM sequence: TTA
aaggcactgagctgttggaa

SEQ ID NO: 257638 - DNA, 20 bp, Artificial Sequence
  Description of Artificial Sequence: Synthetic oligonucleotide
  Target: LAMA2; (-) strand; PAM type: YTN; PAM sequence: TTT
aaaggcactgagctgttgga

SEQ ID NO: 257639 - DNA, 20 bp, Artificial Sequence
  Description of Artificial Sequence: Synthetic oligonucleotide
  Target: LAMA2; (-) strand; PAM type: YTN; PAM sequence: TTG
tcaggaatccagtgtttaaa

SEQ ID NO: 257640 - DNA, 20 bp, Artificial Sequence
  Description of Artificial Sequence: Synthetic oligonucleotide
  Target: LAMA2; (-) strand; PAM type: YTN; PAM sequence: TTT
gtcaggaatccagtgtttaa

SEQ ID NO: 257641 - DNA, 20 bp, Artificial Sequence
  Description of Artificial Sequence: Synthetic oligonucleotide
  Target: LAMA2; (-) strand; PAM type: YTN; PAM sequence: TTA
tacatttgtcaggaatccag

SEQ ID NO: 257642 - DNA, 20 bp, Artificial Sequence
  Description of Artificial Sequence: Synthetic oligonucleotide
  Target: LAMA2; (-) strand; PAM type: YTN; PAM sequence: TTT
atacatttgtcaggaatcca

SEQ ID NO: 257643 - DNA, 20 bp, Artificial Sequence
  Description of Artificial Sequence: Synthetic oligonucleotide
  Target: LAMA2; (-) strand; PAM type: YTN; PAM sequence: TTT
tatacatttgtcaggaatcc

SEQ ID NO: 257644 - DNA, 20 bp, Artificial Sequence
  Description of Artificial Sequence: Synthetic oligonucleotide
  Target: LAMA2; (-) strand; PAM type: YTN; PAM sequence: CTA
tgattttatacatttgtcag

SEQ ID NO: 257645 - DNA, 20 bp, Artificial Sequence
  Description of Artificial Sequence: Synthetic oligonucleotide
  Target: LAMA2; (-) strand; PAM type: YTN; PAM sequence: TTC
tatgattttatacatttgtc

SEQ ID NO: 257646 - DNA, 20 bp, Artificial Sequence
  Description of Artificial Sequence: Synthetic oligonucleotide
  Target: LAMA2; (-) strand; PAM type: YTN; PAM sequence: TTT
ctatgattttatacatttgt

SEQ ID NO: 257647 - DNA, 20 bp, Artificial Sequence
  Description of Artificial Sequence: Synthetic oligonucleotide
  Target: LAMA2; (-) strand; PAM type: YTN; PAM sequence: CTT
tctatgattttatacatttg

SEQ ID NO: 257648 - DNA, 20 bp, Artificial Sequence
  Description of Artificial Sequence: Synthetic oligonucleotide
  Target: LAMA2; (-) strand; PAM type: YTN; PAM sequence: TTA
ggctttctatgattttatac

SEQ ID NO: 257649 - DNA, 20 bp, Artificial Sequence
  Description of Artificial Sequence: Synthetic oligonucleotide
  Target: LAMA2; (-) strand; PAM type: YTN; PAM sequence: CTT
aggctttctatgattttata

SEQ ID NO: 257650 - DNA, 20 bp, Artificial Sequence
  Description of Artificial Sequence: Synthetic oligonucleotide
  Target: LAMA2; (-) strand; PAM type: YTN; PAM sequence: TTC
ttaggctttctatgatttta

SEQ ID NO: 257651 - DNA, 20 bp, Artificial Sequence
  Description of Artificial Sequence: Synthetic oligonucleotide
  Target: LAMA2; (-) strand; PAM type: YTN; PAM sequence: TTT
cttaggctttctatgatttt

SEQ ID NO: 257652 - DNA, 20 bp, Artificial Sequence
  Description of Artificial Sequence: Synthetic oligonucleotide
  Target: LAMA2; (-) strand; PAM type: YTN; PAM sequence: CTG
tgggaaaggaagaatttctt

SEQ ID NO: 257653 - DNA, 20 bp, Artificial Sequence
  Description of Artificial Sequence: Synthetic oligonucleotide
  Target: LAMA2; (-) strand; PAM type: YTN; PAM sequence: CTA
gatgatctgtgggaaaggaa

SEQ ID NO: 257654 - DNA, 20 bp, Artificial Sequence
  Description of Artificial Sequence: Synthetic oligonucleotide
  Target: LAMA2; (-) strand; PAM type: YTN; PAM sequence: CTA
gaaaatgtagatcctagatg

SEQ ID NO: 257655 - DNA, 20 bp, Artificial Sequence
  Description of Artificial Sequence: Synthetic oligonucleotide
  Target: LAMA2; (-) strand; PAM type: YTN; PAM sequence: CTC
aggagcacacagctagaaaa

SEQ ID NO: 257656 - DNA, 20 bp, Artificial Sequence
  Description of Artificial Sequence: Synthetic oligonucleotide
  Target: LAMA2; (-) strand; PAM type: YTN; PAM sequence: TTG
ctcaggagcacacagctaga

SEQ ID NO: 257657 - DNA, 20 bp, Artificial Sequence
  Description of Artificial Sequence: Synthetic oligonucleotide
  Target: LAMA2; (-) strand; PAM type: YTN; PAM sequence: CTT
gctcaggagcacacagctag

SEQ ID NO: 257658 - DNA, 20 bp, Artificial Sequence
  Description of Artificial Sequence: Synthetic oligonucleotide
  Target: LAMA2; (-) strand; PAM type: YTN; PAM sequence: CTC
aaggaggtcaaatatcttgc

SEQ ID NO: 257659 - DNA, 20 bp, Artificial Sequence
  Description of Artificial Sequence: Synthetic oligonucleotide
  Target: LAMA2; (-) strand; PAM type: YTN; PAM sequence: CTG
tgtctcaaggaggtcaaata

SEQ ID NO: 257660 - DNA, 20 bp, Artificial Sequence
  Description of Artificial Sequence: Synthetic oligonucleotide
  Target: LAMA2; (-) strand; PAM type: YTN; PAM sequence: CTA
gaaaactgtgtctcaaggag

SEQ ID NO: 257661 - DNA, 20 bp, Artificial Sequence
  Description of Artificial Sequence: Synthetic oligonucleotide
  Target: LAMA2; (-) strand; PAM type: YTN; PAM sequence: TTG
tagactagaaaactgtgtct

SEQ ID NO: 257662 - DNA, 20 bp, Artificial Sequence
  Description of Artificial Sequence: Synthetic oligonucleotide
  Target: LAMA2; (-) strand; PAM type: YTN; PAM sequence: TTT
gtagactagaaaactgtgtc

SEQ ID NO: 257663 - DNA, 20 bp, Artificial Sequence
  Description of Artificial Sequence: Synthetic oligonucleotide
  Target: LAMA2; (-) strand; PAM type: YTN; PAM sequence: CTT
tgtagactagaaaactgtgt

SEQ ID NO: 257664 - DNA, 20 bp, Artificial Sequence
  Description of Artificial Sequence: Synthetic oligonucleotide
  Target: LAMA2; (-) strand; PAM type: YTN; PAM sequence: CTC
tttgtagactagaaaactgt

SEQ ID NO: 257665 - DNA, 20 bp, Artificial Sequence
  Description of Artificial Sequence: Synthetic oligonucleotide
  Target: LAMA2; (-) strand; PAM type: YTN; PAM sequence: CTC
tctttgtagactagaaaact

SEQ ID NO: 257666 - DNA, 20 bp, Artificial Sequence
  Description of Artificial Sequence: Synthetic oligonucleotide
  Target: LAMA2; (-) strand; PAM type: YTN; PAM sequence: TTC
atgactctctttgtagacta

SEQ ID NO: 257667 - DNA, 20 bp, Artificial Sequence
  Description of Artificial Sequence: Synthetic oligonucleotide
  Target: LAMA2; (-) strand; PAM type: YTN; PAM sequence: TTA
gtccccacagaaaattcatg

SEQ ID NO: 257668 - DNA, 20 bp, Artificial Sequence
  Description of Artificial Sequence: Synthetic oligonucleotide
  Target: LAMA2; (-) strand; PAM type: YTN; PAM sequence: TTT
agtccccacagaaaattcat

SEQ ID NO: 257669 - DNA, 20 bp, Artificial Sequence
  Description of Artificial Sequence: Synthetic oligonucleotide
  Target: LAMA2; (-) strand; PAM type: YTN; PAM sequence: CTT
tagtccccacagaaaattca

SEQ ID NO: 257670 - DNA, 20 bp, Artificial Sequence
  Description of Artificial Sequence: Synthetic oligonucleotide
  Target: LAMA2; (-) strand; PAM type: YTN; PAM sequence: CTA
tgtgccaaatcctttagtcc

SEQ ID NO: 257671 - DNA, 20 bp, Artificial Sequence
  Description of Artificial Sequence: Synthetic oligonucleotide
  Target: LAMA2; (-) strand; PAM type: YTN; PAM sequence: CTC
tatgtgccaaatcctttagt

SEQ ID NO: 257672 - DNA, 20 bp, Artificial Sequence
  Description of Artificial Sequence: Synthetic oligonucleotide
  Target: LAMA2; (-) strand; PAM type: YTN; PAM sequence: CTG
gataccctctatgtgccaaa

SEQ ID NO: 257673 - DNA, 20 bp, Artificial Sequence
  Description of Artificial Sequence: Synthetic oligonucleotide
  Target: LAMA2; (-) strand; PAM type: YTN; PAM sequence: CTC
actggataccctctatgtgc

SEQ ID NO: 257674 - DNA, 20 bp, Artificial Sequence
  Description of Artificial Sequence: Synthetic oligonucleotide
  Target: LAMA2; (-) strand; PAM type: YTN; PAM sequence: TTG
ggaactcactggataccctc

SEQ ID NO: 257675 - DNA, 20 bp, Artificial Sequence
  Description of Artificial Sequence: Synthetic oligonucleotide
  Target: LAMA2; (-) strand; PAM type: YTN; PAM sequence: CTT
gggaactcactggataccct

SEQ ID NO: 257676 - DNA, 20 bp, Artificial Sequence
  Description of Artificial Sequence: Synthetic oligonucleotide
  Target: LAMA2; (-) strand; PAM type: YTN; PAM sequence: CTC
caggacttgggaactcactg

SEQ ID NO: 257677 - DNA, 20 bp, Artificial Sequence
  Description of Artificial Sequence: Synthetic oligonucleotide
  Target: LAMA2; (-) strand; PAM type: YTN; PAM sequence: CTA
ccatgtgtgagcatctccag

SEQ ID NO: 257678 - DNA, 20 bp, Artificial Sequence
  Description of Artificial Sequence: Synthetic oligonucleotide
  Target: LAMA2; (-) strand; PAM type: YTN; PAM sequence: CTA
ccaaagacagctaccatgtg

SEQ ID NO: 257679 - DNA, 20 bp, Artificial Sequence
  Description of Artificial Sequence: Synthetic oligonucleotide
  Target: LAMA2; (-) strand; PAM type: YTN; PAM sequence: CTG
ctaccaaagacagctaccat

SEQ ID NO: 257680 - DNA, 20 bp, Artificial Sequence
  Description of Artificial Sequence: Synthetic oligonucleotide
  Target: LAMA2; (-) strand; PAM type: YTN; PAM sequence: CTA
tgagcactgctaccaaagac

SEQ ID NO: 257681 - DNA, 20 bp, Artificial Sequence
  Description of Artificial Sequence: Synthetic oligonucleotide
  Target: LAMA2; (-) strand; PAM type: YTN; PAM sequence: CTA
ctatgagcactgctaccaaa

SEQ ID NO: 257682 - DNA, 20 bp, Artificial Sequence
  Description of Artificial Sequence: Synthetic oligonucleotide
  Target: LAMA2; (-) strand; PAM type: YTN; PAM sequence: CTG
atatgcacagctactatgag

SEQ ID NO: 257683 - DNA, 20 bp, Artificial Sequence
  Description of Artificial Sequence: Synthetic oligonucleotide
  Target: LAMA2; (-) strand; PAM type: YTN; PAM sequence: CTG
gtgaacaactgatatgcaca

SEQ ID NO: 257684 - DNA, 20 bp, Artificial Sequence
  Description of Artificial Sequence: Synthetic oligonucleotide
  Target: LAMA2; (-) strand; PAM type: YTN; PAM sequence: TTC
actggtgaacaactgatatg

SEQ ID NO: 257685 - DNA, 20 bp, Artificial Sequence
  Description of Artificial Sequence: Synthetic oligonucleotide
  Target: LAMA2; (-) strand; PAM type: YTN; PAM sequence: TTA
gaattcactggtgaacaact

SEQ ID NO: 257686 - DNA, 20 bp, Artificial Sequence
  Description of Artificial Sequence: Synthetic oligonucleotide
  Target: LAMA2; (-) strand; PAM type: YTN; PAM sequence: CTT
agaattcactggtgaacaac

SEQ ID NO: 257687 - DNA, 20 bp, Artificial Sequence
  Description of Artificial Sequence: Synthetic oligonucleotide
  Target: LAMA2; (-) strand; PAM type: YTN; PAM sequence: TTA
gccttagaattcactggtga

SEQ ID NO: 257688 - DNA, 20 bp, Artificial Sequence
  Description of Artificial Sequence: Synthetic oligonucleotide
  Target: LAMA2; (-) strand; PAM type: YTN; PAM sequence: CTT
agccttagaattcactggtg

SEQ ID NO: 257689 - DNA, 20 bp, Artificial Sequence
  Description of Artificial Sequence: Synthetic oligonucleotide
  Target: LAMA2; (-) strand; PAM type: YTN; PAM sequence: CTA
acttagccttagaattcact

SEQ ID NO: 257690 - DNA, 20 bp, Artificial Sequence
  Description of Artificial Sequence: Synthetic oligonucleotide
  Target: LAMA2; (-) strand; PAM type: YTN; PAM sequence: TTG
gaagacaggataaaatgtca

SEQ ID NO: 257691 - DNA, 20 bp, Artificial Sequence
  Description of Artificial Sequence: Synthetic oligonucleotide
  Target: LAMA2; (-) strand; PAM type: YTN; PAM sequence: TTA
ttggaagacaggataaaatg

SEQ ID NO: 257692 - DNA, 20 bp, Artificial Sequence
  Description of Artificial Sequence: Synthetic oligonucleotide
  Target: LAMA2; (-) strand; PAM type: YTN; PAM sequence: TTA
tgggggtgggggttattgga

SEQ ID NO: 257693 - DNA, 20 bp, Artificial Sequence
  Description of Artificial Sequence: Synthetic oligonucleotide
  Target: LAMA2; (-) strand; PAM type: YTN; PAM sequence: TTT
atgggggtgggggttattgg

SEQ ID NO: 257694 - DNA, 20 bp, Artificial Sequence
  Description of Artificial Sequence: Synthetic oligonucleotide
  Target: LAMA2; (-) strand; PAM type: YTN; PAM sequence: CTT
tatgggggtgggggttattg

SEQ ID NO: 257695 - DNA, 20 bp, Artificial Sequence
  Description of Artificial Sequence: Synthetic oligonucleotide
  Target: LAMA2; (-) strand; PAM type: YTN; PAM sequence: CTA
actttatgggggtgggggtt

SEQ ID NO: 257696 - DNA, 20 bp, Artificial Sequence
  Description of Artificial Sequence: Synthetic oligonucleotide
  Target: LAMA2; (-) strand; PAM type: YTN; PAM sequence: TTA
gtggaataatatccctaact

SEQ ID NO: 257697 - DNA, 20 bp, Artificial Sequence
  Description of Artificial Sequence: Synthetic oligonucleotide
  Target: LAMA2; (-) strand; PAM type: YTN; PAM sequence: TTA
ccataataaaattagtggaa

SEQ ID NO: 257698 - DNA, 20 bp, Artificial Sequence
  Description of Artificial Sequence: Synthetic oligonucleotide
  Target: LAMA2; (-) strand; PAM type: YTN; PAM sequence: TTA
ccataataaaataatcccac

SEQ ID NO: 257699 - DNA, 20 bp, Artificial Sequence
  Description of Artificial Sequence: Synthetic oligonucleotide
  Target: LAMA2; (-) strand; PAM type: YTN; PAM sequence: TTA
attaccataataaaataatc

SEQ ID NO: 257700 - DNA, 20 bp, Artificial Sequence
  Description of Artificial Sequence: Synthetic oligonucleotide
  Target: LAMA2; (-) strand; PAM type: YTN; PAM sequence: TTA
ccataataaaataataatta

SEQ ID NO: 257701 - DNA, 20 bp, Artificial Sequence
  Description of Artificial Sequence: Synthetic oligonucleotide
  Target: LAMA2; (-) strand; PAM type: YTN; PAM sequence: TTA
attaccataataaaataata

SEQ ID NO: 257702 - DNA, 20 bp, Artificial Sequence
  Description of Artificial Sequence: Synthetic oligonucleotide
  Target: LAMA2; (-) strand; PAM type: YTN; PAM sequence: CTA
caataattaattaccataat

SEQ ID NO: 257703 - DNA, 20 bp, Artificial Sequence
  Description of Artificial Sequence: Synthetic oligonucleotide
  Target: LAMA2; (-) strand; PAM type: YTN; PAM sequence: TTC
tacaataattaattaccata

SEQ ID NO: 257704 - DNA, 20 bp, Artificial Sequence
  Description of Artificial Sequence: Synthetic oligonucleotide
  Target: LAMA2; (-) strand; PAM type: YTN; PAM sequence: TTT
ctacaataattaattaccat

SEQ ID NO: 257705 - DNA, 20 bp, Artificial Sequence
  Description of Artificial Sequence: Synthetic oligonucleotide
  Target: LAMA2; (-) strand; PAM type: YTN; PAM sequence: TTT
tctacaataattaattacca

SEQ ID NO: 257706 - DNA, 20 bp, Artificial Sequence
  Description of Artificial Sequence: Synthetic oligonucleotide
  Target: LAMA2; (-) strand; PAM type: YTN; PAM sequence: TTA
ccataataaaataatcccat

SEQ ID NO: 257707 - DNA, 20 bp, Artificial Sequence
  Description of Artificial Sequence: Synthetic oligonucleotide
  Target: LAMA2; (-) strand; PAM type: YTN; PAM sequence: TTC
atgccatggatcccataata

SEQ ID NO: 257708 - DNA, 20 bp, Artificial Sequence
  Description of Artificial Sequence: Synthetic oligonucleotide
  Target: LAMA2; (-) strand; PAM type: YTN; PAM sequence: CTT
catgccatggatcccataat

SEQ ID NO: 257709 - DNA, 20 bp, Artificial Sequence
  Description of Artificial Sequence: Synthetic oligonucleotide
  Target: LAMA2; (-) strand; PAM type: YTN; PAM sequence: TTA
agacttcatgccatggatcc

SEQ ID NO: 257710 - DNA, 20 bp, Artificial Sequence
  Description of Artificial Sequence: Synthetic oligonucleotide
  Target: LAMA2; (-) strand; PAM type: YTN; PAM sequence: CTT
aagacttcatgccatggatc

SEQ ID NO: 257711 - DNA, 20 bp, Artificial Sequence
  Description of Artificial Sequence: Synthetic oligonucleotide
  Target: LAMA2; (-) strand; PAM type: YTN; PAM sequence: TTC
ttaagacttcatgccatgga

SEQ ID NO: 257712 - DNA, 20 bp, Artificial Sequence
  Description of Artificial Sequence: Synthetic oligonucleotide
  Target: LAMA2; (-) strand; PAM type: YTN; PAM sequence: TTA
tgttcttaagacttcatgcc

SEQ ID NO: 257713 - DNA, 20 bp, Artificial Sequence
  Description of Artificial Sequence: Synthetic oligonucleotide
  Target: LAMA2; (-) strand; PAM type: YTN; PAM sequence: TTT
atgttcttaagacttcatgc

SEQ ID NO: 257714 - DNA, 20 bp, Artificial Sequence
  Description of Artificial Sequence: Synthetic oligonucleotide
  Target: LAMA2; (-) strand; PAM type: YTN; PAM sequence: TTT
tatgttcttaagacttcatg

SEQ ID NO: 257715 - DNA, 20 bp, Artificial Sequence
  Description of Artificial Sequence: Synthetic oligonucleotide
  Target: LAMA2; (-) strand; PAM type: YTN; PAM sequence: TTT
ttatgttcttaagacttcat

SEQ ID NO: 257716 - DNA, 20 bp, Artificial Sequence
  Description of Artificial Sequence: Synthetic oligonucleotide
  Target: LAMA2; (-) strand; PAM type: YTN; PAM sequence: TTT
tttatgttcttaagacttca

SEQ ID NO: 257717 - DNA, 20 bp, Artificial Sequence
  Description of Artificial Sequence: Synthetic oligonucleotide
  Target: LAMA2; (-) strand; PAM type: YTN; PAM sequence: CTT
ttttatgttcttaagacttc

SEQ ID NO: 257718 - DNA, 20 bp, Artificial Sequence
  Description of Artificial Sequence: Synthetic oligonucleotide
  Target: LAMA2; (-) strand; PAM type: YTN; PAM sequence: TTC
ttttttatgttcttaagact

SEQ ID NO: 257719 - DNA, 20 bp, Artificial Sequence
  Description of Artificial Sequence: Synthetic oligonucleotide
  Target: LAMA2; (-) strand; PAM type: YTN; PAM sequence: CTC
acattcttttttatgttctt

SEQ ID NO: 257720 - DNA, 20 bp, Artificial Sequence
  Description of Artificial Sequence: Synthetic oligonucleotide
  Target: LAMA2; (-) strand; PAM type: YTN; PAM sequence: TTC
tcacattcttttttatgttc

SEQ ID NO: 257721 - DNA, 20 bp, Artificial Sequence
  Description of Artificial Sequence: Synthetic oligonucleotide
  Target: LAMA2; (-) strand; PAM type: YTN; PAM sequence: TTA
ttctcacattcttttttatg

SEQ ID NO: 257722 - DNA, 20 bp, Artificial Sequence
  Description of Artificial Sequence: Synthetic oligonucleotide
  Target: LAMA2; (-) strand; PAM type: YTN; PAM sequence: TTT
attctcacattcttttttat

SEQ ID NO: 257723 - DNA, 20 bp, Artificial Sequence
  Description of Artificial Sequence: Synthetic oligonucleotide
  Target: LAMA2; (-) strand; PAM type: YTN; PAM sequence: TTT
tattctcacattctttttta

SEQ ID NO: 257724 - DNA, 20 bp, Artificial Sequence
  Description of Artificial Sequence: Synthetic oligonucleotide
  Target: LAMA2; (-) strand; PAM type: YTN; PAM sequence: TTT
ttattctcacattctttttt

SEQ ID NO: 257725 - DNA, 20 bp, Artificial Sequence
  Description of Artificial Sequence: Synthetic oligonucleotide
  Target: LAMA2; (-) strand; PAM type: YTN; PAM sequence: CTG
gtaatggtcaaaatgttttt

SEQ ID NO: 257726 - DNA, 20 bp, Artificial Sequence
  Description of Artificial Sequence: Synthetic oligonucleotide
  Target: LAMA2; (-) strand; PAM type: YTN; PAM sequence: CTC
acggcaagtagtatgaaaac

SEQ ID NO: 257727 - DNA, 20 bp, Artificial Sequence
  Description of Artificial Sequence: Synthetic oligonucleotide
  Target: LAMA2; (-) strand; PAM type: YTN; PAM sequence: CTA
tactcacggcaagtagtatg

SEQ ID NO: 257728 - DNA, 20 bp, Artificial Sequence
  Description of Artificial Sequence: Synthetic oligonucleotide
  Target: LAMA2; (-) strand; PAM type: YTN; PAM sequence: TTA
taatcacatctatactcacg

SEQ ID NO: 257729 - DNA, 20 bp, Artificial Sequence
  Description of Artificial Sequence: Synthetic oligonucleotide
  Target: LAMA2; (-) strand; PAM type: YTN; PAM sequence: TTA
aaaattataatcacatctat

SEQ ID NO: 257730 - DNA, 20 bp, Artificial Sequence
  Description of Artificial Sequence: Synthetic oligonucleotide
  Target: LAMA2; (-) strand; PAM type: YTN; PAM sequence: TTA
tatggcaaagagcattaaaa

SEQ ID NO: 257731 - DNA, 20 bp, Artificial Sequence
  Description of Artificial Sequence: Synthetic oligonucleotide
  Target: LAMA2; (-) strand; PAM type: YTN; PAM sequence: TTG
tgattatatggcaaagagca

SEQ ID NO: 257732 - DNA, 20 bp, Artificial Sequence
  Description of Artificial Sequence: Synthetic oligonucleotide
  Target: LAMA2; (-) strand; PAM type: YTN; PAM sequence: TTA
attgtgattatatggcaaag

SEQ ID NO: 257733 - DNA, 20 bp, Artificial Sequence
  Description of Artificial Sequence: Synthetic oligonucleotide
  Target: LAMA2; (-) strand; PAM type: YTN; PAM sequence: TTT
aattgtgattatatggcaaa

SEQ ID NO: 257734 - DNA, 20 bp, Artificial Sequence
  Description of Artificial Sequence: Synthetic oligonucleotide
  Target: LAMA2; (-) strand; PAM type: YTN; PAM sequence: TTT
taattgtgattatatggcaa

SEQ ID NO: 257735 - DNA, 20 bp, Artificial Sequence
  Description of Artificial Sequence: Synthetic oligonucleotide
  Target: LAMA2; (-) strand; PAM type: YTN; PAM sequence: CTT
ttaattgtgattatatggca

SEQ ID NO: 257736 - DNA, 20 bp, Artificial Sequence
  Description of Artificial Sequence: Synthetic oligonucleotide
  Target: LAMA2; (-) strand; PAM type: YTN; PAM sequence: TTA
tacttttaattgtgattata

SEQ ID NO: 257737 - DNA, 20 bp, Artificial Sequence
  Description of Artificial Sequence: Synthetic oligonucleotide
  Target: LAMA2; (-) strand; PAM type: YTN; PAM sequence: CTT
atacttttaattgtgattat

SEQ ID NO: 257738 - DNA, 20 bp, Artificial Sequence
  Description of Artificial Sequence: Synthetic oligonucleotide
  Target: LAMA2; (-) strand; PAM type: YTN; PAM sequence: TTC
ttatacttttaattgtgatt

SEQ ID NO: 257739 - DNA, 20 bp, Artificial Sequence
  Description of Artificial Sequence: Synthetic oligonucleotide
  Target: LAMA2; (-) strand; PAM type: YTN; PAM sequence: CTT
cttatacttttaattgtgat

SEQ ID NO: 257740 - DNA, 20 bp, Artificial Sequence
  Description of Artificial Sequence: Synthetic oligonucleotide
  Target: LAMA2; (-) strand; PAM type: YTN; PAM sequence: TTA
taaaaataagtaataaatgt

SEQ ID NO: 257741 - DNA, 20 bp, Artificial Sequence
  Description of Artificial Sequence: Synthetic oligonucleotide
  Target: LAMA2; (-) strand; PAM type: YTN; PAM sequence: TTG
tatccatgaaaaattataaa

SEQ ID NO: 257742 - DNA, 20 bp, Artificial Sequence
  Description of Artificial Sequence: Synthetic oligonucleotide
  Target: LAMA2; (-) strand; PAM type: YTN; PAM sequence: TTA
tgcatagaagtgatattgta

SEQ ID NO: 257743 - DNA, 20 bp, Artificial Sequence
  Description of Artificial Sequence: Synthetic oligonucleotide
  Target: LAMA2; (-) strand; PAM type: YTN; PAM sequence: CTT
atgcatagaagtgatattgt

SEQ ID NO: 257744 - DNA, 20 bp, Artificial Sequence
  Description of Artificial Sequence: Synthetic oligonucleotide
  Target: LAMA2; (-) strand; PAM type: YTN; PAM sequence: TTA
ccacttatgcatagaagtga

SEQ ID NO: 257745 - DNA, 20 bp, Artificial Sequence
  Description of Artificial Sequence: Synthetic oligonucleotide
  Target: LAMA2; (-) strand; PAM type: YTN; PAM sequence: TTT
accacttatgcatagaagtg

SEQ ID NO: 257746 - DNA, 20 bp, Artificial Sequence
  Description of Artificial Sequence: Synthetic oligonucleotide
  Target: LAMA2; (-) strand; PAM type: YTN; PAM sequence: TTT
taccacttatgcatagaagt

SEQ ID NO: 257747 - DNA, 20 bp, Artificial Sequence
  Description of Artificial Sequence: Synthetic oligonucleotide
  Target: LAMA2; (-) strand; PAM type: YTN; PAM sequence: TTG
aggttttaccacttatgcat

SEQ ID NO: 257748 - DNA, 20 bp, Artificial Sequence
  Description of Artificial Sequence: Synthetic oligonucleotide
  Target: LAMA2; (-) strand; PAM type: YTN; PAM sequence: CTT
gaggttttaccacttatgca

SEQ ID NO: 257749 - DNA, 20 bp, Artificial Sequence
  Description of Artificial Sequence: Synthetic oligonucleotide
  Target: LAMA2; (-) strand; PAM type: YTN; PAM sequence: TTC
cttgaggttttaccacttat

SEQ ID NO: 257750 - DNA, 20 bp, Artificial Sequence
  Description of Artificial Sequence: Synthetic oligonucleotide
  Target: LAMA2; (-) strand; PAM type: YTN; PAM sequence: TTT
ccttgaggttttaccactta

SEQ ID NO: 257751 - DNA, 20 bp, Artificial Sequence
  Description of Artificial Sequence: Synthetic oligonucleotide
  Target: LAMA2; (-) strand; PAM type: YTN; PAM sequence: CTT
tccttgaggttttaccactt

SEQ ID NO: 257752 - DNA, 20 bp, Artificial Sequence
  Description of Artificial Sequence: Synthetic oligonucleotide
  Target: LAMA2; (-) strand; PAM type: YTN; PAM sequence: TTC
tttccttgaggttttaccac

SEQ ID NO: 257753 - DNA, 20 bp, Artificial Sequence
  Description of Artificial Sequence: Synthetic oligonucleotide
  Target: LAMA2; (-) strand; PAM type: YTN; PAM sequence: TTT
ctttccttgaggttttacca

SEQ ID NO: 257754 - DNA, 20 bp, Artificial Sequence
  Description of Artificial Sequence: Synthetic oligonucleotide
  Target: LAMA2; (-) strand; PAM type: YTN; PAM sequence: CTT
tctttccttgaggttttacc

SEQ ID NO: 257755 - DNA, 20 bp, Artificial Sequence
  Description of Artificial Sequence: Synthetic oligonucleotide
  Target: LAMA2; (-) strand; PAM type: YTN; PAM sequence: TTC
caggaactttctttccttga

SEQ ID NO: 257756 - DNA, 20 bp, Artificial Sequence
  Description of Artificial Sequence: Synthetic oligonucleotide
  Target: LAMA2; (-) strand; PAM type: YTN; PAM sequence: TTT
ccaggaactttctttccttg

SEQ ID NO: 257757 - DNA, 20 bp, Artificial Sequence
  Description of Artificial Sequence: Synthetic oligonucleotide
  Target: LAMA2; (-) strand; PAM type: YTN; PAM sequence: CTA
taggtaaccaaaataatgta

SEQ ID NO: 257758 - DNA, 20 bp, Artificial Sequence
  Description of Artificial Sequence: Synthetic oligonucleotide
  Target: LAMA2; (-) strand; PAM type: YTN; PAM sequence: TTG
aacaaatctataggtaacca

SEQ ID NO: 257759 - DNA, 20 bp, Artificial Sequence
  Description of Artificial Sequence: Synthetic oligonucleotide
  Target: LAMA2; (-) strand; PAM type: YTN; PAM sequence: CTT
gaacaaatctataggtaacc

SEQ ID NO: 257760 - DNA, 20 bp, Artificial Sequence
  Description of Artificial Sequence: Synthetic oligonucleotide
  Target: LAMA2; (-) strand; PAM type: YTN; PAM sequence: TTC
ttgaacaaatctataggtaa

SEQ ID NO: 257761 - DNA, 20 bp, Artificial Sequence
  Description of Artificial Sequence: Synthetic oligonucleotide
  Target: LAMA2; (-) strand; PAM type: YTN; PAM sequence: TTT
cttgaacaaatctataggta

SEQ ID NO: 257762 - DNA, 20 bp, Artificial Sequence
  Description of Artificial Sequence: Synthetic oligonucleotide
  Target: LAMA2; (-) strand; PAM type: YTN; PAM sequence: TTT
tcttgaacaaatctataggt

SEQ ID NO: 257763 - DNA, 20 bp, Artificial Sequence
  Description of Artificial Sequence: Synthetic oligonucleotide
  Target: LAMA2; (-) strand; PAM type: YTN; PAM sequence: CTT
ttcttgaacaaatctatagg

SEQ ID NO: 257764 - DNA, 20 bp, Artificial Sequence
  Description of Artificial Sequence: Synthetic oligonucleotide
  Target: LAMA2; (-) strand; PAM type: YTN; PAM sequence: TTG
tagtggtgtacttttcttga

SEQ ID NO: 257765 - DNA, 20 bp, Artificial Sequence
  Description of Artificial Sequence: Synthetic oligonucleotide
  Target: LAMA2; (-) strand; PAM type: YTN; PAM sequence: TTT
gtagtggtgtacttttcttg

SEQ ID NO: 257766 - DNA, 20 bp, Artificial Sequence
  Description of Artificial Sequence: Synthetic oligonucleotide
  Target: LAMA2; (-) strand; PAM type: YTN; PAM sequence: CTT
tgtagtggtgtacttttctt

SEQ ID NO: 257767 - DNA, 20 bp, Artificial Sequence
  Description of Artificial Sequence: Synthetic oligonucleotide
  Target: LAMA2; (-) strand; PAM type: YTN; PAM sequence: TTC
tttgtagtggtgtacttttc

SEQ ID NO: 257768 - DNA, 20 bp, Artificial Sequence
  Description of Artificial Sequence: Synthetic oligonucleotide
  Target: LAMA2; (-) strand; PAM type: YTN; PAM sequence: TTT
ctttgtagtggtgtactttt

SEQ ID NO: 257769 - DNA, 20 bp, Artificial Sequence
  Description of Artificial Sequence: Synthetic oligonucleotide
  Target: LAMA2; (-) strand; PAM type: YTN; PAM sequence: TTA
aaatgcaaaatatatttctt

SEQ ID NO: 257770 - DNA, 20 bp, Artificial Sequence
  Description of Artificial Sequence: Synthetic oligonucleotide
  Target: LAMA2; (-) strand; PAM type: YTN; PAM sequence: TTT
aaaatgcaaaatatatttct

SEQ ID NO: 257771 - DNA, 20 bp, Artificial Sequence
  Description of Artificial Sequence: Synthetic oligonucleotide
  Target: LAMA2; (-) strand; PAM type: YTN; PAM sequence: TTA
atggaaaaatatgacaccaa

SEQ ID NO: 257772 - DNA, 20 bp, Artificial Sequence
  Description of Artificial Sequence: Synthetic oligonucleotide
  Target: LAMA2; (-) strand; PAM type: YTN; PAM sequence: TTT
aatggaaaaatatgacacca

SEQ ID NO: 257773 - DNA, 20 bp, Artificial Sequence
  Description of Artificial Sequence: Synthetic oligonucleotide
  Target: LAMA2; (-) strand; PAM type: YTN; PAM sequence: TTT
taatggaaaaatatgacacc

SEQ ID NO: 257774 - DNA, 20 bp, Artificial Sequence
  Description of Artificial Sequence: Synthetic oligonucleotide
  Target: LAMA2; (-) strand; PAM type: YTN; PAM sequence: CTA
aagtgtcattttaatggaaa

SEQ ID NO: 257775 - DNA, 20 bp, Artificial Sequence
  Description of Artificial Sequence: Synthetic oligonucleotide
  Target: LAMA2; (-) strand; PAM type: YTN; PAM sequence: TTG
ctaaagtgtcattttaatgg

SEQ ID NO: 257776 - DNA, 20 bp, Artificial Sequence
  Description of Artificial Sequence: Synthetic oligonucleotide
  Target: LAMA2; (-) strand; PAM type: YTN; PAM sequence: TTT
gctaaagtgtcattttaatg

SEQ ID NO: 257777 - DNA, 20 bp, Artificial Sequence
  Description of Artificial Sequence: Synthetic oligonucleotide
  Target: LAMA2; (-) strand; PAM type: YTN; PAM sequence: TTT
tgctaaagtgtcattttaat

SEQ ID NO: 257778 - DNA, 20 bp, Artificial Sequence
  Description of Artificial Sequence: Synthetic oligonucleotide
  Target: LAMA2; (-) strand; PAM type: YTN; PAM sequence: TTA
tcgtaaaaacaacaaagcag

SEQ ID NO: 257779 - DNA, 20 bp, Artificial Sequence
  Description of Artificial Sequence: Synthetic oligonucleotide
  Target: LAMA2; (-) strand; PAM type: YTN; PAM sequence: TTA
atgttatcgtaaaaacaaca

SEQ ID NO: 257780 - DNA, 20 bp, Artificial Sequence
  Description of Artificial Sequence: Synthetic oligonucleotide
  Target: LAMA2; (-) strand; PAM type: YTN; PAM sequence: TTA
attaatgttatcgtaaaaac

SEQ ID NO: 257781 - DNA, 20 bp, Artificial Sequence
  Description of Artificial Sequence: Synthetic oligonucleotide
  Target: LAMA2; (-) strand; PAM type: YTN; PAM sequence: TTA
ccataaatatgatggtaatt

SEQ ID NO: 257782 - DNA, 20 bp, Artificial Sequence
  Description of Artificial Sequence: Synthetic oligonucleotide
  Target: LAMA2; (-) strand; PAM type: YTN; PAM sequence: TTT
accataaatatgatggtaat

SEQ ID NO: 257783 - DNA, 20 bp, Artificial Sequence
  Description of Artificial Sequence: Synthetic oligonucleotide
  Target: LAMA2; (-) strand; PAM type: YTN; PAM sequence: TTA
aatttaccataaatatgatg

SEQ ID NO: 257784 - DNA, 20 bp, Artificial Sequence
  Description of Artificial Sequence: Synthetic oligonucleotide
  Target: LAMA2; (-) strand; PAM type: YTN; PAM sequence: CTA
caaaattaaatttaccataa

SEQ ID NO: 257785 - DNA, 20 bp, Artificial Sequence
  Description of Artificial Sequence: Synthetic oligonucleotide
  Target: LAMA2; (-) strand; PAM type: YTN; PAM sequence: TTG
gagtgtaaactacaaaatta

SEQ ID NO: 257786 - DNA, 20 bp, Artificial Sequence
  Description of Artificial Sequence: Synthetic oligonucleotide
  Target: LAMA2; (-) strand; PAM type: YTN; PAM sequence: CTT
ggagtgtaaactacaaaatt

SEQ ID NO: 257787 - DNA, 20 bp, Artificial Sequence
  Description of Artificial Sequence: Synthetic oligonucleotide
  Target: LAMA2; (-) strand; PAM type: YTN; PAM sequence: TTC
ttggagtgtaaactacaaaa

SEQ ID NO: 257788 - DNA, 20 bp, Artificial Sequence
  Description of Artificial Sequence: Synthetic oligonucleotide
  Target: LAMA2; (-) strand; PAM type: YTN; PAM sequence: TTT
cttggagtgtaaactacaaa

SEQ ID NO: 257789 - DNA, 20 bp, Artificial Sequence
  Description of Artificial Sequence: Synthetic oligonucleotide
  Target: LAMA2; (-) strand; PAM type: YTN; PAM sequence: TTT
tcttggagtgtaaactacaa

SEQ ID NO: 257790 - DNA, 20 bp, Artificial Sequence
  Description of Artificial Sequence: Synthetic oligonucleotide
  Target: LAMA2; (-) strand; PAM type: YTN; PAM sequence: TTT
ttcttggagtgtaaactaca

SEQ ID NO: 257791 - DNA, 20 bp, Artificial Sequence
  Description of Artificial Sequence: Synthetic oligonucleotide
  Target: LAMA2; (-) strand; PAM type: YTN; PAM sequence: CTT
tttcttggagtgtaaactac

SEQ ID NO: 257792 - DNA, 20 bp, Artificial Sequence
  Description of Artificial Sequence: Synthetic oligonucleotide
  Target: LAMA2; (-) strand; PAM type: YTN; PAM sequence: TTA
ggagtcactttttcttggag

SEQ ID NO: 257793 - DNA, 20 bp, Artificial Sequence
  Description of Artificial Sequence: Synthetic oligonucleotide
  Target: LAMA2; (-) strand; PAM type: YTN; PAM sequence: TTT
aggagtcactttttcttgga

SEQ ID NO: 257794 - DNA, 20 bp, Artificial Sequence
  Description of Artificial Sequence: Synthetic oligonucleotide
  Target: LAMA2; (-) strand; PAM type: YTN; PAM sequence: CTT
taggagtcactttttcttgg

SEQ ID NO: 257795 - DNA, 20 bp, Artificial Sequence
  Description of Artificial Sequence: Synthetic oligonucleotide
  Target: LAMA2; (-) strand; PAM type: YTN; PAM sequence: TTA
gactttaggagtcacttttt

SEQ ID NO: 257796 - DNA, 20 bp, Artificial Sequence
  Description of Artificial Sequence: Synthetic oligonucleotide
  Target: LAMA2; (-) strand; PAM type: YTN; PAM sequence: TTT
agactttaggagtcactttt

SEQ ID NO: 257797 - DNA, 20 bp, Artificial Sequence
  Description of Artificial Sequence: Synthetic oligonucleotide
  Target: LAMA2; (-) strand; PAM type: YTN; PAM sequence: TTA
tttagactttaggagtcact

SEQ ID NO: 257798 - DNA, 20 bp, Artificial Sequence
  Description of Artificial Sequence: Synthetic oligonucleotide
  Target: LAMA2; (-) strand; PAM type: YTN; PAM sequence: TTA
aaatatcaaattatttagac

SEQ ID NO: 257799 - DNA, 20 bp, Artificial Sequence
  Description of Artificial Sequence: Synthetic oligonucleotide
  Target: LAMA2; (-) strand; PAM type: YTN; PAM sequence: TTT
aaaatatcaaattatttaga

SEQ ID NO: 257800 - DNA, 20 bp, Artificial Sequence
  Description of Artificial Sequence: Synthetic oligonucleotide
  Target: LAMA2; (-) strand; PAM type: YTN; PAM sequence: TTT
taaaatatcaaattatttag

SEQ ID NO: 257801 - DNA, 20 bp, Artificial Sequence
  Description of Artificial Sequence: Synthetic oligonucleotide
  Target: LAMA2; (-) strand; PAM type: YTN; PAM sequence: TTT
ttaaaatatcaaattattta

SEQ ID NO: 257802 - DNA, 20 bp, Artificial Sequence
  Description of Artificial Sequence: Synthetic oligonucleotide
  Target: LAMA2; (-) strand; PAM type: YTN; PAM sequence: TTA
tgcatatcatacatttttaa

SEQ ID NO: 257803 - DNA, 20 bp, Artificial Sequence
  Description of Artificial Sequence: Synthetic oligonucleotide
  Target: LAMA2; (-) strand; PAM type: YTN; PAM sequence: CTT
atgcatatcatacattttta

SEQ ID NO: 257804 - DNA, 20 bp, Artificial Sequence
  Description of Artificial Sequence: Synthetic oligonucleotide
  Target: LAMA2; (-) strand; PAM type: YTN; PAM sequence: TTC
ttatgcatatcatacatttt

SEQ ID NO: 257805 - DNA, 20 bp, Artificial Sequence
  Description of Artificial Sequence: Synthetic oligonucleotide
  Target: LAMA2; (-) strand; PAM type: YTN; PAM sequence: TTT
cttatgcatatcatacattt

SEQ ID NO: 257806 - DNA, 20 bp, Artificial Sequence
  Description of Artificial Sequence: Synthetic oligonucleotide
  Target: LAMA2; (-) strand; PAM type: YTN; PAM sequence: TTA
tgaaagtttcttatgcatat

SEQ ID NO: 257807 - DNA, 20 bp, Artificial Sequence
  Description of Artificial Sequence: Synthetic oligonucleotide
  Target: LAMA2; (-) strand; PAM type: YTN; PAM sequence: TTT
atgaaagtttcttatgcata

SEQ ID NO: 257808 - DNA, 20 bp, Artificial Sequence
  Description of Artificial Sequence: Synthetic oligonucleotide
  Target: LAMA2; (-) strand; PAM type: YTN; PAM sequence: TTT
tatgaaagtttcttatgcat

SEQ ID NO: 257809 - DNA, 20 bp, Artificial Sequence
  Description of Artificial Sequence: Synthetic oligonucleotide
  Target: LAMA2; (-) strand; PAM type: YTN; PAM sequence: TTA
ttttatgaaagtttcttatg

SEQ ID NO: 257810 - DNA, 20 bp, Artificial Sequence
  Description of Artificial Sequence: Synthetic oligonucleotide
  Target: LAMA2; (-) strand; PAM type: YTN; PAM sequence: TTA
ttattttatgaaagtttctt

SEQ ID NO: 257811 - DNA, 20 bp, Artificial Sequence
  Description of Artificial Sequence: Synthetic oligonucleotide
  Target: LAMA2; (-) strand; PAM type: YTN; PAM sequence: TTT
attattttatgaaagtttct

SEQ ID NO: 257812 - DNA, 20 bp, Artificial Sequence
  Description of Artificial Sequence: Synthetic oligonucleotide
  Target: LAMA2; (-) strand; PAM type: YTN; PAM sequence: TTT
tattattttatgaaagtttc

SEQ ID NO: 257813 - DNA, 20 bp, Artificial Sequence
  Description of Artificial Sequence: Synthetic oligonucleotide
  Target: LAMA2; (-) strand; PAM type: YTN; PAM sequence: CTT
ttattattttatgaaagttt

SEQ ID NO: 257814 - DNA, 20 bp, Artificial Sequence
  Description of Artificial Sequence: Synthetic oligonucleotide
  Target: LAMA2; (-) strand; PAM type: YTN; PAM sequence: TTG
tatatacttttattatttta

SEQ ID NO: 257815 - DNA, 20 bp, Artificial Sequence
  Description of Artificial Sequence: Synthetic oligonucleotide
  Target: LAMA2; (-) strand; PAM type: YTN; PAM sequence: TTT
gtatatacttttattatttt

SEQ ID NO: 257816 - DNA, 20 bp, Artificial Sequence
  Description of Artificial Sequence: Synthetic oligonucleotide
  Target: LAMA2; (-) strand; PAM type: YTN; PAM sequence: TTA
tcgaatttgtatatactttt

SEQ ID NO: 257817 - DNA, 20 bp, Artificial Sequence
  Description of Artificial Sequence: Synthetic oligonucleotide
  Target: LAMA2; (-) strand; PAM type: YTN; PAM sequence: TTT
atcgaatttgtatatacttt

SEQ ID NO: 257818 - DNA, 20 bp, Artificial Sequence
  Description of Artificial Sequence: Synthetic oligonucleotide
  Target: LAMA2; (-) strand; PAM type: YTN; PAM sequence: CTG
atttatcgaatttgtatata

SEQ ID NO: 257819 - DNA, 20 bp, Artificial Sequence
  Description of Artificial Sequence: Synthetic oligonucleotide
  Target: LAMA2; (-) strand; PAM type: YTN; PAM sequence: TTC
atctgatttatcgaatttgt

SEQ ID NO: 257820 - DNA, 20 bp, Artificial Sequence
  Description of Artificial Sequence: Synthetic oligonucleotide
  Target: LAMA2; (-) strand; PAM type: YTN; PAM sequence: TTT
catctgatttatcgaatttg

SEQ ID NO: 257821 - DNA, 20 bp, Artificial Sequence
  Description of Artificial Sequence: Synthetic oligonucleotide
  Target: LAMA2; (-) strand; PAM type: YTN; PAM sequence: TTT
tcatctgatttatcgaattt

SEQ ID NO: 257822 - DNA, 20 bp, Artificial Sequence
  Description of Artificial Sequence: Synthetic oligonucleotide
  Target: LAMA2; (-) strand; PAM type: YTN; PAM sequence: TTA
aatatccattttcatctgat

SEQ ID NO: 257823 - DNA, 20 bp, Artificial Sequence
  Description of Artificial Sequence: Synthetic oligonucleotide
  Target: LAMA2; (-) strand; PAM type: YTN; PAM sequence: TTT
aaatatccattttcatctga

SEQ ID NO: 257824 - DNA, 20 bp, Artificial Sequence
  Description of Artificial Sequence: Synthetic oligonucleotide
  Target: LAMA2; (-) strand; PAM type: YTN; PAM sequence: CTT
taaatatccattttcatctg

SEQ ID NO: 257825 - DNA, 20 bp, Artificial Sequence
  Description of Artificial Sequence: Synthetic oligonucleotide
  Target: LAMA2; (-) strand; PAM type: YTN; PAM sequence: TTC
ctttaaatatccattttcat

SEQ ID NO: 257826 - DNA, 20 bp, Artificial Sequence
  Description of Artificial Sequence: Synthetic oligonucleotide
  Target: LAMA2; (-) strand; PAM type: YTN; PAM sequence: TTT
cctttaaatatccattttca

SEQ ID NO: 257827 - DNA, 20 bp, Artificial Sequence
  Description of Artificial Sequence: Synthetic oligonucleotide
  Target: LAMA2; (-) strand; PAM type: YTN; PAM sequence: TTT
tcctttaaatatccattttc

SEQ ID NO: 257828 - DNA, 20 bp, Artificial Sequence
  Description of Artificial Sequence: Synthetic oligonucleotide
  Target: LAMA2; (-) strand; PAM type: YTN; PAM sequence: TTT
ttcctttaaatatccatttt

SEQ ID NO: 257829 - DNA, 20 bp, Artificial Sequence
  Description of Artificial Sequence: Synthetic oligonucleotide
  Target: LAMA2; (-) strand; PAM type: YTN; PAM sequence: CTG
aaaatttttcctttaaatat

SEQ ID NO: 257830 - DNA, 20 bp, Artificial Sequence
  Description of Artificial Sequence: Synthetic oligonucleotide
  Target: LAMA2; (-) strand; PAM type: YTN; PAM sequence: CTG
aaatacaaggaaaggctgaa

SEQ ID NO: 257831 - DNA, 20 bp, Artificial Sequence
  Description of Artificial Sequence: Synthetic oligonucleotide
  Target: LAMA2; (-) strand; PAM type: YTN; PAM sequence: CTA
tagctgaaatacaaggaaag

SEQ ID NO: 257832 - DNA, 20 bp, Artificial Sequence
  Description of Artificial Sequence: Synthetic oligonucleotide
  Target: LAMA2; (-) strand; PAM type: YTN; PAM sequence: CTA
cggatagtctatagctgaaa

SEQ ID NO: 257833 - DNA, 20 bp, Artificial Sequence
  Description of Artificial Sequence: Synthetic oligonucleotide
  Target: LAMA2; (-) strand; PAM type: YTN; PAM sequence: CTG
aaagagcctacggatagtct

SEQ ID NO: 257834 - DNA, 20 bp, Artificial Sequence
  Description of Artificial Sequence: Synthetic oligonucleotide
  Target: LAMA2; (-) strand; PAM type: YTN; PAM sequence: TTG
agaaactgaaagagcctacg

SEQ ID NO: 257835 - DNA, 20 bp, Artificial Sequence
  Description of Artificial Sequence: Synthetic oligonucleotide
  Target: LAMA2; (-) strand; PAM type: YTN; PAM sequence: CTA
gagtaagggccattgagaaa

SEQ ID NO: 257836 - DNA, 20 bp, Artificial Sequence
  Description of Artificial Sequence: Synthetic oligonucleotide
  Target: LAMA2; (-) strand; PAM type: YTN; PAM sequence: CTG
ccaaggggatactagagtaa

SEQ ID NO: 257837 - DNA, 20 bp, Artificial Sequence
  Description of Artificial Sequence: Synthetic oligonucleotide
  Target: LAMA2; (-) strand; PAM type: YTN; PAM sequence: TTC
agtgtctgccaaggggatac

SEQ ID NO: 257838 - DNA, 20 bp, Artificial Sequence
  Description of Artificial Sequence: Synthetic oligonucleotide
  Target: LAMA2; (-) strand; PAM type: YTN; PAM sequence: CTT
cagtgtctgccaaggggata

SEQ ID NO: 257839 - DNA, 20 bp, Artificial Sequence
  Description of Artificial Sequence: Synthetic oligonucleotide
  Target: LAMA2; (-) strand; PAM type: YTN; PAM sequence: TTG
tcttcagtgtctgccaaggg

SEQ ID NO: 257840 - DNA, 20 bp, Artificial Sequence
  Description of Artificial Sequence: Synthetic oligonucleotide
  Target: LAMA2; (-) strand; PAM type: YTN; PAM sequence: TTT
gtcttcagtgtctgccaagg

SEQ ID NO: 257841 - DNA, 20 bp, Artificial Sequence
  Description of Artificial Sequence: Synthetic oligonucleotide
  Target: LAMA2; (-) strand; PAM type: YTN; PAM sequence: TTC
cagcaaagtttgtcttcagt

SEQ ID NO: 257842 - DNA, 20 bp, Artificial Sequence
  Description of Artificial Sequence: Synthetic oligonucleotide
  Target: LAMA2; (-) strand; PAM type: YTN; PAM sequence: CTT
ccagcaaagtttgtcttcag

SEQ ID NO: 257843 - DNA, 20 bp, Artificial Sequence
  Description of Artificial Sequence: Synthetic oligonucleotide
  Target: LAMA2; (-) strand; PAM type: YTN; PAM sequence: TTA
tcttccagcaaagtttgtct

SEQ ID NO: 257844 - DNA, 20 bp, Artificial Sequence
  Description of Artificial Sequence: Synthetic oligonucleotide
  Target: LAMA2; (-) strand; PAM type: YTN; PAM sequence: TTT
atcttccagcaaagtttgtc

SEQ ID NO: 257845 - DNA, 20 bp, Artificial Sequence
  Description of Artificial Sequence: Synthetic oligonucleotide
  Target: LAMA2; (-) strand; PAM type: YTN; PAM sequence: TTA
atttatcttccagcaaagtt

SEQ ID NO: 257846 - DNA, 20 bp, Artificial Sequence
  Description of Artificial Sequence: Synthetic oligonucleotide
  Target: LAMA2; (-) strand; PAM type: YTN; PAM sequence: CTT
aatttatcttccagcaaagt

SEQ ID NO: 257847 - DNA, 20 bp, Artificial Sequence
  Description of Artificial Sequence: Synthetic oligonucleotide
  Target: LAMA2; (-) strand; PAM type: YTN; PAM sequence: CTG
cttaatttatcttccagcaa

SEQ ID NO: 257848 - DNA, 20 bp, Artificial Sequence
  Description of Artificial Sequence: Synthetic oligonucleotide
  Target: LAMA2; (-) strand; PAM type: YTN; PAM sequence: CTA
aaaactgcttaatttatctt

SEQ ID NO: 257849 - DNA, 20 bp, Artificial Sequence
  Description of Artificial Sequence: Synthetic oligonucleotide
  Target: LAMA2; (-) strand; PAM type: YTN; PAM sequence: TTC
taaaaactgcttaatttatc

SEQ ID NO: 257850 - DNA, 20 bp, Artificial Sequence
  Description of Artificial Sequence: Synthetic oligonucleotide
  Target: LAMA2; (-) strand; PAM type: YTN; PAM sequence: TTT
ctaaaaactgcttaatttat

SEQ ID NO: 257851 - DNA, 20 bp, Artificial Sequence
  Description of Artificial Sequence: Synthetic oligonucleotide
  Target: LAMA2; (-) strand; PAM type: YTN; PAM sequence: TTT
tctaaaaactgcttaattta

SEQ ID NO: 257852 - DNA, 20 bp, Artificial Sequence
  Description of Artificial Sequence: Synthetic oligonucleotide
  Target: LAMA2; (-) strand; PAM type: YTN; PAM sequence: CTT
ttctaaaaactgcttaattt

SEQ ID NO: 257853 - DNA, 20 bp, Artificial Sequence
  Description of Artificial Sequence: Synthetic oligonucleotide
  Target: LAMA2; (-) strand; PAM type: YTN; PAM sequence: CTG
cttttctaaaaactgcttaa

SEQ ID NO: 257854 - DNA, 20 bp, Artificial Sequence
  Description of Artificial Sequence: Synthetic oligonucleotide
  Target: LAMA2; (-) strand; PAM type: YTN; PAM sequence: TTA
aaaaacaaacaaataaacaa

SEQ ID NO: 257855 - DNA, 20 bp, Artificial Sequence
  Description of Artificial Sequence: Synthetic oligonucleotide
  Target: LAMA2; (-) strand; PAM type: YTN; PAM sequence: TTT
aaaaaacaaacaaataaaca

SEQ ID NO: 257856 - DNA, 20 bp, Artificial Sequence
  Description of Artificial Sequence: Synthetic oligonucleotide
  Target: LAMA2; (-) strand; PAM type: YTN; PAM sequence: TTT
taaaaaacaaacaaataaac

SEQ ID NO: 257857 - DNA, 20 bp, Artificial Sequence
  Description of Artificial Sequence: Synthetic oligonucleotide
  Target: LAMA2; (-) strand; PAM type: YTN; PAM sequence: CTT
ttaaaaaacaaacaaataaa

SEQ ID NO: 257858 - DNA, 20 bp, Artificial Sequence
  Description of Artificial Sequence: Synthetic oligonucleotide
  Target: LAMA2; (-) strand; PAM type: YTN; PAM sequence: CTC
cttttaaaaaacaaacaaat

SEQ ID NO: 257859 - DNA, 20 bp, Artificial Sequence
  Description of Artificial Sequence: Synthetic oligonucleotide
  Target: LAMA2; (-) strand; PAM type: YTN; PAM sequence: TTC
tccttttaaaaaacaaacaa

SEQ ID NO: 257860 - DNA, 20 bp, Artificial Sequence
  Description of Artificial Sequence: Synthetic oligonucleotide
  Target: LAMA2; (-) strand; PAM type: YTN; PAM sequence: CTA
ggttctccttttaaaaaaca

SEQ ID NO: 257861 - DNA, 20 bp, Artificial Sequence
  Description of Artificial Sequence: Synthetic oligonucleotide
  Target: LAMA2; (-) strand; PAM type: YTN; PAM sequence: CTC
taggttctccttttaaaaaa

SEQ ID NO: 257862 - DNA, 20 bp, Artificial Sequence
  Description of Artificial Sequence: Synthetic oligonucleotide
  Target: LAMA2; (-) strand; PAM type: YTN; PAM sequence: CTG
gctctaggttctccttttaa

SEQ ID NO: 257863 - DNA, 20 bp, Artificial Sequence
  Description of Artificial Sequence: Synthetic oligonucleotide
  Target: LAMA2; (-) strand; PAM type: YTN; PAM sequence: CTC
ctggctctaggttctccttt

SEQ ID NO: 257864 - DNA, 20 bp, Artificial Sequence
  Description of Artificial Sequence: Synthetic oligonucleotide
  Target: LAMA2; (-) strand; PAM type: YTN; PAM sequence: TTC
tcctggctctaggttctcct

SEQ ID NO: 257865 - DNA, 20 bp, Artificial Sequence
  Description of Artificial Sequence: Synthetic oligonucleotide
  Target: LAMA2; (-) strand; PAM type: YTN; PAM sequence: TTA
ttctcctggctctaggttct

SEQ ID NO: 257866 - DNA, 20 bp, Artificial Sequence
  Description of Artificial Sequence: Synthetic oligonucleotide
  Target: LAMA2; (-) strand; PAM type: YTN; PAM sequence: TTT
attctcctggctctaggttc

SEQ ID NO: 257867 - DNA, 20 bp, Artificial Sequence
  Description of Artificial Sequence: Synthetic oligonucleotide
  Target: LAMA2; (-) strand; PAM type: YTN; PAM sequence: TTT
tattctcctggctctaggtt

SEQ ID NO: 257868 - DNA, 20 bp, Artificial Sequence
  Description of Artificial Sequence: Synthetic oligonucleotide
  Target: LAMA2; (-) strand; PAM type: YTN; PAM sequence: CTA
atattttattctcctggctc

SEQ ID NO: 257869 - DNA, 20 bp, Artificial Sequence
  Description of Artificial Sequence: Synthetic oligonucleotide
  Target: LAMA2; (-) strand; PAM type: YTN; PAM sequence: CTA
tgctaatattttattctcct

SEQ ID NO: 257870 - DNA, 20 bp, Artificial Sequence
  Description of Artificial Sequence: Synthetic oligonucleotide
  Target: LAMA2; (-) strand; PAM type: YTN; PAM sequence: CTA
tcagcctatgctaatatttt

SEQ ID NO: 257871 - DNA, 20 bp, Artificial Sequence
  Description of Artificial Sequence: Synthetic oligonucleotide
  Target: LAMA2; (-) strand; PAM type: YTN; PAM sequence: CTC
tatcagcctatgctaatatt

SEQ ID NO: 257872 - DNA, 20 bp, Artificial Sequence
  Description of Artificial Sequence: Synthetic oligonucleotide
  Target: LAMA2; (-) strand; PAM type: YTN; PAM sequence: CTA
taaacaggtactctatcagc

SEQ ID NO: 257873 - DNA, 20 bp, Artificial Sequence
  Description of Artificial Sequence: Synthetic oligonucleotide
  Target: LAMA2; (-) strand; PAM type: YTN; PAM sequence: TTA
agctataaacaggtactcta

SEQ ID NO: 257874 - DNA, 20 bp, Artificial Sequence
  Description of Artificial Sequence: Synthetic oligonucleotide
  Target: LAMA2; (-) strand; PAM type: YTN; PAM sequence: CTA
aaattaagctataaacaggt

SEQ ID NO: 257875 - DNA, 20 bp, Artificial Sequence
  Description of Artificial Sequence: Synthetic oligonucleotide
  Target: LAMA2; (-) strand; PAM type: YTN; PAM sequence: TTG
aacacaacctaaaattaagc

SEQ ID NO: 257876 - DNA, 20 bp, Artificial Sequence
  Description of Artificial Sequence: Synthetic oligonucleotide
  Target: LAMA2; (-) strand; PAM type: YTN; PAM sequence: TTT
gaacacaacctaaaattaag

SEQ ID NO: 257877 - DNA, 20 bp, Artificial Sequence
  Description of Artificial Sequence: Synthetic oligonucleotide
  Target: LAMA2; (-) strand; PAM type: YTN; PAM sequence: TTG
atttgaacacaacctaaaat

SEQ ID NO: 257878 - DNA, 20 bp, Artificial Sequence
  Description of Artificial Sequence: Synthetic oligonucleotide
  Target: LAMA2; (-) strand; PAM type: YTN; PAM sequence: TTT
gatttgaacacaacctaaaa

SEQ ID NO: 257879 - DNA, 20 bp, Artificial Sequence
  Description of Artificial Sequence: Synthetic oligonucleotide
  Target: LAMA2; (-) strand; PAM type: YTN; PAM sequence: TTT
tgatttgaacacaacctaaa

SEQ ID NO: 257880 - DNA, 20 bp, Artificial Sequence
  Description of Artificial Sequence: Synthetic oligonucleotide
  Target: LAMA2; (-) strand; PAM type: YTN; PAM sequence: CTG
aatattttgatttgaacaca

SEQ ID NO: 257881 - DNA, 20 bp, Artificial Sequence
  Description of Artificial Sequence: Synthetic oligonucleotide
  Target: LAMA2; (-) strand; PAM type: YTN; PAM sequence: TTC
tgaatattttgatttgaaca

SEQ ID NO: 257882 - DNA, 20 bp, Artificial Sequence
  Description of Artificial Sequence: Synthetic oligonucleotide
  Target: LAMA2; (-) strand; PAM type: YTN; PAM sequence: TTT
ctgaatattttgatttgaac

SEQ ID NO: 257883 - DNA, 20 bp, Artificial Sequence
  Description of Artificial Sequence: Synthetic oligonucleotide
  Target: LAMA2; (-) strand; PAM type: YTN; PAM sequence: TTA
aatttctgaatattttgatt

SEQ ID NO: 257884 - DNA, 20 bp, Artificial Sequence
  Description of Artificial Sequence: Synthetic oligonucleotide
  Target: LAMA2; (-) strand; PAM type: YTN; PAM sequence: TTG
ttaaatttctgaatattttg

SEQ ID NO: 257885 - DNA, 20 bp, Artificial Sequence
  Description of Artificial Sequence: Synthetic oligonucleotide
  Target: LAMA2; (-) strand; PAM type: YTN; PAM sequence: TTT
gttaaatttctgaatatttt

SEQ ID NO: 257886 - DNA, 20 bp, Artificial Sequence
  Description of Artificial Sequence: Synthetic oligonucleotide
  Target: LAMA2; (-) strand; PAM type: YTN; PAM sequence: TTT
tgttaaatttctgaatattt

SEQ ID NO: 257887 - DNA, 20 bp, Artificial Sequence
  Description of Artificial Sequence: Synthetic oligonucleotide
  Target: LAMA2; (-) strand; PAM type: YTN; PAM sequence: CTC
atagatgattttgttaaatt

SEQ ID NO: 257888 - DNA, 20 bp, Artificial Sequence
  Description of Artificial Sequence: Synthetic oligonucleotide
  Target: LAMA2; (-) strand; PAM type: YTN; PAM sequence: CTA
ctcatagatgattttgttaa

SEQ ID NO: 257889 - DNA, 20 bp, Artificial Sequence
  Description of Artificial Sequence: Synthetic oligonucleotide
  Target: LAMA2; (-) strand; PAM type: YTN; PAM sequence: TTA
ggctactcatagatgatttt

SEQ ID NO: 257890 - DNA, 20 bp, Artificial Sequence
  Description of Artificial Sequence: Synthetic oligonucleotide
  Target: LAMA2; (-) strand; PAM type: YTN; PAM sequence: TTT
aggctactcatagatgattt

SEQ ID NO: 257891 - DNA, 20 bp, Artificial Sequence
  Description of Artificial Sequence: Synthetic oligonucleotide
  Target: LAMA2; (-) strand; PAM type: YTN; PAM sequence: TTA
tatcagaataaaaatacaag

SEQ ID NO: 257892 - DNA, 20 bp, Artificial Sequence
  Description of Artificial Sequence: Synthetic oligonucleotide
  Target: LAMA2; (-) strand; PAM type: YTN; PAM sequence: TTT
atatcagaataaaaatacaa

SEQ ID NO: 257893 - DNA, 20 bp, Artificial Sequence
  Description of Artificial Sequence: Synthetic oligonucleotide
  Target: LAMA2; (-) strand; PAM type: YTN; PAM sequence: TTG
catttatatcagaataaaaa

SEQ ID NO: 257894 - DNA, 20 bp, Artificial Sequence
  Description of Artificial Sequence: Synthetic oligonucleotide
  Target: LAMA2; (-) strand; PAM type: YTN; PAM sequence: TTA
atggtacatataattgcatt

SEQ ID NO: 257895 - DNA, 20 bp, Artificial Sequence
  Description of Artificial Sequence: Synthetic oligonucleotide
  Target: LAMA2; (-) strand; PAM type: YTN; PAM sequence: TTT
aatggtacatataattgcat

SEQ ID NO: 257896 - DNA, 20 bp, Artificial Sequence
  Description of Artificial Sequence: Synthetic oligonucleotide
  Target: LAMA2; (-) strand; PAM type: YTN; PAM sequence: TTT
taatggtacatataattgca

SEQ ID NO: 257897 - DNA, 20 bp, Artificial Sequence
  Description of Artificial Sequence: Synthetic oligonucleotide
  Target: LAMA2; (-) strand; PAM type: YTN; PAM sequence: TTT
ttaatggtacatataattgc

SEQ ID NO: 257898 - DNA, 20 bp, Artificial Sequence
  Description of Artificial Sequence: Synthetic oligonucleotide
  Target: LAMA2; (-) strand; PAM type: YTN; PAM sequence: CTA
tatttttaatggtacatata

SEQ ID NO: 257899 - DNA, 20 bp, Artificial Sequence
  Description of Artificial Sequence: Synthetic oligonucleotide
  Target: LAMA2; (-) strand; PAM type: YTN; PAM sequence: CTA
tgtaccctatatttttaatg

SEQ ID NO: 257900 - DNA, 20 bp, Artificial Sequence
  Description of Artificial Sequence: Synthetic oligonucleotide
  Target: LAMA2; (-) strand; PAM type: YTN; PAM sequence: TTA
ctatgtaccctatattttta

SEQ ID NO: 257901 - DNA, 20 bp, Artificial Sequence
  Description of Artificial Sequence: Synthetic oligonucleotide
  Target: LAMA2; (-) strand; PAM type: YTN; PAM sequence: TTT
actatgtaccctatattttt

SEQ ID NO: 257902 - DNA, 20 bp, Artificial Sequence
  Description of Artificial Sequence: Synthetic oligonucleotide
  Target: LAMA2; (-) strand; PAM type: YTN; PAM sequence: TTG
tttactatgtaccctatatt

SEQ ID NO: 257903 - DNA, 20 bp, Artificial Sequence
  Description of Artificial Sequence: Synthetic oligonucleotide
  Target: LAMA2; (-) strand; PAM type: YTN; PAM sequence: TTA
attgtttactatgtacccta

SEQ ID NO: 257904 - DNA, 20 bp, Artificial Sequence
  Description of Artificial Sequence: Synthetic oligonucleotide
  Target: LAMA2; (-) strand; PAM type: YTN; PAM sequence: TTC
acaaatagaatagtaattaa

SEQ ID NO: 257905 - DNA, 20 bp, Artificial Sequence
  Description of Artificial Sequence: Synthetic oligonucleotide
  Target: LAMA2; (-) strand; PAM type: YTN; PAM sequence: TTT
cacaaatagaatagtaatta

SEQ ID NO: 257906 - DNA, 20 bp, Artificial Sequence
  Description of Artificial Sequence: Synthetic oligonucleotide
  Target: LAMA2; (-) strand; PAM type: YTN; PAM sequence: TTT
tcacaaatagaatagtaatt

SEQ ID NO: 257907 - DNA, 20 bp, Artificial Sequence
  Description of Artificial Sequence: Synthetic oligonucleotide
  Target: LAMA2; (-) strand; PAM type: YTN; PAM sequence: CTT
ttcacaaatagaatagtaat

SEQ ID NO: 257908 - DNA, 20 bp, Artificial Sequence
  Description of Artificial Sequence: Synthetic oligonucleotide
  Target: LAMA2; (-) strand; PAM type: YTN; PAM sequence: TTA
agtgaccttttcacaaatag

SEQ ID NO: 257909 - DNA, 20 bp, Artificial Sequence
  Description of Artificial Sequence: Synthetic oligonucleotide
  Target: LAMA2; (-) strand; PAM type: YTN; PAM sequence: CTT
aagtgaccttttcacaaata

SEQ ID NO: 257910 - DNA, 20 bp, Artificial Sequence
  Description of Artificial Sequence: Synthetic oligonucleotide
  Target: LAMA2; (-) strand; PAM type: YTN; PAM sequence: CTA
aagcttaagtgaccttttca

SEQ ID NO: 257911 - DNA, 20 bp, Artificial Sequence
  Description of Artificial Sequence: Synthetic oligonucleotide
  Target: LAMA2; (-) strand; PAM type: YTN; PAM sequence: CTA
aaacgtagagtaaatcagtc

SEQ ID NO: 257912 - DNA, 20 bp, Artificial Sequence
  Description of Artificial Sequence: Synthetic oligonucleotide
  Target: LAMA2; (-) strand; PAM type: YTN; PAM sequence: TTC
taaaacgtagagtaaatcag

SEQ ID NO: 257913 - DNA, 20 bp, Artificial Sequence
  Description of Artificial Sequence: Synthetic oligonucleotide
  Target: LAMA2; (-) strand; PAM type: YTN; PAM sequence: TTA
ttctaaaacgtagagtaaat

SEQ ID NO: 257914 - DNA, 20 bp, Artificial Sequence
  Description of Artificial Sequence: Synthetic oligonucleotide
  Target: LAMA2; (-) strand; PAM type: YTN; PAM sequence: CTG
aggttattctaaaacgtaga

SEQ ID NO: 257915 - DNA, 20 bp, Artificial Sequence
  Description of Artificial Sequence: Synthetic oligonucleotide
  Target: LAMA2; (-) strand; PAM type: YTN; PAM sequence: CTG
tctgaggttattctaaaacg

SEQ ID NO: 257916 - DNA, 20 bp, Artificial Sequence
  Description of Artificial Sequence: Synthetic oligonucleotide
  Target: LAMA2; (-) strand; PAM type: YTN; PAM sequence: TTA
taaagctgtctgaggttatt

SEQ ID NO: 257917 - DNA, 20 bp, Artificial Sequence
  Description of Artificial Sequence: Synthetic oligonucleotide
  Target: LAMA2; (-) strand; PAM type: YTN; PAM sequence: TTG
ttataaagctgtctgaggtt

SEQ ID NO: 257918 - DNA, 20 bp, Artificial Sequence
  Description of Artificial Sequence: Synthetic oligonucleotide
  Target: LAMA2; (-) strand; PAM type: YTN; PAM sequence: TTT
gttataaagctgtctgaggt

SEQ ID NO: 257919 - DNA, 20 bp, Artificial Sequence
  Description of Artificial Sequence: Synthetic oligonucleotide
  Target: LAMA2; (-) strand; PAM type: YTN; PAM sequence: CTT
tgttataaagctgtctgagg

SEQ ID NO: 257920 - DNA, 20 bp, Artificial Sequence
  Description of Artificial Sequence: Synthetic oligonucleotide
  Target: LAMA2; (-) strand; PAM type: YTN; PAM sequence: TTG
ctttgttataaagctgtctg

SEQ ID NO: 257921 - DNA, 20 bp, Artificial Sequence
  Description of Artificial Sequence: Synthetic oligonucleotide
  Target: LAMA2; (-) strand; PAM type: YTN; PAM sequence: TTT
gctttgttataaagctgtct

SEQ ID NO: 257922 - DNA, 20 bp, Artificial Sequence
  Description of Artificial Sequence: Synthetic oligonucleotide
  Target: LAMA2; (-) strand; PAM type: YTN; PAM sequence: TTT
tgctttgttataaagctgtc

SEQ ID NO: 257923 - DNA, 20 bp, Artificial Sequence
  Description of Artificial Sequence: Synthetic oligonucleotide
  Target: LAMA2; (-) strand; PAM type: YTN; PAM sequence: TTT
ttgctttgttataaagctgt

SEQ ID NO: 257924 - DNA, 20 bp, Artificial Sequence
  Description of Artificial Sequence: Synthetic oligonucleotide
  Target: LAMA2; (-) strand; PAM type: YTN; PAM sequence: TTT
tttgctttgttataaagctg

SEQ ID NO: 257925 - DNA, 20 bp, Artificial Sequence
  Description of Artificial Sequence: Synthetic oligonucleotide
  Target: LAMA2; (-) strand; PAM type: YTN; PAM sequence: CTT
ttttgctttgttataaagct

SEQ ID NO: 257926 - DNA, 20 bp, Artificial Sequence
  Description of Artificial Sequence: Synthetic oligonucleotide
  Target: LAMA2; (-) strand; PAM type: YTN; PAM sequence: TTG
tcttttttgctttgttataa

SEQ ID NO: 257927 - DNA, 20 bp, Artificial Sequence
  Description of Artificial Sequence: Synthetic oligonucleotide
  Target: LAMA2; (-) strand; PAM type: YTN; PAM sequence: TTT
gtcttttttgctttgttata

SEQ ID NO: 257928 - DNA, 20 bp, Artificial Sequence
  Description of Artificial Sequence: Synthetic oligonucleotide
  Target: LAMA2; (-) strand; PAM type: YTN; PAM sequence: TTT
tgtcttttttgctttgttat

SEQ ID NO: 257929 - DNA, 20 bp, Artificial Sequence
  Description of Artificial Sequence: Synthetic oligonucleotide
  Target: LAMA2; (-) strand; PAM type: YTN; PAM sequence: CTT
ttgtcttttttgctttgtta

SEQ ID NO: 257930 - DNA, 20 bp, Artificial Sequence
  Description of Artificial Sequence: Synthetic oligonucleotide
  Target: LAMA2; (-) strand; PAM type: YTN; PAM sequence: TTA
agtaatcttttgtctttttt

SEQ ID NO: 257931 - DNA, 20 bp, Artificial Sequence
  Description of Artificial Sequence: Synthetic oligonucleotide
  Target: LAMA2; (-) strand; PAM type: YTN; PAM sequence: TTT
aagtaatcttttgtcttttt

SEQ ID NO: 257932 - DNA, 20 bp, Artificial Sequence
  Description of Artificial Sequence: Synthetic oligonucleotide
  Target: LAMA2; (-) strand; PAM type: YTN; PAM sequence: TTC
atttaagtaatcttttgtct

SEQ ID NO: 257933 - DNA, 20 bp, Artificial Sequence
  Description of Artificial Sequence: Synthetic oligonucleotide
  Target: LAMA2; (-) strand; PAM type: YTN; PAM sequence: TTT
catttaagtaatcttttgtc

SEQ ID NO: 257934 - DNA, 20 bp, Artificial Sequence
  Description of Artificial Sequence: Synthetic oligonucleotide
  Target: LAMA2; (-) strand; PAM type: YTN; PAM sequence: CTC
caaacatacaaaacatattt

SEQ ID NO: 257935 - DNA, 20 bp, Artificial Sequence
  Description of Artificial Sequence: Synthetic oligonucleotide
  Target: LAMA2; (-) strand; PAM type: YTN; PAM sequence: CTA
tctccaaacatacaaaacat

SEQ ID NO: 257936 - DNA, 20 bp, Artificial Sequence
  Description of Artificial Sequence: Synthetic oligonucleotide
  Target: LAMA2; (-) strand; PAM type: YTN; PAM sequence: TTA
tatgctatctccaaacatac

SEQ ID NO: 257937 - DNA, 20 bp, Artificial Sequence
  Description of Artificial Sequence: Synthetic oligonucleotide
  Target: LAMA2; (-) strand; PAM type: YTN; PAM sequence: TTT
atatgctatctccaaacata

SEQ ID NO: 257938 - DNA, 20 bp, Artificial Sequence
  Description of Artificial Sequence: Synthetic oligonucleotide
  Target: LAMA2; (-) strand; PAM type: YTN; PAM sequence: TTA
cagtttatatgctatctcca

SEQ ID NO: 257939 - DNA, 20 bp, Artificial Sequence
  Description of Artificial Sequence: Synthetic oligonucleotide
  Target: LAMA2; (-) strand; PAM type: YTN; PAM sequence: TTT
acagtttatatgctatctcc

SEQ ID NO: 257940 - DNA, 20 bp, Artificial Sequence
  Description of Artificial Sequence: Synthetic oligonucleotide
  Target: LAMA2; (-) strand; PAM type: YTN; PAM sequence: TTT
tacagtttatatgctatctc

SEQ ID NO: 257941 - DNA, 20 bp, Artificial Sequence
  Description of Artificial Sequence: Synthetic oligonucleotide
  Target: LAMA2; (-) strand; PAM type: YTN; PAM sequence: TTA
ttttacagtttatatgctat

SEQ ID NO: 257942 - DNA, 20 bp, Artificial Sequence
  Description of Artificial Sequence: Synthetic oligonucleotide
  Target: LAMA2; (-) strand; PAM type: YTN; PAM sequence: TTT
attttacagtttatatgcta

SEQ ID NO: 257943 - DNA, 20 bp, Artificial Sequence
  Description of Artificial Sequence: Synthetic oligonucleotide
  Target: LAMA2; (-) strand; PAM type: YTN; PAM sequence: TTT
tattttacagtttatatgct

SEQ ID NO: 257944 - DNA, 20 bp, Artificial Sequence
  Description of Artificial Sequence: Synthetic oligonucleotide
  Target: LAMA2; (-) strand; PAM type: YTN; PAM sequence: CTT
ttattttacagtttatatgc

SEQ ID NO: 257945 - DNA, 20 bp, Artificial Sequence
  Description of Artificial Sequence: Synthetic oligonucleotide
  Target: LAMA2; (-) strand; PAM type: YTN; PAM sequence: TTA
agaatcacttttattttaca

SEQ ID NO: 257946 - DNA, 20 bp, Artificial Sequence
  Description of Artificial Sequence: Synthetic oligonucleotide
  Target: LAMA2; (-) strand; PAM type: YTN; PAM sequence: TTT
aagaatcacttttattttac

SEQ ID NO: 257947 - DNA, 20 bp, Artificial Sequence
  Description of Artificial Sequence: Synthetic oligonucleotide
  Target: LAMA2; (-) strand; PAM type: YTN; PAM sequence: TTA
taacatttaagaatcacttt

SEQ ID NO: 257948 - DNA, 20 bp, Artificial Sequence
  Description of Artificial Sequence: Synthetic oligonucleotide
  Target: LAMA2; (-) strand; PAM type: YTN; PAM sequence: CTA
tagcattataacatttaaga

SEQ ID NO: 257949 - DNA, 20 bp, Artificial Sequence
  Description of Artificial Sequence: Synthetic oligonucleotide
  Target: LAMA2; (-) strand; PAM type: YTN; PAM sequence: TTA
agactatagcattataacat

SEQ ID NO: 257950 - DNA, 20 bp, Artificial Sequence
  Description of Artificial Sequence: Synthetic oligonucleotide
  Target: LAMA2; (-) strand; PAM type: YTN; PAM sequence: CTT
aagactatagcattataaca

SEQ ID NO: 257951 - DNA, 20 bp, Artificial Sequence
  Description of Artificial Sequence: Synthetic oligonucleotide
  Target: LAMA2; (-) strand; PAM type: YTN; PAM sequence: TTC
aagtatcttaagactatagc

SEQ ID NO: 257952 - DNA, 20 bp, Artificial Sequence
  Description of Artificial Sequence: Synthetic oligonucleotide
  Target: LAMA2; (-) strand; PAM type: YTN; PAM sequence: TTT
caagtatcttaagactatag

SEQ ID NO: 257953 - DNA, 20 bp, Artificial Sequence
  Description of Artificial Sequence: Synthetic oligonucleotide
  Target: LAMA2; (-) strand; PAM type: YTN; PAM sequence: TTA
aaagacaacaaaaacatcat

SEQ ID NO: 257954 - DNA, 20 bp, Artificial Sequence
  Description of Artificial Sequence: Synthetic oligonucleotide
  Target: LAMA2; (-) strand; PAM type: YTN; PAM sequence: TTT
aaaagacaacaaaaacatca

SEQ ID NO: 257955 - DNA, 20 bp, Artificial Sequence
  Description of Artificial Sequence: Synthetic oligonucleotide
  Target: LAMA2; (-) strand; PAM type: YTN; PAM sequence: TTC
agaagtttaaaagacaacaa

SEQ ID NO: 257956 - DNA, 20 bp, Artificial Sequence
  Description of Artificial Sequence: Synthetic oligonucleotide
  Target: LAMA2; (-) strand; PAM type: YTN; PAM sequence: TTA
agattcagaagtttaaaaga

SEQ ID NO: 257957 - DNA, 20 bp, Artificial Sequence
  Description of Artificial Sequence: Synthetic oligonucleotide
  Target: LAMA2; (-) strand; PAM type: YTN; PAM sequence: TTT
aagattcagaagtttaaaag

SEQ ID NO: 257958 - DNA, 20 bp, Artificial Sequence
  Description of Artificial Sequence: Synthetic oligonucleotide
  Target: LAMA2; (-) strand; PAM type: YTN; PAM sequence: TTT
taagattcagaagtttaaaa

SEQ ID NO: 257959 - DNA, 20 bp, Artificial Sequence
  Description of Artificial Sequence: Synthetic oligonucleotide
  Target: LAMA2; (-) strand; PAM type: YTN; PAM sequence: TTT
ttaagattcagaagtttaaa

SEQ ID NO: 257960 - DNA, 20 bp, Artificial Sequence
  Description of Artificial Sequence: Synthetic oligonucleotide
  Target: LAMA2; (-) strand; PAM type: YTN; PAM sequence: TTT
tttaagattcagaagtttaa

SEQ ID NO: 257961 - DNA, 20 bp, Artificial Sequence
  Description of Artificial Sequence: Synthetic oligonucleotide
  Target: LAMA2; (-) strand; PAM type: YTN; PAM sequence: CTT
ttttaagattcagaagttta

SEQ ID NO: 257962 - DNA, 20 bp, Artificial Sequence
  Description of Artificial Sequence: Synthetic oligonucleotide
  Target: LAMA2; (-) strand; PAM type: YTN; PAM sequence: TTA
tgccttttttaagattcaga

SEQ ID NO: 257963 - DNA, 20 bp, Artificial Sequence
  Description of Artificial Sequence: Synthetic oligonucleotide
  Target: LAMA2; (-) strand; PAM type: YTN; PAM sequence: TTT
atgccttttttaagattcag

SEQ ID NO: 257964 - DNA, 20 bp, Artificial Sequence
  Description of Artificial Sequence: Synthetic oligonucleotide
  Target: LAMA2; (-) strand; PAM type: YTN; PAM sequence: TTG
aggtgaaatatttatgcctt

SEQ ID NO: 257965 - DNA, 20 bp, Artificial Sequence
  Description of Artificial Sequence: Synthetic oligonucleotide
  Target: LAMA2; (-) strand; PAM type: YTN; PAM sequence: TTT
gaggtgaaatatttatgcct

SEQ ID NO: 257966 - DNA, 20 bp, Artificial Sequence
  Description of Artificial Sequence: Synthetic oligonucleotide
  Target: LAMA2; (-) strand; PAM type: YTN; PAM sequence: TTA
aaaaatggtttgaggtgaaa

SEQ ID NO: 257967 - DNA, 20 bp, Artificial Sequence
  Description of Artificial Sequence: Synthetic oligonucleotide
  Target: LAMA2; (-) strand; PAM type: YTN; PAM sequence: TTT
aaaaaatggtttgaggtgaa

SEQ ID NO: 257968 - DNA, 20 bp, Artificial Sequence
  Description of Artificial Sequence: Synthetic oligonucleotide
  Target: LAMA2; (-) strand; PAM type: YTN; PAM sequence: TTA
agtttaaaaaatggtttgag

SEQ ID NO: 257969 - DNA, 20 bp, Artificial Sequence
  Description of Artificial Sequence: Synthetic oligonucleotide
  Target: LAMA2; (-) strand; PAM type: YTN; PAM sequence: TTG
tgttaagtttaaaaaatggt

SEQ ID NO: 257970 - DNA, 20 bp, Artificial Sequence
  Description of Artificial Sequence: Synthetic oligonucleotide
  Target: LAMA2; (-) strand; PAM type: YTN; PAM sequence: TTT
gtgttaagtttaaaaaatgg

SEQ ID NO: 257971 - DNA, 20 bp, Artificial Sequence
  Description of Artificial Sequence: Synthetic oligonucleotide
  Target: LAMA2; (-) strand; PAM type: YTN; PAM sequence: TTT
tgtgttaagtttaaaaaatg

SEQ ID NO: 257972 - DNA, 20 bp, Artificial Sequence
  Description of Artificial Sequence: Synthetic oligonucleotide
  Target: LAMA2; (-) strand; PAM type: YTN; PAM sequence: CTG
tgtgccggttttgtgttaag

SEQ ID NO: 257973 - DNA, 20 bp, Artificial Sequence
  Description of Artificial Sequence: Synthetic oligonucleotide
  Target: LAMA2; (-) strand; PAM type: YTN; PAM sequence: TTA
ctgtgtgccggttttgtgtt

SEQ ID NO: 257974 - DNA, 20 bp, Artificial Sequence
  Description of Artificial Sequence: Synthetic oligonucleotide
  Target: LAMA2; (-) strand; PAM type: YTN; PAM sequence: TTT
actgtgtgccggttttgtgt

SEQ ID NO: 257975 - DNA, 20 bp, Artificial Sequence
  Description of Artificial Sequence: Synthetic oligonucleotide
  Target: LAMA2; (-) strand; PAM type: YTN; PAM sequence: TTA
atgatttactgtgtgccggt

SEQ ID NO: 257976 - DNA, 20 bp, Artificial Sequence
  Description of Artificial Sequence: Synthetic oligonucleotide
  Target: LAMA2; (-) strand; PAM type: YTN; PAM sequence: TTT
aatgatttactgtgtgccgg

SEQ ID NO: 257977 - DNA, 20 bp, Artificial Sequence
  Description of Artificial Sequence: Synthetic oligonucleotide
  Target: LAMA2; (-) strand; PAM type: YTN; PAM sequence: TTG
atttaatgatttactgtgtg

SEQ ID NO: 257978 - DNA, 20 bp, Artificial Sequence
  Description of Artificial Sequence: Synthetic oligonucleotide
  Target: LAMA2; (-) strand; PAM type: YTN; PAM sequence: TTT
gatttaatgatttactgtgt

SEQ ID NO: 257979 - DNA, 20 bp, Artificial Sequence
  Description of Artificial Sequence: Synthetic oligonucleotide
  Target: LAMA2; (-) strand; PAM type: YTN; PAM sequence: TTT
tgatttaatgatttactgtg

SEQ ID NO: 257980 - DNA, 20 bp, Artificial Sequence
  Description of Artificial Sequence: Synthetic oligonucleotide
  Target: LAMA2; (-) strand; PAM type: YTN; PAM sequence: TTT
ttgatttaatgatttactgt

SEQ ID NO: 257981 - DNA, 20 bp, Artificial Sequence
  Description of Artificial Sequence: Synthetic oligonucleotide
  Target: LAMA2; (-) strand; PAM type: YTN; PAM sequence: TTT
tttgatttaatgatttactg

SEQ ID NO: 257982 - DNA, 20 bp, Artificial Sequence
  Description of Artificial Sequence: Synthetic oligonucleotide
  Target: LAMA2; (-) strand; PAM type: YTN; PAM sequence: TTT
ttttgatttaatgatttact

SEQ ID NO: 257983 - DNA, 20 bp, Artificial Sequence
  Description of Artificial Sequence: Synthetic oligonucleotide
  Target: LAMA2; (-) strand; PAM type: YTN; PAM sequence: TTA
gtttttttgatttaatgatt

SEQ ID NO: 257984 - DNA, 20 bp, Artificial Sequence
  Description of Artificial Sequence: Synthetic oligonucleotide
  Target: LAMA2; (-) strand; PAM type: YTN; PAM sequence: TTA
gttagtttttttgatttaat

SEQ ID NO: 257985 - DNA, 20 bp, Artificial Sequence
  Description of Artificial Sequence: Synthetic oligonucleotide
  Target: LAMA2; (-) strand; PAM type: YTN; PAM sequence: TTT
agttagtttttttgatttaa

SEQ ID NO: 257986 - DNA, 20 bp, Artificial Sequence
  Description of Artificial Sequence: Synthetic oligonucleotide
  Target: LAMA2; (-) strand; PAM type: YTN; PAM sequence: CTA
gaaaaatttagttagttttt

SEQ ID NO: 257987 - DNA, 20 bp, Artificial Sequence
  Description of Artificial Sequence: Synthetic oligonucleotide
  Target: LAMA2; (-) strand; PAM type: YTN; PAM sequence: TTA
atctagaaaaatttagttag

SEQ ID NO: 257988 - DNA, 20 bp, Artificial Sequence
  Description of Artificial Sequence: Synthetic oligonucleotide
  Target: LAMA2; (-) strand; PAM type: YTN; PAM sequence: CTA
ttaatctagaaaaatttagt

SEQ ID NO: 257989 - DNA, 20 bp, Artificial Sequence
  Description of Artificial Sequence: Synthetic oligonucleotide
  Target: LAMA2; (-) strand; PAM type: YTN; PAM sequence: TTA
ctattaatctagaaaaattt

SEQ ID NO: 257990 - DNA, 20 bp, Artificial Sequence
  Description of Artificial Sequence: Synthetic oligonucleotide
  Target: LAMA2; (-) strand; PAM type: YTN; PAM sequence: TTA
atgttactattaatctagaa

SEQ ID NO: 257991 - DNA, 20 bp, Artificial Sequence
  Description of Artificial Sequence: Synthetic oligonucleotide
  Target: LAMA2; (-) strand; PAM type: YTN; PAM sequence: TTT
aatgttactattaatctaga

SEQ ID NO: 257992 - DNA, 20 bp, Artificial Sequence
  Description of Artificial Sequence: Synthetic oligonucleotide
  Target: LAMA2; (-) strand; PAM type: YTN; PAM sequence: TTT
taatgttactattaatctag

SEQ ID NO: 257993 - DNA, 20 bp, Artificial Sequence
  Description of Artificial Sequence: Synthetic oligonucleotide
  Target: LAMA2; (-) strand; PAM type: YTN; PAM sequence: CTG
gcaaaattttaatgttacta

SEQ ID NO: 257994 - DNA, 20 bp, Artificial Sequence
  Description of Artificial Sequence: Synthetic oligonucleotide
  Target: LAMA2; (-) strand; PAM type: YTN; PAM sequence: TTA
atagcacccctggcaaaatt

SEQ ID NO: 257995 - DNA, 20 bp, Artificial Sequence
  Description of Artificial Sequence: Synthetic oligonucleotide
  Target: LAMA2; (-) strand; PAM type: YTN; PAM sequence: TTC
aaaattaatagcacccctgg

SEQ ID NO: 257996 - DNA, 20 bp, Artificial Sequence
  Description of Artificial Sequence: Synthetic oligonucleotide
  Target: LAMA2; (-) strand; PAM type: YTN; PAM sequence: TTT
caaaattaatagcacccctg

SEQ ID NO: 257997 - DNA, 20 bp, Artificial Sequence
  Description of Artificial Sequence: Synthetic oligonucleotide
  Target: LAMA2; (-) strand; PAM type: YTN; PAM sequence: TTT
tcaaaattaatagcacccct

SEQ ID NO: 257998 - DNA, 20 bp, Artificial Sequence
  Description of Artificial Sequence: Synthetic oligonucleotide
  Target: LAMA2; (-) strand; PAM type: YTN; PAM sequence: TTG
aggaattttcaaaattaata

SEQ ID NO: 257999 - DNA, 20 bp, Artificial Sequence
  Description of Artificial Sequence: Synthetic oligonucleotide
  Target: LAMA2; (-) strand; PAM type: YTN; PAM sequence: TTT
gaggaattttcaaaattaat

SEQ ID NO: 258000 - DNA, 20 bp, Artificial Sequence
  Description of Artificial Sequence: Synthetic oligonucleotide
  Target: LAMA2; (-) strand; PAM type: YTN; PAM sequence: TTT
tgaggaattttcaaaattaa

SEQ ID NO: 258001 - DNA, 20 bp, Artificial Sequence
  Description of Artificial Sequence: Synthetic oligonucleotide
  Target: LAMA2; (-) strand; PAM type: YTN; PAM sequence: CTA
aaataattttgaggaatttt

SEQ ID NO: 258002 - DNA, 20 bp, Artificial Sequence
  Description of Artificial Sequence: Synthetic oligonucleotide
  Target: LAMA2; (-) strand; PAM type: YTN; PAM sequence: TTA
gaactaaaataattttgagg

SEQ ID NO: 258003 - DNA, 20 bp, Artificial Sequence
  Description of Artificial Sequence: Synthetic oligonucleotide
  Target: LAMA2; (-) strand; PAM type: YTN; PAM sequence: TTT
agaactaaaataattttgag

SEQ ID NO: 258004 - DNA, 20 bp, Artificial Sequence
  Description of Artificial Sequence: Synthetic oligonucleotide
  Target: LAMA2; (-) strand; PAM type: YTN; PAM sequence: CTT
tagaactaaaataattttga

SEQ ID NO: 258005 - DNA, 20 bp, Artificial Sequence
  Description of Artificial Sequence: Synthetic oligonucleotide
  Target: LAMA2; (-) strand; PAM type: YTN; PAM sequence: CTG
actttagaactaaaataatt

SEQ ID NO: 258006 - DNA, 20 bp, Artificial Sequence
  Description of Artificial Sequence: Synthetic oligonucleotide
  Target: LAMA2; (-) strand; PAM type: YTN; PAM sequence: TTG
taagtaatgcatactgactt

SEQ ID NO: 258007 - DNA, 20 bp, Artificial Sequence
  Description of Artificial Sequence: Synthetic oligonucleotide
  Target: LAMA2; (-) strand; PAM type: YTN; PAM sequence: TTA
tcccattgtaagtaatgcat

SEQ ID NO: 258008 - DNA, 20 bp, Artificial Sequence
  Description of Artificial Sequence: Synthetic oligonucleotide
  Target: LAMA2; (-) strand; PAM type: YTN; PAM sequence: CTA
ttatcccattgtaagtaatg

SEQ ID NO: 258009 - DNA, 20 bp, Artificial Sequence
  Description of Artificial Sequence: Synthetic oligonucleotide
  Target: LAMA2; (-) strand; PAM type: YTN; PAM sequence: TTA
aaatactattatcccattgt

SEQ ID NO: 258010 - DNA, 20 bp, Artificial Sequence
  Description of Artificial Sequence: Synthetic oligonucleotide
  Target: LAMA2; (-) strand; PAM type: YTN; PAM sequence: CTT
aaaatactattatcccattg

SEQ ID NO: 258011 - DNA, 20 bp, Artificial Sequence
  Description of Artificial Sequence: Synthetic oligonucleotide
  Target: LAMA2; (-) strand; PAM type: YTN; PAM sequence: TTA
cagatacatcagggtaacac

SEQ ID NO: 258012 - DNA, 20 bp, Artificial Sequence
  Description of Artificial Sequence: Synthetic oligonucleotide
  Target: LAMA2; (-) strand; PAM type: YTN; PAM sequence: TTT
acagatacatcagggtaaca

SEQ ID NO: 258013 - DNA, 20 bp, Artificial Sequence
  Description of Artificial Sequence: Synthetic oligonucleotide
  Target: LAMA2; (-) strand; PAM type: YTN; PAM sequence: CTT
tacagatacatcagggtaac

SEQ ID NO: 258014 - DNA, 20 bp, Artificial Sequence
  Description of Artificial Sequence: Synthetic oligonucleotide
  Target: LAMA2; (-) strand; PAM type: YTN; PAM sequence: TTC
tttacagatacatcagggta

SEQ ID NO: 258015 - DNA, 20 bp, Artificial Sequence
  Description of Artificial Sequence: Synthetic oligonucleotide
  Target: LAMA2; (-) strand; PAM type: YTN; PAM sequence: TTA
gttctttacagatacatcag

SEQ ID NO: 258016 - DNA, 20 bp, Artificial Sequence
  Description of Artificial Sequence: Synthetic oligonucleotide
  Target: LAMA2; (-) strand; PAM type: YTN; PAM sequence: TTT
agttctttacagatacatca

SEQ ID NO: 258017 - DNA, 20 bp, Artificial Sequence
  Description of Artificial Sequence: Synthetic oligonucleotide
  Target: LAMA2; (-) strand; PAM type: YTN; PAM sequence: TTT
tagttctttacagatacatc

SEQ ID NO: 258018 - DNA, 20 bp, Artificial Sequence
  Description of Artificial Sequence: Synthetic oligonucleotide
  Target: LAMA2; (-) strand; PAM type: YTN; PAM sequence: CTG
ttttagttctttacagatac

SEQ ID NO: 258019 - DNA, 20 bp, Artificial Sequence
  Description of Artificial Sequence: Synthetic oligonucleotide
  Target: LAMA2; (-) strand; PAM type: YTN; PAM sequence: CTC
aaggtgtaacgctgttttag

SEQ ID NO: 258020 - DNA, 20 bp, Artificial Sequence
  Description of Artificial Sequence: Synthetic oligonucleotide
  Target: LAMA2; (-) strand; PAM type: YTN; PAM sequence: TTG
actcaaggtgtaacgctgtt

SEQ ID NO: 258021 - DNA, 20 bp, Artificial Sequence
  Description of Artificial Sequence: Synthetic oligonucleotide
  Target: LAMA2; (-) strand; PAM type: YTN; PAM sequence: CTT
gactcaaggtgtaacgctgt

SEQ ID NO: 258022 - DNA, 20 bp, Artificial Sequence
  Description of Artificial Sequence: Synthetic oligonucleotide
  Target: LAMA2; (-) strand; PAM type: YTN; PAM sequence: TTC
ttgactcaaggtgtaacgct

SEQ ID NO: 258023 - DNA, 20 bp, Artificial Sequence
  Description of Artificial Sequence: Synthetic oligonucleotide
  Target: LAMA2; (-) strand; PAM type: YTN; PAM sequence: TTG
gagttcttgactcaaggtgt

SEQ ID NO: 258024 - DNA, 20 bp, Artificial Sequence
  Description of Artificial Sequence: Synthetic oligonucleotide
  Target: LAMA2; (-) strand; PAM type: YTN; PAM sequence: CTT
ggagttcttgactcaaggtg

SEQ ID NO: 258025 - DNA, 20 bp, Artificial Sequence
  Description of Artificial Sequence: Synthetic oligonucleotide
  Target: LAMA2; (-) strand; PAM type: YTN; PAM sequence: CTG
tgtcatataggtgagtccag

SEQ ID NO: 258026 - DNA, 20 bp, Artificial Sequence
  Description of Artificial Sequence: Synthetic oligonucleotide
  Target: LAMA2; (-) strand; PAM type: YTN; PAM sequence: CTG
ctgtgtcatataggtgagtc

SEQ ID NO: 258027 - DNA, 20 bp, Artificial Sequence
  Description of Artificial Sequence: Synthetic oligonucleotide
  Target: LAMA2; (-) strand; PAM type: YTN; PAM sequence: TTA
tacaagtccacatgcctgct

SEQ ID NO: 258028 - DNA, 20 bp, Artificial Sequence
  Description of Artificial Sequence: Synthetic oligonucleotide
  Target: LAMA2; (-) strand; PAM type: YTN; PAM sequence: CTT
atacaagtccacatgcctgc

SEQ ID NO: 258029 - DNA, 20 bp, Artificial Sequence
  Description of Artificial Sequence: Synthetic oligonucleotide
  Target: LAMA2; (-) strand; PAM type: YTN; PAM sequence: TTC
aaagaagccatagcttatac

SEQ ID NO: 258030 - DNA, 20 bp, Artificial Sequence
  Description of Artificial Sequence: Synthetic oligonucleotide
  Target: LAMA2; (-) strand; PAM type: YTN; PAM sequence: CTG
aaattcaaagaagccatagc

SEQ ID NO: 258031 - DNA, 20 bp, Artificial Sequence
  Description of Artificial Sequence: Synthetic oligonucleotide
  Target: LAMA2; (-) strand; PAM type: YTN; PAM sequence: TTG
agcatgaagacactgaaatt

SEQ ID NO: 258032 - DNA, 20 bp, Artificial Sequence
  Description of Artificial Sequence: Synthetic oligonucleotide
  Target: LAMA2; (-) strand; PAM type: YTN; PAM sequence: TTT
gagcatgaagacactgaaat

SEQ ID NO: 258033 - DNA, 20 bp, Artificial Sequence
  Description of Artificial Sequence: Synthetic oligonucleotide
  Target: LAMA2; (-) strand; PAM type: YTN; PAM sequence: TTT
tgagcatgaagacactgaaa

SEQ ID NO: 258034 - DNA, 20 bp, Artificial Sequence
  Description of Artificial Sequence: Synthetic oligonucleotide
  Target: LAMA2; (-) strand; PAM type: YTN; PAM sequence: TTC
caattttgagcatgaagaca

SEQ ID NO: 258035 - DNA, 20 bp, Artificial Sequence
  Description of Artificial Sequence: Synthetic oligonucleotide
  Target: LAMA2; (-) strand; PAM type: YTN; PAM sequence: TTA
atgtcatcatcatcattcca

SEQ ID NO: 258036 - DNA, 20 bp, Artificial Sequence
  Description of Artificial Sequence: Synthetic oligonucleotide
  Target: LAMA2; (-) strand; PAM type: YTN; PAM sequence: TTA
aaatattaatgtcatcatca

SEQ ID NO: 258037 - DNA, 20 bp, Artificial Sequence
  Description of Artificial Sequence: Synthetic oligonucleotide
  Target: LAMA2; (-) strand; PAM type: YTN; PAM sequence: CTG
gcccatcatatgccattaaa

SEQ ID NO: 258038 - DNA, 20 bp, Artificial Sequence
  Description of Artificial Sequence: Synthetic oligonucleotide
  Target: LAMA2; (-) strand; PAM type: YTN; PAM sequence: TTA
gcatcatgtctggcccatca

SEQ ID NO: 258039 - DNA, 20 bp, Artificial Sequence
  Description of Artificial Sequence: Synthetic oligonucleotide
  Target: LAMA2; (-) strand; PAM type: YTN; PAM sequence: TTT
agcatcatgtctggcccatc

SEQ ID NO: 258040 - DNA, 20 bp, Artificial Sequence
  Description of Artificial Sequence: Synthetic oligonucleotide
  Target: LAMA2; (-) strand; PAM type: YTN; PAM sequence: CTT
tagcatcatgtctggcccat

SEQ ID NO: 258041 - DNA, 20 bp, Artificial Sequence
  Description of Artificial Sequence: Synthetic oligonucleotide
  Target: LAMA2; (-) strand; PAM type: YTN; PAM sequence: TTC
acataaaggctttagcatca

SEQ ID NO: 258042 - DNA, 20 bp, Artificial Sequence
  Description of Artificial Sequence: Synthetic oligonucleotide
  Target: LAMA2; (-) strand; PAM type: YTN; PAM sequence: CTG
tagggataattcacataaag

SEQ ID NO: 258043 - DNA, 20 bp, Artificial Sequence
  Description of Artificial Sequence: Synthetic oligonucleotide
  Target: LAMA2; (-) strand; PAM type: YTN; PAM sequence: CTA
caagctgtagggataattca

SEQ ID NO: 258044 - DNA, 20 bp, Artificial Sequence
  Description of Artificial Sequence: Synthetic oligonucleotide
  Target: LAMA2; (-) strand; PAM type: YTN; PAM sequence: CTC
tacaagctgtagggataatt

SEQ ID NO: 258045 - DNA, 20 bp, Artificial Sequence
  Description of Artificial Sequence: Synthetic oligonucleotide
  Target: LAMA2; (-) strand; PAM type: YTN; PAM sequence: CTA
taacaactctacaagctgta

SEQ ID NO: 258046 - DNA, 20 bp, Artificial Sequence
  Description of Artificial Sequence: Synthetic oligonucleotide
  Target: LAMA2; (-) strand; PAM type: YTN; PAM sequence: TTA
atccctataacaactctaca

SEQ ID NO: 258047 - DNA, 20 bp, Artificial Sequence
  Description of Artificial Sequence: Synthetic oligonucleotide
  Target: LAMA2; (-) strand; PAM type: YTN; PAM sequence: TTT
aatccctataacaactctac

SEQ ID NO: 258048 - DNA, 20 bp, Artificial Sequence
  Description of Artificial Sequence: Synthetic oligonucleotide
  Target: LAMA2; (-) strand; PAM type: YTN; PAM sequence: CTA
tcatttaatccctataacaa

SEQ ID NO: 258049 - DNA, 20 bp, Artificial Sequence
  Description of Artificial Sequence: Synthetic oligonucleotide
  Target: LAMA2; (-) strand; PAM type: YTN; PAM sequence: TTC
tatcatttaatccctataac

SEQ ID NO: 258050 - DNA, 20 bp, Artificial Sequence
  Description of Artificial Sequence: Synthetic oligonucleotide
  Target: LAMA2; (-) strand; PAM type: YTN; PAM sequence: TTA
ggcattctatcatttaatcc

SEQ ID NO: 258051 - DNA, 20 bp, Artificial Sequence
  Description of Artificial Sequence: Synthetic oligonucleotide
  Target: LAMA2; (-) strand; PAM type: YTN; PAM sequence: CTG
ttaggcattctatcatttaa

SEQ ID NO: 258052 - DNA, 20 bp, Artificial Sequence
  Description of Artificial Sequence: Synthetic oligonucleotide
  Target: LAMA2; (-) strand; PAM type: YTN; PAM sequence: TTA
agtgccctgttaggcattct

SEQ ID NO: 258053 - DNA, 20 bp, Artificial Sequence
  Description of Artificial Sequence: Synthetic oligonucleotide
  Target: LAMA2; (-) strand; PAM type: YTN; PAM sequence: TTG
ttaagtgccctgttaggcat

SEQ ID NO: 258054 - DNA, 20 bp, Artificial Sequence
  Description of Artificial Sequence: Synthetic oligonucleotide
  Target: LAMA2; (-) strand; PAM type: YTN; PAM sequence: TTT
gttaagtgccctgttaggca

SEQ ID NO: 258055 - DNA, 20 bp, Artificial Sequence
  Description of Artificial Sequence: Synthetic oligonucleotide
  Target: LAMA2; (-) strand; PAM type: YTN; PAM sequence: CTG
atttgttaagtgccctgtta

SEQ ID NO: 258056 - DNA, 20 bp, Artificial Sequence
  Description of Artificial Sequence: Synthetic oligonucleotide
  Target: LAMA2; (-) strand; PAM type: YTN; PAM sequence: TTC
tgatttgttaagtgccctgt

SEQ ID NO: 258057 - DNA, 20 bp, Artificial Sequence
  Description of Artificial Sequence: Synthetic oligonucleotide
  Target: LAMA2; (-) strand; PAM type: YTN; PAM sequence: TTT
ctgatttgttaagtgccctg

SEQ ID NO: 258058 - DNA, 20 bp, Artificial Sequence
  Description of Artificial Sequence: Synthetic oligonucleotide
  Target: LAMA2; (-) strand; PAM type: YTN; PAM sequence: TTT
tctgatttgttaagtgccct

SEQ ID NO: 258059 - DNA, 20 bp, Artificial Sequence
  Description of Artificial Sequence: Synthetic oligonucleotide
  Target: LAMA2; (-) strand; PAM type: YTN; PAM sequence: TTC
agtaacagaatgttttctga

SEQ ID NO: 258060 - DNA, 20 bp, Artificial Sequence
  Description of Artificial Sequence: Synthetic oligonucleotide
  Target: LAMA2; (-) strand; PAM type: YTN; PAM sequence: CTA
agttcagtaacagaatgttt

SEQ ID NO: 258061 - DNA, 20 bp, Artificial Sequence
  Description of Artificial Sequence: Synthetic oligonucleotide
  Target: LAMA2; (-) strand; PAM type: YTN; PAM sequence: TTA
aataataatataccccacat

SEQ ID NO: 258062 - DNA, 20 bp, Artificial Sequence
  Description of Artificial Sequence: Synthetic oligonucleotide
  Target: LAMA2; (-) strand; PAM type: YTN; PAM sequence: TTG
ttaaataataatatacccca

SEQ ID NO: 258063 - DNA, 20 bp, Artificial Sequence
  Description of Artificial Sequence: Synthetic oligonucleotide
  Target: LAMA2; (-) strand; PAM type: YTN; PAM sequence: CTT
gttaaataataatatacccc

SEQ ID NO: 258064 - DNA, 20 bp, Artificial Sequence
  Description of Artificial Sequence: Synthetic oligonucleotide
  Target: LAMA2; (-) strand; PAM type: YTN; PAM sequence: TTA
ataggcttgttaaataataa

SEQ ID NO: 258065 - DNA, 20 bp, Artificial Sequence
  Description of Artificial Sequence: Synthetic oligonucleotide
  Target: LAMA2; (-) strand; PAM type: YTN; PAM sequence: CTT
aataggcttgttaaataata

SEQ ID NO: 258066 - DNA, 20 bp, Artificial Sequence
  Description of Artificial Sequence: Synthetic oligonucleotide
  Target: LAMA2; (-) strand; PAM type: YTN; PAM sequence: CTA
atagtcttaataggcttgtt

SEQ ID NO: 258067 - DNA, 20 bp, Artificial Sequence
  Description of Artificial Sequence: Synthetic oligonucleotide
  Target: LAMA2; (-) strand; PAM type: YTN; PAM sequence: TTC
taatagtcttaataggcttg

SEQ ID NO: 258068 - DNA, 20 bp, Artificial Sequence
  Description of Artificial Sequence: Synthetic oligonucleotide
  Target: LAMA2; (-) strand; PAM type: YTN; PAM sequence: TTT
ctaatagtcttaataggctt

SEQ ID NO: 258069 - DNA, 20 bp, Artificial Sequence
  Description of Artificial Sequence: Synthetic oligonucleotide
  Target: LAMA2; (-) strand; PAM type: YTN; PAM sequence: CTT
tctaatagtcttaataggct

SEQ ID NO: 258070 - DNA, 20 bp, Artificial Sequence
  Description of Artificial Sequence: Synthetic oligonucleotide
  Target: LAMA2; (-) strand; PAM type: YTN; PAM sequence: CTG
tgatcaggaaaactttctaa

SEQ ID NO: 258071 - DNA, 20 bp, Artificial Sequence
  Description of Artificial Sequence: Synthetic oligonucleotide
  Target: LAMA2; (-) strand; PAM type: YTN; PAM sequence: CTG
caaagagaagagagacctgt

SEQ ID NO: 258072 - DNA, 20 bp, Artificial Sequence
  Description of Artificial Sequence: Synthetic oligonucleotide
  Target: LAMA2; (-) strand; PAM type: YTN; PAM sequence: TTA
cagcgacaggctgcaaagag

SEQ ID NO: 258073 - DNA, 20 bp, Artificial Sequence
  Description of Artificial Sequence: Synthetic oligonucleotide
  Target: LAMA2; (-) strand; PAM type: YTN; PAM sequence: CTC
agagaaagagccaccggcat

SEQ ID NO: 258074 - DNA, 20 bp, Artificial Sequence
  Description of Artificial Sequence: Synthetic oligonucleotide
  Target: LAMA2; (-) strand; PAM type: YTN; PAM sequence: CTG
tggcaaacctcagagaaaga

SEQ ID NO: 258075 - DNA, 20 bp, Artificial Sequence
  Description of Artificial Sequence: Synthetic oligonucleotide
  Target: LAMA2; (-) strand; PAM type: YTN; PAM sequence: TTG
actgtggcaaacctcagaga

SEQ ID NO: 258076 - DNA, 20 bp, Artificial Sequence
  Description of Artificial Sequence: Synthetic oligonucleotide
  Target: LAMA2; (-) strand; PAM type: YTN; PAM sequence: TTT
gactgtggcaaacctcagag

SEQ ID NO: 258077 - DNA, 20 bp, Artificial Sequence
  Description of Artificial Sequence: Synthetic oligonucleotide
  Target: LAMA2; (-) strand; PAM type: YTN; PAM sequence: CTG
tccagtttgactgtggcaaa

SEQ ID NO: 258078 - DNA, 20 bp, Artificial Sequence
  Description of Artificial Sequence: Synthetic oligonucleotide
  Target: LAMA2; (-) strand; PAM type: YTN; PAM sequence: CTC
acactgtccagtttgactgt

SEQ ID NO: 258079 - DNA, 20 bp, Artificial Sequence
  Description of Artificial Sequence: Synthetic oligonucleotide
  Target: LAMA2; (-) strand; PAM type: YTN; PAM sequence: CTG
cactcacactgtccagtttg

SEQ ID NO: 258080 - DNA, 20 bp, Artificial Sequence
  Description of Artificial Sequence: Synthetic oligonucleotide
  Target: LAMA2; (-) strand; PAM type: YTN; PAM sequence: CTC
tgcactcacactgtccagtt

SEQ ID NO: 258081 - DNA, 20 bp, Artificial Sequence
  Description of Artificial Sequence: Synthetic oligonucleotide
  Target: LAMA2; (-) strand; PAM type: YTN; PAM sequence: TTG
gctctgcactcacactgtcc

SEQ ID NO: 258082 - DNA, 20 bp, Artificial Sequence
  Description of Artificial Sequence: Synthetic oligonucleotide
  Target: LAMA2; (-) strand; PAM type: YTN; PAM sequence: CTG
aacgttggctctgcactcac

SEQ ID NO: 258083 - DNA, 20 bp, Artificial Sequence
  Description of Artificial Sequence: Synthetic oligonucleotide
  Target: LAMA2; (-) strand; PAM type: YTN; PAM sequence: CTG
accctgaacgttggctctgc

SEQ ID NO: 258084 - DNA, 20 bp, Artificial Sequence
  Description of Artificial Sequence: Synthetic oligonucleotide
  Target: LAMA2; (-) strand; PAM type: YTN; PAM sequence: CTC
tgaccctgaacgttggctct

SEQ ID NO: 258085 - DNA, 20 bp, Artificial Sequence
  Description of Artificial Sequence: Synthetic oligonucleotide
  Target: LAMA2; (-) strand; PAM type: YTN; PAM sequence: TTG
tcacatctctgaccctgaac

SEQ ID NO: 258086 - DNA, 20 bp, Artificial Sequence
  Description of Artificial Sequence: Synthetic oligonucleotide
  Target: LAMA2; (-) strand; PAM type: YTN; PAM sequence: TTT
gtcacatctctgaccctgaa

SEQ ID NO: 258087 - DNA, 20 bp, Artificial Sequence
  Description of Artificial Sequence: Synthetic oligonucleotide
  Target: LAMA2; (-) strand; PAM type: YTN; PAM sequence: TTG
catttgtcacatctctgacc

SEQ ID NO: 258088 - DNA, 20 bp, Artificial Sequence
  Description of Artificial Sequence: Synthetic oligonucleotide
  Target: LAMA2; (-) strand; PAM type: YTN; PAM sequence: CTT
gcatttgtcacatctctgac

SEQ ID NO: 258089 - DNA, 20 bp, Artificial Sequence
  Description of Artificial Sequence: Synthetic oligonucleotide
  Target: LAMA2; (-) strand; PAM type: YTN; PAM sequence: TTA
ccttgcatttgtcacatctc

SEQ ID NO: 258090 - DNA, 20 bp, Artificial Sequence
  Description of Artificial Sequence: Synthetic oligonucleotide
  Target: LAMA2; (-) strand; PAM type: YTN; PAM sequence: CTT
accttgcatttgtcacatct

SEQ ID NO: 258091 - DNA, 20 bp, Artificial Sequence
  Description of Artificial Sequence: Synthetic oligonucleotide
  Target: LAMA2; (-) strand; PAM type: YTN; PAM sequence: CTC
cttaccttgcatttgtcaca

SEQ ID NO: 258092 - DNA, 20 bp, Artificial Sequence
  Description of Artificial Sequence: Synthetic oligonucleotide
  Target: LAMA2; (-) strand; PAM type: YTN; PAM sequence: CTA
ctccttaccttgcatttgtc

SEQ ID NO: 258093 - DNA, 20 bp, Artificial Sequence
  Description of Artificial Sequence: Synthetic oligonucleotide
  Target: LAMA2; (-) strand; PAM type: YTN; PAM sequence: CTC
tactccttaccttgcatttg

SEQ ID NO: 258094 - DNA, 20 bp, Artificial Sequence
  Description of Artificial Sequence: Synthetic oligonucleotide
  Target: LAMA2; (-) strand; PAM type: YTN; PAM sequence: TTA
tgggtcagcctctactcctt

SEQ ID NO: 258095 - DNA, 20 bp, Artificial Sequence
  Description of Artificial Sequence: Synthetic oligonucleotide
  Target: LAMA2; (-) strand; PAM type: YTN; PAM sequence: TTT
atgggtcagcctctactcct

SEQ ID NO: 258096 - DNA, 20 bp, Artificial Sequence
  Description of Artificial Sequence: Synthetic oligonucleotide
  Target: LAMA2; (-) strand; PAM type: YTN; PAM sequence: CTG
taaggagaaagtaatttatg

SEQ ID NO: 258097 - DNA, 20 bp, Artificial Sequence
  Description of Artificial Sequence: Synthetic oligonucleotide
  Target: LAMA2; (-) strand; PAM type: YTN; PAM sequence: TTA
atatacgaaggtatacaaaa

SEQ ID NO: 258098 - DNA, 20 bp, Artificial Sequence
  Description of Artificial Sequence: Synthetic oligonucleotide
  Target: LAMA2; (-) strand; PAM type: YTN; PAM sequence: TTT
aatatacgaaggtatacaaa

SEQ ID NO: 258099 - DNA, 20 bp, Artificial Sequence
  Description of Artificial Sequence: Synthetic oligonucleotide
  Target: LAMA2; (-) strand; PAM type: YTN; PAM sequence: TTT
taatatacgaaggtatacaa

SEQ ID NO: 258100 - DNA, 20 bp, Artificial Sequence
  Description of Artificial Sequence: Synthetic oligonucleotide
  Target: LAMA2; (-) strand; PAM type: YTN; PAM sequence: CTT
ttaatatacgaaggtataca

SEQ ID NO: 258101 - DNA, 20 bp, Artificial Sequence
  Description of Artificial Sequence: Synthetic oligonucleotide
  Target: LAMA2; (-) strand; PAM type: YTN; PAM sequence: TTC
cttttaatatacgaaggtat

SEQ ID NO: 258102 - DNA, 20 bp, Artificial Sequence
  Description of Artificial Sequence: Synthetic oligonucleotide
  Target: LAMA2; (-) strand; PAM type: YTN; PAM sequence: CTT
ccttttaatatacgaaggta

SEQ ID NO: 258103 - DNA, 20 bp, Artificial Sequence
  Description of Artificial Sequence: Synthetic oligonucleotide
  Target: LAMA2; (-) strand; PAM type: YTN; PAM sequence: TTA
gataatcccaaaccttcctt

SEQ ID NO: 258104 - DNA, 20 bp, Artificial Sequence
  Description of Artificial Sequence: Synthetic oligonucleotide
  Target: LAMA2; (-) strand; PAM type: YTN; PAM sequence: TTG
tagaattagataatcccaaa

SEQ ID NO: 258105 - DNA, 20 bp, Artificial Sequence
  Description of Artificial Sequence: Synthetic oligonucleotide
  Target: LAMA2; (-) strand; PAM type: YTN; PAM sequence: TTC
aattgtagaattagataatc

SEQ ID NO: 258106 - DNA, 20 bp, Artificial Sequence
  Description of Artificial Sequence: Synthetic oligonucleotide
  Target: LAMA2; (-) strand; PAM type: YTN; PAM sequence: TTT
caattgtagaattagataat

SEQ ID NO: 258107 - DNA, 20 bp, Artificial Sequence
  Description of Artificial Sequence: Synthetic oligonucleotide
  Target: LAMA2; (-) strand; PAM type: YTN; PAM sequence: CTG
atcacagtcatttcaattgt

SEQ ID NO: 258108 - DNA, 20 bp, Artificial Sequence
  Description of Artificial Sequence: Synthetic oligonucleotide
  Target: LAMA2; (-) strand; PAM type: YTN; PAM sequence: TTC
actgatcacagtcatttcaa

SEQ ID NO: 258109 - DNA, 20 bp, Artificial Sequence
  Description of Artificial Sequence: Synthetic oligonucleotide
  Target: LAMA2; (-) strand; PAM type: YTN; PAM sequence: TTT
cactgatcacagtcatttca

SEQ ID NO: 258110 - DNA, 20 bp, Artificial Sequence
  Description of Artificial Sequence: Synthetic oligonucleotide
  Target: LAMA2; (-) strand; PAM type: YTN; PAM sequence: TTT
tcactgatcacagtcatttc

SEQ ID NO: 258111 - DNA, 20 bp, Artificial Sequence
  Description of Artificial Sequence: Synthetic oligonucleotide
  Target: LAMA2; (-) strand; PAM type: YTN; PAM sequence: CTT
ttcactgatcacagtcattt

SEQ ID NO: 258112 - DNA, 20 bp, Artificial Sequence
  Description of Artificial Sequence: Synthetic oligonucleotide
  Target: LAMA2; (-) strand; PAM type: YTN; PAM sequence: TTG
aaaaaaacttttcactgatc

SEQ ID NO: 258113 - DNA, 20 bp, Artificial Sequence
  Description of Artificial Sequence: Synthetic oligonucleotide
  Target: LAMA2; (-) strand; PAM type: YTN; PAM sequence: TTT
gaaaaaaacttttcactgat

SEQ ID NO: 258114 - DNA, 20 bp, Artificial Sequence
  Description of Artificial Sequence: Synthetic oligonucleotide
  Target: LAMA2; (-) strand; PAM type: YTN; PAM sequence: CTA
gtttgaaaaaaacttttcac

SEQ ID NO: 258115 - DNA, 20 bp, Artificial Sequence
  Description of Artificial Sequence: Synthetic oligonucleotide
  Target: LAMA2; (-) strand; PAM type: YTN; PAM sequence: TTC
tagtttgaaaaaaacttttc

SEQ ID NO: 258116 - DNA, 20 bp, Artificial Sequence
  Description of Artificial Sequence: Synthetic oligonucleotide
  Target: LAMA2; (-) strand; PAM type: YTN; PAM sequence: TTG
ttctagtttgaaaaaaactt

SEQ ID NO: 258117 - DNA, 20 bp, Artificial Sequence
  Description of Artificial Sequence: Synthetic oligonucleotide
  Target: LAMA2; (-) strand; PAM type: YTN; PAM sequence: TTT
gttctagtttgaaaaaaact

SEQ ID NO: 258118 - DNA, 20 bp, Artificial Sequence
  Description of Artificial Sequence: Synthetic oligonucleotide
  Target: LAMA2; (-) strand; PAM type: YTN; PAM sequence: TTT
tgttctagtttgaaaaaaac

SEQ ID NO: 258119 - DNA, 20 bp, Artificial Sequence
  Description of Artificial Sequence: Synthetic oligonucleotide
  Target: LAMA2; (-) strand; PAM type: YTN; PAM sequence: TTA
aggtcaaatggtaatgtaca

SEQ ID NO: 258120 - DNA, 20 bp, Artificial Sequence
  Description of Artificial Sequence: Synthetic oligonucleotide
  Target: LAMA2; (-) strand; PAM type: YTN; PAM sequence: TTT
aaggtcaaatggtaatgtac

SEQ ID NO: 258121 - DNA, 20 bp, Artificial Sequence
  Description of Artificial Sequence: Synthetic oligonucleotide
  Target: LAMA2; (-) strand; PAM type: YTN; PAM sequence: CTG
ccaaaaaaaaatgtttaagg

SEQ ID NO: 258122 - DNA, 20 bp, Artificial Sequence
  Description of Artificial Sequence: Synthetic oligonucleotide
  Target: LAMA2; (-) strand; PAM type: YTN; PAM sequence: TTC
actgccaaaaaaaaatgttt

SEQ ID NO: 258123 - DNA, 20 bp, Artificial Sequence
  Description of Artificial Sequence: Synthetic oligonucleotide
  Target: LAMA2; (-) strand; PAM type: YTN; PAM sequence: TTA
aagcgaatataatacacatt

SEQ ID NO: 258124 - DNA, 20 bp, Artificial Sequence
  Description of Artificial Sequence: Synthetic oligonucleotide
  Target: LAMA2; (-) strand; PAM type: YTN; PAM sequence: CTG
aattaaagcgaatataatac

SEQ ID NO: 258125 - DNA, 20 bp, Artificial Sequence
  Description of Artificial Sequence: Synthetic oligonucleotide
  Target: LAMA2; (-) strand; PAM type: YTN; PAM sequence: TTC
agaaatgtctgaattaaagc

SEQ ID NO: 258126 - DNA, 20 bp, Artificial Sequence
  Description of Artificial Sequence: Synthetic oligonucleotide
  Target: LAMA2; (-) strand; PAM type: YTN; PAM sequence: TTT
cagaaatgtctgaattaaag

SEQ ID NO: 258127 - DNA, 20 bp, Artificial Sequence
  Description of Artificial Sequence: Synthetic oligonucleotide
  Target: LAMA2; (-) strand; PAM type: YTN; PAM sequence: TTG
tttcagaaatgtctgaatta

SEQ ID NO: 258128 - DNA, 20 bp, Artificial Sequence
  Description of Artificial Sequence: Synthetic oligonucleotide
  Target: LAMA2; (-) strand; PAM type: YTN; PAM sequence: TTT
gtttcagaaatgtctgaatt

SEQ ID NO: 258129 - DNA, 20 bp, Artificial Sequence
  Description of Artificial Sequence: Synthetic oligonucleotide
  Target: LAMA2; (-) strand; PAM type: YTN; PAM sequence: CTA
tttgtttcagaaatgtctga

SEQ ID NO: 258130 - DNA, 20 bp, Artificial Sequence
  Description of Artificial Sequence: Synthetic oligonucleotide
  Target: LAMA2; (-) strand; PAM type: YTN; PAM sequence: CTG
ctatttgtttcagaaatgtc

SEQ ID NO: 258131 - DNA, 20 bp, Artificial Sequence
  Description of Artificial Sequence: Synthetic oligonucleotide
  Target: LAMA2; (-) strand; PAM type: YTN; PAM sequence: TTC
gcctgctatttgtttcagaa

SEQ ID NO: 258132 - DNA, 20 bp, Artificial Sequence
  Description of Artificial Sequence: Synthetic oligonucleotide
  Target: LAMA2; (-) strand; PAM type: YTN; PAM sequence: TTA
aattcgcctgctatttgttt

SEQ ID NO: 258133 - DNA, 20 bp, Artificial Sequence
  Description of Artificial Sequence: Synthetic oligonucleotide
  Target: LAMA2; (-) strand; PAM type: YTN; PAM sequence: TTA
agattaaattcgcctgctat

SEQ ID NO: 258134 - DNA, 20 bp, Artificial Sequence
  Description of Artificial Sequence: Synthetic oligonucleotide
  Target: LAMA2; (-) strand; PAM type: YTN; PAM sequence: CTC
cacagattaagattaaattc

SEQ ID NO: 258135 - DNA, 20 bp, Artificial Sequence
  Description of Artificial Sequence: Synthetic oligonucleotide
  Target: LAMA2; (-) strand; PAM type: YTN; PAM sequence: CTG
ccaaaaatgtaaaggcaaag

SEQ ID NO: 258136 - DNA, 20 bp, Artificial Sequence
  Description of Artificial Sequence: Synthetic oligonucleotide
  Target: LAMA2; (-) strand; PAM type: YTN; PAM sequence: TTC
tgccaaaaatgtaaaggcaa

SEQ ID NO: 258137 - DNA, 20 bp, Artificial Sequence
  Description of Artificial Sequence: Synthetic oligonucleotide
  Target: LAMA2; (-) strand; PAM type: YTN; PAM sequence: TTA
ttctgccaaaaatgtaaagg

SEQ ID NO: 258138 - DNA, 20 bp, Artificial Sequence
  Description of Artificial Sequence: Synthetic oligonucleotide
  Target: LAMA2; (-) strand; PAM type: YTN; PAM sequence: TTT
attctgccaaaaatgtaaag

SEQ ID NO: 258139 - DNA, 20 bp, Artificial Sequence
  Description of Artificial Sequence: Synthetic oligonucleotide
  Target: LAMA2; (-) strand; PAM type: YTN; PAM sequence: TTT
tattctgccaaaaatgtaaa

SEQ ID NO: 258140 - DNA, 20 bp, Artificial Sequence
  Description of Artificial Sequence: Synthetic oligonucleotide
  Target: LAMA2; (-) strand; PAM type: YTN; PAM sequence: TTA
caggcatgagccaccgcgcc

SEQ ID NO: 258141 - DNA, 20 bp, Artificial Sequence
  Description of Artificial Sequence: Synthetic oligonucleotide
  Target: LAMA2; (-) strand; PAM type: YTN; PAM sequence: CTG
ggattacaggcatgagccac

SEQ ID NO: 258142 - DNA, 20 bp, Artificial Sequence
  Description of Artificial Sequence: Synthetic oligonucleotide
  Target: LAMA2; (-) strand; PAM type: YTN; PAM sequence: CTC
ccaaagtgctgggattacag

SEQ ID NO: 258143 - DNA, 20 bp, Artificial Sequence
  Description of Artificial Sequence: Synthetic oligonucleotide
  Target: LAMA2; (-) strand; PAM type: YTN; PAM sequence: TTG
gcctcccaaagtgctgggat

SEQ ID NO: 258144 - DNA, 20 bp, Artificial Sequence
  Description of Artificial Sequence: Synthetic oligonucleotide
  Target: LAMA2; (-) strand; PAM type: YTN; PAM sequence: CTT
ggcctcccaaagtgctggga

SEQ ID NO: 258145 - DNA, 20 bp, Artificial Sequence
  Description of Artificial Sequence: Synthetic oligonucleotide
  Target: LAMA2; (-) strand; PAM type: YTN; PAM sequence: CTG
ccttggcctcccaaagtgct

SEQ ID NO: 258146 - DNA, 20 bp, Artificial Sequence
  Description of Artificial Sequence: Synthetic oligonucleotide
  Target: LAMA2; (-) strand; PAM type: YTN; PAM sequence: CTC
gtgatccacctgccttggcc

SEQ ID NO: 258147 - DNA, 20 bp, Artificial Sequence
  Description of Artificial Sequence: Synthetic oligonucleotide
  Target: LAMA2; (-) strand; PAM type: YTN; PAM sequence: CTG
acctcgtgatccacctgcct

SEQ ID NO: 258148 - DNA, 20 bp, Artificial Sequence
  Description of Artificial Sequence: Synthetic oligonucleotide
  Target: LAMA2; (-) strand; PAM type: YTN; PAM sequence: CTC
ctgacctcgtgatccacctg

SEQ ID NO: 258149 - DNA, 20 bp, Artificial Sequence
  Description of Artificial Sequence: Synthetic oligonucleotide
  Target: LAMA2; (-) strand; PAM type: YTN; PAM sequence: TTG
aactcctgacctcgtgatcc

SEQ ID NO: 258150 - DNA, 20 bp, Artificial Sequence
  Description of Artificial Sequence: Synthetic oligonucleotide
  Target: LAMA2; (-) strand; PAM type: YTN; PAM sequence: CTT
gaactcctgacctcgtgatc

SEQ ID NO: 258151 - DNA, 20 bp, Artificial Sequence
  Description of Artificial Sequence: Synthetic oligonucleotide
  Target: LAMA2; (-) strand; PAM type: YTN; PAM sequence: TTC
ttgaactcctgacctcgtga

SEQ ID NO: 258152 - DNA, 20 bp, Artificial Sequence
  Description of Artificial Sequence: Synthetic oligonucleotide
  Target: LAMA2; (-) strand; PAM type: YTN; PAM sequence: CTG
ttcttgaactcctgacctcg

SEQ ID NO: 258153 - DNA, 20 bp, Artificial Sequence
  Description of Artificial Sequence: Synthetic oligonucleotide
  Target: LAMA2; (-) strand; PAM type: YTN; PAM sequence: TTG
gccaggctgttcttgaactc

SEQ ID NO: 258154 - DNA, 20 bp, Artificial Sequence
  Description of Artificial Sequence: Synthetic oligonucleotide
  Target: LAMA2; (-) strand; PAM type: YTN; PAM sequence: CTT
ggccaggctgttcttgaact

SEQ ID NO: 258155 - DNA, 20 bp, Artificial Sequence
  Description of Artificial Sequence: Synthetic oligonucleotide
  Target: LAMA2; (-) strand; PAM type: YTN; PAM sequence: TTC
accatcttggccaggctgtt

SEQ ID NO: 258156 - DNA, 20 bp, Artificial Sequence
  Description of Artificial Sequence: Synthetic oligonucleotide
  Target: LAMA2; (-) strand; PAM type: YTN; PAM sequence: TTT
caccatcttggccaggctgt

SEQ ID NO: 258157 - DNA, 20 bp, Artificial Sequence
  Description of Artificial Sequence: Synthetic oligonucleotide
  Target: LAMA2; (-) strand; PAM type: YTN; PAM sequence: TTA
gcagagatggtgtttcacca

SEQ ID NO: 258158 - DNA, 20 bp, Artificial Sequence
  Description of Artificial Sequence: Synthetic oligonucleotide
  Target: LAMA2; (-) strand; PAM type: YTN; PAM sequence: TTT
agcagagatggtgtttcacc

SEQ ID NO: 258159 - DNA, 20 bp, Artificial Sequence
  Description of Artificial Sequence: Synthetic oligonucleotide
  Target: LAMA2; (-) strand; PAM type: YTN; PAM sequence: TTT
tagcagagatggtgtttcac

SEQ ID NO: 258160 - DNA, 20 bp, Artificial Sequence
  Description of Artificial Sequence: Synthetic oligonucleotide
  Target: LAMA2; (-) strand; PAM type: YTN; PAM sequence: TTT
ttagcagagatggtgtttca

SEQ ID NO: 258161 - DNA, 20 bp, Artificial Sequence
  Description of Artificial Sequence: Synthetic oligonucleotide
  Target: LAMA2; (-) strand; PAM type: YTN; PAM sequence: TTG
tagtttttagcagagatggt

SEQ ID NO: 258162 - DNA, 20 bp, Artificial Sequence
  Description of Artificial Sequence: Synthetic oligonucleotide
  Target: LAMA2; (-) strand; PAM type: YTN; PAM sequence: TTT
gtagtttttagcagagatgg

SEQ ID NO: 258163 - DNA, 20 bp, Artificial Sequence
  Description of Artificial Sequence: Synthetic oligonucleotide
  Target: LAMA2; (-) strand; PAM type: YTN; PAM sequence: TTT
tgtagtttttagcagagatg

SEQ ID NO: 258164 - DNA, 20 bp, Artificial Sequence
  Description of Artificial Sequence: Synthetic oligonucleotide
  Target: LAMA2; (-) strand; PAM type: YTN; PAM sequence: TTT
ttgtagtttttagcagagat

SEQ ID NO: 258165 - DNA, 20 bp, Artificial Sequence
  Description of Artificial Sequence: Synthetic oligonucleotide
  Target: LAMA2; (-) strand; PAM type: YTN; PAM sequence: CTG
atttttgtagtttttagcag

SEQ ID NO: 258166 - DNA, 20 bp, Artificial Sequence
  Description of Artificial Sequence: Synthetic oligonucleotide
  Target: LAMA2; (-) strand; PAM type: YTN; PAM sequence: CTG
gctgatttttgtagttttta

SEQ ID NO: 258167 - DNA, 20 bp, Artificial Sequence
  Description of Artificial Sequence: Synthetic oligonucleotide
  Target: LAMA2; (-) strand; PAM type: YTN; PAM sequence: CTG
ccaccgtgcctggctgattt

SEQ ID NO: 258168 - DNA, 20 bp, Artificial Sequence
  Description of Artificial Sequence: Synthetic oligonucleotide
  Target: LAMA2; (-) strand; PAM type: YTN; PAM sequence: TTA
caggcacctgccaccgtgcc

SEQ ID NO: 258169 - DNA, 20 bp, Artificial Sequence
  Description of Artificial Sequence: Synthetic oligonucleotide
  Target: LAMA2; (-) strand; PAM type: YTN; PAM sequence: CTG
ggattacaggcacctgccac

SEQ ID NO: 258170 - DNA, 20 bp, Artificial Sequence
  Description of Artificial Sequence: Synthetic oligonucleotide
  Target: LAMA2; (-) strand; PAM type: YTN; PAM sequence: CTG
agtagctgggattacaggca

SEQ ID NO: 258171 - DNA, 20 bp, Artificial Sequence
  Description of Artificial Sequence: Synthetic oligonucleotide
  Target: LAMA2; (-) strand; PAM type: YTN; PAM sequence: CTC
ctgagtagctgggattacag

SEQ ID NO: 258172 - DNA, 20 bp, Artificial Sequence
  Description of Artificial Sequence: Synthetic oligonucleotide
  Target: LAMA2; (-) strand; PAM type: YTN; PAM sequence: CTC
agcctcctgagtagctggga

SEQ ID NO: 258173 - DNA, 20 bp, Artificial Sequence
  Description of Artificial Sequence: Synthetic oligonucleotide
  Target: LAMA2; (-) strand; PAM type: YTN; PAM sequence: CTC
ccgcctcagcctcctgagta

SEQ ID NO: 258174 - DNA, 20 bp, Artificial Sequence
  Description of Artificial Sequence: Synthetic oligonucleotide
  Target: LAMA2; (-) strand; PAM type: YTN; PAM sequence: TTC
tcccgcctcagcctcctgag

SEQ ID NO: 258175 - DNA, 20 bp, Artificial Sequence
  Description of Artificial Sequence: Synthetic oligonucleotide
  Target: LAMA2; (-) strand; PAM type: YTN; PAM sequence: TTC
aagcgattctcccgcctcag

SEQ ID NO: 258176 - DNA, 20 bp, Artificial Sequence
  Description of Artificial Sequence: Synthetic oligonucleotide
  Target: LAMA2; (-) strand; PAM type: YTN; PAM sequence: CTG
ccacccaggttcaagcgatt

SEQ ID NO: 258177 - DNA, 20 bp, Artificial Sequence
  Description of Artificial Sequence: Synthetic oligonucleotide
  Target: LAMA2; (-) strand; PAM type: YTN; PAM sequence: CTC
tgccacccaggttcaagcga

SEQ ID NO: 258178 - DNA, 20 bp, Artificial Sequence
  Description of Artificial Sequence: Synthetic oligonucleotide
  Target: LAMA2; (-) strand; PAM type: YTN; PAM sequence: CTG
caacctctgccacccaggtt

SEQ ID NO: 258179 - DNA, 20 bp, Artificial Sequence
  Description of Artificial Sequence: Synthetic oligonucleotide
  Target: LAMA2; (-) strand; PAM type: YTN; PAM sequence: CTC
actgcaacctctgccaccca

SEQ ID NO: 258180 - DNA, 20 bp, Artificial Sequence
  Description of Artificial Sequence: Synthetic oligonucleotide
  Target: LAMA2; (-) strand; PAM type: YTN; PAM sequence: CTC
ggctcactgcaacctctgcc

SEQ ID NO: 258181 - DNA, 20 bp, Artificial Sequence
  Description of Artificial Sequence: Synthetic oligonucleotide
  Target: LAMA2; (-) strand; PAM type: YTN; PAM sequence: CTA
tctcggctcactgcaacctc

SEQ ID NO: 258182 - DNA, 20 bp, Artificial Sequence
  Description of Artificial Sequence: Synthetic oligonucleotide
  Target: LAMA2; (-) strand; PAM type: YTN; PAM sequence: CTG
gagtgcagtggcactatctc

SEQ ID NO: 258183 - DNA, 20 bp, Artificial Sequence
  Description of Artificial Sequence: Synthetic oligonucleotide
  Target: LAMA2; (-) strand; PAM type: YTN; PAM sequence: CTC
ggtcgcccaggctggagtgc

SEQ ID NO: 258184 - DNA, 20 bp, Artificial Sequence
  Description of Artificial Sequence: Synthetic oligonucleotide
  Target: LAMA2; (-) strand; PAM type: YTN; PAM sequence: CTC
actcggtcgcccaggctgga

SEQ ID NO: 258185 - DNA, 20 bp, Artificial Sequence
  Description of Artificial Sequence: Synthetic oligonucleotide
  Target: LAMA2; (-) strand; PAM type: YTN; PAM sequence: TTG
agatggagtctcactcggtc

SEQ ID NO: 258186 - DNA, 20 bp, Artificial Sequence
  Description of Artificial Sequence: Synthetic oligonucleotide
  Target: LAMA2; (-) strand; PAM type: YTN; PAM sequence: TTT
gagatggagtctcactcggt

SEQ ID NO: 258187 - DNA, 20 bp, Artificial Sequence
  Description of Artificial Sequence: Synthetic oligonucleotide
  Target: LAMA2; (-) strand; PAM type: YTN; PAM sequence: TTT
tgagatggagtctcactcgg

SEQ ID NO: 258188 - DNA, 20 bp, Artificial Sequence
  Description of Artificial Sequence: Synthetic oligonucleotide
  Target: LAMA2; (-) strand; PAM type: YTN; PAM sequence: TTT
ttgagatggagtctcactcg

SEQ ID NO: 258189 - DNA, 20 bp, Artificial Sequence
  Description of Artificial Sequence: Synthetic oligonucleotide
  Target: LAMA2; (-) strand; PAM type: YTN; PAM sequence: TTT
tttgagatggagtctcactc

SEQ ID NO: 258190 - DNA, 20 bp, Artificial Sequence
  Description of Artificial Sequence: Synthetic oligonucleotide
  Target: LAMA2; (-) strand; PAM type: YTN; PAM sequence: TTG
ttttttgagatggagtctca

SEQ ID NO: 258191 - DNA, 20 bp, Artificial Sequence
  Description of Artificial Sequence: Synthetic oligonucleotide
  Target: LAMA2; (-) strand; PAM type: YTN; PAM sequence: TTT
gttttttgagatggagtctc

SEQ ID NO: 258192 - DNA, 20 bp, Artificial Sequence
  Description of Artificial Sequence: Synthetic oligonucleotide
  Target: LAMA2; (-) strand; PAM type: YTN; PAM sequence: TTT
tgttttttgagatggagtct

SEQ ID NO: 258193 - DNA, 20 bp, Artificial Sequence
  Description of Artificial Sequence: Synthetic oligonucleotide
  Target: LAMA2; (-) strand; PAM type: YTN; PAM sequence: TTG
ttttgttttttgagatggag

SEQ ID NO: 258194 - DNA, 20 bp, Artificial Sequence
  Description of Artificial Sequence: Synthetic oligonucleotide
  Target: LAMA2; (-) strand; PAM type: YTN; PAM sequence: TTT
gttttgttttttgagatgga

SEQ ID NO: 258195 - DNA, 20 bp, Artificial Sequence
  Description of Artificial Sequence: Synthetic oligonucleotide
  Target: LAMA2; (-) strand; PAM type: YTN; PAM sequence: TTG
gtttgttttgttttttgaga

SEQ ID NO: 258196 - DNA, 20 bp, Artificial Sequence
  Description of Artificial Sequence: Synthetic oligonucleotide
  Target: LAMA2; (-) strand; PAM type: YTN; PAM sequence: TTT
ggtttgttttgttttttgag

SEQ ID NO: 258197 - DNA, 20 bp, Artificial Sequence
  Description of Artificial Sequence: Synthetic oligonucleotide
  Target: LAMA2; (-) strand; PAM type: YTN; PAM sequence: TTT
tggtttgttttgttttttga

SEQ ID NO: 258198 - DNA, 20 bp, Artificial Sequence
  Description of Artificial Sequence: Synthetic oligonucleotide
  Target: LAMA2; (-) strand; PAM type: YTN; PAM sequence: CTA
aaaagcaaagggagtaacat

SEQ ID NO: 258199 - DNA, 20 bp, Artificial Sequence
  Description of Artificial Sequence: Synthetic oligonucleotide
  Target: LAMA2; (-) strand; PAM type: YTN; PAM sequence: TTG
ctaaaaagcaaagggagtaa

SEQ ID NO: 258200 - DNA, 20 bp, Artificial Sequence
  Description of Artificial Sequence: Synthetic oligonucleotide
  Target: LAMA2; (-) strand; PAM type: YTN; PAM sequence: TTT
gctaaaaagcaaagggagta

SEQ ID NO: 258201 - DNA, 20 bp, Artificial Sequence
  Description of Artificial Sequence: Synthetic oligonucleotide
  Target: LAMA2; (-) strand; PAM type: YTN; PAM sequence: CTA
gaagaaggtgtttgctaaaa

SEQ ID NO: 258202 - DNA, 20 bp, Artificial Sequence
  Description of Artificial Sequence: Synthetic oligonucleotide
  Target: LAMA2; (-) strand; PAM type: YTN; PAM sequence: TTA
aatgatggaactagaagaag

SEQ ID NO: 258203 - DNA, 20 bp, Artificial Sequence
  Description of Artificial Sequence: Synthetic oligonucleotide
  Target: LAMA2; (-) strand; PAM type: YTN; PAM sequence: TTT
aaatgatggaactagaagaa

SEQ ID NO: 258204 - DNA, 20 bp, Artificial Sequence
  Description of Artificial Sequence: Synthetic oligonucleotide
  Target: LAMA2; (-) strand; PAM type: YTN; PAM sequence: TTT
taaatgatggaactagaaga

SEQ ID NO: 258205 - DNA, 20 bp, Artificial Sequence
  Description of Artificial Sequence: Synthetic oligonucleotide
  Target: LAMA2; (-) strand; PAM type: YTN; PAM sequence: CTT
ttaaatgatggaactagaag

SEQ ID NO: 258206 - DNA, 20 bp, Artificial Sequence
  Description of Artificial Sequence: Synthetic oligonucleotide
  Target: LAMA2; (-) strand; PAM type: YTN; PAM sequence: CTC
acaggaagtagcttttaaat

SEQ ID NO: 258207 - DNA, 20 bp, Artificial Sequence
  Description of Artificial Sequence: Synthetic oligonucleotide
  Target: LAMA2; (-) strand; PAM type: YTN; PAM sequence: CTG
ctcacaggaagtagctttta

SEQ ID NO: 258208 - DNA, 20 bp, Artificial Sequence
  Description of Artificial Sequence: Synthetic oligonucleotide
  Target: LAMA2; (-) strand; PAM type: YTN; PAM sequence: TTA
ggtagactgctcacaggaag

SEQ ID NO: 258209 - DNA, 20 bp, Artificial Sequence
  Description of Artificial Sequence: Synthetic oligonucleotide
  Target: LAMA2; (-) strand; PAM type: YTN; PAM sequence: TTC
cattaggtagactgctcaca

SEQ ID NO: 258210 - DNA, 20 bp, Artificial Sequence
  Description of Artificial Sequence: Synthetic oligonucleotide
  Target: LAMA2; (-) strand; PAM type: YTN; PAM sequence: CTT
ccattaggtagactgctcac

SEQ ID NO: 258211 - DNA, 20 bp, Artificial Sequence
  Description of Artificial Sequence: Synthetic oligonucleotide
  Target: LAMA2; (-) strand; PAM type: YTN; PAM sequence: CTG
aaacttccattaggtagact

SEQ ID NO: 258212 - DNA, 20 bp, Artificial Sequence
  Description of Artificial Sequence: Synthetic oligonucleotide
  Target: LAMA2; (-) strand; PAM type: YTN; PAM sequence: CTA
ctgaaacttccattaggtag

SEQ ID NO: 258213 - DNA, 20 bp, Artificial Sequence
  Description of Artificial Sequence: Synthetic oligonucleotide
  Target: LAMA2; (-) strand; PAM type: YTN; PAM sequence: CTC
tactgaaacttccattaggt

SEQ ID NO: 258214 - DNA, 20 bp, Artificial Sequence
  Description of Artificial Sequence: Synthetic oligonucleotide
  Target: LAMA2; (-) strand; PAM type: YTN; PAM sequence: TTC
tctactgaaacttccattag

SEQ ID NO: 258215 - DNA, 20 bp, Artificial Sequence
  Description of Artificial Sequence: Synthetic oligonucleotide
  Target: LAMA2; (-) strand; PAM type: YTN; PAM sequence: CTT
ctctactgaaacttccatta

SEQ ID NO: 258216 - DNA, 20 bp, Artificial Sequence
  Description of Artificial Sequence: Synthetic oligonucleotide
  Target: LAMA2; (-) strand; PAM type: YTN; PAM sequence: TTA
acttctctactgaaacttcc

SEQ ID NO: 258217 - DNA, 20 bp, Artificial Sequence
  Description of Artificial Sequence: Synthetic oligonucleotide
  Target: LAMA2; (-) strand; PAM type: YTN; PAM sequence: TTG
attaacttctctactgaaac

SEQ ID NO: 258218 - DNA, 20 bp, Artificial Sequence
  Description of Artificial Sequence: Synthetic oligonucleotide
  Target: LAMA2; (-) strand; PAM type: YTN; PAM sequence: CTT
gattaacttctctactgaaa

SEQ ID NO: 258219 - DNA, 20 bp, Artificial Sequence
  Description of Artificial Sequence: Synthetic oligonucleotide
  Target: LAMA2; (-) strand; PAM type: YTN; PAM sequence: TTA
aaaatatcttgattaacttc

SEQ ID NO: 258220 - DNA, 20 bp, Artificial Sequence
  Description of Artificial Sequence: Synthetic oligonucleotide
  Target: LAMA2; (-) strand; PAM type: YTN; PAM sequence: TTT
aaaaatatcttgattaactt

SEQ ID NO: 258221 - DNA, 20 bp, Artificial Sequence
  Description of Artificial Sequence: Synthetic oligonucleotide
  Target: LAMA2; (-) strand; PAM type: YTN; PAM sequence: CTT
taaaaatatcttgattaact

SEQ ID NO: 258222 - DNA, 20 bp, Artificial Sequence
  Description of Artificial Sequence: Synthetic oligonucleotide
  Target: LAMA2; (-) strand; PAM type: YTN; PAM sequence: TTA
gcaaaataatgcatctttaa

SEQ ID NO: 258223 - DNA, 20 bp, Artificial Sequence
  Description of Artificial Sequence: Synthetic oligonucleotide
  Target: LAMA2; (-) strand; PAM type: YTN; PAM sequence: TTT
agcaaaataatgcatcttta

SEQ ID NO: 258224 - DNA, 20 bp, Artificial Sequence
  Description of Artificial Sequence: Synthetic oligonucleotide
  Target: LAMA2; (-) strand; PAM type: YTN; PAM sequence: TTT
tagcaaaataatgcatcttt

SEQ ID NO: 258225 - DNA, 20 bp, Artificial Sequence
  Description of Artificial Sequence: Synthetic oligonucleotide
  Target: LAMA2; (-) strand; PAM type: YTN; PAM sequence: TTG
ttttagcaaaataatgcatc

SEQ ID NO: 258226 - DNA, 20 bp, Artificial Sequence
  Description of Artificial Sequence: Synthetic oligonucleotide
  Target: LAMA2; (-) strand; PAM type: YTN; PAM sequence: TTT
gttttagcaaaataatgcat

SEQ ID NO: 258227 - DNA, 20 bp, Artificial Sequence
  Description of Artificial Sequence: Synthetic oligonucleotide
  Target: LAMA2; (-) strand; PAM type: YTN; PAM sequence: TTT
tgttttagcaaaataatgca

SEQ ID NO: 258228 - DNA, 20 bp, Artificial Sequence
  Description of Artificial Sequence: Synthetic oligonucleotide
  Target: LAMA2; (-) strand; PAM type: YTN; PAM sequence: TTG
aatattttgttttagcaaaa

SEQ ID NO: 258229 - DNA, 20 bp, Artificial Sequence
  Description of Artificial Sequence: Synthetic oligonucleotide
  Target: LAMA2; (-) strand; PAM type: YTN; PAM sequence: TTA
attgaatattttgttttagc

SEQ ID NO: 258230 - DNA, 20 bp, Artificial Sequence
  Description of Artificial Sequence: Synthetic oligonucleotide
  Target: LAMA2; (-) strand; PAM type: YTN; PAM sequence: TTT
aattgaatattttgttttag

SEQ ID NO: 258231 - DNA, 20 bp, Artificial Sequence
  Description of Artificial Sequence: Synthetic oligonucleotide
  Target: LAMA2; (-) strand; PAM type: YTN; PAM sequence: TTT
taattgaatattttgtttta

SEQ ID NO: 258232 - DNA, 20 bp, Artificial Sequence
  Description of Artificial Sequence: Synthetic oligonucleotide
  Target: LAMA2; (-) strand; PAM type: YTN; PAM sequence: CTG
tattttaattgaatattttg

SEQ ID NO: 258233 - DNA, 20 bp, Artificial Sequence
  Description of Artificial Sequence: Synthetic oligonucleotide
  Target: LAMA2; (-) strand; PAM type: YTN; PAM sequence: CTG
agaacaacatgctgtatttt

SEQ ID NO: 258234 - DNA, 20 bp, Artificial Sequence
  Description of Artificial Sequence: Synthetic oligonucleotide
  Target: LAMA2; (-) strand; PAM type: YTN; PAM sequence: TTC
agggactgagaacaacatgc

SEQ ID NO: 258235 - DNA, 20 bp, Artificial Sequence
  Description of Artificial Sequence: Synthetic oligonucleotide
  Target: LAMA2; (-) strand; PAM type: YTN; PAM sequence: CTG
aaagcagggcaatcggtatg

SEQ ID NO: 258236 - DNA, 20 bp, Artificial Sequence
  Description of Artificial Sequence: Synthetic oligonucleotide
  Target: LAMA2; (-) strand; PAM type: YTN; PAM sequence: TTG
ccatactgaaagcagggcaa

SEQ ID NO: 258237 - DNA, 20 bp, Artificial Sequence
  Description of Artificial Sequence: Synthetic oligonucleotide
  Target: LAMA2; (-) strand; PAM type: YTN; PAM sequence: CTT
gccatactgaaagcagggca

SEQ ID NO: 258238 - DNA, 20 bp, Artificial Sequence
  Description of Artificial Sequence: Synthetic oligonucleotide
  Target: LAMA2; (-) strand; PAM type: YTN; PAM sequence: TTG
cttgccatactgaaagcagg

SEQ ID NO: 258239 - DNA, 20 bp, Artificial Sequence
  Description of Artificial Sequence: Synthetic oligonucleotide
  Target: LAMA2; (-) strand; PAM type: YTN; PAM sequence: CTG
aagttgcttgccatactgaa

SEQ ID NO: 258240 - DNA, 20 bp, Artificial Sequence
  Description of Artificial Sequence: Synthetic oligonucleotide
  Target: LAMA2; (-) strand; PAM type: YTN; PAM sequence: CTC
atggaggaatctgaagttgc

SEQ ID NO: 258241 - DNA, 20 bp, Artificial Sequence
  Description of Artificial Sequence: Synthetic oligonucleotide
  Target: LAMA2; (-) strand; PAM type: YTN; PAM sequence: CTG
tccaccctcatggaggaatc

SEQ ID NO: 258242 - DNA, 20 bp, Artificial Sequence
  Description of Artificial Sequence: Synthetic oligonucleotide
  Target: LAMA2; (-) strand; PAM type: YTN; PAM sequence: CTA
gagcaaatctgtccaccctc

SEQ ID NO: 258243 - DNA, 20 bp, Artificial Sequence
  Description of Artificial Sequence: Synthetic oligonucleotide
  Target: LAMA2; (-) strand; PAM type: YTN; PAM sequence: TTG
tgaaagcgctagagcaaatc

SEQ ID NO: 258244 - DNA, 20 bp, Artificial Sequence
  Description of Artificial Sequence: Synthetic oligonucleotide
  Target: LAMA2; (-) strand; PAM type: YTN; PAM sequence: TTT
gtgaaagcgctagagcaaat

SEQ ID NO: 258245 - DNA, 20 bp, Artificial Sequence
  Description of Artificial Sequence: Synthetic oligonucleotide
  Target: LAMA2; (-) strand; PAM type: YTN; PAM sequence: TTT
tgtgaaagcgctagagcaaa

SEQ ID NO: 258246 - DNA, 20 bp, Artificial Sequence
  Description of Artificial Sequence: Synthetic oligonucleotide
  Target: LAMA2; (-) strand; PAM type: YTN; PAM sequence: TTT
ttgtgaaagcgctagagcaa

SEQ ID NO: 258247 - DNA, 20 bp, Artificial Sequence
  Description of Artificial Sequence: Synthetic oligonucleotide
  Target: LAMA2; (-) strand; PAM type: YTN; PAM sequence: TTA
tcacaaatacaatgtatttt

SEQ ID NO: 258248 - DNA, 20 bp, Artificial Sequence
  Description of Artificial Sequence: Synthetic oligonucleotide
  Target: LAMA2; (-) strand; PAM type: YTN; PAM sequence: TTT
atcacaaatacaatgtattt

SEQ ID NO: 258249 - DNA, 20 bp, Artificial Sequence
  Description of Artificial Sequence: Synthetic oligonucleotide
  Target: LAMA2; (-) strand; PAM type: YTN; PAM sequence: CTT
tatcacaaatacaatgtatt

SEQ ID NO: 258250 - DNA, 20 bp, Artificial Sequence
  Description of Artificial Sequence: Synthetic oligonucleotide
  Target: LAMA2; (-) strand; PAM type: YTN; PAM sequence: CTG
tctttatcacaaatacaatg

SEQ ID NO: 258251 - DNA, 20 bp, Artificial Sequence
  Description of Artificial Sequence: Synthetic oligonucleotide
  Target: LAMA2; (-) strand; PAM type: YTN; PAM sequence: TTA
gctgtctttatcacaaatac

SEQ ID NO: 258252 - DNA, 20 bp, Artificial Sequence
  Description of Artificial Sequence: Synthetic oligonucleotide
  Target: LAMA2; (-) strand; PAM type: YTN; PAM sequence: CTT
agctgtctttatcacaaata

SEQ ID NO: 258253 - DNA, 20 bp, Artificial Sequence
  Description of Artificial Sequence: Synthetic oligonucleotide
  Target: LAMA2; (-) strand; PAM type: YTN; PAM sequence: CTG
cttagctgtctttatcacaa

SEQ ID NO: 258254 - DNA, 20 bp, Artificial Sequence
  Description of Artificial Sequence: Synthetic oligonucleotide
  Target: LAMA2; (-) strand; PAM type: YTN; PAM sequence: TTC
tgcttagctgtctttatcac

SEQ ID NO: 258255 - DNA, 20 bp, Artificial Sequence
  Description of Artificial Sequence: Synthetic oligonucleotide
  Target: LAMA2; (-) strand; PAM type: YTN; PAM sequence: CTT
ctgcttagctgtctttatca

SEQ ID NO: 258256 - DNA, 20 bp, Artificial Sequence
  Description of Artificial Sequence: Synthetic oligonucleotide
  Target: LAMA2; (-) strand; PAM type: YTN; PAM sequence: TTG
cttctgcttagctgtcttta

SEQ ID NO: 258257 - DNA, 20 bp, Artificial Sequence
  Description of Artificial Sequence: Synthetic oligonucleotide
  Target: LAMA2; (-) strand; PAM type: YTN; PAM sequence: CTT
gcttctgcttagctgtcttt

SEQ ID NO: 258258 - DNA, 20 bp, Artificial Sequence
  Description of Artificial Sequence: Synthetic oligonucleotide
  Target: LAMA2; (-) strand; PAM type: YTN; PAM sequence: TTG
acatcggagaaatgcttgct

SEQ ID NO: 258259 - DNA, 20 bp, Artificial Sequence
  Description of Artificial Sequence: Synthetic oligonucleotide
  Target: LAMA2; (-) strand; PAM type: YTN; PAM sequence: TTT
gacatcggagaaatgcttgc

SEQ ID NO: 258260 - DNA, 20 bp, Artificial Sequence
  Description of Artificial Sequence: Synthetic oligonucleotide
  Target: LAMA2; (-) strand; PAM type: YTN; PAM sequence: CTA
cagtaaggccagtttgacat

SEQ ID NO: 258261 - DNA, 20 bp, Artificial Sequence
  Description of Artificial Sequence: Synthetic oligonucleotide
  Target: LAMA2; (-) strand; PAM type: YTN; PAM sequence: TTC
ctacagtaaggccagtttga

SEQ ID NO: 258262 - DNA, 20 bp, Artificial Sequence
  Description of Artificial Sequence: Synthetic oligonucleotide
  Target: LAMA2; (-) strand; PAM type: YTN; PAM sequence: CTT
cctacagtaaggccagtttg

SEQ ID NO: 258263 - DNA, 20 bp, Artificial Sequence
  Description of Artificial Sequence: Synthetic oligonucleotide
  Target: LAMA2; (-) strand; PAM type: YTN; PAM sequence: TTC
aaacttcctacagtaaggcc

SEQ ID NO: 258264 - DNA, 20 bp, Artificial Sequence
  Description of Artificial Sequence: Synthetic oligonucleotide
  Target: LAMA2; (-) strand; PAM type: YTN; PAM sequence: TTT
caaacttcctacagtaaggc

SEQ ID NO: 258265 - DNA, 20 bp, Artificial Sequence
  Description of Artificial Sequence: Synthetic oligonucleotide
  Target: LAMA2; (-) strand; PAM type: YTN; PAM sequence: TTT
tcaaacttcctacagtaagg

SEQ ID NO: 258266 - DNA, 20 bp, Artificial Sequence
  Description of Artificial Sequence: Synthetic oligonucleotide
  Target: LAMA2; (-) strand; PAM type: YTN; PAM sequence: TTC
aagagacagaagcagatgat

SEQ ID NO: 258267 - DNA, 20 bp, Artificial Sequence
  Description of Artificial Sequence: Synthetic oligonucleotide
  Target: LAMA2; (-) strand; PAM type: YTN; PAM sequence: TTA
ttcaagagacagaagcagat

SEQ ID NO: 258268 - DNA, 20 bp, Artificial Sequence
  Description of Artificial Sequence: Synthetic oligonucleotide
  Target: LAMA2; (-) strand; PAM type: YTN; PAM sequence: TTA
aaaaccaaccataaaataaa

SEQ ID NO: 258269 - DNA, 20 bp, Artificial Sequence
  Description of Artificial Sequence: Synthetic oligonucleotide
  Target: LAMA2; (-) strand; PAM type: YTN; PAM sequence: TTT
aaaaaccaaccataaaataa

SEQ ID NO: 258270 - DNA, 20 bp, Artificial Sequence
  Description of Artificial Sequence: Synthetic oligonucleotide
  Target: LAMA2; (-) strand; PAM type: YTN; PAM sequence: CTT
taaaaaccaaccataaaata

SEQ ID NO: 258271 - DNA, 20 bp, Artificial Sequence
  Description of Artificial Sequence: Synthetic oligonucleotide
  Target: LAMA2; (-) strand; PAM type: YTN; PAM sequence: TTG
ggctttaaaaaccaaccata

SEQ ID NO: 258272 - DNA, 20 bp, Artificial Sequence
  Description of Artificial Sequence: Synthetic oligonucleotide
  Target: LAMA2; (-) strand; PAM type: YTN; PAM sequence: CTG
gatcccgccacatattgggc

SEQ ID NO: 258273 - DNA, 20 bp, Artificial Sequence
  Description of Artificial Sequence: Synthetic oligonucleotide
  Target: LAMA2; (-) strand; PAM type: YTN; PAM sequence: CTC
tggatcccgccacatattgg

SEQ ID NO: 258274 - DNA, 20 bp, Artificial Sequence
  Description of Artificial Sequence: Synthetic oligonucleotide
  Target: LAMA2; (-) strand; PAM type: YTN; PAM sequence: TTC
tctggatcccgccacatatt

SEQ ID NO: 258275 - DNA, 20 bp, Artificial Sequence
  Description of Artificial Sequence: Synthetic oligonucleotide
  Target: LAMA2; (-) strand; PAM type: YTN; PAM sequence: CTT
ctctggatcccgccacatat

SEQ ID NO: 258276 - DNA, 20 bp, Artificial Sequence
  Description of Artificial Sequence: Synthetic oligonucleotide
  Target: LAMA2; (-) strand; PAM type: YTN; PAM sequence: TTG
cggtgacacagagccaacgg

SEQ ID NO: 258277 - DNA, 20 bp, Artificial Sequence
  Description of Artificial Sequence: Synthetic oligonucleotide
  Target: LAMA2; (-) strand; PAM type: YTN; PAM sequence: CTG
taatatcacattgcggtgac

SEQ ID NO: 258278 - DNA, 20 bp, Artificial Sequence
  Description of Artificial Sequence: Synthetic oligonucleotide
  Target: LAMA2; (-) strand; PAM type: YTN; PAM sequence: TTC
ctgtaatatcacattgcggt

SEQ ID NO: 258279 - DNA, 20 bp, Artificial Sequence
  Description of Artificial Sequence: Synthetic oligonucleotide
  Target: LAMA2; (-) strand; PAM type: YTN; PAM sequence: CTT
cctgtaatatcacattgcgg

SEQ ID NO: 258280 - DNA, 20 bp, Artificial Sequence
  Description of Artificial Sequence: Synthetic oligonucleotide
  Target: LAMA2; (-) strand; PAM type: YTN; PAM sequence: TTA
cagacacatcttcctgtaat

SEQ ID NO: 258281 - DNA, 20 bp, Artificial Sequence
  Description of Artificial Sequence: Synthetic oligonucleotide
  Target: LAMA2; (-) strand; PAM type: YTN; PAM sequence: TTT
acagacacatcttcctgtaa

SEQ ID NO: 258282 - DNA, 20 bp, Artificial Sequence
  Description of Artificial Sequence: Synthetic oligonucleotide
  Target: LAMA2; (-) strand; PAM type: YTN; PAM sequence: CTG
atttacagacacatcttcct

SEQ ID NO: 258283 - DNA, 20 bp, Artificial Sequence
  Description of Artificial Sequence: Synthetic oligonucleotide
  Target: LAMA2; (-) strand; PAM type: YTN; PAM sequence: CTA
cgaagcctgatttacagaca

SEQ ID NO: 258284 - DNA, 20 bp, Artificial Sequence
  Description of Artificial Sequence: Synthetic oligonucleotide
  Target: LAMA2; (-) strand; PAM type: YTN; PAM sequence: TTC
cctacgaagcctgatttaca

SEQ ID NO: 258285 - DNA, 20 bp, Artificial Sequence
  Description of Artificial Sequence: Synthetic oligonucleotide
  Target: LAMA2; (-) strand; PAM type: YTN; PAM sequence: TTT
ccctacgaagcctgatttac

SEQ ID NO: 258286 - DNA, 20 bp, Artificial Sequence
  Description of Artificial Sequence: Synthetic oligonucleotide
  Target: LAMA2; (-) strand; PAM type: YTN; PAM sequence: CTG
tttccctacgaagcctgatt

SEQ ID NO: 258287 - DNA, 20 bp, Artificial Sequence
  Description of Artificial Sequence: Synthetic oligonucleotide
  Target: LAMA2; (-) strand; PAM type: YTN; PAM sequence: TTG
cactgtttccctacgaagcc

SEQ ID NO: 258288 - DNA, 20 bp, Artificial Sequence
  Description of Artificial Sequence: Synthetic oligonucleotide
  Target: LAMA2; (-) strand; PAM type: YTN; PAM sequence: CTG
ccgaggttgcactgtttccc

SEQ ID NO: 258289 - DNA, 20 bp, Artificial Sequence
  Description of Artificial Sequence: Synthetic oligonucleotide
  Target: LAMA2; (-) strand; PAM type: YTN; PAM sequence: CTG
cctgccgaggttgcactgtt

SEQ ID NO: 258290 - DNA, 20 bp, Artificial Sequence
  Description of Artificial Sequence: Synthetic oligonucleotide
  Target: LAMA2; (-) strand; PAM type: YTN; PAM sequence: TTG
gtgcacctgcctgccgaggt

SEQ ID NO: 258291 - DNA, 20 bp, Artificial Sequence
  Description of Artificial Sequence: Synthetic oligonucleotide
  Target: LAMA2; (-) strand; PAM type: YTN; PAM sequence: CTG
ttggtgcacctgcctgccga

SEQ ID NO: 258292 - DNA, 20 bp, Artificial Sequence
  Description of Artificial Sequence: Synthetic oligonucleotide
  Target: LAMA2; (-) strand; PAM type: YTN; PAM sequence: CTC
ctgttggtgcacctgcctgc

SEQ ID NO: 258293 - DNA, 20 bp, Artificial Sequence
  Description of Artificial Sequence: Synthetic oligonucleotide
  Target: LAMA2; (-) strand; PAM type: YTN; PAM sequence: CTC
ctcctgttggtgcacctgcc

SEQ ID NO: 258294 - DNA, 20 bp, Artificial Sequence
  Description of Artificial Sequence: Synthetic oligonucleotide
  Target: LAMA2; (-) strand; PAM type: YTN; PAM sequence: CTG
ctcctcctgttggtgcacct

SEQ ID NO: 258295 - DNA, 20 bp, Artificial Sequence
  Description of Artificial Sequence: Synthetic oligonucleotide
  Target: LAMA2; (-) strand; PAM type: YTN; PAM sequence: CTC
cgcggctgctcctcctgttg

SEQ ID NO: 258296 - DNA, 20 bp, Artificial Sequence
  Description of Artificial Sequence: Synthetic oligonucleotide
  Target: LAMA2; (-) strand; PAM type: YTN; PAM sequence: CTC
tccgcggctgctcctcctgt

SEQ ID NO: 258297 - DNA, 20 bp, Artificial Sequence
  Description of Artificial Sequence: Synthetic oligonucleotide
  Target: LAMA2; (-) strand; PAM type: YTN; PAM sequence: TTG
cgctctccgcggctgctcct

SEQ ID NO: 258298 - DNA, 20 bp, Artificial Sequence
  Description of Artificial Sequence: Synthetic oligonucleotide
  Target: LAMA2; (-) strand; PAM type: YTN; PAM sequence: CTG
aggagaacccagcacccgtt

SEQ ID NO: 258299 - DNA, 20 bp, Artificial Sequence
  Description of Artificial Sequence: Synthetic oligonucleotide
  Target: LAMA2; (-) strand; PAM type: YTN; PAM sequence: CTC
tgaggagaacccagcacccg

SEQ ID NO: 258300 - DNA, 20 bp, Artificial Sequence
  Description of Artificial Sequence: Synthetic oligonucleotide
  Target: LAMA2; (-) strand; PAM type: YTN; PAM sequence: CTG
ccgatagcccacctctgagg

SEQ ID NO: 258301 - DNA, 20 bp, Artificial Sequence
  Description of Artificial Sequence: Synthetic oligonucleotide
  Target: LAMA2; (-) strand; PAM type: YTN; PAM sequence: CTG
gagctgccgatagcccacct

SEQ ID NO: 258302 - DNA, 20 bp, Artificial Sequence
  Description of Artificial Sequence: Synthetic oligonucleotide
  Target: LAMA2; (-) strand; PAM type: YTN; PAM sequence: CTC
cccgagggcacccgctggag

SEQ ID NO: 258303 - DNA, 20 bp, Artificial Sequence
  Description of Artificial Sequence: Synthetic oligonucleotide
  Target: LAMA2; (-) strand; PAM type: YTN; PAM sequence: CTG
gggcccgataggctccccga

SEQ ID NO: 258304 - DNA, 20 bp, Artificial Sequence
  Description of Artificial Sequence: Synthetic oligonucleotide
  Target: LAMA2; (-) strand; PAM type: YTN; PAM sequence: TTA
ccggagctggggcccgatag

SEQ ID NO: 258305 - DNA, 20 bp, Artificial Sequence
  Description of Artificial Sequence: Synthetic oligonucleotide
  Target: LAMA2; (-) strand; PAM type: YTN; PAM sequence: CTG
ggattaccggagctggggcc

SEQ ID NO: 258306 - DNA, 20 bp, Artificial Sequence
  Description of Artificial Sequence: Synthetic oligonucleotide
  Target: LAMA2; (-) strand; PAM type: YTN; PAM sequence: CTC
tgggattaccggagctgggg

SEQ ID NO: 258307 - DNA, 20 bp, Artificial Sequence
  Description of Artificial Sequence: Synthetic oligonucleotide
  Target: LAMA2; (-) strand; PAM type: YTN; PAM sequence: TTC
agccacagcacacagaacac

SEQ ID NO: 258308 - DNA, 20 bp, Artificial Sequence
  Description of Artificial Sequence: Synthetic oligonucleotide
  Target: LAMA2; (-) strand; PAM type: YTN; PAM sequence: CTT
cagccacagcacacagaaca

SEQ ID NO: 258309 - DNA, 20 bp, Artificial Sequence
  Description of Artificial Sequence: Synthetic oligonucleotide
  Target: LAMA2; (-) strand; PAM type: YTN; PAM sequence: TTG
gtaaaatgccaccagggaac

SEQ ID NO: 258310 - DNA, 20 bp, Artificial Sequence
  Description of Artificial Sequence: Synthetic oligonucleotide
  Target: LAMA2; (-) strand; PAM type: YTN; PAM sequence: TTT
ggtaaaatgccaccagggaa

SEQ ID NO: 258311 - DNA, 20 bp, Artificial Sequence
  Description of Artificial Sequence: Synthetic oligonucleotide
  Target: LAMA2; (-) strand; PAM type: YTN; PAM sequence: TTA
tttggtaaaatgccaccagg

SEQ ID NO: 258312 - DNA, 20 bp, Artificial Sequence
  Description of Artificial Sequence: Synthetic oligonucleotide
  Target: LAMA2; (-) strand; PAM type: YTN; PAM sequence: CTG
ttatttggtaaaatgccacc

SEQ ID NO: 258313 - DNA, 20 bp, Artificial Sequence
  Description of Artificial Sequence: Synthetic oligonucleotide
  Target: LAMA2; (-) strand; PAM type: YTN; PAM sequence: TTA
gcaactgttatttggtaaaa

SEQ ID NO: 258314 - DNA, 20 bp, Artificial Sequence
  Description of Artificial Sequence: Synthetic oligonucleotide
  Target: LAMA2; (-) strand; PAM type: YTN; PAM sequence: CTT
agcaactgttatttggtaaa

SEQ ID NO: 258315 - DNA, 20 bp, Artificial Sequence
  Description of Artificial Sequence: Synthetic oligonucleotide
  Target: LAMA2; (-) strand; PAM type: YTN; PAM sequence: TTG
cacacttagcaactgttatt

SEQ ID NO: 258316 - DNA, 20 bp, Artificial Sequence
  Description of Artificial Sequence: Synthetic oligonucleotide
  Target: LAMA2; (-) strand; PAM type: YTN; PAM sequence: TTT
gcacacttagcaactgttat

SEQ ID NO: 258317 - DNA, 20 bp, Artificial Sequence
  Description of Artificial Sequence: Synthetic oligonucleotide
  Target: LAMA2; (-) strand; PAM type: YTN; PAM sequence: TTG
caatttgcacacttagcaac

SEQ ID NO: 258318 - DNA, 20 bp, Artificial Sequence
  Description of Artificial Sequence: Synthetic oligonucleotide
  Target: LAMA2; (-) strand; PAM type: YTN; PAM sequence: TTT
gcaatttgcacacttagcaa

SEQ ID NO: 258319 - DNA, 20 bp, Artificial Sequence
  Description of Artificial Sequence: Synthetic oligonucleotide
  Target: LAMA2; (-) strand; PAM type: YTN; PAM sequence: TTG
catttgcaatttgcacactt

SEQ ID NO: 258320 - DNA, 20 bp, Artificial Sequence
  Description of Artificial Sequence: Synthetic oligonucleotide
  Target: LAMA2; (-) strand; PAM type: YTN; PAM sequence: TTT
gcatttgcaatttgcacact

SEQ ID NO: 258321 - DNA, 20 bp, Artificial Sequence
  Description of Artificial Sequence: Synthetic oligonucleotide
  Target: LAMA2; (-) strand; PAM type: YTN; PAM sequence: CTT
tgcatttgcaatttgcacac

SEQ ID NO: 258322 - DNA, 20 bp, Artificial Sequence
  Description of Artificial Sequence: Synthetic oligonucleotide
  Target: LAMA2; (-) strand; PAM type: YTN; PAM sequence: CTA
atctttgcatttgcaatttg

SEQ ID NO: 258323 - DNA, 20 bp, Artificial Sequence
  Description of Artificial Sequence: Synthetic oligonucleotide
  Target: LAMA2; (-) strand; PAM type: YTN; PAM sequence: TTG
tctaatctttgcatttgcaa

SEQ ID NO: 258324 - DNA, 20 bp, Artificial Sequence
  Description of Artificial Sequence: Synthetic oligonucleotide
  Target: LAMA2; (-) strand; PAM type: YTN; PAM sequence: TTA
ggaattgtctaatctttgca

SEQ ID NO: 258325 - DNA, 20 bp, Artificial Sequence
  Description of Artificial Sequence: Synthetic oligonucleotide
  Target: LAMA2; (-) strand; PAM type: YTN; PAM sequence: TTC
aattaggaattgtctaatct

SEQ ID NO: 258326 - DNA, 20 bp, Artificial Sequence
  Description of Artificial Sequence: Synthetic oligonucleotide
  Target: LAMA2; (-) strand; PAM type: YTN; PAM sequence: TTA
aaagggcaagggttcaatta

SEQ ID NO: 258327 - DNA, 20 bp, Artificial Sequence
  Description of Artificial Sequence: Synthetic oligonucleotide
  Target: LAMA2; (-) strand; PAM type: YTN; PAM sequence: TTT
aaaagggcaagggttcaatt

SEQ ID NO: 258328 - DNA, 20 bp, Artificial Sequence
  Description of Artificial Sequence: Synthetic oligonucleotide
  Target: LAMA2; (-) strand; PAM type: YTN; PAM sequence: TTT
taaaagggcaagggttcaat

SEQ ID NO: 258329 - DNA, 20 bp, Artificial Sequence
  Description of Artificial Sequence: Synthetic oligonucleotide
  Target: LAMA2; (-) strand; PAM type: YTN; PAM sequence: TTT
ttaaaagggcaagggttcaa

SEQ ID NO: 258330 - DNA, 20 bp, Artificial Sequence
  Description of Artificial Sequence: Synthetic oligonucleotide
  Target: LAMA2; (-) strand; PAM type: YTN; PAM sequence: TTA
tttttaaaagggcaagggtt

SEQ ID NO: 258331 - DNA, 20 bp, Artificial Sequence
  Description of Artificial Sequence: Synthetic oligonucleotide
  Target: LAMA2; (-) strand; PAM type: YTN; PAM sequence: TTA
aagcatacggatggttattt

SEQ ID NO: 258332 - DNA, 20 bp, Artificial Sequence
  Description of Artificial Sequence: Synthetic oligonucleotide
  Target: LAMA2; (-) strand; PAM type: YTN; PAM sequence: TTT
aaagcatacggatggttatt

SEQ ID NO: 258333 - DNA, 20 bp, Artificial Sequence
  Description of Artificial Sequence: Synthetic oligonucleotide
  Target: LAMA2; (-) strand; PAM type: YTN; PAM sequence: TTT
taaagcatacggatggttat

SEQ ID NO: 258334 - DNA, 20 bp, Artificial Sequence
  Description of Artificial Sequence: Synthetic oligonucleotide
  Target: LAMA2; (-) strand; PAM type: YTN; PAM sequence: TTT
ttaaagcatacggatggtta

SEQ ID NO: 258335 - DNA, 20 bp, Artificial Sequence
  Description of Artificial Sequence: Synthetic oligonucleotide
  Target: LAMA2; (-) strand; PAM type: YTN; PAM sequence: CTT
tttaaagcatacggatggtt

SEQ ID NO: 258336 - DNA, 20 bp, Artificial Sequence
  Description of Artificial Sequence: Synthetic oligonucleotide
  Target: LAMA2; (-) strand; PAM type: YTN; PAM sequence: TTG
aatatgctttttaaagcata

SEQ ID NO: 258337 - DNA, 20 bp, Artificial Sequence
  Description of Artificial Sequence: Synthetic oligonucleotide
  Target: LAMA2; (-) strand; PAM type: YTN; PAM sequence: CTT
gaatatgctttttaaagcat

SEQ ID NO: 258338 - DNA, 20 bp, Artificial Sequence
  Description of Artificial Sequence: Synthetic oligonucleotide
  Target: LAMA2; (-) strand; PAM type: YTN; PAM sequence: CTA
tgaacttgaatatgcttttt

SEQ ID NO: 258339 - DNA, 20 bp, Artificial Sequence
  Description of Artificial Sequence: Synthetic oligonucleotide
  Target: LAMA2; (-) strand; PAM type: YTN; PAM sequence: TTA
tgaccctatgaacttgaata

SEQ ID NO: 258340 - DNA, 20 bp, Artificial Sequence
  Description of Artificial Sequence: Synthetic oligonucleotide
  Target: LAMA2; (-) strand; PAM type: YTN; PAM sequence: TTT
atgaccctatgaacttgaat

SEQ ID NO: 258341 - DNA, 20 bp, Artificial Sequence
  Description of Artificial Sequence: Synthetic oligonucleotide
  Target: LAMA2; (-) strand; PAM type: YTN; PAM sequence: TTT
tatgaccctatgaacttgaa

SEQ ID NO: 258342 - DNA, 20 bp, Artificial Sequence
  Description of Artificial Sequence: Synthetic oligonucleotide
  Target: LAMA2; (-) strand; PAM type: YTN; PAM sequence: TTG
aaagttttatgaccctatga

SEQ ID NO: 258343 - DNA, 20 bp, Artificial Sequence
  Description of Artificial Sequence: Synthetic oligonucleotide
  Target: LAMA2; (-) strand; PAM type: YTN; PAM sequence: TTA
attgaaagttttatgaccct

SEQ ID NO: 258344 - DNA, 20 bp, Artificial Sequence
  Description of Artificial Sequence: Synthetic oligonucleotide
  Target: LAMA2; (-) strand; PAM type: YTN; PAM sequence: TTG
gttaattgaaagttttatga

SEQ ID NO: 258345 - DNA, 20 bp, Artificial Sequence
  Description of Artificial Sequence: Synthetic oligonucleotide
  Target: LAMA2; (-) strand; PAM type: YTN; PAM sequence: TTT
ggttaattgaaagttttatg

SEQ ID NO: 258346 - DNA, 20 bp, Artificial Sequence
  Description of Artificial Sequence: Synthetic oligonucleotide
  Target: LAMA2; (-) strand; PAM type: YTN; PAM sequence: TTG
aaagtttggttaattgaaag

SEQ ID NO: 258347 - DNA, 20 bp, Artificial Sequence
  Description of Artificial Sequence: Synthetic oligonucleotide
  Target: LAMA2; (-) strand; PAM type: YTN; PAM sequence: TTA
attgaaagtttggttaattg

SEQ ID NO: 258348 - DNA, 20 bp, Artificial Sequence
  Description of Artificial Sequence: Synthetic oligonucleotide
  Target: LAMA2; (-) strand; PAM type: YTN; PAM sequence: TTC
atggttaattgaaagtttgg

SEQ ID NO: 258349 - DNA, 20 bp, Artificial Sequence
  Description of Artificial Sequence: Synthetic oligonucleotide
  Target: LAMA2; (-) strand; PAM type: YTN; PAM sequence: TTC
cacatattcatggttaattg

SEQ ID NO: 258350 - DNA, 20 bp, Artificial Sequence
  Description of Artificial Sequence: Synthetic oligonucleotide
  Target: LAMA2; (-) strand; PAM type: YTN; PAM sequence: TTT
ccacatattcatggttaatt

SEQ ID NO: 258351 - DNA, 20 bp, Artificial Sequence
  Description of Artificial Sequence: Synthetic oligonucleotide
  Target: LAMA2; (-) strand; PAM type: YTN; PAM sequence: TTG
atttccacatattcatggtt

SEQ ID NO: 258352 - DNA, 20 bp, Artificial Sequence
  Description of Artificial Sequence: Synthetic oligonucleotide
  Target: LAMA2; (-) strand; PAM type: YTN; PAM sequence: TTT
gatttccacatattcatggt

SEQ ID NO: 258353 - DNA, 20 bp, Artificial Sequence
  Description of Artificial Sequence: Synthetic oligonucleotide
  Target: LAMA2; (-) strand; PAM type: YTN; PAM sequence: TTA
tttgatttccacatattcat

SEQ ID NO: 258354 - DNA, 20 bp, Artificial Sequence
  Description of Artificial Sequence: Synthetic oligonucleotide
  Target: LAMA2; (-) strand; PAM type: YTN; PAM sequence: TTT
atttgatttccacatattca

SEQ ID NO: 258355 - DNA, 20 bp, Artificial Sequence
  Description of Artificial Sequence: Synthetic oligonucleotide
  Target: LAMA2; (-) strand; PAM type: YTN; PAM sequence: TTT
tatttgatttccacatattc

SEQ ID NO: 258356 - DNA, 20 bp, Artificial Sequence
  Description of Artificial Sequence: Synthetic oligonucleotide
  Target: LAMA2; (-) strand; PAM type: YTN; PAM sequence: TTT
ttatttgatttccacatatt

SEQ ID NO: 258357 - DNA, 20 bp, Artificial Sequence
  Description of Artificial Sequence: Synthetic oligonucleotide
  Target: LAMA2; (-) strand; PAM type: YTN; PAM sequence: CTC
aagtagatttttatttgatt

SEQ ID NO: 258358 - DNA, 20 bp, Artificial Sequence
  Description of Artificial Sequence: Synthetic oligonucleotide
  Target: LAMA2; (-) strand; PAM type: YTN; PAM sequence: CTC
tcaagtagatttttatttga

SEQ ID NO: 258359 - DNA, 20 bp, Artificial Sequence
  Description of Artificial Sequence: Synthetic oligonucleotide
  Target: LAMA2; (-) strand; PAM type: YTN; PAM sequence: TTC
tctcaagtagatttttattt

SEQ ID NO: 258360 - DNA, 20 bp, Artificial Sequence
  Description of Artificial Sequence: Synthetic oligonucleotide
  Target: LAMA2; (-) strand; PAM type: YTN; PAM sequence: TTA
taggttctctcaagtagatt

SEQ ID NO: 258361 - DNA, 20 bp, Artificial Sequence
  Description of Artificial Sequence: Synthetic oligonucleotide
  Target: LAMA2; (-) strand; PAM type: YTN; PAM sequence: CTA
agattataggttctctcaag

SEQ ID NO: 258362 - DNA, 20 bp, Artificial Sequence
  Description of Artificial Sequence: Synthetic oligonucleotide
  Target: LAMA2; (-) strand; PAM type: YTN; PAM sequence: TTC
taagattataggttctctca

SEQ ID NO: 258363 - DNA, 20 bp, Artificial Sequence
  Description of Artificial Sequence: Synthetic oligonucleotide
  Target: LAMA2; (-) strand; PAM type: YTN; PAM sequence: TTT
ctaagattataggttctctc

SEQ ID NO: 258364 - DNA, 20 bp, Artificial Sequence
  Description of Artificial Sequence: Synthetic oligonucleotide
  Target: LAMA2; (-) strand; PAM type: YTN; PAM sequence: TTC
catttctaagattataggtt

SEQ ID NO: 258365 - DNA, 20 bp, Artificial Sequence
  Description of Artificial Sequence: Synthetic oligonucleotide
  Target: LAMA2; (-) strand; PAM type: YTN; PAM sequence: CTT
ccatttctaagattataggt

SEQ ID NO: 258366 - DNA, 20 bp, Artificial Sequence
  Description of Artificial Sequence: Synthetic oligonucleotide
  Target: LAMA2; (-) strand; PAM type: YTN; PAM sequence: CTC
ttccatttctaagattatag

SEQ ID NO: 258367 - DNA, 20 bp, Artificial Sequence
  Description of Artificial Sequence: Synthetic oligonucleotide
  Target: LAMA2; (-) strand; PAM type: YTN; PAM sequence: CTG
aagtctcttccatttctaag

SEQ ID NO: 258368 - DNA, 20 bp, Artificial Sequence
  Description of Artificial Sequence: Synthetic oligonucleotide
  Target: LAMA2; (-) strand; PAM type: YTN; PAM sequence: TTG
cctgaagtctcttccatttc

SEQ ID NO: 258369 - DNA, 20 bp, Artificial Sequence
  Description of Artificial Sequence: Synthetic oligonucleotide
  Target: LAMA2; (-) strand; PAM type: YTN; PAM sequence: TTC
cccaaaggttgcctgaagtc

SEQ ID NO: 258370 - DNA, 20 bp, Artificial Sequence
  Description of Artificial Sequence: Synthetic oligonucleotide
  Target: LAMA2; (-) strand; PAM type: YTN; PAM sequence: TTT
ccccaaaggttgcctgaagt

SEQ ID NO: 258371 - DNA, 20 bp, Artificial Sequence
  Description of Artificial Sequence: Synthetic oligonucleotide
  Target: LAMA2; (-) strand; PAM type: YTN; PAM sequence: CTT
tccccaaaggttgcctgaag

SEQ ID NO: 258372 - DNA, 20 bp, Artificial Sequence
  Description of Artificial Sequence: Synthetic oligonucleotide
  Target: LAMA2; (-) strand; PAM type: YTN; PAM sequence: TTA
gctttccccaaaggttgcct

SEQ ID NO: 258373 - DNA, 20 bp, Artificial Sequence
  Description of Artificial Sequence: Synthetic oligonucleotide
  Target: LAMA2; (-) strand; PAM type: YTN; PAM sequence: TTA
aagttagctttccccaaagg

SEQ ID NO: 258374 - DNA, 20 bp, Artificial Sequence
  Description of Artificial Sequence: Synthetic oligonucleotide
  Target: LAMA2; (-) strand; PAM type: YTN; PAM sequence: TTA
ttaaagttagctttccccaa

SEQ ID NO: 258375 - DNA, 20 bp, Artificial Sequence
  Description of Artificial Sequence: Synthetic oligonucleotide
  Target: LAMA2; (-) strand; PAM type: YTN; PAM sequence: TTT
attaaagttagctttcccca

SEQ ID NO: 258376 - DNA, 20 bp, Artificial Sequence
  Description of Artificial Sequence: Synthetic oligonucleotide
  Target: LAMA2; (-) strand; PAM type: YTN; PAM sequence: TTC
atttattaaagttagctttc

SEQ ID NO: 258377 - DNA, 20 bp, Artificial Sequence
  Description of Artificial Sequence: Synthetic oligonucleotide
  Target: LAMA2; (-) strand; PAM type: YTN; PAM sequence: TTG
ttcatttattaaagttagct

SEQ ID NO: 258378 - DNA, 20 bp, Artificial Sequence
  Description of Artificial Sequence: Synthetic oligonucleotide
  Target: LAMA2; (-) strand; PAM type: YTN; PAM sequence: TTT
gttcatttattaaagttagc

SEQ ID NO: 258379 - DNA, 20 bp, Artificial Sequence
  Description of Artificial Sequence: Synthetic oligonucleotide
  Target: LAMA2; (-) strand; PAM type: YTN; PAM sequence: TTC
atttgttcatttattaaagt

SEQ ID NO: 258380 - DNA, 20 bp, Artificial Sequence
  Description of Artificial Sequence: Synthetic oligonucleotide
  Target: LAMA2; (-) strand; PAM type: YTN; PAM sequence: CTT
catttgttcatttattaaag

SEQ ID NO: 258381 - DNA, 20 bp, Artificial Sequence
  Description of Artificial Sequence: Synthetic oligonucleotide
  Target: LAMA2; (-) strand; PAM type: YTN; PAM sequence: TTC
cttcatttgttcatttatta

SEQ ID NO: 258382 - DNA, 20 bp, Artificial Sequence
  Description of Artificial Sequence: Synthetic oligonucleotide
  Target: LAMA2; (-) strand; PAM type: YTN; PAM sequence: TTT
ccttcatttgttcatttatt

SEQ ID NO: 258383 - DNA, 20 bp, Artificial Sequence
  Description of Artificial Sequence: Synthetic oligonucleotide
  Target: LAMA2; (-) strand; PAM type: YTN; PAM sequence: TTT
tccttcatttgttcatttat

SEQ ID NO: 258384 - DNA, 20 bp, Artificial Sequence
  Description of Artificial Sequence: Synthetic oligonucleotide
  Target: LAMA2; (-) strand; PAM type: YTN; PAM sequence: CTA
gattttccttcatttgttca

SEQ ID NO: 258385 - DNA, 20 bp, Artificial Sequence
  Description of Artificial Sequence: Synthetic oligonucleotide
  Target: LAMA2; (-) strand; PAM type: YTN; PAM sequence: CTG
ctagattttccttcatttgt

SEQ ID NO: 258386 - DNA, 20 bp, Artificial Sequence
  Description of Artificial Sequence: Synthetic oligonucleotide
  Target: LAMA2; (-) strand; PAM type: YTN; PAM sequence: CTC
tgctagattttccttcattt

SEQ ID NO: 258387 - DNA, 20 bp, Artificial Sequence
  Description of Artificial Sequence: Synthetic oligonucleotide
  Target: LAMA2; (-) strand; PAM type: YTN; PAM sequence: TTC
tctgctagattttccttcat

SEQ ID NO: 258388 - DNA, 20 bp, Artificial Sequence
  Description of Artificial Sequence: Synthetic oligonucleotide
  Target: LAMA2; (-) strand; PAM type: YTN; PAM sequence: TTT
ctctgctagattttccttca

SEQ ID NO: 258389 - DNA, 20 bp, Artificial Sequence
  Description of Artificial Sequence: Synthetic oligonucleotide
  Target: LAMA2; (-) strand; PAM type: YTN; PAM sequence: TTG
gacaaatcaatttctctgct

SEQ ID NO: 258390 - DNA, 20 bp, Artificial Sequence
  Description of Artificial Sequence: Synthetic oligonucleotide
  Target: LAMA2; (-) strand; PAM type: YTN; PAM sequence: CTT
ggacaaatcaatttctctgc

SEQ ID NO: 258391 - DNA, 20 bp, Artificial Sequence
  Description of Artificial Sequence: Synthetic oligonucleotide
  Target: LAMA2; (-) strand; PAM type: YTN; PAM sequence: TTC
ttggacaaatcaatttctct

SEQ ID NO: 258392 - DNA, 20 bp, Artificial Sequence
  Description of Artificial Sequence: Synthetic oligonucleotide
  Target: LAMA2; (-) strand; PAM type: YTN; PAM sequence: TTT
cttggacaaatcaatttctc

SEQ ID NO: 258393 - DNA, 20 bp, Artificial Sequence
  Description of Artificial Sequence: Synthetic oligonucleotide
  Target: LAMA2; (-) strand; PAM type: YTN; PAM sequence: TTT
tcttggacaaatcaatttct

SEQ ID NO: 258394 - DNA, 20 bp, Artificial Sequence
  Description of Artificial Sequence: Synthetic oligonucleotide
  Target: LAMA2; (-) strand; PAM type: YTN; PAM sequence: CTG
agttttcttggacaaatcaa

SEQ ID NO: 258395 - DNA, 20 bp, Artificial Sequence
  Description of Artificial Sequence: Synthetic oligonucleotide
  Target: LAMA2; (-) strand; PAM type: YTN; PAM sequence: CTG
ataaatgggctgagttttct

SEQ ID NO: 258396 - DNA, 20 bp, Artificial Sequence
  Description of Artificial Sequence: Synthetic oligonucleotide
  Target: LAMA2; (-) strand; PAM type: YTN; PAM sequence: TTA
tgatgaaatgcctgataaat

SEQ ID NO: 258397 - DNA, 20 bp, Artificial Sequence
  Description of Artificial Sequence: Synthetic oligonucleotide
  Target: LAMA2; (-) strand; PAM type: YTN; PAM sequence: TTA
attatgatgaaatgcctgat

SEQ ID NO: 258398 - DNA, 20 bp, Artificial Sequence
  Description of Artificial Sequence: Synthetic oligonucleotide
  Target: LAMA2; (-) strand; PAM type: YTN; PAM sequence: CTT
aattatgatgaaatgcctga

SEQ ID NO: 258399 - DNA, 20 bp, Artificial Sequence
  Description of Artificial Sequence: Synthetic oligonucleotide
  Target: LAMA2; (-) strand; PAM type: YTN; PAM sequence: TTC
ttaattatgatgaaatgcct

SEQ ID NO: 258400 - DNA, 20 bp, Artificial Sequence
  Description of Artificial Sequence: Synthetic oligonucleotide
  Target: LAMA2; (-) strand; PAM type: YTN; PAM sequence: TTA
acaaaattcttaattatgat

SEQ ID NO: 258401 - DNA, 20 bp, Artificial Sequence
  Description of Artificial Sequence: Synthetic oligonucleotide
  Target: LAMA2; (-) strand; PAM type: YTN; PAM sequence: TTG
atgtggaaattaacaaaatt

SEQ ID NO: 258402 - DNA, 20 bp, Artificial Sequence
  Description of Artificial Sequence: Synthetic oligonucleotide
  Target: LAMA2; (-) strand; PAM type: YTN; PAM sequence: TTG
tacacataagcacaattgat

SEQ ID NO: 258403 - DNA, 20 bp, Artificial Sequence
  Description of Artificial Sequence: Synthetic oligonucleotide
  Target: LAMA2; (-) strand; PAM type: YTN; PAM sequence: TTG
ttgtacacataagcacaatt

SEQ ID NO: 258404 - DNA, 20 bp, Artificial Sequence
  Description of Artificial Sequence: Synthetic oligonucleotide
  Target: LAMA2; (-) strand; PAM type: YTN; PAM sequence: TTT
gttgtacacataagcacaat

SEQ ID NO: 258405 - DNA, 20 bp, Artificial Sequence
  Description of Artificial Sequence: Synthetic oligonucleotide
  Target: LAMA2; (-) strand; PAM type: YTN; PAM sequence: TTG
catttgttgtacacataagc

SEQ ID NO: 258406 - DNA, 20 bp, Artificial Sequence
  Description of Artificial Sequence: Synthetic oligonucleotide
  Target: LAMA2; (-) strand; PAM type: YTN; PAM sequence: CTT
gcatttgttgtacacataag

SEQ ID NO: 258407 - DNA, 20 bp, Artificial Sequence
  Description of Artificial Sequence: Synthetic oligonucleotide
  Target: LAMA2; (-) strand; PAM type: YTN; PAM sequence: TTC
ttgcatttgttgtacacata

SEQ ID NO: 258408 - DNA, 20 bp, Artificial Sequence
  Description of Artificial Sequence: Synthetic oligonucleotide
  Target: LAMA2; (-) strand; PAM type: YTN; PAM sequence: TTT
cttgcatttgttgtacacat

SEQ ID NO: 258409 - DNA, 20 bp, Artificial Sequence
  Description of Artificial Sequence: Synthetic oligonucleotide
  Target: LAMA2; (-) strand; PAM type: YTN; PAM sequence: TTA
tagtgtgtgaaaatgtgttt

SEQ ID NO: 258410 - DNA, 20 bp, Artificial Sequence
  Description of Artificial Sequence: Synthetic oligonucleotide
  Target: LAMA2; (-) strand; PAM type: YTN; PAM sequence: TTT
atagtgtgtgaaaatgtgtt

SEQ ID NO: 258411 - DNA, 20 bp, Artificial Sequence
  Description of Artificial Sequence: Synthetic oligonucleotide
  Target: LAMA2; (-) strand; PAM type: YTN; PAM sequence: TTG
tccatttatagtgtgtgaaa

SEQ ID NO: 258412 - DNA, 20 bp, Artificial Sequence
  Description of Artificial Sequence: Synthetic oligonucleotide
  Target: LAMA2; (-) strand; PAM type: YTN; PAM sequence: TTT
gtccatttatagtgtgtgaa

SEQ ID NO: 258413 - DNA, 20 bp, Artificial Sequence
  Description of Artificial Sequence: Synthetic oligonucleotide
  Target: LAMA2; (-) strand; PAM type: YTN; PAM sequence: TTG
ggtatttgtccatttatagt

SEQ ID NO: 258414 - DNA, 20 bp, Artificial Sequence
  Description of Artificial Sequence: Synthetic oligonucleotide
  Target: LAMA2; (-) strand; PAM type: YTN; PAM sequence: TTT
gggtatttgtccatttatag

SEQ ID NO: 258415 - DNA, 20 bp, Artificial Sequence
  Description of Artificial Sequence: Synthetic oligonucleotide
  Target: LAMA2; (-) strand; PAM type: YTN; PAM sequence: TTT
tgggtatttgtccatttata

SEQ ID NO: 258416 - DNA, 20 bp, Artificial Sequence
  Description of Artificial Sequence: Synthetic oligonucleotide
  Target: LAMA2; (-) strand; PAM type: YTN; PAM sequence: TTC
cccgttttgggtatttgtcc

SEQ ID NO: 258417 - DNA, 20 bp, Artificial Sequence
  Description of Artificial Sequence: Synthetic oligonucleotide
  Target: LAMA2; (-) strand; PAM type: YTN; PAM sequence: TTT
ccccgttttgggtatttgtc

SEQ ID NO: 258418 - DNA, 20 bp, Artificial Sequence
  Description of Artificial Sequence: Synthetic oligonucleotide
  Target: LAMA2; (-) strand; PAM type: YTN; PAM sequence: CTT
tccccgttttgggtatttgt

SEQ ID NO: 258419 - DNA, 20 bp, Artificial Sequence
  Description of Artificial Sequence: Synthetic oligonucleotide
  Target: LAMA2; (-) strand; PAM type: YTN; PAM sequence: TTA
gaaacaactttccccgtttt

SEQ ID NO: 258420 - DNA, 20 bp, Artificial Sequence
  Description of Artificial Sequence: Synthetic oligonucleotide
  Target: LAMA2; (-) strand; PAM type: YTN; PAM sequence: TTG
taattagaaacaactttccc

SEQ ID NO: 258421 - DNA, 20 bp, Artificial Sequence
  Description of Artificial Sequence: Synthetic oligonucleotide
  Target: LAMA2; (-) strand; PAM type: YTN; PAM sequence: TTT
gtaattagaaacaactttcc

SEQ ID NO: 258422 - DNA, 20 bp, Artificial Sequence
  Description of Artificial Sequence: Synthetic oligonucleotide
  Target: LAMA2; (-) strand; PAM type: YTN; PAM sequence: TTT
tgtaattagaaacaactttc

SEQ ID NO: 258423 - DNA, 20 bp, Artificial Sequence
  Description of Artificial Sequence: Synthetic oligonucleotide
  Target: LAMA2; (-) strand; PAM type: YTN; PAM sequence: CTT
ttgtaattagaaacaacttt

SEQ ID NO: 258424 - DNA, 20 bp, Artificial Sequence
  Description of Artificial Sequence: Synthetic oligonucleotide
  Target: LAMA2; (-) strand; PAM type: YTN; PAM sequence: CTG
tgatatgagaaccacacttt

SEQ ID NO: 258425 - DNA, 20 bp, Artificial Sequence
  Description of Artificial Sequence: Synthetic oligonucleotide
  Target: LAMA2; (-) strand; PAM type: YTN; PAM sequence: TTG
tcctgtgatatgagaaccac

SEQ ID NO: 258426 - DNA, 20 bp, Artificial Sequence
  Description of Artificial Sequence: Synthetic oligonucleotide
  Target: LAMA2; (-) strand; PAM type: YTN; PAM sequence: TTT
gtcctgtgatatgagaacca

SEQ ID NO: 258427 - DNA, 20 bp, Artificial Sequence
  Description of Artificial Sequence: Synthetic oligonucleotide
  Target: LAMA2; (-) strand; PAM type: YTN; PAM sequence: TTT
tgtcctgtgatatgagaacc

SEQ ID NO: 258428 - DNA, 20 bp, Artificial Sequence
  Description of Artificial Sequence: Synthetic oligonucleotide
  Target: LAMA2; (-) strand; PAM type: YTN; PAM sequence: TTG
ttttgtcctgtgatatgaga

SEQ ID NO: 258429 - DNA, 20 bp, Artificial Sequence
  Description of Artificial Sequence: Synthetic oligonucleotide
  Target: LAMA2; (-) strand; PAM type: YTN; PAM sequence: TTT
gttttgtcctgtgatatgag

SEQ ID NO: 258430 - DNA, 20 bp, Artificial Sequence
  Description of Artificial Sequence: Synthetic oligonucleotide
  Target: LAMA2; (-) strand; PAM type: YTN; PAM sequence: TTT
tgttttgtcctgtgatatga

SEQ ID NO: 258431 - DNA, 20 bp, Artificial Sequence
  Description of Artificial Sequence: Synthetic oligonucleotide
  Target: LAMA2; (-) strand; PAM type: YTN; PAM sequence: TTG
ttttgttttgtcctgtgata

SEQ ID NO: 258432 - DNA, 20 bp, Artificial Sequence
  Description of Artificial Sequence: Synthetic oligonucleotide
  Target: LAMA2; (-) strand; PAM type: YTN; PAM sequence: TTT
gttttgttttgtcctgtgat

SEQ ID NO: 258433 - DNA, 20 bp, Artificial Sequence
  Description of Artificial Sequence: Synthetic oligonucleotide
  Target: LAMA2; (-) strand; PAM type: YTN; PAM sequence: TTC
cccagcatttgttttgtttt

SEQ ID NO: 258434 - DNA, 20 bp, Artificial Sequence
  Description of Artificial Sequence: Synthetic oligonucleotide
  Target: LAMA2; (-) strand; PAM type: YTN; PAM sequence: CTT
ccccagcatttgttttgttt

SEQ ID NO: 258435 - DNA, 20 bp, Artificial Sequence
  Description of Artificial Sequence: Synthetic oligonucleotide
  Target: LAMA2; (-) strand; PAM type: YTN; PAM sequence: TTC
ttccccagcatttgttttgt

SEQ ID NO: 258436 - DNA, 20 bp, Artificial Sequence
  Description of Artificial Sequence: Synthetic oligonucleotide
  Target: LAMA2; (-) strand; PAM type: YTN; PAM sequence: CTT
cttccccagcatttgttttg

SEQ ID NO: 258437 - DNA, 20 bp, Artificial Sequence
  Description of Artificial Sequence: Synthetic oligonucleotide
  Target: LAMA2; (-) strand; PAM type: YTN; PAM sequence: TTC
cttcttccccagcatttgtt

SEQ ID NO: 258438 - DNA, 20 bp, Artificial Sequence
  Description of Artificial Sequence: Synthetic oligonucleotide
  Target: LAMA2; (-) strand; PAM type: YTN; PAM sequence: CTT
ccttcttccccagcatttgt

SEQ ID NO: 258439 - DNA, 20 bp, Artificial Sequence
  Description of Artificial Sequence: Synthetic oligonucleotide
  Target: LAMA2; (-) strand; PAM type: YTN; PAM sequence: CTC
ttccttcttccccagcattt

SEQ ID NO: 258440 - DNA, 20 bp, Artificial Sequence
  Description of Artificial Sequence: Synthetic oligonucleotide
  Target: LAMA2; (-) strand; PAM type: YTN; PAM sequence: CTC
tcttccttcttccccagcat

SEQ ID NO: 258441 - DNA, 20 bp, Artificial Sequence
  Description of Artificial Sequence: Synthetic oligonucleotide
  Target: LAMA2; (-) strand; PAM type: YTN; PAM sequence: CTC
cctctcttccttcttcccca

SEQ ID NO: 258442 - DNA, 20 bp, Artificial Sequence
  Description of Artificial Sequence: Synthetic oligonucleotide
  Target: LAMA2; (-) strand; PAM type: YTN; PAM sequence: CTC
cctccctctcttccttcttc

SEQ ID NO: 258443 - DNA, 20 bp, Artificial Sequence
  Description of Artificial Sequence: Synthetic oligonucleotide
  Target: LAMA2; (-) strand; PAM type: YTN; PAM sequence: TTC
cctccctccctctcttcctt

SEQ ID NO: 258444 - DNA, 20 bp, Artificial Sequence
  Description of Artificial Sequence: Synthetic oligonucleotide
  Target: LAMA2; (-) strand; PAM type: YTN; PAM sequence: CTT
ccctccctccctctcttcct

SEQ ID NO: 258445 - DNA, 20 bp, Artificial Sequence
  Description of Artificial Sequence: Synthetic oligonucleotide
  Target: LAMA2; (-) strand; PAM type: YTN; PAM sequence: TTC
ttccctccctccctctcttc

SEQ ID NO: 258446 - DNA, 20 bp, Artificial Sequence
  Description of Artificial Sequence: Synthetic oligonucleotide
  Target: LAMA2; (-) strand; PAM type: YTN; PAM sequence: CTT
cttccctccctccctctctt

SEQ ID NO: 258447 - DNA, 20 bp, Artificial Sequence
  Description of Artificial Sequence: Synthetic oligonucleotide
  Target: LAMA2; (-) strand; PAM type: YTN; PAM sequence: CTC
ttcttccctccctccctctc

SEQ ID NO: 258448 - DNA, 20 bp, Artificial Sequence
  Description of Artificial Sequence: Synthetic oligonucleotide
  Target: LAMA2; (-) strand; PAM type: YTN; PAM sequence: CTG
ggacctcttcttccctccct

SEQ ID NO: 258449 - DNA, 20 bp, Artificial Sequence
  Description of Artificial Sequence: Synthetic oligonucleotide
  Target: LAMA2; (-) strand; PAM type: YTN; PAM sequence: CTC
agcctgggacctcttcttcc

SEQ ID NO: 258450 - DNA, 20 bp, Artificial Sequence
  Description of Artificial Sequence: Synthetic oligonucleotide
  Target: LAMA2; (-) strand; PAM type: YTN; PAM sequence: CTG
cagctcagcctgggacctct

SEQ ID NO: 258451 - DNA, 20 bp, Artificial Sequence
  Description of Artificial Sequence: Synthetic oligonucleotide
  Target: LAMA2; (-) strand; PAM type: YTN; PAM sequence: TTC
tgcagctcagcctgggacct

SEQ ID NO: 258452 - DNA, 20 bp, Artificial Sequence
  Description of Artificial Sequence: Synthetic oligonucleotide
  Target: LAMA2; (-) strand; PAM type: YTN; PAM sequence: CTT
ctgcagctcagcctgggacc

SEQ ID NO: 258453 - DNA, 20 bp, Artificial Sequence
  Description of Artificial Sequence: Synthetic oligonucleotide
  Target: LAMA2; (-) strand; PAM type: YTN; PAM sequence: CTC
ttctgcagctcagcctggga

SEQ ID NO: 258454 - DNA, 20 bp, Artificial Sequence
  Description of Artificial Sequence: Synthetic oligonucleotide
  Target: LAMA2; (-) strand; PAM type: YTN; PAM sequence: CTA
ctcttctgcagctcagcctg

SEQ ID NO: 258455 - DNA, 20 bp, Artificial Sequence
  Description of Artificial Sequence: Synthetic oligonucleotide
  Target: LAMA2; (-) strand; PAM type: YTN; PAM sequence: CTC
ctactcttctgcagctcagc

SEQ ID NO: 258456 - DNA, 20 bp, Artificial Sequence
  Description of Artificial Sequence: Synthetic oligonucleotide
  Target: LAMA2; (-) strand; PAM type: YTN; PAM sequence: TTG
tctcctactcttctgcagct

SEQ ID NO: 258457 - DNA, 20 bp, Artificial Sequence
  Description of Artificial Sequence: Synthetic oligonucleotide
  Target: LAMA2; (-) strand; PAM type: YTN; PAM sequence: CTT
gtctcctactcttctgcagc

SEQ ID NO: 258458 - DNA, 20 bp, Artificial Sequence
  Description of Artificial Sequence: Synthetic oligonucleotide
  Target: LAMA2; (-) strand; PAM type: YTN; PAM sequence: CTG
gtaagtcttgtctcctactc

SEQ ID NO: 258459 - DNA, 20 bp, Artificial Sequence
  Description of Artificial Sequence: Synthetic oligonucleotide
  Target: LAMA2; (-) strand; PAM type: YTN; PAM sequence: CTA
tactggtaagtcttgtctcc

SEQ ID NO: 258460 - DNA, 20 bp, Artificial Sequence
  Description of Artificial Sequence: Synthetic oligonucleotide
  Target: LAMA2; (-) strand; PAM type: YTN; PAM sequence: CTC
tatactggtaagtcttgtct

SEQ ID NO: 258461 - DNA, 20 bp, Artificial Sequence
  Description of Artificial Sequence: Synthetic oligonucleotide
  Target: LAMA2; (-) strand; PAM type: YTN; PAM sequence: CTG
actctatactggtaagtctt

SEQ ID NO: 258462 - DNA, 20 bp, Artificial Sequence
  Description of Artificial Sequence: Synthetic oligonucleotide
  Target: LAMA2; (-) strand; PAM type: YTN; PAM sequence: CTA
caggtcctgactctatactg

SEQ ID NO: 258463 - DNA, 20 bp, Artificial Sequence
  Description of Artificial Sequence: Synthetic oligonucleotide
  Target: LAMA2; (-) strand; PAM type: YTN; PAM sequence: CTC
tacaggtcctgactctatac

SEQ ID NO: 258464 - DNA, 20 bp, Artificial Sequence
  Description of Artificial Sequence: Synthetic oligonucleotide
  Target: LAMA2; (-) strand; PAM type: YTN; PAM sequence: TTC
tctacaggtcctgactctat

SEQ ID NO: 258465 - DNA, 20 bp, Artificial Sequence
  Description of Artificial Sequence: Synthetic oligonucleotide
  Target: LAMA2; (-) strand; PAM type: YTN; PAM sequence: CTC
aattctctacaggtcctgac

SEQ ID NO: 258466 - DNA, 20 bp, Artificial Sequence
  Description of Artificial Sequence: Synthetic oligonucleotide
  Target: LAMA2; (-) strand; PAM type: YTN; PAM sequence: CTA
tcctcaattctctacaggtc

SEQ ID NO: 258467 - DNA, 20 bp, Artificial Sequence
  Description of Artificial Sequence: Synthetic oligonucleotide
  Target: LAMA2; (-) strand; PAM type: YTN; PAM sequence: CTA
tgccctatcctcaattctct

SEQ ID NO: 258468 - DNA, 20 bp, Artificial Sequence
  Description of Artificial Sequence: Synthetic oligonucleotide
  Target: LAMA2; (-) strand; PAM type: YTN; PAM sequence: TTC
tatgccctatcctcaattct

SEQ ID NO: 258469 - DNA, 20 bp, Artificial Sequence
  Description of Artificial Sequence: Synthetic oligonucleotide
  Target: LAMA2; (-) strand; PAM type: YTN; PAM sequence: CTT
ctatgccctatcctcaattc

SEQ ID NO: 258470 - DNA, 20 bp, Artificial Sequence
  Description of Artificial Sequence: Synthetic oligonucleotide
  Target: LAMA2; (-) strand; PAM type: YTN; PAM sequence: TTC
ttctatgccctatcctcaat

SEQ ID NO: 258471 - DNA, 20 bp, Artificial Sequence
  Description of Artificial Sequence: Synthetic oligonucleotide
  Target: LAMA2; (-) strand; PAM type: YTN; PAM sequence: CTT
cttctatgccctatcctcaa

SEQ ID NO: 258472 - DNA, 20 bp, Artificial Sequence
  Description of Artificial Sequence: Synthetic oligonucleotide
  Target: LAMA2; (-) strand; PAM type: YTN; PAM sequence: CTC
cttcttctatgccctatcct

SEQ ID NO: 258473 - DNA, 20 bp, Artificial Sequence
  Description of Artificial Sequence: Synthetic oligonucleotide
  Target: LAMA2; (-) strand; PAM type: YTN; PAM sequence: CTC
tccttcttctatgccctatc

SEQ ID NO: 258474 - DNA, 20 bp, Artificial Sequence
  Description of Artificial Sequence: Synthetic oligonucleotide
  Target: LAMA2; (-) strand; PAM type: YTN; PAM sequence: TTC
catctctccttcttctatgc

SEQ ID NO: 258475 - DNA, 20 bp, Artificial Sequence
  Description of Artificial Sequence: Synthetic oligonucleotide
  Target: LAMA2; (-) strand; PAM type: YTN; PAM sequence: TTT
ccatctctccttcttctatg

SEQ ID NO: 258476 - DNA, 20 bp, Artificial Sequence
  Description of Artificial Sequence: Synthetic oligonucleotide
  Target: LAMA2; (-) strand; PAM type: YTN; PAM sequence: TTA
tttccatctctccttcttct

SEQ ID NO: 258477 - DNA, 20 bp, Artificial Sequence
  Description of Artificial Sequence: Synthetic oligonucleotide
  Target: LAMA2; (-) strand; PAM type: YTN; PAM sequence: TTT
atttccatctctccttcttc

SEQ ID NO: 258478 - DNA, 20 bp, Artificial Sequence
  Description of Artificial Sequence: Synthetic oligonucleotide
  Target: LAMA2; (-) strand; PAM type: YTN; PAM sequence: TTT
tatttccatctctccttctt

SEQ ID NO: 258479 - DNA, 20 bp, Artificial Sequence
  Description of Artificial Sequence: Synthetic oligonucleotide
  Target: LAMA2; (-) strand; PAM type: YTN; PAM sequence: TTT
ttatttccatctctccttct

SEQ ID NO: 258480 - DNA, 20 bp, Artificial Sequence
  Description of Artificial Sequence: Synthetic oligonucleotide
  Target: LAMA2; (-) strand; PAM type: YTN; PAM sequence: CTT
tttatttccatctctccttc

SEQ ID NO: 258481 - DNA, 20 bp, Artificial Sequence
  Description of Artificial Sequence: Synthetic oligonucleotide
  Target: LAMA2; (-) strand; PAM type: YTN; PAM sequence: TTA
ctttttatttccatctctcc

SEQ ID NO: 258482 - DNA, 20 bp, Artificial Sequence
  Description of Artificial Sequence: Synthetic oligonucleotide
  Target: LAMA2; (-) strand; PAM type: YTN; PAM sequence: TTT
actttttatttccatctctc

SEQ ID NO: 258483 - DNA, 20 bp, Artificial Sequence
  Description of Artificial Sequence: Synthetic oligonucleotide
  Target: LAMA2; (-) strand; PAM type: YTN; PAM sequence: CTT
tactttttatttccatctct

SEQ ID NO: 258484 - DNA, 20 bp, Artificial Sequence
  Description of Artificial Sequence: Synthetic oligonucleotide
  Target: LAMA2; (-) strand; PAM type: YTN; PAM sequence: TTC
tttactttttatttccatct

SEQ ID NO: 258485 - DNA, 20 bp, Artificial Sequence
  Description of Artificial Sequence: Synthetic oligonucleotide
  Target: LAMA2; (-) strand; PAM type: YTN; PAM sequence: CTT
ctttactttttatttccatc

SEQ ID NO: 258486 - DNA, 20 bp, Artificial Sequence
  Description of Artificial Sequence: Synthetic oligonucleotide
  Target: LAMA2; (-) strand; PAM type: YTN; PAM sequence: TTC
ttctttactttttatttcca

SEQ ID NO: 258487 - DNA, 20 bp, Artificial Sequence
  Description of Artificial Sequence: Synthetic oligonucleotide
  Target: LAMA2; (-) strand; PAM type: YTN; PAM sequence: CTT
cttctttactttttatttcc

SEQ ID NO: 258488 - DNA, 20 bp, Artificial Sequence
  Description of Artificial Sequence: Synthetic oligonucleotide
  Target: LAMA2; (-) strand; PAM type: YTN; PAM sequence: TTC
ttcttctttactttttattt

SEQ ID NO: 258489 - DNA, 20 bp, Artificial Sequence
  Description of Artificial Sequence: Synthetic oligonucleotide
  Target: LAMA2; (-) strand; PAM type: YTN; PAM sequence: CTT
cttcttctttactttttatt

SEQ ID NO: 258490 - DNA, 20 bp, Artificial Sequence
  Description of Artificial Sequence: Synthetic oligonucleotide
  Target: LAMA2; (-) strand; PAM type: YTN; PAM sequence: TTA
cttcttcttctttacttttt

SEQ ID NO: 258491 - DNA, 20 bp, Artificial Sequence
  Description of Artificial Sequence: Synthetic oligonucleotide
  Target: LAMA2; (-) strand; PAM type: YTN; PAM sequence: TTT
acttcttcttctttactttt

SEQ ID NO: 258492 - DNA, 20 bp, Artificial Sequence
  Description of Artificial Sequence: Synthetic oligonucleotide
  Target: LAMA2; (-) strand; PAM type: YTN; PAM sequence: TTT
tacttcttcttctttacttt

SEQ ID NO: 258493 - DNA, 20 bp, Artificial Sequence
  Description of Artificial Sequence: Synthetic oligonucleotide
  Target: LAMA2; (-) strand; PAM type: YTN; PAM sequence: TTT
ttacttcttcttctttactt

SEQ ID NO: 258494 - DNA, 20 bp, Artificial Sequence
  Description of Artificial Sequence: Synthetic oligonucleotide
  Target: LAMA2; (-) strand; PAM type: YTN; PAM sequence: TTT
tttacttcttcttctttact

SEQ ID NO: 258495 - DNA, 20 bp, Artificial Sequence
  Description of Artificial Sequence: Synthetic oligonucleotide
  Target: LAMA2; (-) strand; PAM type: YTN; PAM sequence: TTG
ttttttacttcttcttcttt

SEQ ID NO: 258496 - DNA, 20 bp, Artificial Sequence
  Description of Artificial Sequence: Synthetic oligonucleotide
  Target: LAMA2; (-) strand; PAM type: YTN; PAM sequence: TTA
aaaaatgtgtgataatgagc

SEQ ID NO: 258497 - DNA, 20 bp, Artificial Sequence
  Description of Artificial Sequence: Synthetic oligonucleotide
  Target: LAMA2; (-) strand; PAM type: YTN; PAM sequence: TTT
aaaaaatgtgtgataatgag

SEQ ID NO: 258498 - DNA, 20 bp, Artificial Sequence
  Description of Artificial Sequence: Synthetic oligonucleotide
  Target: LAMA2; (-) strand; PAM type: YTN; PAM sequence: TTT
taaaaaatgtgtgataatga

SEQ ID NO: 258499 - DNA, 20 bp, Artificial Sequence
  Description of Artificial Sequence: Synthetic oligonucleotide
  Target: LAMA2; (-) strand; PAM type: YTN; PAM sequence: TTT
ttaaaaaatgtgtgataatg

SEQ ID NO: 258500 - DNA, 20 bp, Artificial Sequence
  Description of Artificial Sequence: Synthetic oligonucleotide
  Target: LAMA2; (-) strand; PAM type: YTN; PAM sequence: TTT
tttaaaaaatgtgtgataat

SEQ ID NO: 258501 - DNA, 20 bp, Artificial Sequence
  Description of Artificial Sequence: Synthetic oligonucleotide
  Target: LAMA2; (-) strand; PAM type: YTN; PAM sequence: TTG
ttttttaaaaaatgtgtgat

SEQ ID NO: 258502 - DNA, 20 bp, Artificial Sequence
  Description of Artificial Sequence: Synthetic oligonucleotide
  Target: LAMA2; (-) strand; PAM type: YTN; PAM sequence: TTT
gttttttaaaaaatgtgtga

SEQ ID NO: 258503 - DNA, 20 bp, Artificial Sequence
  Description of Artificial Sequence: Synthetic oligonucleotide
  Target: LAMA2; (-) strand; PAM type: YTN; PAM sequence: CTG
acatcaaaatttgtttttta

SEQ ID NO: 258504 - DNA, 20 bp, Artificial Sequence
  Description of Artificial Sequence: Synthetic oligonucleotide
  Target: LAMA2; (-) strand; PAM type: YTN; PAM sequence: CTA
aggcagtctgacatcaaaat

SEQ ID NO: 258505 - DNA, 20 bp, Artificial Sequence
  Description of Artificial Sequence: Synthetic oligonucleotide
  Target: LAMA2; (-) strand; PAM type: YTN; PAM sequence: TTG
atctaaggcagtctgacatc

SEQ ID NO: 258506 - DNA, 20 bp, Artificial Sequence
  Description of Artificial Sequence: Synthetic oligonucleotide
  Target: LAMA2; (-) strand; PAM type: YTN; PAM sequence: TTT
gatctaaggcagtctgacat

SEQ ID NO: 258507 - DNA, 20 bp, Artificial Sequence
  Description of Artificial Sequence: Synthetic oligonucleotide
  Target: LAMA2; (-) strand; PAM type: YTN; PAM sequence: CTA
ggaagtaatgaggccaggat

SEQ ID NO: 258508 - DNA, 20 bp, Artificial Sequence
  Description of Artificial Sequence: Synthetic oligonucleotide
  Target: LAMA2; (-) strand; PAM type: YTN; PAM sequence: TTA
tagctaggaagtaatgaggc

SEQ ID NO: 258509 - DNA, 20 bp, Artificial Sequence
  Description of Artificial Sequence: Synthetic oligonucleotide
  Target: LAMA2; (-) strand; PAM type: YTN; PAM sequence: TTT
atagctaggaagtaatgagg

SEQ ID NO: 258510 - DNA, 20 bp, Artificial Sequence
  Description of Artificial Sequence: Synthetic oligonucleotide
  Target: LAMA2; (-) strand; PAM type: YTN; PAM sequence: TTC
aaggaatttatagctaggaa

SEQ ID NO: 258511 - DNA, 20 bp, Artificial Sequence
  Description of Artificial Sequence: Synthetic oligonucleotide
  Target: LAMA2; (-) strand; PAM type: YTN; PAM sequence: TTA
cagaaagattcaaggaattt

SEQ ID NO: 258512 - DNA, 20 bp, Artificial Sequence
  Description of Artificial Sequence: Synthetic oligonucleotide
  Target: LAMA2; (-) strand; PAM type: YTN; PAM sequence: CTG
aattacagaaagattcaagg

SEQ ID NO: 258513 - DNA, 20 bp, Artificial Sequence
  Description of Artificial Sequence: Synthetic oligonucleotide
  Target: LAMA2; (-) strand; PAM type: YTN; PAM sequence: CTA
cagatgaagaagctgaatta

SEQ ID NO: 258514 - DNA, 20 bp, Artificial Sequence
  Description of Artificial Sequence: Synthetic oligonucleotide
  Target: LAMA2; (-) strand; PAM type: YTN; PAM sequence: TTA
ctacagatgaagaagctgaa

SEQ ID NO: 258515 - DNA, 20 bp, Artificial Sequence
  Description of Artificial Sequence: Synthetic oligonucleotide
  Target: LAMA2; (-) strand; PAM type: YTN; PAM sequence: CTT
actacagatgaagaagctga

SEQ ID NO: 258516 - DNA, 20 bp, Artificial Sequence
  Description of Artificial Sequence: Synthetic oligonucleotide
  Target: LAMA2; (-) strand; PAM type: YTN; PAM sequence: CTG
aagtggatcttactacagat

SEQ ID NO: 258517 - DNA, 20 bp, Artificial Sequence
  Description of Artificial Sequence: Synthetic oligonucleotide
  Target: LAMA2; (-) strand; PAM type: YTN; PAM sequence: CTC
tgaagtggatcttactacag

SEQ ID NO: 258518 - DNA, 20 bp, Artificial Sequence
  Description of Artificial Sequence: Synthetic oligonucleotide
  Target: LAMA2; (-) strand; PAM type: YTN; PAM sequence: TTG
gagtacgtaagcagacataa

SEQ ID NO: 258519 - DNA, 20 bp, Artificial Sequence
  Description of Artificial Sequence: Synthetic oligonucleotide
  Target: LAMA2; (-) strand; PAM type: YTN; PAM sequence: CTT
ggagtacgtaagcagacata

SEQ ID NO: 258520 - DNA, 20 bp, Artificial Sequence
  Description of Artificial Sequence: Synthetic oligonucleotide
  Target: LAMA2; (-) strand; PAM type: YTN; PAM sequence: TTC
ttggagtacgtaagcagaca

SEQ ID NO: 258521 - DNA, 20 bp, Artificial Sequence
  Description of Artificial Sequence: Synthetic oligonucleotide
  Target: LAMA2; (-) strand; PAM type: YTN; PAM sequence: CTT
cttggagtacgtaagcagac

SEQ ID NO: 258522 - DNA, 20 bp, Artificial Sequence
  Description of Artificial Sequence: Synthetic oligonucleotide
  Target: LAMA2; (-) strand; PAM type: YTN; PAM sequence: TTG
cttcttggagtacgtaagca

SEQ ID NO: 258523 - DNA, 20 bp, Artificial Sequence
  Description of Artificial Sequence: Synthetic oligonucleotide
  Target: LAMA2; (-) strand; PAM type: YTN; PAM sequence: TTT
gcttcttggagtacgtaagc

SEQ ID NO: 258524 - DNA, 20 bp, Artificial Sequence
  Description of Artificial Sequence: Synthetic oligonucleotide
  Target: LAMA2; (-) strand; PAM type: YTN; PAM sequence: TTG
gcatttgcttcttggagtac

SEQ ID NO: 258525 - DNA, 20 bp, Artificial Sequence
  Description of Artificial Sequence: Synthetic oligonucleotide
  Target: LAMA2; (-) strand; PAM type: YTN; PAM sequence: CTT
ggcatttgcttcttggagta

SEQ ID NO: 258526 - DNA, 20 bp, Artificial Sequence
  Description of Artificial Sequence: Synthetic oligonucleotide
  Target: LAMA2; (-) strand; PAM type: YTN; PAM sequence: CTC
ttggcatttgcttcttggag

SEQ ID NO: 258527 - DNA, 20 bp, Artificial Sequence
  Description of Artificial Sequence: Synthetic oligonucleotide
  Target: LAMA2; (-) strand; PAM type: YTN; PAM sequence: TTC
ccccaggaaacctcttggca

SEQ ID NO: 258528 - DNA, 20 bp, Artificial Sequence
  Description of Artificial Sequence: Synthetic oligonucleotide
  Target: LAMA2; (-) strand; PAM type: YTN; PAM sequence: TTT
cccccaggaaacctcttggc

SEQ ID NO: 258529 - DNA, 20 bp, Artificial Sequence
  Description of Artificial Sequence: Synthetic oligonucleotide
  Target: LAMA2; (-) strand; PAM type: YTN; PAM sequence: CTT
tcccccaggaaacctcttgg

SEQ ID NO: 258530 - DNA, 20 bp, Artificial Sequence
  Description of Artificial Sequence: Synthetic oligonucleotide
  Target: LAMA2; (-) strand; PAM type: YTN; PAM sequence: TTG
gcctttcccccaggaaacct

SEQ ID NO: 258531 - DNA, 20 bp, Artificial Sequence
  Description of Artificial Sequence: Synthetic oligonucleotide
  Target: LAMA2; (-) strand; PAM type: YTN; PAM sequence: TTC
gttggcctttcccccaggaa

SEQ ID NO: 258532 - DNA, 20 bp, Artificial Sequence
  Description of Artificial Sequence: Synthetic oligonucleotide
  Target: LAMA2; (-) strand; PAM type: YTN; PAM sequence: CTT
cgttggcctttcccccagga

SEQ ID NO: 258533 - DNA, 20 bp, Artificial Sequence
  Description of Artificial Sequence: Synthetic oligonucleotide
  Target: LAMA2; (-) strand; PAM type: YTN; PAM sequence: TTC
atgcttcgttggcctttccc

SEQ ID NO: 258534 - DNA, 20 bp, Artificial Sequence
  Description of Artificial Sequence: Synthetic oligonucleotide
  Target: LAMA2; (-) strand; PAM type: YTN; PAM sequence: CTT
catgcttcgttggcctttcc

SEQ ID NO: 258535 - DNA, 20 bp, Artificial Sequence
  Description of Artificial Sequence: Synthetic oligonucleotide
  Target: LAMA2; (-) strand; PAM type: YTN; PAM sequence: CTC
ccacttcatgcttcgttggc

SEQ ID NO: 258536 - DNA, 20 bp, Artificial Sequence
  Description of Artificial Sequence: Synthetic oligonucleotide
  Target: LAMA2; (-) strand; PAM type: YTN; PAM sequence: CTG
tctcccacttcatgcttcgt

SEQ ID NO: 258537 - DNA, 20 bp, Artificial Sequence
  Description of Artificial Sequence: Synthetic oligonucleotide
  Target: LAMA2; (-) strand; PAM type: YTN; PAM sequence: CTA
tgctgtctcccacttcatgc

SEQ ID NO: 258538 - DNA, 20 bp, Artificial Sequence
  Description of Artificial Sequence: Synthetic oligonucleotide
  Target: LAMA2; (-) strand; PAM type: YTN; PAM sequence: TTG
cagcagaaggctatgctgtc

SEQ ID NO: 258539 - DNA, 20 bp, Artificial Sequence
  Description of Artificial Sequence: Synthetic oligonucleotide
  Target: LAMA2; (-) strand; PAM type: YTN; PAM sequence: TTC
ccgggagtcagaaccccatt

SEQ ID NO: 258540 - DNA, 20 bp, Artificial Sequence
  Description of Artificial Sequence: Synthetic oligonucleotide
  Target: LAMA2; (-) strand; PAM type: YTN; PAM sequence: TTT
cccgggagtcagaaccccat

SEQ ID NO: 258541 - DNA, 20 bp, Artificial Sequence
  Description of Artificial Sequence: Synthetic oligonucleotide
  Target: LAMA2; (-) strand; PAM type: YTN; PAM sequence: TTT
tcccgggagtcagaacccca

SEQ ID NO: 258542 - DNA, 20 bp, Artificial Sequence
  Description of Artificial Sequence: Synthetic oligonucleotide
  Target: LAMA2; (-) strand; PAM type: YTN; PAM sequence: CTG
tgttttcccgggagtcagaa

SEQ ID NO: 258543 - DNA, 20 bp, Artificial Sequence
  Description of Artificial Sequence: Synthetic oligonucleotide
  Target: LAMA2; (-) strand; PAM type: YTN; PAM sequence: TTC
tgtgttttcccgggagtcag

SEQ ID NO: 258544 - DNA, 20 bp, Artificial Sequence
  Description of Artificial Sequence: Synthetic oligonucleotide
  Target: LAMA2; (-) strand; PAM type: YTN; PAM sequence: TTT
ctgtgttttcccgggagtca

SEQ ID NO: 258545 - DNA, 20 bp, Artificial Sequence
  Description of Artificial Sequence: Synthetic oligonucleotide
  Target: LAMA2; (-) strand; PAM type: YTN; PAM sequence: CTT
tctgtgttttcccgggagtc

SEQ ID NO: 258546 - DNA, 20 bp, Artificial Sequence
  Description of Artificial Sequence: Synthetic oligonucleotide
  Target: LAMA2; (-) strand; PAM type: YTN; PAM sequence: TTC
tttctgtgttttcccgggag

SEQ ID NO: 258547 - DNA, 20 bp, Artificial Sequence
  Description of Artificial Sequence: Synthetic oligonucleotide
  Target: LAMA2; (-) strand; PAM type: YTN; PAM sequence: TTT
ctttctgtgttttcccggga

SEQ ID NO: 258548 - DNA, 20 bp, Artificial Sequence
  Description of Artificial Sequence: Synthetic oligonucleotide
  Target: LAMA2; (-) strand; PAM type: YTN; PAM sequence: CTT
tctttctgtgttttcccggg

SEQ ID NO: 258549 - DNA, 20 bp, Artificial Sequence
  Description of Artificial Sequence: Synthetic oligonucleotide
  Target: LAMA2; (-) strand; PAM type: YTN; PAM sequence: CTA
cccagtctttctttctgtgt

SEQ ID NO: 258550 - DNA, 20 bp, Artificial Sequence
  Description of Artificial Sequence: Synthetic oligonucleotide
  Target: LAMA2; (-) strand; PAM type: YTN; PAM sequence: TTC
ctacccagtctttctttctg

SEQ ID NO: 258551 - DNA, 20 bp, Artificial Sequence
  Description of Artificial Sequence: Synthetic oligonucleotide
  Target: LAMA2; (-) strand; PAM type: YTN; PAM sequence: TTT
cctacccagtctttctttct

SEQ ID NO: 258552 - DNA, 20 bp, Artificial Sequence
  Description of Artificial Sequence: Synthetic oligonucleotide
  Target: LAMA2; (-) strand; PAM type: YTN; PAM sequence: TTT
tcctacccagtctttctttc

SEQ ID NO: 258553 - DNA, 20 bp, Artificial Sequence
  Description of Artificial Sequence: Synthetic oligonucleotide
  Target: LAMA2; (-) strand; PAM type: YTN; PAM sequence: CTT
ttcctacccagtctttcttt

SEQ ID NO: 258554 - DNA, 20 bp, Artificial Sequence
  Description of Artificial Sequence: Synthetic oligonucleotide
  Target: LAMA2; (-) strand; PAM type: YTN; PAM sequence: TTG
acaaaatgcaccaaacaagg

SEQ ID NO: 258555 - DNA, 20 bp, Artificial Sequence
  Description of Artificial Sequence: Synthetic oligonucleotide
  Target: LAMA2; (-) strand; PAM type: YTN; PAM sequence: TTT
gacaaaatgcaccaaacaag

SEQ ID NO: 258556 - DNA, 20 bp, Artificial Sequence
  Description of Artificial Sequence: Synthetic oligonucleotide
  Target: LAMA2; (-) strand; PAM type: YTN; PAM sequence: TTA
agatttgacaaaatgcacca

SEQ ID NO: 258557 - DNA, 20 bp, Artificial Sequence
  Description of Artificial Sequence: Synthetic oligonucleotide
  Target: LAMA2; (-) strand; PAM type: YTN; PAM sequence: TTT
aagatttgacaaaatgcacc

SEQ ID NO: 258558 - DNA, 20 bp, Artificial Sequence
  Description of Artificial Sequence: Synthetic oligonucleotide
  Target: LAMA2; (-) strand; PAM type: YTN; PAM sequence: TTG
gccaagaatttaagatttga

SEQ ID NO: 258559 - DNA, 20 bp, Artificial Sequence
  Description of Artificial Sequence: Synthetic oligonucleotide
  Target: LAMA2; (-) strand; PAM type: YTN; PAM sequence: CTT
ggccaagaatttaagatttg

SEQ ID NO: 258560 - DNA, 20 bp, Artificial Sequence
  Description of Artificial Sequence: Synthetic oligonucleotide
  Target: LAMA2; (-) strand; PAM type: YTN; PAM sequence: TTG
gcttggccaagaatttaaga

SEQ ID NO: 258561 - DNA, 20 bp, Artificial Sequence
  Description of Artificial Sequence: Synthetic oligonucleotide
  Target: LAMA2; (-) strand; PAM type: YTN; PAM sequence: TTG
ggtatatcccattggcttgg

SEQ ID NO: 258562 - DNA, 20 bp, Artificial Sequence
  Description of Artificial Sequence: Synthetic oligonucleotide
  Target: LAMA2; (-) strand; PAM type: YTN; PAM sequence: CTT
gggtatatcccattggcttg

SEQ ID NO: 258563 - DNA, 20 bp, Artificial Sequence
  Description of Artificial Sequence: Synthetic oligonucleotide
  Target: LAMA2; (-) strand; PAM type: YTN; PAM sequence: TTG
cttgggtatatcccattggc

SEQ ID NO: 258564 - DNA, 20 bp, Artificial Sequence
  Description of Artificial Sequence: Synthetic oligonucleotide
  Target: LAMA2; (-) strand; PAM type: YTN; PAM sequence: TTT
gcttgggtatatcccattgg

SEQ ID NO: 258565 - DNA, 20 bp, Artificial Sequence
  Description of Artificial Sequence: Synthetic oligonucleotide
  Target: LAMA2; (-) strand; PAM type: YTN; PAM sequence: TTA
gtgggtaaaatttgcttggg

SEQ ID NO: 258566 - DNA, 20 bp, Artificial Sequence
  Description of Artificial Sequence: Synthetic oligonucleotide
  Target: LAMA2; (-) strand; PAM type: YTN; PAM sequence: TTT
agtgggtaaaatttgcttgg

SEQ ID NO: 258567 - DNA, 20 bp, Artificial Sequence
  Description of Artificial Sequence: Synthetic oligonucleotide
  Target: LAMA2; (-) strand; PAM type: YTN; PAM sequence: CTT
tagtgggtaaaatttgcttg

SEQ ID NO: 258568 - DNA, 20 bp, Artificial Sequence
  Description of Artificial Sequence: Synthetic oligonucleotide
  Target: LAMA2; (-) strand; PAM type: YTN; PAM sequence: TTC
ctttagtgggtaaaatttgc

SEQ ID NO: 258569 - DNA, 20 bp, Artificial Sequence
  Description of Artificial Sequence: Synthetic oligonucleotide
  Target: LAMA2; (-) strand; PAM type: YTN; PAM sequence: TTC
aggattcctttagtgggtaa

SEQ ID NO: 258570 - DNA, 20 bp, Artificial Sequence
  Description of Artificial Sequence: Synthetic oligonucleotide
  Target: LAMA2; (-) strand; PAM type: YTN; PAM sequence: CTG
accaattcaggattccttta

SEQ ID NO: 258571 - DNA, 20 bp, Artificial Sequence
  Description of Artificial Sequence: Synthetic oligonucleotide
  Target: LAMA2; (-) strand; PAM type: YTN; PAM sequence: CTC
cctgaccaattcaggattcc

SEQ ID NO: 258572 - DNA, 20 bp, Artificial Sequence
  Description of Artificial Sequence: Synthetic oligonucleotide
  Target: LAMA2; (-) strand; PAM type: YTN; PAM sequence: CTA
gaacctccctgaccaattca

SEQ ID NO: 258573 - DNA, 20 bp, Artificial Sequence
  Description of Artificial Sequence: Synthetic oligonucleotide
  Target: LAMA2; (-) strand; PAM type: YTN; PAM sequence: CTG
taagatactagaacctccct

SEQ ID NO: 258574 - DNA, 20 bp, Artificial Sequence
  Description of Artificial Sequence: Synthetic oligonucleotide
  Target: LAMA2; (-) strand; PAM type: YTN; PAM sequence: TTA
ctgtaagatactagaacctc

SEQ ID NO: 258575 - DNA, 20 bp, Artificial Sequence
  Description of Artificial Sequence: Synthetic oligonucleotide
  Target: LAMA2; (-) strand; PAM type: YTN; PAM sequence: CTG
attactgtaagatactagaa

SEQ ID NO: 258576 - DNA, 20 bp, Artificial Sequence
  Description of Artificial Sequence: Synthetic oligonucleotide
  Target: LAMA2; (-) strand; PAM type: YTN; PAM sequence: CTC
aggctgattactgtaagata

SEQ ID NO: 258577 - DNA, 20 bp, Artificial Sequence
  Description of Artificial Sequence: Synthetic oligonucleotide
  Target: LAMA2; (-) strand; PAM type: YTN; PAM sequence: CTC
tcaggctgattactgtaaga

SEQ ID NO: 258578 - DNA, 20 bp, Artificial Sequence
  Description of Artificial Sequence: Synthetic oligonucleotide
  Target: LAMA2; (-) strand; PAM type: YTN; PAM sequence: TTC
tctcaggctgattactgtaa

SEQ ID NO: 258579 - DNA, 20 bp, Artificial Sequence
  Description of Artificial Sequence: Synthetic oligonucleotide
  Target: LAMA2; (-) strand; PAM type: YTN; PAM sequence: CTT
ctctcaggctgattactgta

SEQ ID NO: 258580 - DNA, 20 bp, Artificial Sequence
  Description of Artificial Sequence: Synthetic oligonucleotide
  Target: LAMA2; (-) strand; PAM type: YTN; PAM sequence: TTC
cacaagagtatccttctctc

SEQ ID NO: 258581 - DNA, 20 bp, Artificial Sequence
  Description of Artificial Sequence: Synthetic oligonucleotide
  Target: LAMA2; (-) strand; PAM type: YTN; PAM sequence: CTT
ccacaagagtatccttctct

SEQ ID NO: 258582 - DNA, 20 bp, Artificial Sequence
  Description of Artificial Sequence: Synthetic oligonucleotide
  Target: LAMA2; (-) strand; PAM type: YTN; PAM sequence: TTA
agatgagcttccacaagagt

SEQ ID NO: 258583 - DNA, 20 bp, Artificial Sequence
  Description of Artificial Sequence: Synthetic oligonucleotide
  Target: LAMA2; (-) strand; PAM type: YTN; PAM sequence: CTG
aatgaattaagatgagcttc

SEQ ID NO: 258584 - DNA, 20 bp, Artificial Sequence
  Description of Artificial Sequence: Synthetic oligonucleotide
  Target: LAMA2; (-) strand; PAM type: YTN; PAM sequence: CTC
tgaatgaattaagatgagct

SEQ ID NO: 258585 - DNA, 20 bp, Artificial Sequence
  Description of Artificial Sequence: Synthetic oligonucleotide
  Target: LAMA2; (-) strand; PAM type: YTN; PAM sequence: TTA
tagcactctgaatgaattaa

SEQ ID NO: 258586 - DNA, 20 bp, Artificial Sequence
  Description of Artificial Sequence: Synthetic oligonucleotide
  Target: LAMA2; (-) strand; PAM type: YTN; PAM sequence: CTT
atagcactctgaatgaatta

SEQ ID NO: 258587 - DNA, 20 bp, Artificial Sequence
  Description of Artificial Sequence: Synthetic oligonucleotide
  Target: LAMA2; (-) strand; PAM type: YTN; PAM sequence: CTC
ttatagcactctgaatgaat

SEQ ID NO: 258588 - DNA, 20 bp, Artificial Sequence
  Description of Artificial Sequence: Synthetic oligonucleotide
  Target: LAMA2; (-) strand; PAM type: YTN; PAM sequence: TTA
tgctcttatagcactctgaa

SEQ ID NO: 258589 - DNA, 20 bp, Artificial Sequence
  Description of Artificial Sequence: Synthetic oligonucleotide
  Target: LAMA2; (-) strand; PAM type: YTN; PAM sequence: CTA
tgttatgctcttatagcact

SEQ ID NO: 258590 - DNA, 20 bp, Artificial Sequence
  Description of Artificial Sequence: Synthetic oligonucleotide
  Target: LAMA2; (-) strand; PAM type: YTN; PAM sequence: TTA
gtctatgttatgctcttata

SEQ ID NO: 258591 - DNA, 20 bp, Artificial Sequence
  Description of Artificial Sequence: Synthetic oligonucleotide
  Target: LAMA2; (-) strand; PAM type: YTN; PAM sequence: CTT
agtctatgttatgctcttat

SEQ ID NO: 258592 - DNA, 20 bp, Artificial Sequence
  Description of Artificial Sequence: Synthetic oligonucleotide
  Target: LAMA2; (-) strand; PAM type: YTN; PAM sequence: TTA
catgccacttagtctatgtt

SEQ ID NO: 258593 - DNA, 20 bp, Artificial Sequence
  Description of Artificial Sequence: Synthetic oligonucleotide
  Target: LAMA2; (-) strand; PAM type: YTN; PAM sequence: TTT
acatgccacttagtctatgt

SEQ ID NO: 258594 - DNA, 20 bp, Artificial Sequence
  Description of Artificial Sequence: Synthetic oligonucleotide
  Target: LAMA2; (-) strand; PAM type: YTN; PAM sequence: TTG
tttacatgccacttagtcta

SEQ ID NO: 258595 - DNA, 20 bp, Artificial Sequence
  Description of Artificial Sequence: Synthetic oligonucleotide
  Target: LAMA2; (-) strand; PAM type: YTN; PAM sequence: TTC
cattgtttacatgccactta

SEQ ID NO: 258596 - DNA, 20 bp, Artificial Sequence
  Description of Artificial Sequence: Synthetic oligonucleotide
  Target: LAMA2; (-) strand; PAM type: YTN; PAM sequence: TTT
ccattgtttacatgccactt

SEQ ID NO: 258597 - DNA, 20 bp, Artificial Sequence
  Description of Artificial Sequence: Synthetic oligonucleotide
  Target: LAMA2; (-) strand; PAM type: YTN; PAM sequence: CTA
gaatcgtgagaaatgaattt

SEQ ID NO: 258598 - DNA, 20 bp, Artificial Sequence
  Description of Artificial Sequence: Synthetic oligonucleotide
  Target: LAMA2; (-) strand; PAM type: YTN; PAM sequence: CTC
tagaatcgtgagaaatgaat

SEQ ID NO: 258599 - DNA, 20 bp, Artificial Sequence
  Description of Artificial Sequence: Synthetic oligonucleotide
  Target: LAMA2; (-) strand; PAM type: YTN; PAM sequence: TTC
ccagcctctagaatcgtgag

SEQ ID NO: 258600 - DNA, 20 bp, Artificial Sequence
  Description of Artificial Sequence: Synthetic oligonucleotide
  Target: LAMA2; (-) strand; PAM type: YTN; PAM sequence: CTT
cccagcctctagaatcgtga

SEQ ID NO: 258601 - DNA, 20 bp, Artificial Sequence
  Description of Artificial Sequence: Synthetic oligonucleotide
  Target: LAMA2; (-) strand; PAM type: YTN; PAM sequence: TTG
tacttcccagcctctagaat

SEQ ID NO: 258602 - DNA, 20 bp, Artificial Sequence
  Description of Artificial Sequence: Synthetic oligonucleotide
  Target: LAMA2; (-) strand; PAM type: YTN; PAM sequence: CTT
gtacttcccagcctctagaa

SEQ ID NO: 258603 - DNA, 20 bp, Artificial Sequence
  Description of Artificial Sequence: Synthetic oligonucleotide
  Target: LAMA2; (-) strand; PAM type: YTN; PAM sequence: CTG
gatcttgtacttcccagcct

SEQ ID NO: 258604 - DNA, 20 bp, Artificial Sequence
  Description of Artificial Sequence: Synthetic oligonucleotide
  Target: LAMA2; (-) strand; PAM type: YTN; PAM sequence: CTG
ccagcacctggatcttgtac

SEQ ID NO: 258605 - DNA, 20 bp, Artificial Sequence
  Description of Artificial Sequence: Synthetic oligonucleotide
  Target: LAMA2; (-) strand; PAM type: YTN; PAM sequence: CTA
gataggaaatctgccagcac

SEQ ID NO: 258606 - DNA, 20 bp, Artificial Sequence
  Description of Artificial Sequence: Synthetic oligonucleotide
  Target: LAMA2; (-) strand; PAM type: YTN; PAM sequence: CTC
actagataggaaatctgcca

SEQ ID NO: 258607 - DNA, 20 bp, Artificial Sequence
  Description of Artificial Sequence: Synthetic oligonucleotide
  Target: LAMA2; (-) strand; PAM type: YTN; PAM sequence: CTA
gagaaagagggccctcacta

SEQ ID NO: 258608 - DNA, 20 bp, Artificial Sequence
  Description of Artificial Sequence: Synthetic oligonucleotide
  Target: LAMA2; (-) strand; PAM type: YTN; PAM sequence: CTG
tctagagaaagagggccctc

SEQ ID NO: 258609 - DNA, 20 bp, Artificial Sequence
  Description of Artificial Sequence: Synthetic oligonucleotide
  Target: LAMA2; (-) strand; PAM type: YTN; PAM sequence: TTC
cagtgggtaaatgactgtct

SEQ ID NO: 258610 - DNA, 20 bp, Artificial Sequence
  Description of Artificial Sequence: Synthetic oligonucleotide
  Target: LAMA2; (-) strand; PAM type: YTN; PAM sequence: CTC
ccccaagtgaggttccagtg

SEQ ID NO: 258611 - DNA, 20 bp, Artificial Sequence
  Description of Artificial Sequence: Synthetic oligonucleotide
  Target: LAMA2; (-) strand; PAM type: YTN; PAM sequence: TTC
ctcccccaagtgaggttcca

SEQ ID NO: 258612 - DNA, 20 bp, Artificial Sequence
  Description of Artificial Sequence: Synthetic oligonucleotide
  Target: LAMA2; (-) strand; PAM type: YTN; PAM sequence: TTT
cctcccccaagtgaggttcc

SEQ ID NO: 258613 - DNA, 20 bp, Artificial Sequence
  Description of Artificial Sequence: Synthetic oligonucleotide
  Target: LAMA2; (-) strand; PAM type: YTN; PAM sequence: CTC
agagagtttcctcccccaag

SEQ ID NO: 258614 - DNA, 20 bp, Artificial Sequence
  Description of Artificial Sequence: Synthetic oligonucleotide
  Target: LAMA2; (-) strand; PAM type: YTN; PAM sequence: TTA
taaaagaggcctcagagagt

SEQ ID NO: 258615 - DNA, 20 bp, Artificial Sequence
  Description of Artificial Sequence: Synthetic oligonucleotide
  Target: LAMA2; (-) strand; PAM type: YTN; PAM sequence: CTT
ataaaagaggcctcagagag

SEQ ID NO: 258616 - DNA, 20 bp, Artificial Sequence
  Description of Artificial Sequence: Synthetic oligonucleotide
  Target: LAMA2; (-) strand; PAM type: YTN; PAM sequence: CTG
cacttataaaagaggcctca

SEQ ID NO: 258617 - DNA, 20 bp, Artificial Sequence
  Description of Artificial Sequence: Synthetic oligonucleotide
  Target: LAMA2; (-) strand; PAM type: YTN; PAM sequence: CTC
atgaatgggatcactgcact

SEQ ID NO: 258618 - DNA, 20 bp, Artificial Sequence
  Description of Artificial Sequence: Synthetic oligonucleotide
  Target: LAMA2; (-) strand; PAM type: YTN; PAM sequence: CTC
tcatgaatgggatcactgca

SEQ ID NO: 258619 - DNA, 20 bp, Artificial Sequence
  Description of Artificial Sequence: Synthetic oligonucleotide
  Target: LAMA2; (-) strand; PAM type: YTN; PAM sequence: TTA
ggtcatgagaatggagctct

SEQ ID NO: 258620 - DNA, 20 bp, Artificial Sequence
  Description of Artificial Sequence: Synthetic oligonucleotide
  Target: LAMA2; (-) strand; PAM type: YTN; PAM sequence: TTG
ggaggtgattaggtcatgag

SEQ ID NO: 258621 - DNA, 20 bp, Artificial Sequence
  Description of Artificial Sequence: Synthetic oligonucleotide
  Target: LAMA2; (-) strand; PAM type: YTN; PAM sequence: TTT
gggaggtgattaggtcatga

SEQ ID NO: 258622 - DNA, 20 bp, Artificial Sequence
  Description of Artificial Sequence: Synthetic oligonucleotide
  Target: LAMA2; (-) strand; PAM type: YTN; PAM sequence: CTT
tgggaggtgattaggtcatg

SEQ ID NO: 258623 - DNA, 20 bp, Artificial Sequence
  Description of Artificial Sequence: Synthetic oligonucleotide
  Target: LAMA2; (-) strand; PAM type: YTN; PAM sequence: CTC
aaggtggtggtatagacagg

SEQ ID NO: 258624 - DNA, 20 bp, Artificial Sequence
  Description of Artificial Sequence: Synthetic oligonucleotide
  Target: LAMA2; (-) strand; PAM type: YTN; PAM sequence: TTA
accctcaaggtggtggtata

SEQ ID NO: 258625 - DNA, 20 bp, Artificial Sequence
  Description of Artificial Sequence: Synthetic oligonucleotide
  Target: LAMA2; (-) strand; PAM type: YTN; PAM sequence: CTT
aaccctcaaggtggtggtat

SEQ ID NO: 258626 - DNA, 20 bp, Artificial Sequence
  Description of Artificial Sequence: Synthetic oligonucleotide
  Target: LAMA2; (-) strand; PAM type: YTN; PAM sequence: TTC
atatgtagaaatcttaaccc

SEQ ID NO: 258627 - DNA, 20 bp, Artificial Sequence
  Description of Artificial Sequence: Synthetic oligonucleotide
  Target: LAMA2; (-) strand; PAM type: YTN; PAM sequence: TTA
tgtcccccaaaattcatatg

SEQ ID NO: 258628 - DNA, 20 bp, Artificial Sequence
  Description of Artificial Sequence: Synthetic oligonucleotide
  Target: LAMA2; (-) strand; PAM type: YTN; PAM sequence: TTT
atgtcccccaaaattcatat

SEQ ID NO: 258629 - DNA, 20 bp, Artificial Sequence
  Description of Artificial Sequence: Synthetic oligonucleotide
  Target: LAMA2; (-) strand; PAM type: YTN; PAM sequence: CTG
aatgtttatgtcccccaaaa

SEQ ID NO: 258630 - DNA, 20 bp, Artificial Sequence
  Description of Artificial Sequence: Synthetic oligonucleotide
  Target: LAMA2; (-) strand; PAM type: YTN; PAM sequence: CTG
taatggactgaatgtttatg

SEQ ID NO: 258631 - DNA, 20 bp, Artificial Sequence
  Description of Artificial Sequence: Synthetic oligonucleotide
  Target: LAMA2; (-) strand; PAM type: YTN; PAM sequence: CTC
tgtaatggactgaatgttta

SEQ ID NO: 258632 - DNA, 20 bp, Artificial Sequence
  Description of Artificial Sequence: Synthetic oligonucleotide
  Target: LAMA2; (-) strand; PAM type: YTN; PAM sequence: TTG
gacccatcagaggtgctctg

SEQ ID NO: 258633 - DNA, 20 bp, Artificial Sequence
  Description of Artificial Sequence: Synthetic oligonucleotide
  Target: LAMA2; (-) strand; PAM type: YTN; PAM sequence: TTT
ggacccatcagaggtgctct

SEQ ID NO: 258634 - DNA, 20 bp, Artificial Sequence
  Description of Artificial Sequence: Synthetic oligonucleotide
  Target: LAMA2; (-) strand; PAM type: YTN; PAM sequence: TTT
tggacccatcagaggtgctc

SEQ ID NO: 258635 - DNA, 20 bp, Artificial Sequence
  Description of Artificial Sequence: Synthetic oligonucleotide
  Target: LAMA2; (-) strand; PAM type: YTN; PAM sequence: CTT
ttggacccatcagaggtgct

SEQ ID NO: 258636 - DNA, 20 bp, Artificial Sequence
  Description of Artificial Sequence: Synthetic oligonucleotide
  Target: LAMA2; (-) strand; PAM type: YTN; PAM sequence: TTG
tcttttggacccatcagagg

SEQ ID NO: 258637 - DNA, 20 bp, Artificial Sequence
  Description of Artificial Sequence: Synthetic oligonucleotide
  Target: LAMA2; (-) strand; PAM type: YTN; PAM sequence: CTT
gtcttttggacccatcagag

SEQ ID NO: 258638 - DNA, 20 bp, Artificial Sequence
  Description of Artificial Sequence: Synthetic oligonucleotide
  Target: LAMA2; (-) strand; PAM type: YTN; PAM sequence: TTC
ttgtcttttggacccatcag

SEQ ID NO: 258639 - DNA, 20 bp, Artificial Sequence
  Description of Artificial Sequence: Synthetic oligonucleotide
  Target: LAMA2; (-) strand; PAM type: YTN; PAM sequence: TTT
cttgtcttttggacccatca

SEQ ID NO: 258640 - DNA, 20 bp, Artificial Sequence
  Description of Artificial Sequence: Synthetic oligonucleotide
  Target: LAMA2; (-) strand; PAM type: YTN; PAM sequence: CTC
cagtttcttgtcttttggac

SEQ ID NO: 258641 - DNA, 20 bp, Artificial Sequence
  Description of Artificial Sequence: Synthetic oligonucleotide
  Target: LAMA2; (-) strand; PAM type: YTN; PAM sequence: CTG
aaagcctccagtttcttgtc

SEQ ID NO: 258642 - DNA, 20 bp, Artificial Sequence
  Description of Artificial Sequence: Synthetic oligonucleotide
  Target: LAMA2; (-) strand; PAM type: YTN; PAM sequence: CTG
actgaaagcctccagtttct

SEQ ID NO: 258643 - DNA, 20 bp, Artificial Sequence
  Description of Artificial Sequence: Synthetic oligonucleotide
  Target: LAMA2; (-) strand; PAM type: YTN; PAM sequence: TTA
ctgactgaaagcctccagtt

SEQ ID NO: 258644 - DNA, 20 bp, Artificial Sequence
  Description of Artificial Sequence: Synthetic oligonucleotide
  Target: LAMA2; (-) strand; PAM type: YTN; PAM sequence: TTT
actgactgaaagcctccagt

SEQ ID NO: 258645 - DNA, 20 bp, Artificial Sequence
  Description of Artificial Sequence: Synthetic oligonucleotide
  Target: LAMA2; (-) strand; PAM type: YTN; PAM sequence: TTT
tactgactgaaagcctccag

SEQ ID NO: 258646 - DNA, 20 bp, Artificial Sequence
  Description of Artificial Sequence: Synthetic oligonucleotide
  Target: LAMA2; (-) strand; PAM type: YTN; PAM sequence: CTA
cagtgtggaattttactgac

SEQ ID NO: 258647 - DNA, 20 bp, Artificial Sequence
  Description of Artificial Sequence: Synthetic oligonucleotide
  Target: LAMA2; (-) strand; PAM type: YTN; PAM sequence: CTG
caagacaacctacagtgtgg

SEQ ID NO: 258648 - DNA, 20 bp, Artificial Sequence
  Description of Artificial Sequence: Synthetic oligonucleotide
  Target: LAMA2; (-) strand; PAM type: YTN; PAM sequence: CTA
cctgcaagacaacctacagt

SEQ ID NO: 258649 - DNA, 20 bp, Artificial Sequence
  Description of Artificial Sequence: Synthetic oligonucleotide
  Target: LAMA2; (-) strand; PAM type: YTN; PAM sequence: CTC
atccgatctacctgcaagac

SEQ ID NO: 258650 - DNA, 20 bp, Artificial Sequence
  Description of Artificial Sequence: Synthetic oligonucleotide
  Target: LAMA2; (-) strand; PAM type: YTN; PAM sequence: TTG
gaggcgcctcatccgatcta

SEQ ID NO: 258651 - DNA, 20 bp, Artificial Sequence
  Description of Artificial Sequence: Synthetic oligonucleotide
  Target: LAMA2; (-) strand; PAM type: YTN; PAM sequence: CTT
ggaggcgcctcatccgatct

SEQ ID NO: 258652 - DNA, 20 bp, Artificial Sequence
  Description of Artificial Sequence: Synthetic oligonucleotide
  Target: LAMA2; (-) strand; PAM type: YTN; PAM sequence: CTG
agacagccttggaggcgcct

SEQ ID NO: 258653 - DNA, 20 bp, Artificial Sequence
  Description of Artificial Sequence: Synthetic oligonucleotide
  Target: LAMA2; (-) strand; PAM type: YTN; PAM sequence: CTA
ccctgagacagccttggagg

SEQ ID NO: 258654 - DNA, 20 bp, Artificial Sequence
  Description of Artificial Sequence: Synthetic oligonucleotide
  Target: LAMA2; (-) strand; PAM type: YTN; PAM sequence: CTG
ctaccctgagacagccttgg

SEQ ID NO: 258655 - DNA, 20 bp, Artificial Sequence
  Description of Artificial Sequence: Synthetic oligonucleotide
  Target: LAMA2; (-) strand; PAM type: YTN; PAM sequence: CTC
actgctaccctgagacagcc

SEQ ID NO: 258656 - DNA, 20 bp, Artificial Sequence
  Description of Artificial Sequence: Synthetic oligonucleotide
  Target: LAMA2; (-) strand; PAM type: YTN; PAM sequence: TTC
tcactgctaccctgagacag

SEQ ID NO: 258657 - DNA, 20 bp, Artificial Sequence
  Description of Artificial Sequence: Synthetic oligonucleotide
  Target: LAMA2; (-) strand; PAM type: YTN; PAM sequence: CTG
ttctcactgctaccctgaga

SEQ ID NO: 258658 - DNA, 20 bp, Artificial Sequence
  Description of Artificial Sequence: Synthetic oligonucleotide
  Target: LAMA2; (-) strand; PAM type: YTN; PAM sequence: CTG
atgcactgttctcactgcta

SEQ ID NO: 258659 - DNA, 20 bp, Artificial Sequence
  Description of Artificial Sequence: Synthetic oligonucleotide
  Target: LAMA2; (-) strand; PAM type: YTN; PAM sequence: CTG
cctgatgcactgttctcact

SEQ ID NO: 258660 - DNA, 20 bp, Artificial Sequence
  Description of Artificial Sequence: Synthetic oligonucleotide
  Target: LAMA2; (-) strand; PAM type: YTN; PAM sequence: CTC
ctgcctgatgcactgttctc

SEQ ID NO: 258661 - DNA, 20 bp, Artificial Sequence
  Description of Artificial Sequence: Synthetic oligonucleotide
  Target: LAMA2; (-) strand; PAM type: YTN; PAM sequence: CTA
tgctcctgcctgatgcactg

SEQ ID NO: 258662 - DNA, 20 bp, Artificial Sequence
  Description of Artificial Sequence: Synthetic oligonucleotide
  Target: LAMA2; (-) strand; PAM type: YTN; PAM sequence: CTC
tatgctcctgcctgatgcac

SEQ ID NO: 258663 - DNA, 20 bp, Artificial Sequence
  Description of Artificial Sequence: Synthetic oligonucleotide
  Target: LAMA2; (-) strand; PAM type: YTN; PAM sequence: CTC
tctatgctcctgcctgatgc

SEQ ID NO: 258664 - DNA, 20 bp, Artificial Sequence
  Description of Artificial Sequence: Synthetic oligonucleotide
  Target: LAMA2; (-) strand; PAM type: YTN; PAM sequence: CTA
aaaactctctatgctcctgc

SEQ ID NO: 258665 - DNA, 20 bp, Artificial Sequence
  Description of Artificial Sequence: Synthetic oligonucleotide
  Target: LAMA2; (-) strand; PAM type: YTN; PAM sequence: TTA
ctaaaaactctctatgctcc

SEQ ID NO: 258666 - DNA, 20 bp, Artificial Sequence
  Description of Artificial Sequence: Synthetic oligonucleotide
  Target: LAMA2; (-) strand; PAM type: YTN; PAM sequence: TTT
actaaaaactctctatgctc

SEQ ID NO: 258667 - DNA, 20 bp, Artificial Sequence
  Description of Artificial Sequence: Synthetic oligonucleotide
  Target: LAMA2; (-) strand; PAM type: YTN; PAM sequence: CTA
acatttactaaaaactctct

SEQ ID NO: 258668 - DNA, 20 bp, Artificial Sequence
  Description of Artificial Sequence: Synthetic oligonucleotide
  Target: LAMA2; (-) strand; PAM type: YTN; PAM sequence: TTG
gtaataataatagtaatcag

SEQ ID NO: 258669 - DNA, 20 bp, Artificial Sequence
  Description of Artificial Sequence: Synthetic oligonucleotide
  Target: LAMA2; (-) strand; PAM type: YTN; PAM sequence: TTA
acaacattggtaataataat

SEQ ID NO: 258670 - DNA, 20 bp, Artificial Sequence
  Description of Artificial Sequence: Synthetic oligonucleotide
  Target: LAMA2; (-) strand; PAM type: YTN; PAM sequence: TTT
aacaacattggtaataataa

SEQ ID NO: 258671 - DNA, 20 bp, Artificial Sequence
  Description of Artificial Sequence: Synthetic oligonucleotide
  Target: LAMA2; (-) strand; PAM type: YTN; PAM sequence: TTC
atttaacaacattggtaata

SEQ ID NO: 258672 - DNA, 20 bp, Artificial Sequence
  Description of Artificial Sequence: Synthetic oligonucleotide
  Target: LAMA2; (-) strand; PAM type: YTN; PAM sequence: CTT
catttaacaacattggtaat

SEQ ID NO: 258673 - DNA, 20 bp, Artificial Sequence
  Description of Artificial Sequence: Synthetic oligonucleotide
  Target: LAMA2; (-) strand; PAM type: YTN; PAM sequence: TTC
ttcatttaacaacattggta

SEQ ID NO: 258674 - DNA, 20 bp, Artificial Sequence
  Description of Artificial Sequence: Synthetic oligonucleotide
  Target: LAMA2; (-) strand; PAM type: YTN; PAM sequence: TTT
cttcatttaacaacattggt

SEQ ID NO: 258675 - DNA, 20 bp, Artificial Sequence
  Description of Artificial Sequence: Synthetic oligonucleotide
  Target: LAMA2; (-) strand; PAM type: YTN; PAM sequence: TTA
aacatttcttcatttaacaa

SEQ ID NO: 258676 - DNA, 20 bp, Artificial Sequence
  Description of Artificial Sequence: Synthetic oligonucleotide
  Target: LAMA2; (-) strand; PAM type: YTN; PAM sequence: TTT
aaacatttcttcatttaaca

SEQ ID NO: 258677 - DNA, 20 bp, Artificial Sequence
  Description of Artificial Sequence: Synthetic oligonucleotide
  Target: LAMA2; (-) strand; PAM type: YTN; PAM sequence: TTT
taaacatttcttcatttaac

SEQ ID NO: 258678 - DNA, 20 bp, Artificial Sequence
  Description of Artificial Sequence: Synthetic oligonucleotide
  Target: LAMA2; (-) strand; PAM type: YTN; PAM sequence: TTA
ttttaaacatttcttcattt

SEQ ID NO: 258679 - DNA, 20 bp, Artificial Sequence
  Description of Artificial Sequence: Synthetic oligonucleotide
  Target: LAMA2; (-) strand; PAM type: YTN; PAM sequence: TTG
aaaaaaaattattttaaaca

SEQ ID NO: 258680 - DNA, 20 bp, Artificial Sequence
  Description of Artificial Sequence: Synthetic oligonucleotide
  Target: LAMA2; (-) strand; PAM type: YTN; PAM sequence: TTT
gaaaaaaaattattttaaac

SEQ ID NO: 258681 - DNA, 20 bp, Artificial Sequence
  Description of Artificial Sequence: Synthetic oligonucleotide
  Target: LAMA2; (-) strand; PAM type: YTN; PAM sequence: TTT
tgaaaaaaaattattttaaa

SEQ ID NO: 258682 - DNA, 20 bp, Artificial Sequence
  Description of Artificial Sequence: Synthetic oligonucleotide
  Target: LAMA2; (-) strand; PAM type: YTN; PAM sequence: TTT
ttgaaaaaaaattattttaa

SEQ ID NO: 258683 - DNA, 20 bp, Artificial Sequence
  Description of Artificial Sequence: Synthetic oligonucleotide
  Target: LAMA2; (-) strand; PAM type: YTN; PAM sequence: TTG
tttttgaaaaaaaattattt

SEQ ID NO: 258684 - DNA, 20 bp, Artificial Sequence
  Description of Artificial Sequence: Synthetic oligonucleotide
  Target: LAMA2; (-) strand; PAM type: YTN; PAM sequence: TTT
gtttttgaaaaaaaattatt

SEQ ID NO: 258685 - DNA, 20 bp, Artificial Sequence
  Description of Artificial Sequence: Synthetic oligonucleotide
  Target: LAMA2; (-) strand; PAM type: YTN; PAM sequence: TTG
taaatgtatgcatttgtttt

SEQ ID NO: 258686 - DNA, 20 bp, Artificial Sequence
  Description of Artificial Sequence: Synthetic oligonucleotide
  Target: LAMA2; (-) strand; PAM type: YTN; PAM sequence: TTA
ttgtaaatgtatgcatttgt

SEQ ID NO: 258687 - DNA, 20 bp, Artificial Sequence
  Description of Artificial Sequence: Synthetic oligonucleotide
  Target: LAMA2; (-) strand; PAM type: YTN; PAM sequence: TTT
attgtaaatgtatgcatttg

SEQ ID NO: 258688 - DNA, 20 bp, Artificial Sequence
  Description of Artificial Sequence: Synthetic oligonucleotide
  Target: LAMA2; (-) strand; PAM type: YTN; PAM sequence: TTT
tattgtaaatgtatgcattt

SEQ ID NO: 258689 - DNA, 20 bp, Artificial Sequence
  Description of Artificial Sequence: Synthetic oligonucleotide
  Target: LAMA2; (-) strand; PAM type: YTN; PAM sequence: CTT
ttattgtaaatgtatgcatt

SEQ ID NO: 258690 - DNA, 20 bp, Artificial Sequence
  Description of Artificial Sequence: Synthetic oligonucleotide
  Target: LAMA2; (-) strand; PAM type: YTN; PAM sequence: TTC
ttttattgtaaatgtatgca

SEQ ID NO: 258691 - DNA, 20 bp, Artificial Sequence
  Description of Artificial Sequence: Synthetic oligonucleotide
  Target: LAMA2; (-) strand; PAM type: YTN; PAM sequence: TTT
cttttattgtaaatgtatgc

SEQ ID NO: 258692 - DNA, 20 bp, Artificial Sequence
  Description of Artificial Sequence: Synthetic oligonucleotide
  Target: LAMA2; (-) strand; PAM type: YTN; PAM sequence: TTT
tcttttattgtaaatgtatg

SEQ ID NO: 258693 - DNA, 20 bp, Artificial Sequence
  Description of Artificial Sequence: Synthetic oligonucleotide
  Target: LAMA2; (-) strand; PAM type: YTN; PAM sequence: TTT
ttcttttattgtaaatgtat

SEQ ID NO: 258694 - DNA, 20 bp, Artificial Sequence
  Description of Artificial Sequence: Synthetic oligonucleotide
  Target: LAMA2; (-) strand; PAM type: YTN; PAM sequence: CTT
tttcttttattgtaaatgta

SEQ ID NO: 258695 - DNA, 20 bp, Artificial Sequence
  Description of Artificial Sequence: Synthetic oligonucleotide
  Target: LAMA2; (-) strand; PAM type: YTN; PAM sequence: TTA
tctttttcttttattgtaaa

SEQ ID NO: 258696 - DNA, 20 bp, Artificial Sequence
  Description of Artificial Sequence: Synthetic oligonucleotide
  Target: LAMA2; (-) strand; PAM type: YTN; PAM sequence: TTA
ttatctttttcttttattgt

SEQ ID NO: 258697 - DNA, 20 bp, Artificial Sequence
  Description of Artificial Sequence: Synthetic oligonucleotide
  Target: LAMA2; (-) strand; PAM type: YTN; PAM sequence: TTA
atcagttattatctttttct

SEQ ID NO: 258698 - DNA, 20 bp, Artificial Sequence
  Description of Artificial Sequence: Synthetic oligonucleotide
  Target: LAMA2; (-) strand; PAM type: YTN; PAM sequence: TTT
aatcagttattatctttttc

SEQ ID NO: 258699 - DNA, 20 bp, Artificial Sequence
  Description of Artificial Sequence: Synthetic oligonucleotide
  Target: LAMA2; (-) strand; PAM type: YTN; PAM sequence: TTT
taatcagttattatcttttt

SEQ ID NO: 258700 - DNA, 20 bp, Artificial Sequence
  Description of Artificial Sequence: Synthetic oligonucleotide
  Target: LAMA2; (-) strand; PAM type: YTN; PAM sequence: TTA
ggagacattttaatcagtta

SEQ ID NO: 258701 - DNA, 20 bp, Artificial Sequence
  Description of Artificial Sequence: Synthetic oligonucleotide
  Target: LAMA2; (-) strand; PAM type: YTN; PAM sequence: TTT
aggagacattttaatcagtt

SEQ ID NO: 258702 - DNA, 20 bp, Artificial Sequence
  Description of Artificial Sequence: Synthetic oligonucleotide
  Target: LAMA2; (-) strand; PAM type: YTN; PAM sequence: TTA
tatttaggagacattttaat

SEQ ID NO: 258703 - DNA, 20 bp, Artificial Sequence
  Description of Artificial Sequence: Synthetic oligonucleotide
  Target: LAMA2; (-) strand; PAM type: YTN; PAM sequence: TTT
atatttaggagacattttaa

SEQ ID NO: 258704 - DNA, 20 bp, Artificial Sequence
  Description of Artificial Sequence: Synthetic oligonucleotide
  Target: LAMA2; (-) strand; PAM type: YTN; PAM sequence: CTA
aatttatatttaggagacat

SEQ ID NO: 258705 - DNA, 20 bp, Artificial Sequence
  Description of Artificial Sequence: Synthetic oligonucleotide
  Target: LAMA2; (-) strand; PAM type: YTN; PAM sequence: CTG
ctaaatttatatttaggaga

SEQ ID NO: 258706 - DNA, 20 bp, Artificial Sequence
  Description of Artificial Sequence: Synthetic oligonucleotide
  Target: LAMA2; (-) strand; PAM type: YTN; PAM sequence: TTC
tgctaaatttatatttagga

SEQ ID NO: 258707 - DNA, 20 bp, Artificial Sequence
  Description of Artificial Sequence: Synthetic oligonucleotide
  Target: LAMA2; (-) strand; PAM type: YTN; PAM sequence: TTT
ctgctaaatttatatttagg

SEQ ID NO: 258708 - DNA, 20 bp, Artificial Sequence
  Description of Artificial Sequence: Synthetic oligonucleotide
  Target: LAMA2; (-) strand; PAM type: YTN; PAM sequence: CTT
tctgctaaatttatatttag

SEQ ID NO: 258709 - DNA, 20 bp, Artificial Sequence
  Description of Artificial Sequence: Synthetic oligonucleotide
  Target: LAMA2; (-) strand; PAM type: YTN; PAM sequence: TTG
actttctgctaaatttatat

SEQ ID NO: 258710 - DNA, 20 bp, Artificial Sequence
  Description of Artificial Sequence: Synthetic oligonucleotide
  Target: LAMA2; (-) strand; PAM type: YTN; PAM sequence: TTG
aatgaacgttgactttctgc

SEQ ID NO: 258711 - DNA, 20 bp, Artificial Sequence
  Description of Artificial Sequence: Synthetic oligonucleotide
  Target: LAMA2; (-) strand; PAM type: YTN; PAM sequence: CTT
gaatgaacgttgactttctg

SEQ ID NO: 258712 - DNA, 20 bp, Artificial Sequence
  Description of Artificial Sequence: Synthetic oligonucleotide
  Target: LAMA2; (-) strand; PAM type: YTN; PAM sequence: CTG
taagatatgtagggcttgaa

SEQ ID NO: 258713 - DNA, 20 bp, Artificial Sequence
  Description of Artificial Sequence: Synthetic oligonucleotide
  Target: LAMA2; (-) strand; PAM type: YTN; PAM sequence: TTC
atacaatagtactgtaagat

SEQ ID NO: 258714 - DNA, 20 bp, Artificial Sequence
  Description of Artificial Sequence: Synthetic oligonucleotide
  Target: LAMA2; (-) strand; PAM type: YTN; PAM sequence: CTT
catacaatagtactgtaaga

SEQ ID NO: 258715 - DNA, 20 bp, Artificial Sequence
  Description of Artificial Sequence: Synthetic oligonucleotide
  Target: LAMA2; (-) strand; PAM type: YTN; PAM sequence: CTG
cttcatacaatagtactgta

SEQ ID NO: 258716 - DNA, 20 bp, Artificial Sequence
  Description of Artificial Sequence: Synthetic oligonucleotide
  Target: LAMA2; (-) strand; PAM type: YTN; PAM sequence: CTC
gggacaaaaccctgcttcat

SEQ ID NO: 258717 - DNA, 20 bp, Artificial Sequence
  Description of Artificial Sequence: Synthetic oligonucleotide
  Target: LAMA2; (-) strand; PAM type: YTN; PAM sequence: CTG
cagaggaaaaaatagtctcg

SEQ ID NO: 258718 - DNA, 20 bp, Artificial Sequence
  Description of Artificial Sequence: Synthetic oligonucleotide
  Target: LAMA2; (-) strand; PAM type: YTN; PAM sequence: CTG
ctgcagaggaaaaaatagtc

SEQ ID NO: 258719 - DNA, 20 bp, Artificial Sequence
  Description of Artificial Sequence: Synthetic oligonucleotide
  Target: LAMA2; (-) strand; PAM type: YTN; PAM sequence: CTC
acacatactgctgcagagga

SEQ ID NO: 258720 - DNA, 20 bp, Artificial Sequence
  Description of Artificial Sequence: Synthetic oligonucleotide
  Target: LAMA2; (-) strand; PAM type: YTN; PAM sequence: CTC
tcacacatactgctgcagag

SEQ ID NO: 258721 - DNA, 20 bp, Artificial Sequence
  Description of Artificial Sequence: Synthetic oligonucleotide
  Target: LAMA2; (-) strand; PAM type: YTN; PAM sequence: CTC
agctctcacacatactgctg

SEQ ID NO: 258722 - DNA, 20 bp, Artificial Sequence
  Description of Artificial Sequence: Synthetic oligonucleotide
  Target: LAMA2; (-) strand; PAM type: YTN; PAM sequence: CTC
tcagctctcacacatactgc

SEQ ID NO: 258723 - DNA, 20 bp, Artificial Sequence
  Description of Artificial Sequence: Synthetic oligonucleotide
  Target: LAMA2; (-) strand; PAM type: YTN; PAM sequence: CTG
agctctcagctctcacacat

SEQ ID NO: 258724 - DNA, 20 bp, Artificial Sequence
  Description of Artificial Sequence: Synthetic oligonucleotide
  Target: LAMA2; (-) strand; PAM type: YTN; PAM sequence: CTC
cagagtctgagctctcagct

SEQ ID NO: 258725 - DNA, 20 bp, Artificial Sequence
  Description of Artificial Sequence: Synthetic oligonucleotide
  Target: LAMA2; (-) strand; PAM type: YTN; PAM sequence: TTG
gctccagagtctgagctctc

SEQ ID NO: 258726 - DNA, 20 bp, Artificial Sequence
  Description of Artificial Sequence: Synthetic oligonucleotide
  Target: LAMA2; (-) strand; PAM type: YTN; PAM sequence: CTA
ggttggctccagagtctgag

SEQ ID NO: 258727 - DNA, 20 bp, Artificial Sequence
  Description of Artificial Sequence: Synthetic oligonucleotide
  Target: LAMA2; (-) strand; PAM type: YTN; PAM sequence: TTC
cagatcagctaggttggctc

SEQ ID NO: 258728 - DNA, 20 bp, Artificial Sequence
  Description of Artificial Sequence: Synthetic oligonucleotide
  Target: LAMA2; (-) strand; PAM type: YTN; PAM sequence: TTG
tggagtcaagattccagatc

SEQ ID NO: 258729 - DNA, 20 bp, Artificial Sequence
  Description of Artificial Sequence: Synthetic oligonucleotide
  Target: LAMA2; (-) strand; PAM type: YTN; PAM sequence: CTA
accaattgtggagtcaagat

SEQ ID NO: 258730 - DNA, 20 bp, Artificial Sequence
  Description of Artificial Sequence: Synthetic oligonucleotide
  Target: LAMA2; (-) strand; PAM type: YTN; PAM sequence: CTA
aggtcatgagctaaccaatt

SEQ ID NO: 258731 - DNA, 20 bp, Artificial Sequence
  Description of Artificial Sequence: Synthetic oligonucleotide
  Target: LAMA2; (-) strand; PAM type: YTN; PAM sequence: TTG
cctaaggtcatgagctaacc

SEQ ID NO: 258732 - DNA, 20 bp, Artificial Sequence
  Description of Artificial Sequence: Synthetic oligonucleotide
  Target: LAMA2; (-) strand; PAM type: YTN; PAM sequence: TTA
agtaagttgcctaaggtcat

SEQ ID NO: 258733 - DNA, 20 bp, Artificial Sequence
  Description of Artificial Sequence: Synthetic oligonucleotide
  Target: LAMA2; (-) strand; PAM type: YTN; PAM sequence: CTG
aggcacagaaaggttaagta

SEQ ID NO: 258734 - DNA, 20 bp, Artificial Sequence
  Description of Artificial Sequence: Synthetic oligonucleotide
  Target: LAMA2; (-) strand; PAM type: YTN; PAM sequence: TTG
agtggtgaaactgaggcaca

SEQ ID NO: 258735 - DNA, 20 bp, Artificial Sequence
  Description of Artificial Sequence: Synthetic oligonucleotide
  Target: LAMA2; (-) strand; PAM type: YTN; PAM sequence: TTA
ttgagtggtgaaactgaggc

SEQ ID NO: 258736 - DNA, 20 bp, Artificial Sequence
  Description of Artificial Sequence: Synthetic oligonucleotide
  Target: LAMA2; (-) strand; PAM type: YTN; PAM sequence: TTT
attgagtggtgaaactgagg

SEQ ID NO: 258737 - DNA, 20 bp, Artificial Sequence
  Description of Artificial Sequence: Synthetic oligonucleotide
  Target: LAMA2; (-) strand; PAM type: YTN; PAM sequence: TTT
tattgagtggtgaaactgag

SEQ ID NO: 258738 - DNA, 20 bp, Artificial Sequence
  Description of Artificial Sequence: Synthetic oligonucleotide
  Target: LAMA2; (-) strand; PAM type: YTN; PAM sequence: TTT
ttattgagtggtgaaactga

SEQ ID NO: 258739 - DNA, 20 bp, Artificial Sequence
  Description of Artificial Sequence: Synthetic oligonucleotide
  Target: LAMA2; (-) strand; PAM type: YTN; PAM sequence: TTT
tttattgagtggtgaaactg

SEQ ID NO: 258740 - DNA, 20 bp, Artificial Sequence
  Description of Artificial Sequence: Synthetic oligonucleotide
  Target: LAMA2; (-) strand; PAM type: YTN; PAM sequence: CTT
ttttattgagtggtgaaact

SEQ ID NO: 258741 - DNA, 20 bp, Artificial Sequence
  Description of Artificial Sequence: Synthetic oligonucleotide
  Target: LAMA2; (-) strand; PAM type: YTN; PAM sequence: CTC
accacttttttattgagtgg

SEQ ID NO: 258742 - DNA, 20 bp, Artificial Sequence
  Description of Artificial Sequence: Synthetic oligonucleotide
  Target: LAMA2; (-) strand; PAM type: YTN; PAM sequence: TTC
tcaccacttttttattgagt

SEQ ID NO: 258743 - DNA, 20 bp, Artificial Sequence
  Description of Artificial Sequence: Synthetic oligonucleotide
  Target: LAMA2; (-) strand; PAM type: YTN; PAM sequence: TTG
tcattctcaccactttttta

SEQ ID NO: 258744 - DNA, 20 bp, Artificial Sequence
  Description of Artificial Sequence: Synthetic oligonucleotide
  Target: LAMA2; (-) strand; PAM type: YTN; PAM sequence: CTG
gcagagagttgtcattctca

SEQ ID NO: 258745 - DNA, 20 bp, Artificial Sequence
  Description of Artificial Sequence: Synthetic oligonucleotide
  Target: LAMA2; (-) strand; PAM type: YTN; PAM sequence: CTC
aggacaaccctggcagagag

SEQ ID NO: 258746 - DNA, 20 bp, Artificial Sequence
  Description of Artificial Sequence: Synthetic oligonucleotide
  Target: LAMA2; (-) strand; PAM type: YTN; PAM sequence: CTC
ctcaggacaaccctggcaga

SEQ ID NO: 258747 - DNA, 20 bp, Artificial Sequence
  Description of Artificial Sequence: Synthetic oligonucleotide
  Target: LAMA2; (-) strand; PAM type: YTN; PAM sequence: TTA
ctcctcaggacaaccctggc

SEQ ID NO: 258748 - DNA, 20 bp, Artificial Sequence
  Description of Artificial Sequence: Synthetic oligonucleotide
  Target: LAMA2; (-) strand; PAM type: YTN; PAM sequence: TTT
actcctcaggacaaccctgg

SEQ ID NO: 258749 - DNA, 20 bp, Artificial Sequence
  Description of Artificial Sequence: Synthetic oligonucleotide
  Target: LAMA2; (-) strand; PAM type: YTN; PAM sequence: CTC
atttactcctcaggacaacc

SEQ ID NO: 258750 - DNA, 20 bp, Artificial Sequence
  Description of Artificial Sequence: Synthetic oligonucleotide
  Target: LAMA2; (-) strand; PAM type: YTN; PAM sequence: TTA
caaatatgtactcatttact

SEQ ID NO: 258751 - DNA, 20 bp, Artificial Sequence
  Description of Artificial Sequence: Synthetic oligonucleotide
  Target: LAMA2; (-) strand; PAM type: YTN; PAM sequence: TTT
acaaatatgtactcatttac

SEQ ID NO: 258752 - DNA, 20 bp, Artificial Sequence
  Description of Artificial Sequence: Synthetic oligonucleotide
  Target: LAMA2; (-) strand; PAM type: YTN; PAM sequence: CTT
tacaaatatgtactcattta

SEQ ID NO: 258753 - DNA, 20 bp, Artificial Sequence
  Description of Artificial Sequence: Synthetic oligonucleotide
  Target: LAMA2; (-) strand; PAM type: YTN; PAM sequence: CTC
tttacaaatatgtactcatt

SEQ ID NO: 258754 - DNA, 20 bp, Artificial Sequence
  Description of Artificial Sequence: Synthetic oligonucleotide
  Target: LAMA2; (-) strand; PAM type: YTN; PAM sequence: CTA
aactctttacaaatatgtac

SEQ ID NO: 258755 - DNA, 20 bp, Artificial Sequence
  Description of Artificial Sequence: Synthetic oligonucleotide
  Target: LAMA2; (-) strand; PAM type: YTN; PAM sequence: TTA
caaatctaaactctttacaa

SEQ ID NO: 258756 - DNA, 20 bp, Artificial Sequence
  Description of Artificial Sequence: Synthetic oligonucleotide
  Target: LAMA2; (-) strand; PAM type: YTN; PAM sequence: TTT
acaaatctaaactctttaca

SEQ ID NO: 258757 - DNA, 20 bp, Artificial Sequence
  Description of Artificial Sequence: Synthetic oligonucleotide
  Target: LAMA2; (-) strand; PAM type: YTN; PAM sequence: CTT
tacaaatctaaactctttac

SEQ ID NO: 258758 - DNA, 20 bp, Artificial Sequence
  Description of Artificial Sequence: Synthetic oligonucleotide
  Target: LAMA2; (-) strand; PAM type: YTN; PAM sequence: CTA
aaccctttacaaatctaaac

SEQ ID NO: 258759 - DNA, 20 bp, Artificial Sequence
  Description of Artificial Sequence: Synthetic oligonucleotide
  Target: LAMA2; (-) strand; PAM type: YTN; PAM sequence: TTC
taaaccctttacaaatctaa

SEQ ID NO: 258760 - DNA, 20 bp, Artificial Sequence
  Description of Artificial Sequence: Synthetic oligonucleotide
  Target: LAMA2; (-) strand; PAM type: YTN; PAM sequence: TTG
caaagcacaattctaaaccc

SEQ ID NO: 258761 - DNA, 20 bp, Artificial Sequence
  Description of Artificial Sequence: Synthetic oligonucleotide
  Target: LAMA2; (-) strand; PAM type: YTN; PAM sequence: TTT
gcaaagcacaattctaaacc

SEQ ID NO: 258762 - DNA, 20 bp, Artificial Sequence
  Description of Artificial Sequence: Synthetic oligonucleotide
  Target: LAMA2; (-) strand; PAM type: YTN; PAM sequence: TTT
tgcaaagcacaattctaaac

SEQ ID NO: 258763 - DNA, 20 bp, Artificial Sequence
  Description of Artificial Sequence: Synthetic oligonucleotide
  Target: LAMA2; (-) strand; PAM type: YTN; PAM sequence: TTT
ttgcaaagcacaattctaaa

SEQ ID NO: 258764 - DNA, 20 bp, Artificial Sequence
  Description of Artificial Sequence: Synthetic oligonucleotide
  Target: LAMA2; (-) strand; PAM type: YTN; PAM sequence: CTT
tttgcaaagcacaattctaa

SEQ ID NO: 258765 - DNA, 20 bp, Artificial Sequence
  Description of Artificial Sequence: Synthetic oligonucleotide
  Target: LAMA2; (-) strand; PAM type: YTN; PAM sequence: TTC
ctttttgcaaagcacaattc

SEQ ID NO: 258766 - DNA, 20 bp, Artificial Sequence
  Description of Artificial Sequence: Synthetic oligonucleotide
  Target: LAMA2; (-) strand; PAM type: YTN; PAM sequence: CTT
cctttttgcaaagcacaatt

SEQ ID NO: 258767 - DNA, 20 bp, Artificial Sequence
  Description of Artificial Sequence: Synthetic oligonucleotide
  Target: LAMA2; (-) strand; PAM type: YTN; PAM sequence: TTG
tgcttcctttttgcaaagca

SEQ ID NO: 258768 - DNA, 20 bp, Artificial Sequence
  Description of Artificial Sequence: Synthetic oligonucleotide
  Target: LAMA2; (-) strand; PAM type: YTN; PAM sequence: TTC
atatattgtgcttccttttt

SEQ ID NO: 258769 - DNA, 20 bp, Artificial Sequence
  Description of Artificial Sequence: Synthetic oligonucleotide
  Target: LAMA2; (-) strand; PAM type: YTN; PAM sequence: CTA
gcattcatatattgtgcttc

SEQ ID NO: 258770 - DNA, 20 bp, Artificial Sequence
  Description of Artificial Sequence: Synthetic oligonucleotide
  Target: LAMA2; (-) strand; PAM type: YTN; PAM sequence: CTC
ggggtaataagaactagcat

SEQ ID NO: 258771 - DNA, 20 bp, Artificial Sequence
  Description of Artificial Sequence: Synthetic oligonucleotide
  Target: LAMA2; (-) strand; PAM type: YTN; PAM sequence: CTC
tcggggtaataagaactagc

SEQ ID NO: 258772 - DNA, 20 bp, Artificial Sequence
  Description of Artificial Sequence: Synthetic oligonucleotide
  Target: LAMA2; (-) strand; PAM type: YTN; PAM sequence: CTC
tctcggggtaataagaacta

SEQ ID NO: 258773 - DNA, 20 bp, Artificial Sequence
  Description of Artificial Sequence: Synthetic oligonucleotide
  Target: LAMA2; (-) strand; PAM type: YTN; PAM sequence: TTC
ccataaatgtgtctctctcg

SEQ ID NO: 258774 - DNA, 20 bp, Artificial Sequence
  Description of Artificial Sequence: Synthetic oligonucleotide
  Target: LAMA2; (-) strand; PAM type: YTN; PAM sequence: CTG
tataggttcccataaatgtg

SEQ ID NO: 258775 - DNA, 20 bp, Artificial Sequence
  Description of Artificial Sequence: Synthetic oligonucleotide
  Target: LAMA2; (-) strand; PAM type: YTN; PAM sequence: CTA
tccagacccagtgagaaact

SEQ ID NO: 258776 - DNA, 20 bp, Artificial Sequence
  Description of Artificial Sequence: Synthetic oligonucleotide
  Target: LAMA2; (-) strand; PAM type: YTN; PAM sequence: TTA
atgaggtaaaataaatatgg

SEQ ID NO: 258777 - DNA, 20 bp, Artificial Sequence
  Description of Artificial Sequence: Synthetic oligonucleotide
  Target: LAMA2; (-) strand; PAM type: YTN; PAM sequence: TTG
agattaatgaggtaaaataa

SEQ ID NO: 258778 - DNA, 20 bp, Artificial Sequence
  Description of Artificial Sequence: Synthetic oligonucleotide
  Target: LAMA2; (-) strand; PAM type: YTN; PAM sequence: TTC
atggtcagtaattgagatta

SEQ ID NO: 258779 - DNA, 20 bp, Artificial Sequence
  Description of Artificial Sequence: Synthetic oligonucleotide
  Target: LAMA2; (-) strand; PAM type: YTN; PAM sequence: TTA
aggagcagacattcatggtc

SEQ ID NO: 258780 - DNA, 20 bp, Artificial Sequence
  Description of Artificial Sequence: Synthetic oligonucleotide
  Target: LAMA2; (-) strand; PAM type: YTN; PAM sequence: CTT
aaggagcagacattcatggt

SEQ ID NO: 258781 - DNA, 20 bp, Artificial Sequence
  Description of Artificial Sequence: Synthetic oligonucleotide
  Target: LAMA2; (-) strand; PAM type: YTN; PAM sequence: CTA
gtaaacaaacttaaggagca

SEQ ID NO: 258782 - DNA, 20 bp, Artificial Sequence
  Description of Artificial Sequence: Synthetic oligonucleotide
  Target: LAMA2; (-) strand; PAM type: YTN; PAM sequence: CTA
aagaaaaccccactagtaaa

SEQ ID NO: 258783 - DNA, 20 bp, Artificial Sequence
  Description of Artificial Sequence: Synthetic oligonucleotide
  Target: LAMA2; (-) strand; PAM type: YTN; PAM sequence: TTC
aaaggctaaagaaaacccca

SEQ ID NO: 258784 - DNA, 20 bp, Artificial Sequence
  Description of Artificial Sequence: Synthetic oligonucleotide
  Target: LAMA2; (-) strand; PAM type: YTN; PAM sequence: TTT
caaaggctaaagaaaacccc

SEQ ID NO: 258785 - DNA, 20 bp, Artificial Sequence
  Description of Artificial Sequence: Synthetic oligonucleotide
  Target: LAMA2; (-) strand; PAM type: YTN; PAM sequence: TTG
tttcaaaggctaaagaaaac

SEQ ID NO: 258786 - DNA, 20 bp, Artificial Sequence
  Description of Artificial Sequence: Synthetic oligonucleotide
  Target: LAMA2; (-) strand; PAM type: YTN; PAM sequence: TTT
gtttcaaaggctaaagaaaa

SEQ ID NO: 258787 - DNA, 20 bp, Artificial Sequence
  Description of Artificial Sequence: Synthetic oligonucleotide
  Target: LAMA2; (-) strand; PAM type: YTN; PAM sequence: TTC
aaaaatttgtttcaaaggct

SEQ ID NO: 258788 - DNA, 20 bp, Artificial Sequence
  Description of Artificial Sequence: Synthetic oligonucleotide
  Target: LAMA2; (-) strand; PAM type: YTN; PAM sequence: TTG
ttcaaaaatttgtttcaaag

SEQ ID NO: 258789 - DNA, 20 bp, Artificial Sequence
  Description of Artificial Sequence: Synthetic oligonucleotide
  Target: LAMA2; (-) strand; PAM type: YTN; PAM sequence: TTT
gttcaaaaatttgtttcaaa

SEQ ID NO: 258790 - DNA, 20 bp, Artificial Sequence
  Description of Artificial Sequence: Synthetic oligonucleotide
  Target: LAMA2; (-) strand; PAM type: YTN; PAM sequence: TTA
caaatttgttcaaaaatttg

SEQ ID NO: 258791 - DNA, 20 bp, Artificial Sequence
  Description of Artificial Sequence: Synthetic oligonucleotide
  Target: LAMA2; (-) strand; PAM type: YTN; PAM sequence: TTT
acaaatttgttcaaaaattt

SEQ ID NO: 258792 - DNA, 20 bp, Artificial Sequence
  Description of Artificial Sequence: Synthetic oligonucleotide
  Target: LAMA2; (-) strand; PAM type: YTN; PAM sequence: TTC
agtaataaaatgtttacaaa

SEQ ID NO: 258793 - DNA, 20 bp, Artificial Sequence
  Description of Artificial Sequence: Synthetic oligonucleotide
  Target: LAMA2; (-) strand; PAM type: YTN; PAM sequence: TTT
cagtaataaaatgtttacaa

SEQ ID NO: 258794 - DNA, 20 bp, Artificial Sequence
  Description of Artificial Sequence: Synthetic oligonucleotide
  Target: LAMA2; (-) strand; PAM type: YTN; PAM sequence: CTA
ccaaatttcagtaataaaat

SEQ ID NO: 258795 - DNA, 20 bp, Artificial Sequence
  Description of Artificial Sequence: Synthetic oligonucleotide
  Target: LAMA2; (-) strand; PAM type: YTN; PAM sequence: TTG
tagcaaaataaatactacca

SEQ ID NO: 258796 - DNA, 20 bp, Artificial Sequence
  Description of Artificial Sequence: Synthetic oligonucleotide
  Target: LAMA2; (-) strand; PAM type: YTN; PAM sequence: CTA
agttgtagcaaaataaatac

SEQ ID NO: 258797 - DNA, 20 bp, Artificial Sequence
  Description of Artificial Sequence: Synthetic oligonucleotide
  Target: LAMA2; (-) strand; PAM type: YTN; PAM sequence: TTA
aaggctaagttgtagcaaaa

SEQ ID NO: 258798 - DNA, 20 bp, Artificial Sequence
  Description of Artificial Sequence: Synthetic oligonucleotide
  Target: LAMA2; (-) strand; PAM type: YTN; PAM sequence: TTT
aaaggctaagttgtagcaaa

SEQ ID NO: 258799 - DNA, 20 bp, Artificial Sequence
  Description of Artificial Sequence: Synthetic oligonucleotide
  Target: LAMA2; (-) strand; PAM type: YTN; PAM sequence: CTT
taaaggctaagttgtagcaa

SEQ ID NO: 258800 - DNA, 20 bp, Artificial Sequence
  Description of Artificial Sequence: Synthetic oligonucleotide
  Target: LAMA2; (-) strand; PAM type: YTN; PAM sequence: TTA
aataatgtagctttaaaggc

SEQ ID NO: 258801 - DNA, 20 bp, Artificial Sequence
  Description of Artificial Sequence: Synthetic oligonucleotide
  Target: LAMA2; (-) strand; PAM type: YTN; PAM sequence: TTT
aaataatgtagctttaaagg

SEQ ID NO: 258802 - DNA, 20 bp, Artificial Sequence
  Description of Artificial Sequence: Synthetic oligonucleotide
  Target: LAMA2; (-) strand; PAM type: YTN; PAM sequence: TTC
aaatatttaaataatgtagc

SEQ ID NO: 258803 - DNA, 20 bp, Artificial Sequence
  Description of Artificial Sequence: Synthetic oligonucleotide
  Target: LAMA2; (-) strand; PAM type: YTN; PAM sequence: TTT
caaatatttaaataatgtag

SEQ ID NO: 258804 - DNA, 20 bp, Artificial Sequence
  Description of Artificial Sequence: Synthetic oligonucleotide
  Target: LAMA2; (-) strand; PAM type: YTN; PAM sequence: TTT
tcaaatatttaaataatgta

SEQ ID NO: 258805 - DNA, 20 bp, Artificial Sequence
  Description of Artificial Sequence: Synthetic oligonucleotide
  Target: LAMA2; (-) strand; PAM type: YTN; PAM sequence: CTT
ttcaaatatttaaataatgt

SEQ ID NO: 258806 - DNA, 20 bp, Artificial Sequence
  Description of Artificial Sequence: Synthetic oligonucleotide
  Target: LAMA2; (-) strand; PAM type: YTN; PAM sequence: CTC
acttttcaaatatttaaata

SEQ ID NO: 258807 - DNA, 20 bp, Artificial Sequence
  Description of Artificial Sequence: Synthetic oligonucleotide
  Target: LAMA2; (-) strand; PAM type: YTN; PAM sequence: CTA
cctcacttttcaaatattta

SEQ ID NO: 258808 - DNA, 20 bp, Artificial Sequence
  Description of Artificial Sequence: Synthetic oligonucleotide
  Target: LAMA2; (-) strand; PAM type: YTN; PAM sequence: TTC
tacctcacttttcaaatatt

SEQ ID NO: 258809 - DNA, 20 bp, Artificial Sequence
  Description of Artificial Sequence: Synthetic oligonucleotide
  Target: LAMA2; (-) strand; PAM type: YTN; PAM sequence: TTA
tgtaaggaaatatacaagaa

SEQ ID NO: 258810 - DNA, 20 bp, Artificial Sequence
  Description of Artificial Sequence: Synthetic oligonucleotide
  Target: LAMA2; (-) strand; PAM type: YTN; PAM sequence: TTC
caaagtcgattatgtaagga

SEQ ID NO: 258811 - DNA, 20 bp, Artificial Sequence
  Description of Artificial Sequence: Synthetic oligonucleotide
  Target: LAMA2; (-) strand; PAM type: YTN; PAM sequence: TTA
aaaattccaaagtcgattat

SEQ ID NO: 258812 - DNA, 20 bp, Artificial Sequence
  Description of Artificial Sequence: Synthetic oligonucleotide
  Target: LAMA2; (-) strand; PAM type: YTN; PAM sequence: TTT
aaaaattccaaagtcgatta

SEQ ID NO: 258813 - DNA, 20 bp, Artificial Sequence
  Description of Artificial Sequence: Synthetic oligonucleotide
  Target: LAMA2; (-) strand; PAM type: YTN; PAM sequence: TTT
taaaaattccaaagtcgatt

SEQ ID NO: 258814 - DNA, 20 bp, Artificial Sequence
  Description of Artificial Sequence: Synthetic oligonucleotide
  Target: LAMA2; (-) strand; PAM type: YTN; PAM sequence: CTA
tcattttaaaaattccaaag

SEQ ID NO: 258815 - DNA, 20 bp, Artificial Sequence
  Description of Artificial Sequence: Synthetic oligonucleotide
  Target: LAMA2; (-) strand; PAM type: YTN; PAM sequence: TTA
tagctatcattttaaaaatt

SEQ ID NO: 258816 - DNA, 20 bp, Artificial Sequence
  Description of Artificial Sequence: Synthetic oligonucleotide
  Target: LAMA2; (-) strand; PAM type: YTN; PAM sequence: TTC
caaattatagctatcatttt

SEQ ID NO: 258817 - DNA, 20 bp, Artificial Sequence
  Description of Artificial Sequence: Synthetic oligonucleotide
  Target: LAMA2; (-) strand; PAM type: YTN; PAM sequence: TTA
aatcaatcaaatatcaaatg

SEQ ID NO: 258818 - DNA, 20 bp, Artificial Sequence
  Description of Artificial Sequence: Synthetic oligonucleotide
  Target: LAMA2; (-) strand; PAM type: YTN; PAM sequence: TTT
aaatcaatcaaatatcaaat

SEQ ID NO: 258819 - DNA, 20 bp, Artificial Sequence
  Description of Artificial Sequence: Synthetic oligonucleotide
  Target: LAMA2; (-) strand; PAM type: YTN; PAM sequence: CTT
taaatcaatcaaatatcaaa

SEQ ID NO: 258820 - DNA, 20 bp, Artificial Sequence
  Description of Artificial Sequence: Synthetic oligonucleotide
  Target: LAMA2; (-) strand; PAM type: YTN; PAM sequence: TTA
aaggggtgtgtgtacacccc

SEQ ID NO: 258821 - DNA, 20 bp, Artificial Sequence
  Description of Artificial Sequence: Synthetic oligonucleotide
  Target: LAMA2; (-) strand; PAM type: YTN; PAM sequence: CTC
attaaaggggtgtgtgtaca

SEQ ID NO: 258822 - DNA, 20 bp, Artificial Sequence
  Description of Artificial Sequence: Synthetic oligonucleotide
  Target: LAMA2; (-) strand; PAM type: YTN; PAM sequence: TTA
ctcattaaaggggtgtgtgt

SEQ ID NO: 258823 - DNA, 20 bp, Artificial Sequence
  Description of Artificial Sequence: Synthetic oligonucleotide
  Target: LAMA2; (-) strand; PAM type: YTN; PAM sequence: TTT
actcattaaaggggtgtgtg

SEQ ID NO: 258824 - DNA, 20 bp, Artificial Sequence
  Description of Artificial Sequence: Synthetic oligonucleotide
  Target: LAMA2; (-) strand; PAM type: YTN; PAM sequence: TTG
atttactcattaaaggggtg

SEQ ID NO: 258825 - DNA, 20 bp, Artificial Sequence
  Description of Artificial Sequence: Synthetic oligonucleotide
  Target: LAMA2; (-) strand; PAM type: YTN; PAM sequence: CTC
atattgatttactcattaaa

SEQ ID NO: 258826 - DNA, 20 bp, Artificial Sequence
  Description of Artificial Sequence: Synthetic oligonucleotide
  Target: LAMA2; (-) strand; PAM type: YTN; PAM sequence: CTC
tcatattgatttactcatta

SEQ ID NO: 258827 - DNA, 20 bp, Artificial Sequence
  Description of Artificial Sequence: Synthetic oligonucleotide
  Target: LAMA2; (-) strand; PAM type: YTN; PAM sequence: CTA
tatatccacactctcatatt

SEQ ID NO: 258828 - DNA, 20 bp, Artificial Sequence
  Description of Artificial Sequence: Synthetic oligonucleotide
  Target: LAMA2; (-) strand; PAM type: YTN; PAM sequence: TTA
catctatatatccacactct

SEQ ID NO: 258829 - DNA, 20 bp, Artificial Sequence
  Description of Artificial Sequence: Synthetic oligonucleotide
  Target: LAMA2; (-) strand; PAM type: YTN; PAM sequence: TTT
acatctatatatccacactc

SEQ ID NO: 258830 - DNA, 20 bp, Artificial Sequence
  Description of Artificial Sequence: Synthetic oligonucleotide
  Target: LAMA2; (-) strand; PAM type: YTN; PAM sequence: CTC
atatatatttacatctatat

SEQ ID NO: 258831 - DNA, 20 bp, Artificial Sequence
  Description of Artificial Sequence: Synthetic oligonucleotide
  Target: LAMA2; (-) strand; PAM type: YTN; PAM sequence: TTA
ctcatatatatttacatcta

SEQ ID NO: 258832 - DNA, 20 bp, Artificial Sequence
  Description of Artificial Sequence: Synthetic oligonucleotide
  Target: LAMA2; (-) strand; PAM type: YTN; PAM sequence: TTT
actcatatatatttacatct

SEQ ID NO: 258833 - DNA, 20 bp, Artificial Sequence
  Description of Artificial Sequence: Synthetic oligonucleotide
  Target: LAMA2; (-) strand; PAM type: YTN; PAM sequence: CTC
atatatatatacatttactc

SEQ ID NO: 258834 - DNA, 20 bp, Artificial Sequence
  Description of Artificial Sequence: Synthetic oligonucleotide
  Target: LAMA2; (-) strand; PAM type: YTN; PAM sequence: CTA
tgccgatatatgtataaaca

SEQ ID NO: 258835 - DNA, 20 bp, Artificial Sequence
  Description of Artificial Sequence: Synthetic oligonucleotide
  Target: LAMA2; (-) strand; PAM type: YTN; PAM sequence: CTC
atatatctatgccgatatat

SEQ ID NO: 258836 - DNA, 20 bp, Artificial Sequence
  Description of Artificial Sequence: Synthetic oligonucleotide
  Target: LAMA2; (-) strand; PAM type: YTN; PAM sequence: TTC
actcatatatctatgccgat

SEQ ID NO: 258837 - DNA, 20 bp, Artificial Sequence
  Description of Artificial Sequence: Synthetic oligonucleotide
  Target: LAMA2; (-) strand; PAM type: YTN; PAM sequence: CTT
cactcatatatctatgccga

SEQ ID NO: 258838 - DNA, 20 bp, Artificial Sequence
  Description of Artificial Sequence: Synthetic oligonucleotide
  Target: LAMA2; (-) strand; PAM type: YTN; PAM sequence: TTG
tcttcactcatatatctatg

SEQ ID NO: 258839 - DNA, 20 bp, Artificial Sequence
  Description of Artificial Sequence: Synthetic oligonucleotide
  Target: LAMA2; (-) strand; PAM type: YTN; PAM sequence: TTC
agaaattgtcttcactcata

SEQ ID NO: 258840 - DNA, 20 bp, Artificial Sequence
  Description of Artificial Sequence: Synthetic oligonucleotide
  Target: LAMA2; (-) strand; PAM type: YTN; PAM sequence: TTT
cagaaattgtcttcactcat

SEQ ID NO: 258841 - DNA, 20 bp, Artificial Sequence
  Description of Artificial Sequence: Synthetic oligonucleotide
  Target: LAMA2; (-) strand; PAM type: YTN; PAM sequence: TTA
tttcagaaattgtcttcact

SEQ ID NO: 258842 - DNA, 20 bp, Artificial Sequence
  Description of Artificial Sequence: Synthetic oligonucleotide
  Target: LAMA2; (-) strand; PAM type: YTN; PAM sequence: TTT
atttcagaaattgtcttcac

SEQ ID NO: 258843 - DNA, 20 bp, Artificial Sequence
  Description of Artificial Sequence: Synthetic oligonucleotide
  Target: LAMA2; (-) strand; PAM type: YTN; PAM sequence: CTT
tatttcagaaattgtcttca

SEQ ID NO: 258844 - DNA, 20 bp, Artificial Sequence
  Description of Artificial Sequence: Synthetic oligonucleotide
  Target: LAMA2; (-) strand; PAM type: YTN; PAM sequence: TTC
atctttatttcagaaattgt

SEQ ID NO: 258845 - DNA, 20 bp, Artificial Sequence
  Description of Artificial Sequence: Synthetic oligonucleotide
  Target: LAMA2; (-) strand; PAM type: YTN; PAM sequence: TTG
tattcatctttatttcagaa

SEQ ID NO: 258846 - DNA, 20 bp, Artificial Sequence
  Description of Artificial Sequence: Synthetic oligonucleotide
  Target: LAMA2; (-) strand; PAM type: YTN; PAM sequence: TTT
gtattcatctttatttcaga

SEQ ID NO: 258847 - DNA, 20 bp, Artificial Sequence
  Description of Artificial Sequence: Synthetic oligonucleotide
  Target: LAMA2; (-) strand; PAM type: YTN; PAM sequence: CTT
tgtattcatctttatttcag

SEQ ID NO: 258848 - DNA, 20 bp, Artificial Sequence
  Description of Artificial Sequence: Synthetic oligonucleotide
  Target: LAMA2; (-) strand; PAM type: YTN; PAM sequence: CTG
agtcatagaaataatacttt

SEQ ID NO: 258849 - DNA, 20 bp, Artificial Sequence
  Description of Artificial Sequence: Synthetic oligonucleotide
  Target: LAMA2; (-) strand; PAM type: YTN; PAM sequence: TTG
aaaaatatctgagtcataga

SEQ ID NO: 258850 - DNA, 20 bp, Artificial Sequence
  Description of Artificial Sequence: Synthetic oligonucleotide
  Target: LAMA2; (-) strand; PAM type: YTN; PAM sequence: TTA
aaacggtattgaaaaatatc

SEQ ID NO: 258851 - DNA, 20 bp, Artificial Sequence
  Description of Artificial Sequence: Synthetic oligonucleotide
  Target: LAMA2; (-) strand; PAM type: YTN; PAM sequence: CTA
aacataatatattaaaacgg

SEQ ID NO: 258852 - DNA, 20 bp, Artificial Sequence
  Description of Artificial Sequence: Synthetic oligonucleotide
  Target: LAMA2; (-) strand; PAM type: YTN; PAM sequence: TTA
catacccataccaccagaca

SEQ ID NO: 258853 - DNA, 20 bp, Artificial Sequence
  Description of Artificial Sequence: Synthetic oligonucleotide
  Target: LAMA2; (-) strand; PAM type: YTN; PAM sequence: TTC
aattacatacccataccacc

SEQ ID NO: 258854 - DNA, 20 bp, Artificial Sequence
  Description of Artificial Sequence: Synthetic oligonucleotide
  Target: LAMA2; (-) strand; PAM type: YTN; PAM sequence: TTT
caattacatacccataccac

SEQ ID NO: 258855 - DNA, 20 bp, Artificial Sequence
  Description of Artificial Sequence: Synthetic oligonucleotide
  Target: LAMA2; (-) strand; PAM type: YTN; PAM sequence: CTA
tgtaaatttcaattacatac

SEQ ID NO: 258856 - DNA, 20 bp, Artificial Sequence
  Description of Artificial Sequence: Synthetic oligonucleotide
  Target: LAMA2; (-) strand; PAM type: YTN; PAM sequence: CTA
tataaatactatgtaaattt

SEQ ID NO: 258857 - DNA, 20 bp, Artificial Sequence
  Description of Artificial Sequence: Synthetic oligonucleotide
  Target: LAMA2; (-) strand; PAM type: YTN; PAM sequence: TTA
aacaaaaatatgaaactata

SEQ ID NO: 258858 - DNA, 20 bp, Artificial Sequence
  Description of Artificial Sequence: Synthetic oligonucleotide
  Target: LAMA2; (-) strand; PAM type: YTN; PAM sequence: TTA
ggatatagcatgaaatagaa

SEQ ID NO: 258859 - DNA, 20 bp, Artificial Sequence
  Description of Artificial Sequence: Synthetic oligonucleotide
  Target: LAMA2; (-) strand; PAM type: YTN; PAM sequence: CTT
aggatatagcatgaaataga

SEQ ID NO: 258860 - DNA, 20 bp, Artificial Sequence
  Description of Artificial Sequence: Synthetic oligonucleotide
  Target: LAMA2; (-) strand; PAM type: YTN; PAM sequence: TTA
atgatataaatatgcttagg

SEQ ID NO: 258861 - DNA, 20 bp, Artificial Sequence
  Description of Artificial Sequence: Synthetic oligonucleotide
  Target: LAMA2; (-) strand; PAM type: YTN; PAM sequence: TTT
aatgatataaatatgcttag

SEQ ID NO: 258862 - DNA, 20 bp, Artificial Sequence
  Description of Artificial Sequence: Synthetic oligonucleotide
  Target: LAMA2; (-) strand; PAM type: YTN; PAM sequence: TTT
taatgatataaatatgctta

SEQ ID NO: 258863 - DNA, 20 bp, Artificial Sequence
  Description of Artificial Sequence: Synthetic oligonucleotide
  Target: LAMA2; (-) strand; PAM type: YTN; PAM sequence: TTG
aagcagttttaatgatataa

SEQ ID NO: 258864 - DNA, 20 bp, Artificial Sequence
  Description of Artificial Sequence: Synthetic oligonucleotide
  Target: LAMA2; (-) strand; PAM type: YTN; PAM sequence: TTT
gaagcagttttaatgatata

SEQ ID NO: 258865 - DNA, 20 bp, Artificial Sequence
  Description of Artificial Sequence: Synthetic oligonucleotide
  Target: LAMA2; (-) strand; PAM type: YTN; PAM sequence: TTT
tgaagcagttttaatgatat

SEQ ID NO: 258866 - DNA, 20 bp, Artificial Sequence
  Description of Artificial Sequence: Synthetic oligonucleotide
  Target: LAMA2; (-) strand; PAM type: YTN; PAM sequence: CTG
ttttgaagcagttttaatga

SEQ ID NO: 258867 - DNA, 20 bp, Artificial Sequence
  Description of Artificial Sequence: Synthetic oligonucleotide
  Target: LAMA2; (-) strand; PAM type: YTN; PAM sequence: TTA
aaatcctgttttgaagcagt

SEQ ID NO: 258868 - DNA, 20 bp, Artificial Sequence
  Description of Artificial Sequence: Synthetic oligonucleotide
  Target: LAMA2; (-) strand; PAM type: YTN; PAM sequence: TTA
tgaaataatatgcaagaatt

SEQ ID NO: 258869 - DNA, 20 bp, Artificial Sequence
  Description of Artificial Sequence: Synthetic oligonucleotide
  Target: LAMA2; (-) strand; PAM type: YTN; PAM sequence: TTA
aatgatgacatccacattat

SEQ ID NO: 258870 - DNA, 20 bp, Artificial Sequence
  Description of Artificial Sequence: Synthetic oligonucleotide
  Target: LAMA2; (-) strand; PAM type: YTN; PAM sequence: TTG
aataaattaaatgatgacat

SEQ ID NO: 258871 - DNA, 20 bp, Artificial Sequence
  Description of Artificial Sequence: Synthetic oligonucleotide
  Target: LAMA2; (-) strand; PAM type: YTN; PAM sequence: TTG
ttgaataaattaaatgatga

SEQ ID NO: 258872 - DNA, 20 bp, Artificial Sequence
  Description of Artificial Sequence: Synthetic oligonucleotide
  Target: LAMA2; (-) strand; PAM type: YTN; PAM sequence: TTA
taaaaattgttgaataaatt

SEQ ID NO: 258873 - DNA, 20 bp, Artificial Sequence
  Description of Artificial Sequence: Synthetic oligonucleotide
  Target: LAMA2; (-) strand; PAM type: YTN; PAM sequence: CTG
tacaatgttataaaaattgt

SEQ ID NO: 258874 - DNA, 20 bp, Artificial Sequence
  Description of Artificial Sequence: Synthetic oligonucleotide
  Target: LAMA2; (-) strand; PAM type: YTN; PAM sequence: TTA
actgtacaatgttataaaaa

SEQ ID NO: 258875 - DNA, 20 bp, Artificial Sequence
  Description of Artificial Sequence: Synthetic oligonucleotide
  Target: LAMA2; (-) strand; PAM type: YTN; PAM sequence: CTT
aactgtacaatgttataaaa

SEQ ID NO: 258876 - DNA, 20 bp, Artificial Sequence
  Description of Artificial Sequence: Synthetic oligonucleotide
  Target: LAMA2; (-) strand; PAM type: YTN; PAM sequence: CTA
tgcaggcacttaactgtaca

SEQ ID NO: 258877 - DNA, 20 bp, Artificial Sequence
  Description of Artificial Sequence: Synthetic oligonucleotide
  Target: LAMA2; (-) strand; PAM type: YTN; PAM sequence: TTA
tcatggtgaataactatgca

SEQ ID NO: 258878 - DNA, 20 bp, Artificial Sequence
  Description of Artificial Sequence: Synthetic oligonucleotide
  Target: LAMA2; (-) strand; PAM type: YTN; PAM sequence: TTT
atcatggtgaataactatgc

SEQ ID NO: 258879 - DNA, 20 bp, Artificial Sequence
  Description of Artificial Sequence: Synthetic oligonucleotide
  Target: LAMA2; (-) strand; PAM type: YTN; PAM sequence: TTA
tttatcatggtgaataacta

SEQ ID NO: 258880 - DNA, 20 bp, Artificial Sequence
  Description of Artificial Sequence: Synthetic oligonucleotide
  Target: LAMA2; (-) strand; PAM type: YTN; PAM sequence: TTA
caatattatttatcatggtg

SEQ ID NO: 258881 - DNA, 20 bp, Artificial Sequence
  Description of Artificial Sequence: Synthetic oligonucleotide
  Target: LAMA2; (-) strand; PAM type: YTN; PAM sequence: CTA
ttacaatattatttatcatg

SEQ ID NO: 258882 - DNA, 20 bp, Artificial Sequence
  Description of Artificial Sequence: Synthetic oligonucleotide
  Target: LAMA2; (-) strand; PAM type: YTN; PAM sequence: TTA
aagcaaaagcatgcctatta

SEQ ID NO: 258883 - DNA, 20 bp, Artificial Sequence
  Description of Artificial Sequence: Synthetic oligonucleotide
  Target: LAMA2; (-) strand; PAM type: YTN; PAM sequence: TTA
ttaaagcaaaagcatgccta

SEQ ID NO: 258884 - DNA, 20 bp, Artificial Sequence
  Description of Artificial Sequence: Synthetic oligonucleotide
  Target: LAMA2; (-) strand; PAM type: YTN; PAM sequence: TTG
gaatattattaaagcaaaag

SEQ ID NO: 258885 - DNA, 20 bp, Artificial Sequence
  Description of Artificial Sequence: Synthetic oligonucleotide
  Target: LAMA2; (-) strand; PAM type: YTN; PAM sequence: TTA
gagaaataatcagaaattgg

SEQ ID NO: 258886 - DNA, 20 bp, Artificial Sequence
  Description of Artificial Sequence: Synthetic oligonucleotide
  Target: LAMA2; (-) strand; PAM type: YTN; PAM sequence: CTT
agagaaataatcagaaattg

SEQ ID NO: 258887 - DNA, 20 bp, Artificial Sequence
  Description of Artificial Sequence: Synthetic oligonucleotide
  Target: LAMA2; (-) strand; PAM type: YTN; PAM sequence: CTG
gcttagagaaataatcagaa

SEQ ID NO: 258888 - DNA, 20 bp, Artificial Sequence
  Description of Artificial Sequence: Synthetic oligonucleotide
  Target: LAMA2; (-) strand; PAM type: YTN; PAM sequence: TTA
gatacctggcttagagaaat

SEQ ID NO: 258889 - DNA, 20 bp, Artificial Sequence
  Description of Artificial Sequence: Synthetic oligonucleotide
  Target: LAMA2; (-) strand; PAM type: YTN; PAM sequence: TTT
agatacctggcttagagaaa

SEQ ID NO: 258890 - DNA, 20 bp, Artificial Sequence
  Description of Artificial Sequence: Synthetic oligonucleotide
  Target: LAMA2; (-) strand; PAM type: YTN; PAM sequence: TTT
tagatacctggcttagagaa

SEQ ID NO: 258891 - DNA, 20 bp, Artificial Sequence
  Description of Artificial Sequence: Synthetic oligonucleotide
  Target: LAMA2; (-) strand; PAM type: YTN; PAM sequence: TTC
atgtaaaattttagatacct

SEQ ID NO: 258892 - DNA, 20 bp, Artificial Sequence
  Description of Artificial Sequence: Synthetic oligonucleotide
  Target: LAMA2; (-) strand; PAM type: YTN; PAM sequence: TTA
gtaaaagaaattcatgtaaa

SEQ ID NO: 258893 - DNA, 20 bp, Artificial Sequence
  Description of Artificial Sequence: Synthetic oligonucleotide
  Target: LAMA2; (-) strand; PAM type: YTN; PAM sequence: TTA
ttagtaaaagaaattcatgt

SEQ ID NO: 258894 - DNA, 20 bp, Artificial Sequence
  Description of Artificial Sequence: Synthetic oligonucleotide
  Target: LAMA2; (-) strand; PAM type: YTN; PAM sequence: CTA
accatataatatcattatta

SEQ ID NO: 258895 - DNA, 20 bp, Artificial Sequence
  Description of Artificial Sequence: Synthetic oligonucleotide
  Target: LAMA2; (-) strand; PAM type: YTN; PAM sequence: CTA
tataaaaaaaactaaccata

SEQ ID NO: 258896 - DNA, 20 bp, Artificial Sequence
  Description of Artificial Sequence: Synthetic oligonucleotide
  Target: LAMA2; (-) strand; PAM type: YTN; PAM sequence: TTC
acctatataaaaaaaactaa

SEQ ID NO: 258897 - DNA, 20 bp, Artificial Sequence
  Description of Artificial Sequence: Synthetic oligonucleotide
  Target: LAMA2; (-) strand; PAM type: YTN; PAM sequence: TTA
aattcacctatataaaaaaa

SEQ ID NO: 258898 - DNA, 20 bp, Artificial Sequence
  Description of Artificial Sequence: Synthetic oligonucleotide
  Target: LAMA2; (-) strand; PAM type: YTN; PAM sequence: TTG
aaattaaattcacctatata

SEQ ID NO: 258899 - DNA, 20 bp, Artificial Sequence
  Description of Artificial Sequence: Synthetic oligonucleotide
  Target: LAMA2; (-) strand; PAM type: YTN; PAM sequence: TTT
gaaattaaattcacctatat

SEQ ID NO: 258900 - DNA, 20 bp, Artificial Sequence
  Description of Artificial Sequence: Synthetic oligonucleotide
  Target: LAMA2; (-) strand; PAM type: YTN; PAM sequence: CTT
tgaaattaaattcacctata

SEQ ID NO: 258901 - DNA, 20 bp, Artificial Sequence
  Description of Artificial Sequence: Synthetic oligonucleotide
  Target: LAMA2; (-) strand; PAM type: YTN; PAM sequence: TTC
caacagatgacatgactttg

SEQ ID NO: 258902 - DNA, 20 bp, Artificial Sequence
  Description of Artificial Sequence: Synthetic oligonucleotide
  Target: LAMA2; (-) strand; PAM type: YTN; PAM sequence: TTA
aagaaaaaagcatgtaacag

SEQ ID NO: 258903 - DNA, 20 bp, Artificial Sequence
  Description of Artificial Sequence: Synthetic oligonucleotide
  Target: LAMA2; (-) strand; PAM type: YTN; PAM sequence: TTG
tggtatatgattaaagaaaa

SEQ ID NO: 258904 - DNA, 20 bp, Artificial Sequence
  Description of Artificial Sequence: Synthetic oligonucleotide
  Target: LAMA2; (-) strand; PAM type: YTN; PAM sequence: TTC
agattgtggtatatgattaa

SEQ ID NO: 258905 - DNA, 20 bp, Artificial Sequence
  Description of Artificial Sequence: Synthetic oligonucleotide
  Target: LAMA2; (-) strand; PAM type: YTN; PAM sequence: CTA
attcagattgtggtatatga

SEQ ID NO: 258906 - DNA, 20 bp, Artificial Sequence
  Description of Artificial Sequence: Synthetic oligonucleotide
  Target: LAMA2; (-) strand; PAM type: YTN; PAM sequence: TTC
taattcagattgtggtatat

SEQ ID NO: 258907 - DNA, 20 bp, Artificial Sequence
  Description of Artificial Sequence: Synthetic oligonucleotide
  Target: LAMA2; (-) strand; PAM type: YTN; PAM sequence: CTA
gttctaattcagattgtggt

SEQ ID NO: 258908 - DNA, 20 bp, Artificial Sequence
  Description of Artificial Sequence: Synthetic oligonucleotide
  Target: LAMA2; (-) strand; PAM type: YTN; PAM sequence: TTC
tagttctaattcagattgtg

SEQ ID NO: 258909 - DNA, 20 bp, Artificial Sequence
  Description of Artificial Sequence: Synthetic oligonucleotide
  Target: LAMA2; (-) strand; PAM type: YTN; PAM sequence: TTT
ctagttctaattcagattgt

SEQ ID NO: 258910 - DNA, 20 bp, Artificial Sequence
  Description of Artificial Sequence: Synthetic oligonucleotide
  Target: LAMA2; (-) strand; PAM type: YTN; PAM sequence: TTA
tttctagttctaattcagat

SEQ ID NO: 258911 - DNA, 20 bp, Artificial Sequence
  Description of Artificial Sequence: Synthetic oligonucleotide
  Target: LAMA2; (-) strand; PAM type: YTN; PAM sequence: TTT
atttctagttctaattcaga

SEQ ID NO: 258912 - DNA, 20 bp, Artificial Sequence
  Description of Artificial Sequence: Synthetic oligonucleotide
  Target: LAMA2; (-) strand; PAM type: YTN; PAM sequence: TTT
tatttctagttctaattcag

SEQ ID NO: 258913 - DNA, 20 bp, Artificial Sequence
  Description of Artificial Sequence: Synthetic oligonucleotide
  Target: LAMA2; (-) strand; PAM type: YTN; PAM sequence: TTT
ttatttctagttctaattca

SEQ ID NO: 258914 - DNA, 20 bp, Artificial Sequence
  Description of Artificial Sequence: Synthetic oligonucleotide
  Target: LAMA2; (-) strand; PAM type: YTN; PAM sequence: TTA
tttttatttctagttctaat

SEQ ID NO: 258915 - DNA, 20 bp, Artificial Sequence
  Description of Artificial Sequence: Synthetic oligonucleotide
  Target: LAMA2; (-) strand; PAM type: YTN; PAM sequence: TTT
atttttatttctagttctaa

SEQ ID NO: 258916 - DNA, 20 bp, Artificial Sequence
  Description of Artificial Sequence: Synthetic oligonucleotide
  Target: LAMA2; (-) strand; PAM type: YTN; PAM sequence: TTT
tatttttatttctagttcta

SEQ ID NO: 258917 - DNA, 20 bp, Artificial Sequence
  Description of Artificial Sequence: Synthetic oligonucleotide
  Target: LAMA2; (-) strand; PAM type: YTN; PAM sequence: TTG
gttttatttttatttctagt

SEQ ID NO: 258918 - DNA, 20 bp, Artificial Sequence
  Description of Artificial Sequence: Synthetic oligonucleotide
  Target: LAMA2; (-) strand; PAM type: YTN; PAM sequence: CTG
ttggttttatttttatttct

SEQ ID NO: 258919 - DNA, 20 bp, Artificial Sequence
  Description of Artificial Sequence: Synthetic oligonucleotide
  Target: LAMA2; (-) strand; PAM type: YTN; PAM sequence: TTA
ctgttggttttatttttatt

SEQ ID NO: 258920 - DNA, 20 bp, Artificial Sequence
  Description of Artificial Sequence: Synthetic oligonucleotide
  Target: LAMA2; (-) strand; PAM type: YTN; PAM sequence: TTT
actgttggttttatttttat

SEQ ID NO: 258921 - DNA, 20 bp, Artificial Sequence
  Description of Artificial Sequence: Synthetic oligonucleotide
  Target: LAMA2; (-) strand; PAM type: YTN; PAM sequence: TTA
catttactgttggttttatt

SEQ ID NO: 258922 - DNA, 20 bp, Artificial Sequence
  Description of Artificial Sequence: Synthetic oligonucleotide
  Target: LAMA2; (-) strand; PAM type: YTN; PAM sequence: TTT
acatttactgttggttttat

SEQ ID NO: 258923 - DNA, 20 bp, Artificial Sequence
  Description of Artificial Sequence: Synthetic oligonucleotide
  Target: LAMA2; (-) strand; PAM type: YTN; PAM sequence: CTT
tacatttactgttggtttta

SEQ ID NO: 258924 - DNA, 20 bp, Artificial Sequence
  Description of Artificial Sequence: Synthetic oligonucleotide
  Target: LAMA2; (-) strand; PAM type: YTN; PAM sequence: CTC
atctttacatttactgttgg

SEQ ID NO: 258925 - DNA, 20 bp, Artificial Sequence
  Description of Artificial Sequence: Synthetic oligonucleotide
  Target: LAMA2; (-) strand; PAM type: YTN; PAM sequence: TTC
tcatctttacatttactgtt

SEQ ID NO: 258926 - DNA, 20 bp, Artificial Sequence
  Description of Artificial Sequence: Synthetic oligonucleotide
  Target: LAMA2; (-) strand; PAM type: YTN; PAM sequence: TTG
acgatcattctcatctttac

SEQ ID NO: 258927 - DNA, 20 bp, Artificial Sequence
  Description of Artificial Sequence: Synthetic oligonucleotide
  Target: LAMA2; (-) strand; PAM type: YTN; PAM sequence: TTT
gacgatcattctcatcttta

SEQ ID NO: 258928 - DNA, 20 bp, Artificial Sequence
  Description of Artificial Sequence: Synthetic oligonucleotide
  Target: LAMA2; (-) strand; PAM type: YTN; PAM sequence: CTG
agtttgacgatcattctcat

SEQ ID NO: 258929 - DNA, 20 bp, Artificial Sequence
  Description of Artificial Sequence: Synthetic oligonucleotide
  Target: LAMA2; (-) strand; PAM type: YTN; PAM sequence: TTG
actgagtttgacgatcattc

SEQ ID NO: 258930 - DNA, 20 bp, Artificial Sequence
  Description of Artificial Sequence: Synthetic oligonucleotide
  Target: LAMA2; (-) strand; PAM type: YTN; PAM sequence: TTA
aaatgtaaaatgggttgact

SEQ ID NO: 258931 - DNA, 20 bp, Artificial Sequence
  Description of Artificial Sequence: Synthetic oligonucleotide
  Target: LAMA2; (-) strand; PAM type: YTN; PAM sequence: TTT
aaaatgtaaaatgggttgac

SEQ ID NO: 258932 - DNA, 20 bp, Artificial Sequence
  Description of Artificial Sequence: Synthetic oligonucleotide
  Target: LAMA2; (-) strand; PAM type: YTN; PAM sequence: TTT
taaaatgtaaaatgggttga

SEQ ID NO: 258933 - DNA, 20 bp, Artificial Sequence
  Description of Artificial Sequence: Synthetic oligonucleotide
  Target: LAMA2; (-) strand; PAM type: YTN; PAM sequence: TTT
ttaaaatgtaaaatgggttg

SEQ ID NO: 258934 - DNA, 20 bp, Artificial Sequence
  Description of Artificial Sequence: Synthetic oligonucleotide
  Target: LAMA2; (-) strand; PAM type: YTN; PAM sequence: TTA
tttttaaaatgtaaaatggg

SEQ ID NO: 258935 - DNA, 20 bp, Artificial Sequence
  Description of Artificial Sequence: Synthetic oligonucleotide
  Target: LAMA2; (-) strand; PAM type: YTN; PAM sequence: TTT
atttttaaaatgtaaaatgg

SEQ ID NO: 258936 - DNA, 20 bp, Artificial Sequence
  Description of Artificial Sequence: Synthetic oligonucleotide
  Target: LAMA2; (-) strand; PAM type: YTN; PAM sequence: TTT
tatttttaaaatgtaaaatg

SEQ ID NO: 258937 - DNA, 20 bp, Artificial Sequence
  Description of Artificial Sequence: Synthetic oligonucleotide
  Target: LAMA2; (-) strand; PAM type: YTN; PAM sequence: CTA
agaatagttttatttttaaa

SEQ ID NO: 258938 - DNA, 20 bp, Artificial Sequence
  Description of Artificial Sequence: Synthetic oligonucleotide
  Target: LAMA2; (-) strand; PAM type: YTN; PAM sequence: TTA
aaatgaccgtagctaagaat

SEQ ID NO: 258939 - DNA, 20 bp, Artificial Sequence
  Description of Artificial Sequence: Synthetic oligonucleotide
  Target: LAMA2; (-) strand; PAM type: YTN; PAM sequence: TTT
aaaatgaccgtagctaagaa

SEQ ID NO: 258940 - DNA, 20 bp, Artificial Sequence
  Description of Artificial Sequence: Synthetic oligonucleotide
  Target: LAMA2; (-) strand; PAM type: YTN; PAM sequence: TTT
taaaatgaccgtagctaaga

SEQ ID NO: 258941 - DNA, 20 bp, Artificial Sequence
  Description of Artificial Sequence: Synthetic oligonucleotide
  Target: LAMA2; (-) strand; PAM type: YTN; PAM sequence: TTT
ttaaaatgaccgtagctaag

SEQ ID NO: 258942 - DNA, 20 bp, Artificial Sequence
  Description of Artificial Sequence: Synthetic oligonucleotide
  Target: LAMA2; (-) strand; PAM type: YTN; PAM sequence: TTA
gatttttaaaatgaccgtag

SEQ ID NO: 258943 - DNA, 20 bp, Artificial Sequence
  Description of Artificial Sequence: Synthetic oligonucleotide
  Target: LAMA2; (-) strand; PAM type: YTN; PAM sequence: CTG
aaaattagatttttaaaatg

SEQ ID NO: 258944 - DNA, 20 bp, Artificial Sequence
  Description of Artificial Sequence: Synthetic oligonucleotide
  Target: LAMA2; (-) strand; PAM type: YTN; PAM sequence: TTA
taaaagtgaaatcacactga

SEQ ID NO: 258945 - DNA, 20 bp, Artificial Sequence
  Description of Artificial Sequence: Synthetic oligonucleotide
  Target: LAMA2; (-) strand; PAM type: YTN; PAM sequence: TTA
aaaataagttataaaagtga

SEQ ID NO: 258946 - DNA, 20 bp, Artificial Sequence
  Description of Artificial Sequence: Synthetic oligonucleotide
  Target: LAMA2; (-) strand; PAM type: YTN; PAM sequence: TTT
aaaaataagttataaaagtg

SEQ ID NO: 258947 - DNA, 20 bp, Artificial Sequence
  Description of Artificial Sequence: Synthetic oligonucleotide
  Target: LAMA2; (-) strand; PAM type: YTN; PAM sequence: TTT
taaaaataagttataaaagt

SEQ ID NO: 258948 - DNA, 20 bp, Artificial Sequence
  Description of Artificial Sequence: Synthetic oligonucleotide
  Target: LAMA2; (-) strand; PAM type: YTN; PAM sequence: TTA
gtagttttaaaaataagtta

SEQ ID NO: 258949 - DNA, 20 bp, Artificial Sequence
  Description of Artificial Sequence: Synthetic oligonucleotide
  Target: LAMA2; (-) strand; PAM type: YTN; PAM sequence: TTG
ttagtagttttaaaaataag

SEQ ID NO: 258950 - DNA, 20 bp, Artificial Sequence
  Description of Artificial Sequence: Synthetic oligonucleotide
  Target: LAMA2; (-) strand; PAM type: YTN; PAM sequence: TTA
ttgttagtagttttaaaaat

SEQ ID NO: 258951 - DNA, 20 bp, Artificial Sequence
  Description of Artificial Sequence: Synthetic oligonucleotide
  Target: LAMA2; (-) strand; PAM type: YTN; PAM sequence: TTA
gatattattgttagtagttt

SEQ ID NO: 258952 - DNA, 20 bp, Artificial Sequence
  Description of Artificial Sequence: Synthetic oligonucleotide
  Target: LAMA2; (-) strand; PAM type: YTN; PAM sequence: TTT
agatattattgttagtagtt

SEQ ID NO: 258953 - DNA, 20 bp, Artificial Sequence
  Description of Artificial Sequence: Synthetic oligonucleotide
  Target: LAMA2; (-) strand; PAM type: YTN; PAM sequence: TTT
tagatattattgttagtagt

SEQ ID NO: 258954 - DNA, 20 bp, Artificial Sequence
  Description of Artificial Sequence: Synthetic oligonucleotide
  Target: LAMA2; (-) strand; PAM type: YTN; PAM sequence: TTA
tatattttagatattattgt

SEQ ID NO: 258955 - DNA, 20 bp, Artificial Sequence
  Description of Artificial Sequence: Synthetic oligonucleotide
  Target: LAMA2; (-) strand; PAM type: YTN; PAM sequence: CTC
attatatattttagatatta

SEQ ID NO: 258956 - DNA, 20 bp, Artificial Sequence
  Description of Artificial Sequence: Synthetic oligonucleotide
  Target: LAMA2; (-) strand; PAM type: YTN; PAM sequence: TTA
ataagcctcattatatattt

SEQ ID NO: 258957 - DNA, 20 bp, Artificial Sequence
  Description of Artificial Sequence: Synthetic oligonucleotide
  Target: LAMA2; (-) strand; PAM type: YTN; PAM sequence: TTA
acgtgagccacccaaagaga

SEQ ID NO: 258958 - DNA, 20 bp, Artificial Sequence
  Description of Artificial Sequence: Synthetic oligonucleotide
  Target: LAMA2; (-) strand; PAM type: YTN; PAM sequence: CTT
aacgtgagccacccaaagag

SEQ ID NO: 258959 - DNA, 20 bp, Artificial Sequence
  Description of Artificial Sequence: Synthetic oligonucleotide
  Target: LAMA2; (-) strand; PAM type: YTN; PAM sequence: TTG
ccacttaacgtgagccaccc

SEQ ID NO: 258960 - DNA, 20 bp, Artificial Sequence
  Description of Artificial Sequence: Synthetic oligonucleotide
  Target: LAMA2; (-) strand; PAM type: YTN; PAM sequence: CTT
gccacttaacgtgagccacc

SEQ ID NO: 258961 - DNA, 20 bp, Artificial Sequence
  Description of Artificial Sequence: Synthetic oligonucleotide
  Target: LAMA2; (-) strand; PAM type: YTN; PAM sequence: TTG
gtaaaaaaaaatcttgccac

SEQ ID NO: 258962 - DNA, 20 bp, Artificial Sequence
  Description of Artificial Sequence: Synthetic oligonucleotide
  Target: LAMA2; (-) strand; PAM type: YTN; PAM sequence: CTT
ggtaaaaaaaaatcttgcca

SEQ ID NO: 258963 - DNA, 20 bp, Artificial Sequence
  Description of Artificial Sequence: Synthetic oligonucleotide
  Target: LAMA2; (-) strand; PAM type: YTN; PAM sequence: TTC
ttggtaaaaaaaaatcttgc

SEQ ID NO: 258964 - DNA, 20 bp, Artificial Sequence
  Description of Artificial Sequence: Synthetic oligonucleotide
  Target: LAMA2; (-) strand; PAM type: YTN; PAM sequence: CTT
cttggtaaaaaaaaatcttg

SEQ ID NO: 258965 - DNA, 20 bp, Artificial Sequence
  Description of Artificial Sequence: Synthetic oligonucleotide
  Target: LAMA2; (-) strand; PAM type: YTN; PAM sequence: TTG
cttcttggtaaaaaaaaatc

SEQ ID NO: 258966 - DNA, 20 bp, Artificial Sequence
  Description of Artificial Sequence: Synthetic oligonucleotide
  Target: LAMA2; (-) strand; PAM type: YTN; PAM sequence: TTA
ataattgcttcttggtaaaa

SEQ ID NO: 258967 - DNA, 20 bp, Artificial Sequence
  Description of Artificial Sequence: Synthetic oligonucleotide
  Target: LAMA2; (-) strand; PAM type: YTN; PAM sequence: CTT
aataattgcttcttggtaaa

SEQ ID NO: 258968 - DNA, 20 bp, Artificial Sequence
  Description of Artificial Sequence: Synthetic oligonucleotide
  Target: LAMA2; (-) strand; PAM type: YTN; PAM sequence: TTA
gacttaataattgcttcttg

SEQ ID NO: 258969 - DNA, 20 bp, Artificial Sequence
  Description of Artificial Sequence: Synthetic oligonucleotide
  Target: LAMA2; (-) strand; PAM type: YTN; PAM sequence: TTG
gaaaattagacttaataatt

SEQ ID NO: 258970 - DNA, 20 bp, Artificial Sequence
  Description of Artificial Sequence: Synthetic oligonucleotide
  Target: LAMA2; (-) strand; PAM type: YTN; PAM sequence: TTT
ggaaaattagacttaataat

SEQ ID NO: 258971 - DNA, 20 bp, Artificial Sequence
  Description of Artificial Sequence: Synthetic oligonucleotide
  Target: LAMA2; (-) strand; PAM type: YTN; PAM sequence: TTT
tggaaaattagacttaataa

SEQ ID NO: 258972 - DNA, 20 bp, Artificial Sequence
  Description of Artificial Sequence: Synthetic oligonucleotide
  Target: LAMA2; (-) strand; PAM type: YTN; PAM sequence: TTA
ttttggaaaattagacttaa

SEQ ID NO: 258973 - DNA, 20 bp, Artificial Sequence
  Description of Artificial Sequence: Synthetic oligonucleotide
  Target: LAMA2; (-) strand; PAM type: YTN; PAM sequence: CTT
attttggaaaattagactta

SEQ ID NO: 258974 - DNA, 20 bp, Artificial Sequence
  Description of Artificial Sequence: Synthetic oligonucleotide
  Target: LAMA2; (-) strand; PAM type: YTN; PAM sequence: TTC
ttattttggaaaattagact

SEQ ID NO: 258975 - DNA, 20 bp, Artificial Sequence
  Description of Artificial Sequence: Synthetic oligonucleotide
  Target: LAMA2; (-) strand; PAM type: YTN; PAM sequence: TTG
taaaaataattcttattttg

SEQ ID NO: 258976 - DNA, 20 bp, Artificial Sequence
  Description of Artificial Sequence: Synthetic oligonucleotide
  Target: LAMA2; (-) strand; PAM type: YTN; PAM sequence: TTT
gtaaaaataattcttatttt

SEQ ID NO: 258977 - DNA, 20 bp, Artificial Sequence
  Description of Artificial Sequence: Synthetic oligonucleotide
  Target: LAMA2; (-) strand; PAM type: YTN; PAM sequence: CTT
tgtaaaaataattcttattt

SEQ ID NO: 258978 - DNA, 20 bp, Artificial Sequence
  Description of Artificial Sequence: Synthetic oligonucleotide
  Target: LAMA2; (-) strand; PAM type: YTN; PAM sequence: TTC
tttgtaaaaataattcttat

SEQ ID NO: 258979 - DNA, 20 bp, Artificial Sequence
  Description of Artificial Sequence: Synthetic oligonucleotide
  Target: LAMA2; (-) strand; PAM type: YTN; PAM sequence: CTT
ctttgtaaaaataattctta

SEQ ID NO: 258980 - DNA, 20 bp, Artificial Sequence
  Description of Artificial Sequence: Synthetic oligonucleotide
  Target: LAMA2; (-) strand; PAM type: YTN; PAM sequence: TTA
cttctttgtaaaaataattc

SEQ ID NO: 258981 - DNA, 20 bp, Artificial Sequence
  Description of Artificial Sequence: Synthetic oligonucleotide
  Target: LAMA2; (-) strand; PAM type: YTN; PAM sequence: CTC
ggtaattacttctttgtaaa

SEQ ID NO: 258982 - DNA, 20 bp, Artificial Sequence
  Description of Artificial Sequence: Synthetic oligonucleotide
  Target: LAMA2; (-) strand; PAM type: YTN; PAM sequence: TTC
tcggtaattacttctttgta

SEQ ID NO: 258983 - DNA, 20 bp, Artificial Sequence
  Description of Artificial Sequence: Synthetic oligonucleotide
  Target: LAMA2; (-) strand; PAM type: YTN; PAM sequence: TTA
ttctcggtaattacttcttt

SEQ ID NO: 258984 - DNA, 20 bp, Artificial Sequence
  Description of Artificial Sequence: Synthetic oligonucleotide
  Target: LAMA2; (-) strand; PAM type: YTN; PAM sequence: CTG
gaaaattattctcggtaatt

SEQ ID NO: 258985 - DNA, 20 bp, Artificial Sequence
  Description of Artificial Sequence: Synthetic oligonucleotide
  Target: LAMA2; (-) strand; PAM type: YTN; PAM sequence: TTA
atctggaaaattattctcgg

SEQ ID NO: 258986 - DNA, 20 bp, Artificial Sequence
  Description of Artificial Sequence: Synthetic oligonucleotide
  Target: LAMA2; (-) strand; PAM type: YTN; PAM sequence: TTT
aatctggaaaattattctcg

SEQ ID NO: 258987 - DNA, 20 bp, Artificial Sequence
  Description of Artificial Sequence: Synthetic oligonucleotide
  Target: LAMA2; (-) strand; PAM type: YTN; PAM sequence: TTT
taatctggaaaattattctc

SEQ ID NO: 258988 - DNA, 20 bp, Artificial Sequence
  Description of Artificial Sequence: Synthetic oligonucleotide
  Target: LAMA2; (-) strand; PAM type: YTN; PAM sequence: TTA
tgatattttaatctggaaaa

SEQ ID NO: 258989 - DNA, 20 bp, Artificial Sequence
  Description of Artificial Sequence: Synthetic oligonucleotide
  Target: LAMA2; (-) strand; PAM type: YTN; PAM sequence: TTA
ttatgatattttaatctgga

SEQ ID NO: 258990 - DNA, 20 bp, Artificial Sequence
  Description of Artificial Sequence: Synthetic oligonucleotide
  Target: LAMA2; (-) strand; PAM type: YTN; PAM sequence: TTA
aaaatataaagcatgtcaca

SEQ ID NO: 258991 - DNA, 20 bp, Artificial Sequence
  Description of Artificial Sequence: Synthetic oligonucleotide
  Target: LAMA2; (-) strand; PAM type: YTN; PAM sequence: TTT
aaaaatataaagcatgtcac

SEQ ID NO: 258992 - DNA, 20 bp, Artificial Sequence
  Description of Artificial Sequence: Synthetic oligonucleotide
  Target: LAMA2; (-) strand; PAM type: YTN; PAM sequence: TTT
taaaaatataaagcatgtca

SEQ ID NO: 258993 - DNA, 20 bp, Artificial Sequence
  Description of Artificial Sequence: Synthetic oligonucleotide
  Target: LAMA2; (-) strand; PAM type: YTN; PAM sequence: TTT
ttaaaaatataaagcatgtc

SEQ ID NO: 258994 - DNA, 20 bp, Artificial Sequence
  Description of Artificial Sequence: Synthetic oligonucleotide
  Target: LAMA2; (-) strand; PAM type: YTN; PAM sequence: TTT
tttaaaaatataaagcatgt

SEQ ID NO: 258995 - DNA, 20 bp, Artificial Sequence
  Description of Artificial Sequence: Synthetic oligonucleotide
  Target: LAMA2; (-) strand; PAM type: YTN; PAM sequence: TTA
ttttttaaaaatataaagca

SEQ ID NO: 258996 - DNA, 20 bp, Artificial Sequence
  Description of Artificial Sequence: Synthetic oligonucleotide
  Target: LAMA2; (-) strand; PAM type: YTN; PAM sequence: TTC
agggttattttttaaaaata

SEQ ID NO: 258997 - DNA, 20 bp, Artificial Sequence
  Description of Artificial Sequence: Synthetic oligonucleotide
  Target: LAMA2; (-) strand; PAM type: YTN; PAM sequence: CTT
cagggttattttttaaaaat

SEQ ID NO: 258998 - DNA, 20 bp, Artificial Sequence
  Description of Artificial Sequence: Synthetic oligonucleotide
  Target: LAMA2; (-) strand; PAM type: YTN; PAM sequence: TTA
aaatacttcagggttatttt

SEQ ID NO: 258999 - DNA, 20 bp, Artificial Sequence
  Description of Artificial Sequence: Synthetic oligonucleotide
  Target: LAMA2; (-) strand; PAM type: YTN; PAM sequence: CTT
aaaatacttcagggttattt

SEQ ID NO: 259000 - DNA, 20 bp, Artificial Sequence
  Description of Artificial Sequence: Synthetic oligonucleotide
  Target: LAMA2; (-) strand; PAM type: YTN; PAM sequence: CTG
cttaaaatacttcagggtta

SEQ ID NO: 259001 - DNA, 20 bp, Artificial Sequence
  Description of Artificial Sequence: Synthetic oligonucleotide
  Target: LAMA2; (-) strand; PAM type: YTN; PAM sequence: CTA
tcctgcttaaaatacttcag

SEQ ID NO: 259002 - DNA, 20 bp, Artificial Sequence
  Description of Artificial Sequence: Synthetic oligonucleotide
  Target: LAMA2; (-) strand; PAM type: YTN; PAM sequence: CTC
cgagcagaaaaatgaaaatc

SEQ ID NO: 259003 - DNA, 20 bp, Artificial Sequence
  Description of Artificial Sequence: Synthetic oligonucleotide
  Target: LAMA2; (-) strand; PAM type: YTN; PAM sequence: TTA
aaaaatcactccgagcagaa

SEQ ID NO: 259004 - DNA, 20 bp, Artificial Sequence
  Description of Artificial Sequence: Synthetic oligonucleotide
  Target: LAMA2; (-) strand; PAM type: YTN; PAM sequence: CTG
atggattaaaaaatcactcc

SEQ ID NO: 259005 - DNA, 20 bp, Artificial Sequence
  Description of Artificial Sequence: Synthetic oligonucleotide
  Target: LAMA2; (-) strand; PAM type: YTN; PAM sequence: TTA
gaaaatgctgatggattaaa

SEQ ID NO: 259006 - DNA, 20 bp, Artificial Sequence
  Description of Artificial Sequence: Synthetic oligonucleotide
  Target: LAMA2; (-) strand; PAM type: YTN; PAM sequence: TTA
aaatgaaacgttagaaaatg

SEQ ID NO: 259007 - DNA, 20 bp, Artificial Sequence
  Description of Artificial Sequence: Synthetic oligonucleotide
  Target: LAMA2; (-) strand; PAM type: YTN; PAM sequence: CTT
aaaatgaaacgttagaaaat

SEQ ID NO: 259008 - DNA, 20 bp, Artificial Sequence
  Description of Artificial Sequence: Synthetic oligonucleotide
  Target: LAMA2; (-) strand; PAM type: YTN; PAM sequence: TTA
tcaggcttaaaatgaaacgt

SEQ ID NO: 259009 - DNA, 20 bp, Artificial Sequence
  Description of Artificial Sequence: Synthetic oligonucleotide
  Target: LAMA2; (-) strand; PAM type: YTN; PAM sequence: TTG
aaatgcatgttatcaggctt

SEQ ID NO: 259010 - DNA, 20 bp, Artificial Sequence
  Description of Artificial Sequence: Synthetic oligonucleotide
  Target: LAMA2; (-) strand; PAM type: YTN; PAM sequence: CTT
gaaatgcatgttatcaggct

SEQ ID NO: 259011 - DNA, 20 bp, Artificial Sequence
  Description of Artificial Sequence: Synthetic oligonucleotide
  Target: LAMA2; (-) strand; PAM type: YTN; PAM sequence: TTC
ttgaaatgcatgttatcagg

SEQ ID NO: 259012 - DNA, 20 bp, Artificial Sequence
  Description of Artificial Sequence: Synthetic oligonucleotide
  Target: LAMA2; (-) strand; PAM type: YTN; PAM sequence: TTT
cttgaaatgcatgttatcag

SEQ ID NO: 259013 - DNA, 20 bp, Artificial Sequence
  Description of Artificial Sequence: Synthetic oligonucleotide
  Target: LAMA2; (-) strand; PAM type: YTN; PAM sequence: CTT
tcttgaaatgcatgttatca

SEQ ID NO: 259014 - DNA, 20 bp, Artificial Sequence
  Description of Artificial Sequence: Synthetic oligonucleotide
  Target: LAMA2; (-) strand; PAM type: YTN; PAM sequence: CTG
actttcttgaaatgcatgtt

SEQ ID NO: 259015 - DNA, 20 bp, Artificial Sequence
  Description of Artificial Sequence: Synthetic oligonucleotide
  Target: LAMA2; (-) strand; PAM type: YTN; PAM sequence: TTC
ggctgactttcttgaaatgc

SEQ ID NO: 259016 - DNA, 20 bp, Artificial Sequence
  Description of Artificial Sequence: Synthetic oligonucleotide
  Target: LAMA2; (-) strand; PAM type: YTN; PAM sequence: CTT
cggctgactttcttgaaatg

SEQ ID NO: 259017 - DNA, 20 bp, Artificial Sequence
  Description of Artificial Sequence: Synthetic oligonucleotide
  Target: LAMA2; (-) strand; PAM type: YTN; PAM sequence: TTA
ccagcttcggctgactttct

SEQ ID NO: 259018 - DNA, 20 bp, Artificial Sequence
  Description of Artificial Sequence: Synthetic oligonucleotide
  Target: LAMA2; (-) strand; PAM type: YTN; PAM sequence: TTG
cattaccagcttcggctgac

SEQ ID NO: 259019 - DNA, 20 bp, Artificial Sequence
  Description of Artificial Sequence: Synthetic oligonucleotide
  Target: LAMA2; (-) strand; PAM type: YTN; PAM sequence: TTT
gcattaccagcttcggctga

SEQ ID NO: 259020 - DNA, 20 bp, Artificial Sequence
  Description of Artificial Sequence: Synthetic oligonucleotide
  Target: LAMA2; (-) strand; PAM type: YTN; PAM sequence: TTA
cggtcaagtttgcattacca

SEQ ID NO: 259021 - DNA, 20 bp, Artificial Sequence
  Description of Artificial Sequence: Synthetic oligonucleotide
  Target: LAMA2; (-) strand; PAM type: YTN; PAM sequence: TTT
acggtcaagtttgcattacc

SEQ ID NO: 259022 - DNA, 20 bp, Artificial Sequence
  Description of Artificial Sequence: Synthetic oligonucleotide
  Target: LAMA2; (-) strand; PAM type: YTN; PAM sequence: TTT
tacggtcaagtttgcattac

SEQ ID NO: 259023 - DNA, 20 bp, Artificial Sequence
  Description of Artificial Sequence: Synthetic oligonucleotide
  Target: LAMA2; (-) strand; PAM type: YTN; PAM sequence: CTT
ttacggtcaagtttgcatta

SEQ ID NO: 259024 - DNA, 20 bp, Artificial Sequence
  Description of Artificial Sequence: Synthetic oligonucleotide
  Target: LAMA2; (-) strand; PAM type: YTN; PAM sequence: CTA
taacaaatcatcttttacgg

SEQ ID NO: 259025 - DNA, 20 bp, Artificial Sequence
  Description of Artificial Sequence: Synthetic oligonucleotide
  Target: LAMA2; (-) strand; PAM type: YTN; PAM sequence: CTA
tctataacaaatcatctttt

SEQ ID NO: 259026 - DNA, 20 bp, Artificial Sequence
  Description of Artificial Sequence: Synthetic oligonucleotide
  Target: LAMA2; (-) strand; PAM type: YTN; PAM sequence: TTA
tctatctataacaaatcatc

SEQ ID NO: 259027 - DNA, 20 bp, Artificial Sequence
  Description of Artificial Sequence: Synthetic oligonucleotide
  Target: LAMA2; (-) strand; PAM type: YTN; PAM sequence: CTT
atctatctataacaaatcat

SEQ ID NO: 259028 - DNA, 20 bp, Artificial Sequence
  Description of Artificial Sequence: Synthetic oligonucleotide
  Target: LAMA2; (-) strand; PAM type: YTN; PAM sequence: CTC
ttatctatctataacaaatc

SEQ ID NO: 259029 - DNA, 20 bp, Artificial Sequence
  Description of Artificial Sequence: Synthetic oligonucleotide
  Target: LAMA2; (-) strand; PAM type: YTN; PAM sequence: TTC
atatgcatatctcttatcta

SEQ ID NO: 259030 - DNA, 20 bp, Artificial Sequence
  Description of Artificial Sequence: Synthetic oligonucleotide
  Target: LAMA2; (-) strand; PAM type: YTN; PAM sequence: TTA
ttcatatgcatatctcttat

SEQ ID NO: 259031 - DNA, 20 bp, Artificial Sequence
  Description of Artificial Sequence: Synthetic oligonucleotide
  Target: LAMA2; (-) strand; PAM type: YTN; PAM sequence: CTG
atgagttattcatatgcata

SEQ ID NO: 259032 - DNA, 20 bp, Artificial Sequence
  Description of Artificial Sequence: Synthetic oligonucleotide
  Target: LAMA2; (-) strand; PAM type: YTN; PAM sequence: CTC
tgatgagttattcatatgca

SEQ ID NO: 259033 - DNA, 20 bp, Artificial Sequence
  Description of Artificial Sequence: Synthetic oligonucleotide
  Target: LAMA2; (-) strand; PAM type: YTN; PAM sequence: TTC
tctgatgagttattcatatg

SEQ ID NO: 259034 - DNA, 20 bp, Artificial Sequence
  Description of Artificial Sequence: Synthetic oligonucleotide
  Target: LAMA2; (-) strand; PAM type: YTN; PAM sequence: TTC
attctctgatgagttattca

SEQ ID NO: 259035 - DNA, 20 bp, Artificial Sequence
  Description of Artificial Sequence: Synthetic oligonucleotide
  Target: LAMA2; (-) strand; PAM type: YTN; PAM sequence: TTT
cattctctgatgagttattc

SEQ ID NO: 259036 - DNA, 20 bp, Artificial Sequence
  Description of Artificial Sequence: Synthetic oligonucleotide
  Target: LAMA2; (-) strand; PAM type: YTN; PAM sequence: CTT
tcattctctgatgagttatt

SEQ ID NO: 259037 - DNA, 20 bp, Artificial Sequence
  Description of Artificial Sequence: Synthetic oligonucleotide
  Target: LAMA2; (-) strand; PAM type: YTN; PAM sequence: TTA
aagcaccagatcaggtaagt

SEQ ID NO: 259038 - DNA, 20 bp, Artificial Sequence
  Description of Artificial Sequence: Synthetic oligonucleotide
  Target: LAMA2; (-) strand; PAM type: YTN; PAM sequence: TTA
gtgagaacacgtattaaagc

SEQ ID NO: 259039 - DNA, 20 bp, Artificial Sequence
  Description of Artificial Sequence: Synthetic oligonucleotide
  Target: LAMA2; (-) strand; PAM type: YTN; PAM sequence: TTG
attagtgagaacacgtatta

SEQ ID NO: 259040 - DNA, 20 bp, Artificial Sequence
  Description of Artificial Sequence: Synthetic oligonucleotide
  Target: LAMA2; (-) strand; PAM type: YTN; PAM sequence: TTG
aaattgattagtgagaacac

SEQ ID NO: 259041 - DNA, 20 bp, Artificial Sequence
  Description of Artificial Sequence: Synthetic oligonucleotide
  Target: LAMA2; (-) strand; PAM type: YTN; PAM sequence: CTA
acaattgaaattgattagtg

SEQ ID NO: 259042 - DNA, 20 bp, Artificial Sequence
  Description of Artificial Sequence: Synthetic oligonucleotide
  Target: LAMA2; (-) strand; PAM type: YTN; PAM sequence: TTC
taacaattgaaattgattag

SEQ ID NO: 259043 - DNA, 20 bp, Artificial Sequence
  Description of Artificial Sequence: Synthetic oligonucleotide
  Target: LAMA2; (-) strand; PAM type: YTN; PAM sequence: TTC
attctaacaattgaaattga

SEQ ID NO: 259044 - DNA, 20 bp, Artificial Sequence
  Description of Artificial Sequence: Synthetic oligonucleotide
  Target: LAMA2; (-) strand; PAM type: YTN; PAM sequence: TTT
cattctaacaattgaaattg

SEQ ID NO: 259045 - DNA, 20 bp, Artificial Sequence
  Description of Artificial Sequence: Synthetic oligonucleotide
  Target: LAMA2; (-) strand; PAM type: YTN; PAM sequence: TTA
ggtttcattctaacaattga

SEQ ID NO: 259046 - DNA, 20 bp, Artificial Sequence
  Description of Artificial Sequence: Synthetic oligonucleotide
  Target: LAMA2; (-) strand; PAM type: YTN; PAM sequence: CTT
aggtttcattctaacaattg

SEQ ID NO: 259047 - DNA, 20 bp, Artificial Sequence
  Description of Artificial Sequence: Synthetic oligonucleotide
  Target: LAMA2; (-) strand; PAM type: YTN; PAM sequence: TTC
ttaggtttcattctaacaat

SEQ ID NO: 259048 - DNA, 20 bp, Artificial Sequence
  Description of Artificial Sequence: Synthetic oligonucleotide
  Target: LAMA2; (-) strand; PAM type: YTN; PAM sequence: TTT
cttaggtttcattctaacaa

SEQ ID NO: 259049 - DNA, 20 bp, Artificial Sequence
  Description of Artificial Sequence: Synthetic oligonucleotide
  Target: LAMA2; (-) strand; PAM type: YTN; PAM sequence: TTG
atttcttaggtttcattcta

SEQ ID NO: 259050 - DNA, 20 bp, Artificial Sequence
  Description of Artificial Sequence: Synthetic oligonucleotide
  Target: LAMA2; (-) strand; PAM type: YTN; PAM sequence: TTT
gatttcttaggtttcattct

SEQ ID NO: 259051 - DNA, 20 bp, Artificial Sequence
  Description of Artificial Sequence: Synthetic oligonucleotide
  Target: LAMA2; (-) strand; PAM type: YTN; PAM sequence: TTC
aacaaacatttgatttctta

SEQ ID NO: 259052 - DNA, 20 bp, Artificial Sequence
  Description of Artificial Sequence: Synthetic oligonucleotide
  Target: LAMA2; (-) strand; PAM type: YTN; PAM sequence: TTG
gttcaacaaacatttgattt

SEQ ID NO: 259053 - DNA, 20 bp, Artificial Sequence
  Description of Artificial Sequence: Synthetic oligonucleotide
  Target: LAMA2; (-) strand; PAM type: YTN; PAM sequence: CTG
atcaaataattggttcaaca

SEQ ID NO: 259054 - DNA, 20 bp, Artificial Sequence
  Description of Artificial Sequence: Synthetic oligonucleotide
  Target: LAMA2; (-) strand; PAM type: YTN; PAM sequence: TTA
cactgatcaaataattggtt

SEQ ID NO: 259055 - DNA, 20 bp, Artificial Sequence
  Description of Artificial Sequence: Synthetic oligonucleotide
  Target: LAMA2; (-) strand; PAM type: YTN; PAM sequence: CTT
acactgatcaaataattggt

SEQ ID NO: 259056 - DNA, 20 bp, Artificial Sequence
  Description of Artificial Sequence: Synthetic oligonucleotide
  Target: LAMA2; (-) strand; PAM type: YTN; PAM sequence: TTA
tgcttacactgatcaaataa

SEQ ID NO: 259057 - DNA, 20 bp, Artificial Sequence
  Description of Artificial Sequence: Synthetic oligonucleotide
  Target: LAMA2; (-) strand; PAM type: YTN; PAM sequence: TTC
aggttatgcttacactgatc

SEQ ID NO: 259058 - DNA, 20 bp, Artificial Sequence
  Description of Artificial Sequence: Synthetic oligonucleotide
  Target: LAMA2; (-) strand; PAM type: YTN; PAM sequence: TTT
caggttatgcttacactgat

SEQ ID NO: 259059 - DNA, 20 bp, Artificial Sequence
  Description of Artificial Sequence: Synthetic oligonucleotide
  Target: LAMA2; (-) strand; PAM type: YTN; PAM sequence: TTT
tcaggttatgcttacactga

SEQ ID NO: 259060 - DNA, 20 bp, Artificial Sequence
  Description of Artificial Sequence: Synthetic oligonucleotide
  Target: LAMA2; (-) strand; PAM type: YTN; PAM sequence: TTA
taaatataattttcaggtta

SEQ ID NO: 259061 - DNA, 20 bp, Artificial Sequence
  Description of Artificial Sequence: Synthetic oligonucleotide
  Target: LAMA2; (-) strand; PAM type: YTN; PAM sequence: TTC
acattataaatataattttc

SEQ ID NO: 259062 - DNA, 20 bp, Artificial Sequence
  Description of Artificial Sequence: Synthetic oligonucleotide
  Target: LAMA2; (-) strand; PAM type: YTN; PAM sequence: CTA
tagtgttcacattataaata

SEQ ID NO: 259063 - DNA, 20 bp, Artificial Sequence
  Description of Artificial Sequence: Synthetic oligonucleotide
  Target: LAMA2; (-) strand; PAM type: YTN; PAM sequence: TTG
ctatagtgttcacattataa

SEQ ID NO: 259064 - DNA, 20 bp, Artificial Sequence
  Description of Artificial Sequence: Synthetic oligonucleotide
  Target: LAMA2; (-) strand; PAM type: YTN; PAM sequence: TTA
atcattgctatagtgttcac

SEQ ID NO: 259065 - DNA, 20 bp, Artificial Sequence
  Description of Artificial Sequence: Synthetic oligonucleotide
  Target: LAMA2; (-) strand; PAM type: YTN; PAM sequence: TTT
aatcattgctatagtgttca

SEQ ID NO: 259066 - DNA, 20 bp, Artificial Sequence
  Description of Artificial Sequence: Synthetic oligonucleotide
  Target: LAMA2; (-) strand; PAM type: YTN; PAM sequence: TTT
taatcattgctatagtgttc

SEQ ID NO: 259067 - DNA, 20 bp, Artificial Sequence
  Description of Artificial Sequence: Synthetic oligonucleotide
  Target: LAMA2; (-) strand; PAM type: YTN; PAM sequence: CTT
ttaatcattgctatagtgtt

SEQ ID NO: 259068 - DNA, 20 bp, Artificial Sequence
  Description of Artificial Sequence: Synthetic oligonucleotide
  Target: LAMA2; (-) strand; PAM type: YTN; PAM sequence: TTG
tcacatatccataaatactt

SEQ ID NO: 259069 - DNA, 20 bp, Artificial Sequence
  Description of Artificial Sequence: Synthetic oligonucleotide
  Target: LAMA2; (-) strand; PAM type: YTN; PAM sequence: TTT
gtcacatatccataaatact

SEQ ID NO: 259070 - DNA, 20 bp, Artificial Sequence
  Description of Artificial Sequence: Synthetic oligonucleotide
  Target: LAMA2; (-) strand; PAM type: YTN; PAM sequence: TTT
tgtcacatatccataaatac

SEQ ID NO: 259071 - DNA, 20 bp, Artificial Sequence
  Description of Artificial Sequence: Synthetic oligonucleotide
  Target: LAMA2; (-) strand; PAM type: YTN; PAM sequence: TTG
atagaattttgtcacatatc

SEQ ID NO: 259072 - DNA, 20 bp, Artificial Sequence
  Description of Artificial Sequence: Synthetic oligonucleotide
  Target: LAMA2; (-) strand; PAM type: YTN; PAM sequence: TTT
gatagaattttgtcacatat

SEQ ID NO: 259073 - DNA, 20 bp, Artificial Sequence
  Description of Artificial Sequence: Synthetic oligonucleotide
  Target: LAMA2; (-) strand; PAM type: YTN; PAM sequence: CTA
atatttgatagaattttgtc

SEQ ID NO: 259074 - DNA, 20 bp, Artificial Sequence
  Description of Artificial Sequence: Synthetic oligonucleotide
  Target: LAMA2; (-) strand; PAM type: YTN; PAM sequence: TTG
ccctaatatttgatagaatt

SEQ ID NO: 259075 - DNA, 20 bp, Artificial Sequence
  Description of Artificial Sequence: Synthetic oligonucleotide
  Target: LAMA2; (-) strand; PAM type: YTN; PAM sequence: TTT
gccctaatatttgatagaat

SEQ ID NO: 259076 - DNA, 20 bp, Artificial Sequence
  Description of Artificial Sequence: Synthetic oligonucleotide
  Target: LAMA2; (-) strand; PAM type: YTN; PAM sequence: TTT
tgccctaatatttgatagaa

SEQ ID NO: 259077 - DNA, 20 bp, Artificial Sequence
  Description of Artificial Sequence: Synthetic oligonucleotide
  Target: LAMA2; (-) strand; PAM type: YTN; PAM sequence: TTT
ttgccctaatatttgataga

SEQ ID NO: 259078 - DNA, 20 bp, Artificial Sequence
  Description of Artificial Sequence: Synthetic oligonucleotide
  Target: LAMA2; (-) strand; PAM type: YTN; PAM sequence: CTT
tttgccctaatatttgatag

SEQ ID NO: 259079 - DNA, 20 bp, Artificial Sequence
  Description of Artificial Sequence: Synthetic oligonucleotide
  Target: LAMA2; (-) strand; PAM type: YTN; PAM sequence: TTA
aaataatcctttttgcccta

SEQ ID NO: 259080 - DNA, 20 bp, Artificial Sequence
  Description of Artificial Sequence: Synthetic oligonucleotide
  Target: LAMA2; (-) strand; PAM type: YTN; PAM sequence: CTA
aagttaaaataatccttttt

SEQ ID NO: 259081 - DNA, 20 bp, Artificial Sequence
  Description of Artificial Sequence: Synthetic oligonucleotide
  Target: LAMA2; (-) strand; PAM type: YTN; PAM sequence: TTG
accagcagcctaaagttaaa

SEQ ID NO: 259082 - DNA, 20 bp, Artificial Sequence
  Description of Artificial Sequence: Synthetic oligonucleotide
  Target: LAMA2; (-) strand; PAM type: YTN; PAM sequence: TTA
ttgaccagcagcctaaagtt

SEQ ID NO: 259083 - DNA, 20 bp, Artificial Sequence
  Description of Artificial Sequence: Synthetic oligonucleotide
  Target: LAMA2; (-) strand; PAM type: YTN; PAM sequence: TTC
aacattattgaccagcagcc

SEQ ID NO: 259084 - DNA, 20 bp, Artificial Sequence
  Description of Artificial Sequence: Synthetic oligonucleotide
  Target: LAMA2; (-) strand; PAM type: YTN; PAM sequence: TTT
caacattattgaccagcagc

SEQ ID NO: 259085 - DNA, 20 bp, Artificial Sequence
  Description of Artificial Sequence: Synthetic oligonucleotide
  Target: LAMA2; (-) strand; PAM type: YTN; PAM sequence: CTT
tcaacattattgaccagcag

SEQ ID NO: 259086 - DNA, 20 bp, Artificial Sequence
  Description of Artificial Sequence: Synthetic oligonucleotide
  Target: LAMA2; (-) strand; PAM type: YTN; PAM sequence: TTG
gtaaaaatactttcaacatt

SEQ ID NO: 259087 - DNA, 20 bp, Artificial Sequence
  Description of Artificial Sequence: Synthetic oligonucleotide
  Target: LAMA2; (-) strand; PAM type: YTN; PAM sequence: CTT
ggtaaaaatactttcaacat

SEQ ID NO: 259088 - DNA, 20 bp, Artificial Sequence
  Description of Artificial Sequence: Synthetic oligonucleotide
  Target: LAMA2; (-) strand; PAM type: YTN; PAM sequence: CTA
cttggtaaaaatactttcaa

SEQ ID NO: 259089 - DNA, 20 bp, Artificial Sequence
  Description of Artificial Sequence: Synthetic oligonucleotide
  Target: LAMA2; (-) strand; PAM type: YTN; PAM sequence: CTC
ctacttggtaaaaatacttt

SEQ ID NO: 259090 - DNA, 20 bp, Artificial Sequence
  Description of Artificial Sequence: Synthetic oligonucleotide
  Target: LAMA2; (-) strand; PAM type: YTN; PAM sequence: CTA
tggactcctacttggtaaaa

SEQ ID NO: 259091 - DNA, 20 bp, Artificial Sequence
  Description of Artificial Sequence: Synthetic oligonucleotide
  Target: LAMA2; (-) strand; PAM type: YTN; PAM sequence: TTC
agatctatggactcctactt

SEQ ID NO: 259092 - DNA, 20 bp, Artificial Sequence
  Description of Artificial Sequence: Synthetic oligonucleotide
  Target: LAMA2; (-) strand; PAM type: YTN; PAM sequence: TTT
cagatctatggactcctact

SEQ ID NO: 259093 - DNA, 20 bp, Artificial Sequence
  Description of Artificial Sequence: Synthetic oligonucleotide
  Target: LAMA2; (-) strand; PAM type: YTN; PAM sequence: CTT
tcagatctatggactcctac

SEQ ID NO: 259094 - DNA, 20 bp, Artificial Sequence
  Description of Artificial Sequence: Synthetic oligonucleotide
  Target: LAMA2; (-) strand; PAM type: YTN; PAM sequence: TTA
ctttcagatctatggactcc

SEQ ID NO: 259095 - DNA, 20 bp, Artificial Sequence
  Description of Artificial Sequence: Synthetic oligonucleotide
  Target: LAMA2; (-) strand; PAM type: YTN; PAM sequence: TTG
attactttcagatctatgga

SEQ ID NO: 259096 - DNA, 20 bp, Artificial Sequence
  Description of Artificial Sequence: Synthetic oligonucleotide
  Target: LAMA2; (-) strand; PAM type: YTN; PAM sequence: CTG
aattgattactttcagatct

SEQ ID NO: 259097 - DNA, 20 bp, Artificial Sequence
  Description of Artificial Sequence: Synthetic oligonucleotide
  Target: LAMA2; (-) strand; PAM type: YTN; PAM sequence: TTA
gtaatctgaattgattactt

SEQ ID NO: 259098 - DNA, 20 bp, Artificial Sequence
  Description of Artificial Sequence: Synthetic oligonucleotide
  Target: LAMA2; (-) strand; PAM type: YTN; PAM sequence: TTT
agtaatctgaattgattact

SEQ ID NO: 259099 - DNA, 20 bp, Artificial Sequence
  Description of Artificial Sequence: Synthetic oligonucleotide
  Target: LAMA2; (-) strand; PAM type: YTN; PAM sequence: TTT
tagtaatctgaattgattac

SEQ ID NO: 259100 - DNA, 20 bp, Artificial Sequence
  Description of Artificial Sequence: Synthetic oligonucleotide
  Target: LAMA2; (-) strand; PAM type: YTN; PAM sequence: TTT
ttagtaatctgaattgatta

SEQ ID NO: 259101 - DNA, 20 bp, Artificial Sequence
  Description of Artificial Sequence: Synthetic oligonucleotide
  Target: LAMA2; (-) strand; PAM type: YTN; PAM sequence: TTC
atttttagtaatctgaattg

SEQ ID NO: 259102 - DNA, 20 bp, Artificial Sequence
  Description of Artificial Sequence: Synthetic oligonucleotide
  Target: LAMA2; (-) strand; PAM type: YTN; PAM sequence: CTT
catttttagtaatctgaatt

SEQ ID NO: 259103 - DNA, 20 bp, Artificial Sequence
  Description of Artificial Sequence: Synthetic oligonucleotide
  Target: LAMA2; (-) strand; PAM type: YTN; PAM sequence: TTC
ttcatttttagtaatctgaa

SEQ ID NO: 259104 - DNA, 20 bp, Artificial Sequence
  Description of Artificial Sequence: Synthetic oligonucleotide
  Target: LAMA2; (-) strand; PAM type: YTN; PAM sequence: CTT
cttcatttttagtaatctga

SEQ ID NO: 259105 - DNA, 20 bp, Artificial Sequence
  Description of Artificial Sequence: Synthetic oligonucleotide
  Target: LAMA2; (-) strand; PAM type: YTN; PAM sequence: TTA
cttcttcatttttagtaatc

SEQ ID NO: 259106 - DNA, 20 bp, Artificial Sequence
  Description of Artificial Sequence: Synthetic oligonucleotide
  Target: LAMA2; (-) strand; PAM type: YTN; PAM sequence: TTT
acttcttcatttttagtaat

SEQ ID NO: 259107 - DNA, 20 bp, Artificial Sequence
  Description of Artificial Sequence: Synthetic oligonucleotide
  Target: LAMA2; (-) strand; PAM type: YTN; PAM sequence: TTT
tacttcttcatttttagtaa

SEQ ID NO: 259108 - DNA, 20 bp, Artificial Sequence
  Description of Artificial Sequence: Synthetic oligonucleotide
  Target: LAMA2; (-) strand; PAM type: YTN; PAM sequence: TTA
aaattttacttcttcatttt

SEQ ID NO: 259109 - DNA, 20 bp, Artificial Sequence
  Description of Artificial Sequence: Synthetic oligonucleotide
  Target: LAMA2; (-) strand; PAM type: YTN; PAM sequence: TTT
aaaattttacttcttcattt

SEQ ID NO: 259110 - DNA, 20 bp, Artificial Sequence
  Description of Artificial Sequence: Synthetic oligonucleotide
  Target: LAMA2; (-) strand; PAM type: YTN; PAM sequence: TTA
atttaaaattttacttcttc

SEQ ID NO: 259111 - DNA, 20 bp, Artificial Sequence
  Description of Artificial Sequence: Synthetic oligonucleotide
  Target: LAMA2; (-) strand; PAM type: YTN; PAM sequence: CTT
aatttaaaattttacttctt

SEQ ID NO: 259112 - DNA, 20 bp, Artificial Sequence
  Description of Artificial Sequence: Synthetic oligonucleotide
  Target: LAMA2; (-) strand; PAM type: YTN; PAM sequence: CTA
gtcttaatttaaaattttac

SEQ ID NO: 259113 - DNA, 20 bp, Artificial Sequence
  Description of Artificial Sequence: Synthetic oligonucleotide
  Target: LAMA2; (-) strand; PAM type: YTN; PAM sequence: TTC
tagtcttaatttaaaatttt

SEQ ID NO: 259114 - DNA, 20 bp, Artificial Sequence
  Description of Artificial Sequence: Synthetic oligonucleotide
  Target: LAMA2; (-) strand; PAM type: YTN; PAM sequence: TTT
ctagtcttaatttaaaattt

SEQ ID NO: 259115 - DNA, 20 bp, Artificial Sequence
  Description of Artificial Sequence: Synthetic oligonucleotide
  Target: LAMA2; (-) strand; PAM type: YTN; PAM sequence: CTA
taggtggtatttctagtctt

SEQ ID NO: 259116 - DNA, 20 bp, Artificial Sequence
  Description of Artificial Sequence: Synthetic oligonucleotide
  Target: LAMA2; (-) strand; PAM type: YTN; PAM sequence: TTC
aatagcaatatggaaaggac

SEQ ID NO: 259117 - DNA, 20 bp, Artificial Sequence
  Description of Artificial Sequence: Synthetic oligonucleotide
  Target: LAMA2; (-) strand; PAM type: YTN; PAM sequence: TTT
caatagcaatatggaaagga

SEQ ID NO: 259118 - DNA, 20 bp, Artificial Sequence
  Description of Artificial Sequence: Synthetic oligonucleotide
  Target: LAMA2; (-) strand; PAM type: YTN; PAM sequence: CTC
aagatttcaatagcaatatg

SEQ ID NO: 259119 - DNA, 20 bp, Artificial Sequence
  Description of Artificial Sequence: Synthetic oligonucleotide
  Target: LAMA2; (-) strand; PAM type: YTN; PAM sequence: TTC
tcaagatttcaatagcaata

SEQ ID NO: 259120 - DNA, 20 bp, Artificial Sequence
  Description of Artificial Sequence: Synthetic oligonucleotide
  Target: LAMA2; (-) strand; PAM type: YTN; PAM sequence: CTT
ctcaagatttcaatagcaat

SEQ ID NO: 259121 - DNA, 20 bp, Artificial Sequence
  Description of Artificial Sequence: Synthetic oligonucleotide
  Target: LAMA2; (-) strand; PAM type: YTN; PAM sequence: CTG
tcccagtacttctcaagatt

SEQ ID NO: 259122 - DNA, 20 bp, Artificial Sequence
  Description of Artificial Sequence: Synthetic oligonucleotide
  Target: LAMA2; (-) strand; PAM type: YTN; PAM sequence: TTC
accagcctgtcccagtactt

SEQ ID NO: 259123 - DNA, 20 bp, Artificial Sequence
  Description of Artificial Sequence: Synthetic oligonucleotide
  Target: LAMA2; (-) strand; PAM type: YTN; PAM sequence: TTT
caccagcctgtcccagtact

SEQ ID NO: 259124 - DNA, 20 bp, Artificial Sequence
  Description of Artificial Sequence: Synthetic oligonucleotide
  Target: LAMA2; (-) strand; PAM type: YTN; PAM sequence: TTT
tcaccagcctgtcccagtac

SEQ ID NO: 259125 - DNA, 20 bp, Artificial Sequence
  Description of Artificial Sequence: Synthetic oligonucleotide
  Target: LAMA2; (-) strand; PAM type: YTN; PAM sequence: TTG
tattttcaccagcctgtccc

SEQ ID NO: 259126 - DNA, 20 bp, Artificial Sequence
  Description of Artificial Sequence: Synthetic oligonucleotide
  Target: LAMA2; (-) strand; PAM type: YTN; PAM sequence: CTG
ttgtattttcaccagcctgt

SEQ ID NO: 259127 - DNA, 20 bp, Artificial Sequence
  Description of Artificial Sequence: Synthetic oligonucleotide
  Target: LAMA2; (-) strand; PAM type: YTN; PAM sequence: CTG
tctgttgtattttcaccagc

SEQ ID NO: 259128 - DNA, 20 bp, Artificial Sequence
  Description of Artificial Sequence: Synthetic oligonucleotide
  Target: LAMA2; (-) strand; PAM type: YTN; PAM sequence: TTA
ctgtctgttgtattttcacc

SEQ ID NO: 259129 - DNA, 20 bp, Artificial Sequence
  Description of Artificial Sequence: Synthetic oligonucleotide
  Target: LAMA2; (-) strand; PAM type: YTN; PAM sequence: TTT
actgtctgttgtattttcac

SEQ ID NO: 259130 - DNA, 20 bp, Artificial Sequence
  Description of Artificial Sequence: Synthetic oligonucleotide
  Target: LAMA2; (-) strand; PAM type: YTN; PAM sequence: CTT
tactgtctgttgtattttca

SEQ ID NO: 259131 - DNA, 20 bp, Artificial Sequence
  Description of Artificial Sequence: Synthetic oligonucleotide
  Target: LAMA2; (-) strand; PAM type: YTN; PAM sequence: TTC
ctttactgtctgttgtattt

SEQ ID NO: 259132 - DNA, 20 bp, Artificial Sequence
  Description of Artificial Sequence: Synthetic oligonucleotide
  Target: LAMA2; (-) strand; PAM type: YTN; PAM sequence: CTT
cctttactgtctgttgtatt

SEQ ID NO: 259133 - DNA, 20 bp, Artificial Sequence
  Description of Artificial Sequence: Synthetic oligonucleotide
  Target: LAMA2; (-) strand; PAM type: YTN; PAM sequence: TTA
ggcgcttcctttactgtctg

SEQ ID NO: 259134 - DNA, 20 bp, Artificial Sequence
  Description of Artificial Sequence: Synthetic oligonucleotide
  Target: LAMA2; (-) strand; PAM type: YTN; PAM sequence: CTG
cagaattaggcgcttccttt

SEQ ID NO: 259135 - DNA, 20 bp, Artificial Sequence
  Description of Artificial Sequence: Synthetic oligonucleotide
  Target: LAMA2; (-) strand; PAM type: YTN; PAM sequence: TTA
actgcagaattaggcgcttc

SEQ ID NO: 259136 - DNA, 20 bp, Artificial Sequence
  Description of Artificial Sequence: Synthetic oligonucleotide
  Target: LAMA2; (-) strand; PAM type: YTN; PAM sequence: TTA
tcaaaattaactgcagaatt

SEQ ID NO: 259137 - DNA, 20 bp, Artificial Sequence
  Description of Artificial Sequence: Synthetic oligonucleotide
  Target: LAMA2; (-) strand; PAM type: YTN; PAM sequence: TTT
atcaaaattaactgcagaat

SEQ ID NO: 259138 - DNA, 20 bp, Artificial Sequence
  Description of Artificial Sequence: Synthetic oligonucleotide
  Target: LAMA2; (-) strand; PAM type: YTN; PAM sequence: TTT
tatcaaaattaactgcagaa

SEQ ID NO: 259139 - DNA, 20 bp, Artificial Sequence
  Description of Artificial Sequence: Synthetic oligonucleotide
  Target: LAMA2; (-) strand; PAM type: YTN; PAM sequence: CTG
aaattttatcaaaattaact

SEQ ID NO: 259140 - DNA, 20 bp, Artificial Sequence
  Description of Artificial Sequence: Synthetic oligonucleotide
  Target: LAMA2; (-) strand; PAM type: YTN; PAM sequence: TTC
tgaaattttatcaaaattaa

SEQ ID NO: 259141 - DNA, 20 bp, Artificial Sequence
  Description of Artificial Sequence: Synthetic oligonucleotide
  Target: LAMA2; (-) strand; PAM type: YTN; PAM sequence: TTA
ttctgaaattttatcaaaat

SEQ ID NO: 259142 - DNA, 20 bp, Artificial Sequence
  Description of Artificial Sequence: Synthetic oligonucleotide
  Target: LAMA2; (-) strand; PAM type: YTN; PAM sequence: TTC
aattattctgaaattttatc

SEQ ID NO: 259143 - DNA, 20 bp, Artificial Sequence
  Description of Artificial Sequence: Synthetic oligonucleotide
  Target: LAMA2; (-) strand; PAM type: YTN; PAM sequence: CTA
tgatatccaaagagaaaagt

SEQ ID NO: 259144 - DNA, 20 bp, Artificial Sequence
  Description of Artificial Sequence: Synthetic oligonucleotide
  Target: LAMA2; (-) strand; PAM type: YTN; PAM sequence: TTC
tatgatatccaaagagaaaa

SEQ ID NO: 259145 - DNA, 20 bp, Artificial Sequence
  Description of Artificial Sequence: Synthetic oligonucleotide
  Target: LAMA2; (-) strand; PAM type: YTN; PAM sequence: TTT
ctatgatatccaaagagaaa

SEQ ID NO: 259146 - DNA, 20 bp, Artificial Sequence
  Description of Artificial Sequence: Synthetic oligonucleotide
  Target: LAMA2; (-) strand; PAM type: YTN; PAM sequence: TTT
tctatgatatccaaagagaa

SEQ ID NO: 259147 - DNA, 20 bp, Artificial Sequence
  Description of Artificial Sequence: Synthetic oligonucleotide
  Target: LAMA2; (-) strand; PAM type: YTN; PAM sequence: CTT
ttctatgatatccaaagaga

SEQ ID NO: 259148 - DNA, 20 bp, Artificial Sequence
  Description of Artificial Sequence: Synthetic oligonucleotide
  Target: LAMA2; (-) strand; PAM type: YTN; PAM sequence: TTC
aatcaaatggaccttttcta

SEQ ID NO: 259149 - DNA, 20 bp, Artificial Sequence
  Description of Artificial Sequence: Synthetic oligonucleotide
  Target: LAMA2; (-) strand; PAM type: YTN; PAM sequence: TTC
attcaatcaaatggaccttt

SEQ ID NO: 259150 - DNA, 20 bp, Artificial Sequence
  Description of Artificial Sequence: Synthetic oligonucleotide
  Target: LAMA2; (-) strand; PAM type: YTN; PAM sequence: TTT
cattcaatcaaatggacctt

SEQ ID NO: 259151 - DNA, 20 bp, Artificial Sequence
  Description of Artificial Sequence: Synthetic oligonucleotide
  Target: LAMA2; (-) strand; PAM type: YTN; PAM sequence: TTT
tcattcaatcaaatggacct

SEQ ID NO: 259152 - DNA, 20 bp, Artificial Sequence
  Description of Artificial Sequence: Synthetic oligonucleotide
  Target: LAMA2; (-) strand; PAM type: YTN; PAM sequence: TTG
ggttttcattcaatcaaatg

SEQ ID NO: 259153 - DNA, 20 bp, Artificial Sequence
  Description of Artificial Sequence: Synthetic oligonucleotide
  Target: LAMA2; (-) strand; PAM type: YTN; PAM sequence: TTA
tgacaattgggttttcattc

SEQ ID NO: 259154 - DNA, 20 bp, Artificial Sequence
  Description of Artificial Sequence: Synthetic oligonucleotide
  Target: LAMA2; (-) strand; PAM type: YTN; PAM sequence: CTG
atgttatgacaattgggttt

SEQ ID NO: 259155 - DNA, 20 bp, Artificial Sequence
  Description of Artificial Sequence: Synthetic oligonucleotide
  Target: LAMA2; (-) strand; PAM type: YTN; PAM sequence: CTC
actgatgttatgacaattgg

SEQ ID NO: 259156 - DNA, 20 bp, Artificial Sequence
  Description of Artificial Sequence: Synthetic oligonucleotide
  Target: LAMA2; (-) strand; PAM type: YTN; PAM sequence: TTC
ctcactgatgttatgacaat

SEQ ID NO: 259157 - DNA, 20 bp, Artificial Sequence
  Description of Artificial Sequence: Synthetic oligonucleotide
  Target: LAMA2; (-) strand; PAM type: YTN; PAM sequence: TTA
tcaggattcctcactgatgt

SEQ ID NO: 259158 - DNA, 20 bp, Artificial Sequence
  Description of Artificial Sequence: Synthetic oligonucleotide
  Target: LAMA2; (-) strand; PAM type: YTN; PAM sequence: TTA
ggagttatcaggattcctca

SEQ ID NO: 259159 - DNA, 20 bp, Artificial Sequence
  Description of Artificial Sequence: Synthetic oligonucleotide
  Target: LAMA2; (-) strand; PAM type: YTN; PAM sequence: CTT
aggagttatcaggattcctc

SEQ ID NO: 259160 - DNA, 20 bp, Artificial Sequence
  Description of Artificial Sequence: Synthetic oligonucleotide
  Target: LAMA2; (-) strand; PAM type: YTN; PAM sequence: CTC
gaagtgaagcaagatgcaca

SEQ ID NO: 259161 - DNA, 20 bp, Artificial Sequence
  Description of Artificial Sequence: Synthetic oligonucleotide
  Target: LAMA2; (-) strand; PAM type: YTN; PAM sequence: TTA
actcgaagtgaagcaagatg

SEQ ID NO: 259162 - DNA, 20 bp, Artificial Sequence
  Description of Artificial Sequence: Synthetic oligonucleotide
  Target: LAMA2; (-) strand; PAM type: YTN; PAM sequence: TTA
aatcagttaactcgaagtga

SEQ ID NO: 259163 - DNA, 20 bp, Artificial Sequence
  Description of Artificial Sequence: Synthetic oligonucleotide
  Target: LAMA2; (-) strand; PAM type: YTN; PAM sequence: TTT
aaatcagttaactcgaagtg

SEQ ID NO: 259164 - DNA, 20 bp, Artificial Sequence
  Description of Artificial Sequence: Synthetic oligonucleotide
  Target: LAMA2; (-) strand; PAM type: YTN; PAM sequence: TTA
aatttaaatcagttaactcg

SEQ ID NO: 259165 - DNA, 20 bp, Artificial Sequence
  Description of Artificial Sequence: Synthetic oligonucleotide
  Target: LAMA2; (-) strand; PAM type: YTN; PAM sequence: CTG
gcaatggaagaggagagaaa

SEQ ID NO: 259166 - DNA, 20 bp, Artificial Sequence
  Description of Artificial Sequence: Synthetic oligonucleotide
  Target: LAMA2; (-) strand; PAM type: YTN; PAM sequence: TTG
taggccaaaggtcccagcct

SEQ ID NO: 259167 - DNA, 20 bp, Artificial Sequence
  Description of Artificial Sequence: Synthetic oligonucleotide
  Target: LAMA2; (-) strand; PAM type: YTN; PAM sequence: CTG
attgtaggccaaaggtccca

SEQ ID NO: 259168 - DNA, 20 bp, Artificial Sequence
  Description of Artificial Sequence: Synthetic oligonucleotide
  Target: LAMA2; (-) strand; PAM type: YTN; PAM sequence: TTG
ctgattgtaggccaaaggtc

SEQ ID NO: 259169 - DNA, 20 bp, Artificial Sequence
  Description of Artificial Sequence: Synthetic oligonucleotide
  Target: LAMA2; (-) strand; PAM type: YTN; PAM sequence: CTT
gctgattgtaggccaaaggt

SEQ ID NO: 259170 - DNA, 20 bp, Artificial Sequence
  Description of Artificial Sequence: Synthetic oligonucleotide
  Target: LAMA2; (-) strand; PAM type: YTN; PAM sequence: TTG
cagggaacacagccccttgc

SEQ ID NO: 259171 - DNA, 20 bp, Artificial Sequence
  Description of Artificial Sequence: Synthetic oligonucleotide
  Target: LAMA2; (-) strand; PAM type: YTN; PAM sequence: TTG
cagttgcagggaacacagcc

SEQ ID NO: 259172 - DNA, 20 bp, Artificial Sequence
  Description of Artificial Sequence: Synthetic oligonucleotide
  Target: LAMA2; (-) strand; PAM type: YTN; PAM sequence: TTA
gacccaaaagaattgcagtt

SEQ ID NO: 259173 - DNA, 20 bp, Artificial Sequence
  Description of Artificial Sequence: Synthetic oligonucleotide
  Target: LAMA2; (-) strand; PAM type: YTN; PAM sequence: CTT
agacccaaaagaattgcagt

SEQ ID NO: 259174 - DNA, 20 bp, Artificial Sequence
  Description of Artificial Sequence: Synthetic oligonucleotide
  Target: LAMA2; (-) strand; PAM type: YTN; PAM sequence: TTC
acagtcgaatgacttagacc

SEQ ID NO: 259175 - DNA, 20 bp, Artificial Sequence
  Description of Artificial Sequence: Synthetic oligonucleotide
  Target: LAMA2; (-) strand; PAM type: YTN; PAM sequence: CTT
cacagtcgaatgacttagac

SEQ ID NO: 259176 - DNA, 20 bp, Artificial Sequence
  Description of Artificial Sequence: Synthetic oligonucleotide
  Target: LAMA2; (-) strand; PAM type: YTN; PAM sequence: CTC
ttcacagtcgaatgacttag

SEQ ID NO: 259177 - DNA, 20 bp, Artificial Sequence
  Description of Artificial Sequence: Synthetic oligonucleotide
  Target: LAMA2; (-) strand; PAM type: YTN; PAM sequence: CTC
tcttcacagtcgaatgactt

SEQ ID NO: 259178 - DNA, 20 bp, Artificial Sequence
  Description of Artificial Sequence: Synthetic oligonucleotide
  Target: LAMA2; (-) strand; PAM type: YTN; PAM sequence: TTG
tccactctcttcacagtcga

SEQ ID NO: 259179 - DNA, 20 bp, Artificial Sequence
  Description of Artificial Sequence: Synthetic oligonucleotide
  Target: LAMA2; (-) strand; PAM type: YTN; PAM sequence: TTG
gcaccaacattgtccactct

SEQ ID NO: 259180 - DNA, 20 bp, Artificial Sequence
  Description of Artificial Sequence: Synthetic oligonucleotide
  Target: LAMA2; (-) strand; PAM type: YTN; PAM sequence: CTC
caggttggcaccaacattgt

SEQ ID NO: 259181 - DNA, 20 bp, Artificial Sequence
  Description of Artificial Sequence: Synthetic oligonucleotide
  Target: LAMA2; (-) strand; PAM type: YTN; PAM sequence: CTG
tgactccaggttggcaccaa

SEQ ID NO: 259182 - DNA, 20 bp, Artificial Sequence
  Description of Artificial Sequence: Synthetic oligonucleotide
  Target: LAMA2; (-) strand; PAM type: YTN; PAM sequence: TTC
cctgtgactccaggttggca

SEQ ID NO: 259183 - DNA, 20 bp, Artificial Sequence
  Description of Artificial Sequence: Synthetic oligonucleotide
  Target: LAMA2; (-) strand; PAM type: YTN; PAM sequence: CTT
ccctgtgactccaggttggc

SEQ ID NO: 259184 - DNA, 20 bp, Artificial Sequence
  Description of Artificial Sequence: Synthetic oligonucleotide
  Target: LAMA2; (-) strand; PAM type: YTN; PAM sequence: TTC
ttccctgtgactccaggttg

SEQ ID NO: 259185 - DNA, 20 bp, Artificial Sequence
  Description of Artificial Sequence: Synthetic oligonucleotide
  Target: LAMA2; (-) strand; PAM type: YTN; PAM sequence: TTT
cttccctgtgactccaggtt

SEQ ID NO: 259186 - DNA, 20 bp, Artificial Sequence
  Description of Artificial Sequence: Synthetic oligonucleotide
  Target: LAMA2; (-) strand; PAM type: YTN; PAM sequence: TTG
aaatagccgtgggcacagcg

SEQ ID NO: 259187 - DNA, 20 bp, Artificial Sequence
  Description of Artificial Sequence: Synthetic oligonucleotide
  Target: LAMA2; (-) strand; PAM type: YTN; PAM sequence: TTG
gaagttgaaatagccgtggg

SEQ ID NO: 259188 - DNA, 20 bp, Artificial Sequence
  Description of Artificial Sequence: Synthetic oligonucleotide
  Target: LAMA2; (-) strand; PAM type: YTN; PAM sequence: CTT
ggaagttgaaatagccgtgg

SEQ ID NO: 259189 - DNA, 20 bp, Artificial Sequence
  Description of Artificial Sequence: Synthetic oligonucleotide
  Target: LAMA2; (-) strand; PAM type: YTN; PAM sequence: TTC
ttggaagttgaaatagccgt

SEQ ID NO: 259190 - DNA, 20 bp, Artificial Sequence
  Description of Artificial Sequence: Synthetic oligonucleotide
  Target: LAMA2; (-) strand; PAM type: YTN; PAM sequence: CTT
cttggaagttgaaatagccg

SEQ ID NO: 259191 - DNA, 20 bp, Artificial Sequence
  Description of Artificial Sequence: Synthetic oligonucleotide
  Target: LAMA2; (-) strand; PAM type: YTN; PAM sequence: CTC
cttcttggaagttgaaatag

SEQ ID NO: 259192 - DNA, 20 bp, Artificial Sequence
  Description of Artificial Sequence: Synthetic oligonucleotide
  Target: LAMA2; (-) strand; PAM type: YTN; PAM sequence: CTG
tgcagcctccttcttggaag

SEQ ID NO: 259193 - DNA, 20 bp, Artificial Sequence
  Description of Artificial Sequence: Synthetic oligonucleotide
  Target: LAMA2; (-) strand; PAM type: YTN; PAM sequence: TTA
cagacctgtgcagcctcctt

SEQ ID NO: 259194 - DNA, 20 bp, Artificial Sequence
  Description of Artificial Sequence: Synthetic oligonucleotide
  Target: LAMA2; (-) strand; PAM type: YTN; PAM sequence: TTT
acagacctgtgcagcctcct

SEQ ID NO: 259195 - DNA, 20 bp, Artificial Sequence
  Description of Artificial Sequence: Synthetic oligonucleotide
  Target: LAMA2; (-) strand; PAM type: YTN; PAM sequence: TTA
agtcatatttacagacctgt

SEQ ID NO: 259196 - DNA, 20 bp, Artificial Sequence
  Description of Artificial Sequence: Synthetic oligonucleotide
  Target: LAMA2; (-) strand; PAM type: YTN; PAM sequence: CTT
aagtcatatttacagacctg

SEQ ID NO: 259197 - DNA, 20 bp, Artificial Sequence
  Description of Artificial Sequence: Synthetic oligonucleotide
  Target: LAMA2; (-) strand; PAM type: YTN; PAM sequence: CTA
tcagagtgaatatgtaggac

SEQ ID NO: 259198 - DNA, 20 bp, Artificial Sequence
  Description of Artificial Sequence: Synthetic oligonucleotide
  Target: LAMA2; (-) strand; PAM type: YTN; PAM sequence: CTA
aaactatcagagtgaatatg

SEQ ID NO: 259199 - DNA, 20 bp, Artificial Sequence
  Description of Artificial Sequence: Synthetic oligonucleotide
  Target: LAMA2; (-) strand; PAM type: YTN; PAM sequence: TTA
cagaagtcagaccctaaaac

SEQ ID NO: 259200 - DNA, 20 bp, Artificial Sequence
  Description of Artificial Sequence: Synthetic oligonucleotide
  Target: LAMA2; (-) strand; PAM type: YTN; PAM sequence: CTG
ttacagaagtcagaccctaa

SEQ ID NO: 259201 - DNA, 20 bp, Artificial Sequence
  Description of Artificial Sequence: Synthetic oligonucleotide
  Target: LAMA2; (-) strand; PAM type: YTN; PAM sequence: TTA
aaagaacaaactgttacaga

SEQ ID NO: 259202 - DNA, 20 bp, Artificial Sequence
  Description of Artificial Sequence: Synthetic oligonucleotide
  Target: LAMA2; (-) strand; PAM type: YTN; PAM sequence: TTT
aaaagaacaaactgttacag

SEQ ID NO: 259203 - DNA, 20 bp, Artificial Sequence
  Description of Artificial Sequence: Synthetic oligonucleotide
  Target: LAMA2; (-) strand; PAM type: YTN; PAM sequence: CTT
taaaagaacaaactgttaca

SEQ ID NO: 259204 - DNA, 20 bp, Artificial Sequence
  Description of Artificial Sequence: Synthetic oligonucleotide
  Target: LAMA2; (-) strand; PAM type: YTN; PAM sequence: TTC
ctttaaaagaacaaactgtt

SEQ ID NO: 259205 - DNA, 20 bp, Artificial Sequence
  Description of Artificial Sequence: Synthetic oligonucleotide
  Target: LAMA2; (-) strand; PAM type: YTN; PAM sequence: CTT
cctttaaaagaacaaactgt

SEQ ID NO: 259206 - DNA, 20 bp, Artificial Sequence
  Description of Artificial Sequence: Synthetic oligonucleotide
  Target: LAMA2; (-) strand; PAM type: YTN; PAM sequence: CTG
tgcttcctttaaaagaacaa

SEQ ID NO: 259207 - DNA, 20 bp, Artificial Sequence
  Description of Artificial Sequence: Synthetic oligonucleotide
  Target: LAMA2; (-) strand; PAM type: YTN; PAM sequence: TTG
tatcaatctgtgcttccttt

SEQ ID NO: 259208 - DNA, 20 bp, Artificial Sequence
  Description of Artificial Sequence: Synthetic oligonucleotide
  Target: LAMA2; (-) strand; PAM type: YTN; PAM sequence: TTA
aatacgttgtatcaatctgt

SEQ ID NO: 259209 - DNA, 20 bp, Artificial Sequence
  Description of Artificial Sequence: Synthetic oligonucleotide
  Target: LAMA2; (-) strand; PAM type: YTN; PAM sequence: TTA
tgttaaatacgttgtatcaa

SEQ ID NO: 259210 - DNA, 20 bp, Artificial Sequence
  Description of Artificial Sequence: Synthetic oligonucleotide
  Target: LAMA2; (-) strand; PAM type: YTN; PAM sequence: CTC
attatgttaaatacgttgta

SEQ ID NO: 259211 - DNA, 20 bp, Artificial Sequence
  Description of Artificial Sequence: Synthetic oligonucleotide
  Target: LAMA2; (-) strand; PAM type: YTN; PAM sequence: TTA
ctcattatgttaaatacgtt

SEQ ID NO: 259212 - DNA, 20 bp, Artificial Sequence
  Description of Artificial Sequence: Synthetic oligonucleotide
  Target: LAMA2; (-) strand; PAM type: YTN; PAM sequence: TTA
agtaacgtaaaaataagtag

SEQ ID NO: 259213 - DNA, 20 bp, Artificial Sequence
  Description of Artificial Sequence: Synthetic oligonucleotide
  Target: LAMA2; (-) strand; PAM type: YTN; PAM sequence: TTT
aagtaacgtaaaaataagta

SEQ ID NO: 259214 - DNA, 20 bp, Artificial Sequence
  Description of Artificial Sequence: Synthetic oligonucleotide
  Target: LAMA2; (-) strand; PAM type: YTN; PAM sequence: TTT
taagtaacgtaaaaataagt

SEQ ID NO: 259215 - DNA, 20 bp, Artificial Sequence
  Description of Artificial Sequence: Synthetic oligonucleotide
  Target: LAMA2; (-) strand; PAM type: YTN; PAM sequence: TTT
ttaagtaacgtaaaaataag

SEQ ID NO: 259216 - DNA, 20 bp, Artificial Sequence
  Description of Artificial Sequence: Synthetic oligonucleotide
  Target: LAMA2; (-) strand; PAM type: YTN; PAM sequence: TTT
tttaagtaacgtaaaaataa

SEQ ID NO: 259217 - DNA, 20 bp, Artificial Sequence
  Description of Artificial Sequence: Synthetic oligonucleotide
  Target: LAMA2; (-) strand; PAM type: YTN; PAM sequence: TTC
attttttaagtaacgtaaaa

SEQ ID NO: 259218 - DNA, 20 bp, Artificial Sequence
  Description of Artificial Sequence: Synthetic oligonucleotide
  Target: LAMA2; (-) strand; PAM type: YTN; PAM sequence: TTT
cattttttaagtaacgtaaa

SEQ ID NO: 259219 - DNA, 20 bp, Artificial Sequence
  Description of Artificial Sequence: Synthetic oligonucleotide
  Target: LAMA2; (-) strand; PAM type: YTN; PAM sequence: CTG
acatgtatttcattttttaa

SEQ ID NO: 259220 - DNA, 20 bp, Artificial Sequence
  Description of Artificial Sequence: Synthetic oligonucleotide
  Target: LAMA2; (-) strand; PAM type: YTN; PAM sequence: TTC
aaactgacatgtatttcatt

SEQ ID NO: 259221 - DNA, 20 bp, Artificial Sequence
  Description of Artificial Sequence: Synthetic oligonucleotide
  Target: LAMA2; (-) strand; PAM type: YTN; PAM sequence: TTT
caaactgacatgtatttcat

SEQ ID NO: 259222 - DNA, 20 bp, Artificial Sequence
  Description of Artificial Sequence: Synthetic oligonucleotide
  Target: LAMA2; (-) strand; PAM type: YTN; PAM sequence: TTA
aggcagtgtttcaaactgac

SEQ ID NO: 259223 - DNA, 20 bp, Artificial Sequence
  Description of Artificial Sequence: Synthetic oligonucleotide
  Target: LAMA2; (-) strand; PAM type: YTN; PAM sequence: TTA
ttaaggcagtgtttcaaact

SEQ ID NO: 259224 - DNA, 20 bp, Artificial Sequence
  Description of Artificial Sequence: Synthetic oligonucleotide
  Target: LAMA2; (-) strand; PAM type: YTN; PAM sequence: TTG
cacacagttattaaggcagt

SEQ ID NO: 259225 - DNA, 20 bp, Artificial Sequence
  Description of Artificial Sequence: Synthetic oligonucleotide
  Target: LAMA2; (-) strand; PAM type: YTN; PAM sequence: CTT
gcacacagttattaaggcag

SEQ ID NO: 259226 - DNA, 20 bp, Artificial Sequence
  Description of Artificial Sequence: Synthetic oligonucleotide
  Target: LAMA2; (-) strand; PAM type: YTN; PAM sequence: CTG
agtacttgcacacagttatt

SEQ ID NO: 259227 - DNA, 20 bp, Artificial Sequence
  Description of Artificial Sequence: Synthetic oligonucleotide
  Target: LAMA2; (-) strand; PAM type: YTN; PAM sequence: TTA
ctgagtacttgcacacagtt

SEQ ID NO: 259228 - DNA, 20 bp, Artificial Sequence
  Description of Artificial Sequence: Synthetic oligonucleotide
  Target: LAMA2; (-) strand; PAM type: YTN; PAM sequence: TTT
actgagtacttgcacacagt

SEQ ID NO: 259229 - DNA, 20 bp, Artificial Sequence
  Description of Artificial Sequence: Synthetic oligonucleotide
  Target: LAMA2; (-) strand; PAM type: YTN; PAM sequence: TTT
tactgagtacttgcacacag

SEQ ID NO: 259230 - DNA, 20 bp, Artificial Sequence
  Description of Artificial Sequence: Synthetic oligonucleotide
  Target: LAMA2; (-) strand; PAM type: YTN; PAM sequence: TTT
ttactgagtacttgcacaca

SEQ ID NO: 259231 - DNA, 20 bp, Artificial Sequence
  Description of Artificial Sequence: Synthetic oligonucleotide
  Target: LAMA2; (-) strand; PAM type: YTN; PAM sequence: CTG
atttttactgagtacttgca

SEQ ID NO: 259232 - DNA, 20 bp, Artificial Sequence
  Description of Artificial Sequence: Synthetic oligonucleotide
  Target: LAMA2; (-) strand; PAM type: YTN; PAM sequence: CTG
ctgatttttactgagtactt

SEQ ID NO: 259233 - DNA, 20 bp, Artificial Sequence
  Description of Artificial Sequence: Synthetic oligonucleotide
  Target: LAMA2; (-) strand; PAM type: YTN; PAM sequence: CTG
aatcaaagtcacagacaggg

SEQ ID NO: 259234 - DNA, 20 bp, Artificial Sequence
  Description of Artificial Sequence: Synthetic oligonucleotide
  Target: LAMA2; (-) strand; PAM type: YTN; PAM sequence: CTG
gctgaatcaaagtcacagac

SEQ ID NO: 259235 - DNA, 20 bp, Artificial Sequence
  Description of Artificial Sequence: Synthetic oligonucleotide
  Target: LAMA2; (-) strand; PAM type: YTN; PAM sequence: TTG
agtgactggctgaatcaaag

SEQ ID NO: 259236 - DNA, 20 bp, Artificial Sequence
  Description of Artificial Sequence: Synthetic oligonucleotide
  Target: LAMA2; (-) strand; PAM type: YTN; PAM sequence: TTT
gagtgactggctgaatcaaa

SEQ ID NO: 259237 - DNA, 20 bp, Artificial Sequence
  Description of Artificial Sequence: Synthetic oligonucleotide
  Target: LAMA2; (-) strand; PAM type: YTN; PAM sequence: TTC
aagccgtagcagtgtttgag

SEQ ID NO: 259238 - DNA, 20 bp, Artificial Sequence
  Description of Artificial Sequence: Synthetic oligonucleotide
  Target: LAMA2; (-) strand; PAM type: YTN; PAM sequence: TTT
caagccgtagcagtgtttga

SEQ ID NO: 259239 - DNA, 20 bp, Artificial Sequence
  Description of Artificial Sequence: Synthetic oligonucleotide
  Target: LAMA2; (-) strand; PAM type: YTN; PAM sequence: CTT
tcaagccgtagcagtgtttg

SEQ ID NO: 259240 - DNA, 20 bp, Artificial Sequence
  Description of Artificial Sequence: Synthetic oligonucleotide
  Target: LAMA2; (-) strand; PAM type: YTN; PAM sequence: TTA
actttcaagccgtagcagtg

SEQ ID NO: 259241 - DNA, 20 bp, Artificial Sequence
  Description of Artificial Sequence: Synthetic oligonucleotide
  Target: LAMA2; (-) strand; PAM type: YTN; PAM sequence: TTT
aactttcaagccgtagcagt

SEQ ID NO: 259242 - DNA, 20 bp, Artificial Sequence
  Description of Artificial Sequence: Synthetic oligonucleotide
  Target: LAMA2; (-) strand; PAM type: YTN; PAM sequence: CTG
gtaccagaaaaatcgaacat

SEQ ID NO: 259243 - DNA, 20 bp, Artificial Sequence
  Description of Artificial Sequence: Synthetic oligonucleotide
  Target: LAMA2; (-) strand; PAM type: YTN; PAM sequence: CTA
agataagactggtaccagaa

SEQ ID NO: 259244 - DNA, 20 bp, Artificial Sequence
  Description of Artificial Sequence: Synthetic oligonucleotide
  Target: LAMA2; (-) strand; PAM type: YTN; PAM sequence: TTA
aactaagataagactggtac

SEQ ID NO: 259245 - DNA, 20 bp, Artificial Sequence
  Description of Artificial Sequence: Synthetic oligonucleotide
  Target: LAMA2; (-) strand; PAM type: YTN; PAM sequence: CTT
aaactaagataagactggta

SEQ ID NO: 259246 - DNA, 20 bp, Artificial Sequence
  Description of Artificial Sequence: Synthetic oligonucleotide
  Target: LAMA2; (-) strand; PAM type: YTN; PAM sequence: TTG
agcttaaactaagataagac

SEQ ID NO: 259247 - DNA, 20 bp, Artificial Sequence
  Description of Artificial Sequence: Synthetic oligonucleotide
  Target: LAMA2; (-) strand; PAM type: YTN; PAM sequence: TTT
gagcttaaactaagataaga

SEQ ID NO: 259248 - DNA, 20 bp, Artificial Sequence
  Description of Artificial Sequence: Synthetic oligonucleotide
  Target: LAMA2; (-) strand; PAM type: YTN; PAM sequence: TTG
gcgtggggtttgagcttaaa

SEQ ID NO: 259249 - DNA, 20 bp, Artificial Sequence
  Description of Artificial Sequence: Synthetic oligonucleotide
  Target: LAMA2; (-) strand; PAM type: YTN; PAM sequence: TTG
aaatgcattggcgtggggtt

SEQ ID NO: 259250 - DNA, 20 bp, Artificial Sequence
  Description of Artificial Sequence: Synthetic oligonucleotide
  Target: LAMA2; (-) strand; PAM type: YTN; PAM sequence: TTG
caataggaaaaagggaaagt

SEQ ID NO: 259251 - DNA, 20 bp, Artificial Sequence
  Description of Artificial Sequence: Synthetic oligonucleotide
  Target: LAMA2; (-) strand; PAM type: YTN; PAM sequence: TTT
gcaataggaaaaagggaaag

SEQ ID NO: 259252 - DNA, 20 bp, Artificial Sequence
  Description of Artificial Sequence: Synthetic oligonucleotide
  Target: LAMA2; (-) strand; PAM type: YTN; PAM sequence: TTT
tgcaataggaaaaagggaaa

SEQ ID NO: 259253 - DNA, 20 bp, Artificial Sequence
  Description of Artificial Sequence: Synthetic oligonucleotide
  Target: LAMA2; (-) strand; PAM type: YTN; PAM sequence: TTG
atccggataccaattttgca

SEQ ID NO: 259254 - DNA, 20 bp, Artificial Sequence
  Description of Artificial Sequence: Synthetic oligonucleotide
  Target: LAMA2; (-) strand; PAM type: YTN; PAM sequence: CTT
gatccggataccaattttgc

SEQ ID NO: 259255 - DNA, 20 bp, Artificial Sequence
  Description of Artificial Sequence: Synthetic oligonucleotide
  Target: LAMA2; (-) strand; PAM type: YTN; PAM sequence: TTC
ttgatccggataccaatttt

SEQ ID NO: 259256 - DNA, 20 bp, Artificial Sequence
  Description of Artificial Sequence: Synthetic oligonucleotide
  Target: LAMA2; (-) strand; PAM type: YTN; PAM sequence: TTT
cttgatccggataccaattt

SEQ ID NO: 259257 - DNA, 20 bp, Artificial Sequence
  Description of Artificial Sequence: Synthetic oligonucleotide
  Target: LAMA2; (-) strand; PAM type: YTN; PAM sequence: TTT
tcttgatccggataccaatt

SEQ ID NO: 259258 - DNA, 20 bp, Artificial Sequence
  Description of Artificial Sequence: Synthetic oligonucleotide
  Target: LAMA2; (-) strand; PAM type: YTN; PAM sequence: CTT
ttcttgatccggataccaat

SEQ ID NO: 259259 - DNA, 20 bp, Artificial Sequence
  Description of Artificial Sequence: Synthetic oligonucleotide
  Target: LAMA2; (-) strand; PAM type: YTN; PAM sequence: TTG
acttttcttgatccggatac

SEQ ID NO: 259260 - DNA, 20 bp, Artificial Sequence
  Description of Artificial Sequence: Synthetic oligonucleotide
  Target: LAMA2; (-) strand; PAM type: YTN; PAM sequence: CTT
gacttttcttgatccggata

SEQ ID NO: 259261 - DNA, 20 bp, Artificial Sequence
  Description of Artificial Sequence: Synthetic oligonucleotide
  Target: LAMA2; (-) strand; PAM type: YTN; PAM sequence: TTG
gggtaccaggaaaaaaaaaa

SEQ ID NO: 259262 - DNA, 20 bp, Artificial Sequence
  Description of Artificial Sequence: Synthetic oligonucleotide
  Target: LAMA2; (-) strand; PAM type: YTN; PAM sequence: TTT
ggggtaccaggaaaaaaaaa

SEQ ID NO: 259263 - DNA, 20 bp, Artificial Sequence
  Description of Artificial Sequence: Synthetic oligonucleotide
  Target: LAMA2; (-) strand; PAM type: YTN; PAM sequence: TTT
tggggtaccaggaaaaaaaa

SEQ ID NO: 259264 - DNA, 20 bp, Artificial Sequence
  Description of Artificial Sequence: Synthetic oligonucleotide
  Target: LAMA2; (-) strand; PAM type: YTN; PAM sequence: TTT
ttggggtaccaggaaaaaaa

SEQ ID NO: 259265 - DNA, 20 bp, Artificial Sequence
  Description of Artificial Sequence: Synthetic oligonucleotide
  Target: LAMA2; (-) strand; PAM type: YTN; PAM sequence: TTC
aaggcagccaaaagtagatg

SEQ ID NO: 259266 - DNA, 20 bp, Artificial Sequence
  Description of Artificial Sequence: Synthetic oligonucleotide
  Target: LAMA2; (-) strand; PAM type: YTN; PAM sequence: TTT
caaggcagccaaaagtagat

SEQ ID NO: 259267 - DNA, 20 bp, Artificial Sequence
  Description of Artificial Sequence: Synthetic oligonucleotide
  Target: LAMA2; (-) strand; PAM type: YTN; PAM sequence: TTT
tcaaggcagccaaaagtaga

SEQ ID NO: 259268 - DNA, 20 bp, Artificial Sequence
  Description of Artificial Sequence: Synthetic oligonucleotide
  Target: LAMA2; (-) strand; PAM type: YTN; PAM sequence: TTA
gaacatcatagttttcaagg

SEQ ID NO: 259269 - DNA, 20 bp, Artificial Sequence
  Description of Artificial Sequence: Synthetic oligonucleotide
  Target: LAMA2; (-) strand; PAM type: YTN; PAM sequence: CTT
agaacatcatagttttcaag

SEQ ID NO: 259270 - DNA, 20 bp, Artificial Sequence
  Description of Artificial Sequence: Synthetic oligonucleotide
  Target: LAMA2; (-) strand; PAM type: YTN; PAM sequence: CTC
ttagaacatcatagttttca

SEQ ID NO: 259271 - DNA, 20 bp, Artificial Sequence
  Description of Artificial Sequence: Synthetic oligonucleotide
  Target: LAMA2; (-) strand; PAM type: YTN; PAM sequence: CTC
tcttagaacatcatagtttt

SEQ ID NO: 259272 - DNA, 20 bp, Artificial Sequence
  Description of Artificial Sequence: Synthetic oligonucleotide
  Target: LAMA2; (-) strand; PAM type: YTN; PAM sequence: TTC
tctcttagaacatcatagtt

SEQ ID NO: 259273 - DNA, 20 bp, Artificial Sequence
  Description of Artificial Sequence: Synthetic oligonucleotide
  Target: LAMA2; (-) strand; PAM type: YTN; PAM sequence: TTT
ctctcttagaacatcatagt

SEQ ID NO: 259274 - DNA, 20 bp, Artificial Sequence
  Description of Artificial Sequence: Synthetic oligonucleotide
  Target: LAMA2; (-) strand; PAM type: YTN; PAM sequence: CTA
tttctctcttagaacatcat

SEQ ID NO: 259275 - DNA, 20 bp, Artificial Sequence
  Description of Artificial Sequence: Synthetic oligonucleotide
  Target: LAMA2; (-) strand; PAM type: YTN; PAM sequence: CTA
gagccaacctatttctctct

SEQ ID NO: 259276 - DNA, 20 bp, Artificial Sequence
  Description of Artificial Sequence: Synthetic oligonucleotide
  Target: LAMA2; (-) strand; PAM type: YTN; PAM sequence: CTA
aatatctagagccaacctat

SEQ ID NO: 259277 - DNA, 20 bp, Artificial Sequence
  Description of Artificial Sequence: Synthetic oligonucleotide
  Target: LAMA2; (-) strand; PAM type: YTN; PAM sequence: TTG
atgaactaaatatctagagc

SEQ ID NO: 259278 - DNA, 20 bp, Artificial Sequence
  Description of Artificial Sequence: Synthetic oligonucleotide
  Target: LAMA2; (-) strand; PAM type: YTN; PAM sequence: TTT
gatgaactaaatatctagag

SEQ ID NO: 259279 - DNA, 20 bp, Artificial Sequence
  Description of Artificial Sequence: Synthetic oligonucleotide
  Target: LAMA2; (-) strand; PAM type: YTN; PAM sequence: TTT
tgatgaactaaatatctaga

SEQ ID NO: 259280 - DNA, 20 bp, Artificial Sequence
  Description of Artificial Sequence: Synthetic oligonucleotide
  Target: LAMA2; (-) strand; PAM type: YTN; PAM sequence: TTT
ttgatgaactaaatatctag

SEQ ID NO: 259281 - DNA, 20 bp, Artificial Sequence
  Description of Artificial Sequence: Synthetic oligonucleotide
  Target: LAMA2; (-) strand; PAM type: YTN; PAM sequence: TTT
tttgatgaactaaatatcta

SEQ ID NO: 259282 - DNA, 20 bp, Artificial Sequence
  Description of Artificial Sequence: Synthetic oligonucleotide
  Target: LAMA2; (-) strand; PAM type: YTN; PAM sequence: CTG
cattttttgatgaactaaat

SEQ ID NO: 259283 - DNA, 20 bp, Artificial Sequence
  Description of Artificial Sequence: Synthetic oligonucleotide
  Target: LAMA2; (-) strand; PAM type: YTN; PAM sequence: CTG
cctgcattttttgatgaact

SEQ ID NO: 259284 - DNA, 20 bp, Artificial Sequence
  Description of Artificial Sequence: Synthetic oligonucleotide
  Target: LAMA2; (-) strand; PAM type: YTN; PAM sequence: CTC
tgcctgcattttttgatgaa

SEQ ID NO: 259285 - DNA, 20 bp, Artificial Sequence
  Description of Artificial Sequence: Synthetic oligonucleotide
  Target: LAMA2; (-) strand; PAM type: YTN; PAM sequence: TTA
gaaacctctgcctgcatttt

SEQ ID NO: 259286 - DNA, 20 bp, Artificial Sequence
  Description of Artificial Sequence: Synthetic oligonucleotide
  Target: LAMA2; (-) strand; PAM type: YTN; PAM sequence: TTG
agggaatcatggttagaaac

SEQ ID NO: 259287 - DNA, 20 bp, Artificial Sequence
  Description of Artificial Sequence: Synthetic oligonucleotide
  Target: LAMA2; (-) strand; PAM type: YTN; PAM sequence: CTT
gagggaatcatggttagaaa

SEQ ID NO: 259288 - DNA, 20 bp, Artificial Sequence
  Description of Artificial Sequence: Synthetic oligonucleotide
  Target: LAMA2; (-) strand; PAM type: YTN; PAM sequence: CTG
cttgagggaatcatggttag

SEQ ID NO: 259289 - DNA, 20 bp, Artificial Sequence
  Description of Artificial Sequence: Synthetic oligonucleotide
  Target: LAMA2; (-) strand; PAM type: YTN; PAM sequence: CTG
gatgtataagaatactgctt

SEQ ID NO: 259290 - DNA, 20 bp, Artificial Sequence
  Description of Artificial Sequence: Synthetic oligonucleotide
  Target: LAMA2; (-) strand; PAM type: YTN; PAM sequence: CTG
tggctggatgtataagaata

SEQ ID NO: 259291 - DNA, 20 bp, Artificial Sequence
  Description of Artificial Sequence: Synthetic oligonucleotide
  Target: LAMA2; (-) strand; PAM type: YTN; PAM sequence: TTG
ggtgaaggctgtggctggat

SEQ ID NO: 259292 - DNA, 20 bp, Artificial Sequence
  Description of Artificial Sequence: Synthetic oligonucleotide
  Target: LAMA2; (-) strand; PAM type: YTN; PAM sequence: TTT
gggtgaaggctgtggctgga

SEQ ID NO: 259293 - DNA, 20 bp, Artificial Sequence
  Description of Artificial Sequence: Synthetic oligonucleotide
  Target: LAMA2; (-) strand; PAM type: YTN; PAM sequence: CTC
atgatttgggtgaaggctgt

SEQ ID NO: 259294 - DNA, 20 bp, Artificial Sequence
  Description of Artificial Sequence: Synthetic oligonucleotide
  Target: LAMA2; (-) strand; PAM type: YTN; PAM sequence: TTA
gctcatgatttgggtgaagg

SEQ ID NO: 259295 - DNA, 20 bp, Artificial Sequence
  Description of Artificial Sequence: Synthetic oligonucleotide
  Target: LAMA2; (-) strand; PAM type: YTN; PAM sequence: CTT
agctcatgatttgggtgaag

SEQ ID NO: 259296 - DNA, 20 bp, Artificial Sequence
  Description of Artificial Sequence: Synthetic oligonucleotide
  Target: LAMA2; (-) strand; PAM type: YTN; PAM sequence: TTC
ttagctcatgatttgggtga

SEQ ID NO: 259297 - DNA, 20 bp, Artificial Sequence
  Description of Artificial Sequence: Synthetic oligonucleotide
  Target: LAMA2; (-) strand; PAM type: YTN; PAM sequence: TTT
cttagctcatgatttgggtg

SEQ ID NO: 259298 - DNA, 20 bp, Artificial Sequence
  Description of Artificial Sequence: Synthetic oligonucleotide
  Target: LAMA2; (-) strand; PAM type: YTN; PAM sequence: TTT
tcttagctcatgatttgggt

SEQ ID NO: 259299 - DNA, 20 bp, Artificial Sequence
  Description of Artificial Sequence: Synthetic oligonucleotide
  Target: LAMA2; (-) strand; PAM type: YTN; PAM sequence: CTA
agtgatattttcttagctca

SEQ ID NO: 259300 - DNA, 20 bp, Artificial Sequence
  Description of Artificial Sequence: Synthetic oligonucleotide
  Target: LAMA2; (-) strand; PAM type: YTN; PAM sequence: CTG
cagaatgctaagtgatattt

SEQ ID NO: 259301 - DNA, 20 bp, Artificial Sequence
  Description of Artificial Sequence: Synthetic oligonucleotide
  Target: LAMA2; (-) strand; PAM type: YTN; PAM sequence: TTC
atctgcagaatgctaagtga

SEQ ID NO: 259302 - DNA, 20 bp, Artificial Sequence
  Description of Artificial Sequence: Synthetic oligonucleotide
  Target: LAMA2; (-) strand; PAM type: YTN; PAM sequence: TTT
catctgcagaatgctaagtg

SEQ ID NO: 259303 - DNA, 20 bp, Artificial Sequence
  Description of Artificial Sequence: Synthetic oligonucleotide
  Target: LAMA2; (-) strand; PAM type: YTN; PAM sequence: CTT
tcatctgcagaatgctaagt

SEQ ID NO: 259304 - DNA, 20 bp, Artificial Sequence
  Description of Artificial Sequence: Synthetic oligonucleotide
  Target: LAMA2; (-) strand; PAM type: YTN; PAM sequence: TTA
ctttcatctgcagaatgcta

SEQ ID NO: 259305 - DNA, 20 bp, Artificial Sequence
  Description of Artificial Sequence: Synthetic oligonucleotide
  Target: LAMA2; (-) strand; PAM type: YTN; PAM sequence: TTT
actttcatctgcagaatgct

SEQ ID NO: 259306 - DNA, 20 bp, Artificial Sequence
  Description of Artificial Sequence: Synthetic oligonucleotide
  Target: LAMA2; (-) strand; PAM type: YTN; PAM sequence: CTT
tactttcatctgcagaatgc

SEQ ID NO: 259307 - DNA, 20 bp, Artificial Sequence
  Description of Artificial Sequence: Synthetic oligonucleotide
  Target: LAMA2; (-) strand; PAM type: YTN; PAM sequence: CTC
tttactttcatctgcagaat

SEQ ID NO: 259308 - DNA, 20 bp, Artificial Sequence
  Description of Artificial Sequence: Synthetic oligonucleotide
  Target: LAMA2; (-) strand; PAM type: YTN; PAM sequence: TTC
actctttactttcatctgca

SEQ ID NO: 259309 - DNA, 20 bp, Artificial Sequence
  Description of Artificial Sequence: Synthetic oligonucleotide
  Target: LAMA2; (-) strand; PAM type: YTN; PAM sequence: CTA
atgttcactctttactttca

SEQ ID NO: 259310 - DNA, 20 bp, Artificial Sequence
  Description of Artificial Sequence: Synthetic oligonucleotide
  Target: LAMA2; (-) strand; PAM type: YTN; PAM sequence: TTA
gcagcatataaatcaaggct

SEQ ID NO: 259311 - DNA, 20 bp, Artificial Sequence
  Description of Artificial Sequence: Synthetic oligonucleotide
  Target: LAMA2; (-) strand; PAM type: YTN; PAM sequence: TTC
gaaattagcagcatataaat

SEQ ID NO: 259312 - DNA, 20 bp, Artificial Sequence
  Description of Artificial Sequence: Synthetic oligonucleotide
  Target: LAMA2; (-) strand; PAM type: YTN; PAM sequence: TTG
gaataagggtcagttcgaaa

SEQ ID NO: 259313 - DNA, 20 bp, Artificial Sequence
  Description of Artificial Sequence: Synthetic oligonucleotide
  Target: LAMA2; (-) strand; PAM type: YTN; PAM sequence: TTG
ttggaataagggtcagttcg

SEQ ID NO: 259314 - DNA, 20 bp, Artificial Sequence
  Description of Artificial Sequence: Synthetic oligonucleotide
  Target: LAMA2; (-) strand; PAM type: YTN; PAM sequence: CTA
gtgattgttggaataagggt

SEQ ID NO: 259315 - DNA, 20 bp, Artificial Sequence
  Description of Artificial Sequence: Synthetic oligonucleotide
  Target: LAMA2; (-) strand; PAM type: YTN; PAM sequence: TTC
aaactagtgattgttggaat

SEQ ID NO: 259316 - DNA, 20 bp, Artificial Sequence
  Description of Artificial Sequence: Synthetic oligonucleotide
  Target: LAMA2; (-) strand; PAM type: YTN; PAM sequence: TTA
gtaaacaaaggtaatattca

SEQ ID NO: 259317 - DNA, 20 bp, Artificial Sequence
  Description of Artificial Sequence: Synthetic oligonucleotide
  Target: LAMA2; (-) strand; PAM type: YTN; PAM sequence: TTG
aatccatgacattagtaaac

SEQ ID NO: 259318 - DNA, 20 bp, Artificial Sequence
  Description of Artificial Sequence: Synthetic oligonucleotide
  Target: LAMA2; (-) strand; PAM type: YTN; PAM sequence: TTA
tccaggttgaatccatgaca

SEQ ID NO: 259319 - DNA, 20 bp, Artificial Sequence
  Description of Artificial Sequence: Synthetic oligonucleotide
  Target: LAMA2; (-) strand; PAM type: YTN; PAM sequence: CTG
agagtatgtgagcattatcc

SEQ ID NO: 259320 - DNA, 20 bp, Artificial Sequence
  Description of Artificial Sequence: Synthetic oligonucleotide
  Target: LAMA2; (-) strand; PAM type: YTN; PAM sequence: TTA
ccatggtgctgagagtatgt

SEQ ID NO: 259321 - DNA, 20 bp, Artificial Sequence
  Description of Artificial Sequence: Synthetic oligonucleotide
  Target: LAMA2; (-) strand; PAM type: YTN; PAM sequence: CTT
accatggtgctgagagtatg

SEQ ID NO: 259322 - DNA, 20 bp, Artificial Sequence
  Description of Artificial Sequence: Synthetic oligonucleotide
  Target: LAMA2; (-) strand; PAM type: YTN; PAM sequence: TTA
aaatcttaccatggtgctga

SEQ ID NO: 259323 - DNA, 20 bp, Artificial Sequence
  Description of Artificial Sequence: Synthetic oligonucleotide
  Target: LAMA2; (-) strand; PAM type: YTN; PAM sequence: TTT
aaaatcttaccatggtgctg

SEQ ID NO: 259324 - DNA, 20 bp, Artificial Sequence
  Description of Artificial Sequence: Synthetic oligonucleotide
  Target: LAMA2; (-) strand; PAM type: YTN; PAM sequence: TTT
taaaatcttaccatggtgct

SEQ ID NO: 259325 - DNA, 20 bp, Artificial Sequence
  Description of Artificial Sequence: Synthetic oligonucleotide
  Target: LAMA2; (-) strand; PAM type: YTN; PAM sequence: TTG
ccacaacagtgaataacaat

SEQ ID NO: 259326 - DNA, 20 bp, Artificial Sequence
  Description of Artificial Sequence: Synthetic oligonucleotide
  Target: LAMA2; (-) strand; PAM type: YTN; PAM sequence: TTT
gccacaacagtgaataacaa

SEQ ID NO: 259327 - DNA, 20 bp, Artificial Sequence
  Description of Artificial Sequence: Synthetic oligonucleotide
  Target: LAMA2; (-) strand; PAM type: YTN; PAM sequence: TTA
aatttgccacaacagtgaat

SEQ ID NO: 259328 - DNA, 20 bp, Artificial Sequence
  Description of Artificial Sequence: Synthetic oligonucleotide
  Target: LAMA2; (-) strand; PAM type: YTN; PAM sequence: CTT
aaatttgccacaacagtgaa

SEQ ID NO: 259329 - DNA, 20 bp, Artificial Sequence
  Description of Artificial Sequence: Synthetic oligonucleotide
  Target: LAMA2; (-) strand; PAM type: YTN; PAM sequence: CTA
cttaaatttgccacaacagt

SEQ ID NO: 259330 - DNA, 20 bp, Artificial Sequence
  Description of Artificial Sequence: Synthetic oligonucleotide
  Target: LAMA2; (-) strand; PAM type: YTN; PAM sequence: TTC
ctacttaaatttgccacaac

SEQ ID NO: 259331 - DNA, 20 bp, Artificial Sequence
  Description of Artificial Sequence: Synthetic oligonucleotide
  Target: LAMA2; (-) strand; PAM type: YTN; PAM sequence: CTT
cctacttaaatttgccacaa

SEQ ID NO: 259332 - DNA, 20 bp, Artificial Sequence
  Description of Artificial Sequence: Synthetic oligonucleotide
  Target: LAMA2; (-) strand; PAM type: YTN; PAM sequence: CTG
cttcctacttaaatttgcca

SEQ ID NO: 259333 - DNA, 20 bp, Artificial Sequence
  Description of Artificial Sequence: Synthetic oligonucleotide
  Target: LAMA2; (-) strand; PAM type: YTN; PAM sequence: CTA
ctgcttcctacttaaatttg

SEQ ID NO: 259334 - DNA, 20 bp, Artificial Sequence
  Description of Artificial Sequence: Synthetic oligonucleotide
  Target: LAMA2; (-) strand; PAM type: YTN; PAM sequence: TTC
ctactgcttcctacttaaat

SEQ ID NO: 259335 - DNA, 20 bp, Artificial Sequence
  Description of Artificial Sequence: Synthetic oligonucleotide
  Target: LAMA2; (-) strand; PAM type: YTN; PAM sequence: TTA
ttcctactgcttcctactta

SEQ ID NO: 259336 - DNA, 20 bp, Artificial Sequence
  Description of Artificial Sequence: Synthetic oligonucleotide
  Target: LAMA2; (-) strand; PAM type: YTN; PAM sequence: TTA
aatattattcctactgcttc

SEQ ID NO: 259337 - DNA, 20 bp, Artificial Sequence
  Description of Artificial Sequence: Synthetic oligonucleotide
  Target: LAMA2; (-) strand; PAM type: YTN; PAM sequence: TTT
aaatattattcctactgctt

SEQ ID NO: 259338 - DNA, 20 bp, Artificial Sequence
  Description of Artificial Sequence: Synthetic oligonucleotide
  Target: LAMA2; (-) strand; PAM type: YTN; PAM sequence: TTT
taaatattattcctactgct

SEQ ID NO: 259339 - DNA, 20 bp, Artificial Sequence
  Description of Artificial Sequence: Synthetic oligonucleotide
  Target: LAMA2; (-) strand; PAM type: YTN; PAM sequence: TTA
aatagttttaaatattattc

SEQ ID NO: 259340 - DNA, 20 bp, Artificial Sequence
  Description of Artificial Sequence: Synthetic oligonucleotide
  Target: LAMA2; (-) strand; PAM type: YTN; PAM sequence: TTT
aaatagttttaaatattatt

SEQ ID NO: 259341 - DNA, 20 bp, Artificial Sequence
  Description of Artificial Sequence: Synthetic oligonucleotide
  Target: LAMA2; (-) strand; PAM type: YTN; PAM sequence: CTT
taaatagttttaaatattat

SEQ ID NO: 259342 - DNA, 20 bp, Artificial Sequence
  Description of Artificial Sequence: Synthetic oligonucleotide
  Target: LAMA2; (-) strand; PAM type: YTN; PAM sequence: TTC
tttaaatagttttaaatatt

SEQ ID NO: 259343 - DNA, 20 bp, Artificial Sequence
  Description of Artificial Sequence: Synthetic oligonucleotide
  Target: LAMA2; (-) strand; PAM type: YTN; PAM sequence: TTG
gttctttaaatagttttaaa

SEQ ID NO: 259344 - DNA, 20 bp, Artificial Sequence
  Description of Artificial Sequence: Synthetic oligonucleotide
  Target: LAMA2; (-) strand; PAM type: YTN; PAM sequence: CTG
aaagatattggttctttaaa

SEQ ID NO: 259345 - DNA, 20 bp, Artificial Sequence
  Description of Artificial Sequence: Synthetic oligonucleotide
  Target: LAMA2; (-) strand; PAM type: YTN; PAM sequence: CTG
gagaatgtctgaaagatatt

SEQ ID NO: 259346 - DNA, 20 bp, Artificial Sequence
  Description of Artificial Sequence: Synthetic oligonucleotide
  Target: LAMA2; (-) strand; PAM type: YTN; PAM sequence: CTA
aagtgctggagaatgtctga

SEQ ID NO: 259347 - DNA, 20 bp, Artificial Sequence
  Description of Artificial Sequence: Synthetic oligonucleotide
  Target: LAMA2; (-) strand; PAM type: YTN; PAM sequence: TTA
tggtaaaatccacatatcta

SEQ ID NO: 259348 - DNA, 20 bp, Artificial Sequence
  Description of Artificial Sequence: Synthetic oligonucleotide
  Target: LAMA2; (-) strand; PAM type: YTN; PAM sequence: TTT
atggtaaaatccacatatct

SEQ ID NO: 259349 - DNA, 20 bp, Artificial Sequence
  Description of Artificial Sequence: Synthetic oligonucleotide
  Target: LAMA2; (-) strand; PAM type: YTN; PAM sequence: TTA
atttatggtaaaatccacat

SEQ ID NO: 259350 - DNA, 20 bp, Artificial Sequence
  Description of Artificial Sequence: Synthetic oligonucleotide
  Target: LAMA2; (-) strand; PAM type: YTN; PAM sequence: CTT
aatttatggtaaaatccaca

SEQ ID NO: 259351 - DNA, 20 bp, Artificial Sequence
  Description of Artificial Sequence: Synthetic oligonucleotide
  Target: LAMA2; (-) strand; PAM type: YTN; PAM sequence: TTA
tcatggcttaatttatggta

SEQ ID NO: 259352 - DNA, 20 bp, Artificial Sequence
  Description of Artificial Sequence: Synthetic oligonucleotide
  Target: LAMA2; (-) strand; PAM type: YTN; PAM sequence: CTT
atcatggcttaatttatggt

SEQ ID NO: 259353 - DNA, 20 bp, Artificial Sequence
  Description of Artificial Sequence: Synthetic oligonucleotide
  Target: LAMA2; (-) strand; PAM type: YTN; PAM sequence: TTA
gaataacttatcatggctta

SEQ ID NO: 259354 - DNA, 20 bp, Artificial Sequence
  Description of Artificial Sequence: Synthetic oligonucleotide
  Target: LAMA2; (-) strand; PAM type: YTN; PAM sequence: TTA
tcaattagaataacttatca

SEQ ID NO: 259355 - DNA, 20 bp, Artificial Sequence
  Description of Artificial Sequence: Synthetic oligonucleotide
  Target: LAMA2; (-) strand; PAM type: YTN; PAM sequence: CTT
atcaattagaataacttatc

SEQ ID NO: 259356 - DNA, 20 bp, Artificial Sequence
  Description of Artificial Sequence: Synthetic oligonucleotide
  Target: LAMA2; (-) strand; PAM type: YTN; PAM sequence: TTA
gaataacttatcaattagaa

SEQ ID NO: 259357 - DNA, 20 bp, Artificial Sequence
  Description of Artificial Sequence: Synthetic oligonucleotide
  Target: LAMA2; (-) strand; PAM type: YTN; PAM sequence: TTA
tcaattagaataacttatca

SEQ ID NO: 259358 - DNA, 20 bp, Artificial Sequence
  Description of Artificial Sequence: Synthetic oligonucleotide
  Target: LAMA2; (-) strand; PAM type: YTN; PAM sequence: CTT
atcaattagaataacttatc

SEQ ID NO: 259359 - DNA, 20 bp, Artificial Sequence
  Description of Artificial Sequence: Synthetic oligonucleotide
  Target: LAMA2; (-) strand; PAM type: YTN; PAM sequence: TTA
gaataacttatcaattagaa

SEQ ID NO: 259360 - DNA, 20 bp, Artificial Sequence
  Description of Artificial Sequence: Synthetic oligonucleotide
  Target: LAMA2; (-) strand; PAM type: YTN; PAM sequence: TTT
agaataacttatcaattaga

SEQ ID NO: 259361 - DNA, 20 bp, Artificial Sequence
  Description of Artificial Sequence: Synthetic oligonucleotide
  Target: LAMA2; (-) strand; PAM type: YTN; PAM sequence: TTA
tcatttagaataacttatca

SEQ ID NO: 259362 - DNA, 20 bp, Artificial Sequence
  Description of Artificial Sequence: Synthetic oligonucleotide
  Target: LAMA2; (-) strand; PAM type: YTN; PAM sequence: CTT
atcatttagaataacttatc

SEQ ID NO: 259363 - DNA, 20 bp, Artificial Sequence
  Description of Artificial Sequence: Synthetic oligonucleotide
  Target: LAMA2; (-) strand; PAM type: YTN; PAM sequence: TTA
taaacttatcatttagaata

SEQ ID NO: 259364 - DNA, 20 bp, Artificial Sequence
  Description of Artificial Sequence: Synthetic oligonucleotide
  Target: LAMA2; (-) strand; PAM type: YTN; PAM sequence: CTA
caattataaacttatcattt

SEQ ID NO: 259365 - DNA, 20 bp, Artificial Sequence
  Description of Artificial Sequence: Synthetic oligonucleotide
  Target: LAMA2; (-) strand; PAM type: YTN; PAM sequence: TTA
gaggatctacaattataaac

SEQ ID NO: 259366 - DNA, 20 bp, Artificial Sequence
  Description of Artificial Sequence: Synthetic oligonucleotide
  Target: LAMA2; (-) strand; PAM type: YTN; PAM sequence: CTT
agaggatctacaattataaa

SEQ ID NO: 259367 - DNA, 20 bp, Artificial Sequence
  Description of Artificial Sequence: Synthetic oligonucleotide
  Target: LAMA2; (-) strand; PAM type: YTN; PAM sequence: TTC
ttagaggatctacaattata

SEQ ID NO: 259368 - DNA, 20 bp, Artificial Sequence
  Description of Artificial Sequence: Synthetic oligonucleotide
  Target: LAMA2; (-) strand; PAM type: YTN; PAM sequence: TTA
gagatatacagattcttaga

SEQ ID NO: 259369 - DNA, 20 bp, Artificial Sequence
  Description of Artificial Sequence: Synthetic oligonucleotide
  Target: LAMA2; (-) strand; PAM type: YTN; PAM sequence: CTT
agagatatacagattcttag

SEQ ID NO: 259370 - DNA, 20 bp, Artificial Sequence
  Description of Artificial Sequence: Synthetic oligonucleotide
  Target: LAMA2; (-) strand; PAM type: YTN; PAM sequence: TTG
gcttagagatatacagattc

SEQ ID NO: 259371 - DNA, 20 bp, Artificial Sequence
  Description of Artificial Sequence: Synthetic oligonucleotide
  Target: LAMA2; (-) strand; PAM type: YTN; PAM sequence: TTA
tacagatattggcttagaga

SEQ ID NO: 259372 - DNA, 20 bp, Artificial Sequence
  Description of Artificial Sequence: Synthetic oligonucleotide
  Target: LAMA2; (-) strand; PAM type: YTN; PAM sequence: TTA
agttatacagatattggctt

SEQ ID NO: 259373 - DNA, 20 bp, Artificial Sequence
  Description of Artificial Sequence: Synthetic oligonucleotide
  Target: LAMA2; (-) strand; PAM type: YTN; PAM sequence: TTT
aagttatacagatattggct

SEQ ID NO: 259374 - DNA, 20 bp, Artificial Sequence
  Description of Artificial Sequence: Synthetic oligonucleotide
  Target: LAMA2; (-) strand; PAM type: YTN; PAM sequence: TTT
taagttatacagatattggc

SEQ ID NO: 259375 - DNA, 20 bp, Artificial Sequence
  Description of Artificial Sequence: Synthetic oligonucleotide
  Target: LAMA2; (-) strand; PAM type: YTN; PAM sequence: TTT
ttaagttatacagatattgg

SEQ ID NO: 259376 - DNA, 20 bp, Artificial Sequence
  Description of Artificial Sequence: Synthetic oligonucleotide
  Target: LAMA2; (-) strand; PAM type: YTN; PAM sequence: TTA
taatttttaagttatacaga

SEQ ID NO: 259377 - DNA, 20 bp, Artificial Sequence
  Description of Artificial Sequence: Synthetic oligonucleotide
  Target: LAMA2; (-) strand; PAM type: YTN; PAM sequence: TTT
ataatttttaagttatacag

SEQ ID NO: 259378 - DNA, 20 bp, Artificial Sequence
  Description of Artificial Sequence: Synthetic oligonucleotide
  Target: LAMA2; (-) strand; PAM type: YTN; PAM sequence: CTT
tataatttttaagttataca

SEQ ID NO: 259379 - DNA, 20 bp, Artificial Sequence
  Description of Artificial Sequence: Synthetic oligonucleotide
  Target: LAMA2; (-) strand; PAM type: YTN; PAM sequence: TTA
aaatacagctttataatttt

SEQ ID NO: 259380 - DNA, 20 bp, Artificial Sequence
  Description of Artificial Sequence: Synthetic oligonucleotide
  Target: LAMA2; (-) strand; PAM type: YTN; PAM sequence: TTT
aaaatacagctttataattt

SEQ ID NO: 259381 - DNA, 20 bp, Artificial Sequence
  Description of Artificial Sequence: Synthetic oligonucleotide
  Target: LAMA2; (-) strand; PAM type: YTN; PAM sequence: TTT
taaaatacagctttataatt

SEQ ID NO: 259382 - DNA, 20 bp, Artificial Sequence
  Description of Artificial Sequence: Synthetic oligonucleotide
  Target: LAMA2; (-) strand; PAM type: YTN; PAM sequence: TTA
aagaacagagtatattttaa

SEQ ID NO: 259383 - DNA, 20 bp, Artificial Sequence
  Description of Artificial Sequence: Synthetic oligonucleotide
  Target: LAMA2; (-) strand; PAM type: YTN; PAM sequence: TTT
aaagaacagagtatatttta

SEQ ID NO: 259384 - DNA, 20 bp, Artificial Sequence
  Description of Artificial Sequence: Synthetic oligonucleotide
  Target: LAMA2; (-) strand; PAM type: YTN; PAM sequence: TTG
gatttaaagaacagagtata

SEQ ID NO: 259385 - DNA, 20 bp, Artificial Sequence
  Description of Artificial Sequence: Synthetic oligonucleotide
  Target: LAMA2; (-) strand; PAM type: YTN; PAM sequence: TTT
ggatttaaagaacagagtat

SEQ ID NO: 259386 - DNA, 20 bp, Artificial Sequence
  Description of Artificial Sequence: Synthetic oligonucleotide
  Target: LAMA2; (-) strand; PAM type: YTN; PAM sequence: CTT
tggatttaaagaacagagta

SEQ ID NO: 259387 - DNA, 20 bp, Artificial Sequence
  Description of Artificial Sequence: Synthetic oligonucleotide
  Target: LAMA2; (-) strand; PAM type: YTN; PAM sequence: TTA
agtaaaaatgtcagtgagct

SEQ ID NO: 259388 - DNA, 20 bp, Artificial Sequence
  Description of Artificial Sequence: Synthetic oligonucleotide
  Target: LAMA2; (-) strand; PAM type: YTN; PAM sequence: TTC
atattaagtaaaaatgtcag

SEQ ID NO: 259389 - DNA, 20 bp, Artificial Sequence
  Description of Artificial Sequence: Synthetic oligonucleotide
  Target: LAMA2; (-) strand; PAM type: YTN; PAM sequence: TTA
attcatattaagtaaaaatg

SEQ ID NO: 259390 - DNA, 20 bp, Artificial Sequence
  Description of Artificial Sequence: Synthetic oligonucleotide
  Target: LAMA2; (-) strand; PAM type: YTN; PAM sequence: CTC
attaattcatattaagtaaa

SEQ ID NO: 259391 - DNA, 20 bp, Artificial Sequence
  Description of Artificial Sequence: Synthetic oligonucleotide
  Target: LAMA2; (-) strand; PAM type: YTN; PAM sequence: CTA
cctcattaattcatattaag

SEQ ID NO: 259392 - DNA, 20 bp, Artificial Sequence
  Description of Artificial Sequence: Synthetic oligonucleotide
  Target: LAMA2; (-) strand; PAM type: YTN; PAM sequence: TTA
aatgtataatactacctcat

SEQ ID NO: 259393 - DNA, 20 bp, Artificial Sequence
  Description of Artificial Sequence: Synthetic oligonucleotide
  Target: LAMA2; (-) strand; PAM type: YTN; PAM sequence: TTT
aaatgtataatactacctca

SEQ ID NO: 259394 - DNA, 20 bp, Artificial Sequence
  Description of Artificial Sequence: Synthetic oligonucleotide
  Target: LAMA2; (-) strand; PAM type: YTN; PAM sequence: CTA
tatgtatttaaatgtataat

SEQ ID NO: 259395 - DNA, 20 bp, Artificial Sequence
  Description of Artificial Sequence: Synthetic oligonucleotide
  Target: LAMA2; (-) strand; PAM type: YTN; PAM sequence: TTA
ctatatgtatttaaatgtat

SEQ ID NO: 259396 - DNA, 20 bp, Artificial Sequence
  Description of Artificial Sequence: Synthetic oligonucleotide
  Target: LAMA2; (-) strand; PAM type: YTN; PAM sequence: TTG
ttactatatgtatttaaatg

SEQ ID NO: 259397 - DNA, 20 bp, Artificial Sequence
  Description of Artificial Sequence: Synthetic oligonucleotide
  Target: LAMA2; (-) strand; PAM type: YTN; PAM sequence: TTT
gttactatatgtatttaaat

SEQ ID NO: 259398 - DNA, 20 bp, Artificial Sequence
  Description of Artificial Sequence: Synthetic oligonucleotide
  Target: LAMA2; (-) strand; PAM type: YTN; PAM sequence: TTA
taatttgttactatatgtat

SEQ ID NO: 259399 - DNA, 20 bp, Artificial Sequence
  Description of Artificial Sequence: Synthetic oligonucleotide
  Target: LAMA2; (-) strand; PAM type: YTN; PAM sequence: TTT
ataatttgttactatatgta

SEQ ID NO: 259400 - DNA, 20 bp, Artificial Sequence
  Description of Artificial Sequence: Synthetic oligonucleotide
  Target: LAMA2; (-) strand; PAM type: YTN; PAM sequence: CTC
atttataatttgttactata

SEQ ID NO: 259401 - DNA, 20 bp, Artificial Sequence
  Description of Artificial Sequence: Synthetic oligonucleotide
  Target: LAMA2; (-) strand; PAM type: YTN; PAM sequence: TTG
gtctcatttataatttgtta

SEQ ID NO: 259402 - DNA, 20 bp, Artificial Sequence
  Description of Artificial Sequence: Synthetic oligonucleotide
  Target: LAMA2; (-) strand; PAM type: YTN; PAM sequence: CTT
ggtctcatttataatttgtt

SEQ ID NO: 259403 - DNA, 20 bp, Artificial Sequence
  Description of Artificial Sequence: Synthetic oligonucleotide
  Target: LAMA2; (-) strand; PAM type: YTN; PAM sequence: TTC
ttggtctcatttataatttg

SEQ ID NO: 259404 - DNA, 20 bp, Artificial Sequence
  Description of Artificial Sequence: Synthetic oligonucleotide
  Target: LAMA2; (-) strand; PAM type: YTN; PAM sequence: TTA
aaataatattcttggtctca

SEQ ID NO: 259405 - DNA, 20 bp, Artificial Sequence
  Description of Artificial Sequence: Synthetic oligonucleotide
  Target: LAMA2; (-) strand; PAM type: YTN; PAM sequence: TTT
aaaataatattcttggtctc

SEQ ID NO: 259406 - DNA, 20 bp, Artificial Sequence
  Description of Artificial Sequence: Synthetic oligonucleotide
  Target: LAMA2; (-) strand; PAM type: YTN; PAM sequence: CTA
taatttaaaataatattctt

SEQ ID NO: 259407 - DNA, 20 bp, Artificial Sequence
  Description of Artificial Sequence: Synthetic oligonucleotide
  Target: LAMA2; (-) strand; PAM type: YTN; PAM sequence: TTC
tataatttaaaataatattc

SEQ ID NO: 259408 - DNA, 20 bp, Artificial Sequence
  Description of Artificial Sequence: Synthetic oligonucleotide
  Target: LAMA2; (-) strand; PAM type: YTN; PAM sequence: TTT
ctataatttaaaataatatt

SEQ ID NO: 259409 - DNA, 20 bp, Artificial Sequence
  Description of Artificial Sequence: Synthetic oligonucleotide
  Target: LAMA2; (-) strand; PAM type: YTN; PAM sequence: CTT
tctataatttaaaataatat

SEQ ID NO: 259410 - DNA, 20 bp, Artificial Sequence
  Description of Artificial Sequence: Synthetic oligonucleotide
  Target: LAMA2; (-) strand; PAM type: YTN; PAM sequence: CTG
tcatctttctataatttaaa

SEQ ID NO: 259411 - DNA, 20 bp, Artificial Sequence
  Description of Artificial Sequence: Synthetic oligonucleotide
  Target: LAMA2; (-) strand; PAM type: YTN; PAM sequence: TTA
aatgctgtcatctttctata

SEQ ID NO: 259412 - DNA, 20 bp, Artificial Sequence
  Description of Artificial Sequence: Synthetic oligonucleotide
  Target: LAMA2; (-) strand; PAM type: YTN; PAM sequence: TTA
ttaaatgctgtcatctttct

SEQ ID NO: 259413 - DNA, 20 bp, Artificial Sequence
  Description of Artificial Sequence: Synthetic oligonucleotide
  Target: LAMA2; (-) strand; PAM type: YTN; PAM sequence: TTT
attaaatgctgtcatctttc

SEQ ID NO: 259414 - DNA, 20 bp, Artificial Sequence
  Description of Artificial Sequence: Synthetic oligonucleotide
  Target: LAMA2; (-) strand; PAM type: YTN; PAM sequence: CTG
catttattaaatgctgtcat

SEQ ID NO: 259415 - DNA, 20 bp, Artificial Sequence
  Description of Artificial Sequence: Synthetic oligonucleotide
  Target: LAMA2; (-) strand; PAM type: YTN; PAM sequence: CTA
gtaggtctgcatttattaaa

SEQ ID NO: 259416 - DNA, 20 bp, Artificial Sequence
  Description of Artificial Sequence: Synthetic oligonucleotide
  Target: LAMA2; (-) strand; PAM type: YTN; PAM sequence: TTG
ggccagaatgctagtaggtc

SEQ ID NO: 259417 - DNA, 20 bp, Artificial Sequence
  Description of Artificial Sequence: Synthetic oligonucleotide
  Target: LAMA2; (-) strand; PAM type: YTN; PAM sequence: TTT
gggccagaatgctagtaggt

SEQ ID NO: 259418 - DNA, 20 bp, Artificial Sequence
  Description of Artificial Sequence: Synthetic oligonucleotide
  Target: LAMA2; (-) strand; PAM type: YTN; PAM sequence: CTT
tgggccagaatgctagtagg

SEQ ID NO: 259419 - DNA, 20 bp, Artificial Sequence
  Description of Artificial Sequence: Synthetic oligonucleotide
  Target: LAMA2; (-) strand; PAM type: YTN; PAM sequence: TTC
tttgggccagaatgctagta

SEQ ID NO: 259420 - DNA, 20 bp, Artificial Sequence
  Description of Artificial Sequence: Synthetic oligonucleotide
  Target: LAMA2; (-) strand; PAM type: YTN; PAM sequence: TTT
ctttgggccagaatgctagt

SEQ ID NO: 259421 - DNA, 20 bp, Artificial Sequence
  Description of Artificial Sequence: Synthetic oligonucleotide
  Target: LAMA2; (-) strand; PAM type: YTN; PAM sequence: CTA
tggtgtttctttgggccaga

SEQ ID NO: 259422 - DNA, 20 bp, Artificial Sequence
  Description of Artificial Sequence: Synthetic oligonucleotide
  Target: LAMA2; (-) strand; PAM type: YTN; PAM sequence: TTC
tatggtgtttctttgggcca

SEQ ID NO: 259423 - DNA, 20 bp, Artificial Sequence
  Description of Artificial Sequence: Synthetic oligonucleotide
  Target: LAMA2; (-) strand; PAM type: YTN; PAM sequence: TTT
ctatggtgtttctttgggcc

SEQ ID NO: 259424 - DNA, 20 bp, Artificial Sequence
  Description of Artificial Sequence: Synthetic oligonucleotide
  Target: LAMA2; (-) strand; PAM type: YTN; PAM sequence: TTT
tctatggtgtttctttgggc

SEQ ID NO: 259425 - DNA, 20 bp, Artificial Sequence
  Description of Artificial Sequence: Synthetic oligonucleotide
  Target: LAMA2; (-) strand; PAM type: YTN; PAM sequence: TTT
ttctatggtgtttctttggg

SEQ ID NO: 259426 - DNA, 20 bp, Artificial Sequence
  Description of Artificial Sequence: Synthetic oligonucleotide
  Target: LAMA2; (-) strand; PAM type: YTN; PAM sequence: TTT
tttctatggtgtttctttgg

SEQ ID NO: 259427 - DNA, 20 bp, Artificial Sequence
  Description of Artificial Sequence: Synthetic oligonucleotide
  Target: LAMA2; (-) strand; PAM type: YTN; PAM sequence: TTT
ttttctatggtgtttctttg

SEQ ID NO: 259428 - DNA, 20 bp, Artificial Sequence
  Description of Artificial Sequence: Synthetic oligonucleotide
  Target: LAMA2; (-) strand; PAM type: YTN; PAM sequence: TTT
tttttctatggtgtttcttt

SEQ ID NO: 259429 - DNA, 20 bp, Artificial Sequence
  Description of Artificial Sequence: Synthetic oligonucleotide
  Target: LAMA2; (-) strand; PAM type: YTN; PAM sequence: TTT
ttttttctatggtgtttctt

SEQ ID NO: 259430 - DNA, 20 bp, Artificial Sequence
  Description of Artificial Sequence: Synthetic oligonucleotide
  Target: LAMA2; (-) strand; PAM type: YTN; PAM sequence: TTT
tttttttctatggtgtttct

SEQ ID NO: 259431 - DNA, 20 bp, Artificial Sequence
  Description of Artificial Sequence: Synthetic oligonucleotide
  Target: LAMA2; (-) strand; PAM type: YTN; PAM sequence: CTT
ttttttttctatggtgtttc

SEQ ID NO: 259432 - DNA, 20 bp, Artificial Sequence
  Description of Artificial Sequence: Synthetic oligonucleotide
  Target: LAMA2; (-) strand; PAM type: YTN; PAM sequence: TTG
tgcttttttttttctatggt

SEQ ID NO: 259433 - DNA, 20 bp, Artificial Sequence
  Description of Artificial Sequence: Synthetic oligonucleotide
  Target: LAMA2; (-) strand; PAM type: YTN; PAM sequence: TTT
gtgcttttttttttctatgg

SEQ ID NO: 259434 - DNA, 20 bp, Artificial Sequence
  Description of Artificial Sequence: Synthetic oligonucleotide
  Target: LAMA2; (-) strand; PAM type: YTN; PAM sequence: TTT
tgtgcttttttttttctatg

SEQ ID NO: 259435 - DNA, 20 bp, Artificial Sequence
  Description of Artificial Sequence: Synthetic oligonucleotide
  Target: LAMA2; (-) strand; PAM type: YTN; PAM sequence: CTG
ttttgtgcttttttttttct

SEQ ID NO: 259436 - DNA, 20 bp, Artificial Sequence
  Description of Artificial Sequence: Synthetic oligonucleotide
  Target: LAMA2; (-) strand; PAM type: YTN; PAM sequence: TTC
ctgttttgtgcttttttttt

SEQ ID NO: 259437 - DNA, 20 bp, Artificial Sequence
  Description of Artificial Sequence: Synthetic oligonucleotide
  Target: LAMA2; (-) strand; PAM type: YTN; PAM sequence: CTT
cctgttttgtgctttttttt

SEQ ID NO: 259438 - DNA, 20 bp, Artificial Sequence
  Description of Artificial Sequence: Synthetic oligonucleotide
  Target: LAMA2; (-) strand; PAM type: YTN; PAM sequence: TTC
ttcctgttttgtgctttttt

SEQ ID NO: 259439 - DNA, 20 bp, Artificial Sequence
  Description of Artificial Sequence: Synthetic oligonucleotide
  Target: LAMA2; (-) strand; PAM type: YTN; PAM sequence: CTA
ttcttcctgttttgtgcttt

SEQ ID NO: 259440 - DNA, 20 bp, Artificial Sequence
  Description of Artificial Sequence: Synthetic oligonucleotide
  Target: LAMA2; (-) strand; PAM type: YTN; PAM sequence: TTA
ctattcttcctgttttgtgc

SEQ ID NO: 259441 - DNA, 20 bp, Artificial Sequence
  Description of Artificial Sequence: Synthetic oligonucleotide
  Target: LAMA2; (-) strand; PAM type: YTN; PAM sequence: CTC
agtcatattactattcttcc

SEQ ID NO: 259442 - DNA, 20 bp, Artificial Sequence
  Description of Artificial Sequence: Synthetic oligonucleotide
  Target: LAMA2; (-) strand; PAM type: YTN; PAM sequence: TTG
tgcaagtcatgtcctcagtc

SEQ ID NO: 259443 - DNA, 20 bp, Artificial Sequence
  Description of Artificial Sequence: Synthetic oligonucleotide
  Target: LAMA2; (-) strand; PAM type: YTN; PAM sequence: TTT
gtgcaagtcatgtcctcagt

SEQ ID NO: 259444 - DNA, 20 bp, Artificial Sequence
  Description of Artificial Sequence: Synthetic oligonucleotide
  Target: LAMA2; (-) strand; PAM type: YTN; PAM sequence: TTT
tgtgcaagtcatgtcctcag

SEQ ID NO: 259445 - DNA, 20 bp, Artificial Sequence
  Description of Artificial Sequence: Synthetic oligonucleotide
  Target: LAMA2; (-) strand; PAM type: YTN; PAM sequence: CTA
ttttgtgcaagtcatgtcct

SEQ ID NO: 259446 - DNA, 20 bp, Artificial Sequence
  Description of Artificial Sequence: Synthetic oligonucleotide
  Target: LAMA2; (-) strand; PAM type: YTN; PAM sequence: TTA
gacaaatccaggctattttg

SEQ ID NO: 259447 - DNA, 20 bp, Artificial Sequence
  Description of Artificial Sequence: Synthetic oligonucleotide
  Target: LAMA2; (-) strand; PAM type: YTN; PAM sequence: TTT
agacaaatccaggctatttt

SEQ ID NO: 259448 - DNA, 20 bp, Artificial Sequence
  Description of Artificial Sequence: Synthetic oligonucleotide
  Target: LAMA2; (-) strand; PAM type: YTN; PAM sequence: CTG
aaggagccatttagacaaat

SEQ ID NO: 259449 - DNA, 20 bp, Artificial Sequence
  Description of Artificial Sequence: Synthetic oligonucleotide
  Target: LAMA2; (-) strand; PAM type: YTN; PAM sequence: TTA
ctgaaggagccatttagaca

SEQ ID NO: 259450 - DNA, 20 bp, Artificial Sequence
  Description of Artificial Sequence: Synthetic oligonucleotide
  Target: LAMA2; (-) strand; PAM type: YTN; PAM sequence: CTA
gttactgaaggagccattta

SEQ ID NO: 259451 - DNA, 20 bp, Artificial Sequence
  Description of Artificial Sequence: Synthetic oligonucleotide
  Target: LAMA2; (-) strand; PAM type: YTN; PAM sequence: CTC
agtcaaggtcccagaactag

SEQ ID NO: 259452 - DNA, 20 bp, Artificial Sequence
  Description of Artificial Sequence: Synthetic oligonucleotide
  Target: LAMA2; (-) strand; PAM type: YTN; PAM sequence: TTA
ctcagtcaaggtcccagaac

SEQ ID NO: 259453 - DNA, 20 bp, Artificial Sequence
  Description of Artificial Sequence: Synthetic oligonucleotide
  Target: LAMA2; (-) strand; PAM type: YTN; PAM sequence: TTG
cagatggaaaatgaaacaaa

SEQ ID NO: 259454 - DNA, 20 bp, Artificial Sequence
  Description of Artificial Sequence: Synthetic oligonucleotide
  Target: LAMA2; (-) strand; PAM type: YTN; PAM sequence: TTT
gcagatggaaaatgaaacaa

SEQ ID NO: 259455 - DNA, 20 bp, Artificial Sequence
  Description of Artificial Sequence: Synthetic oligonucleotide
  Target: LAMA2; (-) strand; PAM type: YTN; PAM sequence: TTT
tgcagatggaaaatgaaaca

SEQ ID NO: 259456 - DNA, 20 bp, Artificial Sequence
  Description of Artificial Sequence: Synthetic oligonucleotide
  Target: LAMA2; (-) strand; PAM type: YTN; PAM sequence: TTA
atagatgaattttgcagatg

SEQ ID NO: 259457 - DNA, 20 bp, Artificial Sequence
  Description of Artificial Sequence: Synthetic oligonucleotide
  Target: LAMA2; (-) strand; PAM type: YTN; PAM sequence: TTT
aatagatgaattttgcagat

SEQ ID NO: 259458 - DNA, 20 bp, Artificial Sequence
  Description of Artificial Sequence: Synthetic oligonucleotide
  Target: LAMA2; (-) strand; PAM type: YTN; PAM sequence: TTA
atttaatagatgaattttgc

SEQ ID NO: 259459 - DNA, 20 bp, Artificial Sequence
  Description of Artificial Sequence: Synthetic oligonucleotide
  Target: LAMA2; (-) strand; PAM type: YTN; PAM sequence: CTT
aatttaatagatgaattttg

SEQ ID NO: 259460 - DNA, 20 bp, Artificial Sequence
  Description of Artificial Sequence: Synthetic oligonucleotide
  Target: LAMA2; (-) strand; PAM type: YTN; PAM sequence: TTA
tcttaatttaatagatgaat

SEQ ID NO: 259461 - DNA, 20 bp, Artificial Sequence
  Description of Artificial Sequence: Synthetic oligonucleotide
  Target: LAMA2; (-) strand; PAM type: YTN; PAM sequence: TTA
ttatcttaatttaatagatg

SEQ ID NO: 259462 - DNA, 20 bp, Artificial Sequence
  Description of Artificial Sequence: Synthetic oligonucleotide
  Target: LAMA2; (-) strand; PAM type: YTN; PAM sequence: CTA
ttattatcttaatttaatag

SEQ ID NO: 259463 - DNA, 20 bp, Artificial Sequence
  Description of Artificial Sequence: Synthetic oligonucleotide
  Target: LAMA2; (-) strand; PAM type: YTN; PAM sequence: TTG
taacaaaaaccatgtgtggt

SEQ ID NO: 259464 - DNA, 20 bp, Artificial Sequence
  Description of Artificial Sequence: Synthetic oligonucleotide
  Target: LAMA2; (-) strand; PAM type: YTN; PAM sequence: CTA
attgtaacaaaaaccatgtg

SEQ ID NO: 259465 - DNA, 20 bp, Artificial Sequence
  Description of Artificial Sequence: Synthetic oligonucleotide
  Target: LAMA2; (-) strand; PAM type: YTN; PAM sequence: CTC
aactaattgtaacaaaaacc

SEQ ID NO: 259466 - DNA, 20 bp, Artificial Sequence
  Description of Artificial Sequence: Synthetic oligonucleotide
  Target: LAMA2; (-) strand; PAM type: YTN; PAM sequence: CTA
actcaactaattgtaacaaa

SEQ ID NO: 259467 - DNA, 20 bp, Artificial Sequence
  Description of Artificial Sequence: Synthetic oligonucleotide
  Target: LAMA2; (-) strand; PAM type: YTN; PAM sequence: TTA
tagccgctaactcaactaat

SEQ ID NO: 259468 - DNA, 20 bp, Artificial Sequence
  Description of Artificial Sequence: Synthetic oligonucleotide
  Target: LAMA2; (-) strand; PAM type: YTN; PAM sequence: TTT
atagccgctaactcaactaa

SEQ ID NO: 259469 - DNA, 20 bp, Artificial Sequence
  Description of Artificial Sequence: Synthetic oligonucleotide
  Target: LAMA2; (-) strand; PAM type: YTN; PAM sequence: TTT
tatagccgctaactcaacta

SEQ ID NO: 259470 - DNA, 20 bp, Artificial Sequence
  Description of Artificial Sequence: Synthetic oligonucleotide
  Target: LAMA2; (-) strand; PAM type: YTN; PAM sequence: CTA
aatattttatagccgctaac

SEQ ID NO: 259471 - DNA, 20 bp, Artificial Sequence
  Description of Artificial Sequence: Synthetic oligonucleotide
  Target: LAMA2; (-) strand; PAM type: YTN; PAM sequence: CTC
taaatattttatagccgcta

SEQ ID NO: 259472 - DNA, 20 bp, Artificial Sequence
  Description of Artificial Sequence: Synthetic oligonucleotide
  Target: LAMA2; (-) strand; PAM type: YTN; PAM sequence: TTA
ctctaaatattttatagccg

SEQ ID NO: 259473 - DNA, 20 bp, Artificial Sequence
  Description of Artificial Sequence: Synthetic oligonucleotide
  Target: LAMA2; (-) strand; PAM type: YTN; PAM sequence: CTA
ggcattactctaaatatttt

SEQ ID NO: 259474 - DNA, 20 bp, Artificial Sequence
  Description of Artificial Sequence: Synthetic oligonucleotide
  Target: LAMA2; (-) strand; PAM type: YTN; PAM sequence: TTA
catgctaggcattactctaa

SEQ ID NO: 259475 - DNA, 20 bp, Artificial Sequence
  Description of Artificial Sequence: Synthetic oligonucleotide
  Target: LAMA2; (-) strand; PAM type: YTN; PAM sequence: CTT
acatgctaggcattactcta

SEQ ID NO: 259476 - DNA, 20 bp, Artificial Sequence
  Description of Artificial Sequence: Synthetic oligonucleotide
  Target: LAMA2; (-) strand; PAM type: YTN; PAM sequence: TTC
catagcacttacatgctagg

SEQ ID NO: 259477 - DNA, 20 bp, Artificial Sequence
  Description of Artificial Sequence: Synthetic oligonucleotide
  Target: LAMA2; (-) strand; PAM type: YTN; PAM sequence: CTT
ccatagcacttacatgctag

SEQ ID NO: 259478 - DNA, 20 bp, Artificial Sequence
  Description of Artificial Sequence: Synthetic oligonucleotide
  Target: LAMA2; (-) strand; PAM type: YTN; PAM sequence: CTA
ataaagataataataataat

SEQ ID NO: 259479 - DNA, 20 bp, Artificial Sequence
  Description of Artificial Sequence: Synthetic oligonucleotide
  Target: LAMA2; (-) strand; PAM type: YTN; PAM sequence: TTA
ataaaactaataaagataat

SEQ ID NO: 259480 - DNA, 20 bp, Artificial Sequence
  Description of Artificial Sequence: Synthetic oligonucleotide
  Target: LAMA2; (-) strand; PAM type: YTN; PAM sequence: CTG
tgccaaagcacaatgtataa

SEQ ID NO: 259481 - DNA, 20 bp, Artificial Sequence
  Description of Artificial Sequence: Synthetic oligonucleotide
  Target: LAMA2; (-) strand; PAM type: YTN; PAM sequence: TTC
ctgtgccaaagcacaatgta

SEQ ID NO: 259482 - DNA, 20 bp, Artificial Sequence
  Description of Artificial Sequence: Synthetic oligonucleotide
  Target: LAMA2; (-) strand; PAM type: YTN; PAM sequence: TTT
cctgtgccaaagcacaatgt

SEQ ID NO: 259483 - DNA, 20 bp, Artificial Sequence
  Description of Artificial Sequence: Synthetic oligonucleotide
  Target: LAMA2; (-) strand; PAM type: YTN; PAM sequence: TTT
tcctgtgccaaagcacaatg

SEQ ID NO: 259484 - DNA, 20 bp, Artificial Sequence
  Description of Artificial Sequence: Synthetic oligonucleotide
  Target: LAMA2; (-) strand; PAM type: YTN; PAM sequence: CTA
gttttcctgtgccaaagcac

SEQ ID NO: 259485 - DNA, 20 bp, Artificial Sequence
  Description of Artificial Sequence: Synthetic oligonucleotide
  Target: LAMA2; (-) strand; PAM type: YTN; PAM sequence: TTA
gctagttttcctgtgccaaa

SEQ ID NO: 259486 - DNA, 20 bp, Artificial Sequence
  Description of Artificial Sequence: Synthetic oligonucleotide
  Target: LAMA2; (-) strand; PAM type: YTN; PAM sequence: CTG
agtaattagctagttttcct

SEQ ID NO: 259487 - DNA, 20 bp, Artificial Sequence
  Description of Artificial Sequence: Synthetic oligonucleotide
  Target: LAMA2; (-) strand; PAM type: YTN; PAM sequence: CTA
aatagaaagaaaacctgagt

SEQ ID NO: 259488 - DNA, 20 bp, Artificial Sequence
  Description of Artificial Sequence: Synthetic oligonucleotide
  Target: LAMA2; (-) strand; PAM type: YTN; PAM sequence: TTC
agcggaatcataacactaaa

SEQ ID NO: 259489 - DNA, 20 bp, Artificial Sequence
  Description of Artificial Sequence: Synthetic oligonucleotide
  Target: LAMA2; (-) strand; PAM type: YTN; PAM sequence: CTT
cagcggaatcataacactaa

SEQ ID NO: 259490 - DNA, 20 bp, Artificial Sequence
  Description of Artificial Sequence: Synthetic oligonucleotide
  Target: LAMA2; (-) strand; PAM type: YTN; PAM sequence: TTC
ttcagcggaatcataacact

SEQ ID NO: 259491 - DNA, 20 bp, Artificial Sequence
  Description of Artificial Sequence: Synthetic oligonucleotide
  Target: LAMA2; (-) strand; PAM type: YTN; PAM sequence: TTA
agtagttcttcagcggaatc

SEQ ID NO: 259492 - DNA, 20 bp, Artificial Sequence
  Description of Artificial Sequence: Synthetic oligonucleotide
  Target: LAMA2; (-) strand; PAM type: YTN; PAM sequence: CTT
aagtagttcttcagcggaat

SEQ ID NO: 259493 - DNA, 20 bp, Artificial Sequence
  Description of Artificial Sequence: Synthetic oligonucleotide
  Target: LAMA2; (-) strand; PAM type: YTN; PAM sequence: TTA
tcttaagtagttcttcagcg

SEQ ID NO: 259494 - DNA, 20 bp, Artificial Sequence
  Description of Artificial Sequence: Synthetic oligonucleotide
  Target: LAMA2; (-) strand; PAM type: YTN; PAM sequence: TTG
caaatagaaattatcttaag

SEQ ID NO: 259495 - DNA, 20 bp, Artificial Sequence
  Description of Artificial Sequence: Synthetic oligonucleotide
  Target: LAMA2; (-) strand; PAM type: YTN; PAM sequence: CTT
gcaaatagaaattatcttaa

SEQ ID NO: 259496 - DNA, 20 bp, Artificial Sequence
  Description of Artificial Sequence: Synthetic oligonucleotide
  Target: LAMA2; (-) strand; PAM type: YTN; PAM sequence: TTA
cttgcaaatagaaattatct

SEQ ID NO: 259497 - DNA, 20 bp, Artificial Sequence
  Description of Artificial Sequence: Synthetic oligonucleotide
  Target: LAMA2; (-) strand; PAM type: YTN; PAM sequence: CTA
aaaaatgtcatgggacagtg

SEQ ID NO: 259498 - DNA, 20 bp, Artificial Sequence
  Description of Artificial Sequence: Synthetic oligonucleotide
  Target: LAMA2; (-) strand; PAM type: YTN; PAM sequence: TTA
tatgctaaaaaatgtcatgg

SEQ ID NO: 259499 - DNA, 20 bp, Artificial Sequence
  Description of Artificial Sequence: Synthetic oligonucleotide
  Target: LAMA2; (-) strand; PAM type: YTN; PAM sequence: TTT
atatgctaaaaaatgtcatg

SEQ ID NO: 259500 - DNA, 20 bp, Artificial Sequence
  Description of Artificial Sequence: Synthetic oligonucleotide
  Target: LAMA2; (-) strand; PAM type: YTN; PAM sequence: TTA
aatttatatgctaaaaaatg

SEQ ID NO: 259501 - DNA, 20 bp, Artificial Sequence
  Description of Artificial Sequence: Synthetic oligonucleotide
  Target: LAMA2; (-) strand; PAM type: YTN; PAM sequence: TTT
aaatttatatgctaaaaaat

SEQ ID NO: 259502 - DNA, 20 bp, Artificial Sequence
  Description of Artificial Sequence: Synthetic oligonucleotide
  Target: LAMA2; (-) strand; PAM type: YTN; PAM sequence: TTA
tgtttaaatttatatgctaa

SEQ ID NO: 259503 - DNA, 20 bp, Artificial Sequence
  Description of Artificial Sequence: Synthetic oligonucleotide
  Target: LAMA2; (-) strand; PAM type: YTN; PAM sequence: TTA
ccattatgtttaaatttata

SEQ ID NO: 259504 - DNA, 20 bp, Artificial Sequence
  Description of Artificial Sequence: Synthetic oligonucleotide
  Target: LAMA2; (-) strand; PAM type: YTN; PAM sequence: TTA
agaagaaaaatagttaccat

SEQ ID NO: 259505 - DNA, 20 bp, Artificial Sequence
  Description of Artificial Sequence: Synthetic oligonucleotide
  Target: LAMA2; (-) strand; PAM type: YTN; PAM sequence: TTC
attaagaagaaaaatagtta

SEQ ID NO: 259506 - DNA, 20 bp, Artificial Sequence
  Description of Artificial Sequence: Synthetic oligonucleotide
  Target: LAMA2; (-) strand; PAM type: YTN; PAM sequence: CTT
cattaagaagaaaaatagtt

SEQ ID NO: 259507 - DNA, 20 bp, Artificial Sequence
  Description of Artificial Sequence: Synthetic oligonucleotide
  Target: LAMA2; (-) strand; PAM type: YTN; PAM sequence: TTA
gatgtgtccttcattaagaa

SEQ ID NO: 259508 - DNA, 20 bp, Artificial Sequence
  Description of Artificial Sequence: Synthetic oligonucleotide
  Target: LAMA2; (-) strand; PAM type: YTN; PAM sequence: TTT
agatgtgtccttcattaaga

SEQ ID NO: 259509 - DNA, 20 bp, Artificial Sequence
  Description of Artificial Sequence: Synthetic oligonucleotide
  Target: LAMA2; (-) strand; PAM type: YTN; PAM sequence: TTT
tagatgtgtccttcattaag

SEQ ID NO: 259510 - DNA, 20 bp, Artificial Sequence
  Description of Artificial Sequence: Synthetic oligonucleotide
  Target: LAMA2; (-) strand; PAM type: YTN; PAM sequence: TTA
ttttagatgtgtccttcatt

SEQ ID NO: 259511 - DNA, 20 bp, Artificial Sequence
  Description of Artificial Sequence: Synthetic oligonucleotide
  Target: LAMA2; (-) strand; PAM type: YTN; PAM sequence: TTT
attttagatgtgtccttcat

SEQ ID NO: 259512 - DNA, 20 bp, Artificial Sequence
  Description of Artificial Sequence: Synthetic oligonucleotide
  Target: LAMA2; (-) strand; PAM type: YTN; PAM sequence: TTA
agccaaatgatttattttag

SEQ ID NO: 259513 - DNA, 20 bp, Artificial Sequence
  Description of Artificial Sequence: Synthetic oligonucleotide
  Target: LAMA2; (-) strand; PAM type: YTN; PAM sequence: TTT
aagccaaatgatttatttta

SEQ ID NO: 259514 - DNA, 20 bp, Artificial Sequence
  Description of Artificial Sequence: Synthetic oligonucleotide
  Target: LAMA2; (-) strand; PAM type: YTN; PAM sequence: TTT
taagccaaatgatttatttt

SEQ ID NO: 259515 - DNA, 20 bp, Artificial Sequence
  Description of Artificial Sequence: Synthetic oligonucleotide
  Target: LAMA2; (-) strand; PAM type: YTN; PAM sequence: CTA
attttaagccaaatgattta

SEQ ID NO: 259516 - DNA, 20 bp, Artificial Sequence
  Description of Artificial Sequence: Synthetic oligonucleotide
  Target: LAMA2; (-) strand; PAM type: YTN; PAM sequence: TTG
ctaattttaagccaaatgat

SEQ ID NO: 259517 - DNA, 20 bp, Artificial Sequence
  Description of Artificial Sequence: Synthetic oligonucleotide
  Target: LAMA2; (-) strand; PAM type: YTN; PAM sequence: TTG
ttgctaattttaagccaaat

SEQ ID NO: 259518 - DNA, 20 bp, Artificial Sequence
  Description of Artificial Sequence: Synthetic oligonucleotide
  Target: LAMA2; (-) strand; PAM type: YTN; PAM sequence: CTG
ttgttgctaattttaagcca

SEQ ID NO: 259519 - DNA, 20 bp, Artificial Sequence
  Description of Artificial Sequence: Synthetic oligonucleotide
  Target: LAMA2; (-) strand; PAM type: YTN; PAM sequence: TTA
ctgttgttgctaattttaag

SEQ ID NO: 259520 - DNA, 20 bp, Artificial Sequence
  Description of Artificial Sequence: Synthetic oligonucleotide
  Target: LAMA2; (-) strand; PAM type: YTN; PAM sequence: TTA
ttactgttgttgctaatttt

SEQ ID NO: 259521 - DNA, 20 bp, Artificial Sequence
  Description of Artificial Sequence: Synthetic oligonucleotide
  Target: LAMA2; (-) strand; PAM type: YTN; PAM sequence: TTG
gttattactgttgttgctaa

SEQ ID NO: 259522 - DNA, 20 bp, Artificial Sequence
  Description of Artificial Sequence: Synthetic oligonucleotide
  Target: LAMA2; (-) strand; PAM type: YTN; PAM sequence: TTT
ggttattactgttgttgcta

SEQ ID NO: 259523 - DNA, 20 bp, Artificial Sequence
  Description of Artificial Sequence: Synthetic oligonucleotide
  Target: LAMA2; (-) strand; PAM type: YTN; PAM sequence: TTT
tggttattactgttgttgct

SEQ ID NO: 259524 - DNA, 20 bp, Artificial Sequence
  Description of Artificial Sequence: Synthetic oligonucleotide
  Target: LAMA2; (-) strand; PAM type: YTN; PAM sequence: CTG
ttttggttattactgttgtt

SEQ ID NO: 259525 - DNA, 20 bp, Artificial Sequence
  Description of Artificial Sequence: Synthetic oligonucleotide
  Target: LAMA2; (-) strand; PAM type: YTN; PAM sequence: TTG
ctgttttggttattactgtt

SEQ ID NO: 259526 - DNA, 20 bp, Artificial Sequence
  Description of Artificial Sequence: Synthetic oligonucleotide
  Target: LAMA2; (-) strand; PAM type: YTN; PAM sequence: TTA
gtcattgctgttttggttat

SEQ ID NO: 259527 - DNA, 20 bp, Artificial Sequence
  Description of Artificial Sequence: Synthetic oligonucleotide
  Target: LAMA2; (-) strand; PAM type: YTN; PAM sequence: CTA
aataaatgttagtcattgct

SEQ ID NO: 259528 - DNA, 20 bp, Artificial Sequence
  Description of Artificial Sequence: Synthetic oligonucleotide
  Target: LAMA2; (-) strand; PAM type: YTN; PAM sequence: TTA
caccgagtaaacactaaata

SEQ ID NO: 259529 - DNA, 20 bp, Artificial Sequence
  Description of Artificial Sequence: Synthetic oligonucleotide
  Target: LAMA2; (-) strand; PAM type: YTN; PAM sequence: TTT
acaccgagtaaacactaaat

SEQ ID NO: 259530 - DNA, 20 bp, Artificial Sequence
  Description of Artificial Sequence: Synthetic oligonucleotide
  Target: LAMA2; (-) strand; PAM type: YTN; PAM sequence: CTT
tacaccgagtaaacactaaa

SEQ ID NO: 259531 - DNA, 20 bp, Artificial Sequence
  Description of Artificial Sequence: Synthetic oligonucleotide
  Target: LAMA2; (-) strand; PAM type: YTN; PAM sequence: TTA
gaaaaatactttacaccgag

SEQ ID NO: 259532 - DNA, 20 bp, Artificial Sequence
  Description of Artificial Sequence: Synthetic oligonucleotide
  Target: LAMA2; (-) strand; PAM type: YTN; PAM sequence: TTT
agaaaaatactttacaccga

SEQ ID NO: 259533 - DNA, 20 bp, Artificial Sequence
  Description of Artificial Sequence: Synthetic oligonucleotide
  Target: LAMA2; (-) strand; PAM type: YTN; PAM sequence: CTG
tggaaggtgtttagaaaaat

SEQ ID NO: 259534 - DNA, 20 bp, Artificial Sequence
  Description of Artificial Sequence: Synthetic oligonucleotide
  Target: LAMA2; (-) strand; PAM type: YTN; PAM sequence: TTA
cacaccagctgtggaaggtg

SEQ ID NO: 259535 - DNA, 20 bp, Artificial Sequence
  Description of Artificial Sequence: Synthetic oligonucleotide
  Target: LAMA2; (-) strand; PAM type: YTN; PAM sequence: CTC
acagcattacacaccagctg

SEQ ID NO: 259536 - DNA, 20 bp, Artificial Sequence
  Description of Artificial Sequence: Synthetic oligonucleotide
  Target: LAMA2; (-) strand; PAM type: YTN; PAM sequence: TTG
ctcacagcattacacaccag

SEQ ID NO: 259537 - DNA, 20 bp, Artificial Sequence
  Description of Artificial Sequence: Synthetic oligonucleotide
  Target: LAMA2; (-) strand; PAM type: YTN; PAM sequence: TTC
attgctcacagcattacaca

SEQ ID NO: 259538 - DNA, 20 bp, Artificial Sequence
  Description of Artificial Sequence: Synthetic oligonucleotide
  Target: LAMA2; (-) strand; PAM type: YTN; PAM sequence: TTA
tgaaatgacaatattcattg

SEQ ID NO: 259539 - DNA, 20 bp, Artificial Sequence
  Description of Artificial Sequence: Synthetic oligonucleotide
  Target: LAMA2; (-) strand; PAM type: YTN; PAM sequence: TTT
atgaaatgacaatattcatt

SEQ ID NO: 259540 - DNA, 20 bp, Artificial Sequence
  Description of Artificial Sequence: Synthetic oligonucleotide
  Target: LAMA2; (-) strand; PAM type: YTN; PAM sequence: TTT
tatgaaatgacaatattcat

SEQ ID NO: 259541 - DNA, 20 bp, Artificial Sequence
  Description of Artificial Sequence: Synthetic oligonucleotide
  Target: LAMA2; (-) strand; PAM type: YTN; PAM sequence: TTT
ttatgaaatgacaatattca

SEQ ID NO: 259542 - DNA, 20 bp, Artificial Sequence
  Description of Artificial Sequence: Synthetic oligonucleotide
  Target: LAMA2; (-) strand; PAM type: YTN; PAM sequence: CTT
tttatgaaatgacaatattc

SEQ ID NO: 259543 - DNA, 20 bp, Artificial Sequence
  Description of Artificial Sequence: Synthetic oligonucleotide
  Target: LAMA2; (-) strand; PAM type: YTN; PAM sequence: TTC
actttttatgaaatgacaat

SEQ ID NO: 259544 - DNA, 20 bp, Artificial Sequence
  Description of Artificial Sequence: Synthetic oligonucleotide
  Target: LAMA2; (-) strand; PAM type: YTN; PAM sequence: CTA
aattcactttttatgaaatg

SEQ ID NO: 259545 - DNA, 20 bp, Artificial Sequence
  Description of Artificial Sequence: Synthetic oligonucleotide
  Target: LAMA2; (-) strand; PAM type: YTN; PAM sequence: TTG
actaaattcactttttatga

SEQ ID NO: 259546 - DNA, 20 bp, Artificial Sequence
  Description of Artificial Sequence: Synthetic oligonucleotide
  Target: LAMA2; (-) strand; PAM type: YTN; PAM sequence: TTT
gactaaattcactttttatg

SEQ ID NO: 259547 - DNA, 20 bp, Artificial Sequence
  Description of Artificial Sequence: Synthetic oligonucleotide
  Target: LAMA2; (-) strand; PAM type: YTN; PAM sequence: TTA
gaatatttgactaaattcac

SEQ ID NO: 259548 - DNA, 20 bp, Artificial Sequence
  Description of Artificial Sequence: Synthetic oligonucleotide
  Target: LAMA2; (-) strand; PAM type: YTN; PAM sequence: TTT
agaatatttgactaaattca

SEQ ID NO: 259549 - DNA, 20 bp, Artificial Sequence
  Description of Artificial Sequence: Synthetic oligonucleotide
  Target: LAMA2; (-) strand; PAM type: YTN; PAM sequence: CTG
aatatatttagaatatttga

SEQ ID NO: 259550 - DNA, 20 bp, Artificial Sequence
  Description of Artificial Sequence: Synthetic oligonucleotide
  Target: LAMA2; (-) strand; PAM type: YTN; PAM sequence: TTC
actgaatatatttagaatat

SEQ ID NO: 259551 - DNA, 20 bp, Artificial Sequence
  Description of Artificial Sequence: Synthetic oligonucleotide
  Target: LAMA2; (-) strand; PAM type: YTN; PAM sequence: TTT
cactgaatatatttagaata

SEQ ID NO: 259552 - DNA, 20 bp, Artificial Sequence
  Description of Artificial Sequence: Synthetic oligonucleotide
  Target: LAMA2; (-) strand; PAM type: YTN; PAM sequence: TTT
tcactgaatatatttagaat

SEQ ID NO: 259553 - DNA, 20 bp, Artificial Sequence
  Description of Artificial Sequence: Synthetic oligonucleotide
  Target: LAMA2; (-) strand; PAM type: YTN; PAM sequence: CTA
aatcattttcactgaatata

SEQ ID NO: 259554 - DNA, 20 bp, Artificial Sequence
  Description of Artificial Sequence: Synthetic oligonucleotide
  Target: LAMA2; (-) strand; PAM type: YTN; PAM sequence: TTA
tatgatgactaaatcatttt

SEQ ID NO: 259555 - DNA, 20 bp, Artificial Sequence
  Description of Artificial Sequence: Synthetic oligonucleotide
  Target: LAMA2; (-) strand; PAM type: YTN; PAM sequence: TTG
gttatatgatgactaaatca

SEQ ID NO: 259556 - DNA, 20 bp, Artificial Sequence
  Description of Artificial Sequence: Synthetic oligonucleotide
  Target: LAMA2; (-) strand; PAM type: YTN; PAM sequence: TTA
attggttatatgatgactaa

SEQ ID NO: 259557 - DNA, 20 bp, Artificial Sequence
  Description of Artificial Sequence: Synthetic oligonucleotide
  Target: LAMA2; (-) strand; PAM type: YTN; PAM sequence: TTT
aattggttatatgatgacta

SEQ ID NO: 259558 - DNA, 20 bp, Artificial Sequence
  Description of Artificial Sequence: Synthetic oligonucleotide
  Target: LAMA2; (-) strand; PAM type: YTN; PAM sequence: TTT
taattggttatatgatgact

SEQ ID NO: 259559 - DNA, 20 bp, Artificial Sequence
  Description of Artificial Sequence: Synthetic oligonucleotide
  Target: LAMA2; (-) strand; PAM type: YTN; PAM sequence: CTT
ttaattggttatatgatgac

SEQ ID NO: 259560 - DNA, 20 bp, Artificial Sequence
  Description of Artificial Sequence: Synthetic oligonucleotide
  Target: LAMA2; (-) strand; PAM type: YTN; PAM sequence: TTA
tgagtaaacttttaattggt

SEQ ID NO: 259561 - DNA, 20 bp, Artificial Sequence
  Description of Artificial Sequence: Synthetic oligonucleotide
  Target: LAMA2; (-) strand; PAM type: YTN; PAM sequence: CTA
atgttatgagtaaactttta

SEQ ID NO: 259562 - DNA, 20 bp, Artificial Sequence
  Description of Artificial Sequence: Synthetic oligonucleotide
  Target: LAMA2; (-) strand; PAM type: YTN; PAM sequence: TTC
aaatggaagactaatgttat

SEQ ID NO: 259563 - DNA, 20 bp, Artificial Sequence
  Description of Artificial Sequence: Synthetic oligonucleotide
  Target: LAMA2; (-) strand; PAM type: YTN; PAM sequence: TTG
aattcaaatggaagactaat

SEQ ID NO: 259564 - DNA, 20 bp, Artificial Sequence
  Description of Artificial Sequence: Synthetic oligonucleotide
  Target: LAMA2; (-) strand; PAM type: YTN; PAM sequence: CTT
gaattcaaatggaagactaa

SEQ ID NO: 259565 - DNA, 20 bp, Artificial Sequence
  Description of Artificial Sequence: Synthetic oligonucleotide
  Target: LAMA2; (-) strand; PAM type: YTN; PAM sequence: TTC
atgtcaaagaaatgtaagtg

SEQ ID NO: 259566 - DNA, 20 bp, Artificial Sequence
  Description of Artificial Sequence: Synthetic oligonucleotide
  Target: LAMA2; (-) strand; PAM type: YTN; PAM sequence: TTT
catgtcaaagaaatgtaagt

SEQ ID NO: 259567 - DNA, 20 bp, Artificial Sequence
  Description of Artificial Sequence: Synthetic oligonucleotide
  Target: LAMA2; (-) strand; PAM type: YTN; PAM sequence: CTA
gtgcagcgtttcatgtcaaa

SEQ ID NO: 259568 - DNA, 20 bp, Artificial Sequence
  Description of Artificial Sequence: Synthetic oligonucleotide
  Target: LAMA2; (-) strand; PAM type: YTN; PAM sequence: TTC
tagtgcagcgtttcatgtca

SEQ ID NO: 259569 - DNA, 20 bp, Artificial Sequence
  Description of Artificial Sequence: Synthetic oligonucleotide
  Target: LAMA2; (-) strand; PAM type: YTN; PAM sequence: TTT
ctagtgcagcgtttcatgtc

SEQ ID NO: 259570 - DNA, 20 bp, Artificial Sequence
  Description of Artificial Sequence: Synthetic oligonucleotide
  Target: LAMA2; (-) strand; PAM type: YTN; PAM sequence: CTA
agaatatttctagtgcagcg

SEQ ID NO: 259571 - DNA, 20 bp, Artificial Sequence
  Description of Artificial Sequence: Synthetic oligonucleotide
  Target: LAMA2; (-) strand; PAM type: YTN; PAM sequence: CTA
ctaagaatatttctagtgca

SEQ ID NO: 259572 - DNA, 20 bp, Artificial Sequence
  Description of Artificial Sequence: Synthetic oligonucleotide
  Target: LAMA2; (-) strand; PAM type: YTN; PAM sequence: TTG
acccagctactaagaatatt

SEQ ID NO: 259573 - DNA, 20 bp, Artificial Sequence
  Description of Artificial Sequence: Synthetic oligonucleotide
  Target: LAMA2; (-) strand; PAM type: YTN; PAM sequence: TTC
aaagccatccaagacaagga

SEQ ID NO: 259574 - DNA, 20 bp, Artificial Sequence
  Description of Artificial Sequence: Synthetic oligonucleotide
  Target: LAMA2; (-) strand; PAM type: YTN; PAM sequence: CTT
caaagccatccaagacaagg

SEQ ID NO: 259575 - DNA, 20 bp, Artificial Sequence
  Description of Artificial Sequence: Synthetic oligonucleotide
  Target: LAMA2; (-) strand; PAM type: YTN; PAM sequence: TTG
agaatatcttcaaagccatc

SEQ ID NO: 259576 - DNA, 20 bp, Artificial Sequence
  Description of Artificial Sequence: Synthetic oligonucleotide
  Target: LAMA2; (-) strand; PAM type: YTN; PAM sequence: TTT
gagaatatcttcaaagccat

SEQ ID NO: 259577 - DNA, 20 bp, Artificial Sequence
  Description of Artificial Sequence: Synthetic oligonucleotide
  Target: LAMA2; (-) strand; PAM type: YTN; PAM sequence: TTG
caaaaataatgtttgagaat

SEQ ID NO: 259578 - DNA, 20 bp, Artificial Sequence
  Description of Artificial Sequence: Synthetic oligonucleotide
  Target: LAMA2; (-) strand; PAM type: YTN; PAM sequence: TTC
aaagattgcaaaaataatgt

SEQ ID NO: 259579 - DNA, 20 bp, Artificial Sequence
  Description of Artificial Sequence: Synthetic oligonucleotide
  Target: LAMA2; (-) strand; PAM type: YTN; PAM sequence: TTT
caaagattgcaaaaataatg

SEQ ID NO: 259580 - DNA, 20 bp, Artificial Sequence
  Description of Artificial Sequence: Synthetic oligonucleotide
  Target: LAMA2; (-) strand; PAM type: YTN; PAM sequence: TTT
tcaaagattgcaaaaataat

SEQ ID NO: 259581 - DNA, 20 bp, Artificial Sequence
  Description of Artificial Sequence: Synthetic oligonucleotide
  Target: LAMA2; (-) strand; PAM type: YTN; PAM sequence: TTT
ttcaaagattgcaaaaataa

SEQ ID NO: 259582 - DNA, 20 bp, Artificial Sequence
  Description of Artificial Sequence: Synthetic oligonucleotide
  Target: LAMA2; (-) strand; PAM type: YTN; PAM sequence: CTT
tttcaaagattgcaaaaata

SEQ ID NO: 259583 - DNA, 20 bp, Artificial Sequence
  Description of Artificial Sequence: Synthetic oligonucleotide
  Target: LAMA2; (-) strand; PAM type: YTN; PAM sequence: TTG
tactttttcaaagattgcaa

SEQ ID NO: 259584 - DNA, 20 bp, Artificial Sequence
  Description of Artificial Sequence: Synthetic oligonucleotide
  Target: LAMA2; (-) strand; PAM type: YTN; PAM sequence: TTT
gtactttttcaaagattgca

SEQ ID NO: 259585 - DNA, 20 bp, Artificial Sequence
  Description of Artificial Sequence: Synthetic oligonucleotide
  Target: LAMA2; (-) strand; PAM type: YTN; PAM sequence: TTT
tgtactttttcaaagattgc

SEQ ID NO: 259586 - DNA, 20 bp, Artificial Sequence
  Description of Artificial Sequence: Synthetic oligonucleotide
  Target: LAMA2; (-) strand; PAM type: YTN; PAM sequence: CTT
ttgtactttttcaaagattg

SEQ ID NO: 259587 - DNA, 20 bp, Artificial Sequence
  Description of Artificial Sequence: Synthetic oligonucleotide
  Target: LAMA2; (-) strand; PAM type: YTN; PAM sequence: CTA
ccttttgtactttttcaaag

SEQ ID NO: 259588 - DNA, 20 bp, Artificial Sequence
  Description of Artificial Sequence: Synthetic oligonucleotide
  Target: LAMA2; (-) strand; PAM type: YTN; PAM sequence: TTA
tctaccttttgtactttttc

SEQ ID NO: 259589 - DNA, 20 bp, Artificial Sequence
  Description of Artificial Sequence: Synthetic oligonucleotide
  Target: LAMA2; (-) strand; PAM type: YTN; PAM sequence: TTC
aaagggtacaaagttatcta

SEQ ID NO: 259590 - DNA, 20 bp, Artificial Sequence
  Description of Artificial Sequence: Synthetic oligonucleotide
  Target: LAMA2; (-) strand; PAM type: YTN; PAM sequence: CTA
tcatgcaatattcaaagggt

SEQ ID NO: 259591 - DNA, 20 bp, Artificial Sequence
  Description of Artificial Sequence: Synthetic oligonucleotide
  Target: LAMA2; (-) strand; PAM type: YTN; PAM sequence: TTG
ctatcatgcaatattcaaag

SEQ ID NO: 259592 - DNA, 20 bp, Artificial Sequence
  Description of Artificial Sequence: Synthetic oligonucleotide
  Target: LAMA2; (-) strand; PAM type: YTN; PAM sequence: TTG
ttgctatcatgcaatattca

SEQ ID NO: 259593 - DNA, 20 bp, Artificial Sequence
  Description of Artificial Sequence: Synthetic oligonucleotide
  Target: LAMA2; (-) strand; PAM type: YTN; PAM sequence: TTT
gttgctatcatgcaatattc

SEQ ID NO: 259594 - DNA, 20 bp, Artificial Sequence
  Description of Artificial Sequence: Synthetic oligonucleotide
  Target: LAMA2; (-) strand; PAM type: YTN; PAM sequence: TTT
tgttgctatcatgcaatatt

SEQ ID NO: 259595 - DNA, 20 bp, Artificial Sequence
  Description of Artificial Sequence: Synthetic oligonucleotide
  Target: LAMA2; (-) strand; PAM type: YTN; PAM sequence: TTT
ttgttgctatcatgcaatat

SEQ ID NO: 259596 - DNA, 20 bp, Artificial Sequence
  Description of Artificial Sequence: Synthetic oligonucleotide
  Target: LAMA2; (-) strand; PAM type: YTN; PAM sequence: TTC
atttttgttgctatcatgca

SEQ ID NO: 259597 - DNA, 20 bp, Artificial Sequence
  Description of Artificial Sequence: Synthetic oligonucleotide
  Target: LAMA2; (-) strand; PAM type: YTN; PAM sequence: TTT
catttttgttgctatcatgc

SEQ ID NO: 259598 - DNA, 20 bp, Artificial Sequence
  Description of Artificial Sequence: Synthetic oligonucleotide
  Target: LAMA2; (-) strand; PAM type: YTN; PAM sequence: TTT
tcatttttgttgctatcatg

SEQ ID NO: 259599 - DNA, 20 bp, Artificial Sequence
  Description of Artificial Sequence: Synthetic oligonucleotide
  Target: LAMA2; (-) strand; PAM type: YTN; PAM sequence: TTT
ttcatttttgttgctatcat

SEQ ID NO: 259600 - DNA, 20 bp, Artificial Sequence
  Description of Artificial Sequence: Synthetic oligonucleotide
  Target: LAMA2; (-) strand; PAM type: YTN; PAM sequence: CTA
tagatttttcatttttgttg

SEQ ID NO: 259601 - DNA, 20 bp, Artificial Sequence
  Description of Artificial Sequence: Synthetic oligonucleotide
  Target: LAMA2; (-) strand; PAM type: YTN; PAM sequence: TTC
tatagatttttcatttttgt

SEQ ID NO: 259602 - DNA, 20 bp, Artificial Sequence
  Description of Artificial Sequence: Synthetic oligonucleotide
  Target: LAMA2; (-) strand; PAM type: YTN; PAM sequence: TTT
ctatagatttttcatttttg

SEQ ID NO: 259603 - DNA, 20 bp, Artificial Sequence
  Description of Artificial Sequence: Synthetic oligonucleotide
  Target: LAMA2; (-) strand; PAM type: YTN; PAM sequence: TTT
tctatagatttttcattttt

SEQ ID NO: 259604 - DNA, 20 bp, Artificial Sequence
  Description of Artificial Sequence: Synthetic oligonucleotide
  Target: LAMA2; (-) strand; PAM type: YTN; PAM sequence: TTT
ttctatagatttttcatttt

SEQ ID NO: 259605 - DNA, 20 bp, Artificial Sequence
  Description of Artificial Sequence: Synthetic oligonucleotide
  Target: LAMA2; (-) strand; PAM type: YTN; PAM sequence: TTT
tttctatagatttttcattt

SEQ ID NO: 259606 - DNA, 20 bp, Artificial Sequence
  Description of Artificial Sequence: Synthetic oligonucleotide
  Target: LAMA2; (-) strand; PAM type: YTN; PAM sequence: CTT
ttttctatagatttttcatt

SEQ ID NO: 259607 - DNA, 20 bp, Artificial Sequence
  Description of Artificial Sequence: Synthetic oligonucleotide
  Target: LAMA2; (-) strand; PAM type: YTN; PAM sequence: CTG
acttttttctatagattttt

SEQ ID NO: 259608 - DNA, 20 bp, Artificial Sequence
  Description of Artificial Sequence: Synthetic oligonucleotide
  Target: LAMA2; (-) strand; PAM type: YTN; PAM sequence: TTA
ccacctgacttttttctata

SEQ ID NO: 259609 - DNA, 20 bp, Artificial Sequence
  Description of Artificial Sequence: Synthetic oligonucleotide
  Target: LAMA2; (-) strand; PAM type: YTN; PAM sequence: TTT
accacctgacttttttctat

SEQ ID NO: 259610 - DNA, 20 bp, Artificial Sequence
  Description of Artificial Sequence: Synthetic oligonucleotide
  Target: LAMA2; (-) strand; PAM type: YTN; PAM sequence: TTA
tttaccacctgacttttttc

SEQ ID NO: 259611 - DNA, 20 bp, Artificial Sequence
  Description of Artificial Sequence: Synthetic oligonucleotide
  Target: LAMA2; (-) strand; PAM type: YTN; PAM sequence: TTT
atttaccacctgactttttt

SEQ ID NO: 259612 - DNA, 20 bp, Artificial Sequence
  Description of Artificial Sequence: Synthetic oligonucleotide
  Target: LAMA2; (-) strand; PAM type: YTN; PAM sequence: TTT
tatttaccacctgacttttt

SEQ ID NO: 259613 - DNA, 20 bp, Artificial Sequence
  Description of Artificial Sequence: Synthetic oligonucleotide
  Target: LAMA2; (-) strand; PAM type: YTN; PAM sequence: TTT
ttatttaccacctgactttt

SEQ ID NO: 259614 - DNA, 20 bp, Artificial Sequence
  Description of Artificial Sequence: Synthetic oligonucleotide
  Target: LAMA2; (-) strand; PAM type: YTN; PAM sequence: TTC
gatttttatttaccacctga

SEQ ID NO: 259615 - DNA, 20 bp, Artificial Sequence
  Description of Artificial Sequence: Synthetic oligonucleotide
  Target: LAMA2; (-) strand; PAM type: YTN; PAM sequence: TTT
cgatttttatttaccacctg

SEQ ID NO: 259616 - DNA, 20 bp, Artificial Sequence
  Description of Artificial Sequence: Synthetic oligonucleotide
  Target: LAMA2; (-) strand; PAM type: YTN; PAM sequence: CTT
tcgatttttatttaccacct

SEQ ID NO: 259617 - DNA, 20 bp, Artificial Sequence
  Description of Artificial Sequence: Synthetic oligonucleotide
  Target: LAMA2; (-) strand; PAM type: YTN; PAM sequence: TTA
tatataaagatactttcgat

SEQ ID NO: 259618 - DNA, 20 bp, Artificial Sequence
  Description of Artificial Sequence: Synthetic oligonucleotide
  Target: LAMA2; (-) strand; PAM type: YTN; PAM sequence: TTT
atatataaagatactttcga

SEQ ID NO: 259619 - DNA, 20 bp, Artificial Sequence
  Description of Artificial Sequence: Synthetic oligonucleotide
  Target: LAMA2; (-) strand; PAM type: YTN; PAM sequence: CTG
tttatatataaagatacttt

SEQ ID NO: 259620 - DNA, 20 bp, Artificial Sequence
  Description of Artificial Sequence: Synthetic oligonucleotide
  Target: LAMA2; (-) strand; PAM type: YTN; PAM sequence: TTA
tggacactgtttatatataa

SEQ ID NO: 259621 - DNA, 20 bp, Artificial Sequence
  Description of Artificial Sequence: Synthetic oligonucleotide
  Target: LAMA2; (-) strand; PAM type: YTN; PAM sequence: TTG
aattatggacactgtttata

SEQ ID NO: 259622 - DNA, 20 bp, Artificial Sequence
  Description of Artificial Sequence: Synthetic oligonucleotide
  Target: LAMA2; (-) strand; PAM type: YTN; PAM sequence: TTA
aaatggttgaattatggaca

SEQ ID NO: 259623 - DNA, 20 bp, Artificial Sequence
  Description of Artificial Sequence: Synthetic oligonucleotide
  Target: LAMA2; (-) strand; PAM type: YTN; PAM sequence: TTT
aaaatggttgaattatggac

SEQ ID NO: 259624 - DNA, 20 bp, Artificial Sequence
  Description of Artificial Sequence: Synthetic oligonucleotide
  Target: LAMA2; (-) strand; PAM type: YTN; PAM sequence: CTT
taaaatggttgaattatgga

SEQ ID NO: 259625 - DNA, 20 bp, Artificial Sequence
  Description of Artificial Sequence: Synthetic oligonucleotide
  Target: LAMA2; (-) strand; PAM type: YTN; PAM sequence: TTG
caaatactttaaaatggttg

SEQ ID NO: 259626 - DNA, 20 bp, Artificial Sequence
  Description of Artificial Sequence: Synthetic oligonucleotide
  Target: LAMA2; (-) strand; PAM type: YTN; PAM sequence: TTT
gcaaatactttaaaatggtt

SEQ ID NO: 259627 - DNA, 20 bp, Artificial Sequence
  Description of Artificial Sequence: Synthetic oligonucleotide
  Target: LAMA2; (-) strand; PAM type: YTN; PAM sequence: TTT
tgcaaatactttaaaatggt

SEQ ID NO: 259628 - DNA, 20 bp, Artificial Sequence
  Description of Artificial Sequence: Synthetic oligonucleotide
  Target: LAMA2; (-) strand; PAM type: YTN; PAM sequence: TTA
gaaacgcacacaacagaata

SEQ ID NO: 259629 - DNA, 20 bp, Artificial Sequence
  Description of Artificial Sequence: Synthetic oligonucleotide
  Target: LAMA2; (-) strand; PAM type: YTN; PAM sequence: TTC
ggtacatcatgtatatagtt

SEQ ID NO: 259630 - DNA, 20 bp, Artificial Sequence
  Description of Artificial Sequence: Synthetic oligonucleotide
  Target: LAMA2; (-) strand; PAM type: YTN; PAM sequence: TTA
aattcggtacatcatgtata

SEQ ID NO: 259631 - DNA, 20 bp, Artificial Sequence
  Description of Artificial Sequence: Synthetic oligonucleotide
  Target: LAMA2; (-) strand; PAM type: YTN; PAM sequence: CTT
aaattcggtacatcatgtat

SEQ ID NO: 259632 - DNA, 20 bp, Artificial Sequence
  Description of Artificial Sequence: Synthetic oligonucleotide
  Target: LAMA2; (-) strand; PAM type: YTN; PAM sequence: TTC
ttaaattcggtacatcatgt

SEQ ID NO: 259633 - DNA, 20 bp, Artificial Sequence
  Description of Artificial Sequence: Synthetic oligonucleotide
  Target: LAMA2; (-) strand; PAM type: YTN; PAM sequence: CTT
cttaaattcggtacatcatg

SEQ ID NO: 259634 - DNA, 20 bp, Artificial Sequence
  Description of Artificial Sequence: Synthetic oligonucleotide
  Target: LAMA2; (-) strand; PAM type: YTN; PAM sequence: TTA
ataagcttcttaaattcggt

SEQ ID NO: 259635 - DNA, 20 bp, Artificial Sequence
  Description of Artificial Sequence: Synthetic oligonucleotide
  Target: LAMA2; (-) strand; PAM type: YTN; PAM sequence: CTT
aataagcttcttaaattcgg

SEQ ID NO: 259636 - DNA, 20 bp, Artificial Sequence
  Description of Artificial Sequence: Synthetic oligonucleotide
  Target: LAMA2; (-) strand; PAM type: YTN; PAM sequence: CTG
cagtaaaaaccaataagctt

SEQ ID NO: 259637 - DNA, 20 bp, Artificial Sequence
  Description of Artificial Sequence: Synthetic oligonucleotide
  Target: LAMA2; (-) strand; PAM type: YTN; PAM sequence: TTG
atgagcccgatctgcagtaa

SEQ ID NO: 259638 - DNA, 20 bp, Artificial Sequence
  Description of Artificial Sequence: Synthetic oligonucleotide
  Target: LAMA2; (-) strand; PAM type: YTN; PAM sequence: CTT
gatgagcccgatctgcagta

SEQ ID NO: 259639 - DNA, 20 bp, Artificial Sequence
  Description of Artificial Sequence: Synthetic oligonucleotide
  Target: LAMA2; (-) strand; PAM type: YTN; PAM sequence: TTC
cttgatgagcccgatctgca

SEQ ID NO: 259640 - DNA, 20 bp, Artificial Sequence
  Description of Artificial Sequence: Synthetic oligonucleotide
  Target: LAMA2; (-) strand; PAM type: YTN; PAM sequence: TTT
ccttgatgagcccgatctgc

SEQ ID NO: 259641 - DNA, 20 bp, Artificial Sequence
  Description of Artificial Sequence: Synthetic oligonucleotide
  Target: LAMA2; (-) strand; PAM type: YTN; PAM sequence: TTT
tccttgatgagcccgatctg

SEQ ID NO: 259642 - DNA, 20 bp, Artificial Sequence
  Description of Artificial Sequence: Synthetic oligonucleotide
  Target: LAMA2; (-) strand; PAM type: YTN; PAM sequence: TTT
ttccttgatgagcccgatct

SEQ ID NO: 259643 - DNA, 20 bp, Artificial Sequence
  Description of Artificial Sequence: Synthetic oligonucleotide
  Target: LAMA2; (-) strand; PAM type: YTN; PAM sequence: TTA
gtttttccttgatgagcccg

SEQ ID NO: 259644 - DNA, 20 bp, Artificial Sequence
  Description of Artificial Sequence: Synthetic oligonucleotide
  Target: LAMA2; (-) strand; PAM type: YTN; PAM sequence: CTG
tacggattagtttttccttg

SEQ ID NO: 259645 - DNA, 20 bp, Artificial Sequence
  Description of Artificial Sequence: Synthetic oligonucleotide
  Target: LAMA2; (-) strand; PAM type: YTN; PAM sequence: TTA
tgctgtacggattagttttt

SEQ ID NO: 259646 - DNA, 20 bp, Artificial Sequence
  Description of Artificial Sequence: Synthetic oligonucleotide
  Target: LAMA2; (-) strand; PAM type: YTN; PAM sequence: TTT
atgctgtacggattagtttt

SEQ ID NO: 259647 - DNA, 20 bp, Artificial Sequence
  Description of Artificial Sequence: Synthetic oligonucleotide
  Target: LAMA2; (-) strand; PAM type: YTN; PAM sequence: TTG
tttatgctgtacggattagt

SEQ ID NO: 259648 - DNA, 20 bp, Artificial Sequence
  Description of Artificial Sequence: Synthetic oligonucleotide
  Target: LAMA2; (-) strand; PAM type: YTN; PAM sequence: TTT
gtttatgctgtacggattag

SEQ ID NO: 259649 - DNA, 20 bp, Artificial Sequence
  Description of Artificial Sequence: Synthetic oligonucleotide
  Target: LAMA2; (-) strand; PAM type: YTN; PAM sequence: CTA
atttgtttatgctgtacgga

SEQ ID NO: 259650 - DNA, 20 bp, Artificial Sequence
  Description of Artificial Sequence: Synthetic oligonucleotide
  Target: LAMA2; (-) strand; PAM type: YTN; PAM sequence: TTC
taatttgtttatgctgtacg

SEQ ID NO: 259651 - DNA, 20 bp, Artificial Sequence
  Description of Artificial Sequence: Synthetic oligonucleotide
  Target: LAMA2; (-) strand; PAM type: YTN; PAM sequence: TTT
ctaatttgtttatgctgtac

SEQ ID NO: 259652 - DNA, 20 bp, Artificial Sequence
  Description of Artificial Sequence: Synthetic oligonucleotide
  Target: LAMA2; (-) strand; PAM type: YTN; PAM sequence: TTC
atttctaatttgtttatgct

SEQ ID NO: 259653 - DNA, 20 bp, Artificial Sequence
  Description of Artificial Sequence: Synthetic oligonucleotide
  Target: LAMA2; (-) strand; PAM type: YTN; PAM sequence: TTA
agttcatttctaatttgttt

SEQ ID NO: 259654 - DNA, 20 bp, Artificial Sequence
  Description of Artificial Sequence: Synthetic oligonucleotide
  Target: LAMA2; (-) strand; PAM type: YTN; PAM sequence: TTT
aagttcatttctaatttgtt

SEQ ID NO: 259655 - DNA, 20 bp, Artificial Sequence
  Description of Artificial Sequence: Synthetic oligonucleotide
  Target: LAMA2; (-) strand; PAM type: YTN; PAM sequence: TTT
taagttcatttctaatttgt

SEQ ID NO: 259656 - DNA, 20 bp, Artificial Sequence
  Description of Artificial Sequence: Synthetic oligonucleotide
  Target: LAMA2; (-) strand; PAM type: YTN; PAM sequence: TTA
ttttaagttcatttctaatt

SEQ ID NO: 259657 - DNA, 20 bp, Artificial Sequence
  Description of Artificial Sequence: Synthetic oligonucleotide
  Target: LAMA2; (-) strand; PAM type: YTN; PAM sequence: TTT
attttaagttcatttctaat

SEQ ID NO: 259658 - DNA, 20 bp, Artificial Sequence
  Description of Artificial Sequence: Synthetic oligonucleotide
  Target: LAMA2; (-) strand; PAM type: YTN; PAM sequence: TTG
tatatttattttaagttcat

SEQ ID NO: 259659 - DNA, 20 bp, Artificial Sequence
  Description of Artificial Sequence: Synthetic oligonucleotide
  Target: LAMA2; (-) strand; PAM type: YTN; PAM sequence: TTT
gtatatttattttaagttca

SEQ ID NO: 259660 - DNA, 20 bp, Artificial Sequence
  Description of Artificial Sequence: Synthetic oligonucleotide
  Target: LAMA2; (-) strand; PAM type: YTN; PAM sequence: TTG
tttgtatatttattttaagt

SEQ ID NO: 259661 - DNA, 20 bp, Artificial Sequence
  Description of Artificial Sequence: Synthetic oligonucleotide
  Target: LAMA2; (-) strand; PAM type: YTN; PAM sequence: TTT
gtttgtatatttattttaag

SEQ ID NO: 259662 - DNA, 20 bp, Artificial Sequence
  Description of Artificial Sequence: Synthetic oligonucleotide
  Target: LAMA2; (-) strand; PAM type: YTN; PAM sequence: TTT
tgtttgtatatttattttaa

SEQ ID NO: 259663 - DNA, 20 bp, Artificial Sequence
  Description of Artificial Sequence: Synthetic oligonucleotide
  Target: LAMA2; (-) strand; PAM type: YTN; PAM sequence: CTA
ttttgtttgtatatttattt

SEQ ID NO: 259664 - DNA, 20 bp, Artificial Sequence
  Description of Artificial Sequence: Synthetic oligonucleotide
  Target: LAMA2; (-) strand; PAM type: YTN; PAM sequence: TTA
ctattttgtttgtatattta

SEQ ID NO: 259665 - DNA, 20 bp, Artificial Sequence
  Description of Artificial Sequence: Synthetic oligonucleotide
  Target: LAMA2; (-) strand; PAM type: YTN; PAM sequence: TTT
actattttgtttgtatattt

SEQ ID NO: 259666 - DNA, 20 bp, Artificial Sequence
  Description of Artificial Sequence: Synthetic oligonucleotide
  Target: LAMA2; (-) strand; PAM type: YTN; PAM sequence: CTA
caaagtttactattttgttt

SEQ ID NO: 259667 - DNA, 20 bp, Artificial Sequence
  Description of Artificial Sequence: Synthetic oligonucleotide
  Target: LAMA2; (-) strand; PAM type: YTN; PAM sequence: TTC
gggtactacaaagtttacta

SEQ ID NO: 259668 - DNA, 20 bp, Artificial Sequence
  Description of Artificial Sequence: Synthetic oligonucleotide
  Target: LAMA2; (-) strand; PAM type: YTN; PAM sequence: TTA
tattcgggtactacaaagtt

SEQ ID NO: 259669 - DNA, 20 bp, Artificial Sequence
  Description of Artificial Sequence: Synthetic oligonucleotide
  Target: LAMA2; (-) strand; PAM type: YTN; PAM sequence: CTT
atattcgggtactacaaagt

SEQ ID NO: 259670 - DNA, 20 bp, Artificial Sequence
  Description of Artificial Sequence: Synthetic oligonucleotide
  Target: LAMA2; (-) strand; PAM type: YTN; PAM sequence: CTG
taacaccttatattcgggta

SEQ ID NO: 259671 - DNA, 20 bp, Artificial Sequence
  Description of Artificial Sequence: Synthetic oligonucleotide
  Target: LAMA2; (-) strand; PAM type: YTN; PAM sequence: TTA
actgtaacaccttatattcg

SEQ ID NO: 259672 - DNA, 20 bp, Artificial Sequence
  Description of Artificial Sequence: Synthetic oligonucleotide
  Target: LAMA2; (-) strand; PAM type: YTN; PAM sequence: TTC
catgttaactgtaacacctt

SEQ ID NO: 259673 - DNA, 20 bp, Artificial Sequence
  Description of Artificial Sequence: Synthetic oligonucleotide
  Target: LAMA2; (-) strand; PAM type: YTN; PAM sequence: TTA
tcagattccatgttaactgt

SEQ ID NO: 259674 - DNA, 20 bp, Artificial Sequence
  Description of Artificial Sequence: Synthetic oligonucleotide
  Target: LAMA2; (-) strand; PAM type: YTN; PAM sequence: TTG
gtgttatcagattccatgtt

SEQ ID NO: 259675 - DNA, 20 bp, Artificial Sequence
  Description of Artificial Sequence: Synthetic oligonucleotide
  Target: LAMA2; (-) strand; PAM type: YTN; PAM sequence: TTA
agaaaggaaagaattggtgt

SEQ ID NO: 259676 - DNA, 20 bp, Artificial Sequence
  Description of Artificial Sequence: Synthetic oligonucleotide
  Target: LAMA2; (-) strand; PAM type: YTN; PAM sequence: TTT
aagaaaggaaagaattggtg

SEQ ID NO: 259677 - DNA, 20 bp, Artificial Sequence
  Description of Artificial Sequence: Synthetic oligonucleotide
  Target: LAMA2; (-) strand; PAM type: YTN; PAM sequence: CTA
tgaagtttaagaaaggaaag

SEQ ID NO: 259678 - DNA, 20 bp, Artificial Sequence
  Description of Artificial Sequence: Synthetic oligonucleotide
  Target: LAMA2; (-) strand; PAM type: YTN; PAM sequence: TTC
ctatgaagtttaagaaagga

SEQ ID NO: 259679 - DNA, 20 bp, Artificial Sequence
  Description of Artificial Sequence: Synthetic oligonucleotide
  Target: LAMA2; (-) strand; PAM type: YTN; PAM sequence: TTT
cctatgaagtttaagaaagg

SEQ ID NO: 259680 - DNA, 20 bp, Artificial Sequence
  Description of Artificial Sequence: Synthetic oligonucleotide
  Target: LAMA2; (-) strand; PAM type: YTN; PAM sequence: CTT
tcctatgaagtttaagaaag

SEQ ID NO: 259681 - DNA, 20 bp, Artificial Sequence
  Description of Artificial Sequence: Synthetic oligonucleotide
  Target: LAMA2; (-) strand; PAM type: YTN; PAM sequence: TTA
gctttcctatgaagtttaag

SEQ ID NO: 259682 - DNA, 20 bp, Artificial Sequence
  Description of Artificial Sequence: Synthetic oligonucleotide
  Target: LAMA2; (-) strand; PAM type: YTN; PAM sequence: TTT
agctttcctatgaagtttaa

SEQ ID NO: 259683 - DNA, 20 bp, Artificial Sequence
  Description of Artificial Sequence: Synthetic oligonucleotide
  Target: LAMA2; (-) strand; PAM type: YTN; PAM sequence: TTT
tagctttcctatgaagttta

SEQ ID NO: 259684 - DNA, 20 bp, Artificial Sequence
  Description of Artificial Sequence: Synthetic oligonucleotide
  Target: LAMA2; (-) strand; PAM type: YTN; PAM sequence: TTT
ttagctttcctatgaagttt

SEQ ID NO: 259685 - DNA, 20 bp, Artificial Sequence
  Description of Artificial Sequence: Synthetic oligonucleotide
  Target: LAMA2; (-) strand; PAM type: YTN; PAM sequence: TTA
aagtatttttagctttccta

SEQ ID NO: 259686 - DNA, 20 bp, Artificial Sequence
  Description of Artificial Sequence: Synthetic oligonucleotide
  Target: LAMA2; (-) strand; PAM type: YTN; PAM sequence: TTC
aaaagttaaagtatttttag

SEQ ID NO: 259687 - DNA, 20 bp, Artificial Sequence
  Description of Artificial Sequence: Synthetic oligonucleotide
  Target: LAMA2; (-) strand; PAM type: YTN; PAM sequence: TTT
caaaagttaaagtattttta

SEQ ID NO: 259688 - DNA, 20 bp, Artificial Sequence
  Description of Artificial Sequence: Synthetic oligonucleotide
  Target: LAMA2; (-) strand; PAM type: YTN; PAM sequence: TTA
atttcaaaagttaaagtatt

SEQ ID NO: 259689 - DNA, 20 bp, Artificial Sequence
  Description of Artificial Sequence: Synthetic oligonucleotide
  Target: LAMA2; (-) strand; PAM type: YTN; PAM sequence: TTA
ttaatttcaaaagttaaagt

SEQ ID NO: 259690 - DNA, 20 bp, Artificial Sequence
  Description of Artificial Sequence: Synthetic oligonucleotide
  Target: LAMA2; (-) strand; PAM type: YTN; PAM sequence: TTT
attaatttcaaaagttaaag

SEQ ID NO: 259691 - DNA, 20 bp, Artificial Sequence
  Description of Artificial Sequence: Synthetic oligonucleotide
  Target: LAMA2; (-) strand; PAM type: YTN; PAM sequence: TTC
atttattaatttcaaaagtt

SEQ ID NO: 259692 - DNA, 20 bp, Artificial Sequence
  Description of Artificial Sequence: Synthetic oligonucleotide
  Target: LAMA2; (-) strand; PAM type: YTN; PAM sequence: TTT
catttattaatttcaaaagt

SEQ ID NO: 259693 - DNA, 20 bp, Artificial Sequence
  Description of Artificial Sequence: Synthetic oligonucleotide
  Target: LAMA2; (-) strand; PAM type: YTN; PAM sequence: TTC
aataaatataagatgtattt

SEQ ID NO: 259694 - DNA, 20 bp, Artificial Sequence
  Description of Artificial Sequence: Synthetic oligonucleotide
  Target: LAMA2; (-) strand; PAM type: YTN; PAM sequence: CTG
ttcaataaatataagatgta

SEQ ID NO: 259695 - DNA, 20 bp, Artificial Sequence
  Description of Artificial Sequence: Synthetic oligonucleotide
  Target: LAMA2; (-) strand; PAM type: YTN; PAM sequence: TTC
agaaaggagctgttcaataa

SEQ ID NO: 259696 - DNA, 20 bp, Artificial Sequence
  Description of Artificial Sequence: Synthetic oligonucleotide
  Target: LAMA2; (-) strand; PAM type: YTN; PAM sequence: TTT
cagaaaggagctgttcaata

SEQ ID NO: 259697 - DNA, 20 bp, Artificial Sequence
  Description of Artificial Sequence: Synthetic oligonucleotide
  Target: LAMA2; (-) strand; PAM type: YTN; PAM sequence: TTA
tagtacaatgtatttcagaa

SEQ ID NO: 259698 - DNA, 20 bp, Artificial Sequence
  Description of Artificial Sequence: Synthetic oligonucleotide
  Target: LAMA2; (-) strand; PAM type: YTN; PAM sequence: TTA
tattatagtacaatgtattt

SEQ ID NO: 259699 - DNA, 20 bp, Artificial Sequence
  Description of Artificial Sequence: Synthetic oligonucleotide
  Target: LAMA2; (-) strand; PAM type: YTN; PAM sequence: TTT
atattatagtacaatgtatt

SEQ ID NO: 259700 - DNA, 20 bp, Artificial Sequence
  Description of Artificial Sequence: Synthetic oligonucleotide
  Target: LAMA2; (-) strand; PAM type: YTN; PAM sequence: TTT
tatattatagtacaatgtat

SEQ ID NO: 259701 - DNA, 20 bp, Artificial Sequence
  Description of Artificial Sequence: Synthetic oligonucleotide
  Target: LAMA2; (-) strand; PAM type: YTN; PAM sequence: CTT
ttatattatagtacaatgta

SEQ ID NO: 259702 - DNA, 20 bp, Artificial Sequence
  Description of Artificial Sequence: Synthetic oligonucleotide
  Target: LAMA2; (-) strand; PAM type: YTN; PAM sequence: TTC
atcttttatattatagtaca

SEQ ID NO: 259703 - DNA, 20 bp, Artificial Sequence
  Description of Artificial Sequence: Synthetic oligonucleotide
  Target: LAMA2; (-) strand; PAM type: YTN; PAM sequence: TTC
attcatcttttatattatag

SEQ ID NO: 259704 - DNA, 20 bp, Artificial Sequence
  Description of Artificial Sequence: Synthetic oligonucleotide
  Target: LAMA2; (-) strand; PAM type: YTN; PAM sequence: CTT
cattcatcttttatattata

SEQ ID NO: 259705 - DNA, 20 bp, Artificial Sequence
  Description of Artificial Sequence: Synthetic oligonucleotide
  Target: LAMA2; (-) strand; PAM type: YTN; PAM sequence: TTA
cttcattcatcttttatatt

SEQ ID NO: 259706 - DNA, 20 bp, Artificial Sequence
  Description of Artificial Sequence: Synthetic oligonucleotide
  Target: LAMA2; (-) strand; PAM type: YTN; PAM sequence: CTT
acttcattcatcttttatat

SEQ ID NO: 259707 - DNA, 20 bp, Artificial Sequence
  Description of Artificial Sequence: Synthetic oligonucleotide
  Target: LAMA2; (-) strand; PAM type: YTN; PAM sequence: TTG
gaaataaaaacttacttcat

SEQ ID NO: 259708 - DNA, 20 bp, Artificial Sequence
  Description of Artificial Sequence: Synthetic oligonucleotide
  Target: LAMA2; (-) strand; PAM type: YTN; PAM sequence: TTT
ggaaataaaaacttacttca

SEQ ID NO: 259709 - DNA, 20 bp, Artificial Sequence
  Description of Artificial Sequence: Synthetic oligonucleotide
  Target: LAMA2; (-) strand; PAM type: YTN; PAM sequence: TTA
aggatatttggaaataaaaa

SEQ ID NO: 259710 - DNA, 20 bp, Artificial Sequence
  Description of Artificial Sequence: Synthetic oligonucleotide
  Target: LAMA2; (-) strand; PAM type: YTN; PAM sequence: CTT
aaggatatttggaaataaaa

SEQ ID NO: 259711 - DNA, 20 bp, Artificial Sequence
  Description of Artificial Sequence: Synthetic oligonucleotide
  Target: LAMA2; (-) strand; PAM type: YTN; PAM sequence: CTA
cacttaaggatatttggaaa

SEQ ID NO: 259712 - DNA, 20 bp, Artificial Sequence
  Description of Artificial Sequence: Synthetic oligonucleotide
  Target: LAMA2; (-) strand; PAM type: YTN; PAM sequence: TTC
tacacttaaggatatttgga

SEQ ID NO: 259713 - DNA, 20 bp, Artificial Sequence
  Description of Artificial Sequence: Synthetic oligonucleotide
  Target: LAMA2; (-) strand; PAM type: YTN; PAM sequence: TTC
agttctacacttaaggatat

SEQ ID NO: 259714 - DNA, 20 bp, Artificial Sequence
  Description of Artificial Sequence: Synthetic oligonucleotide
  Target: LAMA2; (-) strand; PAM type: YTN; PAM sequence: TTT
cagttctacacttaaggata

SEQ ID NO: 259715 - DNA, 20 bp, Artificial Sequence
  Description of Artificial Sequence: Synthetic oligonucleotide
  Target: LAMA2; (-) strand; PAM type: YTN; PAM sequence: TTT
tcagttctacacttaaggat

SEQ ID NO: 259716 - DNA, 20 bp, Artificial Sequence
  Description of Artificial Sequence: Synthetic oligonucleotide
  Target: LAMA2; (-) strand; PAM type: YTN; PAM sequence: CTT
ttcagttctacacttaagga

SEQ ID NO: 259717 - DNA, 20 bp, Artificial Sequence
  Description of Artificial Sequence: Synthetic oligonucleotide
  Target: LAMA2; (-) strand; PAM type: YTN; PAM sequence: TTC
ttttcagttctacacttaag

SEQ ID NO: 259718 - DNA, 20 bp, Artificial Sequence
  Description of Artificial Sequence: Synthetic oligonucleotide
  Target: LAMA2; (-) strand; PAM type: YTN; PAM sequence: TTT
cttttcagttctacacttaa

SEQ ID NO: 259719 - DNA, 20 bp, Artificial Sequence
  Description of Artificial Sequence: Synthetic oligonucleotide
  Target: LAMA2; (-) strand; PAM type: YTN; PAM sequence: TTT
tcttttcagttctacactta

SEQ ID NO: 259720 - DNA, 20 bp, Artificial Sequence
  Description of Artificial Sequence: Synthetic oligonucleotide
  Target: LAMA2; (-) strand; PAM type: YTN; PAM sequence: TTA
ttttcttttcagttctacac

SEQ ID NO: 259721 - DNA, 20 bp, Artificial Sequence
  Description of Artificial Sequence: Synthetic oligonucleotide
  Target: LAMA2; (-) strand; PAM type: YTN; PAM sequence: CTT
attttcttttcagttctaca

SEQ ID NO: 259722 - DNA, 20 bp, Artificial Sequence
  Description of Artificial Sequence: Synthetic oligonucleotide
  Target: LAMA2; (-) strand; PAM type: YTN; PAM sequence: TTG
tcttattttcttttcagttc

SEQ ID NO: 259723 - DNA, 20 bp, Artificial Sequence
  Description of Artificial Sequence: Synthetic oligonucleotide
  Target: LAMA2; (-) strand; PAM type: YTN; PAM sequence: TTT
gtcttattttcttttcagtt

SEQ ID NO: 259724 - DNA, 20 bp, Artificial Sequence
  Description of Artificial Sequence: Synthetic oligonucleotide
  Target: LAMA2; (-) strand; PAM type: YTN; PAM sequence: TTG
gtttgtcttattttcttttc

SEQ ID NO: 259725 - DNA, 20 bp, Artificial Sequence
  Description of Artificial Sequence: Synthetic oligonucleotide
  Target: LAMA2; (-) strand; PAM type: YTN; PAM sequence: TTG
tgttggtttgtcttattttc

SEQ ID NO: 259726 - DNA, 20 bp, Artificial Sequence
  Description of Artificial Sequence: Synthetic oligonucleotide
  Target: LAMA2; (-) strand; PAM type: YTN; PAM sequence: TTA
tattgtgttggtttgtctta

SEQ ID NO: 259727 - DNA, 20 bp, Artificial Sequence
  Description of Artificial Sequence: Synthetic oligonucleotide
  Target: LAMA2; (-) strand; PAM type: YTN; PAM sequence: TTT
atattgtgttggtttgtctt

SEQ ID NO: 259728 - DNA, 20 bp, Artificial Sequence
  Description of Artificial Sequence: Synthetic oligonucleotide
  Target: LAMA2; (-) strand; PAM type: YTN; PAM sequence: TTT
tatattgtgttggtttgtct

SEQ ID NO: 259729 - DNA, 20 bp, Artificial Sequence
  Description of Artificial Sequence: Synthetic oligonucleotide
  Target: LAMA2; (-) strand; PAM type: YTN; PAM sequence: TTG
agttttatattgtgttggtt

SEQ ID NO: 259730 - DNA, 20 bp, Artificial Sequence
  Description of Artificial Sequence: Synthetic oligonucleotide
  Target: LAMA2; (-) strand; PAM type: YTN; PAM sequence: TTG
acacaaagtgttgagtttta

SEQ ID NO: 259731 - DNA, 20 bp, Artificial Sequence
  Description of Artificial Sequence: Synthetic oligonucleotide
  Target: LAMA2; (-) strand; PAM type: YTN; PAM sequence: TTT
gacacaaagtgttgagtttt

SEQ ID NO: 259732 - DNA, 20 bp, Artificial Sequence
  Description of Artificial Sequence: Synthetic oligonucleotide
  Target: LAMA2; (-) strand; PAM type: YTN; PAM sequence: TTC
accggtataagagggaaaac

SEQ ID NO: 259733 - DNA, 20 bp, Artificial Sequence
  Description of Artificial Sequence: Synthetic oligonucleotide
  Target: LAMA2; (-) strand; PAM type: YTN; PAM sequence: CTT
caccggtataagagggaaaa

SEQ ID NO: 259734 - DNA, 20 bp, Artificial Sequence
  Description of Artificial Sequence: Synthetic oligonucleotide
  Target: LAMA2; (-) strand; PAM type: YTN; PAM sequence: TTC
acaagcttcaccggtataag

SEQ ID NO: 259735 - DNA, 20 bp, Artificial Sequence
  Description of Artificial Sequence: Synthetic oligonucleotide
  Target: LAMA2; (-) strand; PAM type: YTN; PAM sequence: TTA
cccagatgagaacattcaca

SEQ ID NO: 259736 - DNA, 20 bp, Artificial Sequence
  Description of Artificial Sequence: Synthetic oligonucleotide
  Target: LAMA2; (-) strand; PAM type: YTN; PAM sequence: TTA
ttacccagatgagaacattc

SEQ ID NO: 259737 - DNA, 20 bp, Artificial Sequence
  Description of Artificial Sequence: Synthetic oligonucleotide
  Target: LAMA2; (-) strand; PAM type: YTN; PAM sequence: TTG
ggtcacaattattacccaga

SEQ ID NO: 259738 - DNA, 20 bp, Artificial Sequence
  Description of Artificial Sequence: Synthetic oligonucleotide
  Target: LAMA2; (-) strand; PAM type: YTN; PAM sequence: TTT
gggtcacaattattacccag

SEQ ID NO: 259739 - DNA, 20 bp, Artificial Sequence
  Description of Artificial Sequence: Synthetic oligonucleotide
  Target: LAMA2; (-) strand; PAM type: YTN; PAM sequence: CTT
tgggtcacaattattaccca

SEQ ID NO: 259740 - DNA, 20 bp, Artificial Sequence
  Description of Artificial Sequence: Synthetic oligonucleotide
  Target: LAMA2; (-) strand; PAM type: YTN; PAM sequence: TTG
ggagggcaaatgcatcgccc

SEQ ID NO: 259741 - DNA, 20 bp, Artificial Sequence
  Description of Artificial Sequence: Synthetic oligonucleotide
  Target: LAMA2; (-) strand; PAM type: YTN; PAM sequence: CTC
caatggtattgggagggcaa

SEQ ID NO: 259742 - DNA, 20 bp, Artificial Sequence
  Description of Artificial Sequence: Synthetic oligonucleotide
  Target: LAMA2; (-) strand; PAM type: YTN; PAM sequence: CTC
tccaatggtattgggagggc

SEQ ID NO: 259743 - DNA, 20 bp, Artificial Sequence
  Description of Artificial Sequence: Synthetic oligonucleotide
  Target: LAMA2; (-) strand; PAM type: YTN; PAM sequence: TTC
tctccaatggtattgggagg

SEQ ID NO: 259744 - DNA, 20 bp, Artificial Sequence
  Description of Artificial Sequence: Synthetic oligonucleotide
  Target: LAMA2; (-) strand; PAM type: YTN; PAM sequence: TTT
ctctccaatggtattgggag

SEQ ID NO: 259745 - DNA, 20 bp, Artificial Sequence
  Description of Artificial Sequence: Synthetic oligonucleotide
  Target: LAMA2; (-) strand; PAM type: YTN; PAM sequence: TTA
gaacatttctctccaatggt

SEQ ID NO: 259746 - DNA, 20 bp, Artificial Sequence
  Description of Artificial Sequence: Synthetic oligonucleotide
  Target: LAMA2; (-) strand; PAM type: YTN; PAM sequence: TTT
agaacatttctctccaatgg

SEQ ID NO: 259747 - DNA, 20 bp, Artificial Sequence
  Description of Artificial Sequence: Synthetic oligonucleotide
  Target: LAMA2; (-) strand; PAM type: YTN; PAM sequence: TTG
ggtgcacatttagaacattt

SEQ ID NO: 259748 - DNA, 20 bp, Artificial Sequence
  Description of Artificial Sequence: Synthetic oligonucleotide
  Target: LAMA2; (-) strand; PAM type: YTN; PAM sequence: CTG
tggccccaggtattgggtgc

SEQ ID NO: 259749 - DNA, 20 bp, Artificial Sequence
  Description of Artificial Sequence: Synthetic oligonucleotide
  Target: LAMA2; (-) strand; PAM type: YTN; PAM sequence: TTA
caaccagtggtaatgctgtg

SEQ ID NO: 259750 - DNA, 20 bp, Artificial Sequence
  Description of Artificial Sequence: Synthetic oligonucleotide
  Target: LAMA2; (-) strand; PAM type: YTN; PAM sequence: CTT
acaaccagtggtaatgctgt

SEQ ID NO: 259751 - DNA, 20 bp, Artificial Sequence
  Description of Artificial Sequence: Synthetic oligonucleotide
  Target: LAMA2; (-) strand; PAM type: YTN; PAM sequence: CTC
accttacaaccagtggtaat

SEQ ID NO: 259752 - DNA, 20 bp, Artificial Sequence
  Description of Artificial Sequence: Synthetic oligonucleotide
  Target: LAMA2; (-) strand; PAM type: YTN; PAM sequence: TTC
actcaccttacaaccagtgg

SEQ ID NO: 259753 - DNA, 20 bp, Artificial Sequence
  Description of Artificial Sequence: Synthetic oligonucleotide
  Target: LAMA2; (-) strand; PAM type: YTN; PAM sequence: TTA
tcagagcaaaaaagtggttc

SEQ ID NO: 259754 - DNA, 20 bp, Artificial Sequence
  Description of Artificial Sequence: Synthetic oligonucleotide
  Target: LAMA2; (-) strand; PAM type: YTN; PAM sequence: CTC
caaaaaattatcagagcaaa

SEQ ID NO: 259755 - DNA, 20 bp, Artificial Sequence
  Description of Artificial Sequence: Synthetic oligonucleotide
  Target: LAMA2; (-) strand; PAM type: YTN; PAM sequence: CTC
tccaaaaaattatcagagca

SEQ ID NO: 259756 - DNA, 20 bp, Artificial Sequence
  Description of Artificial Sequence: Synthetic oligonucleotide
  Target: LAMA2; (-) strand; PAM type: YTN; PAM sequence: CTA
caaaacaaaaatctctccaa

SEQ ID NO: 259757 - DNA, 20 bp, Artificial Sequence
  Description of Artificial Sequence: Synthetic oligonucleotide
  Target: LAMA2; (-) strand; PAM type: YTN; PAM sequence: CTC
tacaaaacaaaaatctctcc

SEQ ID NO: 259758 - DNA, 20 bp, Artificial Sequence
  Description of Artificial Sequence: Synthetic oligonucleotide
  Target: LAMA2; (-) strand; PAM type: YTN; PAM sequence: TTA
cagagctctacaaaacaaaa

SEQ ID NO: 259759 - DNA, 20 bp, Artificial Sequence
  Description of Artificial Sequence: Synthetic oligonucleotide
  Target: LAMA2; (-) strand; PAM type: YTN; PAM sequence: TTG
aaatgcccaattacagagct

SEQ ID NO: 259760 - DNA, 20 bp, Artificial Sequence
  Description of Artificial Sequence: Synthetic oligonucleotide
  Target: LAMA2; (-) strand; PAM type: YTN; PAM sequence: TTT
gaaatgcccaattacagagc

SEQ ID NO: 259761 - DNA, 20 bp, Artificial Sequence
  Description of Artificial Sequence: Synthetic oligonucleotide
  Target: LAMA2; (-) strand; PAM type: YTN; PAM sequence: TTT
tgaaatgcccaattacagag

SEQ ID NO: 259762 - DNA, 20 bp, Artificial Sequence
  Description of Artificial Sequence: Synthetic oligonucleotide
  Target: LAMA2; (-) strand; PAM type: YTN; PAM sequence: TTG
aattttgaaatgcccaatta

SEQ ID NO: 259763 - DNA, 20 bp, Artificial Sequence
  Description of Artificial Sequence: Synthetic oligonucleotide
  Target: LAMA2; (-) strand; PAM type: YTN; PAM sequence: TTG
tgatgtaatattgaattttg

SEQ ID NO: 259764 - DNA, 20 bp, Artificial Sequence
  Description of Artificial Sequence: Synthetic oligonucleotide
  Target: LAMA2; (-) strand; PAM type: YTN; PAM sequence: TTT
gtgatgtaatattgaatttt

SEQ ID NO: 259765 - DNA, 20 bp, Artificial Sequence
  Description of Artificial Sequence: Synthetic oligonucleotide
  Target: LAMA2; (-) strand; PAM type: YTN; PAM sequence: TTT
tgtgatgtaatattgaattt

SEQ ID NO: 259766 - DNA, 20 bp, Artificial Sequence
  Description of Artificial Sequence: Synthetic oligonucleotide
  Target: LAMA2; (-) strand; PAM type: YTN; PAM sequence: TTA
ttttgtgatgtaatattgaa

SEQ ID NO: 259767 - DNA, 20 bp, Artificial Sequence
  Description of Artificial Sequence: Synthetic oligonucleotide
  Target: LAMA2; (-) strand; PAM type: YTN; PAM sequence: CTA
cattattttgtgatgtaata

SEQ ID NO: 259768 - DNA, 20 bp, Artificial Sequence
  Description of Artificial Sequence: Synthetic oligonucleotide
  Target: LAMA2; (-) strand; PAM type: YTN; PAM sequence: TTC
tacattattttgtgatgtaa

SEQ ID NO: 259769 - DNA, 20 bp, Artificial Sequence
  Description of Artificial Sequence: Synthetic oligonucleotide
  Target: LAMA2; (-) strand; PAM type: YTN; PAM sequence: CTT
ctacattattttgtgatgta

SEQ ID NO: 259770 - DNA, 20 bp, Artificial Sequence
  Description of Artificial Sequence: Synthetic oligonucleotide
  Target: LAMA2; (-) strand; PAM type: YTN; PAM sequence: TTA
tagtaatacttctacattat

SEQ ID NO: 259771 - DNA, 20 bp, Artificial Sequence
  Description of Artificial Sequence: Synthetic oligonucleotide
  Target: LAMA2; (-) strand; PAM type: YTN; PAM sequence: CTG
taatcacattatagtaatac

SEQ ID NO: 259772 - DNA, 20 bp, Artificial Sequence
  Description of Artificial Sequence: Synthetic oligonucleotide
  Target: LAMA2; (-) strand; PAM type: YTN; PAM sequence: TTA
atatctgtaatcacattata

SEQ ID NO: 259773 - DNA, 20 bp, Artificial Sequence
  Description of Artificial Sequence: Synthetic oligonucleotide
  Target: LAMA2; (-) strand; PAM type: YTN; PAM sequence: TTG
attaatatctgtaatcacat

SEQ ID NO: 259774 - DNA, 20 bp, Artificial Sequence
  Description of Artificial Sequence: Synthetic oligonucleotide
  Target: LAMA2; (-) strand; PAM type: YTN; PAM sequence: CTG
taagatattgattaatatct

SEQ ID NO: 259775 - DNA, 20 bp, Artificial Sequence
  Description of Artificial Sequence: Synthetic oligonucleotide
  Target: LAMA2; (-) strand; PAM type: YTN; PAM sequence: CTA
caagtaaactgtaagatatt

SEQ ID NO: 259776 - DNA, 20 bp, Artificial Sequence
  Description of Artificial Sequence: Synthetic oligonucleotide
  Target: LAMA2; (-) strand; PAM type: YTN; PAM sequence: TTC
ctacaagtaaactgtaagat

SEQ ID NO: 259777 - DNA, 20 bp, Artificial Sequence
  Description of Artificial Sequence: Synthetic oligonucleotide
  Target: LAMA2; (-) strand; PAM type: YTN; PAM sequence: TTT
cctacaagtaaactgtaaga

SEQ ID NO: 259778 - DNA, 20 bp, Artificial Sequence
  Description of Artificial Sequence: Synthetic oligonucleotide
  Target: LAMA2; (-) strand; PAM type: YTN; PAM sequence: CTT
tcctacaagtaaactgtaag

SEQ ID NO: 259779 - DNA, 20 bp, Artificial Sequence
  Description of Artificial Sequence: Synthetic oligonucleotide
  Target: LAMA2; (-) strand; PAM type: YTN; PAM sequence: TTC
atcatctttcctacaagtaa

SEQ ID NO: 259780 - DNA, 20 bp, Artificial Sequence
  Description of Artificial Sequence: Synthetic oligonucleotide
  Target: LAMA2; (-) strand; PAM type: YTN; PAM sequence: CTT
catcatctttcctacaagta

SEQ ID NO: 259781 - DNA, 20 bp, Artificial Sequence
  Description of Artificial Sequence: Synthetic oligonucleotide
  Target: LAMA2; (-) strand; PAM type: YTN; PAM sequence: TTA
cttcatcatctttcctacaa

SEQ ID NO: 259782 - DNA, 20 bp, Artificial Sequence
  Description of Artificial Sequence: Synthetic oligonucleotide
  Target: LAMA2; (-) strand; PAM type: YTN; PAM sequence: TTT
acttcatcatctttcctaca

SEQ ID NO: 259783 - DNA, 20 bp, Artificial Sequence
  Description of Artificial Sequence: Synthetic oligonucleotide
  Target: LAMA2; (-) strand; PAM type: YTN; PAM sequence: CTG
cataaatgtatatttacttc

SEQ ID NO: 259784 - DNA, 20 bp, Artificial Sequence
  Description of Artificial Sequence: Synthetic oligonucleotide
  Target: LAMA2; (-) strand; PAM type: YTN; PAM sequence: TTC
agctgcataaatgtatattt

SEQ ID NO: 259785 - DNA, 20 bp, Artificial Sequence
  Description of Artificial Sequence: Synthetic oligonucleotide
  Target: LAMA2; (-) strand; PAM type: YTN; PAM sequence: TTC
aagtgttcagctgcataaat

SEQ ID NO: 259786 - DNA, 20 bp, Artificial Sequence
  Description of Artificial Sequence: Synthetic oligonucleotide
  Target: LAMA2; (-) strand; PAM type: YTN; PAM sequence: TTT
caagtgttcagctgcataaa

SEQ ID NO: 259787 - DNA, 20 bp, Artificial Sequence
  Description of Artificial Sequence: Synthetic oligonucleotide
  Target: LAMA2; (-) strand; PAM type: YTN; PAM sequence: TTG
tagatttcaagtgttcagct

SEQ ID NO: 259788 - DNA, 20 bp, Artificial Sequence
  Description of Artificial Sequence: Synthetic oligonucleotide
  Target: LAMA2; (-) strand; PAM type: YTN; PAM sequence: CTT
gtagatttcaagtgttcagc

SEQ ID NO: 259789 - DNA, 20 bp, Artificial Sequence
  Description of Artificial Sequence: Synthetic oligonucleotide
  Target: LAMA2; (-) strand; PAM type: YTN; PAM sequence: CTC
ttgtagatttcaagtgttca

SEQ ID NO: 259790 - DNA, 20 bp, Artificial Sequence
  Description of Artificial Sequence: Synthetic oligonucleotide
  Target: LAMA2; (-) strand; PAM type: YTN; PAM sequence: TTA
cccctcttgtagatttcaag

SEQ ID NO: 259791 - DNA, 20 bp, Artificial Sequence
  Description of Artificial Sequence: Synthetic oligonucleotide
  Target: LAMA2; (-) strand; PAM type: YTN; PAM sequence: TTT
acccctcttgtagatttcaa

SEQ ID NO: 259792 - DNA, 20 bp, Artificial Sequence
  Description of Artificial Sequence: Synthetic oligonucleotide
  Target: LAMA2; (-) strand; PAM type: YTN; PAM sequence: TTT
tacccctcttgtagatttca

SEQ ID NO: 259793 - DNA, 20 bp, Artificial Sequence
  Description of Artificial Sequence: Synthetic oligonucleotide
  Target: LAMA2; (-) strand; PAM type: YTN; PAM sequence: TTT
ttacccctcttgtagatttc

SEQ ID NO: 259794 - DNA, 20 bp, Artificial Sequence
  Description of Artificial Sequence: Synthetic oligonucleotide
  Target: LAMA2; (-) strand; PAM type: YTN; PAM sequence: CTT
tttacccctcttgtagattt

SEQ ID NO: 259795 - DNA, 20 bp, Artificial Sequence
  Description of Artificial Sequence: Synthetic oligonucleotide
  Target: LAMA2; (-) strand; PAM type: YTN; PAM sequence: TTC
tttttacccctcttgtagat

SEQ ID NO: 259796 - DNA, 20 bp, Artificial Sequence
  Description of Artificial Sequence: Synthetic oligonucleotide
  Target: LAMA2; (-) strand; PAM type: YTN; PAM sequence: TTG
ttctttttacccctcttgta

SEQ ID NO: 259797 - DNA, 20 bp, Artificial Sequence
  Description of Artificial Sequence: Synthetic oligonucleotide
  Target: LAMA2; (-) strand; PAM type: YTN; PAM sequence: TTT
gttctttttacccctcttgt

SEQ ID NO: 259798 - DNA, 20 bp, Artificial Sequence
  Description of Artificial Sequence: Synthetic oligonucleotide
  Target: LAMA2; (-) strand; PAM type: YTN; PAM sequence: TTT
tgttctttttacccctcttg

SEQ ID NO: 259799 - DNA, 20 bp, Artificial Sequence
  Description of Artificial Sequence: Synthetic oligonucleotide
  Target: LAMA2; (-) strand; PAM type: YTN; PAM sequence: TTT
ttgttctttttacccctctt

SEQ ID NO: 259800 - DNA, 20 bp, Artificial Sequence
  Description of Artificial Sequence: Synthetic oligonucleotide
  Target: LAMA2; (-) strand; PAM type: YTN; PAM sequence: TTA
cagaatttttgttcttttta

SEQ ID NO: 259801 - DNA, 20 bp, Artificial Sequence
  Description of Artificial Sequence: Synthetic oligonucleotide
  Target: LAMA2; (-) strand; PAM type: YTN; PAM sequence: TTA
ttacagaatttttgttcttt

SEQ ID NO: 259802 - DNA, 20 bp, Artificial Sequence
  Description of Artificial Sequence: Synthetic oligonucleotide
  Target: LAMA2; (-) strand; PAM type: YTN; PAM sequence: CTG
gtattattacagaatttttg

SEQ ID NO: 259803 - DNA, 20 bp, Artificial Sequence
  Description of Artificial Sequence: Synthetic oligonucleotide
  Target: LAMA2; (-) strand; PAM type: YTN; PAM sequence: TTC
tggtattattacagaatttt

SEQ ID NO: 259804 - DNA, 20 bp, Artificial Sequence
  Description of Artificial Sequence: Synthetic oligonucleotide
  Target: LAMA2; (-) strand; PAM type: YTN; PAM sequence: TTT
ctggtattattacagaattt

SEQ ID NO: 259805 - DNA, 20 bp, Artificial Sequence
  Description of Artificial Sequence: Synthetic oligonucleotide
  Target: LAMA2; (-) strand; PAM type: YTN; PAM sequence: TTT
tctggtattattacagaatt

SEQ ID NO: 259806 - DNA, 20 bp, Artificial Sequence
  Description of Artificial Sequence: Synthetic oligonucleotide
  Target: LAMA2; (-) strand; PAM type: YTN; PAM sequence: CTT
ttctggtattattacagaat

SEQ ID NO: 259807 - DNA, 20 bp, Artificial Sequence
  Description of Artificial Sequence: Synthetic oligonucleotide
  Target: LAMA2; (-) strand; PAM type: YTN; PAM sequence: CTC
ttttctggtattattacaga

SEQ ID NO: 259808 - DNA, 20 bp, Artificial Sequence
  Description of Artificial Sequence: Synthetic oligonucleotide
  Target: LAMA2; (-) strand; PAM type: YTN; PAM sequence: TTA
tagctcttttctggtattat

SEQ ID NO: 259809 - DNA, 20 bp, Artificial Sequence
  Description of Artificial Sequence: Synthetic oligonucleotide
  Target: LAMA2; (-) strand; PAM type: YTN; PAM sequence: CTA
ggtatgaggttatagctctt

SEQ ID NO: 259810 - DNA, 20 bp, Artificial Sequence
  Description of Artificial Sequence: Synthetic oligonucleotide
  Target: LAMA2; (-) strand; PAM type: YTN; PAM sequence: TTG
tgcctaggtatgaggttata

SEQ ID NO: 259811 - DNA, 20 bp, Artificial Sequence
  Description of Artificial Sequence: Synthetic oligonucleotide
  Target: LAMA2; (-) strand; PAM type: YTN; PAM sequence: CTT
gtgcctaggtatgaggttat

SEQ ID NO: 259812 - DNA, 20 bp, Artificial Sequence
  Description of Artificial Sequence: Synthetic oligonucleotide
  Target: LAMA2; (-) strand; PAM type: YTN; PAM sequence: TTG
cacatgtatgtccttgtgcc

SEQ ID NO: 259813 - DNA, 20 bp, Artificial Sequence
  Description of Artificial Sequence: Synthetic oligonucleotide
  Target: LAMA2; (-) strand; PAM type: YTN; PAM sequence: TTT
gcacatgtatgtccttgtgc

SEQ ID NO: 259814 - DNA, 20 bp, Artificial Sequence
  Description of Artificial Sequence: Synthetic oligonucleotide
  Target: LAMA2; (-) strand; PAM type: YTN; PAM sequence: CTT
tgcacatgtatgtccttgtg

SEQ ID NO: 259815 - DNA, 20 bp, Artificial Sequence
  Description of Artificial Sequence: Synthetic oligonucleotide
  Target: LAMA2; (-) strand; PAM type: YTN; PAM sequence: CTC
atactttgcacatgtatgtc

SEQ ID NO: 259816 - DNA, 20 bp, Artificial Sequence
  Description of Artificial Sequence: Synthetic oligonucleotide
  Target: LAMA2; (-) strand; PAM type: YTN; PAM sequence: CTC
atatcctcatactttgcaca

SEQ ID NO: 259817 - DNA, 20 bp, Artificial Sequence
  Description of Artificial Sequence: Synthetic oligonucleotide
  Target: LAMA2; (-) strand; PAM type: YTN; PAM sequence: TTC
ctcatatcctcatactttgc

SEQ ID NO: 259818 - DNA, 20 bp, Artificial Sequence
  Description of Artificial Sequence: Synthetic oligonucleotide
  Target: LAMA2; (-) strand; PAM type: YTN; PAM sequence: TTA
gttcctcatatcctcatact

SEQ ID NO: 259819 - DNA, 20 bp, Artificial Sequence
  Description of Artificial Sequence: Synthetic oligonucleotide
  Target: LAMA2; (-) strand; PAM type: YTN; PAM sequence: TTA
attagttcctcatatcctca

SEQ ID NO: 259820 - DNA, 20 bp, Artificial Sequence
  Description of Artificial Sequence: Synthetic oligonucleotide
  Target: LAMA2; (-) strand; PAM type: YTN; PAM sequence: TTG
gaaaattaattagttcctca

SEQ ID NO: 259821 - DNA, 20 bp, Artificial Sequence
  Description of Artificial Sequence: Synthetic oligonucleotide
  Target: LAMA2; (-) strand; PAM type: YTN; PAM sequence: TTT
ggaaaattaattagttcctc

SEQ ID NO: 259822 - DNA, 20 bp, Artificial Sequence
  Description of Artificial Sequence: Synthetic oligonucleotide
  Target: LAMA2; (-) strand; PAM type: YTN; PAM sequence: TTT
tggaaaattaattagttcct

SEQ ID NO: 259823 - DNA, 20 bp, Artificial Sequence
  Description of Artificial Sequence: Synthetic oligonucleotide
  Target: LAMA2; (-) strand; PAM type: YTN; PAM sequence: TTT
ttggaaaattaattagttcc

SEQ ID NO: 259824 - DNA, 20 bp, Artificial Sequence
  Description of Artificial Sequence: Synthetic oligonucleotide
  Target: LAMA2; (-) strand; PAM type: YTN; PAM sequence: CTA
tagatttttggaaaattaat

SEQ ID NO: 259825 - DNA, 20 bp, Artificial Sequence
  Description of Artificial Sequence: Synthetic oligonucleotide
  Target: LAMA2; (-) strand; PAM type: YTN; PAM sequence: TTC
tatagatttttggaaaatta

SEQ ID NO: 259826 - DNA, 20 bp, Artificial Sequence
  Description of Artificial Sequence: Synthetic oligonucleotide
  Target: LAMA2; (-) strand; PAM type: YTN; PAM sequence: TTT
ctatagatttttggaaaatt

SEQ ID NO: 259827 - DNA, 20 bp, Artificial Sequence
  Description of Artificial Sequence: Synthetic oligonucleotide
  Target: LAMA2; (-) strand; PAM type: YTN; PAM sequence: TTC
aggggcaatttctatagatt

SEQ ID NO: 259828 - DNA, 20 bp, Artificial Sequence
  Description of Artificial Sequence: Synthetic oligonucleotide
  Target: LAMA2; (-) strand; PAM type: YTN; PAM sequence: CTA
gtcataattcaggggcaatt

SEQ ID NO: 259829 - DNA, 20 bp, Artificial Sequence
  Description of Artificial Sequence: Synthetic oligonucleotide
  Target: LAMA2; (-) strand; PAM type: YTN; PAM sequence: CTA
aaacctagtcataattcagg

SEQ ID NO: 259830 - DNA, 20 bp, Artificial Sequence
  Description of Artificial Sequence: Synthetic oligonucleotide
  Target: LAMA2; (-) strand; PAM type: YTN; PAM sequence: CTG
aaacctaaaacctagtcata

SEQ ID NO: 259831 - DNA, 20 bp, Artificial Sequence
  Description of Artificial Sequence: Synthetic oligonucleotide
  Target: LAMA2; (-) strand; PAM type: YTN; PAM sequence: TTC
ctgaaacctaaaacctagtc

SEQ ID NO: 259832 - DNA, 20 bp, Artificial Sequence
  Description of Artificial Sequence: Synthetic oligonucleotide
  Target: LAMA2; (-) strand; PAM type: YTN; PAM sequence: CTT
cctgaaacctaaaacctagt

SEQ ID NO: 259833 - DNA, 20 bp, Artificial Sequence
  Description of Artificial Sequence: Synthetic oligonucleotide
  Target: LAMA2; (-) strand; PAM type: YTN; PAM sequence: CTA
cttcctgaaacctaaaacct

SEQ ID NO: 259834 - DNA, 20 bp, Artificial Sequence
  Description of Artificial Sequence: Synthetic oligonucleotide
  Target: LAMA2; (-) strand; PAM type: YTN; PAM sequence: CTC
aactacttcctgaaacctaa

SEQ ID NO: 259835 - DNA, 20 bp, Artificial Sequence
  Description of Artificial Sequence: Synthetic oligonucleotide
  Target: LAMA2; (-) strand; PAM type: YTN; PAM sequence: TTC
agaatgatctcaactacttc

SEQ ID NO: 259836 - DNA, 20 bp, Artificial Sequence
  Description of Artificial Sequence: Synthetic oligonucleotide
  Target: LAMA2; (-) strand; PAM type: YTN; PAM sequence: CTT
cagaatgatctcaactactt

SEQ ID NO: 259837 - DNA, 20 bp, Artificial Sequence
  Description of Artificial Sequence: Synthetic oligonucleotide
  Target: LAMA2; (-) strand; PAM type: YTN; PAM sequence: CTC
ttcagaatgatctcaactac

SEQ ID NO: 259838 - DNA, 20 bp, Artificial Sequence
  Description of Artificial Sequence: Synthetic oligonucleotide
  Target: LAMA2; (-) strand; PAM type: YTN; PAM sequence: TTA
aaatgactcttcagaatgat

SEQ ID NO: 259839 - DNA, 20 bp, Artificial Sequence
  Description of Artificial Sequence: Synthetic oligonucleotide
  Target: LAMA2; (-) strand; PAM type: YTN; PAM sequence: TTG
ttaaaatgactcttcagaat

SEQ ID NO: 259840 - DNA, 20 bp, Artificial Sequence
  Description of Artificial Sequence: Synthetic oligonucleotide
  Target: LAMA2; (-) strand; PAM type: YTN; PAM sequence: CTA
aatgttgttaaaatgactct

SEQ ID NO: 259841 - DNA, 20 bp, Artificial Sequence
  Description of Artificial Sequence: Synthetic oligonucleotide
  Target: LAMA2; (-) strand; PAM type: YTN; PAM sequence: TTC
caagctaaatgttgttaaaa

SEQ ID NO: 259842 - DNA, 20 bp, Artificial Sequence
  Description of Artificial Sequence: Synthetic oligonucleotide
  Target: LAMA2; (-) strand; PAM type: YTN; PAM sequence: TTT
ccaagctaaatgttgttaaa

SEQ ID NO: 259843 - DNA, 20 bp, Artificial Sequence
  Description of Artificial Sequence: Synthetic oligonucleotide
  Target: LAMA2; (-) strand; PAM type: YTN; PAM sequence: TTT
tccaagctaaatgttgttaa

SEQ ID NO: 259844 - DNA, 20 bp, Artificial Sequence
  Description of Artificial Sequence: Synthetic oligonucleotide
  Target: LAMA2; (-) strand; PAM type: YTN; PAM sequence: TTA
ttttccaagctaaatgttgt

SEQ ID NO: 259845 - DNA, 20 bp, Artificial Sequence
  Description of Artificial Sequence: Synthetic oligonucleotide
  Target: LAMA2; (-) strand; PAM type: YTN; PAM sequence: CTA
ccaatgggaaaaaatgatta

SEQ ID NO: 259846 - DNA, 20 bp, Artificial Sequence
  Description of Artificial Sequence: Synthetic oligonucleotide
  Target: LAMA2; (-) strand; PAM type: YTN; PAM sequence: CTA
tggtctaccaatgggaaaaa

SEQ ID NO: 259847 - DNA, 20 bp, Artificial Sequence
  Description of Artificial Sequence: Synthetic oligonucleotide
  Target: LAMA2; (-) strand; PAM type: YTN; PAM sequence: TTC
tatggtctaccaatgggaaa

SEQ ID NO: 259848 - DNA, 20 bp, Artificial Sequence
  Description of Artificial Sequence: Synthetic oligonucleotide
  Target: LAMA2; (-) strand; PAM type: YTN; PAM sequence: TTT
ctatggtctaccaatgggaa

SEQ ID NO: 259849 - DNA, 20 bp, Artificial Sequence
  Description of Artificial Sequence: Synthetic oligonucleotide
  Target: LAMA2; (-) strand; PAM type: YTN; PAM sequence: CTG
gccatgtcaatttctatggt

SEQ ID NO: 259850 - DNA, 20 bp, Artificial Sequence
  Description of Artificial Sequence: Synthetic oligonucleotide
  Target: LAMA2; (-) strand; PAM type: YTN; PAM sequence: CTC
tggccatgtcaatttctatg

SEQ ID NO: 259851 - DNA, 20 bp, Artificial Sequence
  Description of Artificial Sequence: Synthetic oligonucleotide
  Target: LAMA2; (-) strand; PAM type: YTN; PAM sequence: CTG
aacatgactctggccatgtc

SEQ ID NO: 259852 - DNA, 20 bp, Artificial Sequence
  Description of Artificial Sequence: Synthetic oligonucleotide
  Target: LAMA2; (-) strand; PAM type: YTN; PAM sequence: CTC
tgaacatgactctggccatg

SEQ ID NO: 259853 - DNA, 20 bp, Artificial Sequence
  Description of Artificial Sequence: Synthetic oligonucleotide
  Target: LAMA2; (-) strand; PAM type: YTN; PAM sequence: CTC
tctgaacatgactctggcca

SEQ ID NO: 259854 - DNA, 20 bp, Artificial Sequence
  Description of Artificial Sequence: Synthetic oligonucleotide
  Target: LAMA2; (-) strand; PAM type: YTN; PAM sequence: CTA
gatagatctctctgaacatg

SEQ ID NO: 259855 - DNA, 20 bp, Artificial Sequence
  Description of Artificial Sequence: Synthetic oligonucleotide
  Target: LAMA2; (-) strand; PAM type: YTN; PAM sequence: CTG
atgctagatagatctctctg

SEQ ID NO: 259856 - DNA, 20 bp, Artificial Sequence
  Description of Artificial Sequence: Synthetic oligonucleotide
  Target: LAMA2; (-) strand; PAM type: YTN; PAM sequence: CTG
ctgatgctagatagatctct

SEQ ID NO: 259857 - DNA, 20 bp, Artificial Sequence
  Description of Artificial Sequence: Synthetic oligonucleotide
  Target: LAMA2; (-) strand; PAM type: YTN; PAM sequence: TTA
ccatccctgctgatgctaga

SEQ ID NO: 259858 - DNA, 20 bp, Artificial Sequence
  Description of Artificial Sequence: Synthetic oligonucleotide
  Target: LAMA2; (-) strand; PAM type: YTN; PAM sequence: TTG
ttaccatccctgctgatgct

SEQ ID NO: 259859 - DNA, 20 bp, Artificial Sequence
  Description of Artificial Sequence: Synthetic oligonucleotide
  Target: LAMA2; (-) strand; PAM type: YTN; PAM sequence: TTA
taaattgttaccatccctgc

SEQ ID NO: 259860 - DNA, 20 bp, Artificial Sequence
  Description of Artificial Sequence: Synthetic oligonucleotide
  Target: LAMA2; (-) strand; PAM type: YTN; PAM sequence: CTT
ataaattgttaccatccctg

SEQ ID NO: 259861 - DNA, 20 bp, Artificial Sequence
  Description of Artificial Sequence: Synthetic oligonucleotide
  Target: LAMA2; (-) strand; PAM type: YTN; PAM sequence: TTC
aacagccttataaattgtta

SEQ ID NO: 259862 - DNA, 20 bp, Artificial Sequence
  Description of Artificial Sequence: Synthetic oligonucleotide
  Target: LAMA2; (-) strand; PAM type: YTN; PAM sequence: CTT
caacagccttataaattgtt

SEQ ID NO: 259863 - DNA, 20 bp, Artificial Sequence
  Description of Artificial Sequence: Synthetic oligonucleotide
  Target: LAMA2; (-) strand; PAM type: YTN; PAM sequence: TTC
ttcaacagccttataaattg

SEQ ID NO: 259864 - DNA, 20 bp, Artificial Sequence
  Description of Artificial Sequence: Synthetic oligonucleotide
  Target: LAMA2; (-) strand; PAM type: YTN; PAM sequence: TTT
cttcaacagccttataaatt

SEQ ID NO: 259865 - DNA, 20 bp, Artificial Sequence
  Description of Artificial Sequence: Synthetic oligonucleotide
  Target: LAMA2; (-) strand; PAM type: YTN; PAM sequence: TTA
atatttcttcaacagcctta

SEQ ID NO: 259866 - DNA, 20 bp, Artificial Sequence
  Description of Artificial Sequence: Synthetic oligonucleotide
  Target: LAMA2; (-) strand; PAM type: YTN; PAM sequence: TTA
ttaatatttcttcaacagcc

SEQ ID NO: 259867 - DNA, 20 bp, Artificial Sequence
  Description of Artificial Sequence: Synthetic oligonucleotide
  Target: LAMA2; (-) strand; PAM type: YTN; PAM sequence: CTT
attaatatttcttcaacagc

SEQ ID NO: 259868 - DNA, 20 bp, Artificial Sequence
  Description of Artificial Sequence: Synthetic oligonucleotide
  Target: LAMA2; (-) strand; PAM type: YTN; PAM sequence: CTC
ttattaatatttcttcaaca

SEQ ID NO: 259869 - DNA, 20 bp, Artificial Sequence
  Description of Artificial Sequence: Synthetic oligonucleotide
  Target: LAMA2; (-) strand; PAM type: YTN; PAM sequence: TTG
gcatctcttattaatatttc

SEQ ID NO: 259870 - DNA, 20 bp, Artificial Sequence
  Description of Artificial Sequence: Synthetic oligonucleotide
  Target: LAMA2; (-) strand; PAM type: YTN; PAM sequence: TTT
ggcatctcttattaatattt

SEQ ID NO: 259871 - DNA, 20 bp, Artificial Sequence
  Description of Artificial Sequence: Synthetic oligonucleotide
  Target: LAMA2; (-) strand; PAM type: YTN; PAM sequence: TTT
tggcatctcttattaatatt

SEQ ID NO: 259872 - DNA, 20 bp, Artificial Sequence
  Description of Artificial Sequence: Synthetic oligonucleotide
  Target: LAMA2; (-) strand; PAM type: YTN; PAM sequence: CTT
ttggcatctcttattaatat

SEQ ID NO: 259873 - DNA, 20 bp, Artificial Sequence
  Description of Artificial Sequence: Synthetic oligonucleotide
  Target: LAMA2; (-) strand; PAM type: YTN; PAM sequence: CTG
ggtccaggcttttggcatct

SEQ ID NO: 259874 - DNA, 20 bp, Artificial Sequence
  Description of Artificial Sequence: Synthetic oligonucleotide
  Target: LAMA2; (-) strand; PAM type: YTN; PAM sequence: TTG
actgggtccaggcttttggc

SEQ ID NO: 259875 - DNA, 20 bp, Artificial Sequence
  Description of Artificial Sequence: Synthetic oligonucleotide
  Target: LAMA2; (-) strand; PAM type: YTN; PAM sequence: CTC
attgactgggtccaggcttt

SEQ ID NO: 259876 - DNA, 20 bp, Artificial Sequence
  Description of Artificial Sequence: Synthetic oligonucleotide
  Target: LAMA2; (-) strand; PAM type: YTN; PAM sequence: CTG
acgctcattgactgggtcca

SEQ ID NO: 259877 - DNA, 20 bp, Artificial Sequence
  Description of Artificial Sequence: Synthetic oligonucleotide
  Target: LAMA2; (-) strand; PAM type: YTN; PAM sequence: TTC
actgacgctcattgactggg

SEQ ID NO: 259878 - DNA, 20 bp, Artificial Sequence
  Description of Artificial Sequence: Synthetic oligonucleotide
  Target: LAMA2; (-) strand; PAM type: YTN; PAM sequence: CTT
cactgacgctcattgactgg

SEQ ID NO: 259879 - DNA, 20 bp, Artificial Sequence
  Description of Artificial Sequence: Synthetic oligonucleotide
  Target: LAMA2; (-) strand; PAM type: YTN; PAM sequence: CTA
tatatcttcactgacgctca

SEQ ID NO: 259880 - DNA, 20 bp, Artificial Sequence
  Description of Artificial Sequence: Synthetic oligonucleotide
  Target: LAMA2; (-) strand; PAM type: YTN; PAM sequence: CTC
gcgccctatatatcttcact

SEQ ID NO: 259881 - DNA, 20 bp, Artificial Sequence
  Description of Artificial Sequence: Synthetic oligonucleotide
  Target: LAMA2; (-) strand; PAM type: YTN; PAM sequence: CTA
aaatgtaactcgcgccctat

SEQ ID NO: 259882 - DNA, 20 bp, Artificial Sequence
  Description of Artificial Sequence: Synthetic oligonucleotide
  Target: LAMA2; (-) strand; PAM type: YTN; PAM sequence: TTC
taaaatgtaactcgcgccct

SEQ ID NO: 259883 - DNA, 20 bp, Artificial Sequence
  Description of Artificial Sequence: Synthetic oligonucleotide
  Target: LAMA2; (-) strand; PAM type: YTN; PAM sequence: CTG
agttctaaaatgtaactcgc

SEQ ID NO: 259884 - DNA, 20 bp, Artificial Sequence
  Description of Artificial Sequence: Synthetic oligonucleotide
  Target: LAMA2; (-) strand; PAM type: YTN; PAM sequence: CTG
tatcagcctgagttctaaaa

SEQ ID NO: 259885 - DNA, 20 bp, Artificial Sequence
  Description of Artificial Sequence: Synthetic oligonucleotide
  Target: LAMA2; (-) strand; PAM type: YTN; PAM sequence: TTC
accaggctgtatcagcctga

SEQ ID NO: 259886 - DNA, 20 bp, Artificial Sequence
  Description of Artificial Sequence: Synthetic oligonucleotide
  Target: LAMA2; (-) strand; PAM type: YTN; PAM sequence: TTC
cccaaatcaatgaattcacc

SEQ ID NO: 259887 - DNA, 20 bp, Artificial Sequence
  Description of Artificial Sequence: Synthetic oligonucleotide
  Target: LAMA2; (-) strand; PAM type: YTN; PAM sequence: TTA
ttccccaaatcaatgaattc

SEQ ID NO: 259888 - DNA, 20 bp, Artificial Sequence
  Description of Artificial Sequence: Synthetic oligonucleotide
  Target: LAMA2; (-) strand; PAM type: YTN; PAM sequence: CTT
attccccaaatcaatgaatt

SEQ ID NO: 259889 - DNA, 20 bp, Artificial Sequence
  Description of Artificial Sequence: Synthetic oligonucleotide
  Target: LAMA2; (-) strand; PAM type: YTN; PAM sequence: TTC
ttattccccaaatcaatgaa

SEQ ID NO: 259890 - DNA, 20 bp, Artificial Sequence
  Description of Artificial Sequence: Synthetic oligonucleotide
  Target: LAMA2; (-) strand; PAM type: YTN; PAM sequence: TTT
cttattccccaaatcaatga

SEQ ID NO: 259891 - DNA, 20 bp, Artificial Sequence
  Description of Artificial Sequence: Synthetic oligonucleotide
  Target: LAMA2; (-) strand; PAM type: YTN; PAM sequence: CTT
tcttattccccaaatcaatg

SEQ ID NO: 259892 - DNA, 20 bp, Artificial Sequence
  Description of Artificial Sequence: Synthetic oligonucleotide
  Target: LAMA2; (-) strand; PAM type: YTN; PAM sequence: CTC
tttcttattccccaaatcaa

SEQ ID NO: 259893 - DNA, 20 bp, Artificial Sequence
  Description of Artificial Sequence: Synthetic oligonucleotide
  Target: LAMA2; (-) strand; PAM type: YTN; PAM sequence: TTC
tctttcttattccccaaatc

SEQ ID NO: 259894 - DNA, 20 bp, Artificial Sequence
  Description of Artificial Sequence: Synthetic oligonucleotide
  Target: LAMA2; (-) strand; PAM type: YTN; PAM sequence: CTT
ctctttcttattccccaaat

SEQ ID NO: 259895 - DNA, 20 bp, Artificial Sequence
  Description of Artificial Sequence: Synthetic oligonucleotide
  Target: LAMA2; (-) strand; PAM type: YTN; PAM sequence: CTA
agtcttctctttcttattcc

SEQ ID NO: 259896 - DNA, 20 bp, Artificial Sequence
  Description of Artificial Sequence: Synthetic oligonucleotide
  Target: LAMA2; (-) strand; PAM type: YTN; PAM sequence: CTA
ggagtcatcctaagtcttct

SEQ ID NO: 259897 - DNA, 20 bp, Artificial Sequence
  Description of Artificial Sequence: Synthetic oligonucleotide
  Target: LAMA2; (-) strand; PAM type: YTN; PAM sequence: TTG
caaagcaaaacctaggagtc

SEQ ID NO: 259898 - DNA, 20 bp, Artificial Sequence
  Description of Artificial Sequence: Synthetic oligonucleotide
  Target: LAMA2; (-) strand; PAM type: YTN; PAM sequence: CTC
cattgcaaagcaaaacctag

SEQ ID NO: 259899 - DNA, 20 bp, Artificial Sequence
  Description of Artificial Sequence: Synthetic oligonucleotide
  Target: LAMA2; (-) strand; PAM type: YTN; PAM sequence: CTA
ctccattgcaaagcaaaacc

SEQ ID NO: 259900 - DNA, 20 bp, Artificial Sequence
  Description of Artificial Sequence: Synthetic oligonucleotide
  Target: LAMA2; (-) strand; PAM type: YTN; PAM sequence: TTA
tcatctactccattgcaaag

SEQ ID NO: 259901 - DNA, 20 bp, Artificial Sequence
  Description of Artificial Sequence: Synthetic oligonucleotide
  Target: LAMA2; (-) strand; PAM type: YTN; PAM sequence: TTA
ttatcatctactccattgca

SEQ ID NO: 259902 - DNA, 20 bp, Artificial Sequence
  Description of Artificial Sequence: Synthetic oligonucleotide
  Target: LAMA2; (-) strand; PAM type: YTN; PAM sequence: CTT
attatcatctactccattgc

SEQ ID NO: 259903 - DNA, 20 bp, Artificial Sequence
  Description of Artificial Sequence: Synthetic oligonucleotide
  Target: LAMA2; (-) strand; PAM type: YTN; PAM sequence: CTG
cacatggtacttattatcat

SEQ ID NO: 259904 - DNA, 20 bp, Artificial Sequence
  Description of Artificial Sequence: Synthetic oligonucleotide
  Target: LAMA2; (-) strand; PAM type: YTN; PAM sequence: CTA
tagctgcacatggtacttat

SEQ ID NO: 259905 - DNA, 20 bp, Artificial Sequence
  Description of Artificial Sequence: Synthetic oligonucleotide
  Target: LAMA2; (-) strand; PAM type: YTN; PAM sequence: TTC
ctatagctgcacatggtact

SEQ ID NO: 259906 - DNA, 20 bp, Artificial Sequence
  Description of Artificial Sequence: Synthetic oligonucleotide
  Target: LAMA2; (-) strand; PAM type: YTN; PAM sequence: CTA
taattcctatagctgcacat

SEQ ID NO: 259907 - DNA, 20 bp, Artificial Sequence
  Description of Artificial Sequence: Synthetic oligonucleotide
  Target: LAMA2; (-) strand; PAM type: YTN; PAM sequence: CTC
ctataattcctatagctgca

SEQ ID NO: 259908 - DNA, 20 bp, Artificial Sequence
  Description of Artificial Sequence: Synthetic oligonucleotide
  Target: LAMA2; (-) strand; PAM type: YTN; PAM sequence: CTC
ctcctataattcctatagct

SEQ ID NO: 259909 - DNA, 20 bp, Artificial Sequence
  Description of Artificial Sequence: Synthetic oligonucleotide
  Target: LAMA2; (-) strand; PAM type: YTN; PAM sequence: CTC
ctcctcctataattcctata

SEQ ID NO: 259910 - DNA, 20 bp, Artificial Sequence
  Description of Artificial Sequence: Synthetic oligonucleotide
  Target: LAMA2; (-) strand; PAM type: YTN; PAM sequence: TTG
ctcctcctcctataattcct

SEQ ID NO: 259911 - DNA, 20 bp, Artificial Sequence
  Description of Artificial Sequence: Synthetic oligonucleotide
  Target: LAMA2; (-) strand; PAM type: YTN; PAM sequence: CTT
gctcctcctcctataattcc

SEQ ID NO: 259912 - DNA, 20 bp, Artificial Sequence
  Description of Artificial Sequence: Synthetic oligonucleotide
  Target: LAMA2; (-) strand; PAM type: YTN; PAM sequence: CTG
aacttgctcctcctcctata

SEQ ID NO: 259913 - DNA, 20 bp, Artificial Sequence
  Description of Artificial Sequence: Synthetic oligonucleotide
  Target: LAMA2; (-) strand; PAM type: YTN; PAM sequence: TTC
ctgaacttgctcctcctcct

SEQ ID NO: 259914 - DNA, 20 bp, Artificial Sequence
  Description of Artificial Sequence: Synthetic oligonucleotide
  Target: LAMA2; (-) strand; PAM type: YTN; PAM sequence: CTT
cctgaacttgctcctcctcc

SEQ ID NO: 259915 - DNA, 20 bp, Artificial Sequence
  Description of Artificial Sequence: Synthetic oligonucleotide
  Target: LAMA2; (-) strand; PAM type: YTN; PAM sequence: TTC
cttcctgaacttgctcctcc

SEQ ID NO: 259916 - DNA, 20 bp, Artificial Sequence
  Description of Artificial Sequence: Synthetic oligonucleotide
  Target: LAMA2; (-) strand; PAM type: YTN; PAM sequence: TTT
ccttcctgaacttgctcctc

SEQ ID NO: 259917 - DNA, 20 bp, Artificial Sequence
  Description of Artificial Sequence: Synthetic oligonucleotide
  Target: LAMA2; (-) strand; PAM type: YTN; PAM sequence: CTT
tccttcctgaacttgctcct

SEQ ID NO: 259918 - DNA, 20 bp, Artificial Sequence
  Description of Artificial Sequence: Synthetic oligonucleotide
  Target: LAMA2; (-) strand; PAM type: YTN; PAM sequence: TTA
tctttccttcctgaacttgc

SEQ ID NO: 259919 - DNA, 20 bp, Artificial Sequence
  Description of Artificial Sequence: Synthetic oligonucleotide
  Target: LAMA2; (-) strand; PAM type: YTN; PAM sequence: CTG
ataaaaatgcaaagtgatta

SEQ ID NO: 259920 - DNA, 20 bp, Artificial Sequence
  Description of Artificial Sequence: Synthetic oligonucleotide
  Target: LAMA2; (-) strand; PAM type: YTN; PAM sequence: CTC
acaaaaagctgataaaaatg

SEQ ID NO: 259921 - DNA, 20 bp, Artificial Sequence
  Description of Artificial Sequence: Synthetic oligonucleotide
  Target: LAMA2; (-) strand; PAM type: YTN; PAM sequence: TTA
atacctcacaaaaagctgat

SEQ ID NO: 259922 - DNA, 20 bp, Artificial Sequence
  Description of Artificial Sequence: Synthetic oligonucleotide
  Target: LAMA2; (-) strand; PAM type: YTN; PAM sequence: TTA
ttaatacctcacaaaaagct

SEQ ID NO: 259923 - DNA, 20 bp, Artificial Sequence
  Description of Artificial Sequence: Synthetic oligonucleotide
  Target: LAMA2; (-) strand; PAM type: YTN; PAM sequence: TTT
attaatacctcacaaaaagc

SEQ ID NO: 259924 - DNA, 20 bp, Artificial Sequence
  Description of Artificial Sequence: Synthetic oligonucleotide
  Target: LAMA2; (-) strand; PAM type: YTN; PAM sequence: TTT
tattaatacctcacaaaaag

SEQ ID NO: 259925 - DNA, 20 bp, Artificial Sequence
  Description of Artificial Sequence: Synthetic oligonucleotide
  Target: LAMA2; (-) strand; PAM type: YTN; PAM sequence: TTA
ttttattaatacctcacaaa

SEQ ID NO: 259926 - DNA, 20 bp, Artificial Sequence
  Description of Artificial Sequence: Synthetic oligonucleotide
  Target: LAMA2; (-) strand; PAM type: YTN; PAM sequence: TTT
attttattaatacctcacaa

SEQ ID NO: 259927 - DNA, 20 bp, Artificial Sequence
  Description of Artificial Sequence: Synthetic oligonucleotide
  Target: LAMA2; (-) strand; PAM type: YTN; PAM sequence: TTT
tattttattaatacctcaca

SEQ ID NO: 259928 - DNA, 20 bp, Artificial Sequence
  Description of Artificial Sequence: Synthetic oligonucleotide
  Target: LAMA2; (-) strand; PAM type: YTN; PAM sequence: CTA
taaatgggtgaattttattt

SEQ ID NO: 259929 - DNA, 20 bp, Artificial Sequence
  Description of Artificial Sequence: Synthetic oligonucleotide
  Target: LAMA2; (-) strand; PAM type: YTN; PAM sequence: TTA
ctataaatgggtgaatttta

SEQ ID NO: 259930 - DNA, 20 bp, Artificial Sequence
  Description of Artificial Sequence: Synthetic oligonucleotide
  Target: LAMA2; (-) strand; PAM type: YTN; PAM sequence: TTC
attactataaatgggtgaat

SEQ ID NO: 259931 - DNA, 20 bp, Artificial Sequence
  Description of Artificial Sequence: Synthetic oligonucleotide
  Target: LAMA2; (-) strand; PAM type: YTN; PAM sequence: TTA
aaattcattactataaatgg

SEQ ID NO: 259932 - DNA, 20 bp, Artificial Sequence
  Description of Artificial Sequence: Synthetic oligonucleotide
  Target: LAMA2; (-) strand; PAM type: YTN; PAM sequence: TTG
gttaaaattcattactataa

SEQ ID NO: 259933 - DNA, 20 bp, Artificial Sequence
  Description of Artificial Sequence: Synthetic oligonucleotide
  Target: LAMA2; (-) strand; PAM type: YTN; PAM sequence: CTG
taatcattggttaaaattca

SEQ ID NO: 259934 - DNA, 20 bp, Artificial Sequence
  Description of Artificial Sequence: Synthetic oligonucleotide
  Target: LAMA2; (-) strand; PAM type: YTN; PAM sequence: TTA
caccactgtaatcattggtt

SEQ ID NO: 259935 - DNA, 20 bp, Artificial Sequence
  Description of Artificial Sequence: Synthetic oligonucleotide
  Target: LAMA2; (-) strand; PAM type: YTN; PAM sequence: CTG
caatggggcacaagggatga

SEQ ID NO: 259936 - DNA, 20 bp, Artificial Sequence
  Description of Artificial Sequence: Synthetic oligonucleotide
  Target: LAMA2; (-) strand; PAM type: YTN; PAM sequence: TTC
actgcaatggggcacaaggg

SEQ ID NO: 259937 - DNA, 20 bp, Artificial Sequence
  Description of Artificial Sequence: Synthetic oligonucleotide
  Target: LAMA2; (-) strand; PAM type: YTN; PAM sequence: CTT
cactgcaatggggcacaagg

SEQ ID NO: 259938 - DNA, 20 bp, Artificial Sequence
  Description of Artificial Sequence: Synthetic oligonucleotide
  Target: LAMA2; (-) strand; PAM type: YTN; PAM sequence: CTA
gaaggcaaaacagtaggcac

SEQ ID NO: 259939 - DNA, 20 bp, Artificial Sequence
  Description of Artificial Sequence: Synthetic oligonucleotide
  Target: LAMA2; (-) strand; PAM type: YTN; PAM sequence: TTA
taatgctagaaggcaaaaca

SEQ ID NO: 259940 - DNA, 20 bp, Artificial Sequence
  Description of Artificial Sequence: Synthetic oligonucleotide
  Target: LAMA2; (-) strand; PAM type: YTN; PAM sequence: TTG
gaaaattataatgctagaag

SEQ ID NO: 259941 - DNA, 20 bp, Artificial Sequence
  Description of Artificial Sequence: Synthetic oligonucleotide
  Target: LAMA2; (-) strand; PAM type: YTN; PAM sequence: TTG
tagaaattggaaaattataa

SEQ ID NO: 259942 - DNA, 20 bp, Artificial Sequence
  Description of Artificial Sequence: Synthetic oligonucleotide
  Target: LAMA2; (-) strand; PAM type: YTN; PAM sequence: TTC
agaagttgtagaaattggaa

SEQ ID NO: 259943 - DNA, 20 bp, Artificial Sequence
  Description of Artificial Sequence: Synthetic oligonucleotide
  Target: LAMA2; (-) strand; PAM type: YTN; PAM sequence: TTT
cagaagttgtagaaattgga

SEQ ID NO: 259944 - DNA, 20 bp, Artificial Sequence
  Description of Artificial Sequence: Synthetic oligonucleotide
  Target: LAMA2; (-) strand; PAM type: YTN; PAM sequence: TTT
tcagaagttgtagaaattgg

SEQ ID NO: 259945 - DNA, 20 bp, Artificial Sequence
  Description of Artificial Sequence: Synthetic oligonucleotide
  Target: LAMA2; (-) strand; PAM type: YTN; PAM sequence: TTT
ttcagaagttgtagaaattg

SEQ ID NO: 259946 - DNA, 20 bp, Artificial Sequence
  Description of Artificial Sequence: Synthetic oligonucleotide
  Target: LAMA2; (-) strand; PAM type: YTN; PAM sequence: CTA
tttttcagaagttgtagaaa

SEQ ID NO: 259947 - DNA, 20 bp, Artificial Sequence
  Description of Artificial Sequence: Synthetic oligonucleotide
  Target: LAMA2; (-) strand; PAM type: YTN; PAM sequence: TTC
tatttttcagaagttgtaga

SEQ ID NO: 259948 - DNA, 20 bp, Artificial Sequence
  Description of Artificial Sequence: Synthetic oligonucleotide
  Target: LAMA2; (-) strand; PAM type: YTN; PAM sequence: CTA
cgattctatttttcagaagt

SEQ ID NO: 259949 - DNA, 20 bp, Artificial Sequence
  Description of Artificial Sequence: Synthetic oligonucleotide
  Target: LAMA2; (-) strand; PAM type: YTN; PAM sequence: CTC
aaaaaaacagactacgattc

SEQ ID NO: 259950 - DNA, 20 bp, Artificial Sequence
  Description of Artificial Sequence: Synthetic oligonucleotide
  Target: LAMA2; (-) strand; PAM type: YTN; PAM sequence: TTA
caaaaacgtaacaccaagtg

SEQ ID NO: 259951 - DNA, 20 bp, Artificial Sequence
  Description of Artificial Sequence: Synthetic oligonucleotide
  Target: LAMA2; (-) strand; PAM type: YTN; PAM sequence: CTG
atacatgcaacaatatggat

SEQ ID NO: 259952 - DNA, 20 bp, Artificial Sequence
  Description of Artificial Sequence: Synthetic oligonucleotide
  Target: LAMA2; (-) strand; PAM type: YTN; PAM sequence: CTG
ctgatacatgcaacaatatg

SEQ ID NO: 259953 - DNA, 20 bp, Artificial Sequence
  Description of Artificial Sequence: Synthetic oligonucleotide
  Target: LAMA2; (-) strand; PAM type: YTN; PAM sequence: TTA
gaacaaactgctgatacatg

SEQ ID NO: 259954 - DNA, 20 bp, Artificial Sequence
  Description of Artificial Sequence: Synthetic oligonucleotide
  Target: LAMA2; (-) strand; PAM type: YTN; PAM sequence: TTT
agaacaaactgctgatacat

SEQ ID NO: 259955 - DNA, 20 bp, Artificial Sequence
  Description of Artificial Sequence: Synthetic oligonucleotide
  Target: LAMA2; (-) strand; PAM type: YTN; PAM sequence: TTT
tagaacaaactgctgataca

SEQ ID NO: 259956 - DNA, 20 bp, Artificial Sequence
  Description of Artificial Sequence: Synthetic oligonucleotide
  Target: LAMA2; (-) strand; PAM type: YTN; PAM sequence: TTT
ttagaacaaactgctgatac

SEQ ID NO: 259957 - DNA, 20 bp, Artificial Sequence
  Description of Artificial Sequence: Synthetic oligonucleotide
  Target: LAMA2; (-) strand; PAM type: YTN; PAM sequence: TTA
agcaatttttagaacaaact

SEQ ID NO: 259958 - DNA, 20 bp, Artificial Sequence
  Description of Artificial Sequence: Synthetic oligonucleotide
  Target: LAMA2; (-) strand; PAM type: YTN; PAM sequence: TTA
ttaagcaatttttagaacaa

SEQ ID NO: 259959 - DNA, 20 bp, Artificial Sequence
  Description of Artificial Sequence: Synthetic oligonucleotide
  Target: LAMA2; (-) strand; PAM type: YTN; PAM sequence: TTA
cacaaatggaatattattaa

SEQ ID NO: 259960 - DNA, 20 bp, Artificial Sequence
  Description of Artificial Sequence: Synthetic oligonucleotide
  Target: LAMA2; (-) strand; PAM type: YTN; PAM sequence: CTG
tacattacacaaatggaata

SEQ ID NO: 259961 - DNA, 20 bp, Artificial Sequence
  Description of Artificial Sequence: Synthetic oligonucleotide
  Target: LAMA2; (-) strand; PAM type: YTN; PAM sequence: TTA
aatggtaaacaggtaagcaa

SEQ ID NO: 259962 - DNA, 20 bp, Artificial Sequence
  Description of Artificial Sequence: Synthetic oligonucleotide
  Target: LAMA2; (-) strand; PAM type: YTN; PAM sequence: CTA
gaaatgacccaaacacccat

SEQ ID NO: 259963 - DNA, 20 bp, Artificial Sequence
  Description of Artificial Sequence: Synthetic oligonucleotide
  Target: LAMA2; (-) strand; PAM type: YTN; PAM sequence: TTG
taaccccaaactagaaatga

SEQ ID NO: 259964 - DNA, 20 bp, Artificial Sequence
  Description of Artificial Sequence: Synthetic oligonucleotide
  Target: LAMA2; (-) strand; PAM type: YTN; PAM sequence: TTC
acagcaaaattgtaacccca

SEQ ID NO: 259965 - DNA, 20 bp, Artificial Sequence
  Description of Artificial Sequence: Synthetic oligonucleotide
  Target: LAMA2; (-) strand; PAM type: YTN; PAM sequence: CTA
atgttcacagcaaaattgta

SEQ ID NO: 259966 - DNA, 20 bp, Artificial Sequence
  Description of Artificial Sequence: Synthetic oligonucleotide
  Target: LAMA2; (-) strand; PAM type: YTN; PAM sequence: TTG
tatgctaatgttcacagcaa

SEQ ID NO: 259967 - DNA, 20 bp, Artificial Sequence
  Description of Artificial Sequence: Synthetic oligonucleotide
  Target: LAMA2; (-) strand; PAM type: YTN; PAM sequence: CTT
gtatgctaatgttcacagca

SEQ ID NO: 259968 - DNA, 20 bp, Artificial Sequence
  Description of Artificial Sequence: Synthetic oligonucleotide
  Target: LAMA2; (-) strand; PAM type: YTN; PAM sequence: TTG
acttgtatgctaatgttcac

SEQ ID NO: 259969 - DNA, 20 bp, Artificial Sequence
  Description of Artificial Sequence: Synthetic oligonucleotide
  Target: LAMA2; (-) strand; PAM type: YTN; PAM sequence: TTT
gacttgtatgctaatgttca

SEQ ID NO: 259970 - DNA, 20 bp, Artificial Sequence
  Description of Artificial Sequence: Synthetic oligonucleotide
  Target: LAMA2; (-) strand; PAM type: YTN; PAM sequence: TTT
tgacttgtatgctaatgttc

SEQ ID NO: 259971 - DNA, 20 bp, Artificial Sequence
  Description of Artificial Sequence: Synthetic oligonucleotide
  Target: LAMA2; (-) strand; PAM type: YTN; PAM sequence: CTT
ttgacttgtatgctaatgtt

SEQ ID NO: 259972 - DNA, 20 bp, Artificial Sequence
  Description of Artificial Sequence: Synthetic oligonucleotide
  Target: LAMA2; (-) strand; PAM type: YTN; PAM sequence: TTG
tccataaatatgcttttgac

SEQ ID NO: 259973 - DNA, 20 bp, Artificial Sequence
  Description of Artificial Sequence: Synthetic oligonucleotide
  Target: LAMA2; (-) strand; PAM type: YTN; PAM sequence: TTT
gtccataaatatgcttttga

SEQ ID NO: 259974 - DNA, 20 bp, Artificial Sequence
  Description of Artificial Sequence: Synthetic oligonucleotide
  Target: LAMA2; (-) strand; PAM type: YTN; PAM sequence: TTA
agaaaaaaaagagaaaacat

SEQ ID NO: 259975 - DNA, 20 bp, Artificial Sequence
  Description of Artificial Sequence: Synthetic oligonucleotide
  Target: LAMA2; (-) strand; PAM type: YTN; PAM sequence: CTT
aagaaaaaaaagagaaaaca

SEQ ID NO: 259976 - DNA, 20 bp, Artificial Sequence
  Description of Artificial Sequence: Synthetic oligonucleotide
  Target: LAMA2; (-) strand; PAM type: YTN; PAM sequence: TTC
ttaagaaaaaaaagagaaaa

SEQ ID NO: 259977 - DNA, 20 bp, Artificial Sequence
  Description of Artificial Sequence: Synthetic oligonucleotide
  Target: LAMA2; (-) strand; PAM type: YTN; PAM sequence: TTG
gcaaagatgtggagtgttct

SEQ ID NO: 259978 - DNA, 20 bp, Artificial Sequence
  Description of Artificial Sequence: Synthetic oligonucleotide
  Target: LAMA2; (-) strand; PAM type: YTN; PAM sequence: TTA
aaagtccaagagttggcaaa

SEQ ID NO: 259979 - DNA, 20 bp, Artificial Sequence
  Description of Artificial Sequence: Synthetic oligonucleotide
  Target: LAMA2; (-) strand; PAM type: YTN; PAM sequence: TTA
aaaaagggttaaaagtccaa

SEQ ID NO: 259980 - DNA, 20 bp, Artificial Sequence
  Description of Artificial Sequence: Synthetic oligonucleotide
  Target: LAMA2; (-) strand; PAM type: YTN; PAM sequence: TTA
aaattaaaaaagggttaaaa

SEQ ID NO: 259981 - DNA, 20 bp, Artificial Sequence
  Description of Artificial Sequence: Synthetic oligonucleotide
  Target: LAMA2; (-) strand; PAM type: YTN; PAM sequence: CTT
aaaattaaaaaagggttaaa

SEQ ID NO: 259982 - DNA, 20 bp, Artificial Sequence
  Description of Artificial Sequence: Synthetic oligonucleotide
  Target: LAMA2; (-) strand; PAM type: YTN; PAM sequence: TTC
ttaaaattaaaaaagggtta

SEQ ID NO: 259983 - DNA, 20 bp, Artificial Sequence
  Description of Artificial Sequence: Synthetic oligonucleotide
  Target: LAMA2; (-) strand; PAM type: YTN; PAM sequence: TTA
aataaatgcaaacaagagaa

SEQ ID NO: 259984 - DNA, 20 bp, Artificial Sequence
  Description of Artificial Sequence: Synthetic oligonucleotide
  Target: LAMA2; (-) strand; PAM type: YTN; PAM sequence: CTG
ggcattaaataaatgcaaac

SEQ ID NO: 259985 - DNA, 20 bp, Artificial Sequence
  Description of Artificial Sequence: Synthetic oligonucleotide
  Target: LAMA2; (-) strand; PAM type: YTN; PAM sequence: TTA
ctgggcattaaataaatgca

SEQ ID NO: 259986 - DNA, 20 bp, Artificial Sequence
  Description of Artificial Sequence: Synthetic oligonucleotide
  Target: LAMA2; (-) strand; PAM type: YTN; PAM sequence: TTC
ccaacattactgggcattaa

SEQ ID NO: 259987 - DNA, 20 bp, Artificial Sequence
  Description of Artificial Sequence: Synthetic oligonucleotide
  Target: LAMA2; (-) strand; PAM type: YTN; PAM sequence: TTC
aaaaaagatgtataaatgac

SEQ ID NO: 259988 - DNA, 20 bp, Artificial Sequence
  Description of Artificial Sequence: Synthetic oligonucleotide
  Target: LAMA2; (-) strand; PAM type: YTN; PAM sequence: CTT
caaaaaagatgtataaatga

SEQ ID NO: 259989 - DNA, 20 bp, Artificial Sequence
  Description of Artificial Sequence: Synthetic oligonucleotide
  Target: LAMA2; (-) strand; PAM type: YTN; PAM sequence: TTG
taaacacttcaaaaaagatg

SEQ ID NO: 259990 - DNA, 20 bp, Artificial Sequence
  Description of Artificial Sequence: Synthetic oligonucleotide
  Target: LAMA2; (-) strand; PAM type: YTN; PAM sequence: TTT
gtaaacacttcaaaaaagat

SEQ ID NO: 259991 - DNA, 20 bp, Artificial Sequence
  Description of Artificial Sequence: Synthetic oligonucleotide
  Target: LAMA2; (-) strand; PAM type: YTN; PAM sequence: CTT
tgtaaacacttcaaaaaaga

SEQ ID NO: 259992 - DNA, 20 bp, Artificial Sequence
  Description of Artificial Sequence: Synthetic oligonucleotide
  Target: LAMA2; (-) strand; PAM type: YTN; PAM sequence: CTC
aaaatagaaatgggcataag

SEQ ID NO: 259993 - DNA, 20 bp, Artificial Sequence
  Description of Artificial Sequence: Synthetic oligonucleotide
  Target: LAMA2; (-) strand; PAM type: YTN; PAM sequence: CTA
aggaaacaaacaactcaaaa

SEQ ID NO: 259994 - DNA, 20 bp, Artificial Sequence
  Description of Artificial Sequence: Synthetic oligonucleotide
  Target: LAMA2; (-) strand; PAM type: YTN; PAM sequence: TTA
ctaaggaaacaaacaactca

SEQ ID NO: 259995 - DNA, 20 bp, Artificial Sequence
  Description of Artificial Sequence: Synthetic oligonucleotide
  Target: LAMA2; (-) strand; PAM type: YTN; PAM sequence: TTG
caatgcattactaaggaaac

SEQ ID NO: 259996 - DNA, 20 bp, Artificial Sequence
  Description of Artificial Sequence: Synthetic oligonucleotide
  Target: LAMA2; (-) strand; PAM type: YTN; PAM sequence: CTT
gcaatgcattactaaggaaa

SEQ ID NO: 259997 - DNA, 20 bp, Artificial Sequence
  Description of Artificial Sequence: Synthetic oligonucleotide
  Target: LAMA2; (-) strand; PAM type: YTN; PAM sequence: TTA
aagaacatgtatccagaata

SEQ ID NO: 259998 - DNA, 20 bp, Artificial Sequence
  Description of Artificial Sequence: Synthetic oligonucleotide
  Target: LAMA2; (-) strand; PAM type: YTN; PAM sequence: TTA
acatacgttaaagaacatgt

SEQ ID NO: 259999 - DNA, 20 bp, Artificial Sequence
  Description of Artificial Sequence: Synthetic oligonucleotide
  Target: LAMA2; (-) strand; PAM type: YTN; PAM sequence: TTT
aacatacgttaaagaacatg

SEQ ID NO: 260000 - DNA, 20 bp, Artificial Sequence
  Description of Artificial Sequence: Synthetic oligonucleotide
  Target: LAMA2; (-) strand; PAM type: YTN; PAM sequence: CTT
taacatacgttaaagaacat

SEQ ID NO: 260001 - DNA, 20 bp, Artificial Sequence
  Description of Artificial Sequence: Synthetic oligonucleotide
  Target: LAMA2; (-) strand; PAM type: YTN; PAM sequence: CTA
tatgaaaagcaagctttaac

SEQ ID NO: 260002 - DNA, 20 bp, Artificial Sequence
  Description of Artificial Sequence: Synthetic oligonucleotide
  Target: LAMA2; (-) strand; PAM type: YTN; PAM sequence: CTA
ggtaaaaagcaatctatatg

SEQ ID NO: 260003 - DNA, 20 bp, Artificial Sequence
  Description of Artificial Sequence: Synthetic oligonucleotide
  Target: LAMA2; (-) strand; PAM type: YTN; PAM sequence: TTA
gatgatgaaactaggtaaaa

SEQ ID NO: 260004 - DNA, 20 bp, Artificial Sequence
  Description of Artificial Sequence: Synthetic oligonucleotide
  Target: LAMA2; (-) strand; PAM type: YTN; PAM sequence: TTA
taaagattagatgatgaaac

SEQ ID NO: 260005 - DNA, 20 bp, Artificial Sequence
  Description of Artificial Sequence: Synthetic oligonucleotide
  Target: LAMA2; (-) strand; PAM type: YTN; PAM sequence: TTT
ataaagattagatgatgaaa

SEQ ID NO: 260006 - DNA, 20 bp, Artificial Sequence
  Description of Artificial Sequence: Synthetic oligonucleotide
  Target: LAMA2; (-) strand; PAM type: YTN; PAM sequence: CTA
gtgtttataaagattagatg

SEQ ID NO: 260007 - DNA, 20 bp, Artificial Sequence
  Description of Artificial Sequence: Synthetic oligonucleotide
  Target: LAMA2; (-) strand; PAM type: YTN; PAM sequence: CTA
tagaagaaaaagataataag

SEQ ID NO: 260008 - DNA, 20 bp, Artificial Sequence
  Description of Artificial Sequence: Synthetic oligonucleotide
  Target: LAMA2; (-) strand; PAM type: YTN; PAM sequence: TTG
ggtagaacataaaaagtatg

SEQ ID NO: 260009 - DNA, 20 bp, Artificial Sequence
  Description of Artificial Sequence: Synthetic oligonucleotide
  Target: LAMA2; (-) strand; PAM type: YTN; PAM sequence: CTT
gggtagaacataaaaagtat

SEQ ID NO: 260010 - DNA, 20 bp, Artificial Sequence
  Description of Artificial Sequence: Synthetic oligonucleotide
  Target: LAMA2; (-) strand; PAM type: YTN; PAM sequence: TTC
ttgggtagaacataaaaagt

SEQ ID NO: 260011 - DNA, 20 bp, Artificial Sequence
  Description of Artificial Sequence: Synthetic oligonucleotide
  Target: LAMA2; (-) strand; PAM type: YTN; PAM sequence: TTT
cttgggtagaacataaaaag

SEQ ID NO: 260012 - DNA, 20 bp, Artificial Sequence
  Description of Artificial Sequence: Synthetic oligonucleotide
  Target: LAMA2; (-) strand; PAM type: YTN; PAM sequence: CTT
tcttgggtagaacataaaaa

SEQ ID NO: 260013 - DNA, 20 bp, Artificial Sequence
  Description of Artificial Sequence: Synthetic oligonucleotide
  Target: LAMA2; (-) strand; PAM type: YTN; PAM sequence: TTG
tctttcttgggtagaacata

SEQ ID NO: 260014 - DNA, 20 bp, Artificial Sequence
  Description of Artificial Sequence: Synthetic oligonucleotide
  Target: LAMA2; (-) strand; PAM type: YTN; PAM sequence: CTT
gtctttcttgggtagaacat

SEQ ID NO: 260015 - DNA, 20 bp, Artificial Sequence
  Description of Artificial Sequence: Synthetic oligonucleotide
  Target: LAMA2; (-) strand; PAM type: YTN; PAM sequence: TTG
gaccttgtctttcttgggta

SEQ ID NO: 260016 - DNA, 20 bp, Artificial Sequence
  Description of Artificial Sequence: Synthetic oligonucleotide
  Target: LAMA2; (-) strand; PAM type: YTN; PAM sequence: TTT
ggaccttgtctttcttgggt

SEQ ID NO: 260017 - DNA, 20 bp, Artificial Sequence
  Description of Artificial Sequence: Synthetic oligonucleotide
  Target: LAMA2; (-) strand; PAM type: YTN; PAM sequence: CTT
tggaccttgtctttcttggg

SEQ ID NO: 260018 - DNA, 20 bp, Artificial Sequence
  Description of Artificial Sequence: Synthetic oligonucleotide
  Target: LAMA2; (-) strand; PAM type: YTN; PAM sequence: TTG
aagaaaacatgggagagaaa

SEQ ID NO: 260019 - DNA, 20 bp, Artificial Sequence
  Description of Artificial Sequence: Synthetic oligonucleotide
  Target: LAMA2; (-) strand; PAM type: YTN; PAM sequence: CTT
gaagaaaacatgggagagaa

SEQ ID NO: 260020 - DNA, 20 bp, Artificial Sequence
  Description of Artificial Sequence: Synthetic oligonucleotide
  Target: LAMA2; (-) strand; PAM type: YTN; PAM sequence: TTC
ttgaagaaaacatgggagag

SEQ ID NO: 260021 - DNA, 20 bp, Artificial Sequence
  Description of Artificial Sequence: Synthetic oligonucleotide
  Target: LAMA2; (-) strand; PAM type: YTN; PAM sequence: CTT
cttgaagaaaacatgggaga

SEQ ID NO: 260022 - DNA, 20 bp, Artificial Sequence
  Description of Artificial Sequence: Synthetic oligonucleotide
  Target: LAMA2; (-) strand; PAM type: YTN; PAM sequence: CTA
aaacttcttgaagaaaacat

SEQ ID NO: 260023 - DNA, 20 bp, Artificial Sequence
  Description of Artificial Sequence: Synthetic oligonucleotide
  Target: LAMA2; (-) strand; PAM type: YTN; PAM sequence: CTC
taaaacttcttgaagaaaac

SEQ ID NO: 260024 - DNA, 20 bp, Artificial Sequence
  Description of Artificial Sequence: Synthetic oligonucleotide
  Target: LAMA2; (-) strand; PAM type: YTN; PAM sequence: CTA
aaactctaaaacttcttgaa

SEQ ID NO: 260025 - DNA, 20 bp, Artificial Sequence
  Description of Artificial Sequence: Synthetic oligonucleotide
  Target: LAMA2; (-) strand; PAM type: YTN; PAM sequence: TTA
agagctaaaactctaaaact

SEQ ID NO: 260026 - DNA, 20 bp, Artificial Sequence
  Description of Artificial Sequence: Synthetic oligonucleotide
  Target: LAMA2; (-) strand; PAM type: YTN; PAM sequence: TTT
aagagctaaaactctaaaac

SEQ ID NO: 260027 - DNA, 20 bp, Artificial Sequence
  Description of Artificial Sequence: Synthetic oligonucleotide
  Target: LAMA2; (-) strand; PAM type: YTN; PAM sequence: CTA
catttaagagctaaaactct

SEQ ID NO: 260028 - DNA, 20 bp, Artificial Sequence
  Description of Artificial Sequence: Synthetic oligonucleotide
  Target: LAMA2; (-) strand; PAM type: YTN; PAM sequence: TTC
aaaatggaatccaaacctac

SEQ ID NO: 260029 - DNA, 20 bp, Artificial Sequence
  Description of Artificial Sequence: Synthetic oligonucleotide
  Target: LAMA2; (-) strand; PAM type: YTN; PAM sequence: TTA
atattcaaaatggaatccaa

SEQ ID NO: 260030 - DNA, 20 bp, Artificial Sequence
  Description of Artificial Sequence: Synthetic oligonucleotide
  Target: LAMA2; (-) strand; PAM type: YTN; PAM sequence: CTG
atatatagaaaaattaatat

SEQ ID NO: 260031 - DNA, 20 bp, Artificial Sequence
  Description of Artificial Sequence: Synthetic oligonucleotide
  Target: LAMA2; (-) strand; PAM type: YTN; PAM sequence: TTA
cctgatatatagaaaaatta

SEQ ID NO: 260032 - DNA, 20 bp, Artificial Sequence
  Description of Artificial Sequence: Synthetic oligonucleotide
  Target: LAMA2; (-) strand; PAM type: YTN; PAM sequence: CTG
accattacctgatatataga

SEQ ID NO: 260033 - DNA, 20 bp, Artificial Sequence
  Description of Artificial Sequence: Synthetic oligonucleotide
  Target: LAMA2; (-) strand; PAM type: YTN; PAM sequence: CTC
tgaccattacctgatatata

SEQ ID NO: 260034 - DNA, 20 bp, Artificial Sequence
  Description of Artificial Sequence: Synthetic oligonucleotide
  Target: LAMA2; (-) strand; PAM type: YTN; PAM sequence: TTG
ggtatccataaaaagtgagc

SEQ ID NO: 260035 - DNA, 20 bp, Artificial Sequence
  Description of Artificial Sequence: Synthetic oligonucleotide
  Target: LAMA2; (-) strand; PAM type: YTN; PAM sequence: TTG
aaaaattgggtatccataaa

SEQ ID NO: 260036 - DNA, 20 bp, Artificial Sequence
  Description of Artificial Sequence: Synthetic oligonucleotide
  Target: LAMA2; (-) strand; PAM type: YTN; PAM sequence: TTT
gaaaaattgggtatccataa

SEQ ID NO: 260037 - DNA, 20 bp, Artificial Sequence
  Description of Artificial Sequence: Synthetic oligonucleotide
  Target: LAMA2; (-) strand; PAM type: YTN; PAM sequence: TTC
aacaaataatgtttgaaaaa

SEQ ID NO: 260038 - DNA, 20 bp, Artificial Sequence
  Description of Artificial Sequence: Synthetic oligonucleotide
  Target: LAMA2; (-) strand; PAM type: YTN; PAM sequence: TTT
caacaaataatgtttgaaaa

SEQ ID NO: 260039 - DNA, 20 bp, Artificial Sequence
  Description of Artificial Sequence: Synthetic oligonucleotide
  Target: LAMA2; (-) strand; PAM type: YTN; PAM sequence: TTT
tcaacaaataatgtttgaaa

SEQ ID NO: 260040 - DNA, 20 bp, Artificial Sequence
  Description of Artificial Sequence: Synthetic oligonucleotide
  Target: LAMA2; (-) strand; PAM type: YTN; PAM sequence: CTT
ttcaacaaataatgtttgaa

SEQ ID NO: 260041 - DNA, 20 bp, Artificial Sequence
  Description of Artificial Sequence: Synthetic oligonucleotide
  Target: LAMA2; (-) strand; PAM type: YTN; PAM sequence: TTC
aatgggaaaaaggatagtct

SEQ ID NO: 260042 - DNA, 20 bp, Artificial Sequence
  Description of Artificial Sequence: Synthetic oligonucleotide
  Target: LAMA2; (-) strand; PAM type: YTN; PAM sequence: TTG
acaaaggagtcaaagtaatt

SEQ ID NO: 260043 - DNA, 20 bp, Artificial Sequence
  Description of Artificial Sequence: Synthetic oligonucleotide
  Target: LAMA2; (-) strand; PAM type: YTN; PAM sequence: TTT
gacaaaggagtcaaagtaat

SEQ ID NO: 260044 - DNA, 20 bp, Artificial Sequence
  Description of Artificial Sequence: Synthetic oligonucleotide
  Target: LAMA2; (-) strand; PAM type: YTN; PAM sequence: TTT
tgacaaaggagtcaaagtaa

SEQ ID NO: 260045 - DNA, 20 bp, Artificial Sequence
  Description of Artificial Sequence: Synthetic oligonucleotide
  Target: LAMA2; (-) strand; PAM type: YTN; PAM sequence: TTG
atagattttgacaaaggagt

SEQ ID NO: 260046 - DNA, 20 bp, Artificial Sequence
  Description of Artificial Sequence: Synthetic oligonucleotide
  Target: LAMA2; (-) strand; PAM type: YTN; PAM sequence: TTA
acataagaatagatcggtga

SEQ ID NO: 260047 - DNA, 20 bp, Artificial Sequence
  Description of Artificial Sequence: Synthetic oligonucleotide
  Target: LAMA2; (-) strand; PAM type: YTN; PAM sequence: CTA
gtattaacataagaatagat

SEQ ID NO: 260048 - DNA, 20 bp, Artificial Sequence
  Description of Artificial Sequence: Synthetic oligonucleotide
  Target: LAMA2; (-) strand; PAM type: YTN; PAM sequence: TTA
actagtattaacataagaat

SEQ ID NO: 260049 - DNA, 20 bp, Artificial Sequence
  Description of Artificial Sequence: Synthetic oligonucleotide
  Target: LAMA2; (-) strand; PAM type: YTN; PAM sequence: TTA
acatattaactagtattaac

SEQ ID NO: 260050 - DNA, 20 bp, Artificial Sequence
  Description of Artificial Sequence: Synthetic oligonucleotide
  Target: LAMA2; (-) strand; PAM type: YTN; PAM sequence: CTA
caataattaacatattaact

SEQ ID NO: 260051 - DNA, 20 bp, Artificial Sequence
  Description of Artificial Sequence: Synthetic oligonucleotide
  Target: LAMA2; (-) strand; PAM type: YTN; PAM sequence: CTG
gaaagctacaataattaaca

SEQ ID NO: 260052 - DNA, 20 bp, Artificial Sequence
  Description of Artificial Sequence: Synthetic oligonucleotide
  Target: LAMA2; (-) strand; PAM type: YTN; PAM sequence: TTG
ctggaaagctacaataatta

SEQ ID NO: 260053 - DNA, 20 bp, Artificial Sequence
  Description of Artificial Sequence: Synthetic oligonucleotide
  Target: LAMA2; (-) strand; PAM type: YTN; PAM sequence: CTT
gctggaaagctacaataatt

SEQ ID NO: 260054 - DNA, 20 bp, Artificial Sequence
  Description of Artificial Sequence: Synthetic oligonucleotide
  Target: LAMA2; (-) strand; PAM type: YTN; PAM sequence: TTA
tgacttgctggaaagctaca

SEQ ID NO: 260055 - DNA, 20 bp, Artificial Sequence
  Description of Artificial Sequence: Synthetic oligonucleotide
  Target: LAMA2; (-) strand; PAM type: YTN; PAM sequence: TTT
atgacttgctggaaagctac

SEQ ID NO: 260056 - DNA, 20 bp, Artificial Sequence
  Description of Artificial Sequence: Synthetic oligonucleotide
  Target: LAMA2; (-) strand; PAM type: YTN; PAM sequence: TTT
tatgacttgctggaaagcta

SEQ ID NO: 260057 - DNA, 20 bp, Artificial Sequence
  Description of Artificial Sequence: Synthetic oligonucleotide
  Target: LAMA2; (-) strand; PAM type: YTN; PAM sequence: CTG
attttatgacttgctggaaa

SEQ ID NO: 260058 - DNA, 20 bp, Artificial Sequence
  Description of Artificial Sequence: Synthetic oligonucleotide
  Target: LAMA2; (-) strand; PAM type: YTN; PAM sequence: TTA
caatacctgattttatgact

SEQ ID NO: 260059 - DNA, 20 bp, Artificial Sequence
  Description of Artificial Sequence: Synthetic oligonucleotide
  Target: LAMA2; (-) strand; PAM type: YTN; PAM sequence: TTT
acaatacctgattttatgac

SEQ ID NO: 260060 - DNA, 20 bp, Artificial Sequence
  Description of Artificial Sequence: Synthetic oligonucleotide
  Target: LAMA2; (-) strand; PAM type: YTN; PAM sequence: TTG
aggaatttacaatacctgat

SEQ ID NO: 260061 - DNA, 20 bp, Artificial Sequence
  Description of Artificial Sequence: Synthetic oligonucleotide
  Target: LAMA2; (-) strand; PAM type: YTN; PAM sequence: TTG
gaaacgatgaatgaggttga

SEQ ID NO: 260062 - DNA, 20 bp, Artificial Sequence
  Description of Artificial Sequence: Synthetic oligonucleotide
  Target: LAMA2; (-) strand; PAM type: YTN; PAM sequence: CTC
aaaaggtattggaaacgatg

SEQ ID NO: 260063 - DNA, 20 bp, Artificial Sequence
  Description of Artificial Sequence: Synthetic oligonucleotide
  Target: LAMA2; (-) strand; PAM type: YTN; PAM sequence: CTA
aagtactcaaaaggtattgg

SEQ ID NO: 260064 - DNA, 20 bp, Artificial Sequence
  Description of Artificial Sequence: Synthetic oligonucleotide
  Target: LAMA2; (-) strand; PAM type: YTN; PAM sequence: TTA
tgtggaaatgtaaaggagct

SEQ ID NO: 260065 - DNA, 20 bp, Artificial Sequence
  Description of Artificial Sequence: Synthetic oligonucleotide
  Target: LAMA2; (-) strand; PAM type: YTN; PAM sequence: TTA
aaagttatgtggaaatgtaa

SEQ ID NO: 260066 - DNA, 20 bp, Artificial Sequence
  Description of Artificial Sequence: Synthetic oligonucleotide
  Target: LAMA2; (-) strand; PAM type: YTN; PAM sequence: TTT
aaaagttatgtggaaatgta

SEQ ID NO: 260067 - DNA, 20 bp, Artificial Sequence
  Description of Artificial Sequence: Synthetic oligonucleotide
  Target: LAMA2; (-) strand; PAM type: YTN; PAM sequence: CTA
aatttaaaagttatgtggaa

SEQ ID NO: 260068 - DNA, 20 bp, Artificial Sequence
  Description of Artificial Sequence: Synthetic oligonucleotide
  Target: LAMA2; (-) strand; PAM type: YTN; PAM sequence: TTG
acatgctaaatttaaaagtt

SEQ ID NO: 260069 - DNA, 20 bp, Artificial Sequence
  Description of Artificial Sequence: Synthetic oligonucleotide
  Target: LAMA2; (-) strand; PAM type: YTN; PAM sequence: TTG
gtaaagaattgacatgctaa

SEQ ID NO: 260070 - DNA, 20 bp, Artificial Sequence
  Description of Artificial Sequence: Synthetic oligonucleotide
  Target: LAMA2; (-) strand; PAM type: YTN; PAM sequence: TTT
ggtaaagaattgacatgcta

SEQ ID NO: 260071 - DNA, 20 bp, Artificial Sequence
  Description of Artificial Sequence: Synthetic oligonucleotide
  Target: LAMA2; (-) strand; PAM type: YTN; PAM sequence: TTT
tggtaaagaattgacatgct

SEQ ID NO: 260072 - DNA, 20 bp, Artificial Sequence
  Description of Artificial Sequence: Synthetic oligonucleotide
  Target: LAMA2; (-) strand; PAM type: YTN; PAM sequence: TTT
ttggtaaagaattgacatgc

SEQ ID NO: 260073 - DNA, 20 bp, Artificial Sequence
  Description of Artificial Sequence: Synthetic oligonucleotide
  Target: LAMA2; (-) strand; PAM type: YTN; PAM sequence: CTT
tttggtaaagaattgacatg

SEQ ID NO: 260074 - DNA, 20 bp, Artificial Sequence
  Description of Artificial Sequence: Synthetic oligonucleotide
  Target: LAMA2; (-) strand; PAM type: YTN; PAM sequence: CTA
gcaggctttttggtaaagaa

SEQ ID NO: 260075 - DNA, 20 bp, Artificial Sequence
  Description of Artificial Sequence: Synthetic oligonucleotide
  Target: LAMA2; (-) strand; PAM type: YTN; PAM sequence: TTC
agccaaatcctagcaggctt

SEQ ID NO: 260076 - DNA, 20 bp, Artificial Sequence
  Description of Artificial Sequence: Synthetic oligonucleotide
  Target: LAMA2; (-) strand; PAM type: YTN; PAM sequence: TTT
cagccaaatcctagcaggct

SEQ ID NO: 260077 - DNA, 20 bp, Artificial Sequence
  Description of Artificial Sequence: Synthetic oligonucleotide
  Target: LAMA2; (-) strand; PAM type: YTN; PAM sequence: TTC
aatataatttcagccaaatc

SEQ ID NO: 260078 - DNA, 20 bp, Artificial Sequence
  Description of Artificial Sequence: Synthetic oligonucleotide
  Target: LAMA2; (-) strand; PAM type: YTN; PAM sequence: CTA
tcaattcaatataatttcag

SEQ ID NO: 260079 - DNA, 20 bp, Artificial Sequence
  Description of Artificial Sequence: Synthetic oligonucleotide
  Target: LAMA2; (-) strand; PAM type: YTN; PAM sequence: TTG
atctatcaattcaatataat

SEQ ID NO: 260080 - DNA, 20 bp, Artificial Sequence
  Description of Artificial Sequence: Synthetic oligonucleotide
  Target: LAMA2; (-) strand; PAM type: YTN; PAM sequence: TTC
ccaaattgatctatcaattc

SEQ ID NO: 260081 - DNA, 20 bp, Artificial Sequence
  Description of Artificial Sequence: Synthetic oligonucleotide
  Target: LAMA2; (-) strand; PAM type: YTN; PAM sequence: CTT
cccaaattgatctatcaatt

SEQ ID NO: 260082 - DNA, 20 bp, Artificial Sequence
  Description of Artificial Sequence: Synthetic oligonucleotide
  Target: LAMA2; (-) strand; PAM type: YTN; PAM sequence: TTC
ttcccaaattgatctatcaa

SEQ ID NO: 260083 - DNA, 20 bp, Artificial Sequence
  Description of Artificial Sequence: Synthetic oligonucleotide
  Target: LAMA2; (-) strand; PAM type: YTN; PAM sequence: CTG
tcaattcttcccaaattgat

SEQ ID NO: 260084 - DNA, 20 bp, Artificial Sequence
  Description of Artificial Sequence: Synthetic oligonucleotide
  Target: LAMA2; (-) strand; PAM type: YTN; PAM sequence: TTA
agctgtcaattcttcccaaa

SEQ ID NO: 260085 - DNA, 20 bp, Artificial Sequence
  Description of Artificial Sequence: Synthetic oligonucleotide
  Target: LAMA2; (-) strand; PAM type: YTN; PAM sequence: TTT
aagctgtcaattcttcccaa

SEQ ID NO: 260086 - DNA, 20 bp, Artificial Sequence
  Description of Artificial Sequence: Synthetic oligonucleotide
  Target: LAMA2; (-) strand; PAM type: YTN; PAM sequence: TTT
taagctgtcaattcttccca

SEQ ID NO: 260087 - DNA, 20 bp, Artificial Sequence
  Description of Artificial Sequence: Synthetic oligonucleotide
  Target: LAMA2; (-) strand; PAM type: YTN; PAM sequence: CTT
ttaagctgtcaattcttccc

SEQ ID NO: 260088 - DNA, 20 bp, Artificial Sequence
  Description of Artificial Sequence: Synthetic oligonucleotide
  Target: LAMA2; (-) strand; PAM type: YTN; PAM sequence: CTA
atacttttaagctgtcaatt

SEQ ID NO: 260089 - DNA, 20 bp, Artificial Sequence
  Description of Artificial Sequence: Synthetic oligonucleotide
  Target: LAMA2; (-) strand; PAM type: YTN; PAM sequence: CTG
ggatatctaatacttttaag

SEQ ID NO: 260090 - DNA, 20 bp, Artificial Sequence
  Description of Artificial Sequence: Synthetic oligonucleotide
  Target: LAMA2; (-) strand; PAM type: YTN; PAM sequence: TTC
atacactgggatatctaata

SEQ ID NO: 260091 - DNA, 20 bp, Artificial Sequence
  Description of Artificial Sequence: Synthetic oligonucleotide
  Target: LAMA2; (-) strand; PAM type: YTN; PAM sequence: TTA
tgccatgttcatacactggg

SEQ ID NO: 260092 - DNA, 20 bp, Artificial Sequence
  Description of Artificial Sequence: Synthetic oligonucleotide
  Target: LAMA2; (-) strand; PAM type: YTN; PAM sequence: CTA
aaaaaatgcagagttatgcc

SEQ ID NO: 260093 - DNA, 20 bp, Artificial Sequence
  Description of Artificial Sequence: Synthetic oligonucleotide
  Target: LAMA2; (-) strand; PAM type: YTN; PAM sequence: TTA
taacaacctaaaaaaatgca

SEQ ID NO: 260094 - DNA, 20 bp, Artificial Sequence
  Description of Artificial Sequence: Synthetic oligonucleotide
  Target: LAMA2; (-) strand; PAM type: YTN; PAM sequence: CTG
agaaaaaattataacaacct

SEQ ID NO: 260095 - DNA, 20 bp, Artificial Sequence
  Description of Artificial Sequence: Synthetic oligonucleotide
  Target: LAMA2; (-) strand; PAM type: YTN; PAM sequence: TTC
tgagaaaaaattataacaac

SEQ ID NO: 260096 - DNA, 20 bp, Artificial Sequence
  Description of Artificial Sequence: Synthetic oligonucleotide
  Target: LAMA2; (-) strand; PAM type: YTN; PAM sequence: TTT
ctgagaaaaaattataacaa

SEQ ID NO: 260097 - DNA, 20 bp, Artificial Sequence
  Description of Artificial Sequence: Synthetic oligonucleotide
  Target: LAMA2; (-) strand; PAM type: YTN; PAM sequence: CTA
caaacatttctgagaaaaaa

SEQ ID NO: 260098 - DNA, 20 bp, Artificial Sequence
  Description of Artificial Sequence: Synthetic oligonucleotide
  Target: LAMA2; (-) strand; PAM type: YTN; PAM sequence: TTG
cacatcaaaaactacaaaca

SEQ ID NO: 260099 - DNA, 20 bp, Artificial Sequence
  Description of Artificial Sequence: Synthetic oligonucleotide
  Target: LAMA2; (-) strand; PAM type: YTN; PAM sequence: CTT
gcacatcaaaaactacaaac

SEQ ID NO: 260100 - DNA, 20 bp, Artificial Sequence
  Description of Artificial Sequence: Synthetic oligonucleotide
  Target: LAMA2; (-) strand; PAM type: YTN; PAM sequence: TTA
acaatatatatgcaaagctt

SEQ ID NO: 260101 - DNA, 20 bp, Artificial Sequence
  Description of Artificial Sequence: Synthetic oligonucleotide
  Target: LAMA2; (-) strand; PAM type: YTN; PAM sequence: TTT
aacaatatatatgcaaagct

SEQ ID NO: 260102 - DNA, 20 bp, Artificial Sequence
  Description of Artificial Sequence: Synthetic oligonucleotide
  Target: LAMA2; (-) strand; PAM type: YTN; PAM sequence: TTG
ataaaaaatatgaaacggat

SEQ ID NO: 260103 - DNA, 20 bp, Artificial Sequence
  Description of Artificial Sequence: Synthetic oligonucleotide
  Target: LAMA2; (-) strand; PAM type: YTN; PAM sequence: TTT
gataaaaaatatgaaacgga

SEQ ID NO: 260104 - DNA, 20 bp, Artificial Sequence
  Description of Artificial Sequence: Synthetic oligonucleotide
  Target: LAMA2; (-) strand; PAM type: YTN; PAM sequence: TTT
tgataaaaaatatgaaacgg

SEQ ID NO: 260105 - DNA, 20 bp, Artificial Sequence
  Description of Artificial Sequence: Synthetic oligonucleotide
  Target: LAMA2; (-) strand; PAM type: YTN; PAM sequence: CTT
ttgataaaaaatatgaaacg

SEQ ID NO: 260106 - DNA, 20 bp, Artificial Sequence
  Description of Artificial Sequence: Synthetic oligonucleotide
  Target: LAMA2; (-) strand; PAM type: YTN; PAM sequence: TTG
cttttgataaaaaatatgaa

SEQ ID NO: 260107 - DNA, 20 bp, Artificial Sequence
  Description of Artificial Sequence: Synthetic oligonucleotide
  Target: LAMA2; (-) strand; PAM type: YTN; PAM sequence: TTT
gcttttgataaaaaatatga

SEQ ID NO: 260108 - DNA, 20 bp, Artificial Sequence
  Description of Artificial Sequence: Synthetic oligonucleotide
  Target: LAMA2; (-) strand; PAM type: YTN; PAM sequence: CTG
aaatggaacacagcatttgc

SEQ ID NO: 260109 - DNA, 20 bp, Artificial Sequence
  Description of Artificial Sequence: Synthetic oligonucleotide
  Target: LAMA2; (-) strand; PAM type: YTN; PAM sequence: TTA
aaactgaaatggaacacagc

SEQ ID NO: 260110 - DNA, 20 bp, Artificial Sequence
  Description of Artificial Sequence: Synthetic oligonucleotide
  Target: LAMA2; (-) strand; PAM type: YTN; PAM sequence: TTT
aaaactgaaatggaacacag

SEQ ID NO: 260111 - DNA, 20 bp, Artificial Sequence
  Description of Artificial Sequence: Synthetic oligonucleotide
  Target: LAMA2; (-) strand; PAM type: YTN; PAM sequence: CTA
gtaacaagcaatttaaaact

SEQ ID NO: 260112 - DNA, 20 bp, Artificial Sequence
  Description of Artificial Sequence: Synthetic oligonucleotide
  Target: LAMA2; (-) strand; PAM type: YTN; PAM sequence: TTC
tagtaacaagcaatttaaaa

SEQ ID NO: 260113 - DNA, 20 bp, Artificial Sequence
  Description of Artificial Sequence: Synthetic oligonucleotide
  Target: LAMA2; (-) strand; PAM type: YTN; PAM sequence: CTA
ttctagtaacaagcaattta

SEQ ID NO: 260114 - DNA, 20 bp, Artificial Sequence
  Description of Artificial Sequence: Synthetic oligonucleotide
  Target: LAMA2; (-) strand; PAM type: YTN; PAM sequence: TTC
tattctagtaacaagcaatt

SEQ ID NO: 260115 - DNA, 20 bp, Artificial Sequence
  Description of Artificial Sequence: Synthetic oligonucleotide
  Target: LAMA2; (-) strand; PAM type: YTN; PAM sequence: TTT
ctattctagtaacaagcaat

SEQ ID NO: 260116 - DNA, 20 bp, Artificial Sequence
  Description of Artificial Sequence: Synthetic oligonucleotide
  Target: LAMA2; (-) strand; PAM type: YTN; PAM sequence: TTT
tctattctagtaacaagcaa

SEQ ID NO: 260117 - DNA, 20 bp, Artificial Sequence
  Description of Artificial Sequence: Synthetic oligonucleotide
  Target: LAMA2; (-) strand; PAM type: YTN; PAM sequence: TTT
ttctattctagtaacaagca

SEQ ID NO: 260118 - DNA, 20 bp, Artificial Sequence
  Description of Artificial Sequence: Synthetic oligonucleotide
  Target: LAMA2; (-) strand; PAM type: YTN; PAM sequence: TTG
tatttttctattctagtaac

SEQ ID NO: 260119 - DNA, 20 bp, Artificial Sequence
  Description of Artificial Sequence: Synthetic oligonucleotide
  Target: LAMA2; (-) strand; PAM type: YTN; PAM sequence: TTA
cagtatagaaggataaggta

SEQ ID NO: 260120 - DNA, 20 bp, Artificial Sequence
  Description of Artificial Sequence: Synthetic oligonucleotide
  Target: LAMA2; (-) strand; PAM type: YTN; PAM sequence: TTA
gcaagattacagtatagaag

SEQ ID NO: 260121 - DNA, 20 bp, Artificial Sequence
  Description of Artificial Sequence: Synthetic oligonucleotide
  Target: LAMA2; (-) strand; PAM type: YTN; PAM sequence: TTT
agcaagattacagtatagaa

SEQ ID NO: 260122 - DNA, 20 bp, Artificial Sequence
  Description of Artificial Sequence: Synthetic oligonucleotide
  Target: LAMA2; (-) strand; PAM type: YTN; PAM sequence: CTA
ataagtttagcaagattaca

SEQ ID NO: 260123 - DNA, 20 bp, Artificial Sequence
  Description of Artificial Sequence: Synthetic oligonucleotide
  Target: LAMA2; (-) strand; PAM type: YTN; PAM sequence: CTA
gaactaataagtttagcaag

SEQ ID NO: 260124 - DNA, 20 bp, Artificial Sequence
  Description of Artificial Sequence: Synthetic oligonucleotide
  Target: LAMA2; (-) strand; PAM type: YTN; PAM sequence: CTA
aatggaccaaaaagaaacta

SEQ ID NO: 260125 - DNA, 20 bp, Artificial Sequence
  Description of Artificial Sequence: Synthetic oligonucleotide
  Target: LAMA2; (-) strand; PAM type: YTN; PAM sequence: CTC
actaaatggaccaaaaagaa

SEQ ID NO: 260126 - DNA, 20 bp, Artificial Sequence
  Description of Artificial Sequence: Synthetic oligonucleotide
  Target: LAMA2; (-) strand; PAM type: YTN; PAM sequence: CTA
caagaaaatctcactaaatg

SEQ ID NO: 260127 - DNA, 20 bp, Artificial Sequence
  Description of Artificial Sequence: Synthetic oligonucleotide
  Target: LAMA2; (-) strand; PAM type: YTN; PAM sequence: TTA
tctacaagaaaatctcacta

SEQ ID NO: 260128 - DNA, 20 bp, Artificial Sequence
  Description of Artificial Sequence: Synthetic oligonucleotide
  Target: LAMA2; (-) strand; PAM type: YTN; PAM sequence: TTG
cagatgacatgattatctac

SEQ ID NO: 260129 - DNA, 20 bp, Artificial Sequence
  Description of Artificial Sequence: Synthetic oligonucleotide
  Target: LAMA2; (-) strand; PAM type: YTN; PAM sequence: TTT
gcagatgacatgattatcta

SEQ ID NO: 260130 - DNA, 20 bp, Artificial Sequence
  Description of Artificial Sequence: Synthetic oligonucleotide
  Target: LAMA2; (-) strand; PAM type: YTN; PAM sequence: CTT
tgcagatgacatgattatct

SEQ ID NO: 260131 - DNA, 20 bp, Artificial Sequence
  Description of Artificial Sequence: Synthetic oligonucleotide
  Target: LAMA2; (-) strand; PAM type: YTN; PAM sequence: CTC
tttgcagatgacatgattat

SEQ ID NO: 260132 - DNA, 20 bp, Artificial Sequence
  Description of Artificial Sequence: Synthetic oligonucleotide
  Target: LAMA2; (-) strand; PAM type: YTN; PAM sequence: CTC
tctttgcagatgacatgatt

SEQ ID NO: 260133 - DNA, 20 bp, Artificial Sequence
  Description of Artificial Sequence: Synthetic oligonucleotide
  Target: LAMA2; (-) strand; PAM type: YTN; PAM sequence: TTA
gaaaggaagtaaatctctct

SEQ ID NO: 260134 - DNA, 20 bp, Artificial Sequence
  Description of Artificial Sequence: Synthetic oligonucleotide
  Target: LAMA2; (-) strand; PAM type: YTN; PAM sequence: TTA
cacagattagaaaggaagta

SEQ ID NO: 260135 - DNA, 20 bp, Artificial Sequence
  Description of Artificial Sequence: Synthetic oligonucleotide
  Target: LAMA2; (-) strand; PAM type: YTN; PAM sequence: CTA
caataggacaagaaaatgcc

SEQ ID NO: 260136 - DNA, 20 bp, Artificial Sequence
  Description of Artificial Sequence: Synthetic oligonucleotide
  Target: LAMA2; (-) strand; PAM type: YTN; PAM sequence: TTA
ctacaataggacaagaaaat

SEQ ID NO: 260137 - DNA, 20 bp, Artificial Sequence
  Description of Artificial Sequence: Synthetic oligonucleotide
  Target: LAMA2; (-) strand; PAM type: YTN; PAM sequence: TTT
actacaataggacaagaaaa

SEQ ID NO: 260138 - DNA, 20 bp, Artificial Sequence
  Description of Artificial Sequence: Synthetic oligonucleotide
  Target: LAMA2; (-) strand; PAM type: YTN; PAM sequence: CTA
gtcaatagtttactacaata

SEQ ID NO: 260139 - DNA, 20 bp, Artificial Sequence
  Description of Artificial Sequence: Synthetic oligonucleotide
  Target: LAMA2; (-) strand; PAM type: YTN; PAM sequence: TTC
tagtcaatagtttactacaa

SEQ ID NO: 260140 - DNA, 20 bp, Artificial Sequence
  Description of Artificial Sequence: Synthetic oligonucleotide
  Target: LAMA2; (-) strand; PAM type: YTN; PAM sequence: CTT
ctagtcaatagtttactaca

SEQ ID NO: 260141 - DNA, 20 bp, Artificial Sequence
  Description of Artificial Sequence: Synthetic oligonucleotide
  Target: LAMA2; (-) strand; PAM type: YTN; PAM sequence: TTC
caccacttctagtcaatagt

SEQ ID NO: 260142 - DNA, 20 bp, Artificial Sequence
  Description of Artificial Sequence: Synthetic oligonucleotide
  Target: LAMA2; (-) strand; PAM type: YTN; PAM sequence: CTT
ccaccacttctagtcaatag

SEQ ID NO: 260143 - DNA, 20 bp, Artificial Sequence
  Description of Artificial Sequence: Synthetic oligonucleotide
  Target: LAMA2; (-) strand; PAM type: YTN; PAM sequence: TTG
cttccaccacttctagtcaa

SEQ ID NO: 260144 - DNA, 20 bp, Artificial Sequence
  Description of Artificial Sequence: Synthetic oligonucleotide
  Target: LAMA2; (-) strand; PAM type: YTN; PAM sequence: TTT
gcttccaccacttctagtca

SEQ ID NO: 260145 - DNA, 20 bp, Artificial Sequence
  Description of Artificial Sequence: Synthetic oligonucleotide
  Target: LAMA2; (-) strand; PAM type: YTN; PAM sequence: CTA
aggaacaaggcaaggatatt

SEQ ID NO: 260146 - DNA, 20 bp, Artificial Sequence
  Description of Artificial Sequence: Synthetic oligonucleotide
  Target: LAMA2; (-) strand; PAM type: YTN; PAM sequence: TTA
aactaaggaacaaggcaagg

SEQ ID NO: 260147 - DNA, 20 bp, Artificial Sequence
  Description of Artificial Sequence: Synthetic oligonucleotide
  Target: LAMA2; (-) strand; PAM type: YTN; PAM sequence: CTT
aaactaaggaacaaggcaag

SEQ ID NO: 260148 - DNA, 20 bp, Artificial Sequence
  Description of Artificial Sequence: Synthetic oligonucleotide
  Target: LAMA2; (-) strand; PAM type: YTN; PAM sequence: TTC
cacttaaactaaggaacaag

SEQ ID NO: 260149 - DNA, 20 bp, Artificial Sequence
  Description of Artificial Sequence: Synthetic oligonucleotide
  Target: LAMA2; (-) strand; PAM type: YTN; PAM sequence: TTT
ccacttaaactaaggaacaa

SEQ ID NO: 260150 - DNA, 20 bp, Artificial Sequence
  Description of Artificial Sequence: Synthetic oligonucleotide
  Target: LAMA2; (-) strand; PAM type: YTN; PAM sequence: CTT
tccacttaaactaaggaaca

SEQ ID NO: 260151 - DNA, 20 bp, Artificial Sequence
  Description of Artificial Sequence: Synthetic oligonucleotide
  Target: LAMA2; (-) strand; PAM type: YTN; PAM sequence: TTA
taaaagacaatgctttccac

SEQ ID NO: 260152 - DNA, 20 bp, Artificial Sequence
  Description of Artificial Sequence: Synthetic oligonucleotide
  Target: LAMA2; (-) strand; PAM type: YTN; PAM sequence: TTC
aattataaaagacaatgctt

SEQ ID NO: 260153 - DNA, 20 bp, Artificial Sequence
  Description of Artificial Sequence: Synthetic oligonucleotide
  Target: LAMA2; (-) strand; PAM type: YTN; PAM sequence: TTT
caattataaaagacaatgct

SEQ ID NO: 260154 - DNA, 20 bp, Artificial Sequence
  Description of Artificial Sequence: Synthetic oligonucleotide
  Target: LAMA2; (-) strand; PAM type: YTN; PAM sequence: TTT
tcaattataaaagacaatgc

SEQ ID NO: 260155 - DNA, 20 bp, Artificial Sequence
  Description of Artificial Sequence: Synthetic oligonucleotide
  Target: LAMA2; (-) strand; PAM type: YTN; PAM sequence: CTA
caggtaaaatatagccaaca

SEQ ID NO: 260156 - DNA, 20 bp, Artificial Sequence
  Description of Artificial Sequence: Synthetic oligonucleotide
  Target: LAMA2; (-) strand; PAM type: YTN; PAM sequence: CTC
aaaacaataaaaagcaccta

SEQ ID NO: 260157 - DNA, 20 bp, Artificial Sequence
  Description of Artificial Sequence: Synthetic oligonucleotide
  Target: LAMA2; (-) strand; PAM type: YTN; PAM sequence: CTA
aaaacacgagggggcatcct

SEQ ID NO: 260158 - DNA, 20 bp, Artificial Sequence
  Description of Artificial Sequence: Synthetic oligonucleotide
  Target: LAMA2; (-) strand; PAM type: YTN; PAM sequence: TTA
gcaaactaaaaacacgaggg

SEQ ID NO: 260159 - DNA, 20 bp, Artificial Sequence
  Description of Artificial Sequence: Synthetic oligonucleotide
  Target: LAMA2; (-) strand; PAM type: YTN; PAM sequence: CTT
agcaaactaaaaacacgagg

SEQ ID NO: 260160 - DNA, 20 bp, Artificial Sequence
  Description of Artificial Sequence: Synthetic oligonucleotide
  Target: LAMA2; (-) strand; PAM type: YTN; PAM sequence: CTC
ttagcaaactaaaaacacga

SEQ ID NO: 260161 - DNA, 20 bp, Artificial Sequence
  Description of Artificial Sequence: Synthetic oligonucleotide
  Target: LAMA2; (-) strand; PAM type: YTN; PAM sequence: TTG
ataaaagctcttagcaaact

SEQ ID NO: 260162 - DNA, 20 bp, Artificial Sequence
  Description of Artificial Sequence: Synthetic oligonucleotide
  Target: LAMA2; (-) strand; PAM type: YTN; PAM sequence: CTT
gataaaagctcttagcaaac

SEQ ID NO: 260163 - DNA, 20 bp, Artificial Sequence
  Description of Artificial Sequence: Synthetic oligonucleotide
  Target: LAMA2; (-) strand; PAM type: YTN; PAM sequence: TTC
ttgataaaagctcttagcaa

SEQ ID NO: 260164 - DNA, 20 bp, Artificial Sequence
  Description of Artificial Sequence: Synthetic oligonucleotide
  Target: LAMA2; (-) strand; PAM type: YTN; PAM sequence: TTG
aacacatattcttgataaaa

SEQ ID NO: 260165 - DNA, 20 bp, Artificial Sequence
  Description of Artificial Sequence: Synthetic oligonucleotide
  Target: LAMA2; (-) strand; PAM type: YTN; PAM sequence: TTA
acaaaattgaacacatattc

SEQ ID NO: 260166 - DNA, 20 bp, Artificial Sequence
  Description of Artificial Sequence: Synthetic oligonucleotide
  Target: LAMA2; (-) strand; PAM type: YTN; PAM sequence: TTT
aacaaaattgaacacatatt

SEQ ID NO: 260167 - DNA, 20 bp, Artificial Sequence
  Description of Artificial Sequence: Synthetic oligonucleotide
  Target: LAMA2; (-) strand; PAM type: YTN; PAM sequence: CTC
aatagatgcagaaaagtcat

SEQ ID NO: 260168 - DNA, 20 bp, Artificial Sequence
  Description of Artificial Sequence: Synthetic oligonucleotide
  Target: LAMA2; (-) strand; PAM type: YTN; PAM sequence: TTA
aaaagaaatatcatatggtc

SEQ ID NO: 260169 - DNA, 20 bp, Artificial Sequence
  Description of Artificial Sequence: Synthetic oligonucleotide
  Target: LAMA2; (-) strand; PAM type: YTN; PAM sequence: CTT
aaaaagaaatatcatatggt

SEQ ID NO: 260170 - DNA, 20 bp, Artificial Sequence
  Description of Artificial Sequence: Synthetic oligonucleotide
  Target: LAMA2; (-) strand; PAM type: YTN; PAM sequence: TTA
acagcttaaaaagaaatatc

SEQ ID NO: 260171 - DNA, 20 bp, Artificial Sequence
  Description of Artificial Sequence: Synthetic oligonucleotide
  Target: LAMA2; (-) strand; PAM type: YTN; PAM sequence: CTG
tcatattaacagcttaaaaa

SEQ ID NO: 260172 - DNA, 20 bp, Artificial Sequence
  Description of Artificial Sequence: Synthetic oligonucleotide
  Target: LAMA2; (-) strand; PAM type: YTN; PAM sequence: TTG
aaaatcaatcagtataatct

SEQ ID NO: 260173 - DNA, 20 bp, Artificial Sequence
  Description of Artificial Sequence: Synthetic oligonucleotide
  Target: LAMA2; (-) strand; PAM type: YTN; PAM sequence: TTG
atatgttgaaaatcaatcag

SEQ ID NO: 260174 - DNA, 20 bp, Artificial Sequence
  Description of Artificial Sequence: Synthetic oligonucleotide
  Target: LAMA2; (-) strand; PAM type: YTN; PAM sequence: CTG
gattgatatgttgaaaatca

SEQ ID NO: 260175 - DNA, 20 bp, Artificial Sequence
  Description of Artificial Sequence: Synthetic oligonucleotide
  Target: LAMA2; (-) strand; PAM type: YTN; PAM sequence: TTG
taagactggattgatatgtt

SEQ ID NO: 260176 - DNA, 20 bp, Artificial Sequence
  Description of Artificial Sequence: Synthetic oligonucleotide
  Target: LAMA2; (-) strand; PAM type: YTN; PAM sequence: CTG
aggattgtaagactggattg

SEQ ID NO: 260177 - DNA, 20 bp, Artificial Sequence
  Description of Artificial Sequence: Synthetic oligonucleotide
  Target: LAMA2; (-) strand; PAM type: YTN; PAM sequence: TTA
atctgaggattgtaagactg

SEQ ID NO: 260178 - DNA, 20 bp, Artificial Sequence
  Description of Artificial Sequence: Synthetic oligonucleotide
  Target: LAMA2; (-) strand; PAM type: YTN; PAM sequence: TTA
aaaggataatccccatggcc

SEQ ID NO: 260179 - DNA, 20 bp, Artificial Sequence
  Description of Artificial Sequence: Synthetic oligonucleotide
  Target: LAMA2; (-) strand; PAM type: YTN; PAM sequence: TTT
aaaaggataatccccatggc

SEQ ID NO: 260180 - DNA, 20 bp, Artificial Sequence
  Description of Artificial Sequence: Synthetic oligonucleotide
  Target: LAMA2; (-) strand; PAM type: YTN; PAM sequence: TTT
taaaaggataatccccatgg

SEQ ID NO: 260181 - DNA, 20 bp, Artificial Sequence
  Description of Artificial Sequence: Synthetic oligonucleotide
  Target: LAMA2; (-) strand; PAM type: YTN; PAM sequence: TTC
aacataattttaaaaggata

SEQ ID NO: 260182 - DNA, 20 bp, Artificial Sequence
  Description of Artificial Sequence: Synthetic oligonucleotide
  Target: LAMA2; (-) strand; PAM type: YTN; PAM sequence: CTA
gcaaacaggattcaacataa

SEQ ID NO: 260183 - DNA, 20 bp, Artificial Sequence
  Description of Artificial Sequence: Synthetic oligonucleotide
  Target: LAMA2; (-) strand; PAM type: YTN; PAM sequence: TTA
agaaaatgctagcaaacagg

SEQ ID NO: 260184 - DNA, 20 bp, Artificial Sequence
  Description of Artificial Sequence: Synthetic oligonucleotide
  Target: LAMA2; (-) strand; PAM type: YTN; PAM sequence: TTA
taaacgtagatccaaaatca

SEQ ID NO: 260185 - DNA, 20 bp, Artificial Sequence
  Description of Artificial Sequence: Synthetic oligonucleotide
  Target: LAMA2; (-) strand; PAM type: YTN; PAM sequence: CTT
ataaacgtagatccaaaatc

SEQ ID NO: 260186 - DNA, 20 bp, Artificial Sequence
  Description of Artificial Sequence: Synthetic oligonucleotide
  Target: LAMA2; (-) strand; PAM type: YTN; PAM sequence: TTC
ttataaacgtagatccaaaa

SEQ ID NO: 260187 - DNA, 20 bp, Artificial Sequence
  Description of Artificial Sequence: Synthetic oligonucleotide
  Target: LAMA2; (-) strand; PAM type: YTN; PAM sequence: TTT
cttataaacgtagatccaaa

SEQ ID NO: 260188 - DNA, 20 bp, Artificial Sequence
  Description of Artificial Sequence: Synthetic oligonucleotide
  Target: LAMA2; (-) strand; PAM type: YTN; PAM sequence: TTC
ataccaatatttcttataaa

SEQ ID NO: 260189 - DNA, 20 bp, Artificial Sequence
  Description of Artificial Sequence: Synthetic oligonucleotide
  Target: LAMA2; (-) strand; PAM type: YTN; PAM sequence: CTA
caagaaaaataagttcatac

SEQ ID NO: 260190 - DNA, 20 bp, Artificial Sequence
  Description of Artificial Sequence: Synthetic oligonucleotide
  Target: LAMA2; (-) strand; PAM type: YTN; PAM sequence: CTC
atcccgacgacaacgctaca

SEQ ID NO: 260191 - DNA, 20 bp, Artificial Sequence
  Description of Artificial Sequence: Synthetic oligonucleotide
  Target: LAMA2; (-) strand; PAM type: YTN; PAM sequence: TTG
cagtacctcatcccgacgac

SEQ ID NO: 260192 - DNA, 20 bp, Artificial Sequence
  Description of Artificial Sequence: Synthetic oligonucleotide
  Target: LAMA2; (-) strand; PAM type: YTN; PAM sequence: CTT
gcagtacctcatcccgacga

SEQ ID NO: 260193 - DNA, 20 bp, Artificial Sequence
  Description of Artificial Sequence: Synthetic oligonucleotide
  Target: LAMA2; (-) strand; PAM type: YTN; PAM sequence: TTC
atgaagcttgcagtacctca

SEQ ID NO: 260194 - DNA, 20 bp, Artificial Sequence
  Description of Artificial Sequence: Synthetic oligonucleotide
  Target: LAMA2; (-) strand; PAM type: YTN; PAM sequence: TTT
catgaagcttgcagtacctc

SEQ ID NO: 260195 - DNA, 20 bp, Artificial Sequence
  Description of Artificial Sequence: Synthetic oligonucleotide
  Target: LAMA2; (-) strand; PAM type: YTN; PAM sequence: CTG
aatccatttcatgaagcttg

SEQ ID NO: 260196 - DNA, 20 bp, Artificial Sequence
  Description of Artificial Sequence: Synthetic oligonucleotide
  Target: LAMA2; (-) strand; PAM type: YTN; PAM sequence: TTC
tgaatccatttcatgaagct

SEQ ID NO: 260197 - DNA, 20 bp, Artificial Sequence
  Description of Artificial Sequence: Synthetic oligonucleotide
  Target: LAMA2; (-) strand; PAM type: YTN; PAM sequence: CTT
ctgaatccatttcatgaagc

SEQ ID NO: 260198 - DNA, 20 bp, Artificial Sequence
  Description of Artificial Sequence: Synthetic oligonucleotide
  Target: LAMA2; (-) strand; PAM type: YTN; PAM sequence: TTA
tgaggagggaatacttctga

SEQ ID NO: 260199 - DNA, 20 bp, Artificial Sequence
  Description of Artificial Sequence: Synthetic oligonucleotide
  Target: LAMA2; (-) strand; PAM type: YTN; PAM sequence: TTA
taaattatgaggagggaata

SEQ ID NO: 260200 - DNA, 20 bp, Artificial Sequence
  Description of Artificial Sequence: Synthetic oligonucleotide
  Target: LAMA2; (-) strand; PAM type: YTN; PAM sequence: TTT
ataaattatgaggagggaat

SEQ ID NO: 260201 - DNA, 20 bp, Artificial Sequence
  Description of Artificial Sequence: Synthetic oligonucleotide
  Target: LAMA2; (-) strand; PAM type: YTN; PAM sequence: TTT
tataaattatgaggagggaa

SEQ ID NO: 260202 - DNA, 20 bp, Artificial Sequence
  Description of Artificial Sequence: Synthetic oligonucleotide
  Target: LAMA2; (-) strand; PAM type: YTN; PAM sequence: CTT
ttataaattatgaggaggga

SEQ ID NO: 260203 - DNA, 20 bp, Artificial Sequence
  Description of Artificial Sequence: Synthetic oligonucleotide
  Target: LAMA2; (-) strand; PAM type: YTN; PAM sequence: TTG
tgaaaacgcttttataaatt

SEQ ID NO: 260204 - DNA, 20 bp, Artificial Sequence
  Description of Artificial Sequence: Synthetic oligonucleotide
  Target: LAMA2; (-) strand; PAM type: YTN; PAM sequence: TTG
attgtgaaaacgcttttata

SEQ ID NO: 260205 - DNA, 20 bp, Artificial Sequence
  Description of Artificial Sequence: Synthetic oligonucleotide
  Target: LAMA2; (-) strand; PAM type: YTN; PAM sequence: CTC
attgattgtgaaaacgcttt

SEQ ID NO: 260206 - DNA, 20 bp, Artificial Sequence
  Description of Artificial Sequence: Synthetic oligonucleotide
  Target: LAMA2; (-) strand; PAM type: YTN; PAM sequence: CTA
cctcattgattgtgaaaacg

SEQ ID NO: 260207 - DNA, 20 bp, Artificial Sequence
  Description of Artificial Sequence: Synthetic oligonucleotide
  Target: LAMA2; (-) strand; PAM type: YTN; PAM sequence: TTC
tacctcattgattgtgaaaa

SEQ ID NO: 260208 - DNA, 20 bp, Artificial Sequence
  Description of Artificial Sequence: Synthetic oligonucleotide
  Target: LAMA2; (-) strand; PAM type: YTN; PAM sequence: TTT
ctacctcattgattgtgaaa

SEQ ID NO: 260209 - DNA, 20 bp, Artificial Sequence
  Description of Artificial Sequence: Synthetic oligonucleotide
  Target: LAMA2; (-) strand; PAM type: YTN; PAM sequence: TTT
tctacctcattgattgtgaa

SEQ ID NO: 260210 - DNA, 20 bp, Artificial Sequence
  Description of Artificial Sequence: Synthetic oligonucleotide
  Target: LAMA2; (-) strand; PAM type: YTN; PAM sequence: CTG
ttttctacctcattgattgt

SEQ ID NO: 260211 - DNA, 20 bp, Artificial Sequence
  Description of Artificial Sequence: Synthetic oligonucleotide
  Target: LAMA2; (-) strand; PAM type: YTN; PAM sequence: TTC
tgttttctacctcattgatt

SEQ ID NO: 260212 - DNA, 20 bp, Artificial Sequence
  Description of Artificial Sequence: Synthetic oligonucleotide
  Target: LAMA2; (-) strand; PAM type: YTN; PAM sequence: TTT
ctgttttctacctcattgat

SEQ ID NO: 260213 - DNA, 20 bp, Artificial Sequence
  Description of Artificial Sequence: Synthetic oligonucleotide
  Target: LAMA2; (-) strand; PAM type: YTN; PAM sequence: CTA
aagtatttctgttttctacc

SEQ ID NO: 260214 - DNA, 20 bp, Artificial Sequence
  Description of Artificial Sequence: Synthetic oligonucleotide
  Target: LAMA2; (-) strand; PAM type: YTN; PAM sequence: CTC
taaagtatttctgttttcta

SEQ ID NO: 260215 - DNA, 20 bp, Artificial Sequence
  Description of Artificial Sequence: Synthetic oligonucleotide
  Target: LAMA2; (-) strand; PAM type: YTN; PAM sequence: TTC
ctctaaagtatttctgtttt

SEQ ID NO: 260216 - DNA, 20 bp, Artificial Sequence
  Description of Artificial Sequence: Synthetic oligonucleotide
  Target: LAMA2; (-) strand; PAM type: YTN; PAM sequence: TTG
ggttcctctaaagtatttct

SEQ ID NO: 260217 - DNA, 20 bp, Artificial Sequence
  Description of Artificial Sequence: Synthetic oligonucleotide
  Target: LAMA2; (-) strand; PAM type: YTN; PAM sequence: TTT
gggttcctctaaagtatttc

SEQ ID NO: 260218 - DNA, 20 bp, Artificial Sequence
  Description of Artificial Sequence: Synthetic oligonucleotide
  Target: LAMA2; (-) strand; PAM type: YTN; PAM sequence: TTT
tgggttcctctaaagtattt

SEQ ID NO: 260219 - DNA, 20 bp, Artificial Sequence
  Description of Artificial Sequence: Synthetic oligonucleotide
  Target: LAMA2; (-) strand; PAM type: YTN; PAM sequence: CTT
ttgggttcctctaaagtatt

SEQ ID NO: 260220 - DNA, 20 bp, Artificial Sequence
  Description of Artificial Sequence: Synthetic oligonucleotide
  Target: LAMA2; (-) strand; PAM type: YTN; PAM sequence: TTC
aaatagtgagcttttgggtt

SEQ ID NO: 260221 - DNA, 20 bp, Artificial Sequence
  Description of Artificial Sequence: Synthetic oligonucleotide
  Target: LAMA2; (-) strand; PAM type: YTN; PAM sequence: TTT
caaatagtgagcttttgggt

SEQ ID NO: 260222 - DNA, 20 bp, Artificial Sequence
  Description of Artificial Sequence: Synthetic oligonucleotide
  Target: LAMA2; (-) strand; PAM type: YTN; PAM sequence: TTT
tcaaatagtgagcttttggg

SEQ ID NO: 260223 - DNA, 20 bp, Artificial Sequence
  Description of Artificial Sequence: Synthetic oligonucleotide
  Target: LAMA2; (-) strand; PAM type: YTN; PAM sequence: CTT
ttcaaatagtgagcttttgg

SEQ ID NO: 260224 - DNA, 20 bp, Artificial Sequence
  Description of Artificial Sequence: Synthetic oligonucleotide
  Target: LAMA2; (-) strand; PAM type: YTN; PAM sequence: CTG
atcttttcaaatagtgagct

SEQ ID NO: 260225 - DNA, 20 bp, Artificial Sequence
  Description of Artificial Sequence: Synthetic oligonucleotide
  Target: LAMA2; (-) strand; PAM type: YTN; PAM sequence: TTA
ctgatcttttcaaatagtga

SEQ ID NO: 260226 - DNA, 20 bp, Artificial Sequence
  Description of Artificial Sequence: Synthetic oligonucleotide
  Target: LAMA2; (-) strand; PAM type: YTN; PAM sequence: TTT
actgatcttttcaaatagtg

SEQ ID NO: 260227 - DNA, 20 bp, Artificial Sequence
  Description of Artificial Sequence: Synthetic oligonucleotide
  Target: LAMA2; (-) strand; PAM type: YTN; PAM sequence: CTT
tactgatcttttcaaatagt

SEQ ID NO: 260228 - DNA, 20 bp, Artificial Sequence
  Description of Artificial Sequence: Synthetic oligonucleotide
  Target: LAMA2; (-) strand; PAM type: YTN; PAM sequence: TTA
ccaactttactgatcttttc

SEQ ID NO: 260229 - DNA, 20 bp, Artificial Sequence
  Description of Artificial Sequence: Synthetic oligonucleotide
  Target: LAMA2; (-) strand; PAM type: YTN; PAM sequence: CTA
gaatattaccaactttactg

SEQ ID NO: 260230 - DNA, 20 bp, Artificial Sequence
  Description of Artificial Sequence: Synthetic oligonucleotide
  Target: LAMA2; (-) strand; PAM type: YTN; PAM sequence: TTC
tagaatattaccaactttac

SEQ ID NO: 260231 - DNA, 20 bp, Artificial Sequence
  Description of Artificial Sequence: Synthetic oligonucleotide
  Target: LAMA2; (-) strand; PAM type: YTN; PAM sequence: TTT
ctagaatattaccaacttta

SEQ ID NO: 260232 - DNA, 20 bp, Artificial Sequence
  Description of Artificial Sequence: Synthetic oligonucleotide
  Target: LAMA2; (-) strand; PAM type: YTN; PAM sequence: CTT
tctagaatattaccaacttt

SEQ ID NO: 260233 - DNA, 20 bp, Artificial Sequence
  Description of Artificial Sequence: Synthetic oligonucleotide
  Target: LAMA2; (-) strand; PAM type: YTN; PAM sequence: TTA
acctttctagaatattacca

SEQ ID NO: 260234 - DNA, 20 bp, Artificial Sequence
  Description of Artificial Sequence: Synthetic oligonucleotide
  Target: LAMA2; (-) strand; PAM type: YTN; PAM sequence: TTG
attaacctttctagaatatt

SEQ ID NO: 260235 - DNA, 20 bp, Artificial Sequence
  Description of Artificial Sequence: Synthetic oligonucleotide
  Target: LAMA2; (-) strand; PAM type: YTN; PAM sequence: CTT
gattaacctttctagaatat

SEQ ID NO: 260236 - DNA, 20 bp, Artificial Sequence
  Description of Artificial Sequence: Synthetic oligonucleotide
  Target: LAMA2; (-) strand; PAM type: YTN; PAM sequence: TTC
ttgattaacctttctagaat

SEQ ID NO: 260237 - DNA, 20 bp, Artificial Sequence
  Description of Artificial Sequence: Synthetic oligonucleotide
  Target: LAMA2; (-) strand; PAM type: YTN; PAM sequence: TTT
cttgattaacctttctagaa

SEQ ID NO: 260238 - DNA, 20 bp, Artificial Sequence
  Description of Artificial Sequence: Synthetic oligonucleotide
  Target: LAMA2; (-) strand; PAM type: YTN; PAM sequence: TTT
tcttgattaacctttctaga

SEQ ID NO: 260239 - DNA, 20 bp, Artificial Sequence
  Description of Artificial Sequence: Synthetic oligonucleotide
  Target: LAMA2; (-) strand; PAM type: YTN; PAM sequence: TTT
ttcttgattaacctttctag

SEQ ID NO: 260240 - DNA, 20 bp, Artificial Sequence
  Description of Artificial Sequence: Synthetic oligonucleotide
  Target: LAMA2; (-) strand; PAM type: YTN; PAM sequence: TTT
tttcttgattaacctttcta

SEQ ID NO: 260241 - DNA, 20 bp, Artificial Sequence
  Description of Artificial Sequence: Synthetic oligonucleotide
  Target: LAMA2; (-) strand; PAM type: YTN; PAM sequence: CTT
ttttcttgattaacctttct

SEQ ID NO: 260242 - DNA, 20 bp, Artificial Sequence
  Description of Artificial Sequence: Synthetic oligonucleotide
  Target: LAMA2; (-) strand; PAM type: YTN; PAM sequence: CTC
ttttttcttgattaaccttt

SEQ ID NO: 260243 - DNA, 20 bp, Artificial Sequence
  Description of Artificial Sequence: Synthetic oligonucleotide
  Target: LAMA2; (-) strand; PAM type: YTN; PAM sequence: CTC
tcttttttcttgattaacct

SEQ ID NO: 260244 - DNA, 20 bp, Artificial Sequence
  Description of Artificial Sequence: Synthetic oligonucleotide
  Target: LAMA2; (-) strand; PAM type: YTN; PAM sequence: TTC
tctcttttttcttgattaac

SEQ ID NO: 260245 - DNA, 20 bp, Artificial Sequence
  Description of Artificial Sequence: Synthetic oligonucleotide
  Target: LAMA2; (-) strand; PAM type: YTN; PAM sequence: CTT
ctctcttttttcttgattaa

SEQ ID NO: 260246 - DNA, 20 bp, Artificial Sequence
  Description of Artificial Sequence: Synthetic oligonucleotide
  Target: LAMA2; (-) strand; PAM type: YTN; PAM sequence: TTC
ttctctcttttttcttgatt

SEQ ID NO: 260247 - DNA, 20 bp, Artificial Sequence
  Description of Artificial Sequence: Synthetic oligonucleotide
  Target: LAMA2; (-) strand; PAM type: YTN; PAM sequence: TTT
cttctctcttttttcttgat

SEQ ID NO: 260248 - DNA, 20 bp, Artificial Sequence
  Description of Artificial Sequence: Synthetic oligonucleotide
  Target: LAMA2; (-) strand; PAM type: YTN; PAM sequence: TTG
tttcttctctcttttttctt

SEQ ID NO: 260249 - DNA, 20 bp, Artificial Sequence
  Description of Artificial Sequence: Synthetic oligonucleotide
  Target: LAMA2; (-) strand; PAM type: YTN; PAM sequence: CTT
gtttcttctctcttttttct

SEQ ID NO: 260250 - DNA, 20 bp, Artificial Sequence
  Description of Artificial Sequence: Synthetic oligonucleotide
  Target: LAMA2; (-) strand; PAM type: YTN; PAM sequence: TTG
cttgtttcttctctcttttt

SEQ ID NO: 260251 - DNA, 20 bp, Artificial Sequence
  Description of Artificial Sequence: Synthetic oligonucleotide
  Target: LAMA2; (-) strand; PAM type: YTN; PAM sequence: TTG
attgcttgtttcttctctct

SEQ ID NO: 260252 - DNA, 20 bp, Artificial Sequence
  Description of Artificial Sequence: Synthetic oligonucleotide
  Target: LAMA2; (-) strand; PAM type: YTN; PAM sequence: TTT
gattgcttgtttcttctctc

SEQ ID NO: 260253 - DNA, 20 bp, Artificial Sequence
  Description of Artificial Sequence: Synthetic oligonucleotide
  Target: LAMA2; (-) strand; PAM type: YTN; PAM sequence: TTT
tgattgcttgtttcttctct

SEQ ID NO: 260254 - DNA, 20 bp, Artificial Sequence
  Description of Artificial Sequence: Synthetic oligonucleotide
  Target: LAMA2; (-) strand; PAM type: YTN; PAM sequence: TTG
tgattttgattgcttgtttc

SEQ ID NO: 260255 - DNA, 20 bp, Artificial Sequence
  Description of Artificial Sequence: Synthetic oligonucleotide
  Target: LAMA2; (-) strand; PAM type: YTN; PAM sequence: TTT
gtgattttgattgcttgttt

SEQ ID NO: 260256 - DNA, 20 bp, Artificial Sequence
  Description of Artificial Sequence: Synthetic oligonucleotide
  Target: LAMA2; (-) strand; PAM type: YTN; PAM sequence: TTA
tttgtgattttgattgcttg

SEQ ID NO: 260257 - DNA, 20 bp, Artificial Sequence
  Description of Artificial Sequence: Synthetic oligonucleotide
  Target: LAMA2; (-) strand; PAM type: YTN; PAM sequence: TTT
atttgtgattttgattgctt

SEQ ID NO: 260258 - DNA, 20 bp, Artificial Sequence
  Description of Artificial Sequence: Synthetic oligonucleotide
  Target: LAMA2; (-) strand; PAM type: YTN; PAM sequence: TTT
tatttgtgattttgattgct

SEQ ID NO: 260259 - DNA, 20 bp, Artificial Sequence
  Description of Artificial Sequence: Synthetic oligonucleotide
  Target: LAMA2; (-) strand; PAM type: YTN; PAM sequence: CTT
ttatttgtgattttgattgc

SEQ ID NO: 260260 - DNA, 20 bp, Artificial Sequence
  Description of Artificial Sequence: Synthetic oligonucleotide
  Target: LAMA2; (-) strand; PAM type: YTN; PAM sequence: CTA
tagtgatgtcccccttttat

SEQ ID NO: 260261 - DNA, 20 bp, Artificial Sequence
  Description of Artificial Sequence: Synthetic oligonucleotide
  Target: LAMA2; (-) strand; PAM type: YTN; PAM sequence: CTA
taggatctatagtgatgtcc

SEQ ID NO: 260262 - DNA, 20 bp, Artificial Sequence
  Description of Artificial Sequence: Synthetic oligonucleotide
  Target: LAMA2; (-) strand; PAM type: YTN; PAM sequence: TTA
atgtctataggatctatagt

SEQ ID NO: 260263 - DNA, 20 bp, Artificial Sequence
  Description of Artificial Sequence: Synthetic oligonucleotide
  Target: LAMA2; (-) strand; PAM type: YTN; PAM sequence: CTT
aatgtctataggatctatag

SEQ ID NO: 260264 - DNA, 20 bp, Artificial Sequence
  Description of Artificial Sequence: Synthetic oligonucleotide
  Target: LAMA2; (-) strand; PAM type: YTN; PAM sequence: TTA
tcttaatgtctataggatct

SEQ ID NO: 260265 - DNA, 20 bp, Artificial Sequence
  Description of Artificial Sequence: Synthetic oligonucleotide
  Target: LAMA2; (-) strand; PAM type: YTN; PAM sequence: TTA
ttatcttaatgtctatagga

SEQ ID NO: 260266 - DNA, 20 bp, Artificial Sequence
  Description of Artificial Sequence: Synthetic oligonucleotide
  Target: LAMA2; (-) strand; PAM type: YTN; PAM sequence: CTA
ccatattattatcttaatgt

SEQ ID NO: 260267 - DNA, 20 bp, Artificial Sequence
  Description of Artificial Sequence: Synthetic oligonucleotide
  Target: LAMA2; (-) strand; PAM type: YTN; PAM sequence: TTA
ctaccatattattatcttaa

SEQ ID NO: 260268 - DNA, 20 bp, Artificial Sequence
  Description of Artificial Sequence: Synthetic oligonucleotide
  Target: LAMA2; (-) strand; PAM type: YTN; PAM sequence: CTA
ttactaccatattattatct

SEQ ID NO: 260269 - DNA, 20 bp, Artificial Sequence
  Description of Artificial Sequence: Synthetic oligonucleotide
  Target: LAMA2; (-) strand; PAM type: YTN; PAM sequence: TTC
ctattactaccatattatta

SEQ ID NO: 260270 - DNA, 20 bp, Artificial Sequence
  Description of Artificial Sequence: Synthetic oligonucleotide
  Target: LAMA2; (-) strand; PAM type: YTN; PAM sequence: TTG
ttcctattactaccatatta

SEQ ID NO: 260271 - DNA, 20 bp, Artificial Sequence
  Description of Artificial Sequence: Synthetic oligonucleotide
  Target: LAMA2; (-) strand; PAM type: YTN; PAM sequence: CTT
gttcctattactaccatatt

SEQ ID NO: 260272 - DNA, 20 bp, Artificial Sequence
  Description of Artificial Sequence: Synthetic oligonucleotide
  Target: LAMA2; (-) strand; PAM type: YTN; PAM sequence: TTA
ggcaaaacttgttcctatta

SEQ ID NO: 260273 - DNA, 20 bp, Artificial Sequence
  Description of Artificial Sequence: Synthetic oligonucleotide
  Target: LAMA2; (-) strand; PAM type: YTN; PAM sequence: TTA
ttaggcaaaacttgttccta

SEQ ID NO: 260274 - DNA, 20 bp, Artificial Sequence
  Description of Artificial Sequence: Synthetic oligonucleotide
  Target: LAMA2; (-) strand; PAM type: YTN; PAM sequence: TTT
attaggcaaaacttgttcct

SEQ ID NO: 260275 - DNA, 20 bp, Artificial Sequence
  Description of Artificial Sequence: Synthetic oligonucleotide
  Target: LAMA2; (-) strand; PAM type: YTN; PAM sequence: TTA
tcacatttattaggcaaaac

SEQ ID NO: 260276 - DNA, 20 bp, Artificial Sequence
  Description of Artificial Sequence: Synthetic oligonucleotide
  Target: LAMA2; (-) strand; PAM type: YTN; PAM sequence: TTC
atgcaagttatcacatttat

SEQ ID NO: 260277 - DNA, 20 bp, Artificial Sequence
  Description of Artificial Sequence: Synthetic oligonucleotide
  Target: LAMA2; (-) strand; PAM type: YTN; PAM sequence: TTT
catgcaagttatcacattta

SEQ ID NO: 260278 - DNA, 20 bp, Artificial Sequence
  Description of Artificial Sequence: Synthetic oligonucleotide
  Target: LAMA2; (-) strand; PAM type: YTN; PAM sequence: TTT
tcatgcaagttatcacattt

SEQ ID NO: 260279 - DNA, 20 bp, Artificial Sequence
  Description of Artificial Sequence: Synthetic oligonucleotide
  Target: LAMA2; (-) strand; PAM type: YTN; PAM sequence: CTT
ttcatgcaagttatcacatt

SEQ ID NO: 260280 - DNA, 20 bp, Artificial Sequence
  Description of Artificial Sequence: Synthetic oligonucleotide
  Target: LAMA2; (-) strand; PAM type: YTN; PAM sequence: TTC
ttttcatgcaagttatcaca

SEQ ID NO: 260281 - DNA, 20 bp, Artificial Sequence
  Description of Artificial Sequence: Synthetic oligonucleotide
  Target: LAMA2; (-) strand; PAM type: YTN; PAM sequence: CTC
aaagtaagcaaaagaaggaa

SEQ ID NO: 260282 - DNA, 20 bp, Artificial Sequence
  Description of Artificial Sequence: Synthetic oligonucleotide
  Target: LAMA2; (-) strand; PAM type: YTN; PAM sequence: TTA
aactcaaagtaagcaaaaga

SEQ ID NO: 260283 - DNA, 20 bp, Artificial Sequence
  Description of Artificial Sequence: Synthetic oligonucleotide
  Target: LAMA2; (-) strand; PAM type: YTN; PAM sequence: TTG
gaacacaagagaaaattaaa

SEQ ID NO: 260284 - DNA, 20 bp, Artificial Sequence
  Description of Artificial Sequence: Synthetic oligonucleotide
  Target: LAMA2; (-) strand; PAM type: YTN; PAM sequence: CTT
ggaacacaagagaaaattaa

SEQ ID NO: 260285 - DNA, 20 bp, Artificial Sequence
  Description of Artificial Sequence: Synthetic oligonucleotide
  Target: LAMA2; (-) strand; PAM type: YTN; PAM sequence: CTC
aaaaacaaaaaacaaaaaac

SEQ ID NO: 260286 - DNA, 20 bp, Artificial Sequence
  Description of Artificial Sequence: Synthetic oligonucleotide
  Target: LAMA2; (-) strand; PAM type: YTN; PAM sequence: CTC
cgtctcaaaaacaaaaaaca

SEQ ID NO: 260287 - DNA, 20 bp, Artificial Sequence
  Description of Artificial Sequence: Synthetic oligonucleotide
  Target: LAMA2; (-) strand; PAM type: YTN; PAM sequence: CTG
ggggtcagagcaagactccg

SEQ ID NO: 260288 - DNA, 20 bp, Artificial Sequence
  Description of Artificial Sequence: Synthetic oligonucleotide
  Target: LAMA2; (-) strand; PAM type: YTN; PAM sequence: CTC
gagcctgggggtcagagcaa

SEQ ID NO: 260289 - DNA, 20 bp, Artificial Sequence
  Description of Artificial Sequence: Synthetic oligonucleotide
  Target: LAMA2; (-) strand; PAM type: YTN; PAM sequence: CTG
cactcgagcctgggggtcag

SEQ ID NO: 260290 - DNA, 20 bp, Artificial Sequence
  Description of Artificial Sequence: Synthetic oligonucleotide
  Target: LAMA2; (-) strand; PAM type: YTN; PAM sequence: CTG
ccactgcactcgagcctggg

SEQ ID NO: 260291 - DNA, 20 bp, Artificial Sequence
  Description of Artificial Sequence: Synthetic oligonucleotide
  Target: LAMA2; (-) strand; PAM type: YTN; PAM sequence: CTG
gcagtgagccaagatctgcc

SEQ ID NO: 260292 - DNA, 20 bp, Artificial Sequence
  Description of Artificial Sequence: Synthetic oligonucleotide
  Target: LAMA2; (-) strand; PAM type: YTN; PAM sequence: CTG
aggcaggagaatggcgtgaa

SEQ ID NO: 260293 - DNA, 20 bp, Artificial Sequence
  Description of Artificial Sequence: Synthetic oligonucleotide
  Target: LAMA2; (-) strand; PAM type: YTN; PAM sequence: CTC
aggaggctgaggcaggagaa

SEQ ID NO: 260294 - DNA, 20 bp, Artificial Sequence
  Description of Artificial Sequence: Synthetic oligonucleotide
  Target: LAMA2; (-) strand; PAM type: YTN; PAM sequence: CTA
ctcaggaggctgaggcagga

SEQ ID NO: 260295 - DNA, 20 bp, Artificial Sequence
  Description of Artificial Sequence: Synthetic oligonucleotide
  Target: LAMA2; (-) strand; PAM type: YTN; PAM sequence: CTG
tagtcccagctactcaggag

SEQ ID NO: 260296 - DNA, 20 bp, Artificial Sequence
  Description of Artificial Sequence: Synthetic oligonucleotide
  Target: LAMA2; (-) strand; PAM type: YTN; PAM sequence: TTA
gccgggcgtagtggcgggca

SEQ ID NO: 260297 - DNA, 20 bp, Artificial Sequence
  Description of Artificial Sequence: Synthetic oligonucleotide
  Target: LAMA2; (-) strand; PAM type: YTN; PAM sequence: CTA
aaaatacaaaaaattagccg

SEQ ID NO: 260298 - DNA, 20 bp, Artificial Sequence
  Description of Artificial Sequence: Synthetic oligonucleotide
  Target: LAMA2; (-) strand; PAM type: YTN; PAM sequence: CTA
ctaaaaatacaaaaaattag

SEQ ID NO: 260299 - DNA, 20 bp, Artificial Sequence
  Description of Artificial Sequence: Synthetic oligonucleotide
  Target: LAMA2; (-) strand; PAM type: YTN; PAM sequence: CTC
tactaaaaatacaaaaaatt

SEQ ID NO: 260300 - DNA, 20 bp, Artificial Sequence
  Description of Artificial Sequence: Synthetic oligonucleotide
  Target: LAMA2; (-) strand; PAM type: YTN; PAM sequence: CTA
acgcggtgaaaccccgtctc

SEQ ID NO: 260301 - DNA, 20 bp, Artificial Sequence
  Description of Artificial Sequence: Synthetic oligonucleotide
  Target: LAMA2; (-) strand; PAM type: YTN; PAM sequence: CTG
gctaacgcggtgaaaccccg

SEQ ID NO: 260302 - DNA, 20 bp, Artificial Sequence
  Description of Artificial Sequence: Synthetic oligonucleotide
  Target: LAMA2; (-) strand; PAM type: YTN; PAM sequence: CTG
gcggatcacgaggtcaggag

SEQ ID NO: 260303 - DNA, 20 bp, Artificial Sequence
  Description of Artificial Sequence: Synthetic oligonucleotide
  Target: LAMA2; (-) strand; PAM type: YTN; PAM sequence: CTG
aggctggcggatcacgaggt

SEQ ID NO: 260304 - DNA, 20 bp, Artificial Sequence
  Description of Artificial Sequence: Synthetic oligonucleotide
  Target: LAMA2; (-) strand; PAM type: YTN; PAM sequence: TTG
ggaggctgaggctggcggat

SEQ ID NO: 260305 - DNA, 20 bp, Artificial Sequence
  Description of Artificial Sequence: Synthetic oligonucleotide
  Target: LAMA2; (-) strand; PAM type: YTN; PAM sequence: TTT
gggaggctgaggctggcgga

SEQ ID NO: 260306 - DNA, 20 bp, Artificial Sequence
  Description of Artificial Sequence: Synthetic oligonucleotide
  Target: LAMA2; (-) strand; PAM type: YTN; PAM sequence: TTT
tgggaggctgaggctggcgg

SEQ ID NO: 260307 - DNA, 20 bp, Artificial Sequence
  Description of Artificial Sequence: Synthetic oligonucleotide
  Target: LAMA2; (-) strand; PAM type: YTN; PAM sequence: CTA
gcattttgggaggctgaggc

SEQ ID NO: 260308 - DNA, 20 bp, Artificial Sequence
  Description of Artificial Sequence: Synthetic oligonucleotide
  Target: LAMA2; (-) strand; PAM type: YTN; PAM sequence: CTG
taatcctagcattttgggag

SEQ ID NO: 260309 - DNA, 20 bp, Artificial Sequence
  Description of Artificial Sequence: Synthetic oligonucleotide
  Target: LAMA2; (-) strand; PAM type: YTN; PAM sequence: CTC
acgcctgtaatcctagcatt

SEQ ID NO: 260310 - DNA, 20 bp, Artificial Sequence
  Description of Artificial Sequence: Synthetic oligonucleotide
  Target: LAMA2; (-) strand; PAM type: YTN; PAM sequence: TTG
gccgggcacggtggctcacg

SEQ ID NO: 260311 - DNA, 20 bp, Artificial Sequence
  Description of Artificial Sequence: Synthetic oligonucleotide
  Target: LAMA2; (-) strand; PAM type: YTN; PAM sequence: TTG
gaacacaattggccgggcac

SEQ ID NO: 260312 - DNA, 20 bp, Artificial Sequence
  Description of Artificial Sequence: Synthetic oligonucleotide
  Target: LAMA2; (-) strand; PAM type: YTN; PAM sequence: CTT
ggaacacaattggccgggca

SEQ ID NO: 260313 - DNA, 20 bp, Artificial Sequence
  Description of Artificial Sequence: Synthetic oligonucleotide
  Target: LAMA2; (-) strand; PAM type: YTN; PAM sequence: TTA
agaaacttggaacacaattg

SEQ ID NO: 260314 - DNA, 20 bp, Artificial Sequence
  Description of Artificial Sequence: Synthetic oligonucleotide
  Target: LAMA2; (-) strand; PAM type: YTN; PAM sequence: CTT
aagaaacttggaacacaatt

SEQ ID NO: 260315 - DNA, 20 bp, Artificial Sequence
  Description of Artificial Sequence: Synthetic oligonucleotide
  Target: LAMA2; (-) strand; PAM type: YTN; PAM sequence: TTC
accttaagaaacttggaaca

SEQ ID NO: 260316 - DNA, 20 bp, Artificial Sequence
  Description of Artificial Sequence: Synthetic oligonucleotide
  Target: LAMA2; (-) strand; PAM type: YTN; PAM sequence: TTT
caccttaagaaacttggaac

SEQ ID NO: 260317 - DNA, 20 bp, Artificial Sequence
  Description of Artificial Sequence: Synthetic oligonucleotide
  Target: LAMA2; (-) strand; PAM type: YTN; PAM sequence: CTA
aggtttcaccttaagaaact

SEQ ID NO: 260318 - DNA, 20 bp, Artificial Sequence
  Description of Artificial Sequence: Synthetic oligonucleotide
  Target: LAMA2; (-) strand; PAM type: YTN; PAM sequence: TTA
caaatcaatgatctaaggtt

SEQ ID NO: 260319 - DNA, 20 bp, Artificial Sequence
  Description of Artificial Sequence: Synthetic oligonucleotide
  Target: LAMA2; (-) strand; PAM type: YTN; PAM sequence: TTA
gagaaaaaggattacaaatc

SEQ ID NO: 260320 - DNA, 20 bp, Artificial Sequence
  Description of Artificial Sequence: Synthetic oligonucleotide
  Target: LAMA2; (-) strand; PAM type: YTN; PAM sequence: CTG
gaaaaaaatgtatcaaatgc

SEQ ID NO: 260321 - DNA, 20 bp, Artificial Sequence
  Description of Artificial Sequence: Synthetic oligonucleotide
  Target: LAMA2; (-) strand; PAM type: YTN; PAM sequence: TTC
tggaaaaaaatgtatcaaat

SEQ ID NO: 260322 - DNA, 20 bp, Artificial Sequence
  Description of Artificial Sequence: Synthetic oligonucleotide
  Target: LAMA2; (-) strand; PAM type: YTN; PAM sequence: TTT
ctggaaaaaaatgtatcaaa

SEQ ID NO: 260323 - DNA, 20 bp, Artificial Sequence
  Description of Artificial Sequence: Synthetic oligonucleotide
  Target: LAMA2; (-) strand; PAM type: YTN; PAM sequence: TTA
aaacacagcatatcaaaata

SEQ ID NO: 260324 - DNA, 20 bp, Artificial Sequence
  Description of Artificial Sequence: Synthetic oligonucleotide
  Target: LAMA2; (-) strand; PAM type: YTN; PAM sequence: TTA
aaccaagtgaaaattaaaac

SEQ ID NO: 260325 - DNA, 20 bp, Artificial Sequence
  Description of Artificial Sequence: Synthetic oligonucleotide
  Target: LAMA2; (-) strand; PAM type: YTN; PAM sequence: TTA
tattaaaccaagtgaaaatt

SEQ ID NO: 260326 - DNA, 20 bp, Artificial Sequence
  Description of Artificial Sequence: Synthetic oligonucleotide
  Target: LAMA2; (-) strand; PAM type: YTN; PAM sequence: TTA
aagattatattaaaccaagt

SEQ ID NO: 260327 - DNA, 20 bp, Artificial Sequence
  Description of Artificial Sequence: Synthetic oligonucleotide
  Target: LAMA2; (-) strand; PAM type: YTN; PAM sequence: TTA
tccccaaaataaattaaaga

SEQ ID NO: 260328 - DNA, 20 bp, Artificial Sequence
  Description of Artificial Sequence: Synthetic oligonucleotide
  Target: LAMA2; (-) strand; PAM type: YTN; PAM sequence: CTA
aacattatccccaaaataaa

SEQ ID NO: 260329 - DNA, 20 bp, Artificial Sequence
  Description of Artificial Sequence: Synthetic oligonucleotide
  Target: LAMA2; (-) strand; PAM type: YTN; PAM sequence: TTA
gaaactaaacattatcccca

SEQ ID NO: 260330 - DNA, 20 bp, Artificial Sequence
  Description of Artificial Sequence: Synthetic oligonucleotide
  Target: LAMA2; (-) strand; PAM type: YTN; PAM sequence: TTT
agaaactaaacattatcccc

SEQ ID NO: 260331 - DNA, 20 bp, Artificial Sequence
  Description of Artificial Sequence: Synthetic oligonucleotide
  Target: LAMA2; (-) strand; PAM type: YTN; PAM sequence: TTC
cccaaatatttagaaactaa

SEQ ID NO: 260332 - DNA, 20 bp, Artificial Sequence
  Description of Artificial Sequence: Synthetic oligonucleotide
  Target: LAMA2; (-) strand; PAM type: YTN; PAM sequence: TTG
aaaattccccaaatatttag

SEQ ID NO: 260333 - DNA, 20 bp, Artificial Sequence
  Description of Artificial Sequence: Synthetic oligonucleotide
  Target: LAMA2; (-) strand; PAM type: YTN; PAM sequence: CTT
gaaaattccccaaatattta

SEQ ID NO: 260334 - DNA, 20 bp, Artificial Sequence
  Description of Artificial Sequence: Synthetic oligonucleotide
  Target: LAMA2; (-) strand; PAM type: YTN; PAM sequence: CTA
gtaacagtaacgataccttg

SEQ ID NO: 260335 - DNA, 20 bp, Artificial Sequence
  Description of Artificial Sequence: Synthetic oligonucleotide
  Target: LAMA2; (-) strand; PAM type: YTN; PAM sequence: CTA
gatactagtaacagtaacga

SEQ ID NO: 260336 - DNA, 20 bp, Artificial Sequence
  Description of Artificial Sequence: Synthetic oligonucleotide
  Target: LAMA2; (-) strand; PAM type: YTN; PAM sequence: TTA
aactagatactagtaacagt

SEQ ID NO: 260337 - DNA, 20 bp, Artificial Sequence
  Description of Artificial Sequence: Synthetic oligonucleotide
  Target: LAMA2; (-) strand; PAM type: YTN; PAM sequence: TTA
gaattaaactagatactagt

SEQ ID NO: 260338 - DNA, 20 bp, Artificial Sequence
  Description of Artificial Sequence: Synthetic oligonucleotide
  Target: LAMA2; (-) strand; PAM type: YTN; PAM sequence: TTT
agaattaaactagatactag

SEQ ID NO: 260339 - DNA, 20 bp, Artificial Sequence
  Description of Artificial Sequence: Synthetic oligonucleotide
  Target: LAMA2; (-) strand; PAM type: YTN; PAM sequence: CTC
agaacaatttagaattaaac

SEQ ID NO: 260340 - DNA, 20 bp, Artificial Sequence
  Description of Artificial Sequence: Synthetic oligonucleotide
  Target: LAMA2; (-) strand; PAM type: YTN; PAM sequence: TTC
tcagaacaatttagaattaa

SEQ ID NO: 260341 - DNA, 20 bp, Artificial Sequence
  Description of Artificial Sequence: Synthetic oligonucleotide
  Target: LAMA2; (-) strand; PAM type: YTN; PAM sequence: TTA
tgttctcagaacaatttaga

SEQ ID NO: 260342 - DNA, 20 bp, Artificial Sequence
  Description of Artificial Sequence: Synthetic oligonucleotide
  Target: LAMA2; (-) strand; PAM type: YTN; PAM sequence: CTG
aaataatgcagattatgttc

SEQ ID NO: 260343 - DNA, 20 bp, Artificial Sequence
  Description of Artificial Sequence: Synthetic oligonucleotide
  Target: LAMA2; (-) strand; PAM type: YTN; PAM sequence: TTC
aaaaggtctgaaataatgca

SEQ ID NO: 260344 - DNA, 20 bp, Artificial Sequence
  Description of Artificial Sequence: Synthetic oligonucleotide
  Target: LAMA2; (-) strand; PAM type: YTN; PAM sequence: TTT
caaaaggtctgaaataatgc

SEQ ID NO: 260345 - DNA, 20 bp, Artificial Sequence
  Description of Artificial Sequence: Synthetic oligonucleotide
  Target: LAMA2; (-) strand; PAM type: YTN; PAM sequence: TTT
tcaaaaggtctgaaataatg

SEQ ID NO: 260346 - DNA, 20 bp, Artificial Sequence
  Description of Artificial Sequence: Synthetic oligonucleotide
  Target: LAMA2; (-) strand; PAM type: YTN; PAM sequence: CTC
aataattttcaaaaggtctg

SEQ ID NO: 260347 - DNA, 20 bp, Artificial Sequence
  Description of Artificial Sequence: Synthetic oligonucleotide
  Target: LAMA2; (-) strand; PAM type: YTN; PAM sequence: TTC
cgggccataaaacaaatctc

SEQ ID NO: 260348 - DNA, 20 bp, Artificial Sequence
  Description of Artificial Sequence: Synthetic oligonucleotide
  Target: LAMA2; (-) strand; PAM type: YTN; PAM sequence: CTA
ttccgggccataaaacaaat

SEQ ID NO: 260349 - DNA, 20 bp, Artificial Sequence
  Description of Artificial Sequence: Synthetic oligonucleotide
  Target: LAMA2; (-) strand; PAM type: YTN; PAM sequence: CTG
aacactattccgggccataa

SEQ ID NO: 260350 - DNA, 20 bp, Artificial Sequence
  Description of Artificial Sequence: Synthetic oligonucleotide
  Target: LAMA2; (-) strand; PAM type: YTN; PAM sequence: TTA
taataaacaaactgaacact

SEQ ID NO: 260351 - DNA, 20 bp, Artificial Sequence
  Description of Artificial Sequence: Synthetic oligonucleotide
  Target: LAMA2; (-) strand; PAM type: YTN; PAM sequence: TTC
aagtgcacatgttataataa

SEQ ID NO: 260352 - DNA, 20 bp, Artificial Sequence
  Description of Artificial Sequence: Synthetic oligonucleotide
  Target: LAMA2; (-) strand; PAM type: YTN; PAM sequence: TTT
caagtgcacatgttataata

SEQ ID NO: 260353 - DNA, 20 bp, Artificial Sequence
  Description of Artificial Sequence: Synthetic oligonucleotide
  Target: LAMA2; (-) strand; PAM type: YTN; PAM sequence: TTT
tcaagtgcacatgttataat

SEQ ID NO: 260354 - DNA, 20 bp, Artificial Sequence
  Description of Artificial Sequence: Synthetic oligonucleotide
  Target: LAMA2; (-) strand; PAM type: YTN; PAM sequence: TTA
ttttcaagtgcacatgttat

SEQ ID NO: 260355 - DNA, 20 bp, Artificial Sequence
  Description of Artificial Sequence: Synthetic oligonucleotide
  Target: LAMA2; (-) strand; PAM type: YTN; PAM sequence: CTC
cagaatacacattattttca

SEQ ID NO: 260356 - DNA, 20 bp, Artificial Sequence
  Description of Artificial Sequence: Synthetic oligonucleotide
  Target: LAMA2; (-) strand; PAM type: YTN; PAM sequence: TTC
atccaacaactccagaatac

SEQ ID NO: 260357 - DNA, 20 bp, Artificial Sequence
  Description of Artificial Sequence: Synthetic oligonucleotide
  Target: LAMA2; (-) strand; PAM type: YTN; PAM sequence: TTT
catccaacaactccagaata

SEQ ID NO: 260358 - DNA, 20 bp, Artificial Sequence
  Description of Artificial Sequence: Synthetic oligonucleotide
  Target: LAMA2; (-) strand; PAM type: YTN; PAM sequence: TTT
tcatccaacaactccagaat

SEQ ID NO: 260359 - DNA, 20 bp, Artificial Sequence
  Description of Artificial Sequence: Synthetic oligonucleotide
  Target: LAMA2; (-) strand; PAM type: YTN; PAM sequence: CTA
tatagaagttttcatccaac

SEQ ID NO: 260360 - DNA, 20 bp, Artificial Sequence
  Description of Artificial Sequence: Synthetic oligonucleotide
  Target: LAMA2; (-) strand; PAM type: YTN; PAM sequence: TTG
acctatatagaagttttcat

SEQ ID NO: 260361 - DNA, 20 bp, Artificial Sequence
  Description of Artificial Sequence: Synthetic oligonucleotide
  Target: LAMA2; (-) strand; PAM type: YTN; PAM sequence: TTA
aggataattgacctatatag

SEQ ID NO: 260362 - DNA, 20 bp, Artificial Sequence
  Description of Artificial Sequence: Synthetic oligonucleotide
  Target: LAMA2; (-) strand; PAM type: YTN; PAM sequence: CTA
aaaaccgttaaggataattg

SEQ ID NO: 260363 - DNA, 20 bp, Artificial Sequence
  Description of Artificial Sequence: Synthetic oligonucleotide
  Target: LAMA2; (-) strand; PAM type: YTN; PAM sequence: CTG
agagaacatgtagatctaaa

SEQ ID NO: 260364 - DNA, 20 bp, Artificial Sequence
  Description of Artificial Sequence: Synthetic oligonucleotide
  Target: LAMA2; (-) strand; PAM type: YTN; PAM sequence: CTC
agtaactgagagaacatgta

SEQ ID NO: 260365 - DNA, 20 bp, Artificial Sequence
  Description of Artificial Sequence: Synthetic oligonucleotide
  Target: LAMA2; (-) strand; PAM type: YTN; PAM sequence: CTC
tcagtaactgagagaacatg

SEQ ID NO: 260366 - DNA, 20 bp, Artificial Sequence
  Description of Artificial Sequence: Synthetic oligonucleotide
  Target: LAMA2; (-) strand; PAM type: YTN; PAM sequence: TTA
tagtccaacactctcagtaa

SEQ ID NO: 260367 - DNA, 20 bp, Artificial Sequence
  Description of Artificial Sequence: Synthetic oligonucleotide
  Target: LAMA2; (-) strand; PAM type: YTN; PAM sequence: CTG
agagaagtgaaagaagaaac

SEQ ID NO: 260368 - DNA, 20 bp, Artificial Sequence
  Description of Artificial Sequence: Synthetic oligonucleotide
  Target: LAMA2; (-) strand; PAM type: YTN; PAM sequence: CTC
aaaaatacatgtgaataaaa

SEQ ID NO: 260369 - DNA, 20 bp, Artificial Sequence
  Description of Artificial Sequence: Synthetic oligonucleotide
  Target: LAMA2; (-) strand; PAM type: YTN; PAM sequence: CTG
ctcaaaaatacatgtgaata

SEQ ID NO: 260370 - DNA, 20 bp, Artificial Sequence
  Description of Artificial Sequence: Synthetic oligonucleotide
  Target: LAMA2; (-) strand; PAM type: YTN; PAM sequence: CTA
gtatcactgctcaaaaatac

SEQ ID NO: 260371 - DNA, 20 bp, Artificial Sequence
  Description of Artificial Sequence: Synthetic oligonucleotide
  Target: LAMA2; (-) strand; PAM type: YTN; PAM sequence: TTC
atgcacctagtatcactgct

SEQ ID NO: 260372 - DNA, 20 bp, Artificial Sequence
  Description of Artificial Sequence: Synthetic oligonucleotide
  Target: LAMA2; (-) strand; PAM type: YTN; PAM sequence: CTA
aatgttcatgcacctagtat

SEQ ID NO: 260373 - DNA, 20 bp, Artificial Sequence
  Description of Artificial Sequence: Synthetic oligonucleotide
  Target: LAMA2; (-) strand; PAM type: YTN; PAM sequence: TTC
aaaaagacatagcaatccta

SEQ ID NO: 260374 - DNA, 20 bp, Artificial Sequence
  Description of Artificial Sequence: Synthetic oligonucleotide
  Target: LAMA2; (-) strand; PAM type: YTN; PAM sequence: TTT
caaaaagacatagcaatcct

SEQ ID NO: 260375 - DNA, 20 bp, Artificial Sequence
  Description of Artificial Sequence: Synthetic oligonucleotide
  Target: LAMA2; (-) strand; PAM type: YTN; PAM sequence: TTT
tcaaaaagacatagcaatcc

SEQ ID NO: 260376 - DNA, 20 bp, Artificial Sequence
  Description of Artificial Sequence: Synthetic oligonucleotide
  Target: LAMA2; (-) strand; PAM type: YTN; PAM sequence: CTT
ttcaaaaagacatagcaatc

SEQ ID NO: 260377 - DNA, 20 bp, Artificial Sequence
  Description of Artificial Sequence: Synthetic oligonucleotide
  Target: LAMA2; (-) strand; PAM type: YTN; PAM sequence: TTC
acaatgtcaaaaggcaccaa

SEQ ID NO: 260378 - DNA, 20 bp, Artificial Sequence
  Description of Artificial Sequence: Synthetic oligonucleotide
  Target: LAMA2; (-) strand; PAM type: YTN; PAM sequence: TTT
cacaatgtcaaaaggcacca

SEQ ID NO: 260379 - DNA, 20 bp, Artificial Sequence
  Description of Artificial Sequence: Synthetic oligonucleotide
  Target: LAMA2; (-) strand; PAM type: YTN; PAM sequence: CTA
ggaataaagagagacatttc

SEQ ID NO: 260380 - DNA, 20 bp, Artificial Sequence
  Description of Artificial Sequence: Synthetic oligonucleotide
  Target: LAMA2; (-) strand; PAM type: YTN; PAM sequence: TTA
ctaggaataaagagagacat

SEQ ID NO: 260381 - DNA, 20 bp, Artificial Sequence
  Description of Artificial Sequence: Synthetic oligonucleotide
  Target: LAMA2; (-) strand; PAM type: YTN; PAM sequence: CTG
aacaaggaatgttactagga

SEQ ID NO: 260382 - DNA, 20 bp, Artificial Sequence
  Description of Artificial Sequence: Synthetic oligonucleotide
  Target: LAMA2; (-) strand; PAM type: YTN; PAM sequence: TTC
tgaacaaggaatgttactag

SEQ ID NO: 260383 - DNA, 20 bp, Artificial Sequence
  Description of Artificial Sequence: Synthetic oligonucleotide
  Target: LAMA2; (-) strand; PAM type: YTN; PAM sequence: CTT
ctgaacaaggaatgttacta

SEQ ID NO: 260384 - DNA, 20 bp, Artificial Sequence
  Description of Artificial Sequence: Synthetic oligonucleotide
  Target: LAMA2; (-) strand; PAM type: YTN; PAM sequence: CTA
tataaatatcagaaaaagta

SEQ ID NO: 260385 - DNA, 20 bp, Artificial Sequence
  Description of Artificial Sequence: Synthetic oligonucleotide
  Target: LAMA2; (-) strand; PAM type: YTN; PAM sequence: TTG
caatagctatataaatatca

SEQ ID NO: 260386 - DNA, 20 bp, Artificial Sequence
  Description of Artificial Sequence: Synthetic oligonucleotide
  Target: LAMA2; (-) strand; PAM type: YTN; PAM sequence: TTA
aaaagaaagttgcaatagct

SEQ ID NO: 260387 - DNA, 20 bp, Artificial Sequence
  Description of Artificial Sequence: Synthetic oligonucleotide
  Target: LAMA2; (-) strand; PAM type: YTN; PAM sequence: CTA
aaaagggagatgaaatagat

SEQ ID NO: 260388 - DNA, 20 bp, Artificial Sequence
  Description of Artificial Sequence: Synthetic oligonucleotide
  Target: LAMA2; (-) strand; PAM type: YTN; PAM sequence: TTA
aaatactaaaaagggagatg

SEQ ID NO: 260389 - DNA, 20 bp, Artificial Sequence
  Description of Artificial Sequence: Synthetic oligonucleotide
  Target: LAMA2; (-) strand; PAM type: YTN; PAM sequence: CTC
agaataaaaaaaaaaaaggc

SEQ ID NO: 260390 - DNA, 20 bp, Artificial Sequence
  Description of Artificial Sequence: Synthetic oligonucleotide
  Target: LAMA2; (-) strand; PAM type: YTN; PAM sequence: CTG
tctcagaataaaaaaaaaaa

SEQ ID NO: 260391 - DNA, 20 bp, Artificial Sequence
  Description of Artificial Sequence: Synthetic oligonucleotide
  Target: LAMA2; (-) strand; PAM type: YTN; PAM sequence: CTG
ggcaatggagtaagaccctg

SEQ ID NO: 260392 - DNA, 20 bp, Artificial Sequence
  Description of Artificial Sequence: Synthetic oligonucleotide
  Target: LAMA2; (-) strand; PAM type: YTN; PAM sequence: CTA
gcctgggcaatggagtaaga

SEQ ID NO: 260393 - DNA, 20 bp, Artificial Sequence
  Description of Artificial Sequence: Synthetic oligonucleotide
  Target: LAMA2; (-) strand; PAM type: YTN; PAM sequence: CTC
tagcctgggcaatggagtaa

SEQ ID NO: 260394 - DNA, 20 bp, Artificial Sequence
  Description of Artificial Sequence: Synthetic oligonucleotide
  Target: LAMA2; (-) strand; PAM type: YTN; PAM sequence: CTG
cactctagcctgggcaatgg

SEQ ID NO: 260395 - DNA, 20 bp, Artificial Sequence
  Description of Artificial Sequence: Synthetic oligonucleotide
  Target: LAMA2; (-) strand; PAM type: YTN; PAM sequence: CTG
agatcacaccactgcactct

SEQ ID NO: 260396 - DNA, 20 bp, Artificial Sequence
  Description of Artificial Sequence: Synthetic oligonucleotide
  Target: LAMA2; (-) strand; PAM type: YTN; PAM sequence: TTG
agcccagaaggtggagggtg

SEQ ID NO: 260397 - DNA, 20 bp, Artificial Sequence
  Description of Artificial Sequence: Synthetic oligonucleotide
  Target: LAMA2; (-) strand; PAM type: YTN; PAM sequence: CTT
gagcccagaaggtggagggt

SEQ ID NO: 260398 - DNA, 20 bp, Artificial Sequence
  Description of Artificial Sequence: Synthetic oligonucleotide
  Target: LAMA2; (-) strand; PAM type: YTN; PAM sequence: TTC
ttgagcccagaaggtggagg

SEQ ID NO: 260399 - DNA, 20 bp, Artificial Sequence
  Description of Artificial Sequence: Synthetic oligonucleotide
  Target: LAMA2; (-) strand; PAM type: YTN; PAM sequence: TTT
cttgagcccagaaggtggag

SEQ ID NO: 260400 - DNA, 20 bp, Artificial Sequence
  Description of Artificial Sequence: Synthetic oligonucleotide
  Target: LAMA2; (-) strand; PAM type: YTN; PAM sequence: CTG
aggtgagaggatttcttgag

SEQ ID NO: 260401 - DNA, 20 bp, Artificial Sequence
  Description of Artificial Sequence: Synthetic oligonucleotide
  Target: LAMA2; (-) strand; PAM type: YTN; PAM sequence: CTG
gaggctgaggtgagaggatt

SEQ ID NO: 260402 - DNA, 20 bp, Artificial Sequence
  Description of Artificial Sequence: Synthetic oligonucleotide
  Target: LAMA2; (-) strand; PAM type: YTN; PAM sequence: CTC
tggaggctgaggtgagagga

SEQ ID NO: 260403 - DNA, 20 bp, Artificial Sequence
  Description of Artificial Sequence: Synthetic oligonucleotide
  Target: LAMA2; (-) strand; PAM type: YTN; PAM sequence: CTA
ctctggaggctgaggtgaga

SEQ ID NO: 260404 - DNA, 20 bp, Artificial Sequence
  Description of Artificial Sequence: Synthetic oligonucleotide
  Target: LAMA2; (-) strand; PAM type: YTN; PAM sequence: CTG
tagtcccagctactctggag

SEQ ID NO: 260405 - DNA, 20 bp, Artificial Sequence
  Description of Artificial Sequence: Synthetic oligonucleotide
  Target: LAMA2; (-) strand; PAM type: YTN; PAM sequence: TTA
gccaagcatggtggcatgcg

SEQ ID NO: 260406 - DNA, 20 bp, Artificial Sequence
  Description of Artificial Sequence: Synthetic oligonucleotide
  Target: LAMA2; (-) strand; PAM type: YTN; PAM sequence: TTA
aaaattagccaagcatggtg

SEQ ID NO: 260407 - DNA, 20 bp, Artificial Sequence
  Description of Artificial Sequence: Synthetic oligonucleotide
  Target: LAMA2; (-) strand; PAM type: YTN; PAM sequence: CTT
aaaaattagccaagcatggt

SEQ ID NO: 260408 - DNA, 20 bp, Artificial Sequence
  Description of Artificial Sequence: Synthetic oligonucleotide
  Target: LAMA2; (-) strand; PAM type: YTN; PAM sequence: CTA
caaaaaacttaaaaattagc

SEQ ID NO: 260409 - DNA, 20 bp, Artificial Sequence
  Description of Artificial Sequence: Synthetic oligonucleotide
  Target: LAMA2; (-) strand; PAM type: YTN; PAM sequence: TTC
tacaaaaaacttaaaaatta

SEQ ID NO: 260410 - DNA, 20 bp, Artificial Sequence
  Description of Artificial Sequence: Synthetic oligonucleotide
  Target: LAMA2; (-) strand; PAM type: YTN; PAM sequence: TTT
ctacaaaaaacttaaaaatt

SEQ ID NO: 260411 - DNA, 20 bp, Artificial Sequence
  Description of Artificial Sequence: Synthetic oligonucleotide
  Target: LAMA2; (-) strand; PAM type: YTN; PAM sequence: CTC
atttctacaaaaaacttaaa

SEQ ID NO: 260412 - DNA, 20 bp, Artificial Sequence
  Description of Artificial Sequence: Synthetic oligonucleotide
  Target: LAMA2; (-) strand; PAM type: YTN; PAM sequence: TTG
agacaagcatgggcaatata

SEQ ID NO: 260413 - DNA, 20 bp, Artificial Sequence
  Description of Artificial Sequence: Synthetic oligonucleotide
  Target: LAMA2; (-) strand; PAM type: YTN; PAM sequence: TTT
gagacaagcatgggcaatat

SEQ ID NO: 260414 - DNA, 20 bp, Artificial Sequence
  Description of Artificial Sequence: Synthetic oligonucleotide
  Target: LAMA2; (-) strand; PAM type: YTN; PAM sequence: CTT
tgagacaagcatgggcaata

SEQ ID NO: 260415 - DNA, 20 bp, Artificial Sequence
  Description of Artificial Sequence: Synthetic oligonucleotide
  Target: LAMA2; (-) strand; PAM type: YTN; PAM sequence: TTG
agcacaggactttgagacaa

SEQ ID NO: 260416 - DNA, 20 bp, Artificial Sequence
  Description of Artificial Sequence: Synthetic oligonucleotide
  Target: LAMA2; (-) strand; PAM type: YTN; PAM sequence: CTT
gagcacaggactttgagaca

SEQ ID NO: 260417 - DNA, 20 bp, Artificial Sequence
  Description of Artificial Sequence: Synthetic oligonucleotide
  Target: LAMA2; (-) strand; PAM type: YTN; PAM sequence: TTG
caggatcacttgagcacagg

SEQ ID NO: 260418 - DNA, 20 bp, Artificial Sequence
  Description of Artificial Sequence: Synthetic oligonucleotide
  Target: LAMA2; (-) strand; PAM type: YTN; PAM sequence: TTT
gcaggatcacttgagcacag

SEQ ID NO: 260419 - DNA, 20 bp, Artificial Sequence
  Description of Artificial Sequence: Synthetic oligonucleotide
  Target: LAMA2; (-) strand; PAM type: YTN; PAM sequence: TTT
tgcaggatcacttgagcaca

SEQ ID NO: 260420 - DNA, 20 bp, Artificial Sequence
  Description of Artificial Sequence: Synthetic oligonucleotide
  Target: LAMA2; (-) strand; PAM type: YTN; PAM sequence: CTG
taatcccagaattttgcagg

SEQ ID NO: 260421 - DNA, 20 bp, Artificial Sequence
  Description of Artificial Sequence: Synthetic oligonucleotide
  Target: LAMA2; (-) strand; PAM type: YTN; PAM sequence: CTA
ggcatggtggtatacacctg

SEQ ID NO: 260422 - DNA, 20 bp, Artificial Sequence
  Description of Artificial Sequence: Synthetic oligonucleotide
  Target: LAMA2; (-) strand; PAM type: YTN; PAM sequence: TTA
agctaggcatggtggtatac

SEQ ID NO: 260423 - DNA, 20 bp, Artificial Sequence
  Description of Artificial Sequence: Synthetic oligonucleotide
  Target: LAMA2; (-) strand; PAM type: YTN; PAM sequence: CTC
acacacacacacattaagct

SEQ ID NO: 260424 - DNA, 20 bp, Artificial Sequence
  Description of Artificial Sequence: Synthetic oligonucleotide
  Target: LAMA2; (-) strand; PAM type: YTN; PAM sequence: CTC
tcacacacacacacattaag

SEQ ID NO: 260425 - DNA, 20 bp, Artificial Sequence
  Description of Artificial Sequence: Synthetic oligonucleotide
  Target: LAMA2; (-) strand; PAM type: YTN; PAM sequence: CTC
tctcacacacacacacatta

SEQ ID NO: 260426 - DNA, 20 bp, Artificial Sequence
  Description of Artificial Sequence: Synthetic oligonucleotide
  Target: LAMA2; (-) strand; PAM type: YTN; PAM sequence: CTC
tctctcacacacacacacat

SEQ ID NO: 260427 - DNA, 20 bp, Artificial Sequence
  Description of Artificial Sequence: Synthetic oligonucleotide
  Target: LAMA2; (-) strand; PAM type: YTN; PAM sequence: CTG
tctctctctcacacacacac

SEQ ID NO: 260428 - DNA, 20 bp, Artificial Sequence
  Description of Artificial Sequence: Synthetic oligonucleotide
  Target: LAMA2; (-) strand; PAM type: YTN; PAM sequence: CTC
tgtctctctctcacacacac

SEQ ID NO: 260429 - DNA, 20 bp, Artificial Sequence
  Description of Artificial Sequence: Synthetic oligonucleotide
  Target: LAMA2; (-) strand; PAM type: YTN; PAM sequence: CTC
tctgtctctctctcacacac

SEQ ID NO: 260430 - DNA, 20 bp, Artificial Sequence
  Description of Artificial Sequence: Synthetic oligonucleotide
  Target: LAMA2; (-) strand; PAM type: YTN; PAM sequence: CTC
tctctgtctctctctcacac

SEQ ID NO: 260431 - DNA, 20 bp, Artificial Sequence
  Description of Artificial Sequence: Synthetic oligonucleotide
  Target: LAMA2; (-) strand; PAM type: YTN; PAM sequence: CTC
tctctctgtctctctctcac

SEQ ID NO: 260432 - DNA, 20 bp, Artificial Sequence
  Description of Artificial Sequence: Synthetic oligonucleotide
  Target: LAMA2; (-) strand; PAM type: YTN; PAM sequence: CTC
tctctctctgtctctctctc

SEQ ID NO: 260433 - DNA, 20 bp, Artificial Sequence
  Description of Artificial Sequence: Synthetic oligonucleotide
  Target: LAMA2; (-) strand; PAM type: YTN; PAM sequence: TTA
cacacacacacactctctct

SEQ ID NO: 260434 - DNA, 20 bp, Artificial Sequence
  Description of Artificial Sequence: Synthetic oligonucleotide
  Target: LAMA2; (-) strand; PAM type: YTN; PAM sequence: TTT
acacacacacacactctctc

SEQ ID NO: 260435 - DNA, 20 bp, Artificial Sequence
  Description of Artificial Sequence: Synthetic oligonucleotide
  Target: LAMA2; (-) strand; PAM type: YTN; PAM sequence: TTA
tttacacacacacacactct

SEQ ID NO: 260436 - DNA, 20 bp, Artificial Sequence
  Description of Artificial Sequence: Synthetic oligonucleotide
  Target: LAMA2; (-) strand; PAM type: YTN; PAM sequence: CTG
aatatatgttatttacacac

SEQ ID NO: 260437 - DNA, 20 bp, Artificial Sequence
  Description of Artificial Sequence: Synthetic oligonucleotide
  Target: LAMA2; (-) strand; PAM type: YTN; PAM sequence: TTG
aaaaataaagatctgaatat

SEQ ID NO: 260438 - DNA, 20 bp, Artificial Sequence
  Description of Artificial Sequence: Synthetic oligonucleotide
  Target: LAMA2; (-) strand; PAM type: YTN; PAM sequence: TTC
gttgaaaaataaagatctga

SEQ ID NO: 260439 - DNA, 20 bp, Artificial Sequence
  Description of Artificial Sequence: Synthetic oligonucleotide
  Target: LAMA2; (-) strand; PAM type: YTN; PAM sequence: TTA
agattcgttgaaaaataaag

SEQ ID NO: 260440 - DNA, 20 bp, Artificial Sequence
  Description of Artificial Sequence: Synthetic oligonucleotide
  Target: LAMA2; (-) strand; PAM type: YTN; PAM sequence: TTA
ttaagattcgttgaaaaata

SEQ ID NO: 260441 - DNA, 20 bp, Artificial Sequence
  Description of Artificial Sequence: Synthetic oligonucleotide
  Target: LAMA2; (-) strand; PAM type: YTN; PAM sequence: TTA
aaaggccaaattattaagat

SEQ ID NO: 260442 - DNA, 20 bp, Artificial Sequence
  Description of Artificial Sequence: Synthetic oligonucleotide
  Target: LAMA2; (-) strand; PAM type: YTN; PAM sequence: CTC
aaattaaaaggccaaattat

SEQ ID NO: 260443 - DNA, 20 bp, Artificial Sequence
  Description of Artificial Sequence: Synthetic oligonucleotide
  Target: LAMA2; (-) strand; PAM type: YTN; PAM sequence: CTC
ctcaaattaaaaggccaaat

SEQ ID NO: 260444 - DNA, 20 bp, Artificial Sequence
  Description of Artificial Sequence: Synthetic oligonucleotide
  Target: LAMA2; (-) strand; PAM type: YTN; PAM sequence: TTA
actcctcaaattaaaaggcc

SEQ ID NO: 260445 - DNA, 20 bp, Artificial Sequence
  Description of Artificial Sequence: Synthetic oligonucleotide
  Target: LAMA2; (-) strand; PAM type: YTN; PAM sequence: TTT
aactcctcaaattaaaaggc

SEQ ID NO: 260446 - DNA, 20 bp, Artificial Sequence
  Description of Artificial Sequence: Synthetic oligonucleotide
  Target: LAMA2; (-) strand; PAM type: YTN; PAM sequence: TTA
agtggaaatgatttaactcc

SEQ ID NO: 260447 - DNA, 20 bp, Artificial Sequence
  Description of Artificial Sequence: Synthetic oligonucleotide
  Target: LAMA2; (-) strand; PAM type: YTN; PAM sequence: TTA
cattaagtggaaatgattta

SEQ ID NO: 260448 - DNA, 20 bp, Artificial Sequence
  Description of Artificial Sequence: Synthetic oligonucleotide
  Target: LAMA2; (-) strand; PAM type: YTN; PAM sequence: TTT
acattaagtggaaatgattt

SEQ ID NO: 260449 - DNA, 20 bp, Artificial Sequence
  Description of Artificial Sequence: Synthetic oligonucleotide
  Target: LAMA2; (-) strand; PAM type: YTN; PAM sequence: TTA
atccaatcataccaatattt

SEQ ID NO: 260450 - DNA, 20 bp, Artificial Sequence
  Description of Artificial Sequence: Synthetic oligonucleotide
  Target: LAMA2; (-) strand; PAM type: YTN; PAM sequence: CTT
aatccaatcataccaatatt

SEQ ID NO: 260451 - DNA, 20 bp, Artificial Sequence
  Description of Artificial Sequence: Synthetic oligonucleotide
  Target: LAMA2; (-) strand; PAM type: YTN; PAM sequence: TTA
atgcaaaagaaggcaggaca

SEQ ID NO: 260452 - DNA, 20 bp, Artificial Sequence
  Description of Artificial Sequence: Synthetic oligonucleotide
  Target: LAMA2; (-) strand; PAM type: YTN; PAM sequence: TTA
tacaaattaatgcaaaagaa

SEQ ID NO: 260453 - DNA, 20 bp, Artificial Sequence
  Description of Artificial Sequence: Synthetic oligonucleotide
  Target: LAMA2; (-) strand; PAM type: YTN; PAM sequence: TTA
ataatccaaaagtcaagaga

SEQ ID NO: 260454 - DNA, 20 bp, Artificial Sequence
  Description of Artificial Sequence: Synthetic oligonucleotide
  Target: LAMA2; (-) strand; PAM type: YTN; PAM sequence: TTT
aataatccaaaagtcaagag

SEQ ID NO: 260455 - DNA, 20 bp, Artificial Sequence
  Description of Artificial Sequence: Synthetic oligonucleotide
  Target: LAMA2; (-) strand; PAM type: YTN; PAM sequence: CTA
gacaaaaccaaagaaataaa

SEQ ID NO: 260456 - DNA, 20 bp, Artificial Sequence
  Description of Artificial Sequence: Synthetic oligonucleotide
  Target: LAMA2; (-) strand; PAM type: YTN; PAM sequence: TTC
ctagacaaaaccaaagaaat

SEQ ID NO: 260457 - DNA, 20 bp, Artificial Sequence
  Description of Artificial Sequence: Synthetic oligonucleotide
  Target: LAMA2; (-) strand; PAM type: YTN; PAM sequence: TTA
aagatgtatattcctagaca

SEQ ID NO: 260458 - DNA, 20 bp, Artificial Sequence
  Description of Artificial Sequence: Synthetic oligonucleotide
  Target: LAMA2; (-) strand; PAM type: YTN; PAM sequence: CTG
gaaagttaaagatgtatatt

SEQ ID NO: 260459 - DNA, 20 bp, Artificial Sequence
  Description of Artificial Sequence: Synthetic oligonucleotide
  Target: LAMA2; (-) strand; PAM type: YTN; PAM sequence: TTC
tggaaagttaaagatgtata

SEQ ID NO: 260460 - DNA, 20 bp, Artificial Sequence
  Description of Artificial Sequence: Synthetic oligonucleotide
  Target: LAMA2; (-) strand; PAM type: YTN; PAM sequence: TTA
atgtacattctggaaagtta

SEQ ID NO: 260461 - DNA, 20 bp, Artificial Sequence
  Description of Artificial Sequence: Synthetic oligonucleotide
  Target: LAMA2; (-) strand; PAM type: YTN; PAM sequence: TTT
aatgtacattctggaaagtt

SEQ ID NO: 260462 - DNA, 20 bp, Artificial Sequence
  Description of Artificial Sequence: Synthetic oligonucleotide
  Target: LAMA2; (-) strand; PAM type: YTN; PAM sequence: TTT
taatgtacattctggaaagt

SEQ ID NO: 260463 - DNA, 20 bp, Artificial Sequence
  Description of Artificial Sequence: Synthetic oligonucleotide
  Target: LAMA2; (-) strand; PAM type: YTN; PAM sequence: TTA
ttttaatgtacattctggaa

SEQ ID NO: 260464 - DNA, 20 bp, Artificial Sequence
  Description of Artificial Sequence: Synthetic oligonucleotide
  Target: LAMA2; (-) strand; PAM type: YTN; PAM sequence: CTA
aatgtaaagtggtataatat

SEQ ID NO: 260465 - DNA, 20 bp, Artificial Sequence
  Description of Artificial Sequence: Synthetic oligonucleotide
  Target: LAMA2; (-) strand; PAM type: YTN; PAM sequence: TTA
cgctaaatgtaaagtggtat

SEQ ID NO: 260466 - DNA, 20 bp, Artificial Sequence
  Description of Artificial Sequence: Synthetic oligonucleotide
  Target: LAMA2; (-) strand; PAM type: YTN; PAM sequence: CTT
acgctaaatgtaaagtggta

SEQ ID NO: 260467 - DNA, 20 bp, Artificial Sequence
  Description of Artificial Sequence: Synthetic oligonucleotide
  Target: LAMA2; (-) strand; PAM type: YTN; PAM sequence: TTC
ttacgctaaatgtaaagtgg

SEQ ID NO: 260468 - DNA, 20 bp, Artificial Sequence
  Description of Artificial Sequence: Synthetic oligonucleotide
  Target: LAMA2; (-) strand; PAM type: YTN; PAM sequence: TTG
taaggttcttacgctaaatg

SEQ ID NO: 260469 - DNA, 20 bp, Artificial Sequence
  Description of Artificial Sequence: Synthetic oligonucleotide
  Target: LAMA2; (-) strand; PAM type: YTN; PAM sequence: CTG
ttgtaaggttcttacgctaa

SEQ ID NO: 260470 - DNA, 20 bp, Artificial Sequence
  Description of Artificial Sequence: Synthetic oligonucleotide
  Target: LAMA2; (-) strand; PAM type: YTN; PAM sequence: TTC
ctgttgtaaggttcttacgc

SEQ ID NO: 260471 - DNA, 20 bp, Artificial Sequence
  Description of Artificial Sequence: Synthetic oligonucleotide
  Target: LAMA2; (-) strand; PAM type: YTN; PAM sequence: TTT
cctgttgtaaggttcttacg

SEQ ID NO: 260472 - DNA, 20 bp, Artificial Sequence
  Description of Artificial Sequence: Synthetic oligonucleotide
  Target: LAMA2; (-) strand; PAM type: YTN; PAM sequence: CTG
gaggtttcctgttgtaaggt

SEQ ID NO: 260473 - DNA, 20 bp, Artificial Sequence
  Description of Artificial Sequence: Synthetic oligonucleotide
  Target: LAMA2; (-) strand; PAM type: YTN; PAM sequence: TTG
tcagatgtataatatataga

SEQ ID NO: 260474 - DNA, 20 bp, Artificial Sequence
  Description of Artificial Sequence: Synthetic oligonucleotide
  Target: LAMA2; (-) strand; PAM type: YTN; PAM sequence: TTA
tattgtcagatgtataatat

SEQ ID NO: 260475 - DNA, 20 bp, Artificial Sequence
  Description of Artificial Sequence: Synthetic oligonucleotide
  Target: LAMA2; (-) strand; PAM type: YTN; PAM sequence: CTT
atattgtcagatgtataata

SEQ ID NO: 260476 - DNA, 20 bp, Artificial Sequence
  Description of Artificial Sequence: Synthetic oligonucleotide
  Target: LAMA2; (-) strand; PAM type: YTN; PAM sequence: TTG
aaatcaaaatcgtaagctta

SEQ ID NO: 260477 - DNA, 20 bp, Artificial Sequence
  Description of Artificial Sequence: Synthetic oligonucleotide
  Target: LAMA2; (-) strand; PAM type: YTN; PAM sequence: CTA
ttgaaatcaaaatcgtaagc

SEQ ID NO: 260478 - DNA, 20 bp, Artificial Sequence
  Description of Artificial Sequence: Synthetic oligonucleotide
  Target: LAMA2; (-) strand; PAM type: YTN; PAM sequence: TTG
actattgaaatcaaaatcgt

SEQ ID NO: 260479 - DNA, 20 bp, Artificial Sequence
  Description of Artificial Sequence: Synthetic oligonucleotide
  Target: LAMA2; (-) strand; PAM type: YTN; PAM sequence: TTA
aaaagataattgactattga

SEQ ID NO: 260480 - DNA, 20 bp, Artificial Sequence
  Description of Artificial Sequence: Synthetic oligonucleotide
  Target: LAMA2; (-) strand; PAM type: YTN; PAM sequence: TTT
aaaaagataattgactattg

SEQ ID NO: 260481 - DNA, 20 bp, Artificial Sequence
  Description of Artificial Sequence: Synthetic oligonucleotide
  Target: LAMA2; (-) strand; PAM type: YTN; PAM sequence: TTG
tttaaaaagataattgacta

SEQ ID NO: 260482 - DNA, 20 bp, Artificial Sequence
  Description of Artificial Sequence: Synthetic oligonucleotide
  Target: LAMA2; (-) strand; PAM type: YTN; PAM sequence: CTT
gtttaaaaagataattgact

SEQ ID NO: 260483 - DNA, 20 bp, Artificial Sequence
  Description of Artificial Sequence: Synthetic oligonucleotide
  Target: LAMA2; (-) strand; PAM type: YTN; PAM sequence: TTC
ttgtttaaaaagataattga

SEQ ID NO: 260484 - DNA, 20 bp, Artificial Sequence
  Description of Artificial Sequence: Synthetic oligonucleotide
  Target: LAMA2; (-) strand; PAM type: YTN; PAM sequence: TTT
cttgtttaaaaagataattg

SEQ ID NO: 260485 - DNA, 20 bp, Artificial Sequence
  Description of Artificial Sequence: Synthetic oligonucleotide
  Target: LAMA2; (-) strand; PAM type: YTN; PAM sequence: TTT
tcttgtttaaaaagataatt

SEQ ID NO: 260486 - DNA, 20 bp, Artificial Sequence
  Description of Artificial Sequence: Synthetic oligonucleotide
  Target: LAMA2; (-) strand; PAM type: YTN; PAM sequence: TTA
taggagaaattttcttgttt

SEQ ID NO: 260487 - DNA, 20 bp, Artificial Sequence
  Description of Artificial Sequence: Synthetic oligonucleotide
  Target: LAMA2; (-) strand; PAM type: YTN; PAM sequence: TTG
atatacacaaggaaaaagag

SEQ ID NO: 260488 - DNA, 20 bp, Artificial Sequence
  Description of Artificial Sequence: Synthetic oligonucleotide
  Target: LAMA2; (-) strand; PAM type: YTN; PAM sequence: TTA
aaattgatatacacaaggaa

SEQ ID NO: 260489 - DNA, 20 bp, Artificial Sequence
  Description of Artificial Sequence: Synthetic oligonucleotide
  Target: LAMA2; (-) strand; PAM type: YTN; PAM sequence: TTA
aagcattaaaattgatatac

SEQ ID NO: 260490 - DNA, 20 bp, Artificial Sequence
  Description of Artificial Sequence: Synthetic oligonucleotide
  Target: LAMA2; (-) strand; PAM type: YTN; PAM sequence: TTT
aaagcattaaaattgatata

SEQ ID NO: 260491 - DNA, 20 bp, Artificial Sequence
  Description of Artificial Sequence: Synthetic oligonucleotide
  Target: LAMA2; (-) strand; PAM type: YTN; PAM sequence: TTA
atgtacacaaaggaatttaa

SEQ ID NO: 260492 - DNA, 20 bp, Artificial Sequence
  Description of Artificial Sequence: Synthetic oligonucleotide
  Target: LAMA2; (-) strand; PAM type: YTN; PAM sequence: TTT
aatgtacacaaaggaattta

SEQ ID NO: 260493 - DNA, 20 bp, Artificial Sequence
  Description of Artificial Sequence: Synthetic oligonucleotide
  Target: LAMA2; (-) strand; PAM type: YTN; PAM sequence: TTT
taatgtacacaaaggaattt

SEQ ID NO: 260494 - DNA, 20 bp, Artificial Sequence
  Description of Artificial Sequence: Synthetic oligonucleotide
  Target: LAMA2; (-) strand; PAM type: YTN; PAM sequence: TTA
atggaagaagaaaaatgata

SEQ ID NO: 260495 - DNA, 20 bp, Artificial Sequence
  Description of Artificial Sequence: Synthetic oligonucleotide
  Target: LAMA2; (-) strand; PAM type: YTN; PAM sequence: TTA
ggaagtagttaatggaagaa

SEQ ID NO: 260496 - DNA, 20 bp, Artificial Sequence
  Description of Artificial Sequence: Synthetic oligonucleotide
  Target: LAMA2; (-) strand; PAM type: YTN; PAM sequence: CTG
aaacaacaggaataaaatga

SEQ ID NO: 260497 - DNA, 20 bp, Artificial Sequence
  Description of Artificial Sequence: Synthetic oligonucleotide
  Target: LAMA2; (-) strand; PAM type: YTN; PAM sequence: TTG
tcagcagacctgaaacaaca

SEQ ID NO: 260498 - DNA, 20 bp, Artificial Sequence
  Description of Artificial Sequence: Synthetic oligonucleotide
  Target: LAMA2; (-) strand; PAM type: YTN; PAM sequence: TTA
ttgtcagcagacctgaaaca

SEQ ID NO: 260499 - DNA, 20 bp, Artificial Sequence
  Description of Artificial Sequence: Synthetic oligonucleotide
  Target: LAMA2; (-) strand; PAM type: YTN; PAM sequence: CTG
gaacaaaaaaaaaaaaaaaa

SEQ ID NO: 260500 - DNA, 20 bp, Artificial Sequence
  Description of Artificial Sequence: Synthetic oligonucleotide
  Target: LAMA2; (-) strand; PAM type: YTN; PAM sequence: TTC
tggaacaaaaaaaaaaaaaa

SEQ ID NO: 260501 - DNA, 20 bp, Artificial Sequence
  Description of Artificial Sequence: Synthetic oligonucleotide
  Target: LAMA2; (-) strand; PAM type: YTN; PAM sequence: TTT
ctggaacaaaaaaaaaaaaa

SEQ ID NO: 260502 - DNA, 20 bp, Artificial Sequence
  Description of Artificial Sequence: Synthetic oligonucleotide
  Target: LAMA2; (-) strand; PAM type: YTN; PAM sequence: CTT
tctggaacaaaaaaaaaaaa

SEQ ID NO: 260503 - DNA, 20 bp, Artificial Sequence
  Description of Artificial Sequence: Synthetic oligonucleotide
  Target: LAMA2; (-) strand; PAM type: YTN; PAM sequence: TTC
ggaaaaaaaaaaaacacctt

SEQ ID NO: 260504 - DNA, 20 bp, Artificial Sequence
  Description of Artificial Sequence: Synthetic oligonucleotide
  Target: LAMA2; (-) strand; PAM type: YTN; PAM sequence: CTT
cggaaaaaaaaaaaacacct

SEQ ID NO: 260505 - DNA, 20 bp, Artificial Sequence
  Description of Artificial Sequence: Synthetic oligonucleotide
  Target: LAMA2; (-) strand; PAM type: YTN; PAM sequence: CTG
caaaaacatcttcggaaaaa

SEQ ID NO: 260506 - DNA, 20 bp, Artificial Sequence
  Description of Artificial Sequence: Synthetic oligonucleotide
  Target: LAMA2; (-) strand; PAM type: YTN; PAM sequence: CTC
tgcaaaaacatcttcggaaa

SEQ ID NO: 260507 - DNA, 20 bp, Artificial Sequence
  Description of Artificial Sequence: Synthetic oligonucleotide
  Target: LAMA2; (-) strand; PAM type: YTN; PAM sequence: TTA
catactctgcaaaaacatct

SEQ ID NO: 260508 - DNA, 20 bp, Artificial Sequence
  Description of Artificial Sequence: Synthetic oligonucleotide
  Target: LAMA2; (-) strand; PAM type: YTN; PAM sequence: TTA
ggattacatactctgcaaaa

SEQ ID NO: 260509 - DNA, 20 bp, Artificial Sequence
  Description of Artificial Sequence: Synthetic oligonucleotide
  Target: LAMA2; (-) strand; PAM type: YTN; PAM sequence: TTT
aggattacatactctgcaaa

SEQ ID NO: 260510 - DNA, 20 bp, Artificial Sequence
  Description of Artificial Sequence: Synthetic oligonucleotide
  Target: LAMA2; (-) strand; PAM type: YTN; PAM sequence: CTG
caaaccagtatttaggatta

SEQ ID NO: 260511 - DNA, 20 bp, Artificial Sequence
  Description of Artificial Sequence: Synthetic oligonucleotide
  Target: LAMA2; (-) strand; PAM type: YTN; PAM sequence: TTG
ctgcaaaccagtatttagga

SEQ ID NO: 260512 - DNA, 20 bp, Artificial Sequence
  Description of Artificial Sequence: Synthetic oligonucleotide
  Target: LAMA2; (-) strand; PAM type: YTN; PAM sequence: TTA
aattgctgcaaaccagtatt

SEQ ID NO: 260513 - DNA, 20 bp, Artificial Sequence
  Description of Artificial Sequence: Synthetic oligonucleotide
  Target: LAMA2; (-) strand; PAM type: YTN; PAM sequence: TTA
aacacacaaaaagaaaacaa

SEQ ID NO: 260514 - DNA, 20 bp, Artificial Sequence
  Description of Artificial Sequence: Synthetic oligonucleotide
  Target: LAMA2; (-) strand; PAM type: YTN; PAM sequence: TTA
ttaaacacacaaaaagaaaa

SEQ ID NO: 260515 - DNA, 20 bp, Artificial Sequence
  Description of Artificial Sequence: Synthetic oligonucleotide
  Target: LAMA2; (-) strand; PAM type: YTN; PAM sequence: CTA
atcccatgaaaaaataatta

SEQ ID NO: 260516 - DNA, 20 bp, Artificial Sequence
  Description of Artificial Sequence: Synthetic oligonucleotide
  Target: LAMA2; (-) strand; PAM type: YTN; PAM sequence: CTA
actaatcccatgaaaaaata

SEQ ID NO: 260517 - DNA, 20 bp, Artificial Sequence
  Description of Artificial Sequence: Synthetic oligonucleotide
  Target: LAMA2; (-) strand; PAM type: YTN; PAM sequence: CTA
cagggccaacagatctaact

SEQ ID NO: 260518 - DNA, 20 bp, Artificial Sequence
  Description of Artificial Sequence: Synthetic oligonucleotide
  Target: LAMA2; (-) strand; PAM type: YTN; PAM sequence: CTA
taatcctacagggccaacag

SEQ ID NO: 260519 - DNA, 20 bp, Artificial Sequence
  Description of Artificial Sequence: Synthetic oligonucleotide
  Target: LAMA2; (-) strand; PAM type: YTN; PAM sequence: TTG
atgaaaactataatcctaca

SEQ ID NO: 260520 - DNA, 20 bp, Artificial Sequence
  Description of Artificial Sequence: Synthetic oligonucleotide
  Target: LAMA2; (-) strand; PAM type: YTN; PAM sequence: TTT
gatgaaaactataatcctac

SEQ ID NO: 260521 - DNA, 20 bp, Artificial Sequence
  Description of Artificial Sequence: Synthetic oligonucleotide
  Target: LAMA2; (-) strand; PAM type: YTN; PAM sequence: TTC
caaatttgatgaaaactata

SEQ ID NO: 260522 - DNA, 20 bp, Artificial Sequence
  Description of Artificial Sequence: Synthetic oligonucleotide
  Target: LAMA2; (-) strand; PAM type: YTN; PAM sequence: TTT
ccaaatttgatgaaaactat

SEQ ID NO: 260523 - DNA, 20 bp, Artificial Sequence
  Description of Artificial Sequence: Synthetic oligonucleotide
  Target: LAMA2; (-) strand; PAM type: YTN; PAM sequence: TTC
atttccaaatttgatgaaaa

SEQ ID NO: 260524 - DNA, 20 bp, Artificial Sequence
  Description of Artificial Sequence: Synthetic oligonucleotide
  Target: LAMA2; (-) strand; PAM type: YTN; PAM sequence: TTT
catttccaaatttgatgaaa

SEQ ID NO: 260525 - DNA, 20 bp, Artificial Sequence
  Description of Artificial Sequence: Synthetic oligonucleotide
  Target: LAMA2; (-) strand; PAM type: YTN; PAM sequence: CTT
tcatttccaaatttgatgaa

SEQ ID NO: 260526 - DNA, 20 bp, Artificial Sequence
  Description of Artificial Sequence: Synthetic oligonucleotide
  Target: LAMA2; (-) strand; PAM type: YTN; PAM sequence: CTG
acaactttcatttccaaatt

SEQ ID NO: 260527 - DNA, 20 bp, Artificial Sequence
  Description of Artificial Sequence: Synthetic oligonucleotide
  Target: LAMA2; (-) strand; PAM type: YTN; PAM sequence: TTA
aagatataatggctgacaac

SEQ ID NO: 260528 - DNA, 20 bp, Artificial Sequence
  Description of Artificial Sequence: Synthetic oligonucleotide
  Target: LAMA2; (-) strand; PAM type: YTN; PAM sequence: TTT
aaagatataatggctgacaa

SEQ ID NO: 260529 - DNA, 20 bp, Artificial Sequence
  Description of Artificial Sequence: Synthetic oligonucleotide
  Target: LAMA2; (-) strand; PAM type: YTN; PAM sequence: TTC
cagaaagagacaataagaat

SEQ ID NO: 260530 - DNA, 20 bp, Artificial Sequence
  Description of Artificial Sequence: Synthetic oligonucleotide
  Target: LAMA2; (-) strand; PAM type: YTN; PAM sequence: TTT
ccagaaagagacaataagaa

SEQ ID NO: 260531 - DNA, 20 bp, Artificial Sequence
  Description of Artificial Sequence: Synthetic oligonucleotide
  Target: LAMA2; (-) strand; PAM type: YTN; PAM sequence: TTG
gcccaacatacaaaaaatga

SEQ ID NO: 260532 - DNA, 20 bp, Artificial Sequence
  Description of Artificial Sequence: Synthetic oligonucleotide
  Target: LAMA2; (-) strand; PAM type: YTN; PAM sequence: CTC
agtgagatgggggaaaatat

SEQ ID NO: 260533 - DNA, 20 bp, Artificial Sequence
  Description of Artificial Sequence: Synthetic oligonucleotide
  Target: LAMA2; (-) strand; PAM type: YTN; PAM sequence: TTA
aaaaaataagaacctcagtg

SEQ ID NO: 260534 - DNA, 20 bp, Artificial Sequence
  Description of Artificial Sequence: Synthetic oligonucleotide
  Target: LAMA2; (-) strand; PAM type: YTN; PAM sequence: CTA
tcagaaataaaaaatacaga

SEQ ID NO: 260535 - DNA, 20 bp, Artificial Sequence
  Description of Artificial Sequence: Synthetic oligonucleotide
  Target: LAMA2; (-) strand; PAM type: YTN; PAM sequence: TTA
acaatagaaactatcagaaa

SEQ ID NO: 260536 - DNA, 20 bp, Artificial Sequence
  Description of Artificial Sequence: Synthetic oligonucleotide
  Target: LAMA2; (-) strand; PAM type: YTN; PAM sequence: CTT
aacaatagaaactatcagaa

SEQ ID NO: 260537 - DNA, 20 bp, Artificial Sequence
  Description of Artificial Sequence: Synthetic oligonucleotide
  Target: LAMA2; (-) strand; PAM type: YTN; PAM sequence: TTG
gacacttaacaatagaaact

SEQ ID NO: 260538 - DNA, 20 bp, Artificial Sequence
  Description of Artificial Sequence: Synthetic oligonucleotide
  Target: LAMA2; (-) strand; PAM type: YTN; PAM sequence: TTT
ggacacttaacaatagaaac

SEQ ID NO: 260539 - DNA, 20 bp, Artificial Sequence
  Description of Artificial Sequence: Synthetic oligonucleotide
  Target: LAMA2; (-) strand; PAM type: YTN; PAM sequence: CTT
tggacacttaacaatagaaa

SEQ ID NO: 260540 - DNA, 20 bp, Artificial Sequence
  Description of Artificial Sequence: Synthetic oligonucleotide
  Target: LAMA2; (-) strand; PAM type: YTN; PAM sequence: TTA
aaaaatcagtgactttggac

SEQ ID NO: 260541 - DNA, 20 bp, Artificial Sequence
  Description of Artificial Sequence: Synthetic oligonucleotide
  Target: LAMA2; (-) strand; PAM type: YTN; PAM sequence: CTG
cattaaaaaatcagtgactt

SEQ ID NO: 260542 - DNA, 20 bp, Artificial Sequence
  Description of Artificial Sequence: Synthetic oligonucleotide
  Target: LAMA2; (-) strand; PAM type: YTN; PAM sequence: TTA
ggctgcattaaaaaatcagt

SEQ ID NO: 260543 - DNA, 20 bp, Artificial Sequence
  Description of Artificial Sequence: Synthetic oligonucleotide
  Target: LAMA2; (-) strand; PAM type: YTN; PAM sequence: TTA
aaaacaggttaggctgcatt

SEQ ID NO: 260544 - DNA, 20 bp, Artificial Sequence
  Description of Artificial Sequence: Synthetic oligonucleotide
  Target: LAMA2; (-) strand; PAM type: YTN; PAM sequence: TTG
gattaaaaacaggttaggct

SEQ ID NO: 260545 - DNA, 20 bp, Artificial Sequence
  Description of Artificial Sequence: Synthetic oligonucleotide
  Target: LAMA2; (-) strand; PAM type: YTN; PAM sequence: CTC
aattggattaaaaacaggtt

SEQ ID NO: 260546 - DNA, 20 bp, Artificial Sequence
  Description of Artificial Sequence: Synthetic oligonucleotide
  Target: LAMA2; (-) strand; PAM type: YTN; PAM sequence: TTA
aaataaaaaatagactcaat

SEQ ID NO: 260547 - DNA, 20 bp, Artificial Sequence
  Description of Artificial Sequence: Synthetic oligonucleotide
  Target: LAMA2; (-) strand; PAM type: YTN; PAM sequence: TTT
aaaataaaaaatagactcaa

SEQ ID NO: 260548 - DNA, 20 bp, Artificial Sequence
  Description of Artificial Sequence: Synthetic oligonucleotide
  Target: LAMA2; (-) strand; PAM type: YTN; PAM sequence: TTA
aaagataaaaaaatacaatg

SEQ ID NO: 260549 - DNA, 20 bp, Artificial Sequence
  Description of Artificial Sequence: Synthetic oligonucleotide
  Target: LAMA2; (-) strand; PAM type: YTN; PAM sequence: TTT
aaaagataaaaaaatacaat

SEQ ID NO: 260550 - DNA, 20 bp, Artificial Sequence
  Description of Artificial Sequence: Synthetic oligonucleotide
  Target: LAMA2; (-) strand; PAM type: YTN; PAM sequence: TTC
aagaataaatgaaaaaatgt

SEQ ID NO: 260551 - DNA, 20 bp, Artificial Sequence
  Description of Artificial Sequence: Synthetic oligonucleotide
  Target: LAMA2; (-) strand; PAM type: YTN; PAM sequence: TTT
caagaataaatgaaaaaatg

SEQ ID NO: 260552 - DNA, 20 bp, Artificial Sequence
  Description of Artificial Sequence: Synthetic oligonucleotide
  Target: LAMA2; (-) strand; PAM type: YTN; PAM sequence: TTT
tcaagaataaatgaaaaaat

SEQ ID NO: 260553 - DNA, 20 bp, Artificial Sequence
  Description of Artificial Sequence: Synthetic oligonucleotide
  Target: LAMA2; (-) strand; PAM type: YTN; PAM sequence: TTA
tattttcaagaataaatgaa

SEQ ID NO: 260554 - DNA, 20 bp, Artificial Sequence
  Description of Artificial Sequence: Synthetic oligonucleotide
  Target: LAMA2; (-) strand; PAM type: YTN; PAM sequence: TTA
taaacattatattttcaaga

SEQ ID NO: 260555 - DNA, 20 bp, Artificial Sequence
  Description of Artificial Sequence: Synthetic oligonucleotide
  Target: LAMA2; (-) strand; PAM type: YTN; PAM sequence: TTT
ataaacattatattttcaag

SEQ ID NO: 260556 - DNA, 20 bp, Artificial Sequence
  Description of Artificial Sequence: Synthetic oligonucleotide
  Target: LAMA2; (-) strand; PAM type: YTN; PAM sequence: CTA
atgtttataaacattatatt

SEQ ID NO: 260557 - DNA, 20 bp, Artificial Sequence
  Description of Artificial Sequence: Synthetic oligonucleotide
  Target: LAMA2; (-) strand; PAM type: YTN; PAM sequence: TTA
aaaatgctaatgtttataaa

SEQ ID NO: 260558 - DNA, 20 bp, Artificial Sequence
  Description of Artificial Sequence: Synthetic oligonucleotide
  Target: LAMA2; (-) strand; PAM type: YTN; PAM sequence: TTT
aaaaatgctaatgtttataa

SEQ ID NO: 260559 - DNA, 20 bp, Artificial Sequence
  Description of Artificial Sequence: Synthetic oligonucleotide
  Target: LAMA2; (-) strand; PAM type: YTN; PAM sequence: TTT
taaaaatgctaatgtttata

SEQ ID NO: 260560 - DNA, 20 bp, Artificial Sequence
  Description of Artificial Sequence: Synthetic oligonucleotide
  Target: LAMA2; (-) strand; PAM type: YTN; PAM sequence: TTG
cagatgaccattttaaaaat

SEQ ID NO: 260561 - DNA, 20 bp, Artificial Sequence
  Description of Artificial Sequence: Synthetic oligonucleotide
  Target: LAMA2; (-) strand; PAM type: YTN; PAM sequence: TTT
gcagatgaccattttaaaaa

SEQ ID NO: 260562 - DNA, 20 bp, Artificial Sequence
  Description of Artificial Sequence: Synthetic oligonucleotide
  Target: LAMA2; (-) strand; PAM type: YTN; PAM sequence: CTG
caataaaaaagatggaattt

SEQ ID NO: 260563 - DNA, 20 bp, Artificial Sequence
  Description of Artificial Sequence: Synthetic oligonucleotide
  Target: LAMA2; (-) strand; PAM type: YTN; PAM sequence: CTC
agaaacaggagaaaagtcag

SEQ ID NO: 260564 - DNA, 20 bp, Artificial Sequence
  Description of Artificial Sequence: Synthetic oligonucleotide
  Target: LAMA2; (-) strand; PAM type: YTN; PAM sequence: TTA
tcaggcatgtaaagaatcaa

SEQ ID NO: 260565 - DNA, 20 bp, Artificial Sequence
  Description of Artificial Sequence: Synthetic oligonucleotide
  Target: LAMA2; (-) strand; PAM type: YTN; PAM sequence: CTG
gcatccaaataaaaattatc

SEQ ID NO: 260566 - DNA, 20 bp, Artificial Sequence
  Description of Artificial Sequence: Synthetic oligonucleotide
  Target: LAMA2; (-) strand; PAM type: YTN; PAM sequence: TTA
aagaaatacaataaaatcca

SEQ ID NO: 260567 - DNA, 20 bp, Artificial Sequence
  Description of Artificial Sequence: Synthetic oligonucleotide
  Target: LAMA2; (-) strand; PAM type: YTN; PAM sequence: TTT
aaagaaatacaataaaatcc

SEQ ID NO: 260568 - DNA, 20 bp, Artificial Sequence
  Description of Artificial Sequence: Synthetic oligonucleotide
  Target: LAMA2; (-) strand; PAM type: YTN; PAM sequence: CTT
taaagaaatacaataaaatc

SEQ ID NO: 260569 - DNA, 20 bp, Artificial Sequence
  Description of Artificial Sequence: Synthetic oligonucleotide
  Target: LAMA2; (-) strand; PAM type: YTN; PAM sequence: TTC
tttaaagaaatacaataaaa

SEQ ID NO: 260570 - DNA, 20 bp, Artificial Sequence
  Description of Artificial Sequence: Synthetic oligonucleotide
  Target: LAMA2; (-) strand; PAM type: YTN; PAM sequence: TTC
aacattctttaaagaaatac

SEQ ID NO: 260571 - DNA, 20 bp, Artificial Sequence
  Description of Artificial Sequence: Synthetic oligonucleotide
  Target: LAMA2; (-) strand; PAM type: YTN; PAM sequence: TTG
ccagcataaagttcaacatt

SEQ ID NO: 260572 - DNA, 20 bp, Artificial Sequence
  Description of Artificial Sequence: Synthetic oligonucleotide
  Target: LAMA2; (-) strand; PAM type: YTN; PAM sequence: TTT
gccagcataaagttcaacat

SEQ ID NO: 260573 - DNA, 20 bp, Artificial Sequence
  Description of Artificial Sequence: Synthetic oligonucleotide
  Target: LAMA2; (-) strand; PAM type: YTN; PAM sequence: CTG
tttgccagcataaagttcaa

SEQ ID NO: 260574 - DNA, 20 bp, Artificial Sequence
  Description of Artificial Sequence: Synthetic oligonucleotide
  Target: LAMA2; (-) strand; PAM type: YTN; PAM sequence: CTA
aactgtttgccagcataaag

SEQ ID NO: 260575 - DNA, 20 bp, Artificial Sequence
  Description of Artificial Sequence: Synthetic oligonucleotide
  Target: LAMA2; (-) strand; PAM type: YTN; PAM sequence: CTA
cctaaactgtttgccagcat

SEQ ID NO: 260576 - DNA, 20 bp, Artificial Sequence
  Description of Artificial Sequence: Synthetic oligonucleotide
  Target: LAMA2; (-) strand; PAM type: YTN; PAM sequence: TTC
aaaagaatccaagtgacccg

SEQ ID NO: 260577 - DNA, 20 bp, Artificial Sequence
  Description of Artificial Sequence: Synthetic oligonucleotide
  Target: LAMA2; (-) strand; PAM type: YTN; PAM sequence: CTT
caaaagaatccaagtgaccc

SEQ ID NO: 260578 - DNA, 20 bp, Artificial Sequence
  Description of Artificial Sequence: Synthetic oligonucleotide
  Target: LAMA2; (-) strand; PAM type: YTN; PAM sequence: CTC
aaaagcaagcttcaaaagaa

SEQ ID NO: 260579 - DNA, 20 bp, Artificial Sequence
  Description of Artificial Sequence: Synthetic oligonucleotide
  Target: LAMA2; (-) strand; PAM type: YTN; PAM sequence: CTA
acaaaactcaaaagcaagct

SEQ ID NO: 260580 - DNA, 20 bp, Artificial Sequence
  Description of Artificial Sequence: Synthetic oligonucleotide
  Target: LAMA2; (-) strand; PAM type: YTN; PAM sequence: TTC
cctaacaaaactcaaaagca

SEQ ID NO: 260581 - DNA, 20 bp, Artificial Sequence
  Description of Artificial Sequence: Synthetic oligonucleotide
  Target: LAMA2; (-) strand; PAM type: YTN; PAM sequence: CTT
ccctaacaaaactcaaaagc

SEQ ID NO: 260582 - DNA, 20 bp, Artificial Sequence
  Description of Artificial Sequence: Synthetic oligonucleotide
  Target: LAMA2; (-) strand; PAM type: YTN; PAM sequence: CTG
caccttccctaacaaaactc

SEQ ID NO: 260583 - DNA, 20 bp, Artificial Sequence
  Description of Artificial Sequence: Synthetic oligonucleotide
  Target: LAMA2; (-) strand; PAM type: YTN; PAM sequence: CTG
ctgcaccttccctaacaaaa

SEQ ID NO: 260584 - DNA, 20 bp, Artificial Sequence
  Description of Artificial Sequence: Synthetic oligonucleotide
  Target: LAMA2; (-) strand; PAM type: YTN; PAM sequence: TTC
tgctgcaccttccctaacaa

SEQ ID NO: 260585 - DNA, 20 bp, Artificial Sequence
  Description of Artificial Sequence: Synthetic oligonucleotide
  Target: LAMA2; (-) strand; PAM type: YTN; PAM sequence: CTG
ttctgctgcaccttccctaa

SEQ ID NO: 260586 - DNA, 20 bp, Artificial Sequence
  Description of Artificial Sequence: Synthetic oligonucleotide
  Target: LAMA2; (-) strand; PAM type: YTN; PAM sequence: TTC
agactgttctgctgcacctt

SEQ ID NO: 260587 - DNA, 20 bp, Artificial Sequence
  Description of Artificial Sequence: Synthetic oligonucleotide
  Target: LAMA2; (-) strand; PAM type: YTN; PAM sequence: TTT
cagactgttctgctgcacct

SEQ ID NO: 260588 - DNA, 20 bp, Artificial Sequence
  Description of Artificial Sequence: Synthetic oligonucleotide
  Target: LAMA2; (-) strand; PAM type: YTN; PAM sequence: CTT
tcagactgttctgctgcacc

SEQ ID NO: 260589 - DNA, 20 bp, Artificial Sequence
  Description of Artificial Sequence: Synthetic oligonucleotide
  Target: LAMA2; (-) strand; PAM type: YTN; PAM sequence: TTA
gtagaagggctttcagactg

SEQ ID NO: 260590 - DNA, 20 bp, Artificial Sequence
  Description of Artificial Sequence: Synthetic oligonucleotide
  Target: LAMA2; (-) strand; PAM type: YTN; PAM sequence: CTT
agtagaagggctttcagact

SEQ ID NO: 260591 - DNA, 20 bp, Artificial Sequence
  Description of Artificial Sequence: Synthetic oligonucleotide
  Target: LAMA2; (-) strand; PAM type: YTN; PAM sequence: TTC
acagcttagtagaagggctt

SEQ ID NO: 260592 - DNA, 20 bp, Artificial Sequence
  Description of Artificial Sequence: Synthetic oligonucleotide
  Target: LAMA2; (-) strand; PAM type: YTN; PAM sequence: TTT
cacagcttagtagaagggct

SEQ ID NO: 260593 - DNA, 20 bp, Artificial Sequence
  Description of Artificial Sequence: Synthetic oligonucleotide
  Target: LAMA2; (-) strand; PAM type: YTN; PAM sequence: CTC
agaagtttcacagcttagta

SEQ ID NO: 260594 - DNA, 20 bp, Artificial Sequence
  Description of Artificial Sequence: Synthetic oligonucleotide
  Target: LAMA2; (-) strand; PAM type: YTN; PAM sequence: TTC
tcagaagtttcacagcttag

SEQ ID NO: 260595 - DNA, 20 bp, Artificial Sequence
  Description of Artificial Sequence: Synthetic oligonucleotide
  Target: LAMA2; (-) strand; PAM type: YTN; PAM sequence: CTA
ggtagtattctcagaagttt

SEQ ID NO: 260596 - DNA, 20 bp, Artificial Sequence
  Description of Artificial Sequence: Synthetic oligonucleotide
  Target: LAMA2; (-) strand; PAM type: YTN; PAM sequence: TTC
aacagccagagtaaagagac

SEQ ID NO: 260597 - DNA, 20 bp, Artificial Sequence
  Description of Artificial Sequence: Synthetic oligonucleotide
  Target: LAMA2; (-) strand; PAM type: YTN; PAM sequence: TTT
caacagccagagtaaagaga

SEQ ID NO: 260598 - DNA, 20 bp, Artificial Sequence
  Description of Artificial Sequence: Synthetic oligonucleotide
  Target: LAMA2; (-) strand; PAM type: YTN; PAM sequence: TTT
tcaacagccagagtaaagag

SEQ ID NO: 260599 - DNA, 20 bp, Artificial Sequence
  Description of Artificial Sequence: Synthetic oligonucleotide
  Target: LAMA2; (-) strand; PAM type: YTN; PAM sequence: TTG
gaataagccatattttcaac

SEQ ID NO: 260600 - DNA, 20 bp, Artificial Sequence
  Description of Artificial Sequence: Synthetic oligonucleotide
  Target: LAMA2; (-) strand; PAM type: YTN; PAM sequence: CTT
ggaataagccatattttcaa

SEQ ID NO: 260601 - DNA, 20 bp, Artificial Sequence
  Description of Artificial Sequence: Synthetic oligonucleotide
  Target: LAMA2; (-) strand; PAM type: YTN; PAM sequence: TTA
cagcccagagaaagcttgga

SEQ ID NO: 260602 - DNA, 20 bp, Artificial Sequence
  Description of Artificial Sequence: Synthetic oligonucleotide
  Target: LAMA2; (-) strand; PAM type: YTN; PAM sequence: CTT
acagcccagagaaagcttgg

SEQ ID NO: 260603 - DNA, 20 bp, Artificial Sequence
  Description of Artificial Sequence: Synthetic oligonucleotide
  Target: LAMA2; (-) strand; PAM type: YTN; PAM sequence: TTC
ttacagcccagagaaagctt

SEQ ID NO: 260604 - DNA, 20 bp, Artificial Sequence
  Description of Artificial Sequence: Synthetic oligonucleotide
  Target: LAMA2; (-) strand; PAM type: YTN; PAM sequence: CTG
caaaaattcttacagcccag

SEQ ID NO: 260605 - DNA, 20 bp, Artificial Sequence
  Description of Artificial Sequence: Synthetic oligonucleotide
  Target: LAMA2; (-) strand; PAM type: YTN; PAM sequence: CTA
ggctgcaaaaattcttacag

SEQ ID NO: 260606 - DNA, 20 bp, Artificial Sequence
  Description of Artificial Sequence: Synthetic oligonucleotide
  Target: LAMA2; (-) strand; PAM type: YTN; PAM sequence: TTG
gaaaaccctaggctgcaaaa

SEQ ID NO: 260607 - DNA, 20 bp, Artificial Sequence
  Description of Artificial Sequence: Synthetic oligonucleotide
  Target: LAMA2; (-) strand; PAM type: YTN; PAM sequence: CTG
ataggtgcatgcatgggatg

SEQ ID NO: 260608 - DNA, 20 bp, Artificial Sequence
  Description of Artificial Sequence: Synthetic oligonucleotide
  Target: LAMA2; (-) strand; PAM type: YTN; PAM sequence: CTG
aatgctgataggtgcatgca

SEQ ID NO: 260609 - DNA, 20 bp, Artificial Sequence
  Description of Artificial Sequence: Synthetic oligonucleotide
  Target: LAMA2; (-) strand; PAM type: YTN; PAM sequence: TTG
actgaatgctgataggtgca

SEQ ID NO: 260610 - DNA, 20 bp, Artificial Sequence
  Description of Artificial Sequence: Synthetic oligonucleotide
  Target: LAMA2; (-) strand; PAM type: YTN; PAM sequence: TTG
agtcattgactgaatgctga

SEQ ID NO: 260611 - DNA, 20 bp, Artificial Sequence
  Description of Artificial Sequence: Synthetic oligonucleotide
  Target: LAMA2; (-) strand; PAM type: YTN; PAM sequence: CTT
gagtcattgactgaatgctg

SEQ ID NO: 260612 - DNA, 20 bp, Artificial Sequence
  Description of Artificial Sequence: Synthetic oligonucleotide
  Target: LAMA2; (-) strand; PAM type: YTN; PAM sequence: CTC
ttgagtcattgactgaatgc

SEQ ID NO: 260613 - DNA, 20 bp, Artificial Sequence
  Description of Artificial Sequence: Synthetic oligonucleotide
  Target: LAMA2; (-) strand; PAM type: YTN; PAM sequence: TTC
tcttgagtcattgactgaat

SEQ ID NO: 260614 - DNA, 20 bp, Artificial Sequence
  Description of Artificial Sequence: Synthetic oligonucleotide
  Target: LAMA2; (-) strand; PAM type: YTN; PAM sequence: TTC
cagagatgtgcagaagcgtt

SEQ ID NO: 260615 - DNA, 20 bp, Artificial Sequence
  Description of Artificial Sequence: Synthetic oligonucleotide
  Target: LAMA2; (-) strand; PAM type: YTN; PAM sequence: TTA
gatagaaaggtaattccaga

SEQ ID NO: 260616 - DNA, 20 bp, Artificial Sequence
  Description of Artificial Sequence: Synthetic oligonucleotide
  Target: LAMA2; (-) strand; PAM type: YTN; PAM sequence: TTC
aaaaagaaagaagttagata

SEQ ID NO: 260617 - DNA, 20 bp, Artificial Sequence
  Description of Artificial Sequence: Synthetic oligonucleotide
  Target: LAMA2; (-) strand; PAM type: YTN; PAM sequence: TTA
tgatggcaaatagaatacgt

SEQ ID NO: 260618 - DNA, 20 bp, Artificial Sequence
  Description of Artificial Sequence: Synthetic oligonucleotide
  Target: LAMA2; (-) strand; PAM type: YTN; PAM sequence: CTT
atgatggcaaatagaatacg

SEQ ID NO: 260619 - DNA, 20 bp, Artificial Sequence
  Description of Artificial Sequence: Synthetic oligonucleotide
  Target: LAMA2; (-) strand; PAM type: YTN; PAM sequence: CTG
aaacttatgatggcaaatag

SEQ ID NO: 260620 - DNA, 20 bp, Artificial Sequence
  Description of Artificial Sequence: Synthetic oligonucleotide
  Target: LAMA2; (-) strand; PAM type: YTN; PAM sequence: CTG
ctgaaacttatgatggcaaa

SEQ ID NO: 260621 - DNA, 20 bp, Artificial Sequence
  Description of Artificial Sequence: Synthetic oligonucleotide
  Target: LAMA2; (-) strand; PAM type: YTN; PAM sequence: TTG
aggaagccgaggctgctgaa

SEQ ID NO: 260622 - DNA, 20 bp, Artificial Sequence
  Description of Artificial Sequence: Synthetic oligonucleotide
  Target: LAMA2; (-) strand; PAM type: YTN; PAM sequence: TTT
gaggaagccgaggctgctga

SEQ ID NO: 260623 - DNA, 20 bp, Artificial Sequence
  Description of Artificial Sequence: Synthetic oligonucleotide
  Target: LAMA2; (-) strand; PAM type: YTN; PAM sequence: TTG
agagacaaagagtggagttt

SEQ ID NO: 260624 - DNA, 20 bp, Artificial Sequence
  Description of Artificial Sequence: Synthetic oligonucleotide
  Target: LAMA2; (-) strand; PAM type: YTN; PAM sequence: CTG
agttgagagacaaagagtgg

SEQ ID NO: 260625 - DNA, 20 bp, Artificial Sequence
  Description of Artificial Sequence: Synthetic oligonucleotide
  Target: LAMA2; (-) strand; PAM type: YTN; PAM sequence: TTA
tagctgagttgagagacaaa

SEQ ID NO: 260626 - DNA, 20 bp, Artificial Sequence
  Description of Artificial Sequence: Synthetic oligonucleotide
  Target: LAMA2; (-) strand; PAM type: YTN; PAM sequence: CTG
caacacagagagggtaaacc

SEQ ID NO: 260627 - DNA, 20 bp, Artificial Sequence
  Description of Artificial Sequence: Synthetic oligonucleotide
  Target: LAMA2; (-) strand; PAM type: YTN; PAM sequence: CTA
ggctgcaacacagagagggt

SEQ ID NO: 260628 - DNA, 20 bp, Artificial Sequence
  Description of Artificial Sequence: Synthetic oligonucleotide
  Target: LAMA2; (-) strand; PAM type: YTN; PAM sequence: TTC
taggctgcaacacagagagg

SEQ ID NO: 260629 - DNA, 20 bp, Artificial Sequence
  Description of Artificial Sequence: Synthetic oligonucleotide
  Target: LAMA2; (-) strand; PAM type: YTN; PAM sequence: TTT
ctaggctgcaacacagagag

SEQ ID NO: 260630 - DNA, 20 bp, Artificial Sequence
  Description of Artificial Sequence: Synthetic oligonucleotide
  Target: LAMA2; (-) strand; PAM type: YTN; PAM sequence: CTG
agagaaggaaaaaaacatga

SEQ ID NO: 260631 - DNA, 20 bp, Artificial Sequence
  Description of Artificial Sequence: Synthetic oligonucleotide
  Target: LAMA2; (-) strand; PAM type: YTN; PAM sequence: TTC
tgagagaaggaaaaaaacat

SEQ ID NO: 260632 - DNA, 20 bp, Artificial Sequence
  Description of Artificial Sequence: Synthetic oligonucleotide
  Target: LAMA2; (-) strand; PAM type: YTN; PAM sequence: TTT
ctgagagaaggaaaaaaaca

SEQ ID NO: 260633 - DNA, 20 bp, Artificial Sequence
  Description of Artificial Sequence: Synthetic oligonucleotide
  Target: LAMA2; (-) strand; PAM type: YTN; PAM sequence: CTG
tgatttctgagagaaggaaa

SEQ ID NO: 260634 - DNA, 20 bp, Artificial Sequence
  Description of Artificial Sequence: Synthetic oligonucleotide
  Target: LAMA2; (-) strand; PAM type: YTN; PAM sequence: TTA
taggaagcacaggactgtga

SEQ ID NO: 260635 - DNA, 20 bp, Artificial Sequence
  Description of Artificial Sequence: Synthetic oligonucleotide
  Target: LAMA2; (-) strand; PAM type: YTN; PAM sequence: TTG
aattataggaagcacaggac

SEQ ID NO: 260636 - DNA, 20 bp, Artificial Sequence
  Description of Artificial Sequence: Synthetic oligonucleotide
  Target: LAMA2; (-) strand; PAM type: YTN; PAM sequence: TTA
gatattgaattataggaagc

SEQ ID NO: 260637 - DNA, 20 bp, Artificial Sequence
  Description of Artificial Sequence: Synthetic oligonucleotide
  Target: LAMA2; (-) strand; PAM type: YTN; PAM sequence: TTT
agatattgaattataggaag

SEQ ID NO: 260638 - DNA, 20 bp, Artificial Sequence
  Description of Artificial Sequence: Synthetic oligonucleotide
  Target: LAMA2; (-) strand; PAM type: YTN; PAM sequence: TTT
tagatattgaattataggaa

SEQ ID NO: 260639 - DNA, 20 bp, Artificial Sequence
  Description of Artificial Sequence: Synthetic oligonucleotide
  Target: LAMA2; (-) strand; PAM type: YTN; PAM sequence: TTT
ttagatattgaattatagga

SEQ ID NO: 260640 - DNA, 20 bp, Artificial Sequence
  Description of Artificial Sequence: Synthetic oligonucleotide
  Target: LAMA2; (-) strand; PAM type: YTN; PAM sequence: TTG
tttttagatattgaattata

SEQ ID NO: 260641 - DNA, 20 bp, Artificial Sequence
  Description of Artificial Sequence: Synthetic oligonucleotide
  Target: LAMA2; (-) strand; PAM type: YTN; PAM sequence: CTA
aaataaaaatacaaaccaag

SEQ ID NO: 260642 - DNA, 20 bp, Artificial Sequence
  Description of Artificial Sequence: Synthetic oligonucleotide
  Target: LAMA2; (-) strand; PAM type: YTN; PAM sequence: TTA
aagtacacaaccaactaaaa

SEQ ID NO: 260643 - DNA, 20 bp, Artificial Sequence
  Description of Artificial Sequence: Synthetic oligonucleotide
  Target: LAMA2; (-) strand; PAM type: YTN; PAM sequence: CTG
ttaaagtacacaaccaacta

SEQ ID NO: 260644 - DNA, 20 bp, Artificial Sequence
  Description of Artificial Sequence: Synthetic oligonucleotide
  Target: LAMA2; (-) strand; PAM type: YTN; PAM sequence: TTA
agctgttaaagtacacaacc

SEQ ID NO: 260645 - DNA, 20 bp, Artificial Sequence
  Description of Artificial Sequence: Synthetic oligonucleotide
  Target: LAMA2; (-) strand; PAM type: YTN; PAM sequence: TTG
ttaagctgttaaagtacaca

SEQ ID NO: 260646 - DNA, 20 bp, Artificial Sequence
  Description of Artificial Sequence: Synthetic oligonucleotide
  Target: LAMA2; (-) strand; PAM type: YTN; PAM sequence: TTT
gttaagctgttaaagtacac

SEQ ID NO: 260647 - DNA, 20 bp, Artificial Sequence
  Description of Artificial Sequence: Synthetic oligonucleotide
  Target: LAMA2; (-) strand; PAM type: YTN; PAM sequence: CTT
tgttaagctgttaaagtaca

SEQ ID NO: 260648 - DNA, 20 bp, Artificial Sequence
  Description of Artificial Sequence: Synthetic oligonucleotide
  Target: LAMA2; (-) strand; PAM type: YTN; PAM sequence: TTC
tttgttaagctgttaaagta

SEQ ID NO: 260649 - DNA, 20 bp, Artificial Sequence
  Description of Artificial Sequence: Synthetic oligonucleotide
  Target: LAMA2; (-) strand; PAM type: YTN; PAM sequence: CTT
ctttgttaagctgttaaagt

SEQ ID NO: 260650 - DNA, 20 bp, Artificial Sequence
  Description of Artificial Sequence: Synthetic oligonucleotide
  Target: LAMA2; (-) strand; PAM type: YTN; PAM sequence: TTC
ttctttgttaagctgttaaa

SEQ ID NO: 260651 - DNA, 20 bp, Artificial Sequence
  Description of Artificial Sequence: Synthetic oligonucleotide
  Target: LAMA2; (-) strand; PAM type: YTN; PAM sequence: TTA
ttcttctttgttaagctgtt

SEQ ID NO: 260652 - DNA, 20 bp, Artificial Sequence
  Description of Artificial Sequence: Synthetic oligonucleotide
  Target: LAMA2; (-) strand; PAM type: YTN; PAM sequence: TTT
attcttctttgttaagctgt

SEQ ID NO: 260653 - DNA, 20 bp, Artificial Sequence
  Description of Artificial Sequence: Synthetic oligonucleotide
  Target: LAMA2; (-) strand; PAM type: YTN; PAM sequence: TTA
cagtatttattcttctttgt

SEQ ID NO: 260654 - DNA, 20 bp, Artificial Sequence
  Description of Artificial Sequence: Synthetic oligonucleotide
  Target: LAMA2; (-) strand; PAM type: YTN; PAM sequence: TTT
acagtatttattcttctttg

SEQ ID NO: 260655 - DNA, 20 bp, Artificial Sequence
  Description of Artificial Sequence: Synthetic oligonucleotide
  Target: LAMA2; (-) strand; PAM type: YTN; PAM sequence: TTT
tacagtatttattcttcttt

SEQ ID NO: 260656 - DNA, 20 bp, Artificial Sequence
  Description of Artificial Sequence: Synthetic oligonucleotide
  Target: LAMA2; (-) strand; PAM type: YTN; PAM sequence: TTT
ttacagtatttattcttctt

SEQ ID NO: 260657 - DNA, 20 bp, Artificial Sequence
  Description of Artificial Sequence: Synthetic oligonucleotide
  Target: LAMA2; (-) strand; PAM type: YTN; PAM sequence: TTA
gtttttacagtatttattct

SEQ ID NO: 260658 - DNA, 20 bp, Artificial Sequence
  Description of Artificial Sequence: Synthetic oligonucleotide
  Target: LAMA2; (-) strand; PAM type: YTN; PAM sequence: CTT
agtttttacagtatttattc

SEQ ID NO: 260659 - DNA, 20 bp, Artificial Sequence
  Description of Artificial Sequence: Synthetic oligonucleotide
  Target: LAMA2; (-) strand; PAM type: YTN; PAM sequence: TTC
ttagtttttacagtatttat

SEQ ID NO: 260660 - DNA, 20 bp, Artificial Sequence
  Description of Artificial Sequence: Synthetic oligonucleotide
  Target: LAMA2; (-) strand; PAM type: YTN; PAM sequence: CTT
cttagtttttacagtattta

SEQ ID NO: 260661 - DNA, 20 bp, Artificial Sequence
  Description of Artificial Sequence: Synthetic oligonucleotide
  Target: LAMA2; (-) strand; PAM type: YTN; PAM sequence: CTC
ttcttagtttttacagtatt

SEQ ID NO: 260662 - DNA, 20 bp, Artificial Sequence
  Description of Artificial Sequence: Synthetic oligonucleotide
  Target: LAMA2; (-) strand; PAM type: YTN; PAM sequence: TTG
aacagcctcttcttagtttt

SEQ ID NO: 260663 - DNA, 20 bp, Artificial Sequence
  Description of Artificial Sequence: Synthetic oligonucleotide
  Target: LAMA2; (-) strand; PAM type: YTN; PAM sequence: TTT
gaacagcctcttcttagttt

SEQ ID NO: 260664 - DNA, 20 bp, Artificial Sequence
  Description of Artificial Sequence: Synthetic oligonucleotide
  Target: LAMA2; (-) strand; PAM type: YTN; PAM sequence: TTT
tgaacagcctcttcttagtt

SEQ ID NO: 260665 - DNA, 20 bp, Artificial Sequence
  Description of Artificial Sequence: Synthetic oligonucleotide
  Target: LAMA2; (-) strand; PAM type: YTN; PAM sequence: CTT
ttgaacagcctcttcttagt

SEQ ID NO: 260666 - DNA, 20 bp, Artificial Sequence
  Description of Artificial Sequence: Synthetic oligonucleotide
  Target: LAMA2; (-) strand; PAM type: YTN; PAM sequence: TTC
ttttgaacagcctcttctta

SEQ ID NO: 260667 - DNA, 20 bp, Artificial Sequence
  Description of Artificial Sequence: Synthetic oligonucleotide
  Target: LAMA2; (-) strand; PAM type: YTN; PAM sequence: CTT
cttttgaacagcctcttctt

SEQ ID NO: 260668 - DNA, 20 bp, Artificial Sequence
  Description of Artificial Sequence: Synthetic oligonucleotide
  Target: LAMA2; (-) strand; PAM type: YTN; PAM sequence: TTC
ttcttttgaacagcctcttc

SEQ ID NO: 260669 - DNA, 20 bp, Artificial Sequence
  Description of Artificial Sequence: Synthetic oligonucleotide
  Target: LAMA2; (-) strand; PAM type: YTN; PAM sequence: CTG
aagaatattcttcttttgaa

SEQ ID NO: 260670 - DNA, 20 bp, Artificial Sequence
  Description of Artificial Sequence: Synthetic oligonucleotide
  Target: LAMA2; (-) strand; PAM type: YTN; PAM sequence: TTA
ggcactgaagaatattcttc

SEQ ID NO: 260671 - DNA, 20 bp, Artificial Sequence
  Description of Artificial Sequence: Synthetic oligonucleotide
  Target: LAMA2; (-) strand; PAM type: YTN; PAM sequence: TTG
cattaggcactgaagaatat

SEQ ID NO: 260672 - DNA, 20 bp, Artificial Sequence
  Description of Artificial Sequence: Synthetic oligonucleotide
  Target: LAMA2; (-) strand; PAM type: YTN; PAM sequence: TTG
tgttgcattaggcactgaag

SEQ ID NO: 260673 - DNA, 20 bp, Artificial Sequence
  Description of Artificial Sequence: Synthetic oligonucleotide
  Target: LAMA2; (-) strand; PAM type: YTN; PAM sequence: TTT
gtgttgcattaggcactgaa

SEQ ID NO: 260674 - DNA, 20 bp, Artificial Sequence
  Description of Artificial Sequence: Synthetic oligonucleotide
  Target: LAMA2; (-) strand; PAM type: YTN; PAM sequence: CTT
tgtgttgcattaggcactga

SEQ ID NO: 260675 - DNA, 20 bp, Artificial Sequence
  Description of Artificial Sequence: Synthetic oligonucleotide
  Target: LAMA2; (-) strand; PAM type: YTN; PAM sequence: TTG
acctttgtgttgcattaggc

SEQ ID NO: 260676 - DNA, 20 bp, Artificial Sequence
  Description of Artificial Sequence: Synthetic oligonucleotide
  Target: LAMA2; (-) strand; PAM type: YTN; PAM sequence: CTT
gacctttgtgttgcattagg

SEQ ID NO: 260677 - DNA, 20 bp, Artificial Sequence
  Description of Artificial Sequence: Synthetic oligonucleotide
  Target: LAMA2; (-) strand; PAM type: YTN; PAM sequence: CTA
cttgacctttgtgttgcatt

SEQ ID NO: 260678 - DNA, 20 bp, Artificial Sequence
  Description of Artificial Sequence: Synthetic oligonucleotide
  Target: LAMA2; (-) strand; PAM type: YTN; PAM sequence: CTA
atcctacttgacctttgtgt

SEQ ID NO: 260679 - DNA, 20 bp, Artificial Sequence
  Description of Artificial Sequence: Synthetic oligonucleotide
  Target: LAMA2; (-) strand; PAM type: YTN; PAM sequence: TTC
agcactaatcctacttgacc

SEQ ID NO: 260680 - DNA, 20 bp, Artificial Sequence
  Description of Artificial Sequence: Synthetic oligonucleotide
  Target: LAMA2; (-) strand; PAM type: YTN; PAM sequence: CTT
cagcactaatcctacttgac

SEQ ID NO: 260681 - DNA, 20 bp, Artificial Sequence
  Description of Artificial Sequence: Synthetic oligonucleotide
  Target: LAMA2; (-) strand; PAM type: YTN; PAM sequence: TTA
atgaacaacttcagcactaa

SEQ ID NO: 260682 - DNA, 20 bp, Artificial Sequence
  Description of Artificial Sequence: Synthetic oligonucleotide
  Target: LAMA2; (-) strand; PAM type: YTN; PAM sequence: TTT
aatgaacaacttcagcacta

SEQ ID NO: 260683 - DNA, 20 bp, Artificial Sequence
  Description of Artificial Sequence: Synthetic oligonucleotide
  Target: LAMA2; (-) strand; PAM type: YTN; PAM sequence: TTC
aatttaatgaacaacttcag

SEQ ID NO: 260684 - DNA, 20 bp, Artificial Sequence
  Description of Artificial Sequence: Synthetic oligonucleotide
  Target: LAMA2; (-) strand; PAM type: YTN; PAM sequence: CTT
caatttaatgaacaacttca

SEQ ID NO: 260685 - DNA, 20 bp, Artificial Sequence
  Description of Artificial Sequence: Synthetic oligonucleotide
  Target: LAMA2; (-) strand; PAM type: YTN; PAM sequence: CTC
ttcaatttaatgaacaactt

SEQ ID NO: 260686 - DNA, 20 bp, Artificial Sequence
  Description of Artificial Sequence: Synthetic oligonucleotide
  Target: LAMA2; (-) strand; PAM type: YTN; PAM sequence: TTG
ctcttcaatttaatgaacaa

SEQ ID NO: 260687 - DNA, 20 bp, Artificial Sequence
  Description of Artificial Sequence: Synthetic oligonucleotide
  Target: LAMA2; (-) strand; PAM type: YTN; PAM sequence: TTA
ttgctcttcaatttaatgaa

SEQ ID NO: 260688 - DNA, 20 bp, Artificial Sequence
  Description of Artificial Sequence: Synthetic oligonucleotide
  Target: LAMA2; (-) strand; PAM type: YTN; PAM sequence: TTA
ttattgctcttcaatttaat

SEQ ID NO: 260689 - DNA, 20 bp, Artificial Sequence
  Description of Artificial Sequence: Synthetic oligonucleotide
  Target: LAMA2; (-) strand; PAM type: YTN; PAM sequence: CTT
attattgctcttcaatttaa

SEQ ID NO: 260690 - DNA, 20 bp, Artificial Sequence
  Description of Artificial Sequence: Synthetic oligonucleotide
  Target: LAMA2; (-) strand; PAM type: YTN; PAM sequence: CTA
acataaaaaaatgcccttat

SEQ ID NO: 260691 - DNA, 20 bp, Artificial Sequence
  Description of Artificial Sequence: Synthetic oligonucleotide
  Target: LAMA2; (-) strand; PAM type: YTN; PAM sequence: CTC
ccactaacataaaaaaatgc

SEQ ID NO: 260692 - DNA, 20 bp, Artificial Sequence
  Description of Artificial Sequence: Synthetic oligonucleotide
  Target: LAMA2; (-) strand; PAM type: YTN; PAM sequence: TTG
gaacgactcccactaacata

SEQ ID NO: 260693 - DNA, 20 bp, Artificial Sequence
  Description of Artificial Sequence: Synthetic oligonucleotide
  Target: LAMA2; (-) strand; PAM type: YTN; PAM sequence: TTC
acaacccagtggaatcaatt

SEQ ID NO: 260694 - DNA, 20 bp, Artificial Sequence
  Description of Artificial Sequence: Synthetic oligonucleotide
  Target: LAMA2; (-) strand; PAM type: YTN; PAM sequence: TTT
cacaacccagtggaatcaat

SEQ ID NO: 260695 - DNA, 20 bp, Artificial Sequence
  Description of Artificial Sequence: Synthetic oligonucleotide
  Target: LAMA2; (-) strand; PAM type: YTN; PAM sequence: TTC
caatatttcacaacccagtg

SEQ ID NO: 260696 - DNA, 20 bp, Artificial Sequence
  Description of Artificial Sequence: Synthetic oligonucleotide
  Target: LAMA2; (-) strand; PAM type: YTN; PAM sequence: TTG
gtcatcacgttccaatattt

SEQ ID NO: 260697 - DNA, 20 bp, Artificial Sequence
  Description of Artificial Sequence: Synthetic oligonucleotide
  Target: LAMA2; (-) strand; PAM type: YTN; PAM sequence: CTT
ggtcatcacgttccaatatt

SEQ ID NO: 260698 - DNA, 20 bp, Artificial Sequence
  Description of Artificial Sequence: Synthetic oligonucleotide
  Target: LAMA2; (-) strand; PAM type: YTN; PAM sequence: CTA
tagggtcaaacaggaccaca

SEQ ID NO: 260699 - DNA, 20 bp, Artificial Sequence
  Description of Artificial Sequence: Synthetic oligonucleotide
  Target: LAMA2; (-) strand; PAM type: YTN; PAM sequence: CTG
ctatagggtcaaacaggacc

SEQ ID NO: 260700 - DNA, 20 bp, Artificial Sequence
  Description of Artificial Sequence: Synthetic oligonucleotide
  Target: LAMA2; (-) strand; PAM type: YTN; PAM sequence: CTA
tagggtactgctatagggtc

SEQ ID NO: 260701 - DNA, 20 bp, Artificial Sequence
  Description of Artificial Sequence: Synthetic oligonucleotide
  Target: LAMA2; (-) strand; PAM type: YTN; PAM sequence: CTC
tatagggtactgctataggg

SEQ ID NO: 260702 - DNA, 20 bp, Artificial Sequence
  Description of Artificial Sequence: Synthetic oligonucleotide
  Target: LAMA2; (-) strand; PAM type: YTN; PAM sequence: TTA
catctctatagggtactgct

SEQ ID NO: 260703 - DNA, 20 bp, Artificial Sequence
  Description of Artificial Sequence: Synthetic oligonucleotide
  Target: LAMA2; (-) strand; PAM type: YTN; PAM sequence: TTT
acatctctatagggtactgc

SEQ ID NO: 260704 - DNA, 20 bp, Artificial Sequence
  Description of Artificial Sequence: Synthetic oligonucleotide
  Target: LAMA2; (-) strand; PAM type: YTN; PAM sequence: CTC
agcaggaaaaaaagtttaca

SEQ ID NO: 260705 - DNA, 20 bp, Artificial Sequence
  Description of Artificial Sequence: Synthetic oligonucleotide
  Target: LAMA2; (-) strand; PAM type: YTN; PAM sequence: CTA
actcagcaggaaaaaaagtt

SEQ ID NO: 260706 - DNA, 20 bp, Artificial Sequence
  Description of Artificial Sequence: Synthetic oligonucleotide
  Target: LAMA2; (-) strand; PAM type: YTN; PAM sequence: CTG
tgctaactcagcaggaaaaa

SEQ ID NO: 260707 - DNA, 20 bp, Artificial Sequence
  Description of Artificial Sequence: Synthetic oligonucleotide
  Target: LAMA2; (-) strand; PAM type: YTN; PAM sequence: TTC
atctgtgctaactcagcagg

SEQ ID NO: 260708 - DNA, 20 bp, Artificial Sequence
  Description of Artificial Sequence: Synthetic oligonucleotide
  Target: LAMA2; (-) strand; PAM type: YTN; PAM sequence: TTT
catctgtgctaactcagcag

SEQ ID NO: 260709 - DNA, 20 bp, Artificial Sequence
  Description of Artificial Sequence: Synthetic oligonucleotide
  Target: LAMA2; (-) strand; PAM type: YTN; PAM sequence: TTA
tttcatctgtgctaactcag

SEQ ID NO: 260710 - DNA, 20 bp, Artificial Sequence
  Description of Artificial Sequence: Synthetic oligonucleotide
  Target: LAMA2; (-) strand; PAM type: YTN; PAM sequence: CTA
ttatttcatctgtgctaact

SEQ ID NO: 260711 - DNA, 20 bp, Artificial Sequence
  Description of Artificial Sequence: Synthetic oligonucleotide
  Target: LAMA2; (-) strand; PAM type: YTN; PAM sequence: TTA
gagtctattatttcatctgt

SEQ ID NO: 260712 - DNA, 20 bp, Artificial Sequence
  Description of Artificial Sequence: Synthetic oligonucleotide
  Target: LAMA2; (-) strand; PAM type: YTN; PAM sequence: TTA
tcatacatgtgaaggtggtt

SEQ ID NO: 260713 - DNA, 20 bp, Artificial Sequence
  Description of Artificial Sequence: Synthetic oligonucleotide
  Target: LAMA2; (-) strand; PAM type: YTN; PAM sequence: TTT
atcatacatgtgaaggtggt

SEQ ID NO: 260714 - DNA, 20 bp, Artificial Sequence
  Description of Artificial Sequence: Synthetic oligonucleotide
  Target: LAMA2; (-) strand; PAM type: YTN; PAM sequence: TTT
tatcatacatgtgaaggtgg

SEQ ID NO: 260715 - DNA, 20 bp, Artificial Sequence
  Description of Artificial Sequence: Synthetic oligonucleotide
  Target: LAMA2; (-) strand; PAM type: YTN; PAM sequence: TTC
aaatgttttatcatacatgt

SEQ ID NO: 260716 - DNA, 20 bp, Artificial Sequence
  Description of Artificial Sequence: Synthetic oligonucleotide
  Target: LAMA2; (-) strand; PAM type: YTN; PAM sequence: CTA
gaccaggttcaaatgtttta

SEQ ID NO: 260717 - DNA, 20 bp, Artificial Sequence
  Description of Artificial Sequence: Synthetic oligonucleotide
  Target: LAMA2; (-) strand; PAM type: YTN; PAM sequence: TTC
tagaccaggttcaaatgttt

SEQ ID NO: 260718 - DNA, 20 bp, Artificial Sequence
  Description of Artificial Sequence: Synthetic oligonucleotide
  Target: LAMA2; (-) strand; PAM type: YTN; PAM sequence: CTA
ggtcagcatattctagacca

SEQ ID NO: 260719 - DNA, 20 bp, Artificial Sequence
  Description of Artificial Sequence: Synthetic oligonucleotide
  Target: LAMA2; (-) strand; PAM type: YTN; PAM sequence: CTC
taggtcagcatattctagac

SEQ ID NO: 260720 - DNA, 20 bp, Artificial Sequence
  Description of Artificial Sequence: Synthetic oligonucleotide
  Target: LAMA2; (-) strand; PAM type: YTN; PAM sequence: TTC
ctctaggtcagcatattcta

SEQ ID NO: 260721 - DNA, 20 bp, Artificial Sequence
  Description of Artificial Sequence: Synthetic oligonucleotide
  Target: LAMA2; (-) strand; PAM type: YTN; PAM sequence: TTT
cctctaggtcagcatattct

SEQ ID NO: 260722 - DNA, 20 bp, Artificial Sequence
  Description of Artificial Sequence: Synthetic oligonucleotide
  Target: LAMA2; (-) strand; PAM type: YTN; PAM sequence: TTT
tcctctaggtcagcatattc

SEQ ID NO: 260723 - DNA, 20 bp, Artificial Sequence
  Description of Artificial Sequence: Synthetic oligonucleotide
  Target: LAMA2; (-) strand; PAM type: YTN; PAM sequence: TTG
ttttcctctaggtcagcata

SEQ ID NO: 260724 - DNA, 20 bp, Artificial Sequence
  Description of Artificial Sequence: Synthetic oligonucleotide
  Target: LAMA2; (-) strand; PAM type: YTN; PAM sequence: CTT
gttttcctctaggtcagcat

SEQ ID NO: 260725 - DNA, 20 bp, Artificial Sequence
  Description of Artificial Sequence: Synthetic oligonucleotide
  Target: LAMA2; (-) strand; PAM type: YTN; PAM sequence: TTG
aagaatcatcaatatgcttg

SEQ ID NO: 260726 - DNA, 20 bp, Artificial Sequence
  Description of Artificial Sequence: Synthetic oligonucleotide
  Target: LAMA2; (-) strand; PAM type: YTN; PAM sequence: CTT
gaagaatcatcaatatgctt

SEQ ID NO: 260727 - DNA, 20 bp, Artificial Sequence
  Description of Artificial Sequence: Synthetic oligonucleotide
  Target: LAMA2; (-) strand; PAM type: YTN; PAM sequence: TTC
cttgaagaatcatcaatatg

SEQ ID NO: 260728 - DNA, 20 bp, Artificial Sequence
  Description of Artificial Sequence: Synthetic oligonucleotide
  Target: LAMA2; (-) strand; PAM type: YTN; PAM sequence: CTT
ccttgaagaatcatcaatat

SEQ ID NO: 260729 - DNA, 20 bp, Artificial Sequence
  Description of Artificial Sequence: Synthetic oligonucleotide
  Target: LAMA2; (-) strand; PAM type: YTN; PAM sequence: CTG
aacttccttgaagaatcatc

SEQ ID NO: 260730 - DNA, 20 bp, Artificial Sequence
  Description of Artificial Sequence: Synthetic oligonucleotide
  Target: LAMA2; (-) strand; PAM type: YTN; PAM sequence: TTG
aagtcagacatctgaacttc

SEQ ID NO: 260731 - DNA, 20 bp, Artificial Sequence
  Description of Artificial Sequence: Synthetic oligonucleotide
  Target: LAMA2; (-) strand; PAM type: YTN; PAM sequence: CTA
attgaagtcagacatctgaa

SEQ ID NO: 260732 - DNA, 20 bp, Artificial Sequence
  Description of Artificial Sequence: Synthetic oligonucleotide
  Target: LAMA2; (-) strand; PAM type: YTN; PAM sequence: CTA
atcacatgtctaattgaagt

SEQ ID NO: 260733 - DNA, 20 bp, Artificial Sequence
  Description of Artificial Sequence: Synthetic oligonucleotide
  Target: LAMA2; (-) strand; PAM type: YTN; PAM sequence: TTC
taatcacatgtctaattgaa

SEQ ID NO: 260734 - DNA, 20 bp, Artificial Sequence
  Description of Artificial Sequence: Synthetic oligonucleotide
  Target: LAMA2; (-) strand; PAM type: YTN; PAM sequence: TTT
ctaatcacatgtctaattga

SEQ ID NO: 260735 - DNA, 20 bp, Artificial Sequence
  Description of Artificial Sequence: Synthetic oligonucleotide
  Target: LAMA2; (-) strand; PAM type: YTN; PAM sequence: TTT
tctaatcacatgtctaattg

SEQ ID NO: 260736 - DNA, 20 bp, Artificial Sequence
  Description of Artificial Sequence: Synthetic oligonucleotide
  Target: LAMA2; (-) strand; PAM type: YTN; PAM sequence: TTT
ttctaatcacatgtctaatt

SEQ ID NO: 260737 - DNA, 20 bp, Artificial Sequence
  Description of Artificial Sequence: Synthetic oligonucleotide
  Target: LAMA2; (-) strand; PAM type: YTN; PAM sequence: TTT
tttctaatcacatgtctaat

SEQ ID NO: 260738 - DNA, 20 bp, Artificial Sequence
  Description of Artificial Sequence: Synthetic oligonucleotide
  Target: LAMA2; (-) strand; PAM type: YTN; PAM sequence: TTA
ttttttctaatcacatgtct

SEQ ID NO: 260739 - DNA, 20 bp, Artificial Sequence
  Description of Artificial Sequence: Synthetic oligonucleotide
  Target: LAMA2; (-) strand; PAM type: YTN; PAM sequence: TTT
attttttctaatcacatgtc

SEQ ID NO: 260740 - DNA, 20 bp, Artificial Sequence
  Description of Artificial Sequence: Synthetic oligonucleotide
  Target: LAMA2; (-) strand; PAM type: YTN; PAM sequence: TTT
tattttttctaatcacatgt

SEQ ID NO: 260741 - DNA, 20 bp, Artificial Sequence
  Description of Artificial Sequence: Synthetic oligonucleotide
  Target: LAMA2; (-) strand; PAM type: YTN; PAM sequence: TTT
ttattttttctaatcacatg

SEQ ID NO: 260742 - DNA, 20 bp, Artificial Sequence
  Description of Artificial Sequence: Synthetic oligonucleotide
  Target: LAMA2; (-) strand; PAM type: YTN; PAM sequence: CTG
tccagtttttattttttcta

SEQ ID NO: 260743 - DNA, 20 bp, Artificial Sequence
  Description of Artificial Sequence: Synthetic oligonucleotide
  Target: LAMA2; (-) strand; PAM type: YTN; PAM sequence: TTG
acaatagaaaaatgaatgtc

SEQ ID NO: 260744 - DNA, 20 bp, Artificial Sequence
  Description of Artificial Sequence: Synthetic oligonucleotide
  Target: LAMA2; (-) strand; PAM type: YTN; PAM sequence: CTA
ttgacaatagaaaaatgaat

SEQ ID NO: 260745 - DNA, 20 bp, Artificial Sequence
  Description of Artificial Sequence: Synthetic oligonucleotide
  Target: LAMA2; (-) strand; PAM type: YTN; PAM sequence: TTA
ataatgctattgacaataga

SEQ ID NO: 260746 - DNA, 20 bp, Artificial Sequence
  Description of Artificial Sequence: Synthetic oligonucleotide
  Target: LAMA2; (-) strand; PAM type: YTN; PAM sequence: CTT
aataatgctattgacaatag

SEQ ID NO: 260747 - DNA, 20 bp, Artificial Sequence
  Description of Artificial Sequence: Synthetic oligonucleotide
  Target: LAMA2; (-) strand; PAM type: YTN; PAM sequence: TTA
aacttaataatgctattgac

SEQ ID NO: 260748 - DNA, 20 bp, Artificial Sequence
  Description of Artificial Sequence: Synthetic oligonucleotide
  Target: LAMA2; (-) strand; PAM type: YTN; PAM sequence: TTT
aaacttaataatgctattga

SEQ ID NO: 260749 - DNA, 20 bp, Artificial Sequence
  Description of Artificial Sequence: Synthetic oligonucleotide
  Target: LAMA2; (-) strand; PAM type: YTN; PAM sequence: TTT
taaacttaataatgctattg

SEQ ID NO: 260750 - DNA, 20 bp, Artificial Sequence
  Description of Artificial Sequence: Synthetic oligonucleotide
  Target: LAMA2; (-) strand; PAM type: YTN; PAM sequence: TTG
cattttaaacttaataatgc

SEQ ID NO: 260751 - DNA, 20 bp, Artificial Sequence
  Description of Artificial Sequence: Synthetic oligonucleotide
  Target: LAMA2; (-) strand; PAM type: YTN; PAM sequence: CTT
gcattttaaacttaataatg

SEQ ID NO: 260752 - DNA, 20 bp, Artificial Sequence
  Description of Artificial Sequence: Synthetic oligonucleotide
  Target: LAMA2; (-) strand; PAM type: YTN; PAM sequence: CTC
ttgcattttaaacttaataa

SEQ ID NO: 260753 - DNA, 20 bp, Artificial Sequence
  Description of Artificial Sequence: Synthetic oligonucleotide
  Target: LAMA2; (-) strand; PAM type: YTN; PAM sequence: CTC
tcttgcattttaaacttaat

SEQ ID NO: 260754 - DNA, 20 bp, Artificial Sequence
  Description of Artificial Sequence: Synthetic oligonucleotide
  Target: LAMA2; (-) strand; PAM type: YTN; PAM sequence: CTA
aaaatgtagctctcttgcat

SEQ ID NO: 260755 - DNA, 20 bp, Artificial Sequence
  Description of Artificial Sequence: Synthetic oligonucleotide
  Target: LAMA2; (-) strand; PAM type: YTN; PAM sequence: TTC
taaaaatgtagctctcttgc

SEQ ID NO: 260756 - DNA, 20 bp, Artificial Sequence
  Description of Artificial Sequence: Synthetic oligonucleotide
  Target: LAMA2; (-) strand; PAM type: YTN; PAM sequence: TTT
ctaaaaatgtagctctcttg

SEQ ID NO: 260757 - DNA, 20 bp, Artificial Sequence
  Description of Artificial Sequence: Synthetic oligonucleotide
  Target: LAMA2; (-) strand; PAM type: YTN; PAM sequence: CTT
tctaaaaatgtagctctctt

SEQ ID NO: 260758 - DNA, 20 bp, Artificial Sequence
  Description of Artificial Sequence: Synthetic oligonucleotide
  Target: LAMA2; (-) strand; PAM type: YTN; PAM sequence: TTC
tttctaaaaatgtagctctc

SEQ ID NO: 260759 - DNA, 20 bp, Artificial Sequence
  Description of Artificial Sequence: Synthetic oligonucleotide
  Target: LAMA2; (-) strand; PAM type: YTN; PAM sequence: TTT
ctttctaaaaatgtagctct

SEQ ID NO: 260760 - DNA, 20 bp, Artificial Sequence
  Description of Artificial Sequence: Synthetic oligonucleotide
  Target: LAMA2; (-) strand; PAM type: YTN; PAM sequence: TTG
atttctttctaaaaatgtag

SEQ ID NO: 260761 - DNA, 20 bp, Artificial Sequence
  Description of Artificial Sequence: Synthetic oligonucleotide
  Target: LAMA2; (-) strand; PAM type: YTN; PAM sequence: TTT
gatttctttctaaaaatgta

SEQ ID NO: 260762 - DNA, 20 bp, Artificial Sequence
  Description of Artificial Sequence: Synthetic oligonucleotide
  Target: LAMA2; (-) strand; PAM type: YTN; PAM sequence: TTT
tgatttctttctaaaaatgt

SEQ ID NO: 260763 - DNA, 20 bp, Artificial Sequence
  Description of Artificial Sequence: Synthetic oligonucleotide
  Target: LAMA2; (-) strand; PAM type: YTN; PAM sequence: TTT
ttgatttctttctaaaaatg

SEQ ID NO: 260764 - DNA, 20 bp, Artificial Sequence
  Description of Artificial Sequence: Synthetic oligonucleotide
  Target: LAMA2; (-) strand; PAM type: YTN; PAM sequence: CTG
aggagtttttgatttctttc

SEQ ID NO: 260765 - DNA, 20 bp, Artificial Sequence
  Description of Artificial Sequence: Synthetic oligonucleotide
  Target: LAMA2; (-) strand; PAM type: YTN; PAM sequence: TTC
tgaggagtttttgatttctt

SEQ ID NO: 260766 - DNA, 20 bp, Artificial Sequence
  Description of Artificial Sequence: Synthetic oligonucleotide
  Target: LAMA2; (-) strand; PAM type: YTN; PAM sequence: TTG
aaattctgaggagtttttga

SEQ ID NO: 260767 - DNA, 20 bp, Artificial Sequence
  Description of Artificial Sequence: Synthetic oligonucleotide
  Target: LAMA2; (-) strand; PAM type: YTN; PAM sequence: TTT
gaaattctgaggagtttttg

SEQ ID NO: 260768 - DNA, 20 bp, Artificial Sequence
  Description of Artificial Sequence: Synthetic oligonucleotide
  Target: LAMA2; (-) strand; PAM type: YTN; PAM sequence: CTT
tgaaattctgaggagttttt

SEQ ID NO: 260769 - DNA, 20 bp, Artificial Sequence
  Description of Artificial Sequence: Synthetic oligonucleotide
  Target: LAMA2; (-) strand; PAM type: YTN; PAM sequence: TTC
ataagaacactttgaaattc

SEQ ID NO: 260770 - DNA, 20 bp, Artificial Sequence
  Description of Artificial Sequence: Synthetic oligonucleotide
  Target: LAMA2; (-) strand; PAM type: YTN; PAM sequence: TTC
atattcataagaacactttg

SEQ ID NO: 260771 - DNA, 20 bp, Artificial Sequence
  Description of Artificial Sequence: Synthetic oligonucleotide
  Target: LAMA2; (-) strand; PAM type: YTN; PAM sequence: TTG
ttcatattcataagaacact

SEQ ID NO: 260772 - DNA, 20 bp, Artificial Sequence
  Description of Artificial Sequence: Synthetic oligonucleotide
  Target: LAMA2; (-) strand; PAM type: YTN; PAM sequence: TTA
tagcattgttcatattcata

SEQ ID NO: 260773 - DNA, 20 bp, Artificial Sequence
  Description of Artificial Sequence: Synthetic oligonucleotide
  Target: LAMA2; (-) strand; PAM type: YTN; PAM sequence: CTT
atagcattgttcatattcat

SEQ ID NO: 260774 - DNA, 20 bp, Artificial Sequence
  Description of Artificial Sequence: Synthetic oligonucleotide
  Target: LAMA2; (-) strand; PAM type: YTN; PAM sequence: CTG
aaaatgcaaaagtcagtcat

SEQ ID NO: 260775 - DNA, 20 bp, Artificial Sequence
  Description of Artificial Sequence: Synthetic oligonucleotide
  Target: LAMA2; (-) strand; PAM type: YTN; PAM sequence: TTG
aagctgaaaatgcaaaagtc

SEQ ID NO: 260776 - DNA, 20 bp, Artificial Sequence
  Description of Artificial Sequence: Synthetic oligonucleotide
  Target: LAMA2; (-) strand; PAM type: YTN; PAM sequence: TTT
gaagctgaaaatgcaaaagt

SEQ ID NO: 260777 - DNA, 20 bp, Artificial Sequence
  Description of Artificial Sequence: Synthetic oligonucleotide
  Target: LAMA2; (-) strand; PAM type: YTN; PAM sequence: TTG
gatttgaagctgaaaatgca

SEQ ID NO: 260778 - DNA, 20 bp, Artificial Sequence
  Description of Artificial Sequence: Synthetic oligonucleotide
  Target: LAMA2; (-) strand; PAM type: YTN; PAM sequence: CTT
ggatttgaagctgaaaatgc

SEQ ID NO: 260779 - DNA, 20 bp, Artificial Sequence
  Description of Artificial Sequence: Synthetic oligonucleotide
  Target: LAMA2; (-) strand; PAM type: YTN; PAM sequence: CTG
agtccaagtgatatggtgga

SEQ ID NO: 260780 - DNA, 20 bp, Artificial Sequence
  Description of Artificial Sequence: Synthetic oligonucleotide
  Target: LAMA2; (-) strand; PAM type: YTN; PAM sequence: CTC
ctgagtccaagtgatatggt

SEQ ID NO: 260781 - DNA, 20 bp, Artificial Sequence
  Description of Artificial Sequence: Synthetic oligonucleotide
  Target: LAMA2; (-) strand; PAM type: YTN; PAM sequence: TTA
ctcctgagtccaagtgatat

SEQ ID NO: 260782 - DNA, 20 bp, Artificial Sequence
  Description of Artificial Sequence: Synthetic oligonucleotide
  Target: LAMA2; (-) strand; PAM type: YTN; PAM sequence: CTT
actcctgagtccaagtgata

SEQ ID NO: 260783 - DNA, 20 bp, Artificial Sequence
  Description of Artificial Sequence: Synthetic oligonucleotide
  Target: LAMA2; (-) strand; PAM type: YTN; PAM sequence: CTA
gggcttactcctgagtccaa

SEQ ID NO: 260784 - DNA, 20 bp, Artificial Sequence
  Description of Artificial Sequence: Synthetic oligonucleotide
  Target: LAMA2; (-) strand; PAM type: YTN; PAM sequence: TTC
cctagggcttactcctgagt

SEQ ID NO: 260785 - DNA, 20 bp, Artificial Sequence
  Description of Artificial Sequence: Synthetic oligonucleotide
  Target: LAMA2; (-) strand; PAM type: YTN; PAM sequence: TTT
ccctagggcttactcctgag

SEQ ID NO: 260786 - DNA, 20 bp, Artificial Sequence
  Description of Artificial Sequence: Synthetic oligonucleotide
  Target: LAMA2; (-) strand; PAM type: YTN; PAM sequence: TTG
taagtttccctagggcttac

SEQ ID NO: 260787 - DNA, 20 bp, Artificial Sequence
  Description of Artificial Sequence: Synthetic oligonucleotide
  Target: LAMA2; (-) strand; PAM type: YTN; PAM sequence: CTT
gtaagtttccctagggctta

SEQ ID NO: 260788 - DNA, 20 bp, Artificial Sequence
  Description of Artificial Sequence: Synthetic oligonucleotide
  Target: LAMA2; (-) strand; PAM type: YTN; PAM sequence: CTC
ttgtaagtttccctagggct

SEQ ID NO: 260789 - DNA, 20 bp, Artificial Sequence
  Description of Artificial Sequence: Synthetic oligonucleotide
  Target: LAMA2; (-) strand; PAM type: YTN; PAM sequence: CTG
tggataaaacggaactcttg

SEQ ID NO: 260790 - DNA, 20 bp, Artificial Sequence
  Description of Artificial Sequence: Synthetic oligonucleotide
  Target: LAMA2; (-) strand; PAM type: YTN; PAM sequence: TTC
tgtggataaaacggaactct

SEQ ID NO: 260791 - DNA, 20 bp, Artificial Sequence
  Description of Artificial Sequence: Synthetic oligonucleotide
  Target: LAMA2; (-) strand; PAM type: YTN; PAM sequence: CTA
tatcatagcattctgtggat

SEQ ID NO: 260792 - DNA, 20 bp, Artificial Sequence
  Description of Artificial Sequence: Synthetic oligonucleotide
  Target: LAMA2; (-) strand; PAM type: YTN; PAM sequence: TTG
gctatatcatagcattctgt

SEQ ID NO: 260793 - DNA, 20 bp, Artificial Sequence
  Description of Artificial Sequence: Synthetic oligonucleotide
  Target: LAMA2; (-) strand; PAM type: YTN; PAM sequence: TTT
ggctatatcatagcattctg

SEQ ID NO: 260794 - DNA, 20 bp, Artificial Sequence
  Description of Artificial Sequence: Synthetic oligonucleotide
  Target: LAMA2; (-) strand; PAM type: YTN; PAM sequence: TTA
gagtttggctatatcatagc

SEQ ID NO: 260795 - DNA, 20 bp, Artificial Sequence
  Description of Artificial Sequence: Synthetic oligonucleotide
  Target: LAMA2; (-) strand; PAM type: YTN; PAM sequence: TTA
attagagtttggctatatca

SEQ ID NO: 260796 - DNA, 20 bp, Artificial Sequence
  Description of Artificial Sequence: Synthetic oligonucleotide
  Target: LAMA2; (-) strand; PAM type: YTN; PAM sequence: TTT
aattagagtttggctatatc

SEQ ID NO: 260797 - DNA, 20 bp, Artificial Sequence
  Description of Artificial Sequence: Synthetic oligonucleotide
  Target: LAMA2; (-) strand; PAM type: YTN; PAM sequence: TTC
aagagtttaattagagtttg

SEQ ID NO: 260798 - DNA, 20 bp, Artificial Sequence
  Description of Artificial Sequence: Synthetic oligonucleotide
  Target: LAMA2; (-) strand; PAM type: YTN; PAM sequence: TTT
caagagtttaattagagttt

SEQ ID NO: 260799 - DNA, 20 bp, Artificial Sequence
  Description of Artificial Sequence: Synthetic oligonucleotide
  Target: LAMA2; (-) strand; PAM type: YTN; PAM sequence: TTC
aatttcaagagtttaattag

SEQ ID NO: 260800 - DNA, 20 bp, Artificial Sequence
  Description of Artificial Sequence: Synthetic oligonucleotide
  Target: LAMA2; (-) strand; PAM type: YTN; PAM sequence: CTT
caatttcaagagtttaatta

SEQ ID NO: 260801 - DNA, 20 bp, Artificial Sequence
  Description of Artificial Sequence: Synthetic oligonucleotide
  Target: LAMA2; (-) strand; PAM type: YTN; PAM sequence: TTG
aacatgaggtatcaacttca

SEQ ID NO: 260802 - DNA, 20 bp, Artificial Sequence
  Description of Artificial Sequence: Synthetic oligonucleotide
  Target: LAMA2; (-) strand; PAM type: YTN; PAM sequence: CTT
gaacatgaggtatcaacttc

SEQ ID NO: 260803 - DNA, 20 bp, Artificial Sequence
  Description of Artificial Sequence: Synthetic oligonucleotide
  Target: LAMA2; (-) strand; PAM type: YTN; PAM sequence: TTA
tatcttgaacatgaggtatc

SEQ ID NO: 260804 - DNA, 20 bp, Artificial Sequence
  Description of Artificial Sequence: Synthetic oligonucleotide
  Target: LAMA2; (-) strand; PAM type: YTN; PAM sequence: TTT
atatcttgaacatgaggtat

SEQ ID NO: 260805 - DNA, 20 bp, Artificial Sequence
  Description of Artificial Sequence: Synthetic oligonucleotide
  Target: LAMA2; (-) strand; PAM type: YTN; PAM sequence: CTG
atttatatcttgaacatgag

SEQ ID NO: 260806 - DNA, 20 bp, Artificial Sequence
  Description of Artificial Sequence: Synthetic oligonucleotide
  Target: LAMA2; (-) strand; PAM type: YTN; PAM sequence: TTA
tcctgatttatatcttgaac

SEQ ID NO: 260807 - DNA, 20 bp, Artificial Sequence
  Description of Artificial Sequence: Synthetic oligonucleotide
  Target: LAMA2; (-) strand; PAM type: YTN; PAM sequence: TTT
atcctgatttatatcttgaa

SEQ ID NO: 260808 - DNA, 20 bp, Artificial Sequence
  Description of Artificial Sequence: Synthetic oligonucleotide
  Target: LAMA2; (-) strand; PAM type: YTN; PAM sequence: TTT
tatcctgatttatatcttga

SEQ ID NO: 260809 - DNA, 20 bp, Artificial Sequence
  Description of Artificial Sequence: Synthetic oligonucleotide
  Target: LAMA2; (-) strand; PAM type: YTN; PAM sequence: TTG
gaatgtattttatcctgatt

SEQ ID NO: 260810 - DNA, 20 bp, Artificial Sequence
  Description of Artificial Sequence: Synthetic oligonucleotide
  Target: LAMA2; (-) strand; PAM type: YTN; PAM sequence: CTT
ggaatgtattttatcctgat

SEQ ID NO: 260811 - DNA, 20 bp, Artificial Sequence
  Description of Artificial Sequence: Synthetic oligonucleotide
  Target: LAMA2; (-) strand; PAM type: YTN; PAM sequence: TTC
atagaaacttggaatgtatt

SEQ ID NO: 260812 - DNA, 20 bp, Artificial Sequence
  Description of Artificial Sequence: Synthetic oligonucleotide
  Target: LAMA2; (-) strand; PAM type: YTN; PAM sequence: TTT
catagaaacttggaatgtat

SEQ ID NO: 260813 - DNA, 20 bp, Artificial Sequence
  Description of Artificial Sequence: Synthetic oligonucleotide
  Target: LAMA2; (-) strand; PAM type: YTN; PAM sequence: TTT
tcatagaaacttggaatgta

SEQ ID NO: 260814 - DNA, 20 bp, Artificial Sequence
  Description of Artificial Sequence: Synthetic oligonucleotide
  Target: LAMA2; (-) strand; PAM type: YTN; PAM sequence: CTA
cgttttcatagaaacttgga

SEQ ID NO: 260815 - DNA, 20 bp, Artificial Sequence
  Description of Artificial Sequence: Synthetic oligonucleotide
  Target: LAMA2; (-) strand; PAM type: YTN; PAM sequence: CTA
aacatataactacgttttca

SEQ ID NO: 260816 - DNA, 20 bp, Artificial Sequence
  Description of Artificial Sequence: Synthetic oligonucleotide
  Target: LAMA2; (-) strand; PAM type: YTN; PAM sequence: CTA
atgatcagtaaaaatgatag

SEQ ID NO: 260817 - DNA, 20 bp, Artificial Sequence
  Description of Artificial Sequence: Synthetic oligonucleotide
  Target: LAMA2; (-) strand; PAM type: YTN; PAM sequence: TTA
tctaatgatcagtaaaaatg

SEQ ID NO: 260818 - DNA, 20 bp, Artificial Sequence
  Description of Artificial Sequence: Synthetic oligonucleotide
  Target: LAMA2; (-) strand; PAM type: YTN; PAM sequence: TTA
gtcaacagagtaattatcta
